United States Patent Application Publication US 2005/0255487 A1 - sequence listing, part 73

SEQ ID NO: 2004674 - RNA, 19 nt, Homo sapiens
  misc_RNA (1)...(19): siRNA sense strand
caucaggucuuaucucacu

SEQ ID NO: 2004675 - RNA, 19 nt, Homo sapiens
  misc_RNA (1)...(19): siRNA sense strand
ggagugagggcaaacaugu

SEQ ID NO: 2004676 - RNA, 19 nt, Homo sapiens
  misc_RNA (1)...(19): siRNA sense strand
ggcuggagauaaccuaauu

SEQ ID NO: 2004677 - RNA, 19 nt, Homo sapiens
  misc_RNA (1)...(19): siRNA sense strand
gaggacauauuccaaugca

SEQ ID NO: 2004678 - RNA, 19 nt, Homo sapiens
  misc_RNA (1)...(19): siRNA sense strand
gagcuacccauaucuccua

SEQ ID NO: 2004679 - RNA, 19 nt, Homo sapiens
  misc_RNA (1)...(19): siRNA sense strand
uaacaggagguuucacuug

SEQ ID NO: 2004680 - RNA, 19 nt, Homo sapiens
  misc_RNA (1)...(19): siRNA sense strand
caaaggagaaggcugacuu

SEQ ID NO: 2004681 - RNA, 19 nt, Homo sapiens
  misc_RNA (1)...(19): siRNA sense strand
gcaggaaggagauuauaca

SEQ ID NO: 2004682 - RNA, 19 nt, Homo sapiens
  misc_RNA (1)...(19): siRNA sense strand
guucuaaugccuucccaua

SEQ ID NO: 2004683 - RNA, 19 nt, Homo sapiens
  misc_RNA (1)...(19): siRNA sense strand
gccacuaacucuacaacug

SEQ ID NO: 2004684 - RNA, 19 nt, Homo sapiens
  misc_RNA (1)...(19): siRNA sense strand
uagaaacaaccuacaacua

SEQ ID NO: 2004685 - RNA, 19 nt, Homo sapiens
  misc_RNA (1)...(19): siRNA sense strand
gaaagaacuuacgguaucg

SEQ ID NO: 2004686 - RNA, 19 nt, Homo sapiens
  misc_RNA (1)...(19): siRNA sense strand
ggucuuaucucacuuuugu

SEQ ID NO: 2004687 - RNA, 19 nt, Homo sapiens
  misc_RNA (1)...(19): siRNA sense strand
agucugaguuugacaguga

SEQ ID NO: 2004688 - RNA, 19 nt, Homo sapiens
  misc_RNA (1)...(19): siRNA sense strand
acauuaagguccagaagau

SEQ ID NO: 2004689 - RNA, 19 nt, Homo sapiens
  misc_RNA (1)...(19): siRNA sense strand
agaauuguguccuaucugu

SEQ ID NO: 2004690 - RNA, 19 nt, Homo sapiens
  misc_RNA (1)...(19): siRNA sense strand
aguuucagguugacuguua

SEQ ID NO: 2004691 - RNA, 19 nt, Homo sapiens
  misc_RNA (1)...(19): siRNA sense strand
gacacaagcaaacucuuaa

SEQ ID NO: 2004692 - RNA, 19 nt, Homo sapiens
  misc_RNA (1)...(19): siRNA sense strand
aaacaaggacacaagcaaa

SEQ ID NO: 2004693 - RNA, 19 nt, Homo sapiens
  misc_RNA (1)...(19): siRNA sense strand
cuaccaaggugaaauaaaa

SEQ ID NO: 2004694 - RNA, 19 nt, Homo sapiens
  misc_RNA (1)...(19): siRNA sense strand
aaacaaccuacaacuauga

SEQ ID NO: 2004695 - RNA, 19 nt, Homo sapiens
  misc_RNA (1)...(19): siRNA sense strand
ccaaauaugguaucaagca

SEQ ID NO: 2004696 - RNA, 19 nt, Homo sapiens
  misc_RNA (1)...(19): siRNA sense strand
ggagagguguuggagaaag

SEQ ID NO: 2004697 - RNA, 19 nt, Homo sapiens
  misc_RNA (1)...(19): siRNA sense strand
gcagucauuucaccuaacu

SEQ ID NO: 2004698 - RNA, 19 nt, Homo sapiens
  misc_RNA (1)...(19): siRNA sense strand
gguucaaggucuacugaug

SEQ ID NO: 2004699 - RNA, 19 nt, Homo sapiens
  misc_RNA (1)...(19): siRNA sense strand
agacuaccaaggugaaaua

SEQ ID NO: 2004700 - RNA, 19 nt, Homo sapiens
  misc_RNA (1)...(19): siRNA sense strand
guucuugugcuucccaaua

SEQ ID NO: 2004701 - RNA, 19 nt, Homo sapiens
  misc_RNA (1)...(19): siRNA sense strand
ggaacugaggcccaaauau

SEQ ID NO: 2004702 - RNA, 19 nt, Homo sapiens
  misc_RNA (1)...(19): siRNA sense strand
ugaguggaguauauucuau

SEQ ID NO: 2004703 - RNA, 19 nt, Homo sapiens
  misc_RNA (1)...(19): siRNA sense strand
gaucucagcaccgugauug

SEQ ID NO: 2004704 - RNA, 19 nt, Homo sapiens
  misc_RNA (1)...(19): siRNA sense strand
ucuaaugccuucccauagu

SEQ ID NO: 2004705 - RNA, 19 nt, Homo sapiens
  misc_RNA (1)...(19): siRNA sense strand
aaagaauuguguccuaucu

SEQ ID NO: 2004706 - RNA, 19 nt, Homo sapiens
  misc_RNA (1)...(19): siRNA sense strand
guucaaggucuacugauga

SEQ ID NO: 2004707 - RNA, 19 nt, Homo sapiens
  misc_RNA (1)...(19): siRNA sense strand
uggcagacauguucuugug

SEQ ID NO: 2004708 - RNA, 19 nt, Homo sapiens
  misc_RNA (1)...(19): siRNA sense strand
aguugacucucccgucuua

SEQ ID NO: 2004709 - RNA, 19 nt, Homo sapiens
  misc_RNA (1)...(19): siRNA sense strand
gaugauacugaaauaguga

SEQ ID NO: 2004710 - RNA, 19 nt, Homo sapiens
  misc_RNA (1)...(19): siRNA sense strand
caaccuacaacuaugaaug

SEQ ID NO: 2004711 - RNA, 19 nt, Homo sapiens
  misc_RNA (1)...(19): siRNA sense strand
ugagagaaguguguugcuu

SEQ ID NO: 2004712 - RNA, 19 nt, Homo sapiens
  misc_RNA (1)...(19): siRNA sense strand
ucacuuggcuuugcaucug

SEQ ID NO: 2004713 - RNA, 19 nt, Homo sapiens
  misc_RNA (1)...(19): siRNA sense strand
ggagguuucacuuggcuuu

SEQ ID NO: 2004714 - RNA, 19 nt, Homo sapiens
  misc_RNA (1)...(19): siRNA sense strand
acaaagcaauagccacugu

SEQ ID NO: 2004715 - RNA, 19 nt, Homo sapiens
  misc_RNA (1)...(19): siRNA sense strand
ccagagggagugccgagua

SEQ ID NO: 2004716 - RNA, 19 nt, Homo sapiens
  misc_RNA (1)...(19): siRNA sense strand
ggagagagggaauccaaag

SEQ ID NO: 2004717 - RNA, 19 nt, Homo sapiens
  misc_RNA (1)...(19): siRNA sense strand
ugacagagcagcggaagga

SEQ ID NO: 2004718 - RNA, 19 nt, Homo sapiens
  misc_RNA (1)...(19): siRNA sense strand
gcacguccacccucacugu

SEQ ID NO: 2004719 - RNA, 19 nt, Homo sapiens
  misc_RNA (1)...(19): siRNA sense strand
gacgccauaccuucauuua

SEQ ID NO: 2004720 - RNA, 19 nt, Homo sapiens
  misc_RNA (1)...(19): siRNA sense strand
cgucggacuuuaugucuuc

SEQ ID NO: 2004721 - RNA, 19 nt, Homo sapiens
  misc_RNA (1)...(19): siRNA sense strand
ggaugaacaggaaagaaug

SEQ ID NO: 2004722 - RNA, 19 nt, Homo sapiens
  misc_RNA (1)...(19): siRNA sense strand
uggauaacauggaugaaca

SEQ ID NO: 2004723 - RNA, 19 nt, Homo sapiens
  misc_RNA (1)...(19): siRNA sense strand
cauuugcucucacuuaugg

SEQ ID NO: 2004724 - RNA, 19 nt, Homo sapiens
  misc_RNA (1)...(19): siRNA sense strand
ggauggagaaccuuauaca

SEQ ID NO: 2004725 - RNA, 19 nt, Homo sapiens
  misc_RNA (1)...(19): siRNA sense strand
gagggaauccaaagguuuc

SEQ ID NO: 2004726 - RNA, 19 nt, Homo sapiens
  misc_RNA (1)...(19): siRNA sense strand
gguauccgagucugaguuu

SEQ ID NO: 2004727 - RNA, 19 nt, Homo sapiens
  misc_RNA (1)...(19): siRNA sense strand
gaacaggagauccgucuaa

SEQ ID NO: 2004728 - RNA, 19 nt, Homo sapiens
  misc_RNA (1)...(19): siRNA sense strand
ggaaggaguuggcagacaa

SEQ ID NO: 2004729 - RNA, 19 nt, Homo sapiens
  misc_RNA (1)...(19): siRNA sense strand
aagacgaucucauggauuu

SEQ ID NO: 2004730 - RNA, 19 nt, Homo sapiens
  misc_RNA (1)...(19): siRNA sense strand
gaaaggcccauucuacuuc

SEQ ID NO: 2004731 - RNA, 19 nt, Homo sapiens
  misc_RNA (1)...(19): siRNA sense strand
ggaaaggcccauucuacuu

SEQ ID NO: 2004732 - RNA, 19 nt, Homo sapiens
  misc_RNA (1)...(19): siRNA sense strand
uagaugagcugagugagaa

SEQ ID NO: 2004733 - RNA, 19 nt, Homo sapiens
  misc_RNA (1)...(19): siRNA sense strand
ggacgacgacuacuacuuc

SEQ ID NO: 2004734 - RNA, 19 nt, Homo sapiens
  misc_RNA (1)...(19): siRNA sense strand
ggaguuggcagacaaguuc

SEQ ID NO: 2004735 - RNA, 19 nt, Homo sapiens
  misc_RNA (1)...(19): siRNA sense strand
gauacuacagucuagauga

SEQ ID NO: 2004736 - RNA, 19 nt, Homo sapiens
  misc_RNA (1)...(19): siRNA sense strand
ucauggauuugaucaagaa

SEQ ID NO: 2004737 - RNA, 19 nt, Homo sapiens
  misc_RNA (1)...(19): siRNA sense strand
gaaaggaauagaagacgau

SEQ ID NO: 2004738 - RNA, 19 nt, Homo sapiens
  misc_RNA (1)...(19): siRNA sense strand
gggcgcagacccacaguuu

SEQ ID NO: 2004739 - RNA, 19 nt, Homo sapiens
  misc_RNA (1)...(19): siRNA sense strand
ggugucaucugccauugga

SEQ ID NO: 2004740 - RNA, 19 nt, Homo sapiens
  misc_RNA (1)...(19): siRNA sense strand
gaggaguucugccggacuu

SEQ ID NO: 2004741 - RNA, 19 nt, Homo sapiens
  misc_RNA (1)...(19): siRNA sense strand
agaagacgaucucauggau

SEQ ID NO: 2004742 - RNA, 19 nt, Homo sapiens
  misc_RNA (1)...(19): siRNA sense strand
ggacgcguuucccgcagaa

SEQ ID NO: 2004743 - RNA, 19 nt, Homo sapiens
  misc_RNA (1)...(19): siRNA sense strand
gaagacgaucucauggauu

SEQ ID NO: 2004744 - RNA, 19 nt, Homo sapiens
  misc_RNA (1)...(19): siRNA sense strand
gaaaauuguucaccgauac

SEQ ID NO: 2004745 - RNA, 19 nt, Homo sapiens
  misc_RNA (1)...(19): siRNA sense strand
aaaggaaagcgaauggaaa

SEQ ID NO: 2004746 - RNA, 19 nt, Homo sapiens
  misc_RNA (1)...(19): siRNA sense strand
aauagaagacgaucucaug

SEQ ID NO: 2004747 - RNA, 19 nt, Homo sapiens
  misc_RNA (1)...(19): siRNA sense strand
caggagauccgucuaacug

SEQ ID NO: 2004748 - RNA, 19 nt, Homo sapiens
  misc_RNA (1)...(19): siRNA sense strand
gagcugagugagaaaggaa

SEQ ID NO: 2004749 - RNA, 19 nt, Homo sapiens
  misc_RNA (1)...(19): siRNA sense strand
gcgcagacccacaguuugg

SEQ ID NO: 2004750 - RNA, 19 nt, Homo sapiens
  misc_RNA (1)...(19): siRNA sense strand
gacgacgacuacuacuuca

SEQ ID NO: 2004751 - RNA, 19 nt, Homo sapiens
  misc_RNA (1)...(19): siRNA sense strand
gaugacuacuucagcuucu

SEQ ID NO: 2004752 - RNA, 19 nt, Homo sapiens
  misc_RNA (1)...(19): siRNA sense strand
gcaaguccacucggaagga

SEQ ID NO: 2004753 - RNA, 19 nt, Homo sapiens
  misc_RNA (1)...(19): siRNA sense strand
gaauagaagacgaucucau

SEQ ID NO: 2004754 - RNA, 19 nt, Homo sapiens
  misc_RNA (1)...(19): siRNA sense strand
gcugagugagaaaggaaua

SEQ ID NO: 2004755 - RNA, 19 nt, Homo sapiens
  misc_RNA (1)...(19): siRNA sense strand
gagaugacuacuucagcuu

SEQ ID NO: 2004756 - RNA, 19 nt, Homo sapiens
  misc_RNA (1)...(19): siRNA sense strand
ucucauggauuugaucaag

SEQ ID NO: 2004757 - RNA, 19 nt, Homo sapiens
  misc_RNA (1)...(19): siRNA sense strand
gacgaucucauggauuuga

SEQ ID NO: 2004758 - RNA, 19 nt, Homo sapiens
  misc_RNA (1)...(19): siRNA sense strand
ucaccgauacuacagucua

SEQ ID NO: 2004759 - RNA, 19 nt, Homo sapiens
  misc_RNA (1)...(19): siRNA sense strand
ccgagaccgucgaggaguu

SEQ ID NO: 2004760 - RNA, 19 nt, Homo sapiens
  misc_RNA (1)...(19): siRNA sense strand
agaaaauuguucaccgaua

SEQ ID NO: 2004761 - RNA, 19 nt, Homo sapiens
  misc_RNA (1)...(19): siRNA sense strand
gagugagaaaggaauagaa

SEQ ID NO: 2004762 - RNA, 19 nt, Homo sapiens
  misc_RNA (1)...(19): siRNA sense strand
aaaggcccauucuacuuca

SEQ ID NO: 2004763 - RNA, 19 nt, Homo sapiens
  misc_RNA (1)...(19): siRNA sense strand
ggaacaggagauccgucua

SEQ ID NO: 2004764 - RNA, 19 nt, Homo sapiens
  misc_RNA (1)...(19): siRNA sense strand
cuagaugagcugagugaga

SEQ ID NO: 2004765 - RNA, 19 nt, Homo sapiens
  misc_RNA (1)...(19): siRNA sense strand
cgacgaggacgacgacuac

SEQ ID NO: 2004766 - RNA, 19 nt, Homo sapiens
  misc_RNA (1)...(19): siRNA sense strand
uagaagacgaucucaugga

SEQ ID NO: 2004767 - RNA, 19 nt, Homo sapiens
  misc_RNA (1)...(19): siRNA sense strand
gguggugucaucugccauu

SEQ ID NO: 2004768 - RNA, 19 nt, Homo sapiens
  misc_RNA (1)...(19): siRNA sense strand
gcagacggaggaccugaag

SEQ ID NO: 2004769 - RNA, 19 nt, Homo sapiens
  misc_RNA (1)...(19): siRNA sense strand
cauccacgcaggugucaga

SEQ ID NO: 2004770 - RNA, 19 nt, Homo sapiens
  misc_RNA (1)...(19): siRNA sense strand
cgaggacgacgacuacuac

SEQ ID NO: 2004771 - RNA, 19 nt, Homo sapiens
  misc_RNA (1)...(19): siRNA sense strand
ggaauagaagacgaucuca

SEQ ID NO: 2004772 - RNA, 19 nt, Homo sapiens
  misc_RNA (1)...(19): siRNA sense strand
gugagaaaggaauagaaga

SEQ ID NO: 2004773 - RNA, 19 nt, Homo sapiens
  misc_RNA (1)...(19): siRNA sense strand
caccgauacuacagucuag

SEQ ID NO: 2004774 - RNA, 19 nt, Homo sapiens
  misc_RNA (1)...(19): siRNA sense strand
gaaggaguuggcagacaag

SEQ ID NO: 2004775 - RNA, 19 nt, Homo sapiens
  misc_RNA (1)...(19): siRNA sense strand
auacuacagucuagaugag

SEQ ID NO: 2004776 - RNA, 19 nt, Homo sapiens
  misc_RNA (1)...(19): siRNA sense strand
cgacgacuacuacuucaac

SEQ ID NO: 2004777 - RNA, 19 nt, Homo sapiens
  misc_RNA (1)...(19): siRNA sense strand
gagaagaacuuuggcuuua

SEQ ID NO: 2004778 - RNA, 19 nt, Homo sapiens
  misc_RNA (1)...(19): siRNA sense strand
gaacagagaugcagaagag

SEQ ID NO: 2004779 - RNA, 19 nt, Homo sapiens
  misc_RNA (1)...(19): siRNA sense strand
ggaccaaacuuaaccaaga

SEQ ID NO: 2004780 - RNA, 19 nt, Homo sapiens
  misc_RNA (1)...(19): siRNA sense strand
ggagagagauacacagaga

SEQ ID NO: 2004781 - RNA, 19 nt, Homo sapiens
  misc_RNA (1)...(19): siRNA sense strand
acaaauagguccucuguga

SEQ ID NO: 2004782 - RNA, 19 nt, Homo sapiens
  misc_RNA (1)...(19): siRNA sense strand
gaagacaacuauggugauu

SEQ ID NO: 2004783 - RNA, 19 nt, Homo sapiens
  misc_RNA (1)...(19): siRNA sense strand
ccucagagcuggagccuuu

SEQ ID NO: 2004784 - RNA, 19 nt, Homo sapiens
  misc_RNA (1)...(19): siRNA sense strand
caaacaacaugcagagauu

SEQ ID NO: 2004785 - RNA, 19 nt, Homo sapiens
  misc_RNA (1)...(19): siRNA sense strand
ugaaucaacugucccuaua

SEQ ID NO: 2004786 - RNA, 19 nt, Homo sapiens
  misc_RNA (1)...(19): siRNA sense strand
gacaggagaggaagaauua

SEQ ID NO: 2004787 - RNA, 19 nt, Homo sapiens
  misc_RNA (1)...(19): siRNA sense strand
ugagacaucugaggaaaua

SEQ ID NO: 2004788 - RNA, 19 nt, Homo sapiens
  misc_RNA (1)...(19): siRNA sense strand
acaaauauguccucuguga

SEQ ID NO: 2004789 - RNA, 19 nt, Homo sapiens
  misc_RNA (1)...(19): siRNA sense strand
agaaaggccuccugaauug

SEQ ID NO: 2004790 - RNA, 19 nt, Homo sapiens
  misc_RNA (1)...(19): siRNA sense strand
cagaagaggugccacugua

SEQ ID NO: 2004791 - RNA, 19 nt, Homo sapiens
  misc_RNA (1)...(19): siRNA sense strand
gcagguagaucuagguuca

SEQ ID NO: 2004792 - RNA, 19 nt, Homo sapiens
  misc_RNA (1)...(19): siRNA sense strand
gaagaacccugaaucaacu

SEQ ID NO: 2004793 - RNA, 19 nt, Homo sapiens
  misc_RNA (1)...(19): siRNA sense strand
uaacugaaauccagcuuga

SEQ ID NO: 2004794 - RNA, 19 nt, Homo sapiens
  misc_RNA (1)...(19): siRNA sense strand
acaaauagguccucuguca

SEQ ID NO: 2004795 - RNA, 19 nt, Homo sapiens
  misc_RNA (1)...(19): siRNA sense strand
acaaauagguccucuguca

SEQ ID NO: 2004796 - RNA, 19 nt, Homo sapiens
  misc_RNA (1)...(19): siRNA sense strand
acaaauagguccucuguca

SEQ ID NO: 2004797 - RNA, 19 nt, Homo sapiens
  misc_RNA (1)...(19): siRNA sense strand
acaaauagguccucuguca

SEQ ID NO: 2004798 - RNA, 19 nt, Homo sapiens
  misc_RNA (1)...(19): siRNA sense strand
gagagaaccucacagaucu

SEQ ID NO: 2004799 - RNA, 19 nt, Homo sapiens
  misc_RNA (1)...(19): siRNA sense strand
gcacauaccuacccagcau

SEQ ID NO: 2004800 - RNA, 19 nt, Homo sapiens
  misc_RNA (1)...(19): siRNA sense strand
caaggcugguuucuucuua

SEQ ID NO: 2004801 - RNA, 19 nt, Homo sapiens
  misc_RNA (1)...(19): siRNA sense strand
ugacugggauguugaagaa

SEQ ID NO: 2004802 - RNA, 19 nt, Homo sapiens
  misc_RNA (1)...(19): siRNA sense strand
ggucagccauuaugcauau

SEQ ID NO: 2004803 - RNA, 19 nt, Homo sapiens
  misc_RNA (1)...(19): siRNA sense strand
gagcccacaucucagguua

SEQ ID NO: 2004804 - RNA, 19 nt, Homo sapiens
  misc_RNA (1)...(19): siRNA sense strand
ccucugaucuugagccuuu

SEQ ID NO: 2004805 - RNA, 19 nt, Homo sapiens
  misc_RNA (1)...(19): siRNA sense strand
acaaauauguccucuguca

SEQ ID NO: 2004806 - RNA, 19 nt, Homo sapiens
  misc_RNA (1)...(19): siRNA sense strand
gauuagagcccuuguuaga

SEQ ID NO: 2004807 - RNA, 19 nt, Homo sapiens
  misc_RNA (1)...(19): siRNA sense strand
ggacaaaucaaacagaugu

SEQ ID NO: 2004808 - RNA, 19 nt, Homo sapiens
  misc_RNA (1)...(19): siRNA sense strand
ggaggcagacuguggauaa

SEQ ID NO: 2004809 - RNA, 19 nt, Homo sapiens
  misc_RNA (1)...(19): siRNA sense strand
gagagaaacugagaaacug

SEQ ID NO: 2004810 - RNA, 19 nt, Homo sapiens
  misc_RNA (1)...(19): siRNA sense strand
gaccaaacuuaaccaagaa

SEQ ID NO: 2004811 - RNA, 19 nt, Homo sapiens
  misc_RNA (1)...(19): siRNA sense strand
ggagagagaaacugagaaa

SEQ ID NO: 2004812 - RNA, 19 nt, Homo sapiens
  misc_RNA (1)...(19): siRNA sense strand
gaagagaggaucccagcaa

SEQ ID NO: 2004813 - RNA, 19 nt, Homo sapiens
  misc_RNA (1)...(19): siRNA sense strand
cagaaaggccuccugaauu

SEQ ID NO: 2004814 - RNA, 19 nt, Homo sapiens
  misc_RNA (1)...(19): siRNA sense strand
gaaagugcaaguccugaaa

SEQ ID NO: 2004815 - RNA, 19 nt, Homo sapiens
  misc_RNA (1)...(19): siRNA sense strand
caacagguacccuagauga

SEQ ID NO: 2004816 - RNA, 19 nt, Homo sapiens
  misc_RNA (1)...(19): siRNA sense strand
caacuauggugauucugaa

SEQ ID NO: 2004817 - RNA, 19 nt, Homo sapiens
  misc_RNA (1)...(19): siRNA sense strand
ggaccucccuaucucaaga

SEQ ID NO: 2004818 - RNA, 19 nt, Homo sapiens
  misc_RNA (1)...(19): siRNA sense strand
ccucaggacuucccucauu

SEQ ID NO: 2004819 - RNA, 19 nt, Homo sapiens
  misc_RNA (1)...(19): siRNA sense strand
ccgcaaggcugguuucuuc

SEQ ID NO: 2004820 - RNA, 19 nt, Homo sapiens
  misc_RNA (1)...(19): siRNA sense strand
gagaaacugcuaccagaaa

SEQ ID NO: 2004821 - RNA, 19 nt, Homo sapiens
  misc_RNA (1)...(19): siRNA sense strand
uagagaagcuguccucaag

SEQ ID NO: 2004822 - RNA, 19 nt, Homo sapiens
  misc_RNA (1)...(19): siRNA sense strand
ugaaucaauugucccuaua

SEQ ID NO: 2004823 - RNA, 19 nt, Homo sapiens
  misc_RNA (1)...(19): siRNA sense strand
ggaagaaggucagcaacca

SEQ ID NO: 2004824 - RNA, 19 nt, Homo sapiens
  misc_RNA (1)...(19): siRNA sense strand
ggaagaggaugucgugacu

SEQ ID NO: 2004825 - RNA, 19 nt, Homo sapiens
  misc_RNA (1)...(19): siRNA sense strand
gaagagacacccagaguac

SEQ ID NO: 2004826 - RNA, 19 nt, Homo sapiens
  misc_RNA (1)...(19): siRNA sense strand
gcuauugacugggauguug

SEQ ID NO: 2004827 - RNA, 19 nt, Homo sapiens
  misc_RNA (1)...(19): siRNA sense strand
gaucuggaccuacaagcua

SEQ ID NO: 2004828 - RNA, 19 nt, Homo sapiens
  misc_RNA (1)...(19): siRNA sense strand
ggaaguagauuuucuuucu

SEQ ID NO: 2004829 - RNA, 19 nt, Homo sapiens
  misc_RNA (1)...(19): siRNA sense strand
caagacuccugaaacaguu

SEQ ID NO: 2004830 - RNA, 19 nt, Homo sapiens
  misc_RNA (1)...(19): siRNA sense strand
cggaaguccuccagaauga

SEQ ID NO: 2004831 - RNA, 19 nt, Homo sapiens
  misc_RNA (1)...(19): siRNA sense strand
ggaaauacaagagaaacaa

SEQ ID NO: 2004832 - RNA, 19 nt, Homo sapiens
  misc_RNA (1)...(19): siRNA sense strand
gagcuuggcccuucccauu

SEQ ID NO: 2004833 - RNA, 19 nt, Homo sapiens
  misc_RNA (1)...(19): siRNA sense strand
caagagagaaccucacaga

SEQ ID NO: 2004834 - RNA, 19 nt, Homo sapiens
  misc_RNA (1)...(19): siRNA sense strand
cgauacagaugacgaggaa

SEQ ID NO: 2004835 - RNA, 19 nt, Homo sapiens
  misc_RNA (1)...(19): siRNA sense strand
ugaaggagagggacaauga

SEQ ID NO: 2004836 - RNA, 19 nt, Homo sapiens
  misc_RNA (1)...(19): siRNA sense strand
gagaaggugcccaaaguga

SEQ ID NO: 2004837 - RNA, 19 nt, Homo sapiens
  misc_RNA (1)...(19): siRNA sense strand
gagacaagaaucugacaaa

SEQ ID NO: 2004838 - RNA, 19 nt, Homo sapiens
  misc_RNA (1)...(19): siRNA sense strand
ggagagagaacaacaugug

SEQ ID NO: 2004839 - RNA, 19 nt, Homo sapiens
  misc_RNA (1)...(19): siRNA sense strand
aagauuagagcccuuguua

SEQ ID NO: 2004840 - RNA, 19 nt, Homo sapiens
  misc_RNA (1)...(19): siRNA sense strand
gaagagcucccaguggaaa

SEQ ID NO: 2004841 - RNA, 19 nt, Homo sapiens
  misc_RNA (1)...(19): siRNA sense strand
ggaugucucucugcccuuu

SEQ ID NO: 2004842 - RNA, 19 nt, Homo sapiens
  misc_RNA (1)...(19): siRNA sense strand
cagaugggagagauuauua

SEQ ID NO: 2004843 - RNA, 19 nt, Homo sapiens
  misc_RNA (1)...(19): siRNA sense strand
ccacauaucaggcuacuag

SEQ ID NO: 2004844 - RNA, 19 nt, Homo sapiens
  misc_RNA (1)...(19): siRNA sense strand
gacaacagguacccuagau

SEQ ID NO: 2004845 - RNA, 19 nt, Homo sapiens
  misc_RNA (1)...(19): siRNA sense strand
aaagagagccagccugcua

SEQ ID NO: 2004846 - RNA, 19 nt, Homo sapiens
  misc_RNA (1)...(19): siRNA sense strand
ccacagaccagccuauuuc

SEQ ID NO: 2004847 - RNA, 19 nt, Homo sapiens
  misc_RNA (1)...(19): siRNA sense strand
gaauuccaaucuccuguca

SEQ ID NO: 2004848 - RNA, 19 nt, Homo sapiens
  misc_RNA (1)...(19): siRNA sense strand
acuaggagcaggacaaaua

SEQ ID NO: 2004849 - RNA, 19 nt, Homo sapiens
  misc_RNA (1)...(19): siRNA sense strand
acuaggagcaggacaaaua

SEQ ID NO: 2004850 - RNA, 19 nt, Homo sapiens
  misc_RNA (1)...(19): siRNA sense strand
acuaggagcaggacaaaua

SEQ ID NO: 2004851 - RNA, 19 nt, Homo sapiens
  misc_RNA (1)...(19): siRNA sense strand
aaagagauagggagaguuu

SEQ ID NO: 2004852 - RNA, 19 nt, Homo sapiens
  misc_RNA (1)...(19): siRNA sense strand
ccuaacagccucaguaguu

SEQ ID NO: 2004853 - RNA, 19 nt, Homo sapiens
  misc_RNA (1)...(19): siRNA sense strand
gagccagccugcuauaugg

SEQ ID NO: 2004854 - RNA, 19 nt, Homo sapiens
  misc_RNA (1)...(19): siRNA sense strand
acacacaaguggagaagga

SEQ ID NO: 2004855 - RNA, 19 nt, Homo sapiens
  misc_RNA (1)...(19): siRNA sense strand
gaaacaggacagagaacaa

SEQ ID NO: 2004856 - RNA, 19 nt, Homo sapiens
  misc_RNA (1)...(19): siRNA sense strand
gaagaggugccacuguaga

SEQ ID NO: 2004857 - RNA, 19 nt, Homo sapiens
  misc_RNA (1)...(19): siRNA sense strand
ugucaagacuccugaaaca

SEQ ID NO: 2004858 - RNA, 19 nt, Homo sapiens
  misc_RNA (1)...(19): siRNA sense strand
agacagagcaauccaguga

SEQ ID NO: 2004859 - RNA, 19 nt, Homo sapiens
  misc_RNA (1)...(19): siRNA sense strand
gcccugcccuuuccaucua

SEQ ID NO: 2004860 - RNA, 19 nt, Homo sapiens
  misc_RNA (1)...(19): siRNA sense strand
gaucuuccauggaguaggu

SEQ ID NO: 2004861 - RNA, 19 nt, Homo sapiens
  misc_RNA (1)...(19): siRNA sense strand
ggacaucaacacacaagug

SEQ ID NO: 2004862 - RNA, 19 nt, Homo sapiens
  misc_RNA (1)...(19): siRNA sense strand
cagcucccauugaccauaa

SEQ ID NO: 2004863 - RNA, 19 nt, Homo sapiens
  misc_RNA (1)...(19): siRNA sense strand
gauagauccucugucaaga

SEQ ID NO: 2004864 - RNA, 19 nt, Homo sapiens
  misc_RNA (1)...(19): siRNA sense strand
gaagaccccugaaacaguu

SEQ ID NO: 2004865 - RNA, 19 nt, Homo sapiens
  misc_RNA (1)...(19): siRNA sense strand
gcagacccuuccaagcaaa

SEQ ID NO: 2004866 - RNA, 19 nt, Homo sapiens
  misc_RNA (1)...(19): siRNA sense strand
gaagguagaaauugagaca

SEQ ID NO: 2004867 - RNA, 19 nt, Homo sapiens
  misc_RNA (1)...(19): siRNA sense strand
caaggacucugaagacaac

SEQ ID NO: 2004868 - RNA, 19 nt, Homo sapiens
  misc_RNA (1)...(19): siRNA sense strand
ggaccaaggacucugaaga

SEQ ID NO: 2004869 - RNA, 19 nt, Homo sapiens
  misc_RNA (1)...(19): siRNA sense strand
ucaaacagaugugaaagca

SEQ ID NO: 2004870 - RNA, 19 nt, Homo sapiens
  misc_RNA (1)...(19): siRNA sense strand
aaggaucacacaaagauua

SEQ ID NO: 2004871 - RNA, 19 nt, Homo sapiens
  misc_RNA (1)...(19): siRNA sense strand
gaagaacuuuggcuuuagc

SEQ ID NO: 2004872 - RNA, 19 nt, Homo sapiens
  misc_RNA (1)...(19): siRNA sense strand
gaagagaaggugcccaaag

SEQ ID NO: 2004873 - RNA, 19 nt, Homo sapiens
  misc_RNA (1)...(19): siRNA sense strand
guuugaagguagaaauuga

SEQ ID NO: 2004874 - RNA, 19 nt, Homo sapiens
  misc_RNA (1)...(19): siRNA sense strand
gagcaggaccucccuaucu

SEQ ID NO: 2004875 - RNA, 19 nt, Homo sapiens
  misc_RNA (1)...(19): siRNA sense strand
gaaagacagacagauguga

SEQ ID NO: 2004876 - RNA, 19 nt, Homo sapiens
  misc_RNA (1)...(19): siRNA sense strand
aagagaaggugcccaaagu

SEQ ID NO: 2004877 - RNA, 19 nt, Homo sapiens
  misc_RNA (1)...(19): siRNA sense strand
gaacauaccucaaggauuu

SEQ ID NO: 2004878 - RNA, 19 nt, Homo sapiens
  misc_RNA (1)...(19): siRNA sense strand
gaagagaauuccauaugaa

SEQ ID NO: 2004879 - RNA, 19 nt, Homo sapiens
  misc_RNA (1)...(19): siRNA sense strand
caacaucgaucccaucuau

SEQ ID NO: 2004880 - RNA, 19 nt, Homo sapiens
  misc_RNA (1)...(19): siRNA sense strand
cgaaauugcucgaaaguug

SEQ ID NO: 2004881 - RNA, 19 nt, Homo sapiens
  misc_RNA (1)...(19): siRNA sense strand
gcacucggcuggagaaaga

SEQ ID NO: 2004882 - RNA, 19 nt, Homo sapiens
  misc_RNA (1)...(19): siRNA sense strand
caggauaucugcuaagaaa

SEQ ID NO: 2004883 - RNA, 19 nt, Homo sapiens
  misc_RNA (1)...(19): siRNA sense strand
uaaaugcgauggccaggua

SEQ ID NO: 2004884 - RNA, 19 nt, Homo sapiens
  misc_RNA (1)...(19): siRNA sense strand
gaguaaagcugcuggacaa

SEQ ID NO: 2004885 - RNA, 19 nt, Homo sapiens
  misc_RNA (1)...(19): siRNA sense strand
ggacaacaccauggaaaua

SEQ ID NO: 2004886 - RNA, 19 nt, Homo sapiens
  misc_RNA (1)...(19): siRNA sense strand
ggauuuggcuugaaccuau

SEQ ID NO: 2004887 - RNA, 19 nt, Homo sapiens
  misc_RNA (1)...(19): siRNA sense strand
ggaaauauuugacauugag

SEQ ID NO: 2004888 - RNA, 19 nt, Homo sapiens
  misc_RNA (1)...(19): siRNA sense strand
ugaagagaauuccauauga

SEQ ID NO: 2004889 - RNA, 19 nt, Homo sapiens
  misc_RNA (1)...(19): siRNA sense strand
gaaagaaggcacagcaaga

SEQ ID NO: 2004890 - RNA, 19 nt, Homo sapiens
  misc_RNA (1)...(19): siRNA sense strand
ccucaaggauuuagaaguu

SEQ ID NO: 2004891 - RNA, 19 nt, Homo sapiens
  misc_RNA (1)...(19): siRNA sense strand
agaaccagcuuucaggaua

SEQ ID NO: 2004892 - RNA, 19 nt, Homo sapiens
  misc_RNA (1)...(19): siRNA sense strand
ggaaauaggagauuacgau

SEQ ID NO: 2004893 - RNA, 19 nt, Homo sapiens
  misc_RNA (1)...(19): siRNA sense strand
gaaccagcuuucaggauau

SEQ ID NO: 2004894 - RNA, 19 nt, Homo sapiens
  misc_RNA (1)...(19): siRNA sense strand
gagagcaccucaaagugaa

SEQ ID NO: 2004895 - RNA, 19 nt, Homo sapiens
  misc_RNA (1)...(19): siRNA sense strand
gcacugccuugagaagaua

SEQ ID NO: 2004896 - RNA, 19 nt, Homo sapiens
  misc_RNA (1)...(19): siRNA sense strand
agagagaccugcuggaaga

SEQ ID NO: 2004897 - RNA, 19 nt, Homo sapiens
  misc_RNA (1)...(19): siRNA sense strand
gaagauuuguguggaguau

SEQ ID NO: 2004898 - RNA, 19 nt, Homo sapiens
  misc_RNA (1)...(19): siRNA sense strand
aauaggagauuacgaugaa

SEQ ID NO: 2004899 - RNA, 19 nt, Homo sapiens
  misc_RNA (1)...(19): siRNA sense strand
agacgaggccuacuucaua

SEQ ID NO: 2004900 - RNA, 19 nt, Homo sapiens
  misc_RNA (1)...(19): siRNA sense strand
ggaaauguacggcaucaga

SEQ ID NO: 2004901 - RNA, 19 nt, Homo sapiens
  misc_RNA (1)...(19): siRNA sense strand
gagagcaaguacacauuug

SEQ ID NO: 2004902 - RNA, 19 nt, Homo sapiens
  misc_RNA (1)...(19): siRNA sense strand
guuuaaaccugguagaaug

SEQ ID NO: 2004903 - RNA, 19 nt, Homo sapiens
  misc_RNA (1)...(19): siRNA sense strand
gauaacgaguggucuguuc

SEQ ID NO: 2004904 - RNA, 19 nt, Homo sapiens
  misc_RNA (1)...(19): siRNA sense strand
ucucagauauguugcugua

SEQ ID NO: 2004905 - RNA, 19 nt, Homo sapiens
  misc_RNA (1)...(19): siRNA sense strand
caaagacaguggaaugaag

SEQ ID NO: 2004906 - RNA, 19 nt, Homo sapiens
  misc_RNA (1)...(19): siRNA sense strand
ccaggacacauuagaauuu

SEQ ID NO: 2004907 - RNA, 19 nt, Homo sapiens
  misc_RNA (1)...(19): siRNA sense strand
caacuucuguuuguucuuc

SEQ ID NO: 2004908 - RNA, 19 nt, Homo sapiens
  misc_RNA (1)...(19): siRNA sense strand
gagaauuccauaugaaaga

SEQ ID NO: 2004909 - RNA, 19 nt, Homo sapiens
  misc_RNA (1)...(19): siRNA sense strand
caaauacgaaggccaaaga

SEQ ID NO: 2004910 - RNA, 19 nt, Homo sapiens
  misc_RNA (1)...(19): siRNA sense strand
ggagauagaaggaacauac

SEQ ID NO: 2004911 - RNA, 19 nt, Homo sapiens
  misc_RNA (1)...(19): siRNA sense strand
gcucgaaaguuggaaaugu

SEQ ID NO: 2004912 - RNA, 19 nt, Homo sapiens
  misc_RNA (1)...(19): siRNA sense strand
caacaccauggaaauauuu

SEQ ID NO: 2004913 - RNA, 19 nt, Homo sapiens
  misc_RNA (1)...(19): siRNA sense strand
gauuucacauggcuucuga

SEQ ID NO: 2004914 - RNA, 19 nt, Homo sapiens
  misc_RNA (1)...(19): siRNA sense strand
ucaaagugaacgaguauuu

SEQ ID NO: 2004915 - RNA, 19 nt, Homo sapiens
  misc_RNA (1)...(19): siRNA sense strand
ggaccgagagcaccucaaa

SEQ ID NO: 2004916 - RNA, 19 nt, Homo sapiens
  misc_RNA (1)...(19): siRNA sense strand
cgagagcaccucaaaguga

SEQ ID NO: 2004917 - RNA, 19 nt, Homo sapiens
  misc_RNA (1)...(19): siRNA sense strand
gggauggaguuucaaaaua

SEQ ID NO: 2004918 - RNA, 19 nt, Homo sapiens
  misc_RNA (1)...(19): siRNA sense strand
gagcaggagucagaagaug

SEQ ID NO: 2004919 - RNA, 19 nt, Homo sapiens
  misc_RNA (1)...(19): siRNA sense strand
uggaagaacucagaaacaa

SEQ ID NO: 2004920 - RNA, 19 nt, Homo sapiens
  misc_RNA (1)...(19): siRNA sense strand
gaccuuaccaggacacauu

SEQ ID NO: 2004921 - RNA, 19 nt, Homo sapiens
  misc_RNA (1)...(19): siRNA sense strand
gauaucugcuaagaaaguu

SEQ ID NO: 2004922 - RNA, 19 nt, Homo sapiens
  misc_RNA (1)...(19): siRNA sense strand
ucagauauguugcuguaca

SEQ ID NO: 2004923 - RNA, 19 nt, Homo sapiens
  misc_RNA (1)...(19): siRNA sense strand
gaacaugcgccaguuaaag

SEQ ID NO: 2004924 - RNA, 19 nt, Homo sapiens
  misc_RNA (1)...(19): siRNA sense strand
gaagaacucagaaacaacu

SEQ ID NO: 2004925 - RNA, 19 nt, Homo sapiens
  misc_RNA (1)...(19): siRNA sense strand
gauagaaggaacauacaga

SEQ ID NO: 2004926 - RNA, 19 nt, Homo sapiens
  misc_RNA (1)...(19): siRNA sense strand
gggcauagagaaccucauu

SEQ ID NO: 2004927 - RNA, 19 nt, Homo sapiens
  misc_RNA (1)...(19): siRNA sense strand
uauuugacauugagccuaa

SEQ ID NO: 2004928 - RNA, 19 nt, Homo sapiens
  misc_RNA (1)...(19): siRNA sense strand
gcaaguacacauuugaaag

SEQ ID NO: 2004929 - RNA, 19 nt, Homo sapiens
  misc_RNA (1)...(19): siRNA sense strand
ggaacaugcgccaguuaaa

SEQ ID NO: 2004930 - RNA, 19 nt, Homo sapiens
  misc_RNA (1)...(19): siRNA sense strand
acaacaccauggaaauauu

SEQ ID NO: 2004931 - RNA, 19 nt, Homo sapiens
  misc_RNA (1)...(19): siRNA sense strand
gcaccugcaccucagagua

SEQ ID NO: 2004932 - RNA, 19 nt, Homo sapiens
  misc_RNA (1)...(19): siRNA sense strand
guaguagagaugaauguaa

SEQ ID NO: 2004933 - RNA, 19 nt, Homo sapiens
  misc_RNA (1)...(19): siRNA sense strand
ucgccuagcuguaaaauuu

SEQ ID NO: 2004934 - RNA, 19 nt, Homo sapiens
  misc_RNA (1)...(19): siRNA sense strand
gagcaaguacacauuugaa

SEQ ID NO: 2004935 - RNA, 19 nt, Homo sapiens
  misc_RNA (1)...(19): siRNA sense strand
gacgaggccuacuucauag

SEQ ID NO: 2004936 - RNA, 19 nt, Homo sapiens
  misc_RNA (1)...(19): siRNA sense strand
guccaggccuuuccacgaa

SEQ ID NO: 2004937 - RNA, 19 nt, Homo sapiens
  misc_RNA (1)...(19): siRNA sense strand
ggaaggaaccaagauucaa

SEQ ID NO: 2004938 - RNA, 19 nt, Homo sapiens
  misc_RNA (1)...(19): siRNA sense strand
gcagcgcaguggugaagga

SEQ ID NO: 2004939 - RNA, 19 nt, Homo sapiens
  misc_RNA (1)...(19): siRNA sense strand
cagacucucuugcccagaa

SEQ ID NO: 2004940 - RNA, 19 nt, Homo sapiens
  misc_RNA (1)...(19): siRNA sense strand
caaacuucauccagagguu

SEQ ID NO: 2004941 - RNA, 19 nt, Homo sapiens
  misc_RNA (1)...(19): siRNA sense strand
ccaccaaaaucaacacuuu

SEQ ID NO: 2004942 - RNA, 19 nt, Homo sapiens
  misc_RNA (1)...(19): siRNA sense strand
uaagagagaccugcuggaa

SEQ ID NO: 2004943 - RNA, 19 nt, Homo sapiens
  misc_RNA (1)...(19): siRNA sense strand
gaagcucugggucgucuuu

SEQ ID NO: 2004944 - RNA, 19 nt, Homo sapiens
  misc_RNA (1)...(19): siRNA sense strand
ggauaucugcuaagaaagu

SEQ ID NO: 2004945 - RNA, 19 nt, Homo sapiens
  misc_RNA (1)...(19): siRNA sense strand
gaaauguacggcaucagau

SEQ ID NO: 2004946 - RNA, 19 nt, Homo sapiens
  misc_RNA (1)...(19): siRNA sense strand
gaagauacuagaauuccau

SEQ ID NO: 2004947 - RNA, 19 nt, Homo sapiens
  misc_RNA (1)...(19): siRNA sense strand
gaaccuaugaaacccauca

SEQ ID NO: 2004948 - RNA, 19 nt, Homo sapiens
  misc_RNA (1)...(19): siRNA sense strand
caucuacgcggcucagaaa

SEQ ID NO: 2004949 - RNA, 19 nt, Homo sapiens
  misc_RNA (1)...(19): siRNA sense strand
gacaacaccauggaaauau

SEQ ID NO: 2004950 - RNA, 19 nt, Homo sapiens
  misc_RNA (1)...(19): siRNA sense strand
gagaugaauguaagaacuu

SEQ ID NO: 2004951 - RNA, 19 nt, Homo sapiens
  misc_RNA (1)...(19): siRNA sense strand
cucgaaaguuggaaaugua

SEQ ID NO: 2004952 - RNA, 19 nt, Homo sapiens
  misc_RNA (1)...(19): siRNA sense strand
auacuagaauuccaucaga

SEQ ID NO: 2004953 - RNA, 19 nt, Homo sapiens
  misc_RNA (1)...(19): siRNA sense strand
ucaaaucccacgucuacuu

SEQ ID NO: 2004954 - RNA, 19 nt, Homo sapiens
  misc_RNA (1)...(19): siRNA sense strand
guucaaaucccacgucuac

SEQ ID NO: 2004955 - RNA, 19 nt, Homo sapiens
  misc_RNA (1)...(19): siRNA sense strand
guacacaagcaaaggaguu

SEQ ID NO: 2004956 - RNA, 19 nt, Homo sapiens
  misc_RNA (1)...(19): siRNA sense strand
agucggaaauaggagauua

SEQ ID NO: 2004957 - RNA, 19 nt, Homo sapiens
  misc_RNA (1)...(19): siRNA sense strand
ugagagcaaguacacauuu

SEQ ID NO: 2004958 - RNA, 19 nt, Homo sapiens
  misc_RNA (1)...(19): siRNA sense strand
cagggaggccgauggcaua

SEQ ID NO: 2004959 - RNA, 19 nt, Homo sapiens
  misc_RNA (1)...(19): siRNA sense strand
gugcuucgccuagcuguaa

SEQ ID NO: 2004960 - RNA, 19 nt, Homo sapiens
  misc_RNA (1)...(19): siRNA sense strand
cuacaaaacucaucaggau

SEQ ID NO: 2004961 - RNA, 19 nt, Homo sapiens
  misc_RNA (1)...(19): siRNA sense strand
gauccaagcagccaagagu

SEQ ID NO: 2004962 - RNA, 19 nt, Homo sapiens
  misc_RNA (1)...(19): siRNA sense strand
uucacaagcucaccaagaa

SEQ ID NO: 2004963 - RNA, 19 nt, Homo sapiens
  misc_RNA (1)...(19): siRNA sense strand
gaaguuggaggcaguguac

SEQ ID NO: 2004964 - RNA, 19 nt, Homo sapiens
  misc_RNA (1)...(19): siRNA sense strand
caaacgcuguaagaaguug

SEQ ID NO: 2004965 - RNA, 19 nt, Homo sapiens
  misc_RNA (1)...(19): siRNA sense strand
uaguagagaugaauguaag

SEQ ID NO: 2004966 - RNA, 19 nt, Homo sapiens
  misc_RNA (1)...(19): siRNA sense strand
gaaggaaccaagauucaac

SEQ ID NO: 2004967 - RNA, 19 nt, Homo sapiens
  misc_RNA (1)...(19): siRNA sense strand
gggaaggaaccaagauuca

SEQ ID NO: 2004968 - RNA, 19 nt, Homo sapiens
  misc_RNA (1)...(19): siRNA sense strand
gaacucagaaacaacuagu

SEQ ID NO: 2004969 - RNA, 19 nt, Homo sapiens
  misc_RNA (1)...(19): siRNA sense strand
caccugcaccucagaguaa

SEQ ID NO: 2004970 - RNA, 19 nt, Homo sapiens
  misc_RNA (1)...(19): siRNA sense strand
uccaagguccguaaacuaa

SEQ ID NO: 2004971 - RNA, 19 nt, Homo sapiens
  misc_RNA (1)...(19): siRNA sense strand
gaacuccgcgauccaagca

SEQ ID NO: 2004972 - RNA, 19 nt, Homo sapiens
  misc_RNA (1)...(19): siRNA sense strand
uaaaccugguagaauguga

SEQ ID NO: 2004973 - RNA, 19 nt, Homo sapiens
  misc_RNA (1)...(19): siRNA sense strand
gagaaccugcagaagcuaa

SEQ ID NO: 2004974 - RNA, 19 nt, Homo sapiens
  misc_RNA (1)...(19): siRNA sense strand
ugacgcugcucuucuccaa

SEQ ID NO: 2004975 - RNA, 19 nt, Homo sapiens
  misc_RNA (1)...(19): siRNA sense strand
aaacagagcaucucauucc

SEQ ID NO: 2004976 - RNA, 19 nt, Homo sapiens
  misc_RNA (1)...(19): siRNA sense strand
gguccuaacagaacuggaa

SEQ ID NO: 2004977 - RNA, 19 nt, Homo sapiens
  misc_RNA (1)...(19): siRNA sense strand
gcucaaagcugaagaaaug

SEQ ID NO: 2004978 - RNA, 19 nt, Homo sapiens
  misc_RNA (1)...(19): siRNA sense strand
cagaagagcugguagauga

SEQ ID NO: 2004979 - RNA, 19 nt, Homo sapiens
  misc_RNA (1)...(19): siRNA sense strand
gaacaaaggaacugaauga

SEQ ID NO: 2004980 - RNA, 19 nt, Homo sapiens
  misc_RNA (1)...(19): siRNA sense strand
aaagauggcucgucaguaa

SEQ ID NO: 2004981 - RNA, 19 nt, Homo sapiens
  misc_RNA (1)...(19): siRNA sense strand
gaagaaggaccauuuauuc

SEQ ID NO: 2004982 - RNA, 19 nt, Homo sapiens
  misc_RNA (1)...(19): siRNA sense strand
gcaagaagauccucaagag

SEQ ID NO: 2004983 - RNA, 19 nt, Homo sapiens
  misc_RNA (1)...(19): siRNA sense strand
gggcaguucuguuucauuu

SEQ ID NO: 2004984 - RNA, 19 nt, Homo sapiens
  misc_RNA (1)...(19): siRNA sense strand
gaacugggcagccuuauuc

SEQ ID NO: 2004985 - RNA, 19 nt, Homo sapiens
  misc_RNA (1)...(19): siRNA sense strand
gaaggaccauuuauucuag

SEQ ID NO: 2004986 - RNA, 19 nt, Homo sapiens
  misc_RNA (1)...(19): siRNA sense strand
ggaagaaggaccauuuauu

SEQ ID NO: 2004987 - RNA, 19 nt, Homo sapiens
  misc_RNA (1)...(19): siRNA sense strand
caggauaggugaccacaaa

SEQ ID NO: 2004988 - RNA, 19 nt, Homo sapiens
  misc_RNA (1)...(19): siRNA sense strand
gcaauucccuggaugaaag

SEQ ID NO: 2004989 - RNA, 19 nt, Homo sapiens
  misc_RNA (1)...(19): siRNA sense strand
agagugagcuugauguauu

SEQ ID NO: 2004990 - RNA, 19 nt, Homo sapiens
  misc_RNA (1)...(19): siRNA sense strand
gagugagcuugauguauua

SEQ ID NO: 2004991 - RNA, 19 nt, Homo sapiens
  misc_RNA (1)...(19): siRNA sense strand
agaaccagcugcaguuuaa

SEQ ID NO: 2004992 - RNA, 19 nt, Homo sapiens
  misc_RNA (1)...(19): siRNA sense strand
ccacuuagcagacaaggua

SEQ ID NO: 2004993 - RNA, 19 nt, Homo sapiens
  misc_RNA (1)...(19): siRNA sense strand
gaaauugacagcaugcaaa

SEQ ID NO: 2004994 - RNA, 19 nt, Homo sapiens
  misc_RNA (1)...(19): siRNA sense strand
ccucaaagcucucagaagu

SEQ ID NO: 2004995 - RNA, 19 nt, Homo sapiens
  misc_RNA (1)...(19): siRNA sense strand
gaaaggaaggaaucaaaga

SEQ ID NO: 2004996 - RNA, 19 nt, Homo sapiens
  misc_RNA (1)...(19): siRNA sense strand
gugcgaagauuaugcagaa

SEQ ID NO: 2004997 - RNA, 19 nt, Homo sapiens
  misc_RNA (1)...(19): siRNA sense strand
gaacgucgaauccguauca

SEQ ID NO: 2004998 - RNA, 19 nt, Homo sapiens
  misc_RNA (1)...(19): siRNA sense strand
cuuagaggcugcuacauaa

SEQ ID NO: 2004999 - RNA, 19 nt, Homo sapiens
  misc_RNA (1)...(19): siRNA sense strand
ccacaugccauuagaauug

SEQ ID NO: 2005000 - RNA, 19 nt, Homo sapiens
  misc_RNA (1)...(19): siRNA sense strand
uguauuagaugcggauaua

SEQ ID NO: 2005001 - RNA, 19 nt, Homo sapiens
  misc_RNA (1)...(19): siRNA sense strand
caagagagacuuagcuaug

SEQ ID NO: 2005002 - RNA, 19 nt, Homo sapiens
  misc_RNA (1)...(19): siRNA sense strand
ggaaacaagucgaccuucu

SEQ ID NO: 2005003 - RNA, 19 nt, Homo sapiens
  misc_RNA (1)...(19): siRNA sense strand
gaaacgaagacaauuugaa

SEQ ID NO: 2005004 - RNA, 19 nt, Homo sapiens
  misc_RNA (1)...(19): siRNA sense strand
caacaacauucgucagcuu

SEQ ID NO: 2005005 - RNA, 19 nt, Homo sapiens
  misc_RNA (1)...(19): siRNA sense strand
caagcagccugucagugua

SEQ ID NO: 2005006 - RNA, 19 nt, Homo sapiens
  misc_RNA (1)...(19): siRNA sense strand
ggaacugaaugagcucaaa

SEQ ID NO: 2005007 - RNA, 19 nt, Homo sapiens
  misc_RNA (1)...(19): siRNA sense strand
gcaguaccuucggaucaua

SEQ ID NO: 2005008 - RNA, 19 nt, Homo sapiens
  misc_RNA (1)...(19): siRNA sense strand
cagcaucggugacuacugu

SEQ ID NO: 2005009 - RNA, 19 nt, Homo sapiens
  misc_RNA (1)...(19): siRNA sense strand
uguauagacuccaacaauu

SEQ ID NO: 2005010 - RNA, 19 nt, Homo sapiens
  misc_RNA (1)...(19): siRNA sense strand
cagaagagaugugaaacga

SEQ ID NO: 2005011 - RNA, 19 nt, Homo sapiens
  misc_RNA (1)...(19): siRNA sense strand
ccaaguacaucaccaaagg

SEQ ID NO: 2005012 - RNA, 19 nt, Homo sapiens
  misc_RNA (1)...(19): siRNA sense strand
gaacaucaucucagaaguc

SEQ ID NO: 2005013 - RNA, 19 nt, Homo sapiens
  misc_RNA (1)...(19): siRNA sense strand
gaacagaggaaggaucaga

SEQ ID NO: 2005014 - RNA, 19 nt, Homo sapiens
  misc_RNA (1)...(19): siRNA sense strand
gcugaaagagguagacaaa

SEQ ID NO: 2005015 - RNA, 19 nt, Homo sapiens
  misc_RNA (1)...(19): siRNA sense strand
gguuauagauauucugcaa

SEQ ID NO: 2005016 - RNA, 19 nt, Homo sapiens
  misc_RNA (1)...(19): siRNA sense strand
gauaaauugaguccacaua

SEQ ID NO: 2005017 - RNA, 19 nt, Homo sapiens
  misc_RNA (1)...(19): siRNA sense strand
uaaaagaaauccaggaaga

SEQ ID NO: 2005018 - RNA, 19 nt, Homo sapiens
  misc_RNA (1)...(19): siRNA sense strand
ucucagaaguguggacaua

SEQ ID NO: 2005019 - RNA, 19 nt, Homo sapiens
  misc_RNA (1)...(19): siRNA sense strand
ucaaagcucucagaagugu

SEQ ID NO: 2005020 - RNA, 19 nt, Homo sapiens
  misc_RNA (1)...(19): siRNA sense strand
gaaagauggcucgucagua

SEQ ID NO: 2005021 - RNA, 19 nt, Homo sapiens
  misc_RNA (1)...(19): siRNA sense strand
gauauucugcaacaaauug

SEQ ID NO: 2005022 - RNA, 19 nt, Homo sapiens
  misc_RNA (1)...(19): siRNA sense strand
gaccugggcaguucuguuu

SEQ ID NO: 2005023 - RNA, 19 nt, Homo sapiens
  misc_RNA (1)...(19): siRNA sense strand
guucaccucagaauucuua

SEQ ID NO: 2005024 - RNA, 19 nt, Homo sapiens
  misc_RNA (1)...(19): siRNA sense strand
gaucuuacugugccaaauu

SEQ ID NO: 2005025 - RNA, 19 nt, Homo sapiens
  misc_RNA (1)...(19): siRNA sense strand
gcaccuaggacccaacuug

SEQ ID NO: 2005026 - RNA, 19 nt, Homo sapiens
  misc_RNA (1)...(19): siRNA sense strand
guaaagaugcagauuguag

SEQ ID NO: 2005027 - RNA, 19 nt, Homo sapiens
  misc_RNA (1)...(19): siRNA sense strand
gagagucaauucuacuaca

SEQ ID NO: 2005028 - RNA, 19 nt, Homo sapiens
  misc_RNA (1)...(19): siRNA sense strand
ccaaggaaauugacagcau

SEQ ID NO: 2005029 - RNA, 19 nt, Homo sapiens
  misc_RNA (1)...(19): siRNA sense strand
ugaaagagguagacaaagc

SEQ ID NO: 2005030 - RNA, 19 nt, Homo sapiens
  misc_RNA (1)...(19): siRNA sense strand
aaaagaaacugucaccaaa

SEQ ID NO: 2005031 - RNA, 19 nt, Homo sapiens
  misc_RNA (1)...(19): siRNA sense strand
ccacaaaauugaagaggua

SEQ ID NO: 2005032 - RNA, 19 nt, Homo sapiens
  misc_RNA (1)...(19): siRNA sense strand
uagcuaugcuguccaccua

SEQ ID NO: 2005033 - RNA, 19 nt, Homo sapiens
  misc_RNA (1)...(19): siRNA sense strand
caggauaugugcgaagauu

SEQ ID NO: 2005034 - RNA, 19 nt, Homo sapiens
  misc_RNA (1)...(19): siRNA sense strand
gcaaggauccagccgugaa

SEQ ID NO: 2005035 - RNA, 19 nt, Homo sapiens
  misc_RNA (1)...(19): siRNA sense strand
guauagacuccaacaauug

SEQ ID NO: 2005036 - RNA, 19 nt, Homo sapiens
  misc_RNA (1)...(19): siRNA sense strand
gaagaacaaaggaacugaa

SEQ ID NO: 2005037 - RNA, 19 nt, Homo sapiens
  misc_RNA (1)...(19): siRNA sense strand
gagaaugugccguuuagga

SEQ ID NO: 2005038 - RNA, 19 nt, Homo sapiens
  misc_RNA (1)...(19): siRNA sense strand
gcagagugagcuugaugua

SEQ ID NO: 2005039 - RNA, 19 nt, Homo sapiens
  misc_RNA (1)...(19): siRNA sense strand
cagcugcaguuuaauagga

SEQ ID NO: 2005040 - RNA, 19 nt, Homo sapiens
  misc_RNA (1)...(19): siRNA sense strand
ggauaugugcgaagauuau

SEQ ID NO: 2005041 - RNA, 19 nt, Homo sapiens
  misc_RNA (1)...(19): siRNA sense strand
caacuuggcgauccgauau

SEQ ID NO: 2005042 - RNA, 19 nt, Homo sapiens
  misc_RNA (1)...(19): siRNA sense strand
cugaagcacucauacaaug

SEQ ID NO: 2005043 - RNA, 19 nt, Homo sapiens
  misc_RNA (1)...(19): siRNA sense strand
cgucauaucccaagagaga

SEQ ID NO: 2005044 - RNA, 19 nt, Homo sapiens
  misc_RNA (1)...(19): siRNA sense strand
gaaaagaaacugucaccaa

SEQ ID NO: 2005045 - RNA, 19 nt, Homo sapiens
  misc_RNA (1)...(19): siRNA sense strand
ggagucuguucgucaaaga

SEQ ID NO: 2005046 - RNA, 19 nt, Homo sapiens
  misc_RNA (1)...(19): siRNA sense strand
cuucaaagacgagguguua

SEQ ID NO: 2005047 - RNA, 19 nt, Homo sapiens
  misc_RNA (1)...(19): siRNA sense strand
gcaacuuggcgauccgaua

SEQ ID NO: 2005048 - RNA, 19 nt, Homo sapiens
  misc_RNA (1)...(19): siRNA sense strand
uuagaaaggcccuguaaug

SEQ ID NO: 2005049 - RNA, 19 nt, Homo sapiens
  misc_RNA (1)...(19): siRNA sense strand
gacaguggaucgcaaggau

SEQ ID NO: 2005050 - RNA, 19 nt, Homo sapiens
  misc_RNA (1)...(19): siRNA sense strand
aagccaaccucacaguaaa

SEQ ID NO: 2005051 - RNA, 19 nt, Homo sapiens
  misc_RNA (1)...(19): siRNA sense strand
cagcucuggugccaaagua

SEQ ID NO: 2005052 - RNA, 19 nt, Homo sapiens
  misc_RNA (1)...(19): siRNA sense strand
gaugugaaacgaagacaau

SEQ ID NO: 2005053 - RNA, 19 nt, Homo sapiens
  misc_RNA (1)...(19): siRNA sense strand
gcccagagagucaauucua

SEQ ID NO: 2005054 - RNA, 19 nt, Homo sapiens
  misc_RNA (1)...(19): siRNA sense strand
caaagccaaccucacagua

SEQ ID NO: 2005055 - RNA, 19 nt, Homo sapiens
  misc_RNA (1)...(19): siRNA sense strand
gaaacaagucgaccuucug

SEQ ID NO: 2005056 - RNA, 19 nt, Homo sapiens
  misc_RNA (1)...(19): siRNA sense strand
ggaaaggaaggaaucaaag

SEQ ID NO: 2005057 - RNA, 19 nt, Homo sapiens
  misc_RNA (1)...(19): siRNA sense strand
gagcaguaccuucggauca

SEQ ID NO: 2005058 - RNA, 19 nt, Homo sapiens
  misc_RNA (1)...(19): siRNA sense strand
ccaccagcgucuccuaaau

SEQ ID NO: 2005059 - RNA, 19 nt, Homo sapiens
  misc_RNA (1)...(19): siRNA sense strand
acaguuucauccagauuaa

SEQ ID NO: 2005060 - RNA, 19 nt, Homo sapiens
  misc_RNA (1)...(19): siRNA sense strand
ccaggccagucagaucuua

SEQ ID NO: 2005061 - RNA, 19 nt, Homo sapiens
  misc_RNA (1)...(19): siRNA sense strand
ggaaggaaucaaagaguca

SEQ ID NO: 2005062 - RNA, 19 nt, Homo sapiens
  misc_RNA (1)...(19): siRNA sense strand
gaugcagauuguagaguug

SEQ ID NO: 2005063 - RNA, 19 nt, Homo sapiens
  misc_RNA (1)...(19): siRNA sense strand
agaaauguauagacuccaa

SEQ ID NO: 2005064 - RNA, 19 nt, Homo sapiens
  misc_RNA (1)...(19): siRNA sense strand
ggaaauugacagcaugcaa

SEQ ID NO: 2005065 - RNA, 19 nt, Homo sapiens
  misc_RNA (1)...(19): siRNA sense strand
agacaaagccaaccucaca

SEQ ID NO: 2005066 - RNA, 19 nt, Homo sapiens
  misc_RNA (1)...(19): siRNA sense strand
ccaaagugcaagcuucaaa

SEQ ID NO: 2005067 - RNA, 19 nt, Homo sapiens
  misc_RNA (1)...(19): siRNA sense strand
gcucuggugccaaaguaua

SEQ ID NO: 2005068 - RNA, 19 nt, Homo sapiens
  misc_RNA (1)...(19): siRNA sense strand
ucaagcagccugucagugu

SEQ ID NO: 2005069 - RNA, 19 nt, Homo sapiens
  misc_RNA (1)...(19): siRNA sense strand
agaaauccaggaagaauug

SEQ ID NO: 2005070 - RNA, 19 nt, Homo sapiens
  misc_RNA (1)...(19): siRNA sense strand
gacuuuggaugcaggaaga

SEQ ID NO: 2005071 - RNA, 19 nt, Homo sapiens
  misc_RNA (1)...(19): siRNA sense strand
ccaggagucuguucgucaa

SEQ ID NO: 2005072 - RNA, 19 nt, Homo sapiens
  misc_RNA (1)...(19): siRNA sense strand
ccgcaaggcaccauggaua

SEQ ID NO: 2005073 - RNA, 19 nt, Homo sapiens
  misc_RNA (1)...(19): siRNA sense strand
gaaccggcagccugugaaa

SEQ ID NO: 2005074 - RNA, 19 nt, Homo sapiens
  misc_RNA (1)...(19): siRNA sense strand
aaaagaagccugugacuga

SEQ ID NO: 2005075 - RNA, 19 nt, Homo sapiens
  misc_RNA (1)...(19): siRNA sense strand
ggaacugggcagccuuauu

SEQ ID NO: 2005076 - RNA, 19 nt, Homo sapiens
  misc_RNA (1)...(19): siRNA sense strand
caggaagaauuggauaaau

SEQ ID NO: 2005077 - RNA, 19 nt, Homo sapiens
  misc_RNA (1)...(19): siRNA sense strand
gaacagagcacaauaagaa

SEQ ID NO: 2005078 - RNA, 19 nt, Homo sapiens
  misc_RNA (1)...(19): siRNA sense strand
gagaagagcuugaaguugu

SEQ ID NO: 2005079 - RNA, 19 nt, Homo sapiens
  misc_RNA (1)...(19): siRNA sense strand
ggaagugcguuuaugacaa

SEQ ID NO: 2005080 - RNA, 19 nt, Homo sapiens
  misc_RNA (1)...(19): siRNA sense strand
gcggagcacuguucaauuc

SEQ ID NO: 2005081 - RNA, 19 nt, Homo sapiens
  misc_RNA (1)...(19): siRNA sense strand
gaagugcguuuaugacaag

SEQ ID NO: 2005082 - RNA, 19 nt, Homo sapiens
  misc_RNA (1)...(19): siRNA sense strand
gaaaggacaaauggugaua

SEQ ID NO: 2005083 - RNA, 19 nt, Homo sapiens
  misc_RNA (1)...(19): siRNA sense strand
aaagagaccucgccucaag

SEQ ID NO: 2005084 - RNA, 19 nt, Homo sapiens
  misc_RNA (1)...(19): siRNA sense strand
uaucgaagcugccauaggu

SEQ ID NO: 2005085 - RNA, 19 nt, Homo sapiens
  misc_RNA (1)...(19): siRNA sense strand
ggacacacagaaauauaaa

SEQ ID NO: 2005086 - RNA, 19 nt, Homo sapiens
  misc_RNA (1)...(19): siRNA sense strand
ggcacgcucugcauaauga

SEQ ID NO: 2005087 - RNA, 19 nt, Homo sapiens
  misc_RNA (1)...(19): siRNA sense strand
ggauaucgaagcugccaua

SEQ ID NO: 2005088 - RNA, 19 nt, Homo sapiens
  misc_RNA (1)...(19): siRNA sense strand
cauaagaagcggaaagcua

SEQ ID NO: 2005089 - RNA, 19 nt, Homo sapiens
  misc_RNA (1)...(19): siRNA sense strand
gggacacacagaaauauaa

SEQ ID NO: 2005090 - RNA, 19 nt, Homo sapiens
  misc_RNA (1)...(19): siRNA sense strand
aagaguggcugcugaaaca

SEQ ID NO: 2005091 - RNA, 19 nt, Homo sapiens
  misc_RNA (1)...(19): siRNA sense strand
gaaggaaguggcagagaug

SEQ ID NO: 2005092 - RNA, 19 nt, Homo sapiens
  misc_RNA (1)...(19): siRNA sense strand
gggagaagagcuugaaguu

SEQ ID NO: 2005093 - RNA, 19 nt, Homo sapiens
  misc_RNA (1)...(19): siRNA sense strand
ggacaucgagcauaagaag

SEQ ID NO: 2005094 - RNA, 19 nt, Homo sapiens
  misc_RNA (1)...(19): siRNA sense strand
cuaaagguacuauuucuug

SEQ ID NO: 2005095 - RNA, 19 nt, Homo sapiens
  misc_RNA (1)...(19): siRNA sense strand
auaagaagcggaaagcuaa

SEQ ID NO: 2005096 - RNA, 19 nt, Homo sapiens
  misc_RNA (1)...(19): siRNA sense strand
gaaaggaaccaaggaaagg

SEQ ID NO: 2005097 - RNA, 19 nt, Homo sapiens
  misc_RNA (1)...(19): siRNA sense strand
aaggacaaauggugauauu

SEQ ID NO: 2005098 - RNA, 19 nt, Homo sapiens
  misc_RNA (1)...(19): siRNA sense strand
gaaccaaggaaaggacaaa

SEQ ID NO: 2005099 - RNA, 19 nt, Homo sapiens
  misc_RNA (1)...(19): siRNA sense strand
uaagaaaggaaccaaggaa

SEQ ID NO: 2005100 - RNA, 19 nt, Homo sapiens
  misc_RNA (1)...(19): siRNA sense strand
gagacuacuuucagagaag

SEQ ID NO: 2005101 - RNA, 19 nt, Homo sapiens
  misc_RNA (1)...(19): siRNA sense strand
ugagacuacuuucagagaa

SEQ ID NO: 2005102 - RNA, 19 nt, Homo sapiens
  misc_RNA (1)...(19): siRNA sense strand
ggagaagagcuugaaguug

SEQ ID NO: 2005103 - RNA, 19 nt, Homo sapiens
  misc_RNA (1)...(19): siRNA sense strand
cgaggaagacaucugguuu

SEQ ID NO: 2005104 - RNA, 19 nt, Homo sapiens
  misc_RNA (1)...(19): siRNA sense strand
gaggggacaucgagcauaa

SEQ ID NO: 2005105 - RNA, 19 nt, Homo sapiens
  misc_RNA (1)...(19): siRNA sense strand
gaggaagacaucugguuug

SEQ ID NO: 2005106 - RNA, 19 nt, Homo sapiens
  misc_RNA (1)...(19): siRNA sense strand
agaaggaaguggcagagau

SEQ ID NO: 2005107 - RNA, 19 nt, Homo sapiens
  misc_RNA (1)...(19): siRNA sense strand
ggaacagagcacaauaaga

SEQ ID NO: 2005108 - RNA, 19 nt, Homo sapiens
  misc_RNA (1)...(19): siRNA sense strand
ggacccaccggauaucgaa

SEQ ID NO: 2005109 - RNA, 19 nt, Homo sapiens
  misc_RNA (1)...(19): siRNA sense strand
aggaagacaucugguuuga

SEQ ID NO: 2005110 - RNA, 19 nt, Homo sapiens
  misc_RNA (1)...(19): siRNA sense strand
caaaggcaccagaagacuu

SEQ ID NO: 2005111 - RNA, 19 nt, Homo sapiens
  misc_RNA (1)...(19): siRNA sense strand
agaagagcuugaaguuguu

SEQ ID NO: 2005112 - RNA, 19 nt, Homo sapiens
  misc_RNA (1)...(19): siRNA sense strand
ccaaaauuauccagcaaaa

SEQ ID NO: 2005113 - RNA, 19 nt, Homo sapiens
  misc_RNA (1)...(19): siRNA sense strand
ggaaaggacaaauggugau

SEQ ID NO: 2005114 - RNA, 19 nt, Homo sapiens
  misc_RNA (1)...(19): siRNA sense strand
guggaacagagcacaauaa

SEQ ID NO: 2005115 - RNA, 19 nt, Homo sapiens
  misc_RNA (1)...(19): siRNA sense strand
gcagggagaagagcuugaa

SEQ ID NO: 2005116 - RNA, 19 nt, Homo sapiens
  misc_RNA (1)...(19): siRNA sense strand
gaccucgccucaagugaag

SEQ ID NO: 2005117 - RNA, 19 nt, Homo sapiens
  misc_RNA (1)...(19): siRNA sense strand
gcugaagggcagaauucua

SEQ ID NO: 2005118 - RNA, 19 nt, Homo sapiens
  misc_RNA (1)...(19): siRNA sense strand
ccaaggaaaggacaaaugg

SEQ ID NO: 2005119 - RNA, 19 nt, Homo sapiens
  misc_RNA (1)...(19): siRNA sense strand
gguacuauuucuugaucau

SEQ ID NO: 2005120 - RNA, 19 nt, Homo sapiens
  misc_RNA (1)...(19): siRNA sense strand
gcaagaguggcugcugaaa

SEQ ID NO: 2005121 - RNA, 19 nt, Homo sapiens
  misc_RNA (1)...(19): siRNA sense strand
gacgcucacucggaagaaa

SEQ ID NO: 2005122 - RNA, 19 nt, Homo sapiens
  misc_RNA (1)...(19): siRNA sense strand
gggaagugcguuuaugaca

SEQ ID NO: 2005123 - RNA, 19 nt, Homo sapiens
  misc_RNA (1)...(19): siRNA sense strand
gaagggcagaauucuagug

SEQ ID NO: 2005124 - RNA, 19 nt, Homo sapiens
  misc_RNA (1)...(19): siRNA sense strand
uuucaagagucaaguaaag

SEQ ID NO: 2005125 - RNA, 19 nt, Homo sapiens
  misc_RNA (1)...(19): siRNA sense strand
cggccaagauagcgaggaa

SEQ ID NO: 2005126 - RNA, 19 nt, Homo sapiens
  misc_RNA (1)...(19): siRNA sense strand
gagcauaagaagcggaaag

SEQ ID NO: 2005127 - RNA, 19 nt, Homo sapiens
  misc_RNA (1)...(19): siRNA sense strand
gaguggcugcugaaacaaa

SEQ ID NO: 2005128 - RNA, 19 nt, Homo sapiens
  misc_RNA (1)...(19): siRNA sense strand
gaggagaugccggcaggaa

SEQ ID NO: 2005129 - RNA, 19 nt, Homo sapiens
  misc_RNA (1)...(19): siRNA sense strand
gagcacaauaagaaaggaa

SEQ ID NO: 2005130 - RNA, 19 nt, Homo sapiens
  misc_RNA (1)...(19): siRNA sense strand
ggagcacuguucaauucag

SEQ ID NO: 2005131 - RNA, 19 nt, Homo sapiens
  misc_RNA (1)...(19): siRNA sense strand
auaaaccuuucaagaguca

SEQ ID NO: 2005132 - RNA, 19 nt, Homo sapiens
  misc_RNA (1)...(19): siRNA sense strand
uaugggaagugcguuuaug

SEQ ID NO: 2005133 - RNA, 19 nt, Homo sapiens
  misc_RNA (1)...(19): siRNA sense strand
aagaaaggaaccaaggaaa

SEQ ID NO: 2005134 - RNA, 19 nt, Homo sapiens
  misc_RNA (1)...(19): siRNA sense strand
gacaaguacgucaaaccaa

SEQ ID NO: 2005135 - RNA, 19 nt, Homo sapiens
  misc_RNA (1)...(19): siRNA sense strand
cgggacacacagaaauaua

SEQ ID NO: 2005136 - RNA, 19 nt, Homo sapiens
  misc_RNA (1)...(19): siRNA sense strand
agaaaagccucuugucauc

SEQ ID NO: 2005137 - RNA, 19 nt, Homo sapiens
  misc_RNA (1)...(19): siRNA sense strand
gccucagccucgugaaaga

SEQ ID NO: 2005138 - RNA, 19 nt, Homo sapiens
  misc_RNA (1)...(19): siRNA sense strand
agacuacuuucagagaaga

SEQ ID NO: 2005139 - RNA, 19 nt, Homo sapiens
  misc_RNA (1)...(19): siRNA sense strand
aagguacuauuucuugauc

SEQ ID NO: 2005140 - RNA, 19 nt, Homo sapiens
  misc_RNA (1)...(19): siRNA sense strand
ggagaugccggcaggaaaa

SEQ ID NO: 2005141 - RNA, 19 nt, Homo sapiens
  misc_RNA (1)...(19): siRNA sense strand
ggcuguacgucauggugaa

SEQ ID NO: 2005142 - RNA, 19 nt, Homo sapiens
  misc_RNA (1)...(19): siRNA sense strand
gaaccucaagcagggagaa

SEQ ID NO: 2005143 - RNA, 19 nt, Homo sapiens
  misc_RNA (1)...(19): siRNA sense strand
caagauagcgaggaaacag

SEQ ID NO: 2005144 - RNA, 19 nt, Homo sapiens
  misc_RNA (1)...(19): siRNA sense strand
agaccucgccucaagugaa

SEQ ID NO: 2005145 - RNA, 19 nt, Homo sapiens
  misc_RNA (1)...(19): siRNA sense strand
gcacuguucaauucaggau

SEQ ID NO: 2005146 - RNA, 19 nt, Homo sapiens
  misc_RNA (1)...(19): siRNA sense strand
agaaaggaaccaaggaaag

SEQ ID NO: 2005147 - RNA, 19 nt, Homo sapiens
  misc_RNA (1)...(19): siRNA sense strand
gcuaagccggguccuguca

SEQ ID NO: 2005148 - RNA, 19 nt, Homo sapiens
  misc_RNA (1)...(19): siRNA sense strand
cugaagggcagaauucuag

SEQ ID NO: 2005149 - RNA, 19 nt, Homo sapiens
  misc_RNA (1)...(19): siRNA sense strand
ccuuagccuuggacuguga

SEQ ID NO: 2005150 - RNA, 19 nt, Homo sapiens
  misc_RNA (1)...(19): siRNA sense strand
gugcguuuaugacaaguac

SEQ ID NO: 2005151 - RNA, 19 nt, Homo sapiens
  misc_RNA (1)...(19): siRNA sense strand
aaagaagauucgggacaca

SEQ ID NO: 2005152 - RNA, 19 nt, Homo sapiens
  misc_RNA (1)...(19): siRNA sense strand
gggcacgcucugcauaaug

SEQ ID NO: 2005153 - RNA, 19 nt, Homo sapiens
  misc_RNA (1)...(19): siRNA sense strand
caagaguggcugcugaaac

SEQ ID NO: 2005154 - RNA, 19 nt, Homo sapiens
  misc_RNA (1)...(19): siRNA sense strand
ccucuugucaucucucaga

SEQ ID NO: 2005155 - RNA, 19 nt, Homo sapiens
  misc_RNA (1)...(19): siRNA sense strand
gaugcugaagggcagaauu

SEQ ID NO: 2005156 - RNA, 19 nt, Homo sapiens
  misc_RNA (1)...(19): siRNA sense strand
gaagagcuugaaguuguuc

SEQ ID NO: 2005157 - RNA, 19 nt, Homo sapiens
  misc_RNA (1)...(19): siRNA sense strand
uaagccggguccugucaag

SEQ ID NO: 2005158 - RNA, 19 nt, Homo sapiens
  misc_RNA (1)...(19): siRNA sense strand
caccaaggccaguggaaca

SEQ ID NO: 2005159 - RNA, 19 nt, Homo sapiens
  misc_RNA (1)...(19): siRNA sense strand
gauagcgaggaaacaguug

SEQ ID NO: 2005160 - RNA, 19 nt, Homo sapiens
  misc_RNA (1)...(19): siRNA sense strand
aggaaacaguugggucaga

SEQ ID NO: 2005161 - RNA, 19 nt, Homo sapiens
  misc_RNA (1)...(19): siRNA sense strand
caagagucaaguaaagagu

SEQ ID NO: 2005162 - RNA, 19 nt, Homo sapiens
  misc_RNA (1)...(19): siRNA sense strand
ucucucagauggguuccaa

SEQ ID NO: 2005163 - RNA, 19 nt, Homo sapiens
  misc_RNA (1)...(19): siRNA sense strand
gauucgggacacacagaaa

SEQ ID NO: 2005164 - RNA, 19 nt, Homo sapiens
  misc_RNA (1)...(19): siRNA sense strand
guaugggaagugcguuuau

SEQ ID NO: 2005165 - RNA, 19 nt, Homo sapiens
  misc_RNA (1)...(19): siRNA sense strand
uguccaucgugaaccagua

SEQ ID NO: 2005166 - RNA, 19 nt, Homo sapiens
  misc_RNA (1)...(19): siRNA sense strand
gaaauacaguuaagaguga

SEQ ID NO: 2005167 - RNA, 19 nt, Homo sapiens
  misc_RNA (1)...(19): siRNA sense strand
gaauuuaucuacacagguu

SEQ ID NO: 2005168 - RNA, 19 nt, Homo sapiens
  misc_RNA (1)...(19): siRNA sense strand
ggagauccgucaaacuuaa

SEQ ID NO: 2005169 - RNA, 19 nt, Homo sapiens
  misc_RNA (1)...(19): siRNA sense strand
cagagcaacugcagaauuu

SEQ ID NO: 2005170 - RNA, 19 nt, Homo sapiens
  misc_RNA (1)...(19): siRNA sense strand
ggagcgaccuuucaaaugu

SEQ ID NO: 2005171 - RNA, 19 nt, Homo sapiens
  misc_RNA (1)...(19): siRNA sense strand
gcaaaucuuucacagcaaa

SEQ ID NO: 2005172 - RNA, 19 nt, Homo sapiens
  misc_RNA (1)...(19): siRNA sense strand
gaaauucagcuucucguaa

SEQ ID NO: 2005173 - RNA, 19 nt, Homo sapiens
  misc_RNA (1)...(19): siRNA sense strand
cagaagaggucaggaauau

SEQ ID NO: 2005174 - RNA, 19 nt, Homo sapiens
  misc_RNA (1)...(19): siRNA sense strand
gaagaggucaggaauauuc

SEQ ID NO: 2005175 - RNA, 19 nt, Homo sapiens
  misc_RNA (1)...(19): siRNA sense strand
gcaaggcucugaccaccaa

SEQ ID NO: 2005176 - RNA, 19 nt, Homo sapiens
  misc_RNA (1)...(19): siRNA sense strand
ggaaaucggccaauccauu

SEQ ID NO: 2005177 - RNA, 19 nt, Homo sapiens
  misc_RNA (1)...(19): siRNA sense strand
gaacaaauccuggcuacug

SEQ ID NO: 2005178 - RNA, 19 nt, Homo sapiens
  misc_RNA (1)...(19): siRNA sense strand
aaacagaggagcuccauuu

SEQ ID NO: 2005179 - RNA, 19 nt, Homo sapiens
  misc_RNA (1)...(19): siRNA sense strand
gagcgaccuuucaaaugua

SEQ ID NO: 2005180 - RNA, 19 nt, Homo sapiens
  misc_RNA (1)...(19): siRNA sense strand
gagaagccauuuacuugug

SEQ ID NO: 2005181 - RNA, 19 nt, Homo sapiens
  misc_RNA (1)...(19): siRNA sense strand
gaauacuucucaaugaugu

SEQ ID NO: 2005182 - RNA, 19 nt, Homo sapiens
  misc_RNA (1)...(19): siRNA sense strand
ccgucaaacuuaaagauua

SEQ ID NO: 2005183 - RNA, 19 nt, Homo sapiens
  misc_RNA (1)...(19): siRNA sense strand
guggcaaggucuuuaagua

SEQ ID NO: 2005184 - RNA, 19 nt, Homo sapiens
  misc_RNA (1)...(19): siRNA sense strand
ggaauauucuucagcuaca

SEQ ID NO: 2005185 - RNA, 19 nt, Homo sapiens
  misc_RNA (1)...(19): siRNA sense strand
gaagaaauacaguuaagag

SEQ ID NO: 2005186 - RNA, 19 nt, Homo sapiens
  misc_RNA (1)...(19): siRNA sense strand
gagcaacugcagaauuuaa

SEQ ID NO: 2005187 - RNA, 19 nt, Homo sapiens
  misc_RNA (1)...(19): siRNA sense strand
ugaaaucuguggcaaaucu

SEQ ID NO: 2005188 - RNA, 19 nt, Homo sapiens
  misc_RNA (1)...(19): siRNA sense strand
cuugaaggcucacuugaaa

SEQ ID NO: 2005189 - RNA, 19 nt, Homo sapiens
  misc_RNA (1)...(19): siRNA sense strand
gcaaggucuuuaaguacaa

SEQ ID NO: 2005190 - RNA, 19 nt, Homo sapiens
  misc_RNA (1)...(19): siRNA sense strand
ucauacaggccacucauua

SEQ ID NO: 2005191 - RNA, 19 nt, Homo sapiens
  misc_RNA (1)...(19): siRNA sense strand
cagaauccaucgaggagaa

SEQ ID NO: 2005192 - RNA, 19 nt, Homo sapiens
  misc_RNA (1)...(19): siRNA sense strand
ggagcaaacagaacacauu

SEQ ID NO: 2005193 - RNA, 19 nt, Homo sapiens
  misc_RNA (1)...(19): siRNA sense strand
uaaaggagacaguggugua

SEQ ID NO: 2005194 - RNA, 19 nt, Homo sapiens
  misc_RNA (1)...(19): siRNA sense strand
ggaaauucagcuucucgua

SEQ ID NO: 2005195 - RNA, 19 nt, Homo sapiens
  misc_RNA (1)...(19): siRNA sense strand
aaagagccauuaccgaguu

SEQ ID NO: 2005196 - RNA, 19 nt, Homo sapiens
  misc_RNA (1)...(19): siRNA sense strand
gugagaagccauuuacuug

SEQ ID NO: 2005197 - RNA, 19 nt, Homo sapiens
  misc_RNA (1)...(19): siRNA sense strand
auucagagccucaauauga

SEQ ID NO: 2005198 - RNA, 19 nt, Homo sapiens
  misc_RNA (1)...(19): siRNA sense strand
aaucggagccuacuuguga

SEQ ID NO: 2005199 - RNA, 19 nt, Homo sapiens
  misc_RNA (1)...(19): siRNA sense strand
uaaccgauucuguacauaa

SEQ ID NO: 2005200 - RNA, 19 nt, Homo sapiens
  misc_RNA (1)...(19): siRNA sense strand
acacagacuuccaaaauaa

SEQ ID NO: 2005201 - RNA, 19 nt, Homo sapiens
  misc_RNA (1)...(19): siRNA sense strand
agaacuggcugcagaggaa

SEQ ID NO: 2005202 - RNA, 19 nt, Homo sapiens
  misc_RNA (1)...(19): siRNA sense strand
ggcaaggucuuuaaguaca

SEQ ID NO: 2005203 - RNA, 19 nt, Homo sapiens
  misc_RNA (1)...(19): siRNA sense strand
agaaaggcuuccucuguga

SEQ ID NO: 2005204 - RNA, 19 nt, Homo sapiens
  misc_RNA (1)...(19): siRNA sense strand
ccacaaagccuuacuugcu

SEQ ID NO: 2005205 - RNA, 19 nt, Homo sapiens
  misc_RNA (1)...(19): siRNA sense strand
cagaggagcuccauuuagc

SEQ ID NO: 2005206 - RNA, 19 nt, Homo sapiens
  misc_RNA (1)...(19): siRNA sense strand
gcagagaguucccaaaaca

SEQ ID NO: 2005207 - RNA, 19 nt, Homo sapiens
  misc_RNA (1)...(19): siRNA sense strand
agacugccaucgcaaauuc

SEQ ID NO: 2005208 - RNA, 19 nt, Homo sapiens
  misc_RNA (1)...(19): siRNA sense strand
gaggaagaaauacaguuaa

SEQ ID NO: 2005209 - RNA, 19 nt, Homo sapiens
  misc_RNA (1)...(19): siRNA sense strand
agaggaagaaauacaguua

SEQ ID NO: 2005210 - RNA, 19 nt, Homo sapiens
  misc_RNA (1)...(19): siRNA sense strand
gugaauacuucucaaugau

SEQ ID NO: 2005211 - RNA, 19 nt, Homo sapiens
  misc_RNA (1)...(19): siRNA sense strand
cuacacagguuaucuccau

SEQ ID NO: 2005212 - RNA, 19 nt, Homo sapiens
  misc_RNA (1)...(19): siRNA sense strand
gaggaaaugccaguugaaa

SEQ ID NO: 2005213 - RNA, 19 nt, Homo sapiens
  misc_RNA (1)...(19): siRNA sense strand
agugaauacuucucaauga

SEQ ID NO: 2005214 - RNA, 19 nt, Homo sapiens
  misc_RNA (1)...(19): siRNA sense strand
gaccaggcugcuaaucuua

SEQ ID NO: 2005215 - RNA, 19 nt, Homo sapiens
  misc_RNA (1)...(19): siRNA sense strand
gcagacaccuuugguaucc

SEQ ID NO: 2005216 - RNA, 19 nt, Homo sapiens
  misc_RNA (1)...(19): siRNA sense strand
ggugagaagccauuuacuu

SEQ ID NO: 2005217 - RNA, 19 nt, Homo sapiens
  misc_RNA (1)...(19): siRNA sense strand
ggaugugucucagcuaaag

SEQ ID NO: 2005218 - RNA, 19 nt, Homo sapiens
  misc_RNA (1)...(19): siRNA sense strand
caaagacugccaucgcaaa

SEQ ID NO: 2005219 - RNA, 19 nt, Homo sapiens
  misc_RNA (1)...(19): siRNA sense strand
ggaagaaauacaguuaaga

SEQ ID NO: 2005220 - RNA, 19 nt, Homo sapiens
  misc_RNA (1)...(19): siRNA sense strand
ugucucagcuaaagaaaca

SEQ ID NO: 2005221 - RNA, 19 nt, Homo sapiens
  misc_RNA (1)...(19): siRNA sense strand
gagcaaacagaacacauuc

SEQ ID NO: 2005222 - RNA, 19 nt, Homo sapiens
  misc_RNA (1)...(19): siRNA sense strand
agaccaggcugcuaaucuu

SEQ ID NO: 2005223 - RNA, 19 nt, Homo sapiens
  misc_RNA (1)...(19): siRNA sense strand
gaacacacacaggugagaa

SEQ ID NO: 2005224 - RNA, 19 nt, Homo sapiens
  misc_RNA (1)...(19): siRNA sense strand
aaagaaacaucugcgaaca

SEQ ID NO: 2005225 - RNA, 19 nt, Homo sapiens
  misc_RNA (1)...(19): siRNA sense strand
cagaacagacagcuaaaga

SEQ ID NO: 2005226 - RNA, 19 nt, Homo sapiens
  misc_RNA (1)...(19): siRNA sense strand
caacuugaaggcucacuug

SEQ ID NO: 2005227 - RNA, 19 nt, Homo sapiens
  misc_RNA (1)...(19): siRNA sense strand
guacugaaugagcaaauug

SEQ ID NO: 2005228 - RNA, 19 nt, Homo sapiens
  misc_RNA (1)...(19): siRNA sense strand
ccagagcaacugcagaauu

SEQ ID NO: 2005229 - RNA, 19 nt, Homo sapiens
  misc_RNA (1)...(19): siRNA sense strand
agaaacaucugcgaacaca

SEQ ID NO: 2005230 - RNA, 19 nt, Homo sapiens
  misc_RNA (1)...(19): siRNA sense strand
gaccaugguucagccaaga

SEQ ID NO: 2005231 - RNA, 19 nt, Homo sapiens
  misc_RNA (1)...(19): siRNA sense strand
gaagccauuuacuugugaa

SEQ ID NO: 2005232 - RNA, 19 nt, Homo sapiens
  misc_RNA (1)...(19): siRNA sense strand
gcaguaguaauacagaaga

SEQ ID NO: 2005233 - RNA, 19 nt, Homo sapiens
  misc_RNA (1)...(19): siRNA sense strand
ucaaugauguuugcagaag

SEQ ID NO: 2005234 - RNA, 19 nt, Homo sapiens
  misc_RNA (1)...(19): siRNA sense strand
caaugauguuugcagaaga

SEQ ID NO: 2005235 - RNA, 19 nt, Homo sapiens
  misc_RNA (1)...(19): siRNA sense strand
aagaggaucuguggaagga

SEQ ID NO: 2005236 - RNA, 19 nt, Homo sapiens
  misc_RNA (1)...(19): siRNA sense strand
gcagcuuguuguacacuca

SEQ ID NO: 2005237 - RNA, 19 nt, Homo sapiens
  misc_RNA (1)...(19): siRNA sense strand
guaaccgauucuguacaua

SEQ ID NO: 2005238 - RNA, 19 nt, Homo sapiens
  misc_RNA (1)...(19): siRNA sense strand
ucucguaaccgauucugua

SEQ ID NO: 2005239 - RNA, 19 nt, Homo sapiens
  misc_RNA (1)...(19): siRNA sense strand
ugugaaaucuguggcaaau

SEQ ID NO: 2005240 - RNA, 19 nt, Homo sapiens
  misc_RNA (1)...(19): siRNA sense strand
gccaagaggaucuguggaa

SEQ ID NO: 2005241 - RNA, 19 nt, Homo sapiens
  misc_RNA (1)...(19): siRNA sense strand
cagggaaucagcauuguga

SEQ ID NO: 2005242 - RNA, 19 nt, Homo sapiens
  misc_RNA (1)...(19): siRNA sense strand
gcaaacagaacacauucag

SEQ ID NO: 2005243 - RNA, 19 nt, Homo sapiens
  misc_RNA (1)...(19): siRNA sense strand
guauccugcuggaauuuau

SEQ ID NO: 2005244 - RNA, 19 nt, Homo sapiens
  misc_RNA (1)...(19): siRNA sense strand
ccauuuagcuacaaguacu

SEQ ID NO: 2005245 - RNA, 19 nt, Homo sapiens
  misc_RNA (1)...(19): siRNA sense strand
ggaaacacuggaacaucuu

SEQ ID NO: 2005246 - RNA, 19 nt, Homo sapiens
  misc_RNA (1)...(19): siRNA sense strand
agaagccauuuacuuguga

SEQ ID NO: 2005247 - RNA, 19 nt, Homo sapiens
  misc_RNA (1)...(19): siRNA sense strand
gggagcgaccuuucaaaug

SEQ ID NO: 2005248 - RNA, 19 nt, Homo sapiens
  misc_RNA (1)...(19): siRNA sense strand
aaaagucuaugaccuggua

SEQ ID NO: 2005249 - RNA, 19 nt, Homo sapiens
  misc_RNA (1)...(19): siRNA sense strand
gaggaggaaaugccaguug

SEQ ID NO: 2005250 - RNA, 19 nt, Homo sapiens
  misc_RNA (1)...(19): siRNA sense strand
cguaaccgauucuguacau

SEQ ID NO: 2005251 - RNA, 19 nt, Homo sapiens
  misc_RNA (1)...(19): siRNA sense strand
ggaggaaaugccaguugaa

SEQ ID NO: 2005252 - RNA, 19 nt, Homo sapiens
  misc_RNA (1)...(19): siRNA sense strand
gaaaaguacagaacaaauc

SEQ ID NO: 2005253 - RNA, 19 nt, Homo sapiens
  misc_RNA (1)...(19): siRNA sense strand
uuacuuuaaucguggagaa

SEQ ID NO: 2005254 - RNA, 19 nt, Homo sapiens
  misc_RNA (1)...(19): siRNA sense strand
acagaagaggucaggaaua

SEQ ID NO: 2005255 - RNA, 19 nt, Homo sapiens
  misc_RNA (1)...(19): siRNA sense strand
cagcauuucuggcaguagu

SEQ ID NO: 2005256 - RNA, 19 nt, Homo sapiens
  misc_RNA (1)...(19): siRNA sense strand
ggcuuccucugugacauua

SEQ ID NO: 2005257 - RNA, 19 nt, Homo sapiens
  misc_RNA (1)...(19): siRNA sense strand
ggacagaagucuuuuaccu

SEQ ID NO: 2005258 - RNA, 19 nt, Homo sapiens
  misc_RNA (1)...(19): siRNA sense strand
aggaggaaaugccaguuga

SEQ ID NO: 2005259 - RNA, 19 nt, Homo sapiens
  misc_RNA (1)...(19): siRNA sense strand
gcaggaggagaaaucagaa

SEQ ID NO: 2005260 - RNA, 19 nt, Homo sapiens
  misc_RNA (1)...(19): siRNA sense strand
gguauccugcuggaauuua

SEQ ID NO: 2005261 - RNA, 19 nt, Homo sapiens
  misc_RNA (1)...(19): siRNA sense strand
caggaauauucuucagcua

SEQ ID NO: 2005262 - RNA, 19 nt, Homo sapiens
  misc_RNA (1)...(19): siRNA sense strand
gaaacacuggaacaucuuc

SEQ ID NO: 2005263 - RNA, 19 nt, Homo sapiens
  misc_RNA (1)...(19): siRNA sense strand
aggaaacacuggaacaucu

SEQ ID NO: 2005264 - RNA, 19 nt, Homo sapiens
  misc_RNA (1)...(19): siRNA sense strand
aaauucagcuucucguaac

SEQ ID NO: 2005265 - RNA, 19 nt, Homo sapiens
  misc_RNA (1)...(19): siRNA sense strand
cgggagagcaggaaauuca

SEQ ID NO: 2005266 - RNA, 19 nt, Homo sapiens
  misc_RNA (1)...(19): siRNA sense strand
ccaccuacgucaccaagga

SEQ ID NO: 2005267 - RNA, 19 nt, Homo sapiens
  misc_RNA (1)...(19): siRNA sense strand
acacgcugcucaccaggaa

SEQ ID NO: 2005268 - RNA, 19 nt, Homo sapiens
  misc_RNA (1)...(19): siRNA sense strand
gcaucgugcugcucuucug

SEQ ID NO: 2005269 - RNA, 19 nt, Homo sapiens
  misc_RNA (1)...(19): siRNA sense strand
gugcgguggccuccaugua

SEQ ID NO: 2005270 - RNA, 19 nt, Homo sapiens
  misc_RNA (1)...(19): siRNA sense strand
gcucuucggccuggacuuc

SEQ ID NO: 2005271 - RNA, 19 nt, Homo sapiens
  misc_RNA (1)...(19): siRNA sense strand
gcaagaagaugcagaagau

SEQ ID NO: 2005272 - RNA, 19 nt, Homo sapiens
  misc_RNA (1)...(19): siRNA sense strand
caaagacacuucucggaua

SEQ ID NO: 2005273 - RNA, 19 nt, Homo sapiens
  misc_RNA (1)...(19): siRNA sense strand
gaacugcgucggucuuuaa

SEQ ID NO: 2005274 - RNA, 19 nt, Homo sapiens
  misc_RNA (1)...(19): siRNA sense strand
ggagagagcuguguagucu

SEQ ID NO: 2005275 - RNA, 19 nt, Homo sapiens
  misc_RNA (1)...(19): siRNA sense strand
gaagcagaguguagacaga

SEQ ID NO: 2005276 - RNA, 19 nt, Homo sapiens
  misc_RNA (1)...(19): siRNA sense strand
ggacaaagugcaagaagau

SEQ ID NO: 2005277 - RNA, 19 nt, Homo sapiens
  misc_RNA (1)...(19): siRNA sense strand
ucaagcaucucagaaauuc

SEQ ID NO: 2005278 - RNA, 19 nt, Homo sapiens
  misc_RNA (1)...(19): siRNA sense strand
gaagugauggacaaaguga

SEQ ID NO: 2005279 - RNA, 19 nt, Homo sapiens
  misc_RNA (1)...(19): siRNA sense strand
gcacagacccagcucagau

SEQ ID NO: 2005280 - RNA, 19 nt, Homo sapiens
  misc_RNA (1)...(19): siRNA sense strand
caaguuguguuggaaguga

SEQ ID NO: 2005281 - RNA, 19 nt, Homo sapiens
  misc_RNA (1)...(19): siRNA sense strand
guucaagcaucucagaaau

SEQ ID NO: 2005282 - RNA, 19 nt, Homo sapiens
  misc_RNA (1)...(19): siRNA sense strand
gaaagagcagagcaagaaa

SEQ ID NO: 2005283 - RNA, 19 nt, Homo sapiens
  misc_RNA (1)...(19): siRNA sense strand
gaaagaagagaagcaguuc

SEQ ID NO: 2005284 - RNA, 19 nt, Homo sapiens
  misc_RNA (1)...(19): siRNA sense strand
gccaagaggaucacaaaga

SEQ ID NO: 2005285 - RNA, 19 nt, Homo sapiens
  misc_RNA (1)...(19): siRNA sense strand
agaaagagcagagcaagaa

SEQ ID NO: 2005286 - RNA, 19 nt, Homo sapiens
  misc_RNA (1)...(19): siRNA sense strand
ccaagaggaucacaaagac

SEQ ID NO: 2005287 - RNA, 19 nt, Homo sapiens
  misc_RNA (1)...(19): siRNA sense strand
cccaaacucuggauucgaa

SEQ ID NO: 2005288 - RNA, 19 nt, Homo sapiens
  misc_RNA (1)...(19): siRNA sense strand
cacauucucugcccauaga

SEQ ID NO: 2005289 - RNA, 19 nt, Homo sapiens
  misc_RNA (1)...(19): siRNA sense strand
gcggaggauugaaauggaa

SEQ ID NO: 2005290 - RNA, 19 nt, Homo sapiens
  misc_RNA (1)...(19): siRNA sense strand
gaaauggaagcagagugua

SEQ ID NO: 2005291 - RNA, 19 nt, Homo sapiens
  misc_RNA (1)...(19): siRNA sense strand
ugaaagaagagaagcaguu

SEQ ID NO: 2005292 - RNA, 19 nt, Homo sapiens
  misc_RNA (1)...(19): siRNA sense strand
ggacaaagugaaagaagag

SEQ ID NO: 2005293 - RNA, 19 nt, Homo sapiens
  misc_RNA (1)...(19): siRNA sense strand
ccagcaagacucugauuug

SEQ ID NO: 2005294 - RNA, 19 nt, Homo sapiens
  misc_RNA (1)...(19): siRNA sense strand
gaggauguccacagugcua

SEQ ID NO: 2005295 - RNA, 19 nt, Homo sapiens
  misc_RNA (1)...(19): siRNA sense strand
gcauugauuuccagcucuu

SEQ ID NO: 2005296 - RNA, 19 nt, Homo sapiens
  misc_RNA (1)...(19): siRNA sense strand
ggaccaacaagacuaguuc

SEQ ID NO: 2005297 - RNA, 19 nt, Homo sapiens
  misc_RNA (1)...(19): siRNA sense strand
cagcaagacucugauuugg

SEQ ID NO: 2005298 - RNA, 19 nt, Homo sapiens
  misc_RNA (1)...(19): siRNA sense strand
uggaggaggugcaaagcaa

SEQ ID NO: 2005299 - RNA, 19 nt, Homo sapiens
  misc_RNA (1)...(19): siRNA sense strand
cagccaaggaugagacuuu

SEQ ID NO: 2005300 - RNA, 19 nt, Homo sapiens
  misc_RNA (1)...(19): siRNA sense strand
gcaauucucacaggaagau

SEQ ID NO: 2005301 - RNA, 19 nt, Homo sapiens
  misc_RNA (1)...(19): siRNA sense strand
ucccacauguucuggaauu

SEQ ID NO: 2005302 - RNA, 19 nt, Homo sapiens
  misc_RNA (1)...(19): siRNA sense strand
uggacaaagugaaagaaga

SEQ ID NO: 2005303 - RNA, 19 nt, Homo sapiens
  misc_RNA (1)...(19): siRNA sense strand
caucccacauguucuggaa

SEQ ID NO: 2005304 - RNA, 19 nt, Homo sapiens
  misc_RNA (1)...(19): siRNA sense strand
gaaacacagcagaggaugu

SEQ ID NO: 2005305 - RNA, 19 nt, Homo sapiens
  misc_RNA (1)...(19): siRNA sense strand
agaacugcgucggucuuua

SEQ ID NO: 2005306 - RNA, 19 nt, Homo sapiens
  misc_RNA (1)...(19): siRNA sense strand
aaagacacuucucggauac

SEQ ID NO: 2005307 - RNA, 19 nt, Homo sapiens
  misc_RNA (1)...(19): siRNA sense strand
ggaagugauggacaaagug

SEQ ID NO: 2005308 - RNA, 19 nt, Homo sapiens
  misc_RNA (1)...(19): siRNA sense strand
uggaagugauggacaaagu

SEQ ID NO: 2005309 - RNA, 19 nt, Homo sapiens
  misc_RNA (1)...(19): siRNA sense strand
uggacaaagugcaagaaga

SEQ ID NO: 2005310 - RNA, 19 nt, Homo sapiens
  misc_RNA (1)...(19): siRNA sense strand
ccaagggcauugauuucca

SEQ ID NO: 2005311 - RNA, 19 nt, Homo sapiens
  misc_RNA (1)...(19): siRNA sense strand
gaguguagacagaccagaa

SEQ ID NO: 2005312 - RNA, 19 nt, Homo sapiens
  misc_RNA (1)...(19): siRNA sense strand
guacccuguugcacacauu

SEQ ID NO: 2005313 - RNA, 19 nt, Homo sapiens
  misc_RNA (1)...(19): siRNA sense strand
ucuccaagaugugucugua

SEQ ID NO: 2005314 - RNA, 19 nt, Homo sapiens
  misc_RNA (1)...(19): siRNA sense strand
cacagacccagcucagaua

SEQ ID NO: 2005315 - RNA, 19 nt, Homo sapiens
  misc_RNA (1)...(19): siRNA sense strand
caaagugaaagaagagaag

SEQ ID NO: 2005316 - RNA, 19 nt, Homo sapiens
  misc_RNA (1)...(19): siRNA sense strand
agaaauggaagcagagugu

SEQ ID NO: 2005317 - RNA, 19 nt, Homo sapiens
  misc_RNA (1)...(19): siRNA sense strand
ucacccagcagaaauggaa

SEQ ID NO: 2005318 - RNA, 19 nt, Homo sapiens
  misc_RNA (1)...(19): siRNA sense strand
cagcucagauaaggagaga

SEQ ID NO: 2005319 - RNA, 19 nt, Homo sapiens
  misc_RNA (1)...(19): siRNA sense strand
uuaagcaggugcaaacacu

SEQ ID NO: 2005320 - RNA, 19 nt, Homo sapiens
  misc_RNA (1)...(19): siRNA sense strand
guucacaccaucccacaug

SEQ ID NO: 2005321 - RNA, 19 nt, Homo sapiens
  misc_RNA (1)...(19): siRNA sense strand
aggaugagacuuucuggaa

SEQ ID NO: 2005322 - RNA, 19 nt, Homo sapiens
  misc_RNA (1)...(19): siRNA sense strand
guucuggaauugcaaccau

SEQ ID NO: 2005323 - RNA, 19 nt, Homo sapiens
  misc_RNA (1)...(19): siRNA sense strand
ccucuucagucugggcuuu

SEQ ID NO: 2005324 - RNA, 19 nt, Homo sapiens
  misc_RNA (1)...(19): siRNA sense strand
ggccaagggcauugauuuc

SEQ ID NO: 2005325 - RNA, 19 nt, Homo sapiens
  misc_RNA (1)...(19): siRNA sense strand
aagacuaguucaagcaucu

SEQ ID NO: 2005326 - RNA, 19 nt, Homo sapiens
  misc_RNA (1)...(19): siRNA sense strand
uccaagaugugucuguaca

SEQ ID NO: 2005327 - RNA, 19 nt, Homo sapiens
  misc_RNA (1)...(19): siRNA sense strand
cggaaagccaucuccaaga

SEQ ID NO: 2005328 - RNA, 19 nt, Homo sapiens
  misc_RNA (1)...(19): siRNA sense strand
gaauugcaaccauccaacu

SEQ ID NO: 2005329 - RNA, 19 nt, Homo sapiens
  misc_RNA (1)...(19): siRNA sense strand
acaggacacuuuugacuug

SEQ ID NO: 2005330 - RNA, 19 nt, Homo sapiens
  misc_RNA (1)...(19): siRNA sense strand
agacccagcucagauaagg

SEQ ID NO: 2005331 - RNA, 19 nt, Homo sapiens
  misc_RNA (1)...(19): siRNA sense strand
cugcugaggguaagaaguu

SEQ ID NO: 2005332 - RNA, 19 nt, Homo sapiens
  misc_RNA (1)...(19): siRNA sense strand
aagaagaugcagaagaugu

SEQ ID NO: 2005333 - RNA, 19 nt, Homo sapiens
  misc_RNA (1)...(19): siRNA sense strand
aagagcagagcaagaaaga

SEQ ID NO: 2005334 - RNA, 19 nt, Homo sapiens
  misc_RNA (1)...(19): siRNA sense strand
ccaacaagacuaguucaag

SEQ ID NO: 2005335 - RNA, 19 nt, Homo sapiens
  misc_RNA (1)...(19): siRNA sense strand
ggaagaccccugccucaug

SEQ ID NO: 2005336 - RNA, 19 nt, Homo sapiens
  misc_RNA (1)...(19): siRNA sense strand
cucaugggcaggaagguua

SEQ ID NO: 2005337 - RNA, 19 nt, Homo sapiens
  misc_RNA (1)...(19): siRNA sense strand
ccaaggaugagacuuucug

SEQ ID NO: 2005338 - RNA, 19 nt, Homo sapiens
  misc_RNA (1)...(19): siRNA sense strand
gauaaggagagagcugugu

SEQ ID NO: 2005339 - RNA, 19 nt, Homo sapiens
  misc_RNA (1)...(19): siRNA sense strand
gaagcaguuccuccagcaa

SEQ ID NO: 2005340 - RNA, 19 nt, Homo sapiens
  misc_RNA (1)...(19): siRNA sense strand
gauggacaaagugaaagaa

SEQ ID NO: 2005341 - RNA, 19 nt, Homo sapiens
  misc_RNA (1)...(19): siRNA sense strand
caggugcggaggauugaaa

SEQ ID NO: 2005342 - RNA, 19 nt, Homo sapiens
  misc_RNA (1)...(19): siRNA sense strand
aaacacagcagaggauguc

SEQ ID NO: 2005343 - RNA, 19 nt, Homo sapiens
  misc_RNA (1)...(19): siRNA sense strand
cacauguucuggaauugca

SEQ ID NO: 2005344 - RNA, 19 nt, Homo sapiens
  misc_RNA (1)...(19): siRNA sense strand
gugcaaacacuggcuguca

SEQ ID NO: 2005345 - RNA, 19 nt, Homo sapiens
  misc_RNA (1)...(19): siRNA sense strand
cagagaccgccuucggaaa

SEQ ID NO: 2005346 - RNA, 19 nt, Homo sapiens
  misc_RNA (1)...(19): siRNA sense strand
gggaccaacaagacuaguu

SEQ ID NO: 2005347 - RNA, 19 nt, Homo sapiens
  misc_RNA (1)...(19): siRNA sense strand
guccaucacccagcagaaa

SEQ ID NO: 2005348 - RNA, 19 nt, Homo sapiens
  misc_RNA (1)...(19): siRNA sense strand
gagagagcuguguagucua

SEQ ID NO: 2005349 - RNA, 19 nt, Homo sapiens
  misc_RNA (1)...(19): siRNA sense strand
cacacauucucugcccaua

SEQ ID NO: 2005350 - RNA, 19 nt, Homo sapiens
  misc_RNA (1)...(19): siRNA sense strand
gcaaacacuggcugucacu

SEQ ID NO: 2005351 - RNA, 19 nt, Homo sapiens
  misc_RNA (1)...(19): siRNA sense strand
gaggaggugcaaagcaaca

SEQ ID NO: 2005352 - RNA, 19 nt, Homo sapiens
  misc_RNA (1)...(19): siRNA sense strand
cagaacugcgucggucuuu

SEQ ID NO: 2005353 - RNA, 19 nt, Homo sapiens
  misc_RNA (1)...(19): siRNA sense strand
aaacccauccagccaagga

SEQ ID NO: 2005354 - RNA, 19 nt, Homo sapiens
  misc_RNA (1)...(19): siRNA sense strand
auaaggagagagcugugua

SEQ ID NO: 2005355 - RNA, 19 nt, Homo sapiens
  misc_RNA (1)...(19): siRNA sense strand
caagaggaucacaaagaca

SEQ ID NO: 2005356 - RNA, 19 nt, Homo sapiens
  misc_RNA (1)...(19): siRNA sense strand
ucuucugucucuacuccua

SEQ ID NO: 2005357 - RNA, 19 nt, Homo sapiens
  misc_RNA (1)...(19): siRNA sense strand
gaugccuucuucugucucu

SEQ ID NO: 2005358 - RNA, 19 nt, Homo sapiens
  misc_RNA (1)...(19): siRNA sense strand
aggccaagggcauugauuu

SEQ ID NO: 2005359 - RNA, 19 nt, Homo sapiens
  misc_RNA (1)...(19): siRNA sense strand
gcagaaauggaagcagagu

SEQ ID NO: 2005360 - RNA, 19 nt, Homo sapiens
  misc_RNA (1)...(19): siRNA sense strand
acagacccagcucagauaa

SEQ ID NO: 2005361 - RNA, 19 nt, Homo sapiens
  misc_RNA (1)...(19): siRNA sense strand
gcuagcaccaucccaaacu

SEQ ID NO: 2005362 - RNA, 19 nt, Homo sapiens
  misc_RNA (1)...(19): siRNA sense strand
acaaagugaaagaagagaa

SEQ ID NO: 2005363 - RNA, 19 nt, Homo sapiens
  misc_RNA (1)...(19): siRNA sense strand
uguuggaagugauggacaa

SEQ ID NO: 2005364 - RNA, 19 nt, Homo sapiens
  misc_RNA (1)...(19): siRNA sense strand
uggccaagaggaucacaaa

SEQ ID NO: 2005365 - RNA, 19 nt, Homo sapiens
  misc_RNA (1)...(19): siRNA sense strand
ugucucuacuccuaugugu

SEQ ID NO: 2005366 - RNA, 19 nt, Homo sapiens
  misc_RNA (1)...(19): siRNA sense strand
gcaagggccugcucucaga

SEQ ID NO: 2005367 - RNA, 19 nt, Homo sapiens
  misc_RNA (1)...(19): siRNA sense strand
gcguagagcucccgguaga

SEQ ID NO: 2005368 - RNA, 19 nt, Homo sapiens
  misc_RNA (1)...(19): siRNA sense strand
gccaagcugucaccgaaga

SEQ ID NO: 2005369 - RNA, 19 nt, Homo sapiens
  misc_RNA (1)...(19): siRNA sense strand
gcucuaccgccaccuguaa

SEQ ID NO: 2005370 - RNA, 19 nt, Homo sapiens
  misc_RNA (1)...(19): siRNA sense strand
ggaggacgacucuugaaag

SEQ ID NO: 2005371 - RNA, 19 nt, Homo sapiens
  misc_RNA (1)...(19): siRNA sense strand
guagagcucccgguagaug

SEQ ID NO: 2005372 - RNA, 19 nt, Homo sapiens
  misc_RNA (1)...(19): siRNA sense strand
caaagcguguggccaagcu

SEQ ID NO: 2005373 - RNA, 19 nt, Homo sapiens
  misc_RNA (1)...(19): siRNA sense strand
cagggucaccgaaagagaa

SEQ ID NO: 2005374 - RNA, 19 nt, Homo sapiens
  misc_RNA (1)...(19): siRNA sense strand
cggaggacgacucuugaaa

SEQ ID NO: 2005375 - RNA, 19 nt, Homo sapiens
  misc_RNA (1)...(19): siRNA sense strand
gccugggccuucaucuuca

SEQ ID NO: 2005376 - RNA, 19 nt, Homo sapiens
  misc_RNA (1)...(19): siRNA sense strand
ggccagggucaccgaaaga

SEQ ID NO: 2005377 - RNA, 19 nt, Homo sapiens
  misc_RNA (1)...(19): siRNA sense strand
gaacaaaauagaccucuua

SEQ ID NO: 2005378 - RNA, 19 nt, Homo sapiens
  misc_RNA (1)...(19): siRNA sense strand
ggagaucccugcccucaag

SEQ ID NO: 2005379 - RNA, 19 nt, Homo sapiens
  misc_RNA (1)...(19): siRNA sense strand
ugaagaaggugaaguccau

SEQ ID NO: 2005380 - RNA, 19 nt, Homo sapiens
  misc_RNA (1)...(19): siRNA sense strand
gaaagagacaggcagcaau

SEQ ID NO: 2005381 - RNA, 19 nt, Homo sapiens
  misc_RNA (1)...(19): siRNA sense strand
ugaaguccaugcagauguu

SEQ ID NO: 2005382 - RNA, 19 nt, Homo sapiens
  misc_RNA (1)...(19): siRNA sense strand
ccucuuaccugaaggaaag

SEQ ID NO: 2005383 - RNA, 19 nt, Homo sapiens
  misc_RNA (1)...(19): siRNA sense strand
uguacaagcugaagcacaa

SEQ ID NO: 2005384 - RNA, 19 nt, Homo sapiens
  misc_RNA (1)...(19): siRNA sense strand
ucacccaguuugacccuaa

SEQ ID NO: 2005385 - RNA, 19 nt, Homo sapiens
  misc_RNA (1)...(19): siRNA sense strand
ggaaagagacaggcagcaa

SEQ ID NO: 2005386 - RNA, 19 nt, Homo sapiens
  misc_RNA (1)...(19): siRNA sense strand
guuccgaggugcaccgauu

SEQ ID NO: 2005387 - RNA, 19 nt, Homo sapiens
  misc_RNA (1)...(19): siRNA sense strand
agacaggcagcaauugaua

SEQ ID NO: 2005388 - RNA, 19 nt, Homo sapiens
  misc_RNA (1)...(19): siRNA sense strand
gaccguuccucaugucugu

SEQ ID NO: 2005389 - RNA, 19 nt, Homo sapiens
  misc_RNA (1)...(19): siRNA sense strand
aaagagacaggcagcaauu

SEQ ID NO: 2005390 - RNA, 19 nt, Homo sapiens
  misc_RNA (1)...(19): siRNA sense strand
gcagaagacccuagagaac

SEQ ID NO: 2005391 - RNA, 19 nt, Homo sapiens
  misc_RNA (1)...(19): siRNA sense strand
ccaaggcacugugaugaca

SEQ ID NO: 2005392 - RNA, 19 nt, Homo sapiens
  misc_RNA (1)...(19): siRNA sense strand
aaggccaaguuccacauua

SEQ ID NO: 2005393 - RNA, 19 nt, Homo sapiens
  misc_RNA (1)...(19): siRNA sense strand
aaaccaacauccagcucuu

SEQ ID NO: 2005394 - RNA, 19 nt, Homo sapiens
  misc_RNA (1)...(19): siRNA sense strand
gacaggcagcaauugauaa

SEQ ID NO: 2005395 - RNA, 19 nt, Homo sapiens
  misc_RNA (1)...(19): siRNA sense strand
ggcgauggaugacuacagu

SEQ ID NO: 2005396 - RNA, 19 nt, Homo sapiens
  misc_RNA (1)...(19): siRNA sense strand
ggaacuacgccgacagcuu

SEQ ID NO: 2005397 - RNA, 19 nt, Homo sapiens
  misc_RNA (1)...(19): siRNA sense strand
gcaaaccaaggccaaguuc

SEQ ID NO: 2005398 - RNA, 19 nt, Homo sapiens
  misc_RNA (1)...(19): siRNA sense strand
ggucgucuuugcccgaguu

SEQ ID NO: 2005399 - RNA, 19 nt, Homo sapiens
  misc_RNA (1)...(19): siRNA sense strand
gcccucaucucuguggaaa

SEQ ID NO: 2005400 - RNA, 19 nt, Homo sapiens
  misc_RNA (1)...(19): siRNA sense strand
cuccugacgucccagauuu

SEQ ID NO: 2005401 - RNA, 19 nt, Homo sapiens
  misc_RNA (1)...(19): siRNA sense strand
ggccagagcggcaaguuca

SEQ ID NO: 2005402 - RNA, 19 nt, Homo sapiens
  misc_RNA (1)...(19): siRNA sense strand
ccgagucccugcacacugu

SEQ ID NO: 2005403 - RNA, 19 nt, Homo sapiens
  misc_RNA (1)...(19): siRNA sense strand
gcaucugcgucacccaguu

SEQ ID NO: 2005404 - RNA, 19 nt, Homo sapiens
  misc_RNA (1)...(19): siRNA sense strand
ugacagggaccauccuuuc

SEQ ID NO: 2005405 - RNA, 19 nt, Homo sapiens
  misc_RNA (1)...(19): siRNA sense strand
gaccacuguuucuccauca

SEQ ID NO: 2005406 - RNA, 19 nt, Homo sapiens
  misc_RNA (1)...(19): siRNA sense strand
caggcuagaugcggacauu

SEQ ID NO: 2005407 - RNA, 19 nt, Homo sapiens
  misc_RNA (1)...(19): siRNA sense strand
gcagugacagacaaugaug

SEQ ID NO: 2005408 - RNA, 19 nt, Homo sapiens
  misc_RNA (1)...(19): siRNA sense strand
cagcagugacagacaauga

SEQ ID NO: 2005409 - RNA, 19 nt, Homo sapiens
  misc_RNA (1)...(19): siRNA sense strand
ucagcggaaugccuuguga

SEQ ID NO: 2005410 - RNA, 19 nt, Homo sapiens
  misc_RNA (1)...(19): siRNA sense strand
ucaagguggugaagaaggu

SEQ ID NO: 2005411 - RNA, 19 nt, Homo sapiens
  misc_RNA (1)...(19): siRNA sense strand
ccacaugcccaucacuuca

SEQ ID NO: 2005412 - RNA, 19 nt, Homo sapiens
  misc_RNA (1)...(19): siRNA sense strand
caccagcagugacagacaa

SEQ ID NO: 2005413 - RNA, 19 nt, Homo sapiens
  misc_RNA (1)...(19): siRNA sense strand
cagaagacccuagagaaca

SEQ ID NO: 2005414 - RNA, 19 nt, Homo sapiens
  misc_RNA (1)...(19): siRNA sense strand
uuucaagcguuaugucuuc

SEQ ID NO: 2005415 - RNA, 19 nt, Homo sapiens
  misc_RNA (1)...(19): siRNA sense strand
gccugacuuucaagcguua

SEQ ID NO: 2005416 - RNA, 19 nt, Homo sapiens
  misc_RNA (1)...(19): siRNA sense strand
agcaguaccuguccaagga

SEQ ID NO: 2005417 - RNA, 19 nt, Homo sapiens
  misc_RNA (1)...(19): siRNA sense strand
gagacaggcagcaauugau

SEQ ID NO: 2005418 - RNA, 19 nt, Homo sapiens
  misc_RNA (1)...(19): siRNA sense strand
ggccaaggcacugugauga

SEQ ID NO: 2005419 - RNA, 19 nt, Homo sapiens
  misc_RNA (1)...(19): siRNA sense strand
acuggacucuuucaacuuc

SEQ ID NO: 2005420 - RNA, 19 nt, Homo sapiens
  misc_RNA (1)...(19): siRNA sense strand
agagacaggcagcaauuga

SEQ ID NO: 2005421 - RNA, 19 nt, Homo sapiens
  misc_RNA (1)...(19): siRNA sense strand
auacuggacucuuucaacu

SEQ ID NO: 2005422 - RNA, 19 nt, Homo sapiens
  misc_RNA (1)...(19): siRNA sense strand
agccuauacuggacucuuu

SEQ ID NO: 2005423 - RNA, 19 nt, Homo sapiens
  misc_RNA (1)...(19): siRNA sense strand
acaggcagcaauugauaaa

SEQ ID NO: 2005424 - RNA, 19 nt, Homo sapiens
  misc_RNA (1)...(19): siRNA sense strand
ugcccaggcugaaggugua

SEQ ID NO: 2005425 - RNA, 19 nt, Homo sapiens
  misc_RNA (1)...(19): siRNA sense strand
ccagauugccugccagaag

SEQ ID NO: 2005426 - RNA, 19 nt, Homo sapiens
  misc_RNA (1)...(19): siRNA sense strand
gacagggaccauccuuuca

SEQ ID NO: 2005427 - RNA, 19 nt, Homo sapiens
  misc_RNA (1)...(19): siRNA sense strand
gggcccugguggaguuuga

SEQ ID NO: 2005428 - RNA, 19 nt, Homo sapiens
  misc_RNA (1)...(19): siRNA sense strand
gauuugacaccagcaguga

SEQ ID NO: 2005429 - RNA, 19 nt, Homo sapiens
  misc_RNA (1)...(19): siRNA sense strand
gcuccugacgucccagauu

SEQ ID NO: 2005430 - RNA, 19 nt, Homo sapiens
  misc_RNA (1)...(19): siRNA sense strand
gagcgagcccucacagcau

SEQ ID NO: 2005431 - RNA, 19 nt, Homo sapiens
  misc_RNA (1)...(19): siRNA sense strand
caucugcgucacccaguuu

SEQ ID NO: 2005432 - RNA, 19 nt, Homo sapiens
  misc_RNA (1)...(19): siRNA sense strand
ccacuguuucuccaucaaa

SEQ ID NO: 2005433 - RNA, 19 nt, Homo sapiens
  misc_RNA (1)...(19): siRNA sense strand
auggaugacuacaguguga

SEQ ID NO: 2005434 - RNA, 19 nt, Homo sapiens
  misc_RNA (1)...(19): siRNA sense strand
auagaccucuuaccugaag

SEQ ID NO: 2005435 - RNA, 19 nt, Homo sapiens
  misc_RNA (1)...(19): siRNA sense strand
caguaccuguccaaggauu

SEQ ID NO: 2005436 - RNA, 19 nt, Homo sapiens
  misc_RNA (1)...(19): siRNA sense strand
ucaguccugcuccagauaa

SEQ ID NO: 2005437 - RNA, 19 nt, Homo sapiens
  misc_RNA (1)...(19): siRNA sense strand
caaggccaaguuccacauu

SEQ ID NO: 2005438 - RNA, 19 nt, Homo sapiens
  misc_RNA (1)...(19): siRNA sense strand
guaccuguccaaggauuug

SEQ ID NO: 2005439 - RNA, 19 nt, Homo sapiens
  misc_RNA (1)...(19): siRNA sense strand
gagcggcaaguucaagauc

SEQ ID NO: 2005440 - RNA, 19 nt, Homo sapiens
  misc_RNA (1)...(19): siRNA sense strand
cccucaagguggugaagaa

SEQ ID NO: 2005441 - RNA, 19 nt, Homo sapiens
  misc_RNA (1)...(19): siRNA sense strand
ccaagaaaaugcagaagac

SEQ ID NO: 2005442 - RNA, 19 nt, Homo sapiens
  misc_RNA (1)...(19): siRNA sense strand
ggcugaagguguacaagcu

SEQ ID NO: 2005443 - RNA, 19 nt, Homo sapiens
  misc_RNA (1)...(19): siRNA sense strand
caaaauagaccucuuaccu

SEQ ID NO: 2005444 - RNA, 19 nt, Homo sapiens
  misc_RNA (1)...(19): siRNA sense strand
gcauuccagagcucauuga

SEQ ID NO: 2005445 - RNA, 19 nt, Homo sapiens
  misc_RNA (1)...(19): siRNA sense strand
cgaggugcaccgauuauac

SEQ ID NO: 2005446 - RNA, 19 nt, Homo sapiens
  misc_RNA (1)...(19): siRNA sense strand
ugcagaagacccuagagaa

SEQ ID NO: 2005447 - RNA, 19 nt, Homo sapiens
  misc_RNA (1)...(19): siRNA sense strand
gggcauuccagagcucauu

SEQ ID NO: 2005448 - RNA, 19 nt, Homo sapiens
  misc_RNA (1)...(19): siRNA sense strand
augaugaggccgacaagaa

SEQ ID NO: 2005449 - RNA, 19 nt, Homo sapiens
  misc_RNA (1)...(19): siRNA sense strand
cuucaguccugcuccagau

SEQ ID NO: 2005450 - RNA, 19 nt, Homo sapiens
  misc_RNA (1)...(19): siRNA sense strand
agaagacccuagagaacac

SEQ ID NO: 2005451 - RNA, 19 nt, Homo sapiens
  misc_RNA (1)...(19): siRNA sense strand
gcggcaaguucaagaucca

SEQ ID NO: 2005452 - RNA, 19 nt, Homo sapiens
  misc_RNA (1)...(19): siRNA sense strand
ucuuucaacuucucucaag

SEQ ID NO: 2005453 - RNA, 19 nt, Homo sapiens
  misc_RNA (1)...(19): siRNA sense strand
ccaaguuccacauuacagu

SEQ ID NO: 2005454 - RNA, 19 nt, Homo sapiens
  misc_RNA (1)...(19): siRNA sense strand
gaaugaggcuucaccagua

SEQ ID NO: 2005455 - RNA, 19 nt, Homo sapiens
  misc_RNA (1)...(19): siRNA sense strand
gcucaugucucauuaauca

SEQ ID NO: 2005456 - RNA, 19 nt, Homo sapiens
  misc_RNA (1)...(19): siRNA sense strand
caacaacaauaccucgaua

SEQ ID NO: 2005457 - RNA, 19 nt, Homo sapiens
  misc_RNA (1)...(19): siRNA sense strand
ggaaaccagucgaucuaaa

SEQ ID NO: 2005458 - RNA, 19 nt, Homo sapiens
  misc_RNA (1)...(19): siRNA sense strand
ggaggaagccaucaugaaa

SEQ ID NO: 2005459 - RNA, 19 nt, Homo sapiens
  misc_RNA (1)...(19): siRNA sense strand
cgacagaacugaauguaac

SEQ ID NO: 2005460 - RNA, 19 nt, Homo sapiens
  misc_RNA (1)...(19): siRNA sense strand
gaagagaccaccagugaca

SEQ ID NO: 2005461 - RNA, 19 nt, Homo sapiens
  misc_RNA (1)...(19): siRNA sense strand
gcgguuauguguucuguau

SEQ ID NO: 2005462 - RNA, 19 nt, Homo sapiens
  misc_RNA (1)...(19): siRNA sense strand
gaggaaaccagucgaucua

SEQ ID NO: 2005463 - RNA, 19 nt, Homo sapiens
  misc_RNA (1)...(19): siRNA sense strand
gcacagacacagcucaugu

SEQ ID NO: 2005464 - RNA, 19 nt, Homo sapiens
  misc_RNA (1)...(19): siRNA sense strand
gguuauguguucuguaugu

SEQ ID NO: 2005465 - RNA, 19 nt, Homo sapiens
  misc_RNA (1)...(19): siRNA sense strand
agaaacagccagacgauga

SEQ ID NO: 2005466 - RNA, 19 nt, Homo sapiens
  misc_RNA (1)...(19): siRNA sense strand
gaugauuccgcuccaagua

SEQ ID NO: 2005467 - RNA, 19 nt, Homo sapiens
  misc_RNA (1)...(19): siRNA sense strand
ccgaagagaccaccaguga

SEQ ID NO: 2005468 - RNA, 19 nt, Homo sapiens
  misc_RNA (1)...(19): siRNA sense strand
uaacuucaccgaguaaaga

SEQ ID NO: 2005469 - RNA, 19 nt, Homo sapiens
  misc_RNA (1)...(19): siRNA sense strand
cagcucaugucucauuaau

SEQ ID NO: 2005470 - RNA, 19 nt, Homo sapiens
  misc_RNA (1)...(19): siRNA sense strand
gaaucucuguuccaaaugc

SEQ ID NO: 2005471 - RNA, 19 nt, Homo sapiens
  misc_RNA (1)...(19): siRNA sense strand
caaguaacagccaaucaga

SEQ ID NO: 2005472 - RNA, 19 nt, Homo sapiens
  misc_RNA (1)...(19): siRNA sense strand
gaucgugucgcugcgguua

SEQ ID NO: 2005473 - RNA, 19 nt, Homo sapiens
  misc_RNA (1)...(19): siRNA sense strand
ccacgacuacuugagaaua

SEQ ID NO: 2005474 - RNA, 19 nt, Homo sapiens
  misc_RNA (1)...(19): siRNA sense strand
acacagcucaugucucauu

SEQ ID NO: 2005475 - RNA, 19 nt, Homo sapiens
  misc_RNA (1)...(19): siRNA sense strand
aauguaacuucaccgagua

SEQ ID NO: 2005476 - RNA, 19 nt, Homo sapiens
  misc_RNA (1)...(19): siRNA sense strand
aacaauaccucgauaacca

SEQ ID NO: 2005477 - RNA, 19 nt, Homo sapiens
  misc_RNA (1)...(19): siRNA sense strand
gaaaccagucgaucuaaac

SEQ ID NO: 2005478 - RNA, 19 nt, Homo sapiens
  misc_RNA (1)...(19): siRNA sense strand
cacagcucaugucucauua

SEQ ID NO: 2005479 - RNA, 19 nt, Homo sapiens
  misc_RNA (1)...(19): siRNA sense strand
gggaggaagccaucaugaa

SEQ ID NO: 2005480 - RNA, 19 nt, Homo sapiens
  misc_RNA (1)...(19): siRNA sense strand
aaugaggcuucaccaguaa

SEQ ID NO: 2005481 - RNA, 19 nt, Homo sapiens
  misc_RNA (1)...(19): siRNA sense strand
gaaacagccagacgaugau

SEQ ID NO: 2005482 - RNA, 19 nt, Homo sapiens
  misc_RNA (1)...(19): siRNA sense strand
ggccacgacuacuugagaa

SEQ ID NO: 2005483 - RNA, 19 nt, Homo sapiens
  misc_RNA (1)...(19): siRNA sense strand
augaaucucuguuccaaau

SEQ ID NO: 2005484 - RNA, 19 nt, Homo sapiens
  misc_RNA (1)...(19): siRNA sense strand
ucgcugcgguuauguguuc

SEQ ID NO: 2005485 - RNA, 19 nt, Homo sapiens
  misc_RNA (1)...(19): siRNA sense strand
aaacggccacgacuacuug

SEQ ID NO: 2005486 - RNA, 19 nt, Homo sapiens
  misc_RNA (1)...(19): siRNA sense strand
ccagcaagacuaugaaucu

SEQ ID NO: 2005487 - RNA, 19 nt, Homo sapiens
  misc_RNA (1)...(19): siRNA sense strand
cuaugaaucucuguuccaa

SEQ ID NO: 2005488 - RNA, 19 nt, Homo sapiens
  misc_RNA (1)...(19): siRNA sense strand
ucauuaaucacaccaacaa

SEQ ID NO: 2005489 - RNA, 19 nt, Homo sapiens
  misc_RNA (1)...(19): siRNA sense strand
gaagcuggaccggaaagug

SEQ ID NO: 2005490 - RNA, 19 nt, Homo sapiens
  misc_RNA (1)...(19): siRNA sense strand
auaaccacgccaacucuua

SEQ ID NO: 2005491 - RNA, 19 nt, Homo sapiens
  misc_RNA (1)...(19): siRNA sense strand
cagcacgacugcacauucg

SEQ ID NO: 2005492 - RNA, 19 nt, Homo sapiens
  misc_RNA (1)...(19): siRNA sense strand
gaccaccagugacaacaac

SEQ ID NO: 2005493 - RNA, 19 nt, Homo sapiens
  misc_RNA (1)...(19): siRNA sense strand
gauaaccacgccaacucuu

SEQ ID NO: 2005494 - RNA, 19 nt, Homo sapiens
  misc_RNA (1)...(19): siRNA sense strand
ccagugacaacaacaauac

SEQ ID NO: 2005495 - RNA, 19 nt, Homo sapiens
  misc_RNA (1)...(19): siRNA sense strand
uaaccacgccaacucuuag

SEQ ID NO: 2005496 - RNA, 19 nt, Homo sapiens
  misc_RNA (1)...(19): siRNA sense strand
accagucgaucuaaacaga

SEQ ID NO: 2005497 - RNA, 19 nt, Homo sapiens
  misc_RNA (1)...(19): siRNA sense strand
aaagaaacagccagacgau

SEQ ID NO: 2005498 - RNA, 19 nt, Homo sapiens
  misc_RNA (1)...(19): siRNA sense strand
gcuccaaguacaaguaaca

SEQ ID NO: 2005499 - RNA, 19 nt, Homo sapiens
  misc_RNA (1)...(19): siRNA sense strand
ugauuccgcuccaaguaca

SEQ ID NO: 2005500 - RNA, 19 nt, Homo sapiens
  misc_RNA (1)...(19): siRNA sense strand
ccgacagaacugaauguaa

SEQ ID NO: 2005501 - RNA, 19 nt, Homo sapiens
  misc_RNA (1)...(19): siRNA sense strand
cgaggaaaccagucgaucu

SEQ ID NO: 2005502 - RNA, 19 nt, Homo sapiens
  misc_RNA (1)...(19): siRNA sense strand
cacgacuacuugagaauac

SEQ ID NO: 2005503 - RNA, 19 nt, Homo sapiens
  misc_RNA (1)...(19): siRNA sense strand
gaggaagccaucaugaaaa

SEQ ID NO: 2005504 - RNA, 19 nt, Homo sapiens
  misc_RNA (1)...(19): siRNA sense strand
guuauguguucuguauguu

SEQ ID NO: 2005505 - RNA, 19 nt, Homo sapiens
  misc_RNA (1)...(19): siRNA sense strand
cagcaagacuaugaaucuc

SEQ ID NO: 2005506 - RNA, 19 nt, Homo sapiens
  misc_RNA (1)...(19): siRNA sense strand
guacaaguaacagccaauc

SEQ ID NO: 2005507 - RNA, 19 nt, Homo sapiens
  misc_RNA (1)...(19): siRNA sense strand
uauguguucuguauguuac

SEQ ID NO: 2005508 - RNA, 19 nt, Homo sapiens
  misc_RNA (1)...(19): siRNA sense strand
cagucgaucuaaacagaag

SEQ ID NO: 2005509 - RNA, 19 nt, Homo sapiens
  misc_RNA (1)...(19): siRNA sense strand
ugguacagauucacagucu

SEQ ID NO: 2005510 - RNA, 19 nt, Homo sapiens
  misc_RNA (1)...(19): siRNA sense strand
gaaagagaauccugcaaug

SEQ ID NO: 2005511 - RNA, 19 nt, Homo sapiens
  misc_RNA (1)...(19): siRNA sense strand
gaauugaucucccaguaca

SEQ ID NO: 2005512 - RNA, 19 nt, Homo sapiens
  misc_RNA (1)...(19): siRNA sense strand
gaauaagccuggcgauuuu

SEQ ID NO: 2005513 - RNA, 19 nt, Homo sapiens
  misc_RNA (1)...(19): siRNA sense strand
gagcaagaaauccaucaua

SEQ ID NO: 2005514 - RNA, 19 nt, Homo sapiens
  misc_RNA (1)...(19): siRNA sense strand
gcacaguucucagcauuca

SEQ ID NO: 2005515 - RNA, 19 nt, Homo sapiens
  misc_RNA (1)...(19): siRNA sense strand
gaacaacccagccaucauc

SEQ ID NO: 2005516 - RNA, 19 nt, Homo sapiens
  misc_RNA (1)...(19): siRNA sense strand
gaaagccaccaucuugauu

SEQ ID NO: 2005517 - RNA, 19 nt, Homo sapiens
  misc_RNA (1)...(19): siRNA sense strand
caucaucgcagguguguuu

SEQ ID NO: 2005518 - RNA, 19 nt, Homo sapiens
  misc_RNA (1)...(19): siRNA sense strand
gcccaagcauucccuuaaa

SEQ ID NO: 2005519 - RNA, 19 nt, Homo sapiens
  misc_RNA (1)...(19): siRNA sense strand
guaacaacaugcugaacga

SEQ ID NO: 2005520 - RNA, 19 nt, Homo sapiens
  misc_RNA (1)...(19): siRNA sense strand
ggaggaagcgacugacuug

SEQ ID NO: 2005521 - RNA, 19 nt, Homo sapiens
  misc_RNA (1)...(19): siRNA sense strand
gagaagcagagaccuuuaa

SEQ ID NO: 2005522 - RNA, 19 nt, Homo sapiens
  misc_RNA (1)...(19): siRNA sense strand
agaauaagccuggcgauuu

SEQ ID NO: 2005523 - RNA, 19 nt, Homo sapiens
  misc_RNA (1)...(19): siRNA sense strand
ucgcagguguguuugauaa

SEQ ID NO: 2005524 - RNA, 19 nt, Homo sapiens
  misc_RNA (1)...(19): siRNA sense strand
gaaaugcugugagccuugu

SEQ ID NO: 2005525 - RNA, 19 nt, Homo sapiens
  misc_RNA (1)...(19): siRNA sense strand
cagcacaguucucagcauu

SEQ ID NO: 2005526 - RNA, 19 nt, Homo sapiens
  misc_RNA (1)...(19): siRNA sense strand
gcaccgaccgcgugaagaa

SEQ ID NO: 2005527 - RNA, 19 nt, Homo sapiens
  misc_RNA (1)...(19): siRNA sense strand
ugaaucaggugcuguugga

SEQ ID NO: 2005528 - RNA, 19 nt, Homo sapiens
  misc_RNA (1)...(19): siRNA sense strand
gggcauacaugagugugaa

SEQ ID NO: 2005529 - RNA, 19 nt, Homo sapiens
  misc_RNA (1)...(19): siRNA sense strand
uaaaggagucagugaaaga

SEQ ID NO: 2005530 - RNA, 19 nt, Homo sapiens
  misc_RNA (1)...(19): siRNA sense strand
gcaagaaauccaucauaca

SEQ ID NO: 2005531 - RNA, 19 nt, Homo sapiens
  misc_RNA (1)...(19): siRNA sense strand
uggaauugaucucccagua

SEQ ID NO: 2005532 - RNA, 19 nt, Homo sapiens
  misc_RNA (1)...(19): siRNA sense strand
gcagcaaaccagacacuga

SEQ ID NO: 2005533 - RNA, 19 nt, Homo sapiens
  misc_RNA (1)...(19): siRNA sense strand
cagaagugcuggcugagau

SEQ ID NO: 2005534 - RNA, 19 nt, Homo sapiens
  misc_RNA (1)...(19): siRNA sense strand
cagaguggguucccuuuag

SEQ ID NO: 2005535 - RNA, 19 nt, Homo sapiens
  misc_RNA (1)...(19): siRNA sense strand
gacccugacucacccaaga

SEQ ID NO: 2005536 - RNA, 19 nt, Homo sapiens
  misc_RNA (1)...(19): siRNA sense strand
gggcuccguucaccaacua

SEQ ID NO: 2005537 - RNA, 19 nt, Homo sapiens
  misc_RNA (1)...(19): siRNA sense strand
aaccagagcccacuaguga

SEQ ID NO: 2005538 - RNA, 19 nt, Homo sapiens
  misc_RNA (1)...(19): siRNA sense strand
gggagaugaugacgcuuau

SEQ ID NO: 2005539 - RNA, 19 nt, Homo sapiens
  misc_RNA (1)...(19): siRNA sense strand
caagagggcauacaugagu

SEQ ID NO: 2005540 - RNA, 19 nt, Homo sapiens
  misc_RNA (1)...(19): siRNA sense strand
aaagccaccaucuugauua

SEQ ID NO: 2005541 - RNA, 19 nt, Homo sapiens
  misc_RNA (1)...(19): siRNA sense strand
caagaaauccaucauacag

SEQ ID NO: 2005542 - RNA, 19 nt, Homo sapiens
  misc_RNA (1)...(19): siRNA sense strand
ucagguggcuagcagucua

SEQ ID NO: 2005543 - RNA, 19 nt, Homo sapiens
  misc_RNA (1)...(19): siRNA sense strand
gcgggaugcucgcuucuuc

SEQ ID NO: 2005544 - RNA, 19 nt, Homo sapiens
  misc_RNA (1)...(19): siRNA sense strand
gaaccagagcccacuagug

SEQ ID NO: 2005545 - RNA, 19 nt, Homo sapiens
  misc_RNA (1)...(19): siRNA sense strand
ugaaagagaauccugcaau

SEQ ID NO: 2005546 - RNA, 19 nt, Homo sapiens
  misc_RNA (1)...(19): siRNA sense strand
gaugcucgcuucuucuucu

SEQ ID NO: 2005547 - RNA, 19 nt, Homo sapiens
  misc_RNA (1)...(19): siRNA sense strand
uccgguaucucuucacauu

SEQ ID NO: 2005548 - RNA, 19 nt, Homo sapiens
  misc_RNA (1)...(19): siRNA sense strand
guacucacuuccucaacau

SEQ ID NO: 2005549 - RNA, 19 nt, Homo sapiens
  misc_RNA (1)...(19): siRNA sense strand
gcugaacaguacucacuuc

SEQ ID NO: 2005550 - RNA, 19 nt, Homo sapiens
  misc_RNA (1)...(19): siRNA sense strand
caacaugcugaacgacuuu

SEQ ID NO: 2005551 - RNA, 19 nt, Homo sapiens
  misc_RNA (1)...(19): siRNA sense strand
cagcaaaccagacacugaa

SEQ ID NO: 2005552 - RNA, 19 nt, Homo sapiens
  misc_RNA (1)...(19): siRNA sense strand
ggaaacgggagaccucugu

SEQ ID NO: 2005553 - RNA, 19 nt, Homo sapiens
  misc_RNA (1)...(19): siRNA sense strand
gagauucugucgccuuugc

SEQ ID NO: 2005554 - RNA, 19 nt, Homo sapiens
  misc_RNA (1)...(19): siRNA sense strand
cgguaucucuucacauuuc

SEQ ID NO: 2005555 - RNA, 19 nt, Homo sapiens
  misc_RNA (1)...(19): siRNA sense strand
gaccuuuaacucccaagua

SEQ ID NO: 2005556 - RNA, 19 nt, Homo sapiens
  misc_RNA (1)...(19): siRNA sense strand
acucuaccaugucuuuaaa

SEQ ID NO: 2005557 - RNA, 19 nt, Homo sapiens
  misc_RNA (1)...(19): siRNA sense strand
ggacgcagcaaaccagaca

SEQ ID NO: 2005558 - RNA, 19 nt, Homo sapiens
  misc_RNA (1)...(19): siRNA sense strand
aaagagaauccugcaauga

SEQ ID NO: 2005559 - RNA, 19 nt, Homo sapiens
  misc_RNA (1)...(19): siRNA sense strand
gcagguguguuugauaacu

SEQ ID NO: 2005560 - RNA, 19 nt, Homo sapiens
  misc_RNA (1)...(19): siRNA sense strand
ggcccaagcauucccuuaa

SEQ ID NO: 2005561 - RNA, 19 nt, Homo sapiens
  misc_RNA (1)...(19): siRNA sense strand
gagcuucuccacagcauca

SEQ ID NO: 2005562 - RNA, 19 nt, Homo sapiens
  misc_RNA (1)...(19): siRNA sense strand
gcaaucaaagauccaagga

SEQ ID NO: 2005563 - RNA, 19 nt, Homo sapiens
  misc_RNA (1)...(19): siRNA sense strand
gacggcacauggcccugua

SEQ ID NO: 2005564 - RNA, 19 nt, Homo sapiens
  misc_RNA (1)...(19): siRNA sense strand
gggcuggacacgcaagaaa

SEQ ID NO: 2005565 - RNA, 19 nt, Homo sapiens
  misc_RNA (1)...(19): siRNA sense strand
ggacucuaccaugucuuua

SEQ ID NO: 2005566 - RNA, 19 nt, Homo sapiens
  misc_RNA (1)...(19): siRNA sense strand
gggacucuaccaugucuuu

SEQ ID NO: 2005567 - RNA, 19 nt, Homo sapiens
  misc_RNA (1)...(19): siRNA sense strand
acaacaugcugaacgacuu

SEQ ID NO: 2005568 - RNA, 19 nt, Homo sapiens
  misc_RNA (1)...(19): siRNA sense strand
ucugucacguggaguguaa

SEQ ID NO: 2005569 - RNA, 19 nt, Homo sapiens
  misc_RNA (1)...(19): siRNA sense strand
uaggacugcccaucuuaua

SEQ ID NO: 2005570 - RNA, 19 nt, Homo sapiens
  misc_RNA (1)...(19): siRNA sense strand
gcuuaucucggcaaucaaa

SEQ ID NO: 2005571 - RNA, 19 nt, Homo sapiens
  misc_RNA (1)...(19): siRNA sense strand
acgcuuaucucggcaauca

SEQ ID NO: 2005572 - RNA, 19 nt, Homo sapiens
  misc_RNA (1)...(19): siRNA sense strand
cgagaagcagagaccuuua

SEQ ID NO: 2005573 - RNA, 19 nt, Homo sapiens
  misc_RNA (1)...(19): siRNA sense strand
gcagggaugggcucuguca

SEQ ID NO: 2005574 - RNA, 19 nt, Homo sapiens
  misc_RNA (1)...(19): siRNA sense strand
caaaccagacacugaagga

SEQ ID NO: 2005575 - RNA, 19 nt, Homo sapiens
  misc_RNA (1)...(19): siRNA sense strand
gacucuaccaugucuuuaa

SEQ ID NO: 2005576 - RNA, 19 nt, Homo sapiens
  misc_RNA (1)...(19): siRNA sense strand
agaguggguucccuuuaga

SEQ ID NO: 2005577 - RNA, 19 nt, Homo sapiens
  misc_RNA (1)...(19): siRNA sense strand
ggacugcccaucuuauacu

SEQ ID NO: 2005578 - RNA, 19 nt, Homo sapiens
  misc_RNA (1)...(19): siRNA sense strand
ggacacgcaagaaauccuu

SEQ ID NO: 2005579 - RNA, 19 nt, Homo sapiens
  misc_RNA (1)...(19): siRNA sense strand
uggguucccuuuagagaug

SEQ ID NO: 2005580 - RNA, 19 nt, Homo sapiens
  misc_RNA (1)...(19): siRNA sense strand
aagaaauccuugguugaga

SEQ ID NO: 2005581 - RNA, 19 nt, Homo sapiens
  misc_RNA (1)...(19): siRNA sense strand
gacauguucugggacucua

SEQ ID NO: 2005582 - RNA, 19 nt, Homo sapiens
  misc_RNA (1)...(19): siRNA sense strand
cccaagagggcauacauga

SEQ ID NO: 2005583 - RNA, 19 nt, Homo sapiens
  misc_RNA (1)...(19): siRNA sense strand
ggguugugcuugugaacug

SEQ ID NO: 2005584 - RNA, 19 nt, Homo sapiens
  misc_RNA (1)...(19): siRNA sense strand
ggaauugaucucccaguac

SEQ ID NO: 2005585 - RNA, 19 nt, Homo sapiens
  misc_RNA (1)...(19): siRNA sense strand
cugagauucugucgccuuu

SEQ ID NO: 2005586 - RNA, 19 nt, Homo sapiens
  misc_RNA (1)...(19): siRNA sense strand
agagggaacaccugaauca

SEQ ID NO: 2005587 - RNA, 19 nt, Homo sapiens
  misc_RNA (1)...(19): siRNA sense strand
gaggaaagcaaccaaaaug

SEQ ID NO: 2005588 - RNA, 19 nt, Homo sapiens
  misc_RNA (1)...(19): siRNA sense strand
guucgaagacccagagcuu

SEQ ID NO: 2005589 - RNA, 19 nt, Homo sapiens
  misc_RNA (1)...(19): siRNA sense strand
ggcagccacuuacgaugga

SEQ ID NO: 2005590 - RNA, 19 nt, Homo sapiens
  misc_RNA (1)...(19): siRNA sense strand
ccccagaccugacugaaaa

SEQ ID NO: 2005591 - RNA, 19 nt, Homo sapiens
  misc_RNA (1)...(19): siRNA sense strand
ccucagcccagcauauuau

SEQ ID NO: 2005592 - RNA, 19 nt, Homo sapiens
  misc_RNA (1)...(19): siRNA sense strand
caaguaggacugcccaucu

SEQ ID NO: 2005593 - RNA, 19 nt, Homo sapiens
  misc_RNA (1)...(19): siRNA sense strand
ugggagaugaugacgcuua

SEQ ID NO: 2005594 - RNA, 19 nt, Homo sapiens
  misc_RNA (1)...(19): siRNA sense strand
ccgagaagcagagaccuuu

SEQ ID NO: 2005595 - RNA, 19 nt, Homo sapiens
  misc_RNA (1)...(19): siRNA sense strand
acaaggacgcugucacuca

SEQ ID NO: 2005596 - RNA, 19 nt, Homo sapiens
  misc_RNA (1)...(19): siRNA sense strand
acagaguggguucccuuua

SEQ ID NO: 2005597 - RNA, 19 nt, Homo sapiens
  misc_RNA (1)...(19): siRNA sense strand
caucgcagguguguuugau

SEQ ID NO: 2005598 - RNA, 19 nt, Homo sapiens
  misc_RNA (1)...(19): siRNA sense strand
aagcagagaccuuuaacuc

SEQ ID NO: 2005599 - RNA, 19 nt, Homo sapiens
  misc_RNA (1)...(19): siRNA sense strand
agcaagaaauccaucauac

SEQ ID NO: 2005600 - RNA, 19 nt, Homo sapiens
  misc_RNA (1)...(19): siRNA sense strand
aggagucagugaaagagaa

SEQ ID NO: 2005601 - RNA, 19 nt, Homo sapiens
  misc_RNA (1)...(19): siRNA sense strand
gcccugcagcugaacagua

SEQ ID NO: 2005602 - RNA, 19 nt, Homo sapiens
  misc_RNA (1)...(19): siRNA sense strand
caccugggcacacugguuu

SEQ ID NO: 2005603 - RNA, 19 nt, Homo sapiens
  misc_RNA (1)...(19): siRNA sense strand
cugaggaugggcacuauuu

SEQ ID NO: 2005604 - RNA, 19 nt, Homo sapiens
  misc_RNA (1)...(19): siRNA sense strand
guaggacugcccaucuuau

SEQ ID NO: 2005605 - RNA, 19 nt, Homo sapiens
  misc_RNA (1)...(19): siRNA sense strand
ccaagcauucccuuaaaca

SEQ ID NO: 2005606 - RNA, 19 nt, Homo sapiens
  misc_RNA (1)...(19): siRNA sense strand
caucaccucuuuggagucu

SEQ ID NO: 2005607 - RNA, 19 nt, Homo sapiens
  misc_RNA (1)...(19): siRNA sense strand
cagaacaacccagccauca

SEQ ID NO: 2005608 - RNA, 19 nt, Homo sapiens
  misc_RNA (1)...(19): siRNA sense strand
uuaaaggagucagugaaag

SEQ ID NO: 2005609 - RNA, 19 nt, Homo sapiens
  misc_RNA (1)...(19): siRNA sense strand
gcucugaggaugggcacua

SEQ ID NO: 2005610 - RNA, 19 nt, Homo sapiens
  misc_RNA (1)...(19): siRNA sense strand
gaaagagaauccugcaaug

SEQ ID NO: 2005611 - RNA, 19 nt, Homo sapiens
  misc_RNA (1)...(19): siRNA sense strand
gaauugaucucccaguaca

SEQ ID NO: 2005612 - RNA, 19 nt, Homo sapiens
  misc_RNA (1)...(19): siRNA sense strand
gaauaagccuggcgauuuu

SEQ ID NO: 2005613 - RNA, 19 nt, Homo sapiens
  misc_RNA (1)...(19): siRNA sense strand
gagcaagaaauccaucaua

SEQ ID NO: 2005614 - RNA, 19 nt, Homo sapiens
  misc_RNA (1)...(19): siRNA sense strand
gcacaguucucagcauuca

SEQ ID NO: 2005615 - RNA, 19 nt, Homo sapiens
  misc_RNA (1)...(19): siRNA sense strand
gaacaacccagccaucauc

SEQ ID NO: 2005616 - RNA, 19 nt, Homo sapiens
  misc_RNA (1)...(19): siRNA sense strand
gaaagccaccaucuugauu

SEQ ID NO: 2005617 - RNA, 19 nt, Homo sapiens
  misc_RNA (1)...(19): siRNA sense strand
caucaucgcagguguguuu

SEQ ID NO: 2005618 - RNA, 19 nt, Homo sapiens
  misc_RNA (1)...(19): siRNA sense strand
gcccaagcauucccuuaaa

SEQ ID NO: 2005619 - RNA, 19 nt, Homo sapiens
  misc_RNA (1)...(19): siRNA sense strand
guaacaacaugcugaacga

SEQ ID NO: 2005620 - RNA, 19 nt, Homo sapiens
  misc_RNA (1)...(19): siRNA sense strand
ggaggaagcgacugacuug

SEQ ID NO: 2005621 - RNA, 19 nt, Homo sapiens
  misc_RNA (1)...(19): siRNA sense strand
gagaagcagagaccuuuaa

SEQ ID NO: 2005622 - RNA, 19 nt, Homo sapiens
  misc_RNA (1)...(19): siRNA sense strand
agaauaagccuggcgauuu

SEQ ID NO: 2005623 - RNA, 19 nt, Homo sapiens
  misc_RNA (1)...(19): siRNA sense strand
ucgcagguguguuugauaa

SEQ ID NO: 2005624 - RNA, 19 nt, Homo sapiens
  misc_RNA (1)...(19): siRNA sense strand
gaaaugcugugagccuugu

SEQ ID NO: 2005625 - RNA, 19 nt, Homo sapiens
  misc_RNA (1)...(19): siRNA sense strand
cagcacaguucucagcauu

SEQ ID NO: 2005626 - RNA, 19 nt, Homo sapiens
  misc_RNA (1)...(19): siRNA sense strand
gcaccgaccgcgugaagaa

SEQ ID NO: 2005627 - RNA, 19 nt, Homo sapiens
  misc_RNA (1)...(19): siRNA sense strand
ugaaucaggugcuguugga

SEQ ID NO: 2005628 - RNA, 19 nt, Homo sapiens
  misc_RNA (1)...(19): siRNA sense strand
gggcauacaugagugugaa

SEQ ID NO: 2005629 - RNA, 19 nt, Homo sapiens
  misc_RNA (1)...(19): siRNA sense strand
uaaaggagucagugaaaga

SEQ ID NO: 2005630 - RNA, 19 nt, Homo sapiens
  misc_RNA (1)...(19): siRNA sense strand
gcaagaaauccaucauaca

SEQ ID NO: 2005631 - RNA, 19 nt, Homo sapiens
  misc_RNA (1)...(19): siRNA sense strand
uggaauugaucucccagua

SEQ ID NO: 2005632 - RNA, 19 nt, Homo sapiens
  misc_RNA (1)...(19): siRNA sense strand
gcagcaaaccagacacuga

SEQ ID NO: 2005633 - RNA, 19 nt, Homo sapiens
  misc_RNA (1)...(19): siRNA sense strand
cagaagugcuggcugagau

SEQ ID NO: 2005634 - RNA, 19 nt, Homo sapiens
  misc_RNA (1)...(19): siRNA sense strand
cagaguggguucccuuuag

SEQ ID NO: 2005635 - RNA, 19 nt, Homo sapiens
  misc_RNA (1)...(19): siRNA sense strand
gacccugacucacccaaga

SEQ ID NO: 2005636 - RNA, 19 nt, Homo sapiens
  misc_RNA (1)...(19): siRNA sense strand
gggcuccguucaccaacua

SEQ ID NO: 2005637 - RNA, 19 nt, Homo sapiens
  misc_RNA (1)...(19): siRNA sense strand
aaccagagcccacuaguga

SEQ ID NO: 2005638 - RNA, 19 nt, Homo sapiens
  misc_RNA (1)...(19): siRNA sense strand
gggagaugaugacgcuuau

SEQ ID NO: 2005639 - RNA, 19 nt, Homo sapiens
  misc_RNA (1)...(19): siRNA sense strand
caagagggcauacaugagu

SEQ ID NO: 2005640 - RNA, 19 nt, Homo sapiens
  misc_RNA (1)...(19): siRNA sense strand
aaagccaccaucuugauua

SEQ ID NO: 2005641 - RNA, 19 nt, Homo sapiens
  misc_RNA (1)...(19): siRNA sense strand
caagaaauccaucauacag

SEQ ID NO: 2005642 - RNA, 19 nt, Homo sapiens
  misc_RNA (1)...(19): siRNA sense strand
ucagguggcuagcagucua

SEQ ID NO: 2005643 - RNA, 19 nt, Homo sapiens
  misc_RNA (1)...(19): siRNA sense strand
gcgggaugcucgcuucuuc

SEQ ID NO: 2005644 - RNA, 19 nt, Homo sapiens
  misc_RNA (1)...(19): siRNA sense strand
gaaccagagcccacuagug

SEQ ID NO: 2005645 - RNA, 19 nt, Homo sapiens
  misc_RNA (1)...(19): siRNA sense strand
ugaaagagaauccugcaau

SEQ ID NO: 2005646 - RNA, 19 nt, Homo sapiens
  misc_RNA (1)...(19): siRNA sense strand
gaugcucgcuucuucuucu

SEQ ID NO: 2005647 - RNA, 19 nt, Homo sapiens
  misc_RNA (1)...(19): siRNA sense strand
uccgguaucucuucacauu

SEQ ID NO: 2005648 - RNA, 19 nt, Homo sapiens
  misc_RNA (1)...(19): siRNA sense strand
guacucacuuccucaacau

SEQ ID NO: 2005649 - RNA, 19 nt, Homo sapiens
  misc_RNA (1)...(19): siRNA sense strand
gcugaacaguacucacuuc

SEQ ID NO: 2005650 - RNA, 19 nt, Homo sapiens
  misc_RNA (1)...(19): siRNA sense strand
caacaugcugaacgacuuu

SEQ ID NO: 2005651 - RNA, 19 nt, Homo sapiens
  misc_RNA (1)...(19): siRNA sense strand
cagcaaaccagacacugaa

SEQ ID NO: 2005652 - RNA, 19 nt, Homo sapiens
  misc_RNA (1)...(19): siRNA sense strand
ggaaacgggagaccucugu

SEQ ID NO: 2005653 - RNA, 19 nt, Homo sapiens
  misc_RNA (1)...(19): siRNA sense strand
gagauucugucgccuuugc

SEQ ID NO: 2005654 - RNA, 19 nt, Homo sapiens
  misc_RNA (1)...(19): siRNA sense strand
cgguaucucuucacauuuc

SEQ ID NO: 2005655 - RNA, 19 nt, Homo sapiens
  misc_RNA (1)...(19): siRNA sense strand
gaccuuuaacucccaagua

SEQ ID NO: 2005656 - RNA, 19 nt, Homo sapiens
  misc_RNA (1)...(19): siRNA sense strand
acucuaccaugucuuuaaa

SEQ ID NO: 2005657 - RNA, 19 nt, Homo sapiens
  misc_RNA (1)...(19): siRNA sense strand
ggacgcagcaaaccagaca

SEQ ID NO: 2005658 - RNA, 19 nt, Homo sapiens
  misc_RNA (1)...(19): siRNA sense strand
aaagagaauccugcaauga

SEQ ID NO: 2005659 - RNA, 19 nt, Homo sapiens
  misc_RNA (1)...(19): siRNA sense strand
gcagguguguuugauaacu

SEQ ID NO: 2005660 - RNA, 19 nt, Homo sapiens
  misc_RNA (1)...(19): siRNA sense strand
ggcccaagcauucccuuaa

SEQ ID NO: 2005661 - RNA, 19 nt, Homo sapiens
  misc_RNA (1)...(19): siRNA sense strand
gagcuucuccacagcauca

SEQ ID NO: 2005662 - RNA, 19 nt, Homo sapiens
  misc_RNA (1)...(19): siRNA sense strand
gcaaucaaagauccaagga

SEQ ID NO: 2005663 - RNA, 19 nt, Homo sapiens
  misc_RNA (1)...(19): siRNA sense strand
gacggcacauggcccugua

SEQ ID NO: 2005664 - RNA, 19 nt, Homo sapiens
  misc_RNA (1)...(19): siRNA sense strand
gggcuggacacgcaagaaa

SEQ ID NO: 2005665 - RNA, 19 nt, Homo sapiens
  misc_RNA (1)...(19): siRNA sense strand
ggacucuaccaugucuuua

SEQ ID NO: 2005666 - RNA, 19 nt, Homo sapiens
  misc_RNA (1)...(19): siRNA sense strand
gggacucuaccaugucuuu

SEQ ID NO: 2005667 - RNA, 19 nt, Homo sapiens
  misc_RNA (1)...(19): siRNA sense strand
acaacaugcugaacgacuu

SEQ ID NO: 2005668 - RNA, 19 nt, Homo sapiens
  misc_RNA (1)...(19): siRNA sense strand
ucugucacguggaguguaa

SEQ ID NO: 2005669 - RNA, 19 nt, Homo sapiens
  misc_RNA (1)...(19): siRNA sense strand
uaggacugcccaucuuaua

SEQ ID NO: 2005670 - RNA, 19 nt, Homo sapiens
  misc_RNA (1)...(19): siRNA sense strand
gcuuaucucggcaaucaaa

SEQ ID NO: 2005671 - RNA, 19 nt, Homo sapiens
  misc_RNA (1)...(19): siRNA sense strand
acgcuuaucucggcaauca

SEQ ID NO: 2005672 - RNA, 19 nt, Homo sapiens
  misc_RNA (1)...(19): siRNA sense strand
cgagaagcagagaccuuua

SEQ ID NO: 2005673 - RNA, 19 nt, Homo sapiens
  misc_RNA (1)...(19): siRNA sense strand
gcagggaugggcucuguca

SEQ ID NO: 2005674 - RNA, 19 nt, Homo sapiens
  misc_RNA (1)...(19): siRNA sense strand
caaaccagacacugaagga

SEQ ID NO: 2005675 - RNA, 19 nt, Homo sapiens
  misc_RNA (1)...(19): siRNA sense strand
gacucuaccaugucuuuaa

SEQ ID NO: 2005676 - RNA, 19 nt, Homo sapiens
  misc_RNA (1)...(19): siRNA sense strand
agaguggguucccuuuaga

SEQ ID NO: 2005677 - RNA, 19 nt, Homo sapiens
  misc_RNA (1)...(19): siRNA sense strand
ggacugcccaucuuauacu

SEQ ID NO: 2005678 - RNA, 19 nt, Homo sapiens
  misc_RNA (1)...(19): siRNA sense strand
ggacacgcaagaaauccuu

SEQ ID NO: 2005679 - RNA, 19 nt, Homo sapiens
  misc_RNA (1)...(19): siRNA sense strand
uggguucccuuuagagaug

SEQ ID NO: 2005680 - RNA, 19 nt, Homo sapiens
  misc_RNA (1)...(19): siRNA sense strand
aagaaauccuugguugaga

SEQ ID NO: 2005681 - RNA, 19 nt, Homo sapiens
  misc_RNA (1)...(19): siRNA sense strand
gacauguucugggacucua

SEQ ID NO: 2005682 - RNA, 19 nt, Homo sapiens
  misc_RNA (1)...(19): siRNA sense strand
cccaagagggcauacauga

SEQ ID NO: 2005683 - RNA, 19 nt, Homo sapiens
  misc_RNA (1)...(19): siRNA sense strand
ggguugugcuugugaacug

SEQ ID NO: 2005684 - RNA, 19 nt, Homo sapiens
  misc_RNA (1)...(19): siRNA sense strand
ggaauugaucucccaguac

SEQ ID NO: 2005685 - RNA, 19 nt, Homo sapiens
  misc_RNA (1)...(19): siRNA sense strand
cugagauucugucgccuuu

SEQ ID NO: 2005686 - RNA, 19 nt, Homo sapiens
  misc_RNA (1)...(19): siRNA sense strand
agagggaacaccugaauca

SEQ ID NO: 2005687 - RNA, 19 nt, Homo sapiens
  misc_RNA (1)...(19): siRNA sense strand
gaggaaagcaaccaaaaug

SEQ ID NO: 2005688 - RNA, 19 nt, Homo sapiens
  misc_RNA (1)...(19): siRNA sense strand
guucgaagacccagagcuu

SEQ ID NO: 2005689 - RNA, 19 nt, Homo sapiens
  misc_RNA (1)...(19): siRNA sense strand
ggcagccacuuacgaugga

SEQ ID NO: 2005690 - RNA, 19 nt, Homo sapiens
  misc_RNA (1)...(19): siRNA sense strand
ccccagaccugacugaaaa

SEQ ID NO: 2005691 - RNA, 19 nt, Homo sapiens
  misc_RNA (1)...(19): siRNA sense strand
ccucagcccagcauauuau

SEQ ID NO: 2005692 - RNA, 19 nt, Homo sapiens
  misc_RNA (1)...(19): siRNA sense strand
caaguaggacugcccaucu

SEQ ID NO: 2005693 - RNA, 19 nt, Homo sapiens
  misc_RNA (1)...(19): siRNA sense strand
ugggagaugaugacgcuua

SEQ ID NO: 2005694 - RNA, 19 nt, Homo sapiens
  misc_RNA (1)...(19): siRNA sense strand
ccgagaagcagagaccuuu

SEQ ID NO: 2005695 - RNA, 19 nt, Homo sapiens
  misc_RNA (1)...(19): siRNA sense strand
acaaggacgcugucacuca

SEQ ID NO: 2005696 - RNA, 19 nt, Homo sapiens
  misc_RNA (1)...(19): siRNA sense strand
acagaguggguucccuuua

SEQ ID NO: 2005697 - RNA, 19 nt, Homo sapiens
  misc_RNA (1)...(19): siRNA sense strand
caucgcagguguguuugau

SEQ ID NO: 2005698 - RNA, 19 nt, Homo sapiens
  misc_RNA (1)...(19): siRNA sense strand
aagcagagaccuuuaacuc

SEQ ID NO: 2005699 - RNA, 19 nt, Homo sapiens
  misc_RNA (1)...(19): siRNA sense strand
agcaagaaauccaucauac

SEQ ID NO: 2005700 - RNA, 19 nt, Homo sapiens
  misc_RNA (1)...(19): siRNA sense strand
aggagucagugaaagagaa

SEQ ID NO: 2005701 - RNA, 19 nt, Homo sapiens
  misc_RNA (1)...(19): siRNA sense strand
gcccugcagcugaacagua

SEQ ID NO: 2005702 - RNA, 19 nt, Homo sapiens
  misc_RNA (1)...(19): siRNA sense strand
caccugggcacacugguuu

SEQ ID NO: 2005703 - RNA, 19 nt, Homo sapiens
  misc_RNA (1)...(19): siRNA sense strand
cugaggaugggcacuauuu

SEQ ID NO: 2005704 - RNA, 19 nt, Homo sapiens
  misc_RNA (1)...(19): siRNA sense strand
guaggacugcccaucuuau

SEQ ID NO: 2005705 - RNA, 19 nt, Homo sapiens
  misc_RNA (1)...(19): siRNA sense strand
ccaagcauucccuuaaaca

SEQ ID NO: 2005706 - RNA, 19 nt, Homo sapiens
  misc_RNA (1)...(19): siRNA sense strand
caucaccucuuuggagucu

SEQ ID NO: 2005707 - RNA, 19 nt, Homo sapiens
  misc_RNA (1)...(19): siRNA sense strand
cagaacaacccagccauca

SEQ ID NO: 2005708 - RNA, 19 nt, Homo sapiens
  misc_RNA (1)...(19): siRNA sense strand
uuaaaggagucagugaaag

SEQ ID NO: 2005709 - RNA, 19 nt, Homo sapiens
  misc_RNA (1)...(19): siRNA sense strand
gcucugaggaugggcacua

SEQ ID NO: 2005710 - RNA, 19 nt, Homo sapiens
  misc_RNA (1)...(19): siRNA sense strand
ggacuucauuuaaccgauu

SEQ ID NO: 2005711 - RNA, 19 nt, Homo sapiens
  misc_RNA (1)...(19): siRNA sense strand
gucaagagcauaaggauuu

SEQ ID NO: 2005712 - RNA, 19 nt, Homo sapiens
  misc_RNA (1)...(19): siRNA sense strand
gacaaggacucccaaugug

SEQ ID NO: 2005713 - RNA, 19 nt, Homo sapiens
  misc_RNA (1)...(19): siRNA sense strand
ugacaaggacucccaaugu

SEQ ID NO: 2005714 - RNA, 19 nt, Homo sapiens
  misc_RNA (1)...(19): siRNA sense strand
gccauccacugacucguaa

SEQ ID NO: 2005715 - RNA, 19 nt, Homo sapiens
  misc_RNA (1)...(19): siRNA sense strand
gcaucacacuugcccaugu

SEQ ID NO: 2005716 - RNA, 19 nt, Homo sapiens
  misc_RNA (1)...(19): siRNA sense strand
ggaggaugcaucacacuug

SEQ ID NO: 2005717 - RNA, 19 nt, Homo sapiens
  misc_RNA (1)...(19): siRNA sense strand
auaaggauuugcacaccua

SEQ ID NO: 2005718 - RNA, 19 nt, Homo sapiens
  misc_RNA (1)...(19): siRNA sense strand
gucaguaucugggucaaga

SEQ ID NO: 2005719 - RNA, 19 nt, Homo sapiens
  misc_RNA (1)...(19): siRNA sense strand
gcacaccuaugggcaaacu

SEQ ID NO: 2005720 - RNA, 19 nt, Homo sapiens
  misc_RNA (1)...(19): siRNA sense strand
ccacugacucguaaaguuc

SEQ ID NO: 2005721 - RNA, 19 nt, Homo sapiens
  misc_RNA (1)...(19): siRNA sense strand
ucaagagcauaaggauuug

SEQ ID NO: 2005722 - RNA, 19 nt, Homo sapiens
  misc_RNA (1)...(19): siRNA sense strand
gacuucauuuaaccgauuu

SEQ ID NO: 2005723 - RNA, 19 nt, Homo sapiens
  misc_RNA (1)...(19): siRNA sense strand
ggucaagagcauaaggauu

SEQ ID NO: 2005724 - RNA, 19 nt, Homo sapiens
  misc_RNA (1)...(19): siRNA sense strand
guuuacggacuucauuuaa

SEQ ID NO: 2005725 - RNA, 19 nt, Homo sapiens
  misc_RNA (1)...(19): siRNA sense strand
gugcugugcugucaguauc

SEQ ID NO: 2005726 - RNA, 19 nt, Homo sapiens
  misc_RNA (1)...(19): siRNA sense strand
uccacugacucguaaaguu

SEQ ID NO: 2005727 - RNA, 19 nt, Homo sapiens
  misc_RNA (1)...(19): siRNA sense strand
ggcaugugcugugcuguca

SEQ ID NO: 2005728 - RNA, 19 nt, Homo sapiens
  misc_RNA (1)...(19): siRNA sense strand
caucacacuugcccauguc

SEQ ID NO: 2005729 - RNA, 19 nt, Homo sapiens
  misc_RNA (1)...(19): siRNA sense strand
gggcggaggaugcaucaca

SEQ ID NO: 2005730 - RNA, 19 nt, Homo sapiens
  misc_RNA (1)...(19): siRNA sense strand
uguuuacggacuucauuua

SEQ ID NO: 2005731 - RNA, 19 nt, Homo sapiens
  misc_RNA (1)...(19): siRNA sense strand
caugugcugugcugucagu

SEQ ID NO: 2005732 - RNA, 19 nt, Homo sapiens
  misc_RNA (1)...(19): siRNA sense strand
guaucugggucaagagcau

SEQ ID NO: 2005733 - RNA, 19 nt, Homo sapiens
  misc_RNA (1)...(19): siRNA sense strand
gacagcugccauccacuga

SEQ ID NO: 2005734 - RNA, 19 nt, Homo sapiens
  misc_RNA (1)...(19): siRNA sense strand
cagcugccauccacugacu

SEQ ID NO: 2005735 - RNA, 19 nt, Homo sapiens
  misc_RNA (1)...(19): siRNA sense strand
gugacaaggacucccaaug

SEQ ID NO: 2005736 - RNA, 19 nt, Homo sapiens
  misc_RNA (1)...(19): siRNA sense strand
gaaauuuacucguguguua

SEQ ID NO: 2005737 - RNA, 19 nt, Homo sapiens
  misc_RNA (1)...(19): siRNA sense strand
gaacucaucucaugcaaga

SEQ ID NO: 2005738 - RNA, 19 nt, Homo sapiens
  misc_RNA (1)...(19): siRNA sense strand
ggaaaugucugaccucaau

SEQ ID NO: 2005739 - RNA, 19 nt, Homo sapiens
  misc_RNA (1)...(19): siRNA sense strand
gaacaugugugcuggaaug

SEQ ID NO: 2005740 - RNA, 19 nt, Homo sapiens
  misc_RNA (1)...(19): siRNA sense strand
gagauaagcuuggucauau

SEQ ID NO: 2005741 - RNA, 19 nt, Homo sapiens
  misc_RNA (1)...(19): siRNA sense strand
gggaagaaauggugaacua

SEQ ID NO: 2005742 - RNA, 19 nt, Homo sapiens
  misc_RNA (1)...(19): siRNA sense strand
uaaaguuccuccugaauuu

SEQ ID NO: 2005743 - RNA, 19 nt, Homo sapiens
  misc_RNA (1)...(19): siRNA sense strand
ugucugaccucaauaaaua

SEQ ID NO: 2005744 - RNA, 19 nt, Homo sapiens
  misc_RNA (1)...(19): siRNA sense strand
ugaagaagcuugucgagaa

SEQ ID NO: 2005745 - RNA, 19 nt, Homo sapiens
  misc_RNA (1)...(19): siRNA sense strand
uaacagggcucgacagaga

SEQ ID NO: 2005746 - RNA, 19 nt, Homo sapiens
  misc_RNA (1)...(19): siRNA sense strand
agaaagagauccagaaguu

SEQ ID NO: 2005747 - RNA, 19 nt, Homo sapiens
  misc_RNA (1)...(19): siRNA sense strand
gagaacuacuucaugauaa

SEQ ID NO: 2005748 - RNA, 19 nt, Homo sapiens
  misc_RNA (1)...(19): siRNA sense strand
gaaaccaaguuaaucgaaa

SEQ ID NO: 2005749 - RNA, 19 nt, Homo sapiens
  misc_RNA (1)...(19): siRNA sense strand
gauaagcuauuuggucuuu

SEQ ID NO: 2005750 - RNA, 19 nt, Homo sapiens
  misc_RNA (1)...(19): siRNA sense strand
caaagaagaguaaagagua

SEQ ID NO: 2005751 - RNA, 19 nt, Homo sapiens
  misc_RNA (1)...(19): siRNA sense strand
ggagaacuacuucaugaua

SEQ ID NO: 2005752 - RNA, 19 nt, Homo sapiens
  misc_RNA (1)...(19): siRNA sense strand
gcacgaguacuauuacaua

SEQ ID NO: 2005753 - RNA, 19 nt, Homo sapiens
  misc_RNA (1)...(19): siRNA sense strand
uaugaaagcuucuguagau

SEQ ID NO: 2005754 - RNA, 19 nt, Homo sapiens
  misc_RNA (1)...(19): siRNA sense strand
cagaaaggccguaguagua

SEQ ID NO: 2005755 - RNA, 19 nt, Homo sapiens
  misc_RNA (1)...(19): siRNA sense strand
gaaaggccguaguaguaaa

SEQ ID NO: 2005756 - RNA, 19 nt, Homo sapiens
  misc_RNA (1)...(19): siRNA sense strand
aaagaaaguucgcccauug

SEQ ID NO: 2005757 - RNA, 19 nt, Homo sapiens
  misc_RNA (1)...(19): siRNA sense strand
gaagaaauggugaacuauu

SEQ ID NO: 2005758 - RNA, 19 nt, Homo sapiens
  misc_RNA (1)...(19): siRNA sense strand
gaagaagcuugucgagaau

SEQ ID NO: 2005759 - RNA, 19 nt, Homo sapiens
  misc_RNA (1)...(19): siRNA sense strand
uaccauaaccuucgcauua

SEQ ID NO: 2005760 - RNA, 19 nt, Homo sapiens
  misc_RNA (1)...(19): siRNA sense strand
ucugugagguugugaauuu

SEQ ID NO: 2005761 - RNA, 19 nt, Homo sapiens
  misc_RNA (1)...(19): siRNA sense strand
gaccagugcuguugcagaa

SEQ ID NO: 2005762 - RNA, 19 nt, Homo sapiens
  misc_RNA (1)...(19): siRNA sense strand
gaacacagguuugcuccau

SEQ ID NO: 2005763 - RNA, 19 nt, Homo sapiens
  misc_RNA (1)...(19): siRNA sense strand
caccuugccugaacugaua

SEQ ID NO: 2005764 - RNA, 19 nt, Homo sapiens
  misc_RNA (1)...(19): siRNA sense strand
ugacauggacggcaaagua

SEQ ID NO: 2005765 - RNA, 19 nt, Homo sapiens
  misc_RNA (1)...(19): siRNA sense strand
caagaucucuguuacaaac

SEQ ID NO: 2005766 - RNA, 19 nt, Homo sapiens
  misc_RNA (1)...(19): siRNA sense strand
gaaagcuucuguagaugau

SEQ ID NO: 2005767 - RNA, 19 nt, Homo sapiens
  misc_RNA (1)...(19): siRNA sense strand
gaacugauagggauuaugg

SEQ ID NO: 2005768 - RNA, 19 nt, Homo sapiens
  misc_RNA (1)...(19): siRNA sense strand
caugugugcuggaauguuu

SEQ ID NO: 2005769 - RNA, 19 nt, Homo sapiens
  misc_RNA (1)...(19): siRNA sense strand
uguaucgacuccuuuguua

SEQ ID NO: 2005770 - RNA, 19 nt, Homo sapiens
  misc_RNA (1)...(19): siRNA sense strand
uaucaaggauggcacuauu

SEQ ID NO: 2005771 - RNA, 19 nt, Homo sapiens
  misc_RNA (1)...(19): siRNA sense strand
gaagccaugucugcuauug

SEQ ID NO: 2005772 - RNA, 19 nt, Homo sapiens
  misc_RNA (1)...(19): siRNA sense strand
guaaauaaagcugcuguuu

SEQ ID NO: 2005773 - RNA, 19 nt, Homo sapiens
  misc_RNA (1)...(19): siRNA sense strand
gaauuggaacucuacagua

SEQ ID NO: 2005774 - RNA, 19 nt, Homo sapiens
  misc_RNA (1)...(19): siRNA sense strand
uaaaagauguggaggauga

SEQ ID NO: 2005775 - RNA, 19 nt, Homo sapiens
  misc_RNA (1)...(19): siRNA sense strand
agaagcuugucgagaauua

SEQ ID NO: 2005776 - RNA, 19 nt, Homo sapiens
  misc_RNA (1)...(19): siRNA sense strand
ugauuucucugcucauaaa

SEQ ID NO: 2005777 - RNA, 19 nt, Homo sapiens
  misc_RNA (1)...(19): siRNA sense strand
gcaaagaagaguaaagagu

SEQ ID NO: 2005778 - RNA, 19 nt, Homo sapiens
  misc_RNA (1)...(19): siRNA sense strand
gaaaugauggaucccaaga

SEQ ID NO: 2005779 - RNA, 19 nt, Homo sapiens
  misc_RNA (1)...(19): siRNA sense strand
ugaacaagcuaucaaggau

SEQ ID NO: 2005780 - RNA, 19 nt, Homo sapiens
  misc_RNA (1)...(19): siRNA sense strand
aaaaggagaucauccaauu

SEQ ID NO: 2005781 - RNA, 19 nt, Homo sapiens
  misc_RNA (1)...(19): siRNA sense strand
uagaagauccugcuaugaa

SEQ ID NO: 2005782 - RNA, 19 nt, Homo sapiens
  misc_RNA (1)...(19): siRNA sense strand
gaggaugacaugcaaagaa

SEQ ID NO: 2005783 - RNA, 19 nt, Homo sapiens
  misc_RNA (1)...(19): siRNA sense strand
gccgauggcucucaaaugg

SEQ ID NO: 2005784 - RNA, 19 nt, Homo sapiens
  misc_RNA (1)...(19): siRNA sense strand
gaaagagaccagugcuguu

SEQ ID NO: 2005785 - RNA, 19 nt, Homo sapiens
  misc_RNA (1)...(19): siRNA sense strand
gaagaaagagauccagaag

SEQ ID NO: 2005786 - RNA, 19 nt, Homo sapiens
  misc_RNA (1)...(19): siRNA sense strand
ugggagaacuacuucauga

SEQ ID NO: 2005787 - RNA, 19 nt, Homo sapiens
  misc_RNA (1)...(19): siRNA sense strand
cccaagugcuaccuauaua

SEQ ID NO: 2005788 - RNA, 19 nt, Homo sapiens
  misc_RNA (1)...(19): siRNA sense strand
uuacgugccuuuacauuca

SEQ ID NO: 2005789 - RNA, 19 nt, Homo sapiens
  misc_RNA (1)...(19): siRNA sense strand
caaacuggguggacauuac

SEQ ID NO: 2005790 - RNA, 19 nt, Homo sapiens
  misc_RNA (1)...(19): siRNA sense strand
gaacuagaacaccaacaau

SEQ ID NO: 2005791 - RNA, 19 nt, Homo sapiens
  misc_RNA (1)...(19): siRNA sense strand
gaucucaccuugccugaac

SEQ ID NO: 2005792 - RNA, 19 nt, Homo sapiens
  misc_RNA (1)...(19): siRNA sense strand
ucaaggauggcacuauuaa

SEQ ID NO: 2005793 - RNA, 19 nt, Homo sapiens
  misc_RNA (1)...(19): siRNA sense strand
aguuugagcuugauaguga

SEQ ID NO: 2005794 - RNA, 19 nt, Homo sapiens
  misc_RNA (1)...(19): siRNA sense strand
gcagaaaggccguaguagu

SEQ ID NO: 2005795 - RNA, 19 nt, Homo sapiens
  misc_RNA (1)...(19): siRNA sense strand
cagcagaaaggccguagua

SEQ ID NO: 2005796 - RNA, 19 nt, Homo sapiens
  misc_RNA (1)...(19): siRNA sense strand
cggccauucuguagucuua

SEQ ID NO: 2005797 - RNA, 19 nt, Homo sapiens
  misc_RNA (1)...(19): siRNA sense strand
ccaccuaccuucccucgau

SEQ ID NO: 2005798 - RNA, 19 nt, Homo sapiens
  misc_RNA (1)...(19): siRNA sense strand
cauaauucauugcaucaug

SEQ ID NO: 2005799 - RNA, 19 nt, Homo sapiens
  misc_RNA (1)...(19): siRNA sense strand
ugacagaucuucgaguuac

SEQ ID NO: 2005800 - RNA, 19 nt, Homo sapiens
  misc_RNA (1)...(19): siRNA sense strand
guaugcacgaguacuauua

SEQ ID NO: 2005801 - RNA, 19 nt, Homo sapiens
  misc_RNA (1)...(19): siRNA sense strand
cauuuggccugguuaggua

SEQ ID NO: 2005802 - RNA, 19 nt, Homo sapiens
  misc_RNA (1)...(19): siRNA sense strand
aaagagauccagaaguuga

SEQ ID NO: 2005803 - RNA, 19 nt, Homo sapiens
  misc_RNA (1)...(19): siRNA sense strand
ggaaaccaaguuaaucgaa

SEQ ID NO: 2005804 - RNA, 19 nt, Homo sapiens
  misc_RNA (1)...(19): siRNA sense strand
gcacuucggucuuuuguca

SEQ ID NO: 2005805 - RNA, 19 nt, Homo sapiens
  misc_RNA (1)...(19): siRNA sense strand
ugcaagacauggugaaaga

SEQ ID NO: 2005806 - RNA, 19 nt, Homo sapiens
  misc_RNA (1)...(19): siRNA sense strand
guauuuacgugccuuuaca

SEQ ID NO: 2005807 - RNA, 19 nt, Homo sapiens
  misc_RNA (1)...(19): siRNA sense strand
gcacagacaguauuuacgu

SEQ ID NO: 2005808 - RNA, 19 nt, Homo sapiens
  misc_RNA (1)...(19): siRNA sense strand
aauuggaacucuacaguau

SEQ ID NO: 2005809 - RNA, 19 nt, Homo sapiens
  misc_RNA (1)...(19): siRNA sense strand
gaaaaucugugacauugca

SEQ ID NO: 2005810 - RNA, 19 nt, Homo sapiens
  misc_RNA (1)...(19): siRNA sense strand
gaaagagauccagaaguug

SEQ ID NO: 2005811 - RNA, 19 nt, Homo sapiens
  misc_RNA (1)...(19): siRNA sense strand
ggacauuacccaagauuuu

SEQ ID NO: 2005812 - RNA, 19 nt, Homo sapiens
  misc_RNA (1)...(19): siRNA sense strand
gaauuaaaguugggagaac

SEQ ID NO: 2005813 - RNA, 19 nt, Homo sapiens
  misc_RNA (1)...(19): siRNA sense strand
guaaagaguacucgaaguc

SEQ ID NO: 2005814 - RNA, 19 nt, Homo sapiens
  misc_RNA (1)...(19): siRNA sense strand
aaugauggaucccaagaug

SEQ ID NO: 2005815 - RNA, 19 nt, Homo sapiens
  misc_RNA (1)...(19): siRNA sense strand
cuaaaguuccuccugaauu

SEQ ID NO: 2005816 - RNA, 19 nt, Homo sapiens
  misc_RNA (1)...(19): siRNA sense strand
gaccaugagguuaauagaa

SEQ ID NO: 2005817 - RNA, 19 nt, Homo sapiens
  misc_RNA (1)...(19): siRNA sense strand
ccaagcauaucagaacaug

SEQ ID NO: 2005818 - RNA, 19 nt, Homo sapiens
  misc_RNA (1)...(19): siRNA sense strand
gauaagcuuggucauauuc

SEQ ID NO: 2005819 - RNA, 19 nt, Homo sapiens
  misc_RNA (1)...(19): siRNA sense strand
ccaagugcuaccuauauaa

SEQ ID NO: 2005820 - RNA, 19 nt, Homo sapiens
  misc_RNA (1)...(19): siRNA sense strand
ugaauuuagugaacaguca

SEQ ID NO: 2005821 - RNA, 19 nt, Homo sapiens
  misc_RNA (1)...(19): siRNA sense strand
ggauggcacuauuaaaauu

SEQ ID NO: 2005822 - RNA, 19 nt, Homo sapiens
  misc_RNA (1)...(19): siRNA sense strand
ugauagggauuauggauac

SEQ ID NO: 2005823 - RNA, 19 nt, Homo sapiens
  misc_RNA (1)...(19): siRNA sense strand
gaaaugucugaccucaaua

SEQ ID NO: 2005824 - RNA, 19 nt, Homo sapiens
  misc_RNA (1)...(19): siRNA sense strand
cuaaguggcuuugaauugg

SEQ ID NO: 2005825 - RNA, 19 nt, Homo sapiens
  misc_RNA (1)...(19): siRNA sense strand
uuagguaccuggguccuuu

SEQ ID NO: 2005826 - RNA, 19 nt, Homo sapiens
  misc_RNA (1)...(19): siRNA sense strand
gccauucuguagucuuauu

SEQ ID NO: 2005827 - RNA, 19 nt, Homo sapiens
  misc_RNA (1)...(19): siRNA sense strand
aaaggagaucauccaauua

SEQ ID NO: 2005828 - RNA, 19 nt, Homo sapiens
  misc_RNA (1)...(19): siRNA sense strand
ggauuauggauacauguuu

SEQ ID NO: 2005829 - RNA, 19 nt, Homo sapiens
  misc_RNA (1)...(19): siRNA sense strand
ugugacagaucuucgaguu

SEQ ID NO: 2005830 - RNA, 19 nt, Homo sapiens
  misc_RNA (1)...(19): siRNA sense strand
ugaaagcuucuguagauga

SEQ ID NO: 2005831 - RNA, 19 nt, Homo sapiens
  misc_RNA (1)...(19): siRNA sense strand
ccaugagguuaauagaauu

SEQ ID NO: 2005832 - RNA, 19 nt, Homo sapiens
  misc_RNA (1)...(19): siRNA sense strand
ggacggcaaaguacguaaa

SEQ ID NO: 2005833 - RNA, 19 nt, Homo sapiens
  misc_RNA (1)...(19): siRNA sense strand
ccuggguccuuuaccauaa

SEQ ID NO: 2005834 - RNA, 19 nt, Homo sapiens
  misc_RNA (1)...(19): siRNA sense strand
agagauaagcuuggucaua

SEQ ID NO: 2005835 - RNA, 19 nt, Homo sapiens
  misc_RNA (1)...(19): siRNA sense strand
gacaugcaaagaagaguaa

SEQ ID NO: 2005836 - RNA, 19 nt, Homo sapiens
  misc_RNA (1)...(19): siRNA sense strand
gaaauggucucaagggaaa

SEQ ID NO: 2005837 - RNA, 19 nt, Homo sapiens
  misc_RNA (1)...(19): siRNA sense strand
gaagugaucugggauuuau

SEQ ID NO: 2005838 - RNA, 19 nt, Homo sapiens
  misc_RNA (1)...(19): siRNA sense strand
acacguaucugucccauuu

SEQ ID NO: 2005839 - RNA, 19 nt, Homo sapiens
  misc_RNA (1)...(19): siRNA sense strand
gaaccaaguuguccuaugg

SEQ ID NO: 2005840 - RNA, 19 nt, Homo sapiens
  misc_RNA (1)...(19): siRNA sense strand
ugauauaacugcugaucua

SEQ ID NO: 2005841 - RNA, 19 nt, Homo sapiens
  misc_RNA (1)...(19): siRNA sense strand
guuaagcaguuguuucuuu

SEQ ID NO: 2005842 - RNA, 19 nt, Homo sapiens
  misc_RNA (1)...(19): siRNA sense strand
gaaacaggaaugucacuuu

SEQ ID NO: 2005843 - RNA, 19 nt, Homo sapiens
  misc_RNA (1)...(19): siRNA sense strand
aaacaggaaugucacuuug

SEQ ID NO: 2005844 - RNA, 19 nt, Homo sapiens
  misc_RNA (1)...(19): siRNA sense strand
ggaauucuaccucuuguga

SEQ ID NO: 2005845 - RNA, 19 nt, Homo sapiens
  misc_RNA (1)...(19): siRNA sense strand
gaucugggauuuaucacau

SEQ ID NO: 2005846 - RNA, 19 nt, Homo sapiens
  misc_RNA (1)...(19): siRNA sense strand
cgaagcugcugcugaaaga

SEQ ID NO: 2005847 - RNA, 19 nt, Homo sapiens
  misc_RNA (1)...(19): siRNA sense strand
cugcugaucuagagaauau

SEQ ID NO: 2005848 - RNA, 19 nt, Homo sapiens
  misc_RNA (1)...(19): siRNA sense strand
gacaggaucaggacacgua

SEQ ID NO: 2005849 - RNA, 19 nt, Homo sapiens
  misc_RNA (1)...(19): siRNA sense strand
gaucaggacacguaucugu

SEQ ID NO: 2005850 - RNA, 19 nt, Homo sapiens
  misc_RNA (1)...(19): siRNA sense strand
cauaugaaauaacgaagag

SEQ ID NO: 2005851 - RNA, 19 nt, Homo sapiens
  misc_RNA (1)...(19): siRNA sense strand
gaagauuucacuggaccua

SEQ ID NO: 2005852 - RNA, 19 nt, Homo sapiens
  misc_RNA (1)...(19): siRNA sense strand
cagcagaauauucaacaaa

SEQ ID NO: 2005853 - RNA, 19 nt, Homo sapiens
  misc_RNA (1)...(19): siRNA sense strand
aagaagugaucugggauuu

SEQ ID NO: 2005854 - RNA, 19 nt, Homo sapiens
  misc_RNA (1)...(19): siRNA sense strand
ggaccuagagaaagaagug

SEQ ID NO: 2005855 - RNA, 19 nt, Homo sapiens
  misc_RNA (1)...(19): siRNA sense strand
uauaacugcugaucuagag

SEQ ID NO: 2005856 - RNA, 19 nt, Homo sapiens
  misc_RNA (1)...(19): siRNA sense strand
caucaccaccgccuucaaa

SEQ ID NO: 2005857 - RNA, 19 nt, Homo sapiens
  misc_RNA (1)...(19): siRNA sense strand
accaaaugcuggaauucua

SEQ ID NO: 2005858 - RNA, 19 nt, Homo sapiens
  misc_RNA (1)...(19): siRNA sense strand
auaaugcucugaaccaagu

SEQ ID NO: 2005859 - RNA, 19 nt, Homo sapiens
  misc_RNA (1)...(19): siRNA sense strand
aaauaaugcucugaaccaa

SEQ ID NO: 2005860 - RNA, 19 nt, Homo sapiens
  misc_RNA (1)...(19): siRNA sense strand
cgauggaaauggucucaag

SEQ ID NO: 2005861 - RNA, 19 nt, Homo sapiens
  misc_RNA (1)...(19): siRNA sense strand
cguaccaaaugcuggaauu

SEQ ID NO: 2005862 - RNA, 19 nt, Homo sapiens
  misc_RNA (1)...(19): siRNA sense strand
cacuggaccuagagaaaga

SEQ ID NO: 2005863 - RNA, 19 nt, Homo sapiens
  misc_RNA (1)...(19): siRNA sense strand
ggaauguuaagcaguuguu

SEQ ID NO: 2005864 - RNA, 19 nt, Homo sapiens
  misc_RNA (1)...(19): siRNA sense strand
uaacugcugaucuagagaa

SEQ ID NO: 2005865 - RNA, 19 nt, Homo sapiens
  misc_RNA (1)...(19): siRNA sense strand
ucugggauuuaucacauuu

SEQ ID NO: 2005866 - RNA, 19 nt, Homo sapiens
  misc_RNA (1)...(19): siRNA sense strand
ugggauuuaucacauuuga

SEQ ID NO: 2005867 - RNA, 19 nt, Homo sapiens
  misc_RNA (1)...(19): siRNA sense strand
ugaaccaaguuguccuaug

SEQ ID NO: 2005868 - RNA, 19 nt, Homo sapiens
  misc_RNA (1)...(19): siRNA sense strand
gcugaucuagagaauauau

SEQ ID NO: 2005869 - RNA, 19 nt, Homo sapiens
  misc_RNA (1)...(19): siRNA sense strand
gcuggaauucuaccucuug

SEQ ID NO: 2005870 - RNA, 19 nt, Homo sapiens
  misc_RNA (1)...(19): siRNA sense strand
ucacuuugacccugucuug

SEQ ID NO: 2005871 - RNA, 19 nt, Homo sapiens
  misc_RNA (1)...(19): siRNA sense strand
aagcugcugcugaaagaua

SEQ ID NO: 2005872 - RNA, 19 nt, Homo sapiens
  misc_RNA (1)...(19): siRNA sense strand
agauuucacuggaccuaga

SEQ ID NO: 2005873 - RNA, 19 nt, Homo sapiens
  misc_RNA (1)...(19): siRNA sense strand
gcacgucucgcggaucaug

SEQ ID NO: 2005874 - RNA, 19 nt, Homo sapiens
  misc_RNA (1)...(19): siRNA sense strand
ggaaacaggaaugucacuu

SEQ ID NO: 2005875 - RNA, 19 nt, Homo sapiens
  misc_RNA (1)...(19): siRNA sense strand
agaagugaucugggauuua

SEQ ID NO: 2005876 - RNA, 19 nt, Homo sapiens
  misc_RNA (1)...(19): siRNA sense strand
ucucgcggaucaugcuaaa

SEQ ID NO: 2005877 - RNA, 19 nt, Homo sapiens
  misc_RNA (1)...(19): siRNA sense strand
ucagcagaauauucaacaa

SEQ ID NO: 2005878 - RNA, 19 nt, Homo sapiens
  misc_RNA (1)...(19): siRNA sense strand
gaauguuaagcaguuguuu

SEQ ID NO: 2005879 - RNA, 19 nt, Homo sapiens
  misc_RNA (1)...(19): siRNA sense strand
aaagaagugaucugggauu

SEQ ID NO: 2005880 - RNA, 19 nt, Homo sapiens
  misc_RNA (1)...(19): siRNA sense strand
cugcacgucucgcggauca

SEQ ID NO: 2005881 - RNA, 19 nt, Homo sapiens
  misc_RNA (1)...(19): siRNA sense strand
ggaacgucguaccaaaugc

SEQ ID NO: 2005882 - RNA, 19 nt, Homo sapiens
  misc_RNA (1)...(19): siRNA sense strand
auuggaauguuaagcaguu

SEQ ID NO: 2005883 - RNA, 19 nt, Homo sapiens
  misc_RNA (1)...(19): siRNA sense strand
gaacgucguaccaaaugcu

SEQ ID NO: 2005884 - RNA, 19 nt, Homo sapiens
  misc_RNA (1)...(19): siRNA sense strand
gcugaaagauaugaaaaca

SEQ ID NO: 2005885 - RNA, 19 nt, Homo sapiens
  misc_RNA (1)...(19): siRNA sense strand
auccgaagcugcugcugaa

SEQ ID NO: 2005886 - RNA, 19 nt, Homo sapiens
  misc_RNA (1)...(19): siRNA sense strand
gauauaacugcugaucuag

SEQ ID NO: 2005887 - RNA, 19 nt, Homo sapiens
  misc_RNA (1)...(19): siRNA sense strand
ucaccaccgccuucaaaga

SEQ ID NO: 2005888 - RNA, 19 nt, Homo sapiens
  misc_RNA (1)...(19): siRNA sense strand
aauucuaccucuugugaca

SEQ ID NO: 2005889 - RNA, 19 nt, Homo sapiens
  misc_RNA (1)...(19): siRNA sense strand
ucccauuuccagauacaua

SEQ ID NO: 2005890 - RNA, 19 nt, Homo sapiens
  misc_RNA (1)...(19): siRNA sense strand
cuuugacccugucuuggaa

SEQ ID NO: 2005891 - RNA, 19 nt, Homo sapiens
  misc_RNA (1)...(19): siRNA sense strand
ccaaaugcuggaauucuac

SEQ ID NO: 2005892 - RNA, 19 nt, Homo sapiens
  misc_RNA (1)...(19): siRNA sense strand
gcugcugaaagauaugaaa

SEQ ID NO: 2005893 - RNA, 19 nt, Homo sapiens
  misc_RNA (1)...(19): siRNA sense strand
aagggaaacaggaauguca

SEQ ID NO: 2005894 - RNA, 19 nt, Homo sapiens
  misc_RNA (1)...(19): siRNA sense strand
ccagagacguccucaacuu

SEQ ID NO: 2005895 - RNA, 19 nt, Homo sapiens
  misc_RNA (1)...(19): siRNA sense strand
gacaccagcucuuccauca

SEQ ID NO: 2005896 - RNA, 19 nt, Homo sapiens
  misc_RNA (1)...(19): siRNA sense strand
augaaugcguguacuguua

SEQ ID NO: 2005897 - RNA, 19 nt, Homo sapiens
  misc_RNA (1)...(19): siRNA sense strand
ggaggaagaccaugaaugc

SEQ ID NO: 2005898 - RNA, 19 nt, Homo sapiens
  misc_RNA (1)...(19): siRNA sense strand
ccaacaaggaggaguguau

SEQ ID NO: 2005899 - RNA, 19 nt, Homo sapiens
  misc_RNA (1)...(19): siRNA sense strand
cugcugggcugggacauuu

SEQ ID NO: 2005900 - RNA, 19 nt, Homo sapiens
  misc_RNA (1)...(19): siRNA sense strand
gguggaggcugaggaacug

SEQ ID NO: 2005901 - RNA, 19 nt, Homo sapiens
  misc_RNA (1)...(19): siRNA sense strand
gaccuucucugaggagucu

SEQ ID NO: 2005902 - RNA, 19 nt, Homo sapiens
  misc_RNA (1)...(19): siRNA sense strand
cagcagcagcuacaacuca

SEQ ID NO: 2005903 - RNA, 19 nt, Homo sapiens
  misc_RNA (1)...(19): siRNA sense strand
gguccauccuggcucaaca

SEQ ID NO: 2005904 - RNA, 19 nt, Homo sapiens
  misc_RNA (1)...(19): siRNA sense strand
ccagggugaccuucucuga

SEQ ID NO: 2005905 - RNA, 19 nt, Homo sapiens
  misc_RNA (1)...(19): siRNA sense strand
ccugggcuaugacuggauu

SEQ ID NO: 2005906 - RNA, 19 nt, Homo sapiens
  misc_RNA (1)...(19): siRNA sense strand
caacaaggaggaguguauc

SEQ ID NO: 2005907 - RNA, 19 nt, Homo sapiens
  misc_RNA (1)...(19): siRNA sense strand
gaauccagcagcagcuaca

SEQ ID NO: 2005908 - RNA, 19 nt, Homo sapiens
  misc_RNA (1)...(19): siRNA sense strand
cagagacguccucaacuuc

SEQ ID NO: 2005909 - RNA, 19 nt, Homo sapiens
  misc_RNA (1)...(19): siRNA sense strand
caugaaugcguguacuguu

SEQ ID NO: 2005910 - RNA, 19 nt, Homo sapiens
  misc_RNA (1)...(19): siRNA sense strand
gcaaauaggagauacauua

SEQ ID NO: 2005911 - RNA, 19 nt, Homo sapiens
  misc_RNA (1)...(19): siRNA sense strand
gcagccaacucauaaauua

SEQ ID NO: 2005912 - RNA, 19 nt, Homo sapiens
  misc_RNA (1)...(19): siRNA sense strand
agacaaagcucauucaauu

SEQ ID NO: 2005913 - RNA, 19 nt, Homo sapiens
  misc_RNA (1)...(19): siRNA sense strand
gaaagaggaaucacuguua

SEQ ID NO: 2005914 - RNA, 19 nt, Homo sapiens
  misc_RNA (1)...(19): siRNA sense strand
gaagagcaguucagaagaa

SEQ ID NO: 2005915 - RNA, 19 nt, Homo sapiens
  misc_RNA (1)...(19): siRNA sense strand
gaagaaugcugauccugaa

SEQ ID NO: 2005916 - RNA, 19 nt, Homo sapiens
  misc_RNA (1)...(19): siRNA sense strand
gaugaaagaugucacugaa

SEQ ID NO: 2005917 - RNA, 19 nt, Homo sapiens
  misc_RNA (1)...(19): siRNA sense strand
gaacuuacagggacaauug

SEQ ID NO: 2005918 - RNA, 19 nt, Homo sapiens
  misc_RNA (1)...(19): siRNA sense strand
guagcaaacuucuuucuug

SEQ ID NO: 2005919 - RNA, 19 nt, Homo sapiens
  misc_RNA (1)...(19): siRNA sense strand
ucugagagcuuugguauuu

SEQ ID NO: 2005920 - RNA, 19 nt, Homo sapiens
  misc_RNA (1)...(19): siRNA sense strand
gcacagcuaucgguaauuc

SEQ ID NO: 2005921 - RNA, 19 nt, Homo sapiens
  misc_RNA (1)...(19): siRNA sense strand
gagaaaguguuugauauuc

SEQ ID NO: 2005922 - RNA, 19 nt, Homo sapiens
  misc_RNA (1)...(19): siRNA sense strand
aaagaggaaucacuguuaa

SEQ ID NO: 2005923 - RNA, 19 nt, Homo sapiens
  misc_RNA (1)...(19): siRNA sense strand
gaccggagcaagaauauaa

SEQ ID NO: 2005924 - RNA, 19 nt, Homo sapiens
  misc_RNA (1)...(19): siRNA sense strand
auaagcagguucuugauaa

SEQ ID NO: 2005925 - RNA, 19 nt, Homo sapiens
  misc_RNA (1)...(19): siRNA sense strand
ugaaugaaauugugguaga

SEQ ID NO: 2005926 - RNA, 19 nt, Homo sapiens
  misc_RNA (1)...(19): siRNA sense strand
gcagguucuugauaaauug

SEQ ID NO: 2005927 - RNA, 19 nt, Homo sapiens
  misc_RNA (1)...(19): siRNA sense strand
caaaagacauacgaaguua

SEQ ID NO: 2005928 - RNA, 19 nt, Homo sapiens
  misc_RNA (1)...(19): siRNA sense strand
auauaaagcuguacuguca

SEQ ID NO: 2005929 - RNA, 19 nt, Homo sapiens
  misc_RNA (1)...(19): siRNA sense strand
gauaaaggaacauagagaa

SEQ ID NO: 2005930 - RNA, 19 nt, Homo sapiens
  misc_RNA (1)...(19): siRNA sense strand
gcaaguggaacgagaaaga

SEQ ID NO: 2005931 - RNA, 19 nt, Homo sapiens
  misc_RNA (1)...(19): siRNA sense strand
uagaggagcuaguaacugu

SEQ ID NO: 2005932 - RNA, 19 nt, Homo sapiens
  misc_RNA (1)...(19): siRNA sense strand
uaucaauccugcacaauuc

SEQ ID NO: 2005933 - RNA, 19 nt, Homo sapiens
  misc_RNA (1)...(19): siRNA sense strand
gaaaguguuugauauucca

SEQ ID NO: 2005934 - RNA, 19 nt, Homo sapiens
  misc_RNA (1)...(19): siRNA sense strand
gugaacggcugaaggauuc

SEQ ID NO: 2005935 - RNA, 19 nt, Homo sapiens
  misc_RNA (1)...(19): siRNA sense strand
gaauggaaauacuguagag

SEQ ID NO: 2005936 - RNA, 19 nt, Homo sapiens
  misc_RNA (1)...(19): siRNA sense strand
guauuugacuccaccuuug

SEQ ID NO: 2005937 - RNA, 19 nt, Homo sapiens
  misc_RNA (1)...(19): siRNA sense strand
gagcaguucagaagaauau

SEQ ID NO: 2005938 - RNA, 19 nt, Homo sapiens
  misc_RNA (1)...(19): siRNA sense strand
uaagcagguucuugauaaa

SEQ ID NO: 2005939 - RNA, 19 nt, Homo sapiens
  misc_RNA (1)...(19): siRNA sense strand
gagacaagcagaagggaaa

SEQ ID NO: 2005940 - RNA, 19 nt, Homo sapiens
  misc_RNA (1)...(19): siRNA sense strand
uuaaaugauuccaguguga

SEQ ID NO: 2005941 - RNA, 19 nt, Homo sapiens
  misc_RNA (1)...(19): siRNA sense strand
ggacaggugggcuaucuga

SEQ ID NO: 2005942 - RNA, 19 nt, Homo sapiens
  misc_RNA (1)...(19): siRNA sense strand
gacaggcuccuagaacuua

SEQ ID NO: 2005943 - RNA, 19 nt, Homo sapiens
  misc_RNA (1)...(19): siRNA sense strand
gcuaguaacuguuguacac

SEQ ID NO: 2005944 - RNA, 19 nt, Homo sapiens
  misc_RNA (1)...(19): siRNA sense strand
gaaugaaauugugguagau

SEQ ID NO: 2005945 - RNA, 19 nt, Homo sapiens
  misc_RNA (1)...(19): siRNA sense strand
acacguggaucauggcaaa

SEQ ID NO: 2005946 - RNA, 19 nt, Homo sapiens
  misc_RNA (1)...(19): siRNA sense strand
ugagagcuuugguauuuga

SEQ ID NO: 2005947 - RNA, 19 nt, Homo sapiens
  misc_RNA (1)...(19): siRNA sense strand
caggugggcuaucugauug

SEQ ID NO: 2005948 - RNA, 19 nt, Homo sapiens
  misc_RNA (1)...(19): siRNA sense strand
acagacagcaucucucuuu

SEQ ID NO: 2005949 - RNA, 19 nt, Homo sapiens
  misc_RNA (1)...(19): siRNA sense strand
cgaaguuaaugaaguagga

SEQ ID NO: 2005950 - RNA, 19 nt, Homo sapiens
  misc_RNA (1)...(19): siRNA sense strand
gaagcacagcuaucgguaa

SEQ ID NO: 2005951 - RNA, 19 nt, Homo sapiens
  misc_RNA (1)...(19): siRNA sense strand
gcuaggauuucuuggacuu

SEQ ID NO: 2005952 - RNA, 19 nt, Homo sapiens
  misc_RNA (1)...(19): siRNA sense strand
uuacagggacaauugauaa

SEQ ID NO: 2005953 - RNA, 19 nt, Homo sapiens
  misc_RNA (1)...(19): siRNA sense strand
gaaguaggagucuugaauc

SEQ ID NO: 2005954 - RNA, 19 nt, Homo sapiens
  misc_RNA (1)...(19): siRNA sense strand
ccaagugaugaauguauua

SEQ ID NO: 2005955 - RNA, 19 nt, Homo sapiens
  misc_RNA (1)...(19): siRNA sense strand
cuacagcuccgcagaauuc

SEQ ID NO: 2005956 - RNA, 19 nt, Homo sapiens
  misc_RNA (1)...(19): siRNA sense strand
guggugauauuacccgaaa

SEQ ID NO: 2005957 - RNA, 19 nt, Homo sapiens
  misc_RNA (1)...(19): siRNA sense strand
gcacagacagcaucucucu

SEQ ID NO: 2005958 - RNA, 19 nt, Homo sapiens
  misc_RNA (1)...(19): siRNA sense strand
cugcuaaacuuggaacaaa

SEQ ID NO: 2005959 - RNA, 19 nt, Homo sapiens
  misc_RNA (1)...(19): siRNA sense strand
ccaaauugagaaaguguuu

SEQ ID NO: 2005960 - RNA, 19 nt, Homo sapiens
  misc_RNA (1)...(19): siRNA sense strand
cuagaccaaucugaauaua

SEQ ID NO: 2005961 - RNA, 19 nt, Homo sapiens
  misc_RNA (1)...(19): siRNA sense strand
ccaaugguauuugcaggaa

SEQ ID NO: 2005962 - RNA, 19 nt, Homo sapiens
  misc_RNA (1)...(19): siRNA sense strand
uaaaucagcgaaaccaaug

SEQ ID NO: 2005963 - RNA, 19 nt, Homo sapiens
  misc_RNA (1)...(19): siRNA sense strand
ggaugaaagaugucacuga

SEQ ID NO: 2005964 - RNA, 19 nt, Homo sapiens
  misc_RNA (1)...(19): siRNA sense strand
gagcagccaacucauaaau

SEQ ID NO: 2005965 - RNA, 19 nt, Homo sapiens
  misc_RNA (1)...(19): siRNA sense strand
agacauacgaaguuaauga

SEQ ID NO: 2005966 - RNA, 19 nt, Homo sapiens
  misc_RNA (1)...(19): siRNA sense strand
gaacgagaaagaggaauca

SEQ ID NO: 2005967 - RNA, 19 nt, Homo sapiens
  misc_RNA (1)...(19): siRNA sense strand
cuaccagacugcagaacuu

SEQ ID NO: 2005968 - RNA, 19 nt, Homo sapiens
  misc_RNA (1)...(19): siRNA sense strand
gcaguucagaagaauauga

SEQ ID NO: 2005969 - RNA, 19 nt, Homo sapiens
  misc_RNA (1)...(19): siRNA sense strand
agaccaaucugaauauaac

SEQ ID NO: 2005970 - RNA, 19 nt, Homo sapiens
  misc_RNA (1)...(19): siRNA sense strand
cauacgaaguuaaugaagu

SEQ ID NO: 2005971 - RNA, 19 nt, Homo sapiens
  misc_RNA (1)...(19): siRNA sense strand
gcaaaugagggaauucaag

SEQ ID NO: 2005972 - RNA, 19 nt, Homo sapiens
  misc_RNA (1)...(19): siRNA sense strand
auaauaagcagguucuuga

SEQ ID NO: 2005973 - RNA, 19 nt, Homo sapiens
  misc_RNA (1)...(19): siRNA sense strand
ucugaagagugcuauagaa

SEQ ID NO: 2005974 - RNA, 19 nt, Homo sapiens
  misc_RNA (1)...(19): siRNA sense strand
aagcacagcuaucgguaau

SEQ ID NO: 2005975 - RNA, 19 nt, Homo sapiens
  misc_RNA (1)...(19): siRNA sense strand
agugaaagccuauaggaaa

SEQ ID NO: 2005976 - RNA, 19 nt, Homo sapiens
  misc_RNA (1)...(19): siRNA sense strand
gcccuugccuggguuuaaa

SEQ ID NO: 2005977 - RNA, 19 nt, Homo sapiens
  misc_RNA (1)...(19): siRNA sense strand
gaggugugauagccaaugu

SEQ ID NO: 2005978 - RNA, 19 nt, Homo sapiens
  misc_RNA (1)...(19): siRNA sense strand
aggaaucacuguuaaagca

SEQ ID NO: 2005979 - RNA, 19 nt, Homo sapiens
  misc_RNA (1)...(19): siRNA sense strand
gguauuugcaggaauguau

SEQ ID NO: 2005980 - RNA, 19 nt, Homo sapiens
  misc_RNA (1)...(19): siRNA sense strand
ugaaguaggagucuugaau

SEQ ID NO: 2005981 - RNA, 19 nt, Homo sapiens
  misc_RNA (1)...(19): siRNA sense strand
gaauucaagcccaaacugu

SEQ ID NO: 2005982 - RNA, 19 nt, Homo sapiens
  misc_RNA (1)...(19): siRNA sense strand
cagcaucucucuuuuacaa

SEQ ID NO: 2005983 - RNA, 19 nt, Homo sapiens
  misc_RNA (1)...(19): siRNA sense strand
cuaggcaacuguuugagau

SEQ ID NO: 2005984 - RNA, 19 nt, Homo sapiens
  misc_RNA (1)...(19): siRNA sense strand
gaggagcuaguaacuguug

SEQ ID NO: 2005985 - RNA, 19 nt, Homo sapiens
  misc_RNA (1)...(19): siRNA sense strand
gcuguacugucaucaucaa

SEQ ID NO: 2005986 - RNA, 19 nt, Homo sapiens
  misc_RNA (1)...(19): siRNA sense strand
gacauacgaaguuaaugaa

SEQ ID NO: 2005987 - RNA, 19 nt, Homo sapiens
  misc_RNA (1)...(19): siRNA sense strand
gguauuugacuccaccuuu

SEQ ID NO: 2005988 - RNA, 19 nt, Homo sapiens
  misc_RNA (1)...(19): siRNA sense strand
uguuugauauuccaaguga

SEQ ID NO: 2005989 - RNA, 19 nt, Homo sapiens
  misc_RNA (1)...(19): siRNA sense strand
gacaaagcucauucaauug

SEQ ID NO: 2005990 - RNA, 19 nt, Homo sapiens
  misc_RNA (1)...(19): siRNA sense strand
caaagacaaagcucauuca

SEQ ID NO: 2005991 - RNA, 19 nt, Homo sapiens
  misc_RNA (1)...(19): siRNA sense strand
aauaagcagguucuugaua

SEQ ID NO: 2005992 - RNA, 19 nt, Homo sapiens
  misc_RNA (1)...(19): siRNA sense strand
gcaucucucuuuuacaauu

SEQ ID NO: 2005993 - RNA, 19 nt, Homo sapiens
  misc_RNA (1)...(19): siRNA sense strand
aagcugcuauuggaaguaa

SEQ ID NO: 2005994 - RNA, 19 nt, Homo sapiens
  misc_RNA (1)...(19): siRNA sense strand
gaagcgcaaauaggagaua

SEQ ID NO: 2005995 - RNA, 19 nt, Homo sapiens
  misc_RNA (1)...(19): siRNA sense strand
gaaugcugauccugaaagg

SEQ ID NO: 2005996 - RNA, 19 nt, Homo sapiens
  misc_RNA (1)...(19): siRNA sense strand
ggagcuaguaacuguugua

SEQ ID NO: 2005997 - RNA, 19 nt, Homo sapiens
  misc_RNA (1)...(19): siRNA sense strand
ggaauucaagcccaaacug

SEQ ID NO: 2005998 - RNA, 19 nt, Homo sapiens
  misc_RNA (1)...(19): siRNA sense strand
gcuaaacuuggaacaaaug

SEQ ID NO: 2005999 - RNA, 19 nt, Homo sapiens
  misc_RNA (1)...(19): siRNA sense strand
aaaccaaauugagaaagug

SEQ ID NO: 2006000 - RNA, 19 nt, Homo sapiens
  misc_RNA (1)...(19): siRNA sense strand
cggagugguuuccaaagga

SEQ ID NO: 2006001 - RNA, 19 nt, Homo sapiens
  misc_RNA (1)...(19): siRNA sense strand
ccagacugcagaacuugua

SEQ ID NO: 2006002 - RNA, 19 nt, Homo sapiens
  misc_RNA (1)...(19): siRNA sense strand
ugucuagguuuccuguuga

SEQ ID NO: 2006003 - RNA, 19 nt, Homo sapiens
  misc_RNA (1)...(19): siRNA sense strand
gaggaaaauuggcaacguu

SEQ ID NO: 2006004 - RNA, 19 nt, Homo sapiens
  misc_RNA (1)...(19): siRNA sense strand
aauucaagcugcuauugga

SEQ ID NO: 2006005 - RNA, 19 nt, Homo sapiens
  misc_RNA (1)...(19): siRNA sense strand
ggaacgagaaagaggaauc

SEQ ID NO: 2006006 - RNA, 19 nt, Homo sapiens
  misc_RNA (1)...(19): siRNA sense strand
ucugauugcugggaugaaa

SEQ ID NO: 2006007 - RNA, 19 nt, Homo sapiens
  misc_RNA (1)...(19): siRNA sense strand
agcagguucuugauaaauu

SEQ ID NO: 2006008 - RNA, 19 nt, Homo sapiens
  misc_RNA (1)...(19): siRNA sense strand
uaaugaaguaggagucuug

SEQ ID NO: 2006009 - RNA, 19 nt, Homo sapiens
  misc_RNA (1)...(19): siRNA sense strand
gugaaagccuauaggaaaa

SEQ ID NO: 2006010 - RNA, 19 nt, Homo sapiens
  misc_RNA (1)...(19): siRNA sense strand
ggaaggaucuuggauuuga

SEQ ID NO: 2006011 - RNA, 19 nt, Homo sapiens
  misc_RNA (1)...(19): siRNA sense strand
gaaaugaaguggacagacu

SEQ ID NO: 2006012 - RNA, 19 nt, Homo sapiens
  misc_RNA (1)...(19): siRNA sense strand
aagacaagcugccuuauga

SEQ ID NO: 2006013 - RNA, 19 nt, Homo sapiens
  misc_RNA (1)...(19): siRNA sense strand
gagaagacaagcugccuua

SEQ ID NO: 2006014 - RNA, 19 nt, Homo sapiens
  misc_RNA (1)...(19): siRNA sense strand
ggacagacuuagccuuaca

SEQ ID NO: 2006015 - RNA, 19 nt, Homo sapiens
  misc_RNA (1)...(19): siRNA sense strand
gaagacaagcugccuuaug

SEQ ID NO: 2006016 - RNA, 19 nt, Homo sapiens
  misc_RNA (1)...(19): siRNA sense strand
acagugagguucagagaga

SEQ ID NO: 2006017 - RNA, 19 nt, Homo sapiens
  misc_RNA (1)...(19): siRNA sense strand
gaucuuggauuugauugau

SEQ ID NO: 2006018 - RNA, 19 nt, Homo sapiens
  misc_RNA (1)...(19): siRNA sense strand
uacaguaccuccaugagaa

SEQ ID NO: 2006019 - RNA, 19 nt, Homo sapiens
  misc_RNA (1)...(19): siRNA sense strand
uuaugaggaugucgcaaua

SEQ ID NO: 2006020 - RNA, 19 nt, Homo sapiens
  misc_RNA (1)...(19): siRNA sense strand
guggacagacuuagccuua

SEQ ID NO: 2006021 - RNA, 19 nt, Homo sapiens
  misc_RNA (1)...(19): siRNA sense strand
gauggaaggaucuuggauu

SEQ ID NO: 2006022 - RNA, 19 nt, Homo sapiens
  misc_RNA (1)...(19): siRNA sense strand
agacuuagccuuacaguac

SEQ ID NO: 2006023 - RNA, 19 nt, Homo sapiens
  misc_RNA (1)...(19): siRNA sense strand
ggacagugagguucagaga

SEQ ID NO: 2006024 - RNA, 19 nt, Homo sapiens
  misc_RNA (1)...(19): siRNA sense strand
caagcugccuuaugaggau

SEQ ID NO: 2006025 - RNA, 19 nt, Homo sapiens
  misc_RNA (1)...(19): siRNA sense strand
ugucaaagaacaagaaaug

SEQ ID NO: 2006026 - RNA, 19 nt, Homo sapiens
  misc_RNA (1)...(19): siRNA sense strand
gaaggaucuuggauuugau

SEQ ID NO: 2006027 - RNA, 19 nt, Homo sapiens
  misc_RNA (1)...(19): siRNA sense strand
caaagaacaagaaaugaag

SEQ ID NO: 2006028 - RNA, 19 nt, Homo sapiens
  misc_RNA (1)...(19): siRNA sense strand
auggaaggaucuuggauuu

SEQ ID NO: 2006029 - RNA, 19 nt, Homo sapiens
  misc_RNA (1)...(19): siRNA sense strand
gaugaugcuuggcgagaag

SEQ ID NO: 2006030 - RNA, 19 nt, Homo sapiens
  misc_RNA (1)...(19): siRNA sense strand
guaccuccaugagaauguu

SEQ ID NO: 2006031 - RNA, 19 nt, Homo sapiens
  misc_RNA (1)...(19): siRNA sense strand
ucuuggauuugauugauga

SEQ ID NO: 2006032 - RNA, 19 nt, Homo sapiens
  misc_RNA (1)...(19): siRNA sense strand
uuacaguaccuccaugaga

SEQ ID NO: 2006033 - RNA, 19 nt, Homo sapiens
  misc_RNA (1)...(19): siRNA sense strand
gaaccugaacaagacaaug

SEQ ID NO: 2006034 - RNA, 19 nt, Homo sapiens
  misc_RNA (1)...(19): siRNA sense strand
ucgcaauaccacugaauga

SEQ ID NO: 2006035 - RNA, 19 nt, Homo sapiens
  misc_RNA (1)...(19): siRNA sense strand
ugaugaugcuuggcgagaa

SEQ ID NO: 2006036 - RNA, 19 nt, Homo sapiens
  misc_RNA (1)...(19): siRNA sense strand
gaaugagcuuccugaaccu

SEQ ID NO: 2006037 - RNA, 19 nt, Homo sapiens
  misc_RNA (1)...(19): siRNA sense strand
ggaucuuggauuugauuga

SEQ ID NO: 2006038 - RNA, 19 nt, Homo sapiens
  misc_RNA (1)...(19): siRNA sense strand
ggauuugauugaugaugcu

SEQ ID NO: 2006039 - RNA, 19 nt, Homo sapiens
  misc_RNA (1)...(19): siRNA sense strand
ugagcuuccugaaccugaa

SEQ ID NO: 2006040 - RNA, 19 nt, Homo sapiens
  misc_RNA (1)...(19): siRNA sense strand
gaugucgcaauaccacuga

SEQ ID NO: 2006041 - RNA, 19 nt, Homo sapiens
  misc_RNA (1)...(19): siRNA sense strand
gucaaagaacaagaaauga

SEQ ID NO: 2006042 - RNA, 19 nt, Homo sapiens
  misc_RNA (1)...(19): siRNA sense strand
gaagaaggccuuaaauuua

SEQ ID NO: 2006043 - RNA, 19 nt, Homo sapiens
  misc_RNA (1)...(19): siRNA sense strand
gcaaagacauccacauaua

SEQ ID NO: 2006044 - RNA, 19 nt, Homo sapiens
  misc_RNA (1)...(19): siRNA sense strand
ggaagaaggccuuaaauuu

SEQ ID NO: 2006045 - RNA, 19 nt, Homo sapiens
  misc_RNA (1)...(19): siRNA sense strand
uaaaggauuugacgcauua

SEQ ID NO: 2006046 - RNA, 19 nt, Homo sapiens
  misc_RNA (1)...(19): siRNA sense strand
ggucaaagcugaggaguuu

SEQ ID NO: 2006047 - RNA, 19 nt, Homo sapiens
  misc_RNA (1)...(19): siRNA sense strand
ggaagugccuggucauuga

SEQ ID NO: 2006048 - RNA, 19 nt, Homo sapiens
  misc_RNA (1)...(19): siRNA sense strand
gaacaugauggauuucuua

SEQ ID NO: 2006049 - RNA, 19 nt, Homo sapiens
  misc_RNA (1)...(19): siRNA sense strand
ggaaagaauugagaccuaa

SEQ ID NO: 2006050 - RNA, 19 nt, Homo sapiens
  misc_RNA (1)...(19): siRNA sense strand
gcaaggagcagaagaagaa

SEQ ID NO: 2006051 - RNA, 19 nt, Homo sapiens
  misc_RNA (1)...(19): siRNA sense strand
ggagcuagcugacuucaug

SEQ ID NO: 2006052 - RNA, 19 nt, Homo sapiens
  misc_RNA (1)...(19): siRNA sense strand
caaccucggucaaguuuaa

SEQ ID NO: 2006053 - RNA, 19 nt, Homo sapiens
  misc_RNA (1)...(19): siRNA sense strand
ugaagaagguucccaagaa

SEQ ID NO: 2006054 - RNA, 19 nt, Homo sapiens
  misc_RNA (1)...(19): siRNA sense strand
gaagaaccaucccaauuag

SEQ ID NO: 2006055 - RNA, 19 nt, Homo sapiens
  misc_RNA (1)...(19): siRNA sense strand
ugaagaaccaucccaauua

SEQ ID NO: 2006056 - RNA, 19 nt, Homo sapiens
  misc_RNA (1)...(19): siRNA sense strand
gagcugauguugacgcuuu

SEQ ID NO: 2006057 - RNA, 19 nt, Homo sapiens
  misc_RNA (1)...(19): siRNA sense strand
caagacaguucucaggaua

SEQ ID NO: 2006058 - RNA, 19 nt, Homo sapiens
  misc_RNA (1)...(19): siRNA sense strand
ccaccuagcuuguaacgaa

SEQ ID NO: 2006059 - RNA, 19 nt, Homo sapiens
  misc_RNA (1)...(19): siRNA sense strand
ggaagcagaucuuucuaug

SEQ ID NO: 2006060 - RNA, 19 nt, Homo sapiens
  misc_RNA (1)...(19): siRNA sense strand
aaucugagguuaucaauga

SEQ ID NO: 2006061 - RNA, 19 nt, Homo sapiens
  misc_RNA (1)...(19): siRNA sense strand
caaaccagcuucucccauu

SEQ ID NO: 2006062 - RNA, 19 nt, Homo sapiens
  misc_RNA (1)...(19): siRNA sense strand
acagagaacucaaagcaaa

SEQ ID NO: 2006063 - RNA, 19 nt, Homo sapiens
  misc_RNA (1)...(19): siRNA sense strand
gaacaugccgugugaugaa

SEQ ID NO: 2006064 - RNA, 19 nt, Homo sapiens
  misc_RNA (1)...(19): siRNA sense strand
aagcagaucuuucuauguu

SEQ ID NO: 2006065 - RNA, 19 nt, Homo sapiens
  misc_RNA (1)...(19): siRNA sense strand
gaagaagguucccaagaag

SEQ ID NO: 2006066 - RNA, 19 nt, Homo sapiens
  misc_RNA (1)...(19): siRNA sense strand
ggccuuaaauuuacagaaa

SEQ ID NO: 2006067 - RNA, 19 nt, Homo sapiens
  misc_RNA (1)...(19): siRNA sense strand
cgaagaagcucguuagaac

SEQ ID NO: 2006068 - RNA, 19 nt, Homo sapiens
  misc_RNA (1)...(19): siRNA sense strand
gggaaagaauugagaccua

SEQ ID NO: 2006069 - RNA, 19 nt, Homo sapiens
  misc_RNA (1)...(19): siRNA sense strand
gcagaucuuucuauguuug

SEQ ID NO: 2006070 - RNA, 19 nt, Homo sapiens
  misc_RNA (1)...(19): siRNA sense strand
ugugagaaguuguaacaua

SEQ ID NO: 2006071 - RNA, 19 nt, Homo sapiens
  misc_RNA (1)...(19): siRNA sense strand
gagcuugaauugaaacguu

SEQ ID NO: 2006072 - RNA, 19 nt, Homo sapiens
  misc_RNA (1)...(19): siRNA sense strand
gcgaugcccuccacaggua

SEQ ID NO: 2006073 - RNA, 19 nt, Homo sapiens
  misc_RNA (1)...(19): siRNA sense strand
aaaguggaaucaacuauga

SEQ ID NO: 2006074 - RNA, 19 nt, Homo sapiens
  misc_RNA (1)...(19): siRNA sense strand
gcucaggaguggugcgaua

SEQ ID NO: 2006075 - RNA, 19 nt, Homo sapiens
  misc_RNA (1)...(19): siRNA sense strand
gugaagagagccaggauua

SEQ ID NO: 2006076 - RNA, 19 nt, Homo sapiens
  misc_RNA (1)...(19): siRNA sense strand
gcauaucuuugacugauga

SEQ ID NO: 2006077 - RNA, 19 nt, Homo sapiens
  misc_RNA (1)...(19): siRNA sense strand
ggaaaguucucuggauuca

SEQ ID NO: 2006078 - RNA, 19 nt, Homo sapiens
  misc_RNA (1)...(19): siRNA sense strand
gaugaggaguuucaacaga

SEQ ID NO: 2006079 - RNA, 19 nt, Homo sapiens
  misc_RNA (1)...(19): siRNA sense strand
cagaguugcugucuaagaa

SEQ ID NO: 2006080 - RNA, 19 nt, Homo sapiens
  misc_RNA (1)...(19): siRNA sense strand
caucacaccugcacauuuc

SEQ ID NO: 2006081 - RNA, 19 nt, Homo sapiens
  misc_RNA (1)...(19): siRNA sense strand
gcucgauccucuccaguaa

SEQ ID NO: 2006082 - RNA, 19 nt, Homo sapiens
  misc_RNA (1)...(19): siRNA sense strand
gggcaggccuugcagaaug

SEQ ID NO: 2006083 - RNA, 19 nt, Homo sapiens
  misc_RNA (1)...(19): siRNA sense strand
gaaggaagcagaucuuucu

SEQ ID NO: 2006084 - RNA, 19 nt, Homo sapiens
  misc_RNA (1)...(19): siRNA sense strand
gaacagguuguggaaauaa

SEQ ID NO: 2006085 - RNA, 19 nt, Homo sapiens
  misc_RNA (1)...(19): siRNA sense strand
gugcaggccucucagcuuu

SEQ ID NO: 2006086 - RNA, 19 nt, Homo sapiens
  misc_RNA (1)...(19): siRNA sense strand
caagugagcugauguugac

SEQ ID NO: 2006087 - RNA, 19 nt, Homo sapiens
  misc_RNA (1)...(19): siRNA sense strand
gcagagacuugcuaaggau

SEQ ID NO: 2006088 - RNA, 19 nt, Homo sapiens
  misc_RNA (1)...(19): siRNA sense strand
caucauggaucaguucaaa

SEQ ID NO: 2006089 - RNA, 19 nt, Homo sapiens
  misc_RNA (1)...(19): siRNA sense strand
caacaacgucugcuucuga

SEQ ID NO: 2006090 - RNA, 19 nt, Homo sapiens
  misc_RNA (1)...(19): siRNA sense strand
gaguucagcucccuggaaa

SEQ ID NO: 2006091 - RNA, 19 nt, Homo sapiens
  misc_RNA (1)...(19): siRNA sense strand
ggaaaccauugcacccaaa

SEQ ID NO: 2006092 - RNA, 19 nt, Homo sapiens
  misc_RNA (1)...(19): siRNA sense strand
gaaauugaaaucugaagga

SEQ ID NO: 2006093 - RNA, 19 nt, Homo sapiens
  misc_RNA (1)...(19): siRNA sense strand
ggacgucgggugcugauuu

SEQ ID NO: 2006094 - RNA, 19 nt, Homo sapiens
  misc_RNA (1)...(19): siRNA sense strand
ccgaguggcucaucaguga

SEQ ID NO: 2006095 - RNA, 19 nt, Homo sapiens
  misc_RNA (1)...(19): siRNA sense strand
caggaaaguucucuggauu

SEQ ID NO: 2006096 - RNA, 19 nt, Homo sapiens
  misc_RNA (1)...(19): siRNA sense strand
gaaaguggaaucaacuaug

SEQ ID NO: 2006097 - RNA, 19 nt, Homo sapiens
  misc_RNA (1)...(19): siRNA sense strand
ugaaggcacuggagagaga

SEQ ID NO: 2006098 - RNA, 19 nt, Homo sapiens
  misc_RNA (1)...(19): siRNA sense strand
gaggaaaucuccacuucag

SEQ ID NO: 2006099 - RNA, 19 nt, Homo sapiens
  misc_RNA (1)...(19): siRNA sense strand
gaaacauuaugccccauua

SEQ ID NO: 2006100 - RNA, 19 nt, Homo sapiens
  misc_RNA (1)...(19): siRNA sense strand
guacuggcaggaaccauua

SEQ ID NO: 2006101 - RNA, 19 nt, Homo sapiens
  misc_RNA (1)...(19): siRNA sense strand
aggcagaguugcugucuaa

SEQ ID NO: 2006102 - RNA, 19 nt, Homo sapiens
  misc_RNA (1)...(19): siRNA sense strand
gaauugagaccuaaaggau

SEQ ID NO: 2006103 - RNA, 19 nt, Homo sapiens
  misc_RNA (1)...(19): siRNA sense strand
ggaacaugauggauuucuu

SEQ ID NO: 2006104 - RNA, 19 nt, Homo sapiens
  misc_RNA (1)...(19): siRNA sense strand
ugaaagagcgccuggauca

SEQ ID NO: 2006105 - RNA, 19 nt, Homo sapiens
  misc_RNA (1)...(19): siRNA sense strand
ggaaacucauggaggaaau

SEQ ID NO: 2006106 - RNA, 19 nt, Homo sapiens
  misc_RNA (1)...(19): siRNA sense strand
gaagagcagagcagacuga

SEQ ID NO: 2006107 - RNA, 19 nt, Homo sapiens
  misc_RNA (1)...(19): siRNA sense strand
aagcauaucuuaggcagaa

SEQ ID NO: 2006108 - RNA, 19 nt, Homo sapiens
  misc_RNA (1)...(19): siRNA sense strand
gaaaugugaucgugaacac

SEQ ID NO: 2006109 - RNA, 19 nt, Homo sapiens
  misc_RNA (1)...(19): siRNA sense strand
cagggaaguuggaagcuuu

SEQ ID NO: 2006110 - RNA, 19 nt, Homo sapiens
  misc_RNA (1)...(19): siRNA sense strand
gaucucaucggcuuagaaa

SEQ ID NO: 2006111 - RNA, 19 nt, Homo sapiens
  misc_RNA (1)...(19): siRNA sense strand
uaaaguggucauaagguua

SEQ ID NO: 2006112 - RNA, 19 nt, Homo sapiens
  misc_RNA (1)...(19): siRNA sense strand
ggacacaagcggagaggaa

SEQ ID NO: 2006113 - RNA, 19 nt, Homo sapiens
  misc_RNA (1)...(19): siRNA sense strand
gaacuguggugcgccauca

SEQ ID NO: 2006114 - RNA, 19 nt, Homo sapiens
  misc_RNA (1)...(19): siRNA sense strand
gaagguucccaagaaguua

SEQ ID NO: 2006115 - RNA, 19 nt, Homo sapiens
  misc_RNA (1)...(19): siRNA sense strand
gaaaagcaacuaacaaaga

SEQ ID NO: 2006116 - RNA, 19 nt, Homo sapiens
  misc_RNA (1)...(19): siRNA sense strand
ugaacagguuguggaaaua

SEQ ID NO: 2006117 - RNA, 19 nt, Homo sapiens
  misc_RNA (1)...(19): siRNA sense strand
agacggaccuguuuaagag

SEQ ID NO: 2006118 - RNA, 19 nt, Homo sapiens
  misc_RNA (1)...(19): siRNA sense strand
aagggaacaugauggauuu

SEQ ID NO: 2006119 - RNA, 19 nt, Homo sapiens
  misc_RNA (1)...(19): siRNA sense strand
ggaggaggaugcccagaag

SEQ ID NO: 2006120 - RNA, 19 nt, Homo sapiens
  misc_RNA (1)...(19): siRNA sense strand
gagcagaagaagaauauuc

SEQ ID NO: 2006121 - RNA, 19 nt, Homo sapiens
  misc_RNA (1)...(19): siRNA sense strand
caagggaacaugauggauu

SEQ ID NO: 2006122 - RNA, 19 nt, Homo sapiens
  misc_RNA (1)...(19): siRNA sense strand
uagaggagcuagcugacuu

SEQ ID NO: 2006123 - RNA, 19 nt, Homo sapiens
  misc_RNA (1)...(19): siRNA sense strand
ggagcuguuugaaguuuau

SEQ ID NO: 2006124 - RNA, 19 nt, Homo sapiens
  misc_RNA (1)...(19): siRNA sense strand
ggcagagacuugcuaagga

SEQ ID NO: 2006125 - RNA, 19 nt, Homo sapiens
  misc_RNA (1)...(19): siRNA sense strand
gaaagaauugagaccuaaa

SEQ ID NO: 2006126 - RNA, 19 nt, Homo sapiens
  misc_RNA (1)...(19): siRNA sense strand
caaggaguauuugauugaa

SEQ ID NO: 2006127 - RNA, 19 nt, Homo sapiens
  misc_RNA (1)...(19): siRNA sense strand
gagccacuuugacuuaaug

SEQ ID NO: 2006128 - RNA, 19 nt, Homo sapiens
  misc_RNA (1)...(19): siRNA sense strand
ucacagaugauucuuaugu

SEQ ID NO: 2006129 - RNA, 19 nt, Homo sapiens
  misc_RNA (1)...(19): siRNA sense strand
gaggagaacuaagagagau

SEQ ID NO: 2006130 - RNA, 19 nt, Homo sapiens
  misc_RNA (1)...(19): siRNA sense strand
gggcagaacgugaacauca

SEQ ID NO: 2006131 - RNA, 19 nt, Homo sapiens
  misc_RNA (1)...(19): siRNA sense strand
gagaggaagaugcagauga

SEQ ID NO: 2006132 - RNA, 19 nt, Homo sapiens
  misc_RNA (1)...(19): siRNA sense strand
ggaaauaaaacuacgagua

SEQ ID NO: 2006133 - RNA, 19 nt, Homo sapiens
  misc_RNA (1)...(19): siRNA sense strand
aagaaggccuuaaauuuac

SEQ ID NO: 2006134 - RNA, 19 nt, Homo sapiens
  misc_RNA (1)...(19): siRNA sense strand
ccacuuugacuuaaugaaa

SEQ ID NO: 2006135 - RNA, 19 nt, Homo sapiens
  misc_RNA (1)...(19): siRNA sense strand
aggcggagcuccugaccua

SEQ ID NO: 2006136 - RNA, 19 nt, Homo sapiens
  misc_RNA (1)...(19): siRNA sense strand
cagcuuacaccaauugaaa

SEQ ID NO: 2006137 - RNA, 19 nt, Homo sapiens
  misc_RNA (1)...(19): siRNA sense strand
acagaugauucuuauguug

SEQ ID NO: 2006138 - RNA, 19 nt, Homo sapiens
  misc_RNA (1)...(19): siRNA sense strand
ugaagugucgccuuucuaa

SEQ ID NO: 2006139 - RNA, 19 nt, Homo sapiens
  misc_RNA (1)...(19): siRNA sense strand
agugggagcuugaauugaa

SEQ ID NO: 2006140 - RNA, 19 nt, Homo sapiens
  misc_RNA (1)...(19): siRNA sense strand
gagauuaucagaagauugg

SEQ ID NO: 2006141 - RNA, 19 nt, Homo sapiens
  misc_RNA (1)...(19): siRNA sense strand
cuaaaggauuugacgcauu

SEQ ID NO: 2006142 - RNA, 19 nt, Homo sapiens
  misc_RNA (1)...(19): siRNA sense strand
gagcugcccuggaccaaua

SEQ ID NO: 2006143 - RNA, 19 nt, Homo sapiens
  misc_RNA (1)...(19): siRNA sense strand
gaagaaguacauccacaua

SEQ ID NO: 2006144 - RNA, 19 nt, Homo sapiens
  misc_RNA (1)...(19): siRNA sense strand
agaaguacauccacauauu

SEQ ID NO: 2006145 - RNA, 19 nt, Homo sapiens
  misc_RNA (1)...(19): siRNA sense strand
ccaaaacgaugaaggauuu

SEQ ID NO: 2006146 - RNA, 19 nt, Homo sapiens
  misc_RNA (1)...(19): siRNA sense strand
gagaggaggccuaugagaa

SEQ ID NO: 2006147 - RNA, 19 nt, Homo sapiens
  misc_RNA (1)...(19): siRNA sense strand
gaagauaccguggaagaug

SEQ ID NO: 2006148 - RNA, 19 nt, Homo sapiens
  misc_RNA (1)...(19): siRNA sense strand
gaaguacauccacauauuc

SEQ ID NO: 2006149 - RNA, 19 nt, Homo sapiens
  misc_RNA (1)...(19): siRNA sense strand
gaggugaacccacugagaa

SEQ ID NO: 2006150 - RNA, 19 nt, Homo sapiens
  misc_RNA (1)...(19): siRNA sense strand
cgacuucccugccucauac

SEQ ID NO: 2006151 - RNA, 19 nt, Homo sapiens
  misc_RNA (1)...(19): siRNA sense strand
cgaaagacaagaaguggaa

SEQ ID NO: 2006152 - RNA, 19 nt, Homo sapiens
  misc_RNA (1)...(19): siRNA sense strand
ggacguacgccaucgacuu

SEQ ID NO: 2006153 - RNA, 19 nt, Homo sapiens
  misc_RNA (1)...(19): siRNA sense strand
gcacgaaggcuggcacgaa

SEQ ID NO: 2006154 - RNA, 19 nt, Homo sapiens
  misc_RNA (1)...(19): siRNA sense strand
ggaccgagccguguacuuc

SEQ ID NO: 2006155 - RNA, 19 nt, Homo sapiens
  misc_RNA (1)...(19): siRNA sense strand
ugagaugguuggugagaug

SEQ ID NO: 2006156 - RNA, 19 nt, Homo sapiens
  misc_RNA (1)...(19): siRNA sense strand
ggaaucaacaggagcaauc

SEQ ID NO: 2006157 - RNA, 19 nt, Homo sapiens
  misc_RNA (1)...(19): siRNA sense strand
gggagcacguguccaacaa

SEQ ID NO: 2006158 - RNA, 19 nt, Homo sapiens
  misc_RNA (1)...(19): siRNA sense strand
acaaccaggucuacgugua

SEQ ID NO: 2006159 - RNA, 19 nt, Homo sapiens
  misc_RNA (1)...(19): siRNA sense strand
cagaagauaccguggaaga

SEQ ID NO: 2006160 - RNA, 19 nt, Homo sapiens
  misc_RNA (1)...(19): siRNA sense strand
cagaaccucuagacgauuc

SEQ ID NO: 2006161 - RNA, 19 nt, Homo sapiens
  misc_RNA (1)...(19): siRNA sense strand
ucaaggaggccaagaaagu

SEQ ID NO: 2006162 - RNA, 19 nt, Homo sapiens
  misc_RNA (1)...(19): siRNA sense strand
gacguacgccaucgacuuu

SEQ ID NO: 2006163 - RNA, 19 nt, Homo sapiens
  misc_RNA (1)...(19): siRNA sense strand
caggagcaaucccaaagga

SEQ ID NO: 2006164 - RNA, 19 nt, Homo sapiens
  misc_RNA (1)...(19): siRNA sense strand
caacaggagcaaucccaaa

SEQ ID NO: 2006165 - RNA, 19 nt, Homo sapiens
  misc_RNA (1)...(19): siRNA sense strand
guacguggaugagaauuuu

SEQ ID NO: 2006166 - RNA, 19 nt, Homo sapiens
  misc_RNA (1)...(19): siRNA sense strand
uguaugcccuggaugagaa

SEQ ID NO: 2006167 - RNA, 19 nt, Homo sapiens
  misc_RNA (1)...(19): siRNA sense strand
ggaaguggauccgguacag

SEQ ID NO: 2006168 - RNA, 19 nt, Homo sapiens
  misc_RNA (1)...(19): siRNA sense strand
gaaggugugguuccgaaga

SEQ ID NO: 2006169 - RNA, 19 nt, Homo sapiens
  misc_RNA (1)...(19): siRNA sense strand
ccaccgagcaggacaugaa

SEQ ID NO: 2006170 - RNA, 19 nt, Homo sapiens
  misc_RNA (1)...(19): siRNA sense strand
ggacagcauccucuucauc

SEQ ID NO: 2006171 - RNA, 19 nt, Homo sapiens
  misc_RNA (1)...(19): siRNA sense strand
ggugaucgccaacaaagug

SEQ ID NO: 2006172 - RNA, 19 nt, Homo sapiens
  misc_RNA (1)...(19): siRNA sense strand
gggcagacgucgguguaug

SEQ ID NO: 2006173 - RNA, 19 nt, Homo sapiens
  misc_RNA (1)...(19): siRNA sense strand
gagaaucagcgcuggaauc

SEQ ID NO: 2006174 - RNA, 19 nt, Homo sapiens
  misc_RNA (1)...(19): siRNA sense strand
agucagacgugaagugugu

SEQ ID NO: 2006175 - RNA, 19 nt, Homo sapiens
  misc_RNA (1)...(19): siRNA sense strand
ccaguuggauugagauggu

SEQ ID NO: 2006176 - RNA, 19 nt, Homo sapiens
  misc_RNA (1)...(19): siRNA sense strand
ggaggugaacccacugaga

SEQ ID NO: 2006177 - RNA, 19 nt, Homo sapiens
  misc_RNA (1)...(19): siRNA sense strand
gccgagaggaggccuauga

SEQ ID NO: 2006178 - RNA, 19 nt, Homo sapiens
  misc_RNA (1)...(19): siRNA sense strand
gaggaggccuaugagaauc

SEQ ID NO: 2006179 - RNA, 19 nt, Homo sapiens
  misc_RNA (1)...(19): siRNA sense strand
caaccaggucuacguguau

SEQ ID NO: 2006180 - RNA, 19 nt, Homo sapiens
  misc_RNA (1)...(19): siRNA sense strand
gaauggaaaccugugguau

SEQ ID NO: 2006181 - RNA, 19 nt, Homo sapiens
  misc_RNA (1)...(19): siRNA sense strand
ccgacugguucguggauuu

SEQ ID NO: 2006182 - RNA, 19 nt, Homo sapiens
  misc_RNA (1)...(19): siRNA sense strand
agaagcuccugcugaguga

SEQ ID NO: 2006183 - RNA, 19 nt, Homo sapiens
  misc_RNA (1)...(19): siRNA sense strand
gcuuggcccuggagcaguu

SEQ ID NO: 2006184 - RNA, 19 nt, Homo sapiens
  misc_RNA (1)...(19): siRNA sense strand
ggcgucaacucucacaauc

SEQ ID NO: 2006185 - RNA, 19 nt, Homo sapiens
  misc_RNA (1)...(19): siRNA sense strand
gcaguaugccagcgacuuc

SEQ ID NO: 2006186 - RNA, 19 nt, Homo sapiens
  misc_RNA (1)...(19): siRNA sense strand
gcacuccuuugcccuguac

SEQ ID NO: 2006187 - RNA, 19 nt, Homo sapiens
  misc_RNA (1)...(19): siRNA sense strand
ccaccagccucuccucucu

SEQ ID NO: 2006188 - RNA, 19 nt, Homo sapiens
  misc_RNA (1)...(19): siRNA sense strand
cgcagaagauaccguggaa

SEQ ID NO: 2006189 - RNA, 19 nt, Homo sapiens
  misc_RNA (1)...(19): siRNA sense strand
gguacguggaugagaauuu

SEQ ID NO: 2006190 - RNA, 19 nt, Homo sapiens
  misc_RNA (1)...(19): siRNA sense strand
gcgacuucccugccucaua

SEQ ID NO: 2006191 - RNA, 19 nt, Homo sapiens
  misc_RNA (1)...(19): siRNA sense strand
ccacggaccgguacaugug

SEQ ID NO: 2006192 - RNA, 19 nt, Homo sapiens
  misc_RNA (1)...(19): siRNA sense strand
ggcaggaccgcagaagaua

SEQ ID NO: 2006193 - RNA, 19 nt, Homo sapiens
  misc_RNA (1)...(19): siRNA sense strand
gagcaggacaugaaugacu

SEQ ID NO: 2006194 - RNA, 19 nt, Homo sapiens
  misc_RNA (1)...(19): siRNA sense strand
gcagucagacgugaagugu

SEQ ID NO: 2006195 - RNA, 19 nt, Homo sapiens
  misc_RNA (1)...(19): siRNA sense strand
ugcagaaccucuagacgau

SEQ ID NO: 2006196 - RNA, 19 nt, Homo sapiens
  misc_RNA (1)...(19): siRNA sense strand
gcugggaccauaucucugu

SEQ ID NO: 2006197 - RNA, 19 nt, Homo sapiens
  misc_RNA (1)...(19): siRNA sense strand
gcugggagcacguguccaa

SEQ ID NO: 2006198 - RNA, 19 nt, Homo sapiens
  misc_RNA (1)...(19): siRNA sense strand
caggccaucugguccauca

SEQ ID NO: 2006199 - RNA, 19 nt, Homo sapiens
  misc_RNA (1)...(19): siRNA sense strand
agaggaggccuaugagaau

SEQ ID NO: 2006200 - RNA, 19 nt, Homo sapiens
  misc_RNA (1)...(19): siRNA sense strand
ccaccuacacgaaagacaa

SEQ ID NO: 2006201 - RNA, 19 nt, Homo sapiens
  misc_RNA (1)...(19): siRNA sense strand
guguucacaucuaugagaa

SEQ ID NO: 2006202 - RNA, 19 nt, Homo sapiens
  misc_RNA (1)...(19): siRNA sense strand
gacagcauccucuucaucu

SEQ ID NO: 2006203 - RNA, 19 nt, Homo sapiens
  misc_RNA (1)...(19): siRNA sense strand
ggcaccaguuggauugaga

SEQ ID NO: 2006204 - RNA, 19 nt, Homo sapiens
  misc_RNA (1)...(19): siRNA sense strand
gcaaggugugguacagaga

SEQ ID NO: 2006205 - RNA, 19 nt, Homo sapiens
  misc_RNA (1)...(19): siRNA sense strand
gguauacacaggcggcuau

SEQ ID NO: 2006206 - RNA, 19 nt, Homo sapiens
  misc_RNA (1)...(19): siRNA sense strand
ccgagcaggacaugaauga

SEQ ID NO: 2006207 - RNA, 19 nt, Homo sapiens
  misc_RNA (1)...(19): siRNA sense strand
acagcauccucuucaucua

SEQ ID NO: 2006208 - RNA, 19 nt, Homo sapiens
  misc_RNA (1)...(19): siRNA sense strand
agcgggagcuggagaacuu

SEQ ID NO: 2006209 - RNA, 19 nt, Homo sapiens
  misc_RNA (1)...(19): siRNA sense strand
caaggaggccaagaaagug

SEQ ID NO: 2006210 - RNA, 19 nt, Homo sapiens
  misc_RNA (1)...(19): siRNA sense strand
ucuggcagcucgucuaguc

SEQ ID NO: 2006211 - RNA, 19 nt, Homo sapiens
  misc_RNA (1)...(19): siRNA sense strand
cuucaacgaccucucugua

SEQ ID NO: 2006212 - RNA, 19 nt, Homo sapiens
  misc_RNA (1)...(19): siRNA sense strand
agaauggaaaccuguggua

SEQ ID NO: 2006213 - RNA, 19 nt, Homo sapiens
  misc_RNA (1)...(19): siRNA sense strand
gcagcaccaguaacaucua

SEQ ID NO: 2006214 - RNA, 19 nt, Homo sapiens
  misc_RNA (1)...(19): siRNA sense strand
cuggagaacuucagacacu

SEQ ID NO: 2006215 - RNA, 19 nt, Homo sapiens
  misc_RNA (1)...(19): siRNA sense strand
gcagaaccucuagacgauu

SEQ ID NO: 2006216 - RNA, 19 nt, Homo sapiens
  misc_RNA (1)...(19): siRNA sense strand
gagcaaucccaaaggaagu

SEQ ID NO: 2006217 - RNA, 19 nt, Homo sapiens
  misc_RNA (1)...(19): siRNA sense strand
acacgaaagacaagaagug

SEQ ID NO: 2006218 - RNA, 19 nt, Homo sapiens
  misc_RNA (1)...(19): siRNA sense strand
acugguacguggaugagaa

SEQ ID NO: 2006219 - RNA, 19 nt, Homo sapiens
  misc_RNA (1)...(19): siRNA sense strand
ccacacggccuggguauac

SEQ ID NO: 2006220 - RNA, 19 nt, Homo sapiens
  misc_RNA (1)...(19): siRNA sense strand
aaagacaagaaguggaauu

SEQ ID NO: 2006221 - RNA, 19 nt, Homo sapiens
  misc_RNA (1)...(19): siRNA sense strand
cgggacaucugggccaaga

SEQ ID NO: 2006222 - RNA, 19 nt, Homo sapiens
  misc_RNA (1)...(19): siRNA sense strand
gccagcagcaccaguaaca

SEQ ID NO: 2006223 - RNA, 19 nt, Homo sapiens
  misc_RNA (1)...(19): siRNA sense strand
gcccugcgaccagauguuu

SEQ ID NO: 2006224 - RNA, 19 nt, Homo sapiens
  misc_RNA (1)...(19): siRNA sense strand
cagcagcaccaguaacauc

SEQ ID NO: 2006225 - RNA, 19 nt, Homo sapiens
  misc_RNA (1)...(19): siRNA sense strand
uccagcagcucacggaaag

SEQ ID NO: 2006226 - RNA, 19 nt, Homo sapiens
  misc_RNA (1)...(19): siRNA sense strand
gcauccucuucaucuacua

SEQ ID NO: 2006227 - RNA, 19 nt, Homo sapiens
  misc_RNA (1)...(19): siRNA sense strand
uggagaacuucagacacua

SEQ ID NO: 2006228 - RNA, 19 nt, Homo sapiens
  misc_RNA (1)...(19): siRNA sense strand
gaaagacaagaaguggaau

SEQ ID NO: 2006229 - RNA, 19 nt, Homo sapiens
  misc_RNA (1)...(19): siRNA sense strand
cgagacagaggcugaagca

SEQ ID NO: 2006230 - RNA, 19 nt, Homo sapiens
  misc_RNA (1)...(19): siRNA sense strand
uaacaucuacacgcaguca

SEQ ID NO: 2006231 - RNA, 19 nt, Homo sapiens
  misc_RNA (1)...(19): siRNA sense strand
cagcaccaguaacaucuac

SEQ ID NO: 2006232 - RNA, 19 nt, Homo sapiens
  misc_RNA (1)...(19): siRNA sense strand
aagaaguacauccacauau

SEQ ID NO: 2006233 - RNA, 19 nt, Homo sapiens
  misc_RNA (1)...(19): siRNA sense strand
cgagaggaggccuaugaga

SEQ ID NO: 2006234 - RNA, 19 nt, Homo sapiens
  misc_RNA (1)...(19): siRNA sense strand
gggccaagauccccucgaa

SEQ ID NO: 2006235 - RNA, 19 nt, Homo sapiens
  misc_RNA (1)...(19): siRNA sense strand
ggucuacguguaugugugu

SEQ ID NO: 2006236 - RNA, 19 nt, Homo sapiens
  misc_RNA (1)...(19): siRNA sense strand
cgagaccaagcacuccuuu

SEQ ID NO: 2006237 - RNA, 19 nt, Homo sapiens
  misc_RNA (1)...(19): siRNA sense strand
ggagaacuucagacacuac

SEQ ID NO: 2006238 - RNA, 19 nt, Homo sapiens
  misc_RNA (1)...(19): siRNA sense strand
ggagcuggagaacuucaga

SEQ ID NO: 2006239 - RNA, 19 nt, Homo sapiens
  misc_RNA (1)...(19): siRNA sense strand
gggacagcauccucuucau

SEQ ID NO: 2006240 - RNA, 19 nt, Homo sapiens
  misc_RNA (1)...(19): siRNA sense strand
ccacagcaggccaguacug

SEQ ID NO: 2006241 - RNA, 19 nt, Homo sapiens
  misc_RNA (1)...(19): siRNA sense strand
auacacaggcggcuaugga

SEQ ID NO: 2006242 - RNA, 19 nt, Homo sapiens
  misc_RNA (1)...(19): siRNA sense strand
gagcaauucugggcuguga

SEQ ID NO: 2006243 - RNA, 19 nt, Homo sapiens
  misc_RNA (1)...(19): siRNA sense strand
gcaacucgcccaucuuuua

SEQ ID NO: 2006244 - RNA, 19 nt, Homo sapiens
  misc_RNA (1)...(19): siRNA sense strand
gugaagacuccaacccuua

SEQ ID NO: 2006245 - RNA, 19 nt, Homo sapiens
  misc_RNA (1)...(19): siRNA sense strand
cauccuggcucgagaguca

SEQ ID NO: 2006246 - RNA, 19 nt, Homo sapiens
  misc_RNA (1)...(19): siRNA sense strand
gaacucggcaccuucaaag

SEQ ID NO: 2006247 - RNA, 19 nt, Homo sapiens
  misc_RNA (1)...(19): siRNA sense strand
gaacuacacccaggagcaa

SEQ ID NO: 2006248 - RNA, 19 nt, Homo sapiens
  misc_RNA (1)...(19): siRNA sense strand
gguacagaaugccguguug

SEQ ID NO: 2006249 - RNA, 19 nt, Homo sapiens
  misc_RNA (1)...(19): siRNA sense strand
ggaacucggcaccuucaaa

SEQ ID NO: 2006250 - RNA, 19 nt, Homo sapiens
  misc_RNA (1)...(19): siRNA sense strand
ccacaagccgcaagacuuc

SEQ ID NO: 2006251 - RNA, 19 nt, Homo sapiens
  misc_RNA (1)...(19): siRNA sense strand
ccagcuacauggauuugug

SEQ ID NO: 2006252 - RNA, 19 nt, Homo sapiens
  misc_RNA (1)...(19): siRNA sense strand
cuccaacccuuauccugua

SEQ ID NO: 2006253 - RNA, 19 nt, Homo sapiens
  misc_RNA (1)...(19): siRNA sense strand
gcgaggugcucccacucaa

SEQ ID NO: 2006254 - RNA, 19 nt, Homo sapiens
  misc_RNA (1)...(19): siRNA sense strand
caaaggaggcaagcacaga

SEQ ID NO: 2006255 - RNA, 19 nt, Homo sapiens
  misc_RNA (1)...(19): siRNA sense strand
gcucaugcuccuacuguau

SEQ ID NO: 2006256 - RNA, 19 nt, Homo sapiens
  misc_RNA (1)...(19): siRNA sense strand
uggcaacucgcccaucuuu

SEQ ID NO: 2006257 - RNA, 19 nt, Homo sapiens
  misc_RNA (1)...(19): siRNA sense strand
ccaccuccacccagaacua

SEQ ID NO: 2006258 - RNA, 19 nt, Homo sapiens
  misc_RNA (1)...(19): siRNA sense strand
gcaauucugggcugugaag

SEQ ID NO: 2006259 - RNA, 19 nt, Homo sapiens
  misc_RNA (1)...(19): siRNA sense strand
ugaagacuccaacccuuau

SEQ ID NO: 2006260 - RNA, 19 nt, Homo sapiens
  misc_RNA (1)...(19): siRNA sense strand
caacccuuauccuguaugg

SEQ ID NO: 2006261 - RNA, 19 nt, Homo sapiens
  misc_RNA (1)...(19): siRNA sense strand
gagguggugcugcuucaug

SEQ ID NO: 2006262 - RNA, 19 nt, Homo sapiens
  misc_RNA (1)...(19): siRNA sense strand
caugagccagucccaggua

SEQ ID NO: 2006263 - RNA, 19 nt, Homo sapiens
  misc_RNA (1)...(19): siRNA sense strand
auggagagcuggaccacau

SEQ ID NO: 2006264 - RNA, 19 nt, Homo sapiens
  misc_RNA (1)...(19): siRNA sense strand
ccaccagcuacauggauuu

SEQ ID NO: 2006265 - RNA, 19 nt, Homo sapiens
  misc_RNA (1)...(19): siRNA sense strand
guggugaagcuacgcaaug

SEQ ID NO: 2006266 - RNA, 19 nt, Homo sapiens
  misc_RNA (1)...(19): siRNA sense strand
gaagacuccaacccuuauc

SEQ ID NO: 2006267 - RNA, 19 nt, Homo sapiens
  misc_RNA (1)...(19): siRNA sense strand
ccuugaccaucuaccuuga

SEQ ID NO: 2006268 - RNA, 19 nt, Homo sapiens
  misc_RNA (1)...(19): siRNA sense strand
ccuggcaacucgcccaucu

SEQ ID NO: 2006269 - RNA, 19 nt, Homo sapiens
  misc_RNA (1)...(19): siRNA sense strand
gaagaaggcaccucugguu

SEQ ID NO: 2006270 - RNA, 19 nt, Homo sapiens
  misc_RNA (1)...(19): siRNA sense strand
gcuccgagauggaugauga

SEQ ID NO: 2006271 - RNA, 19 nt, Homo sapiens
  misc_RNA (1)...(19): siRNA sense strand
ggaauaaguacgaauguga

SEQ ID NO: 2006272 - RNA, 19 nt, Homo sapiens
  misc_RNA (1)...(19): siRNA sense strand
gugagaagcugcugcucua

SEQ ID NO: 2006273 - RNA, 19 nt, Homo sapiens
  misc_RNA (1)...(19): siRNA sense strand
ggacuggacagccaucaaa

SEQ ID NO: 2006274 - RNA, 19 nt, Homo sapiens
  misc_RNA (1)...(19): siRNA sense strand
agaagcugcugcucuauga

SEQ ID NO: 2006275 - RNA, 19 nt, Homo sapiens
  misc_RNA (1)...(19): siRNA sense strand
guacaugcuucaagagauc

SEQ ID NO: 2006276 - RNA, 19 nt, Homo sapiens
  misc_RNA (1)...(19): siRNA sense strand
gcaaagacacagaagagau

SEQ ID NO: 2006277 - RNA, 19 nt, Homo sapiens
  misc_RNA (1)...(19): siRNA sense strand
gaucaggaauaaguacgaa

SEQ ID NO: 2006278 - RNA, 19 nt, Homo sapiens
  misc_RNA (1)...(19): siRNA sense strand
gaaggcaccucugguuucu

SEQ ID NO: 2006279 - RNA, 19 nt, Homo sapiens
  misc_RNA (1)...(19): siRNA sense strand
cagcggagccucaagauuc

SEQ ID NO: 2006280 - RNA, 19 nt, Homo sapiens
  misc_RNA (1)...(19): siRNA sense strand
caaagacacagaagagaug

SEQ ID NO: 2006281 - RNA, 19 nt, Homo sapiens
  misc_RNA (1)...(19): siRNA sense strand
gaugugaucaggaauaagu

SEQ ID NO: 2006282 - RNA, 19 nt, Homo sapiens
  misc_RNA (1)...(19): siRNA sense strand
gauggaugaugaggacuau

SEQ ID NO: 2006283 - RNA, 19 nt, Homo sapiens
  misc_RNA (1)...(19): siRNA sense strand
gugagaugcuggaccuaga

SEQ ID NO: 2006284 - RNA, 19 nt, Homo sapiens
  misc_RNA (1)...(19): siRNA sense strand
uggaugugaucaggaauaa

SEQ ID NO: 2006285 - RNA, 19 nt, Homo sapiens
  misc_RNA (1)...(19): siRNA sense strand
gagaagcugcugcucuaug

SEQ ID NO: 2006286 - RNA, 19 nt, Homo sapiens
  misc_RNA (1)...(19): siRNA sense strand
aacagcaccuggagaguga

SEQ ID NO: 2006287 - RNA, 19 nt, Homo sapiens
  misc_RNA (1)...(19): siRNA sense strand
gcagcgagugugucaguga

SEQ ID NO: 2006288 - RNA, 19 nt, Homo sapiens
  misc_RNA (1)...(19): siRNA sense strand
ggaagcagagggugauucu

SEQ ID NO: 2006289 - RNA, 19 nt, Homo sapiens
  misc_RNA (1)...(19): siRNA sense strand
gggaggaggaagagaguga

SEQ ID NO: 2006290 - RNA, 19 nt, Homo sapiens
  misc_RNA (1)...(19): siRNA sense strand
agaggcagcuccaggucuu

SEQ ID NO: 2006291 - RNA, 19 nt, Homo sapiens
  misc_RNA (1)...(19): siRNA sense strand
aagcaguucucggagcuaa

SEQ ID NO: 2006292 - RNA, 19 nt, Homo sapiens
  misc_RNA (1)...(19): siRNA sense strand
gcagcggagccucaagauu

SEQ ID NO: 2006293 - RNA, 19 nt, Homo sapiens
  misc_RNA (1)...(19): siRNA sense strand
caagcaaagacacagaaga

SEQ ID NO: 2006294 - RNA, 19 nt, Homo sapiens
  misc_RNA (1)...(19): siRNA sense strand
gaucuacaagggcuucugu

SEQ ID NO: 2006295 - RNA, 19 nt, Homo sapiens
  misc_RNA (1)...(19): siRNA sense strand
uguccagccuccaagcaaa

SEQ ID NO: 2006296 - RNA, 19 nt, Homo sapiens
  misc_RNA (1)...(19): siRNA sense strand
uaaaggagaaguuguucag

SEQ ID NO: 2006297 - RNA, 19 nt, Homo sapiens
  misc_RNA (1)...(19): siRNA sense strand
uggaugaugaggacuauga

SEQ ID NO: 2006298 - RNA, 19 nt, Homo sapiens
  misc_RNA (1)...(19): siRNA sense strand
ggagcuaaaggagaaguug

SEQ ID NO: 2006299 - RNA, 19 nt, Homo sapiens
  misc_RNA (1)...(19): siRNA sense strand
aagaaggcaccucugguuu

SEQ ID NO: 2006300 - RNA, 19 nt, Homo sapiens
  misc_RNA (1)...(19): siRNA sense strand
ugaauggugggacgacaaa

SEQ ID NO: 2006301 - RNA, 19 nt, Homo sapiens
  misc_RNA (1)...(19): siRNA sense strand
ucaggaauaaguacgaaug

SEQ ID NO: 2006302 - RNA, 19 nt, Homo sapiens
  misc_RNA (1)...(19): siRNA sense strand
ugauucugcugcugagaug

SEQ ID NO: 2006303 - RNA, 19 nt, Homo sapiens
  misc_RNA (1)...(19): siRNA sense strand
gcagccagacagagucaga

SEQ ID NO: 2006304 - RNA, 19 nt, Homo sapiens
  misc_RNA (1)...(19): siRNA sense strand
gagcuaaaggagaaguugu

SEQ ID NO: 2006305 - RNA, 19 nt, Homo sapiens
  misc_RNA (1)...(19): siRNA sense strand
ucguguacaugcuucaaga

SEQ ID NO: 2006306 - RNA, 19 nt, Homo sapiens
  misc_RNA (1)...(19): siRNA sense strand
gcgagugugucagugagau

SEQ ID NO: 2006307 - RNA, 19 nt, Homo sapiens
  misc_RNA (1)...(19): siRNA sense strand
gggcuucugucuggaugug

SEQ ID NO: 2006308 - RNA, 19 nt, Homo sapiens
  misc_RNA (1)...(19): siRNA sense strand
gguugcggcuggaggaagu

SEQ ID NO: 2006309 - RNA, 19 nt, Homo sapiens
  misc_RNA (1)...(19): siRNA sense strand
gcaguucucggagcuaaag

SEQ ID NO: 2006310 - RNA, 19 nt, Homo sapiens
  misc_RNA (1)...(19): siRNA sense strand
ggaccuagagaagcaguuc

SEQ ID NO: 2006311 - RNA, 19 nt, Homo sapiens
  misc_RNA (1)...(19): siRNA sense strand
gucuggaugugaucaggaa

SEQ ID NO: 2006312 - RNA, 19 nt, Homo sapiens
  misc_RNA (1)...(19): siRNA sense strand
uguacaugcuucaagagau

SEQ ID NO: 2006313 - RNA, 19 nt, Homo sapiens
  misc_RNA (1)...(19): siRNA sense strand
agaaggcaccucugguuuc

SEQ ID NO: 2006314 - RNA, 19 nt, Homo sapiens
  misc_RNA (1)...(19): siRNA sense strand
ccagacagagucagaagag

SEQ ID NO: 2006315 - RNA, 19 nt, Homo sapiens
  misc_RNA (1)...(19): siRNA sense strand
aagcaaagacacagaagag

SEQ ID NO: 2006316 - RNA, 19 nt, Homo sapiens
  misc_RNA (1)...(19): siRNA sense strand
aaaaucggauggaccuuga

SEQ ID NO: 2006317 - RNA, 19 nt, Homo sapiens
  misc_RNA (1)...(19): siRNA sense strand
ugagagagccccugaauac

SEQ ID NO: 2006318 - RNA, 19 nt, Homo sapiens
  misc_RNA (1)...(19): siRNA sense strand
gagaugcuggaccuagaga

SEQ ID NO: 2006319 - RNA, 19 nt, Homo sapiens
  misc_RNA (1)...(19): siRNA sense strand
agacacagaagagauggaa

SEQ ID NO: 2006320 - RNA, 19 nt, Homo sapiens
  misc_RNA (1)...(19): siRNA sense strand
gcuaaaggagaaguuguuc

SEQ ID NO: 2006321 - RNA, 19 nt, Homo sapiens
  misc_RNA (1)...(19): siRNA sense strand
gauggaagcagagggugau

SEQ ID NO: 2006322 - RNA, 19 nt, Homo sapiens
  misc_RNA (1)...(19): siRNA sense strand
gaugcuggaccuagagaag

SEQ ID NO: 2006323 - RNA, 19 nt, Homo sapiens
  misc_RNA (1)...(19): siRNA sense strand
gaagcaguucucggagcua

SEQ ID NO: 2006324 - RNA, 19 nt, Homo sapiens
  misc_RNA (1)...(19): siRNA sense strand
ggaaaccuguccuaaguaa

SEQ ID NO: 2006325 - RNA, 19 nt, Homo sapiens
  misc_RNA (1)...(19): siRNA sense strand
ugggaaaccuguccuaagu

SEQ ID NO: 2006326 - RNA, 19 nt, Homo sapiens
  misc_RNA (1)...(19): siRNA sense strand
ggccauuucuggucuuugu

SEQ ID NO: 2006327 - RNA, 19 nt, Homo sapiens
  misc_RNA (1)...(19): siRNA sense strand
gggaaaccuguccuaagua

SEQ ID NO: 2006328 - RNA, 19 nt, Homo sapiens
  misc_RNA (1)...(19): siRNA sense strand
gccagccucuccuuucuuc

SEQ ID NO: 2006329 - RNA, 19 nt, Homo sapiens
  misc_RNA (1)...(19): siRNA sense strand
ggagaaugccguccuaagc

SEQ ID NO: 2006330 - RNA, 19 nt, Homo sapiens
  misc_RNA (1)...(19): siRNA sense strand
agaaugccguccuaagcuu

SEQ ID NO: 2006331 - RNA, 19 nt, Homo sapiens
  misc_RNA (1)...(19): siRNA sense strand
gaagcccucgagugacuuu

SEQ ID NO: 2006332 - RNA, 19 nt, Homo sapiens
  misc_RNA (1)...(19): siRNA sense strand
gaaaccuguccuaaguaaa

SEQ ID NO: 2006333 - RNA, 19 nt, Homo sapiens
  misc_RNA (1)...(19): siRNA sense strand
gcccucgagugacuuucua

SEQ ID NO: 2006334 - RNA, 19 nt, Homo sapiens
  misc_RNA (1)...(19): siRNA sense strand
gaacagagaggggagaaug

SEQ ID NO: 2006335 - RNA, 19 nt, Homo sapiens
  misc_RNA (1)...(19): siRNA sense strand
gagaaugccguccuaagcu

SEQ ID NO: 2006336 - RNA, 19 nt, Homo sapiens
  misc_RNA (1)...(19): siRNA sense strand
gcugggagaaccuguguca

SEQ ID NO: 2006337 - RNA, 19 nt, Homo sapiens
  misc_RNA (1)...(19): siRNA sense strand
caaaugccagccucuccuu

SEQ ID NO: 2006338 - RNA, 19 nt, Homo sapiens
  misc_RNA (1)...(19): siRNA sense strand
aaaccuguccuaaguaaaa

SEQ ID NO: 2006339 - RNA, 19 nt, Homo sapiens
  misc_RNA (1)...(19): siRNA sense strand
gugacuuucuaacccaaga

SEQ ID NO: 2006340 - RNA, 19 nt, Homo sapiens
  misc_RNA (1)...(19): siRNA sense strand
ggauggaagcgccuuuguc

SEQ ID NO: 2006341 - RNA, 19 nt, Homo sapiens
  misc_RNA (1)...(19): siRNA sense strand
gcucgagccgucauagauc

SEQ ID NO: 2006342 - RNA, 19 nt, Homo sapiens
  misc_RNA (1)...(19): siRNA sense strand
gggagaaugccguccuaag

SEQ ID NO: 2006343 - RNA, 19 nt, Homo sapiens
  misc_RNA (1)...(19): siRNA sense strand
cugaagcccucgagugacu

SEQ ID NO: 2006344 - RNA, 19 nt, Homo sapiens
  misc_RNA (1)...(19): siRNA sense strand
gcagggcuggugggacaaa

SEQ ID NO: 2006345 - RNA, 19 nt, Homo sapiens
  misc_RNA (1)...(19): siRNA sense strand
ugggagaaccugugucaag

SEQ ID NO: 2006346 - RNA, 19 nt, Homo sapiens
  misc_RNA (1)...(19): siRNA sense strand
gaagagcacugacgggaaa

SEQ ID NO: 2006347 - RNA, 19 nt, Homo sapiens
  misc_RNA (1)...(19): siRNA sense strand
ggaaacauccuaaaugaaa

SEQ ID NO: 2006348 - RNA, 19 nt, Homo sapiens
  misc_RNA (1)...(19): siRNA sense strand
gauaagaagcuuuguguuu

SEQ ID NO: 2006349 - RNA, 19 nt, Homo sapiens
  misc_RNA (1)...(19): siRNA sense strand
aaagagagaucaagaacaa

SEQ ID NO: 2006350 - RNA, 19 nt, Homo sapiens
  misc_RNA (1)...(19): siRNA sense strand
gaaguucaauaucagauga

SEQ ID NO: 2006351 - RNA, 19 nt, Homo sapiens
  misc_RNA (1)...(19): siRNA sense strand
gcacagaaauacauugauc

SEQ ID NO: 2006352 - RNA, 19 nt, Homo sapiens
  misc_RNA (1)...(19): siRNA sense strand
gagaggaaauuaccacgaa

SEQ ID NO: 2006353 - RNA, 19 nt, Homo sapiens
  misc_RNA (1)...(19): siRNA sense strand
gcaaacaccugaauuaacg

SEQ ID NO: 2006354 - RNA, 19 nt, Homo sapiens
  misc_RNA (1)...(19): siRNA sense strand
gaaucuaacucugauaaga

SEQ ID NO: 2006355 - RNA, 19 nt, Homo sapiens
  misc_RNA (1)...(19): siRNA sense strand
caccaaagauaccagauaa

SEQ ID NO: 2006356 - RNA, 19 nt, Homo sapiens
  misc_RNA (1)...(19): siRNA sense strand
agacuacacugaaacauug

SEQ ID NO: 2006357 - RNA, 19 nt, Homo sapiens
  misc_RNA (1)...(19): siRNA sense strand
caccauagauguucaagug

SEQ ID NO: 2006358 - RNA, 19 nt, Homo sapiens
  misc_RNA (1)...(19): siRNA sense strand
aaagcaaacaccugaauua

SEQ ID NO: 2006359 - RNA, 19 nt, Homo sapiens
  misc_RNA (1)...(19): siRNA sense strand
gugaagcccuaacguguaa

SEQ ID NO: 2006360 - RNA, 19 nt, Homo sapiens
  misc_RNA (1)...(19): siRNA sense strand
guaccaaucucugcuguga

SEQ ID NO: 2006361 - RNA, 19 nt, Homo sapiens
  misc_RNA (1)...(19): siRNA sense strand
gaauuaacgcuccaugaaa

SEQ ID NO: 2006362 - RNA, 19 nt, Homo sapiens
  misc_RNA (1)...(19): siRNA sense strand
gaggauacuucacacauca

SEQ ID NO: 2006363 - RNA, 19 nt, Homo sapiens
  misc_RNA (1)...(19): siRNA sense strand
gaaccuacucaaugugaua

SEQ ID NO: 2006364 - RNA, 19 nt, Homo sapiens
  misc_RNA (1)...(19): siRNA sense strand
uaagaagcuuuguguuuga

SEQ ID NO: 2006365 - RNA, 19 nt, Homo sapiens
  misc_RNA (1)...(19): siRNA sense strand
gagaaucuaacucugauaa

SEQ ID NO: 2006366 - RNA, 19 nt, Homo sapiens
  misc_RNA (1)...(19): siRNA sense strand
aaacaaggcccaauucgaa

SEQ ID NO: 2006367 - RNA, 19 nt, Homo sapiens
  misc_RNA (1)...(19): siRNA sense strand
gcaaagaggaaagguauga

SEQ ID NO: 2006368 - RNA, 19 nt, Homo sapiens
  misc_RNA (1)...(19): siRNA sense strand
uaauguggcucuuguagga

SEQ ID NO: 2006369 - RNA, 19 nt, Homo sapiens
  misc_RNA (1)...(19): siRNA sense strand
gaacaugccgucuuuacau

SEQ ID NO: 2006370 - RNA, 19 nt, Homo sapiens
  misc_RNA (1)...(19): siRNA sense strand
gcaauagccauaaagcaaa

SEQ ID NO: 2006371 - RNA, 19 nt, Homo sapiens
  misc_RNA (1)...(19): siRNA sense strand
gcccuaacguguaaacuga

SEQ ID NO: 2006372 - RNA, 19 nt, Homo sapiens
  misc_RNA (1)...(19): siRNA sense strand
ggagaagacugugauugug

SEQ ID NO: 2006373 - RNA, 19 nt, Homo sapiens
  misc_RNA (1)...(19): siRNA sense strand
gcaccacguuugacaacuu

SEQ ID NO: 2006374 - RNA, 19 nt, Homo sapiens
  misc_RNA (1)...(19): siRNA sense strand
auaagaagcuuuguguuug

SEQ ID NO: 2006375 - RNA, 19 nt, Homo sapiens
  misc_RNA (1)...(19): siRNA sense strand
gcaagcaccuauuccuaca

SEQ ID NO: 2006376 - RNA, 19 nt, Homo sapiens
  misc_RNA (1)...(19): siRNA sense strand
gaaacaaggcccaauucga

SEQ ID NO: 2006377 - RNA, 19 nt, Homo sapiens
  misc_RNA (1)...(19): siRNA sense strand
ggacuggcagcuucaaauu

SEQ ID NO: 2006378 - RNA, 19 nt, Homo sapiens
  misc_RNA (1)...(19): siRNA sense strand
caucuucgguugcuguuau

SEQ ID NO: 2006379 - RNA, 19 nt, Homo sapiens
  misc_RNA (1)...(19): siRNA sense strand
gcacagacgagaaagaaca

SEQ ID NO: 2006380 - RNA, 19 nt, Homo sapiens
  misc_RNA (1)...(19): siRNA sense strand
gaagcuuuguguuugaugu

SEQ ID NO: 2006381 - RNA, 19 nt, Homo sapiens
  misc_RNA (1)...(19): siRNA sense strand
ugaugaaccuacucaaugu

SEQ ID NO: 2006382 - RNA, 19 nt, Homo sapiens
  misc_RNA (1)...(19): siRNA sense strand
gaaaagcacagacgagaaa

SEQ ID NO: 2006383 - RNA, 19 nt, Homo sapiens
  misc_RNA (1)...(19): siRNA sense strand
gauuguggcucuccuaagg

SEQ ID NO: 2006384 - RNA, 19 nt, Homo sapiens
  misc_RNA (1)...(19): siRNA sense strand
caaaggauuucaguacauc

SEQ ID NO: 2006385 - RNA, 19 nt, Homo sapiens
  misc_RNA (1)...(19): siRNA sense strand
ccaaaggauuucaguacau

SEQ ID NO: 2006386 - RNA, 19 nt, Homo sapiens
  misc_RNA (1)...(19): siRNA sense strand
uguucaaacucaagcaaua

SEQ ID NO: 2006387 - RNA, 19 nt, Homo sapiens
  misc_RNA (1)...(19): siRNA sense strand
ugaauuaacgcuccaugaa

SEQ ID NO: 2006388 - RNA, 19 nt, Homo sapiens
  misc_RNA (1)...(19): siRNA sense strand
gggagaagacugugauugu

SEQ ID NO: 2006389 - RNA, 19 nt, Homo sapiens
  misc_RNA (1)...(19): siRNA sense strand
agaauaauguggcucuugu

SEQ ID NO: 2006390 - RNA, 19 nt, Homo sapiens
  misc_RNA (1)...(19): siRNA sense strand
guauggaaaucuggucuga

SEQ ID NO: 2006391 - RNA, 19 nt, Homo sapiens
  misc_RNA (1)...(19): siRNA sense strand
aauuaacgcuccaugaaau

SEQ ID NO: 2006392 - RNA, 19 nt, Homo sapiens
  misc_RNA (1)...(19): siRNA sense strand
ucuauuuggugcuggauaa

SEQ ID NO: 2006393 - RNA, 19 nt, Homo sapiens
  misc_RNA (1)...(19): siRNA sense strand
gggccagacuacacugaaa

SEQ ID NO: 2006394 - RNA, 19 nt, Homo sapiens
  misc_RNA (1)...(19): siRNA sense strand
ccacgaaaccugagaacau

SEQ ID NO: 2006395 - RNA, 19 nt, Homo sapiens
  misc_RNA (1)...(19): siRNA sense strand
gugaugaaccuacucaaug

SEQ ID NO: 2006396 - RNA, 19 nt, Homo sapiens
  misc_RNA (1)...(19): siRNA sense strand
gaauaauguggcucuugua

SEQ ID NO: 2006397 - RNA, 19 nt, Homo sapiens
  misc_RNA (1)...(19): siRNA sense strand
ucaccaaagauaccagaua

SEQ ID NO: 2006398 - RNA, 19 nt, Homo sapiens
  misc_RNA (1)...(19): siRNA sense strand
aagcaccuauuccuacaaa

SEQ ID NO: 2006399 - RNA, 19 nt, Homo sapiens
  misc_RNA (1)...(19): siRNA sense strand
ugagauggcacaguucuaa

SEQ ID NO: 2006400 - RNA, 19 nt, Homo sapiens
  misc_RNA (1)...(19): siRNA sense strand
cacgaaaccugagaacaug

SEQ ID NO: 2006401 - RNA, 19 nt, Homo sapiens
  misc_RNA (1)...(19): siRNA sense strand
caucuugccgugcacauuu

SEQ ID NO: 2006402 - RNA, 19 nt, Homo sapiens
  misc_RNA (1)...(19): siRNA sense strand
ccacgaccaugcucagcuu

SEQ ID NO: 2006403 - RNA, 19 nt, Homo sapiens
  misc_RNA (1)...(19): siRNA sense strand
gcaagcaccacguuugaca

SEQ ID NO: 2006404 - RNA, 19 nt, Homo sapiens
  misc_RNA (1)...(19): siRNA sense strand
gcgcaagcaccacguuuga

SEQ ID NO: 2006405 - RNA, 19 nt, Homo sapiens
  misc_RNA (1)...(19): siRNA sense strand
uaaagcaaacaccugaauu

SEQ ID NO: 2006406 - RNA, 19 nt, Homo sapiens
  misc_RNA (1)...(19): siRNA sense strand
caugaaauaguuuguccua

SEQ ID NO: 2006407 - RNA, 19 nt, Homo sapiens
  misc_RNA (1)...(19): siRNA sense strand
gcucauuguucaaacucaa

SEQ ID NO: 2006408 - RNA, 19 nt, Homo sapiens
  misc_RNA (1)...(19): siRNA sense strand
gggcacagaaauacauuga

SEQ ID NO: 2006409 - RNA, 19 nt, Homo sapiens
  misc_RNA (1)...(19): siRNA sense strand
cacaucaucaccaaagaua

SEQ ID NO: 2006410 - RNA, 19 nt, Homo sapiens
  misc_RNA (1)...(19): siRNA sense strand
ggugcuggauaaugccuuu

SEQ ID NO: 2006411 - RNA, 19 nt, Homo sapiens
  misc_RNA (1)...(19): siRNA sense strand
guacuuuggcucauuguuc

SEQ ID NO: 2006412 - RNA, 19 nt, Homo sapiens
  misc_RNA (1)...(19): siRNA sense strand
aagcaaacaccugaauuaa

SEQ ID NO: 2006413 - RNA, 19 nt, Homo sapiens
  misc_RNA (1)...(19): siRNA sense strand
cagacuacacugaaacauu

SEQ ID NO: 2006414 - RNA, 19 nt, Homo sapiens
  misc_RNA (1)...(19): siRNA sense strand
ccuaaggaguguaccaauc

SEQ ID NO: 2006415 - RNA, 19 nt, Homo sapiens
  misc_RNA (1)...(19): siRNA sense strand
gagaggauacuucacacau

SEQ ID NO: 2006416 - RNA, 19 nt, Homo sapiens
  misc_RNA (1)...(19): siRNA sense strand
auggaaaucuggucugaug

SEQ ID NO: 2006417 - RNA, 19 nt, Homo sapiens
  misc_RNA (1)...(19): siRNA sense strand
acauugaucucuauuuggu

SEQ ID NO: 2006418 - RNA, 19 nt, Homo sapiens
  misc_RNA (1)...(19): siRNA sense strand
gggaaacaaggcccaauuc

SEQ ID NO: 2006419 - RNA, 19 nt, Homo sapiens
  misc_RNA (1)...(19): siRNA sense strand
gugcacauuuugaaagaua

SEQ ID NO: 2006420 - RNA, 19 nt, Homo sapiens
  misc_RNA (1)...(19): siRNA sense strand
aagaacaaccagacagaaa

SEQ ID NO: 2006421 - RNA, 19 nt, Homo sapiens
  misc_RNA (1)...(19): siRNA sense strand
cagcuucucagcgggauua

SEQ ID NO: 2006422 - RNA, 19 nt, Homo sapiens
  misc_RNA (1)...(19): siRNA sense strand
gaacaagacccagcuaacc

SEQ ID NO: 2006423 - RNA, 19 nt, Homo sapiens
  misc_RNA (1)...(19): siRNA sense strand
gauaaaaccucugaaaagc

SEQ ID NO: 2006424 - RNA, 19 nt, Homo sapiens
  misc_RNA (1)...(19): siRNA sense strand
gaucaagaacaaccagaca

SEQ ID NO: 2006425 - RNA, 19 nt, Homo sapiens
  misc_RNA (1)...(19): siRNA sense strand
caagaacaaccagacagaa

SEQ ID NO: 2006426 - RNA, 19 nt, Homo sapiens
  misc_RNA (1)...(19): siRNA sense strand
ucaagaacaaccagacaga

SEQ ID NO: 2006427 - RNA, 19 nt, Homo sapiens
  misc_RNA (1)...(19): siRNA sense strand
caugccgucuuuacaucua

SEQ ID NO: 2006428 - RNA, 19 nt, Homo sapiens
  misc_RNA (1)...(19): siRNA sense strand
ggaacaagacccagcuaac

SEQ ID NO: 2006429 - RNA, 19 nt, Homo sapiens
  misc_RNA (1)...(19): siRNA sense strand
agaggaaauuaccacgaaa

SEQ ID NO: 2006430 - RNA, 19 nt, Homo sapiens
  misc_RNA (1)...(19): siRNA sense strand
gagaugcuccaaaccauac

SEQ ID NO: 2006431 - RNA, 19 nt, Homo sapiens
  misc_RNA (1)...(19): siRNA sense strand
cccaaaggauuucaguaca

SEQ ID NO: 2006432 - RNA, 19 nt, Homo sapiens
  misc_RNA (1)...(19): siRNA sense strand
caauagccauaaagcaaac

SEQ ID NO: 2006433 - RNA, 19 nt, Homo sapiens
  misc_RNA (1)...(19): siRNA sense strand
ccaaagauaccagauaaaa

SEQ ID NO: 2006434 - RNA, 19 nt, Homo sapiens
  misc_RNA (1)...(19): siRNA sense strand
ucacacaucaucaccaaag

SEQ ID NO: 2006435 - RNA, 19 nt, Homo sapiens
  misc_RNA (1)...(19): siRNA sense strand
cuucacacaucaucaccaa

SEQ ID NO: 2006436 - RNA, 19 nt, Homo sapiens
  misc_RNA (1)...(19): siRNA sense strand
ccuacucaaugugauauau

SEQ ID NO: 2006437 - RNA, 19 nt, Homo sapiens
  misc_RNA (1)...(19): siRNA sense strand
aaugagaaucuaacucuga

SEQ ID NO: 2006438 - RNA, 19 nt, Homo sapiens
  misc_RNA (1)...(19): siRNA sense strand
agacccagcuaaccacaca

SEQ ID NO: 2006439 - RNA, 19 nt, Homo sapiens
  misc_RNA (1)...(19): siRNA sense strand
uggcaaagaggaaagguau

SEQ ID NO: 2006440 - RNA, 19 nt, Homo sapiens
  misc_RNA (1)...(19): siRNA sense strand
caucuaaccaggaggaaca

SEQ ID NO: 2006441 - RNA, 19 nt, Homo sapiens
  misc_RNA (1)...(19): siRNA sense strand
agaggauacuucacacauc

SEQ ID NO: 2006442 - RNA, 19 nt, Homo sapiens
  misc_RNA (1)...(19): siRNA sense strand
ggaaacaaggcccaauucg

SEQ ID NO: 2006443 - RNA, 19 nt, Homo sapiens
  misc_RNA (1)...(19): siRNA sense strand
agaauucuguugccagcau

SEQ ID NO: 2006444 - RNA, 19 nt, Homo sapiens
  misc_RNA (1)...(19): siRNA sense strand
uuccugagauggcacaguu

SEQ ID NO: 2006445 - RNA, 19 nt, Homo sapiens
  misc_RNA (1)...(19): siRNA sense strand
uacuuuggcucauuguuca

SEQ ID NO: 2006446 - RNA, 19 nt, Homo sapiens
  misc_RNA (1)...(19): siRNA sense strand
ggacuuggcugagaacaug

SEQ ID NO: 2006447 - RNA, 19 nt, Homo sapiens
  misc_RNA (1)...(19): siRNA sense strand
gaacgacgggucuuucauu

SEQ ID NO: 2006448 - RNA, 19 nt, Homo sapiens
  misc_RNA (1)...(19): siRNA sense strand
ggaggucaauaucacagaa

SEQ ID NO: 2006449 - RNA, 19 nt, Homo sapiens
  misc_RNA (1)...(19): siRNA sense strand
gccuggagcuggaggauga

SEQ ID NO: 2006450 - RNA, 19 nt, Homo sapiens
  misc_RNA (1)...(19): siRNA sense strand
gcaccaagaagcacgugua

SEQ ID NO: 2006451 - RNA, 19 nt, Homo sapiens
  misc_RNA (1)...(19): siRNA sense strand
ccaagaagcacguguaugg

SEQ ID NO: 2006452 - RNA, 19 nt, Homo sapiens
  misc_RNA (1)...(19): siRNA sense strand
ucaagggacccaucaacua

SEQ ID NO: 2006453 - RNA, 19 nt, Homo sapiens
  misc_RNA (1)...(19): siRNA sense strand
gaacguggccaucuacaac

SEQ ID NO: 2006454 - RNA, 19 nt, Homo sapiens
  misc_RNA (1)...(19): siRNA sense strand
gaaagccagcucaaucuca

SEQ ID NO: 2006455 - RNA, 19 nt, Homo sapiens
  misc_RNA (1)...(19): siRNA sense strand
cgagaaagccagcucaauc

SEQ ID NO: 2006456 - RNA, 19 nt, Homo sapiens
  misc_RNA (1)...(19): siRNA sense strand
ggugaacgacuccauguau

SEQ ID NO: 2006457 - RNA, 19 nt, Homo sapiens
  misc_RNA (1)...(19): siRNA sense strand
gagaaagccagcucaaucu

SEQ ID NO: 2006458 - RNA, 19 nt, Homo sapiens
  misc_RNA (1)...(19): siRNA sense strand
uggcagaaguccaccaaug

SEQ ID NO: 2006459 - RNA, 19 nt, Homo sapiens
  misc_RNA (1)...(19): siRNA sense strand
gaagaucacccaggucaca

SEQ ID NO: 2006460 - RNA, 19 nt, Homo sapiens
  misc_RNA (1)...(19): siRNA sense strand
gugaacgacuccauguaug

SEQ ID NO: 2006461 - RNA, 19 nt, Homo sapiens
  misc_RNA (1)...(19): siRNA sense strand
aaggaaagccucacucuca

SEQ ID NO: 2006462 - RNA, 19 nt, Homo sapiens
  misc_RNA (1)...(19): siRNA sense strand
gcaguaugagccugaggua

SEQ ID NO: 2006463 - RNA, 19 nt, Homo sapiens
  misc_RNA (1)...(19): siRNA sense strand
cugcaaagcugaugcuaac

SEQ ID NO: 2006464 - RNA, 19 nt, Homo sapiens
  misc_RNA (1)...(19): siRNA sense strand
caaacccaccaauuggaua

SEQ ID NO: 2006465 - RNA, 19 nt, Homo sapiens
  misc_RNA (1)...(19): siRNA sense strand
ccacauggaccgcuucaag

SEQ ID NO: 2006466 - RNA, 19 nt, Homo sapiens
  misc_RNA (1)...(19): siRNA sense strand
gaaggagugguacguguag

SEQ ID NO: 2006467 - RNA, 19 nt, Homo sapiens
  misc_RNA (1)...(19): siRNA sense strand
cgacgggucuuucauuucc

SEQ ID NO: 2006468 - RNA, 19 nt, Homo sapiens
  misc_RNA (1)...(19): siRNA sense strand
aacgacgggucuuucauuu

SEQ ID NO: 2006469 - RNA, 19 nt, Homo sapiens
  misc_RNA (1)...(19): siRNA sense strand
caagggacccaucaacuac

SEQ ID NO: 2006470 - RNA, 19 nt, Homo sapiens
  misc_RNA (1)...(19): siRNA sense strand
uggccaaacccaccaauug

SEQ ID NO: 2006471 - RNA, 19 nt, Homo sapiens
  misc_RNA (1)...(19): siRNA sense strand
aggaaagccucacucucaa

SEQ ID NO: 2006472 - RNA, 19 nt, Homo sapiens
  misc_RNA (1)...(19): siRNA sense strand
agccugagguaaccauuga

SEQ ID NO: 2006473 - RNA, 19 nt, Homo sapiens
  misc_RNA (1)...(19): siRNA sense strand
cgacucagacgacgagaag

SEQ ID NO: 2006474 - RNA, 19 nt, Homo sapiens
  misc_RNA (1)...(19): siRNA sense strand
agaaggagugguacgugua

SEQ ID NO: 2006475 - RNA, 19 nt, Homo sapiens
  misc_RNA (1)...(19): siRNA sense strand
gguuugauggcaacuggua

SEQ ID NO: 2006476 - RNA, 19 nt, Homo sapiens
  misc_RNA (1)...(19): siRNA sense strand
gcagaacguggccaucuac

SEQ ID NO: 2006477 - RNA, 19 nt, Homo sapiens
  misc_RNA (1)...(19): siRNA sense strand
uggcacagaaccugcagua

SEQ ID NO: 2006478 - RNA, 19 nt, Homo sapiens
  misc_RNA (1)...(19): siRNA sense strand
gagccugagguaaccauug

SEQ ID NO: 2006479 - RNA, 19 nt, Homo sapiens
  misc_RNA (1)...(19): siRNA sense strand
uggccugcaucgucaacua

SEQ ID NO: 2006480 - RNA, 19 nt, Homo sapiens
  misc_RNA (1)...(19): siRNA sense strand
caucgucaacuaccacaug

SEQ ID NO: 2006481 - RNA, 19 nt, Homo sapiens
  misc_RNA (1)...(19): siRNA sense strand
gcauccugcugguguugau

SEQ ID NO: 2006482 - RNA, 19 nt, Homo sapiens
  misc_RNA (1)...(19): siRNA sense strand
gaagccucccaguguggua

SEQ ID NO: 2006483 - RNA, 19 nt, Homo sapiens
  misc_RNA (1)...(19): siRNA sense strand
ggcagggaccuacaucugu

SEQ ID NO: 2006484 - RNA, 19 nt, Homo sapiens
  misc_RNA (1)...(19): siRNA sense strand
ccaauggcuccaagcagaa

SEQ ID NO: 2006485 - RNA, 19 nt, Homo sapiens
  misc_RNA (1)...(19): siRNA sense strand
caggucacauggcagaagu

SEQ ID NO: 2006486 - RNA, 19 nt, Homo sapiens
  misc_RNA (1)...(19): siRNA sense strand
agcagaacguggccaucua

SEQ ID NO: 2006487 - RNA, 19 nt, Homo sapiens
  misc_RNA (1)...(19): siRNA sense strand
ggcagaaguccaccaaugg

SEQ ID NO: 2006488 - RNA, 19 nt, Homo sapiens
  misc_RNA (1)...(19): siRNA sense strand
auggaccgcuucaaggaaa

SEQ ID NO: 2006489 - RNA, 19 nt, Homo sapiens
  misc_RNA (1)...(19): siRNA sense strand
cggcuugaccgcauucuuc

SEQ ID NO: 2006490 - RNA, 19 nt, Homo sapiens
  misc_RNA (1)...(19): siRNA sense strand
cagcaccacccaccaaugg

SEQ ID NO: 2006491 - RNA, 19 nt, Homo sapiens
  misc_RNA (1)...(19): siRNA sense strand
caucggcacagacgugguu

SEQ ID NO: 2006492 - RNA, 19 nt, Homo sapiens
  misc_RNA (1)...(19): siRNA sense strand
cagaacgacgggucuuuca

SEQ ID NO: 2006493 - RNA, 19 nt, Homo sapiens
  misc_RNA (1)...(19): siRNA sense strand
ggucaauaucacagaauuc

SEQ ID NO: 2006494 - RNA, 19 nt, Homo sapiens
  misc_RNA (1)...(19): siRNA sense strand
ccacuggaccacgcuaaau

SEQ ID NO: 2006495 - RNA, 19 nt, Homo sapiens
  misc_RNA (1)...(19): siRNA sense strand
aggucaauaucacagaauu

SEQ ID NO: 2006496 - RNA, 19 nt, Homo sapiens
  misc_RNA (1)...(19): siRNA sense strand
acucagacgacgagaagaa

SEQ ID NO: 2006497 - RNA, 19 nt, Homo sapiens
  misc_RNA (1)...(19): siRNA sense strand
gugacuacagcaccaagaa

SEQ ID NO: 2006498 - RNA, 19 nt, Homo sapiens
  misc_RNA (1)...(19): siRNA sense strand
uaaaaggugaggcagagua

SEQ ID NO: 2006499 - RNA, 19 nt, Homo sapiens
  misc_RNA (1)...(19): siRNA sense strand
ccgcgagcguguggaauuc

SEQ ID NO: 2006500 - RNA, 19 nt, Homo sapiens
  misc_RNA (1)...(19): siRNA sense strand
ggaaagccucacucucaac

SEQ ID NO: 2006501 - RNA, 19 nt, Homo sapiens
  misc_RNA (1)...(19): siRNA sense strand
ccaagaaggggcaggauga

SEQ ID NO: 2006502 - RNA, 19 nt, Homo sapiens
  misc_RNA (1)...(19): siRNA sense strand
caccaagaagcacguguau

SEQ ID NO: 2006503 - RNA, 19 nt, Homo sapiens
  misc_RNA (1)...(19): siRNA sense strand
ucaaggaaagccucacucu

SEQ ID NO: 2006504 - RNA, 19 nt, Homo sapiens
  misc_RNA (1)...(19): siRNA sense strand
ggacaauccugacaagaau

SEQ ID NO: 2006505 - RNA, 19 nt, Homo sapiens
  misc_RNA (1)...(19): siRNA sense strand
gagcacagcuucgccuuca

SEQ ID NO: 2006506 - RNA, 19 nt, Homo sapiens
  misc_RNA (1)...(19): siRNA sense strand
gcuggaaccuggugaaugg

SEQ ID NO: 2006507 - RNA, 19 nt, Homo sapiens
  misc_RNA (1)...(19): siRNA sense strand
gacaagaucuacuacuucu

SEQ ID NO: 2006508 - RNA, 19 nt, Homo sapiens
  misc_RNA (1)...(19): siRNA sense strand
ccaggcagcuccucugugu

SEQ ID NO: 2006509 - RNA, 19 nt, Homo sapiens
  misc_RNA (1)...(19): siRNA sense strand
gaacuacucagccgucugu

SEQ ID NO: 2006510 - RNA, 19 nt, Homo sapiens
  misc_RNA (1)...(19): siRNA sense strand
uaaauaccacuaccagaaa

SEQ ID NO: 2006511 - RNA, 19 nt, Homo sapiens
  misc_RNA (1)...(19): siRNA sense strand
ggaauacaaugggaagauc

SEQ ID NO: 2006512 - RNA, 19 nt, Homo sapiens
  misc_RNA (1)...(19): siRNA sense strand
cuaaauaccacuaccagaa

SEQ ID NO: 2006513 - RNA, 19 nt, Homo sapiens
  misc_RNA (1)...(19): siRNA sense strand
ugaaagccaugcugguaug

SEQ ID NO: 2006514 - RNA, 19 nt, Homo sapiens
  misc_RNA (1)...(19): siRNA sense strand
gaauaucggcuccacaaag

SEQ ID NO: 2006515 - RNA, 19 nt, Homo sapiens
  misc_RNA (1)...(19): siRNA sense strand
ggucagugcugcaauccau

SEQ ID NO: 2006516 - RNA, 19 nt, Homo sapiens
  misc_RNA (1)...(19): siRNA sense strand
gagcuguacaccagugaua

SEQ ID NO: 2006517 - RNA, 19 nt, Homo sapiens
  misc_RNA (1)...(19): siRNA sense strand
ggacgagaacucccugguu

SEQ ID NO: 2006518 - RNA, 19 nt, Homo sapiens
  misc_RNA (1)...(19): siRNA sense strand
gugauacugucaugcagaa

SEQ ID NO: 2006519 - RNA, 19 nt, Homo sapiens
  misc_RNA (1)...(19): siRNA sense strand
ggagaccuuucaugugcuu

SEQ ID NO: 2006520 - RNA, 19 nt, Homo sapiens
  misc_RNA (1)...(19): siRNA sense strand
caucuucgccgucuggaaa

SEQ ID NO: 2006521 - RNA, 19 nt, Homo sapiens
  misc_RNA (1)...(19): siRNA sense strand
gugcugcaauccauuaauc

SEQ ID NO: 2006522 - RNA, 19 nt, Homo sapiens
  misc_RNA (1)...(19): siRNA sense strand
ggaagcaggaauacaaugg

SEQ ID NO: 2006523 - RNA, 19 nt, Homo sapiens
  misc_RNA (1)...(19): siRNA sense strand
ucagugcugcaauccauua

SEQ ID NO: 2006524 - RNA, 19 nt, Homo sapiens
  misc_RNA (1)...(19): siRNA sense strand
gaccaaggccgcugcaucu

SEQ ID NO: 2006525 - RNA, 19 nt, Homo sapiens
  misc_RNA (1)...(19): siRNA sense strand
gugaauaucggcuccacaa

SEQ ID NO: 2006526 - RNA, 19 nt, Homo sapiens
  misc_RNA (1)...(19): siRNA sense strand
cgccauuguuccacucuaa

SEQ ID NO: 2006527 - RNA, 19 nt, Homo sapiens
  misc_RNA (1)...(19): siRNA sense strand
cagcuucgccuucaacauc

SEQ ID NO: 2006528 - RNA, 19 nt, Homo sapiens
  misc_RNA (1)...(19): siRNA sense strand
ugacaagaucuacuacuuc

SEQ ID NO: 2006529 - RNA, 19 nt, Homo sapiens
  misc_RNA (1)...(19): siRNA sense strand
caugugcuuuaccuaacua

SEQ ID NO: 2006530 - RNA, 19 nt, Homo sapiens
  misc_RNA (1)...(19): siRNA sense strand
cggaggaagcuguauguga

SEQ ID NO: 2006531 - RNA, 19 nt, Homo sapiens
  misc_RNA (1)...(19): siRNA sense strand
cccaaacucucgcuacuac

SEQ ID NO: 2006532 - RNA, 19 nt, Homo sapiens
  misc_RNA (1)...(19): siRNA sense strand
aauaucggcuccacaaagg

SEQ ID NO: 2006533 - RNA, 19 nt, Homo sapiens
  misc_RNA (1)...(19): siRNA sense strand
ggacugcgagaacuacauc

SEQ ID NO: 2006534 - RNA, 19 nt, Homo sapiens
  misc_RNA (1)...(19): siRNA sense strand
augacaagaucuacuacuu

SEQ ID NO: 2006535 - RNA, 19 nt, Homo sapiens
  misc_RNA (1)...(19): siRNA sense strand
cauuguuccacucuaaaua

SEQ ID NO: 2006536 - RNA, 19 nt, Homo sapiens
  misc_RNA (1)...(19): siRNA sense strand
gaacuucaacaggcugcaa

SEQ ID NO: 2006537 - RNA, 19 nt, Homo sapiens
  misc_RNA (1)...(19): siRNA sense strand
ccaccaucgugcaccaaga

SEQ ID NO: 2006538 - RNA, 19 nt, Homo sapiens
  misc_RNA (1)...(19): siRNA sense strand
cagccgagccacacaagga

SEQ ID NO: 2006539 - RNA, 19 nt, Homo sapiens
  misc_RNA (1)...(19): siRNA sense strand
gagcggaggaagcuguaug

SEQ ID NO: 2006540 - RNA, 19 nt, Homo sapiens
  misc_RNA (1)...(19): siRNA sense strand
ucugaaagccaugcuggua

SEQ ID NO: 2006541 - RNA, 19 nt, Homo sapiens
  misc_RNA (1)...(19): siRNA sense strand
ggagggacaccagggucua

SEQ ID NO: 2006542 - RNA, 19 nt, Homo sapiens
  misc_RNA (1)...(19): siRNA sense strand
ccaacugcauccuguucau

SEQ ID NO: 2006543 - RNA, 19 nt, Homo sapiens
  misc_RNA (1)...(19): siRNA sense strand
gcacagcuucgccuucaac

SEQ ID NO: 2006544 - RNA, 19 nt, Homo sapiens
  misc_RNA (1)...(19): siRNA sense strand
aaauaccacuaccagaaag

SEQ ID NO: 2006545 - RNA, 19 nt, Homo sapiens
  misc_RNA (1)...(19): siRNA sense strand
ggcuuacgaugacaagauc

SEQ ID NO: 2006546 - RNA, 19 nt, Homo sapiens
  misc_RNA (1)...(19): siRNA sense strand
gaacggucagugcugcaau

SEQ ID NO: 2006547 - RNA, 19 nt, Homo sapiens
  misc_RNA (1)...(19): siRNA sense strand
agaccuuucaugugcuuua

SEQ ID NO: 2006548 - RNA, 19 nt, Homo sapiens
  misc_RNA (1)...(19): siRNA sense strand
uuccguaccuccucacuca

SEQ ID NO: 2006549 - RNA, 19 nt, Homo sapiens
  misc_RNA (1)...(19): siRNA sense strand
agaccaggcuuacgaugac

SEQ ID NO: 2006550 - RNA, 19 nt, Homo sapiens
  misc_RNA (1)...(19): siRNA sense strand
uuucaugugcuuuaccuaa

SEQ ID NO: 2006551 - RNA, 19 nt, Homo sapiens
  misc_RNA (1)...(19): siRNA sense strand
gcaggaccggguggacuuu

SEQ ID NO: 2006552 - RNA, 19 nt, Homo sapiens
  misc_RNA (1)...(19): siRNA sense strand
ggucuaccucuuugacuuc

SEQ ID NO: 2006553 - RNA, 19 nt, Homo sapiens
  misc_RNA (1)...(19): siRNA sense strand
gcaccaagaccaggcuuac

SEQ ID NO: 2006554 - RNA, 19 nt, Homo sapiens
  misc_RNA (1)...(19): siRNA sense strand
ccaccaacaagaacuucaa

SEQ ID NO: 2006555 - RNA, 19 nt, Homo sapiens
  misc_RNA (1)...(19): siRNA sense strand
gaugcugccaccaacaaga

SEQ ID NO: 2006556 - RNA, 19 nt, Homo sapiens
  misc_RNA (1)...(19): siRNA sense strand
acgaugacaagaucuacua

SEQ ID NO: 2006557 - RNA, 19 nt, Homo sapiens
  misc_RNA (1)...(19): siRNA sense strand
ucggugacauugacaaggu

SEQ ID NO: 2006558 - RNA, 19 nt, Homo sapiens
  misc_RNA (1)...(19): siRNA sense strand
ccaacaagaacuucaacag

SEQ ID NO: 2006559 - RNA, 19 nt, Homo sapiens
  misc_RNA (1)...(19): siRNA sense strand
cagccgauacccacagaga

SEQ ID NO: 2006560 - RNA, 19 nt, Homo sapiens
  misc_RNA (1)...(19): siRNA sense strand
gcauccuguucaucgagaa

SEQ ID NO: 2006561 - RNA, 19 nt, Homo sapiens
  misc_RNA (1)...(19): siRNA sense strand
gccgcugcaucuccaucua

SEQ ID NO: 2006562 - RNA, 19 nt, Homo sapiens
  misc_RNA (1)...(19): siRNA sense strand
aagaccaggcuuacgauga

SEQ ID NO: 2006563 - RNA, 19 nt, Homo sapiens
  misc_RNA (1)...(19): siRNA sense strand
acucauggcgccacaagga

SEQ ID NO: 2006564 - RNA, 19 nt, Homo sapiens
  misc_RNA (1)...(19): siRNA sense strand
ugcuuuaccuaacuacaga

SEQ ID NO: 2006565 - RNA, 19 nt, Homo sapiens
  misc_RNA (1)...(19): siRNA sense strand
gggcgagagugagcuguac

SEQ ID NO: 2006566 - RNA, 19 nt, Homo sapiens
  misc_RNA (1)...(19): siRNA sense strand
acucagccgucugugugua

SEQ ID NO: 2006567 - RNA, 19 nt, Homo sapiens
  misc_RNA (1)...(19): siRNA sense strand
gugaugcugccaccaacaa

SEQ ID NO: 2006568 - RNA, 19 nt, Homo sapiens
  misc_RNA (1)...(19): siRNA sense strand
ugaauaucggcuccacaaa

SEQ ID NO: 2006569 - RNA, 19 nt, Homo sapiens
  misc_RNA (1)...(19): siRNA sense strand
gaagcuaucuuguuagaaa

SEQ ID NO: 2006570 - RNA, 19 nt, Homo sapiens
  misc_RNA (1)...(19): siRNA sense strand
gaauagauauggagacuga

SEQ ID NO: 2006571 - RNA, 19 nt, Homo sapiens
  misc_RNA (1)...(19): siRNA sense strand
gccagaagcuccugcauug

SEQ ID NO: 2006572 - RNA, 19 nt, Homo sapiens
  misc_RNA (1)...(19): siRNA sense strand
gaagagaucccuccugaag

SEQ ID NO: 2006573 - RNA, 19 nt, Homo sapiens
  misc_RNA (1)...(19): siRNA sense strand
gaggagaagucccgcauca

SEQ ID NO: 2006574 - RNA, 19 nt, Homo sapiens
  misc_RNA (1)...(19): siRNA sense strand
gaggaaaggagaaagauug

SEQ ID NO: 2006575 - RNA, 19 nt, Homo sapiens
  misc_RNA (1)...(19): siRNA sense strand
agagaucccuccugaaguu

SEQ ID NO: 2006576 - RNA, 19 nt, Homo sapiens
  misc_RNA (1)...(19): siRNA sense strand
gcgaauaccugagggugaa

SEQ ID NO: 2006577 - RNA, 19 nt, Homo sapiens
  misc_RNA (1)...(19): siRNA sense strand
cugcagauccgaauagaua

SEQ ID NO: 2006578 - RNA, 19 nt, Homo sapiens
  misc_RNA (1)...(19): siRNA sense strand
ggacauccagcacaucuug

SEQ ID NO: 2006579 - RNA, 19 nt, Homo sapiens
  misc_RNA (1)...(19): siRNA sense strand
gaaaggagaaagauugaag

SEQ ID NO: 2006580 - RNA, 19 nt, Homo sapiens
  misc_RNA (1)...(19): siRNA sense strand
gaucgcagaggaagaagaa

SEQ ID NO: 2006581 - RNA, 19 nt, Homo sapiens
  misc_RNA (1)...(19): siRNA sense strand
cacuggagcugcaggcuaa

SEQ ID NO: 2006582 - RNA, 19 nt, Homo sapiens
  misc_RNA (1)...(19): siRNA sense strand
agagagaguugaagagauc

SEQ ID NO: 2006583 - RNA, 19 nt, Homo sapiens
  misc_RNA (1)...(19): siRNA sense strand
gcucucagcgcaacagauu

SEQ ID NO: 2006584 - RNA, 19 nt, Homo sapiens
  misc_RNA (1)...(19): siRNA sense strand
agauugaaguuccaaguga

SEQ ID NO: 2006585 - RNA, 19 nt, Homo sapiens
  misc_RNA (1)...(19): siRNA sense strand
ccuagaagaugcuccagau

SEQ ID NO: 2006586 - RNA, 19 nt, Homo sapiens
  misc_RNA (1)...(19): siRNA sense strand
gagggugaauguggugaaa

SEQ ID NO: 2006587 - RNA, 19 nt, Homo sapiens
  misc_RNA (1)...(19): siRNA sense strand
ggaggaaaggagaaagauu

SEQ ID NO: 2006588 - RNA, 19 nt, Homo sapiens
  misc_RNA (1)...(19): siRNA sense strand
gagaaagauugaaguucca

SEQ ID NO: 2006589 - RNA, 19 nt, Homo sapiens
  misc_RNA (1)...(19): siRNA sense strand
gauggagacccuagaagau

SEQ ID NO: 2006590 - RNA, 19 nt, Homo sapiens
  misc_RNA (1)...(19): siRNA sense strand
uaacagggagcccgacuuc

SEQ ID NO: 2006591 - RNA, 19 nt, Homo sapiens
  misc_RNA (1)...(19): siRNA sense strand
uauggugucuuuagagauc

SEQ ID NO: 2006592 - RNA, 19 nt, Homo sapiens
  misc_RNA (1)...(19): siRNA sense strand
ggacaaggagacucagauc

SEQ ID NO: 2006593 - RNA, 19 nt, Homo sapiens
  misc_RNA (1)...(19): siRNA sense strand
cugcagagguggaaggaau

SEQ ID NO: 2006594 - RNA, 19 nt, Homo sapiens
  misc_RNA (1)...(19): siRNA sense strand
gaggaggaaaggagaaaga

SEQ ID NO: 2006595 - RNA, 19 nt, Homo sapiens
  misc_RNA (1)...(19): siRNA sense strand
cagagagaguugaagagau

SEQ ID NO: 2006596 - RNA, 19 nt, Homo sapiens
  misc_RNA (1)...(19): siRNA sense strand
gaaguuccaagugagauug

SEQ ID NO: 2006597 - RNA, 19 nt, Homo sapiens
  misc_RNA (1)...(19): siRNA sense strand
ccgcgucuauucucaacaa

SEQ ID NO: 2006598 - RNA, 19 nt, Homo sapiens
  misc_RNA (1)...(19): siRNA sense strand
ccauggagaugccuuuggu

SEQ ID NO: 2006599 - RNA, 19 nt, Homo sapiens
  misc_RNA (1)...(19): siRNA sense strand
ucagauucgacaccucuua

SEQ ID NO: 2006600 - RNA, 19 nt, Homo sapiens
  misc_RNA (1)...(19): siRNA sense strand
uacggaugcuggagauuga

SEQ ID NO: 2006601 - RNA, 19 nt, Homo sapiens
  misc_RNA (1)...(19): siRNA sense strand
gcagauccgaauagauaug

SEQ ID NO: 2006602 - RNA, 19 nt, Homo sapiens
  misc_RNA (1)...(19): siRNA sense strand
gcugaucgcagaggaagaa

SEQ ID NO: 2006603 - RNA, 19 nt, Homo sapiens
  misc_RNA (1)...(19): siRNA sense strand
ccagagagaguugaagaga

SEQ ID NO: 2006604 - RNA, 19 nt, Homo sapiens
  misc_RNA (1)...(19): siRNA sense strand
cuuauggugucuuuagaga

SEQ ID NO: 2006605 - RNA, 19 nt, Homo sapiens
  misc_RNA (1)...(19): siRNA sense strand
ggaaaggagaaagauugaa

SEQ ID NO: 2006606 - RNA, 19 nt, Homo sapiens
  misc_RNA (1)...(19): siRNA sense strand
ccucaucccaccagaagaa

SEQ ID NO: 2006607 - RNA, 19 nt, Homo sapiens
  misc_RNA (1)...(19): siRNA sense strand
cuuuagagaucucccuaga

SEQ ID NO: 2006608 - RNA, 19 nt, Homo sapiens
  misc_RNA (1)...(19): siRNA sense strand
cuaaccaccuggccaugau

SEQ ID NO: 2006609 - RNA, 19 nt, Homo sapiens
  misc_RNA (1)...(19): siRNA sense strand
ucagaggcccugcggaguu

SEQ ID NO: 2006610 - RNA, 19 nt, Homo sapiens
  misc_RNA (1)...(19): siRNA sense strand
ccauacggaugcuggagau

SEQ ID NO: 2006611 - RNA, 19 nt, Homo sapiens
  misc_RNA (1)...(19): siRNA sense strand
ugauggagacccuagaaga

SEQ ID NO: 2006612 - RNA, 19 nt, Homo sapiens
  misc_RNA (1)...(19): siRNA sense strand
cgucuauucucaacaaugc

SEQ ID NO: 2006613 - RNA, 19 nt, Homo sapiens
  misc_RNA (1)...(19): siRNA sense strand
ccagggagccagagaggau

SEQ ID NO: 2006614 - RNA, 19 nt, Homo sapiens
  misc_RNA (1)...(19): siRNA sense strand
caacuucagaucgguguga

SEQ ID NO: 2006615 - RNA, 19 nt, Homo sapiens
  misc_RNA (1)...(19): siRNA sense strand
cgauaucccucagauucga

SEQ ID NO: 2006616 - RNA, 19 nt, Homo sapiens
  misc_RNA (1)...(19): siRNA sense strand
ggugugauccgcgucuauu

SEQ ID NO: 2006617 - RNA, 19 nt, Homo sapiens
  misc_RNA (1)...(19): siRNA sense strand
gaggacauccagcacaucu

SEQ ID NO: 2006618 - RNA, 19 nt, Homo sapiens
  misc_RNA (1)...(19): siRNA sense strand
gugaaaaccugcgaggaaa

SEQ ID NO: 2006619 - RNA, 19 nt, Homo sapiens
  misc_RNA (1)...(19): siRNA sense strand
cuccugaaguuccuacaga

SEQ ID NO: 2006620 - RNA, 19 nt, Homo sapiens
  misc_RNA (1)...(19): siRNA sense strand
gcaaucccagagagaguug

SEQ ID NO: 2006621 - RNA, 19 nt, Homo sapiens
  misc_RNA (1)...(19): siRNA sense strand
cgucgucgccgguuacugu

SEQ ID NO: 2006622 - RNA, 19 nt, Homo sapiens
  misc_RNA (1)...(19): siRNA sense strand
guggaucccagacuuccua

SEQ ID NO: 2006623 - RNA, 19 nt, Homo sapiens
  misc_RNA (1)...(19): siRNA sense strand
cggaggacauccagcacau

SEQ ID NO: 2006624 - RNA, 19 nt, Homo sapiens
  misc_RNA (1)...(19): siRNA sense strand
ucccugaggugcccaugga

SEQ ID NO: 2006625 - RNA, 19 nt, Homo sapiens
  misc_RNA (1)...(19): siRNA sense strand
caugauggagacccuagaa

SEQ ID NO: 2006626 - RNA, 19 nt, Homo sapiens
  misc_RNA (1)...(19): siRNA sense strand
ccgaauagauauggagacu

SEQ ID NO: 2006627 - RNA, 19 nt, Homo sapiens
  misc_RNA (1)...(19): siRNA sense strand
gcagaggaagaagaagcua

SEQ ID NO: 2006628 - RNA, 19 nt, Homo sapiens
  misc_RNA (1)...(19): siRNA sense strand
ggugaaaaccugcgaggaa

SEQ ID NO: 2006629 - RNA, 19 nt, Homo sapiens
  misc_RNA (1)...(19): siRNA sense strand
cuuccuaguccuuucgaua

SEQ ID NO: 2006630 - RNA, 19 nt, Homo sapiens
  misc_RNA (1)...(19): siRNA sense strand
ugaaguuccaagugagauu

SEQ ID NO: 2006631 - RNA, 19 nt, Homo sapiens
  misc_RNA (1)...(19): siRNA sense strand
gggacaaggagacucagau

SEQ ID NO: 2006632 - RNA, 19 nt, Homo sapiens
  misc_RNA (1)...(19): siRNA sense strand
cagcgcaacagauucuuca

SEQ ID NO: 2006633 - RNA, 19 nt, Homo sapiens
  misc_RNA (1)...(19): siRNA sense strand
cgccagaagcuccugcauu

SEQ ID NO: 2006634 - RNA, 19 nt, Homo sapiens
  misc_RNA (1)...(19): siRNA sense strand
aaggagaaagauugaaguu

SEQ ID NO: 2006635 - RNA, 19 nt, Homo sapiens
  misc_RNA (1)...(19): siRNA sense strand
caccugaggccaucacgau

SEQ ID NO: 2006636 - RNA, 19 nt, Homo sapiens
  misc_RNA (1)...(19): siRNA sense strand
gcagagguggaaggaauag

SEQ ID NO: 2006637 - RNA, 19 nt, Homo sapiens
  misc_RNA (1)...(19): siRNA sense strand
aaacaguccucacaccuua

SEQ ID NO: 2006638 - RNA, 19 nt, Homo sapiens
  misc_RNA (1)...(19): siRNA sense strand
ggacuuaaccaauguuuga

SEQ ID NO: 2006639 - RNA, 19 nt, Homo sapiens
  misc_RNA (1)...(19): siRNA sense strand
cuacaaaugugaaguaugu

SEQ ID NO: 2006640 - RNA, 19 nt, Homo sapiens
  misc_RNA (1)...(19): siRNA sense strand
cuacaaaugugaacaaugu

SEQ ID NO: 2006641 - RNA, 19 nt, Homo sapiens
  misc_RNA (1)...(19): siRNA sense strand
gaagagaaacccuacaaau

SEQ ID NO: 2006642 - RNA, 19 nt, Homo sapiens
  misc_RNA (1)...(19): siRNA sense strand
cuacaaaugugaagagugu

SEQ ID NO: 2006643 - RNA, 19 nt, Homo sapiens
  misc_RNA (1)...(19): siRNA sense strand
gagaaacccuacaaaugug

SEQ ID NO: 2006644 - RNA, 19 nt, Homo sapiens
  misc_RNA (1)...(19): siRNA sense strand
caccaauccucaauccuua

SEQ ID NO: 2006645 - RNA, 19 nt, Homo sapiens
  misc_RNA (1)...(19): siRNA sense strand
ccacaaaccuuucuaaacc

SEQ ID NO: 2006646 - RNA, 19 nt, Homo sapiens
  misc_RNA (1)...(19): siRNA sense strand
gagaggaaccauacaaaug

SEQ ID NO: 2006647 - RNA, 19 nt, Homo sapiens
  misc_RNA (1)...(19): siRNA sense strand
gauaauucguacuggagaa

SEQ ID NO: 2006648 - RNA, 19 nt, Homo sapiens
  misc_RNA (1)...(19): siRNA sense strand
agagaaacccuacaaaugu

SEQ ID NO: 2006649 - RNA, 19 nt, Homo sapiens
  misc_RNA (1)...(19): siRNA sense strand
ggagaggaaccauacaaau

SEQ ID NO: 2006650 - RNA, 19 nt, Homo sapiens
  misc_RNA (1)...(19): siRNA sense strand
ggacauaagaauuuacagu

SEQ ID NO: 2006651 - RNA, 19 nt, Homo sapiens
  misc_RNA (1)...(19): siRNA sense strand
guaaagaaugugacaaauc

SEQ ID NO: 2006652 - RNA, 19 nt, Homo sapiens
  misc_RNA (1)...(19): siRNA sense strand
acacugagcagauauggaa

SEQ ID NO: 2006653 - RNA, 19 nt, Homo sapiens
  misc_RNA (1)...(19): siRNA sense strand
uggcaaagcuuuuaaccua

SEQ ID NO: 2006654 - RNA, 19 nt, Homo sapiens
  misc_RNA (1)...(19): siRNA sense strand
ccucacaccuuacuagaca

SEQ ID NO: 2006655 - RNA, 19 nt, Homo sapiens
  misc_RNA (1)...(19): siRNA sense strand
ccucaauccuuacuaaaca

SEQ ID NO: 2006656 - RNA, 19 nt, Homo sapiens
  misc_RNA (1)...(19): siRNA sense strand
caagauaagacauacugaa

SEQ ID NO: 2006657 - RNA, 19 nt, Homo sapiens
  misc_RNA (1)...(19): siRNA sense strand
agacacaagauaagacaua

SEQ ID NO: 2006658 - RNA, 19 nt, Homo sapiens
  misc_RNA (1)...(19): siRNA sense strand
acgccuaacucaacauaaa

SEQ ID NO: 2006659 - RNA, 19 nt, Homo sapiens
  misc_RNA (1)...(19): siRNA sense strand
auacaaaugugaggaaugu

SEQ ID NO: 2006660 - RNA, 19 nt, Homo sapiens
  misc_RNA (1)...(19): siRNA sense strand
cuauaaaugugcacacugu

SEQ ID NO: 2006661 - RNA, 19 nt, Homo sapiens
  misc_RNA (1)...(19): siRNA sense strand
agaaaaggcuguaaaagug

SEQ ID NO: 2006662 - RNA, 19 nt, Homo sapiens
  misc_RNA (1)...(19): siRNA sense strand
gaggaaccauacaaaugug

SEQ ID NO: 2006663 - RNA, 19 nt, Homo sapiens
  misc_RNA (1)...(19): siRNA sense strand
aagagaaacccuacaaaug

SEQ ID NO: 2006664 - RNA, 19 nt, Homo sapiens
  misc_RNA (1)...(19): siRNA sense strand
gagcagaacauaaaagauu

SEQ ID NO: 2006665 - RNA, 19 nt, Homo sapiens
  misc_RNA (1)...(19): siRNA sense strand
aauccucaauccuuacuaa

SEQ ID NO: 2006666 - RNA, 19 nt, Homo sapiens
  misc_RNA (1)...(19): siRNA sense strand
caaauagacacaagauaag

SEQ ID NO: 2006667 - RNA, 19 nt, Homo sapiens
  misc_RNA (1)...(19): siRNA sense strand
gaaaauucauacuggagaa

SEQ ID NO: 2006668 - RNA, 19 nt, Homo sapiens
  misc_RNA (1)...(19): siRNA sense strand
acaaaccuuucuaaaccua

SEQ ID NO: 2006669 - RNA, 19 nt, Homo sapiens
  misc_RNA (1)...(19): siRNA sense strand
ggcuagagcagaacauaaa

SEQ ID NO: 2006670 - RNA, 19 nt, Homo sapiens
  misc_RNA (1)...(19): siRNA sense strand
uaauggacuuaaccaaugu

SEQ ID NO: 2006671 - RNA, 19 nt, Homo sapiens
  misc_RNA (1)...(19): siRNA sense strand
cauaagauaauucguacug

SEQ ID NO: 2006672 - RNA, 19 nt, Homo sapiens
  misc_RNA (1)...(19): siRNA sense strand
gaaaauuaccacaagcaaa

SEQ ID NO: 2006673 - RNA, 19 nt, Homo sapiens
  misc_RNA (1)...(19): siRNA sense strand
agaggaaccauacaaaugu

SEQ ID NO: 2006674 - RNA, 19 nt, Homo sapiens
  misc_RNA (1)...(19): siRNA sense strand
ucaccaauccucaauccuu

SEQ ID NO: 2006675 - RNA, 19 nt, Homo sapiens
  misc_RNA (1)...(19): siRNA sense strand
uaacugguccacaaaccuu

SEQ ID NO: 2006676 - RNA, 19 nt, Homo sapiens
  misc_RNA (1)...(19): siRNA sense strand
guggcaaggucuuuaagca

SEQ ID NO: 2006677 - RNA, 19 nt, Homo sapiens
  misc_RNA (1)...(19): siRNA sense strand
uaaacaguccucacaccuu

SEQ ID NO: 2006678 - RNA, 19 nt, Homo sapiens
  misc_RNA (1)...(19): siRNA sense strand
ugaagagaaacccuacaaa

SEQ ID NO: 2006679 - RNA, 19 nt, Homo sapiens
  misc_RNA (1)...(19): siRNA sense strand
caauguggcaaggucuuua

SEQ ID NO: 2006680 - RNA, 19 nt, Homo sapiens
  misc_RNA (1)...(19): siRNA sense strand
ucacaccuuacuagacaua

SEQ ID NO: 2006681 - RNA, 19 nt, Homo sapiens
  misc_RNA (1)...(19): siRNA sense strand
gacacaagauaagacauac

SEQ ID NO: 2006682 - RNA, 19 nt, Homo sapiens
  misc_RNA (1)...(19): siRNA sense strand
gcaaagcuuuuaaccuauc

SEQ ID NO: 2006683 - RNA, 19 nt, Homo sapiens
  misc_RNA (1)...(19): siRNA sense strand
ugaggaauguggcaaagcu

SEQ ID NO: 2006684 - RNA, 19 nt, Homo sapiens
  misc_RNA (1)...(19): siRNA sense strand
aaaguguggaugaguguaa

SEQ ID NO: 2006685 - RNA, 19 nt, Homo sapiens
  misc_RNA (1)...(19): siRNA sense strand
gguccacaaaccuuucuaa

SEQ ID NO: 2006686 - RNA, 19 nt, Homo sapiens
  misc_RNA (1)...(19): siRNA sense strand
ucacgccuaacucaacaua

SEQ ID NO: 2006687 - RNA, 19 nt, Homo sapiens
  misc_RNA (1)...(19): siRNA sense strand
aaaucacuuugcaugcuuu

SEQ ID NO: 2006688 - RNA, 19 nt, Homo sapiens
  misc_RNA (1)...(19): siRNA sense strand
gaaacccuacaaaugugaa

SEQ ID NO: 2006689 - RNA, 19 nt, Homo sapiens
  misc_RNA (1)...(19): siRNA sense strand
ucagauguaaagaauguga

SEQ ID NO: 2006690 - RNA, 19 nt, Homo sapiens
  misc_RNA (1)...(19): siRNA sense strand
gaauguggcaaagcuuuua

SEQ ID NO: 2006691 - RNA, 19 nt, Homo sapiens
  misc_RNA (1)...(19): siRNA sense strand
ccauacaaaugugaggaau

SEQ ID NO: 2006692 - RNA, 19 nt, Homo sapiens
  misc_RNA (1)...(19): siRNA sense strand
guccacaaaccuuucuaaa

SEQ ID NO: 2006693 - RNA, 19 nt, Homo sapiens
  misc_RNA (1)...(19): siRNA sense strand
cacaagauaagacauacug

SEQ ID NO: 2006694 - RNA, 19 nt, Homo sapiens
  misc_RNA (1)...(19): siRNA sense strand
gaaaaggcuguaaaagugu

SEQ ID NO: 2006695 - RNA, 19 nt, Homo sapiens
  misc_RNA (1)...(19): siRNA sense strand
aauuuauacuggagaggaa

SEQ ID NO: 2006696 - RNA, 19 nt, Homo sapiens
  misc_RNA (1)...(19): siRNA sense strand
aaaccuuucuaaaccuaag

SEQ ID NO: 2006697 - RNA, 19 nt, Homo sapiens
  misc_RNA (1)...(19): siRNA sense strand
uggagaggaaccauacaaa

SEQ ID NO: 2006698 - RNA, 19 nt, Homo sapiens
  misc_RNA (1)...(19): siRNA sense strand
caaaccuuucuaaaccuaa

SEQ ID NO: 2006699 - RNA, 19 nt, Homo sapiens
  misc_RNA (1)...(19): siRNA sense strand
aaugugaaguauguggaaa

SEQ ID NO: 2006700 - RNA, 19 nt, Homo sapiens
  misc_RNA (1)...(19): siRNA sense strand
ugcaugcuuucacgccuaa

SEQ ID NO: 2006701 - RNA, 19 nt, Homo sapiens
  misc_RNA (1)...(19): siRNA sense strand
gcacauaagaucauucaua

SEQ ID NO: 2006702 - RNA, 19 nt, Homo sapiens
  misc_RNA (1)...(19): siRNA sense strand
ccacaaauaugaagaaugu

SEQ ID NO: 2006703 - RNA, 19 nt, Homo sapiens
  misc_RNA (1)...(19): siRNA sense strand
aaacaguccucacaccuua

SEQ ID NO: 2006704 - RNA, 19 nt, Homo sapiens
  misc_RNA (1)...(19): siRNA sense strand
ggacuuaaccaauguuuga

SEQ ID NO: 2006705 - RNA, 19 nt, Homo sapiens
  misc_RNA (1)...(19): siRNA sense strand
agagaaaccuuacaaaugu

SEQ ID NO: 2006706 - RNA, 19 nt, Homo sapiens
  misc_RNA (1)...(19): siRNA sense strand
cuacaaaugugaaguaugu

SEQ ID NO: 2006707 - RNA, 19 nt, Homo sapiens
  misc_RNA (1)...(19): siRNA sense strand
cuacaaaugugaagaaugu

SEQ ID NO: 2006708 - RNA, 19 nt, Homo sapiens
  misc_RNA (1)...(19): siRNA sense strand
gaaugaaacccuacaaaug

SEQ ID NO: 2006709 - RNA, 19 nt, Homo sapiens
  misc_RNA (1)...(19): siRNA sense strand
gagagaaaccuuacaaaug

SEQ ID NO: 2006710 - RNA, 19 nt, Homo sapiens
  misc_RNA (1)...(19): siRNA sense strand
cuacaaaugugaagaaugu

SEQ ID NO: 2006711 - RNA, 19 nt, Homo sapiens
  misc_RNA (1)...(19): siRNA sense strand
cuacaaaugugaacaaugu

SEQ ID NO: 2006712 - RNA, 19 nt, Homo sapiens
  misc_RNA (1)...(19): siRNA sense strand
gaagagaaacccuacaaau

SEQ ID NO: 2006713 - RNA, 19 nt, Homo sapiens
  misc_RNA (1)...(19): siRNA sense strand
gagaaacucuacaaaugug

SEQ ID NO: 2006714 - RNA, 19 nt, Homo sapiens
  misc_RNA (1)...(19): siRNA sense strand
gcaaagcucacugaacaua

SEQ ID NO: 2006715 - RNA, 19 nt, Homo sapiens
  misc_RNA (1)...(19): siRNA sense strand
acaagaagauucauacuag

SEQ ID NO: 2006716 - RNA, 19 nt, Homo sapiens
  misc_RNA (1)...(19): siRNA sense strand
ucucaaaccuuacuaaaca

SEQ ID NO: 2006717 - RNA, 19 nt, Homo sapiens
  misc_RNA (1)...(19): siRNA sense strand
cuacaaaugugaagagugu

SEQ ID NO: 2006718 - RNA, 19 nt, Homo sapiens
  misc_RNA (1)...(19): siRNA sense strand
cuacaaaugugaacgaugu

SEQ ID NO: 2006719 - RNA, 19 nt, Homo sapiens
  misc_RNA (1)...(19): siRNA sense strand
gagaaagccuacaaaugug

SEQ ID NO: 2006720 - RNA, 19 nt, Homo sapiens
  misc_RNA (1)...(19): siRNA sense strand
gagaaacccuacaaaugug

SEQ ID NO: 2006721 - RNA, 19 nt, Homo sapiens
  misc_RNA (1)...(19): siRNA sense strand
ccgcaaagcucacugaaca

SEQ ID NO: 2006722 - RNA, 19 nt, Homo sapiens
  misc_RNA (1)...(19): siRNA sense strand
caccaauccucaauccuua

SEQ ID NO: 2006723 - RNA, 19 nt, Homo sapiens
  misc_RNA (1)...(19): siRNA sense strand
ggagagaaaccuuacaaau

SEQ ID NO: 2006724 - RNA, 19 nt, Homo sapiens
  misc_RNA (1)...(19): siRNA sense strand
agagaaagccuacaaaugu

SEQ ID NO: 2006725 - RNA, 19 nt, Homo sapiens
  misc_RNA (1)...(19): siRNA sense strand
ccacaaaccuuucuaaacc

SEQ ID NO: 2006726 - RNA, 19 nt, Homo sapiens
  misc_RNA (1)...(19): siRNA sense strand
gagaggaaccauacaaaug

SEQ ID NO: 2006727 - RNA, 19 nt, Homo sapiens
  misc_RNA (1)...(19): siRNA sense strand
gagagaaagccuacaaaug

SEQ ID NO: 2006728 - RNA, 19 nt, Homo sapiens
  misc_RNA (1)...(19): siRNA sense strand
ugaagaauguggcauaucu

SEQ ID NO: 2006729 - RNA, 19 nt, Homo sapiens
  misc_RNA (1)...(19): siRNA sense strand
gagagaaaccccacaaaua

SEQ ID NO: 2006730 - RNA, 19 nt, Homo sapiens
  misc_RNA (1)...(19): siRNA sense strand
caagaagauucauacuaga

SEQ ID NO: 2006731 - RNA, 19 nt, Homo sapiens
  misc_RNA (1)...(19): siRNA sense strand
uaagaugauucacacuuga

SEQ ID NO: 2006732 - RNA, 19 nt, Homo sapiens
  misc_RNA (1)...(19): siRNA sense strand
caccgauacucaauccuua

SEQ ID NO: 2006733 - RNA, 19 nt, Homo sapiens
  misc_RNA (1)...(19): siRNA sense strand
ccucaacucuuauuacaca

SEQ ID NO: 2006734 - RNA, 19 nt, Homo sapiens
  misc_RNA (1)...(19): siRNA sense strand
gaauguggcauaucuuuua

SEQ ID NO: 2006735 - RNA, 19 nt, Homo sapiens
  misc_RNA (1)...(19): siRNA sense strand
gcacagcggaauguauaua

SEQ ID NO: 2006736 - RNA, 19 nt, Homo sapiens
  misc_RNA (1)...(19): siRNA sense strand
agccaacucucaaaccuua

SEQ ID NO: 2006737 - RNA, 19 nt, Homo sapiens
  misc_RNA (1)...(19): siRNA sense strand
gauaauucguacuggagaa

SEQ ID NO: 2006738 - RNA, 19 nt, Homo sapiens
  misc_RNA (1)...(19): siRNA sense strand
uuacaaaugugaggaaugu

SEQ ID NO: 2006739 - RNA, 19 nt, Homo sapiens
  misc_RNA (1)...(19): siRNA sense strand
cacauaagaucauucauac

SEQ ID NO: 2006740 - RNA, 19 nt, Homo sapiens
  misc_RNA (1)...(19): siRNA sense strand
agagaaacccuacaaaugu

SEQ ID NO: 2006741 - RNA, 19 nt, Homo sapiens
  misc_RNA (1)...(19): siRNA sense strand
gaacuuuacuaugcauaag

SEQ ID NO: 2006742 - RNA, 19 nt, Homo sapiens
  misc_RNA (1)...(19): siRNA sense strand
ggagaggaaccauacaaau

SEQ ID NO: 2006743 - RNA, 19 nt, Homo sapiens
  misc_RNA (1)...(19): siRNA sense strand
ggacauaagaauuuacagu

SEQ ID NO: 2006744 - RNA, 19 nt, Homo sapiens
  misc_RNA (1)...(19): siRNA sense strand
ucucaacacuuacuauaca

SEQ ID NO: 2006745 - RNA, 19 nt, Homo sapiens
  misc_RNA (1)...(19): siRNA sense strand
gcucacugaacauaaguua

SEQ ID NO: 2006746 - RNA, 19 nt, Homo sapiens
  misc_RNA (1)...(19): siRNA sense strand
guaaagaaugugacaaauc

SEQ ID NO: 2006747 - RNA, 19 nt, Homo sapiens
  misc_RNA (1)...(19): siRNA sense strand
acacugagcagauauggaa

SEQ ID NO: 2006748 - RNA, 19 nt, Homo sapiens
  misc_RNA (1)...(19): siRNA sense strand
gagaaaccuuacaaaugug

SEQ ID NO: 2006749 - RNA, 19 nt, Homo sapiens
  misc_RNA (1)...(19): siRNA sense strand
cauaagaucauucauacug

SEQ ID NO: 2006750 - RNA, 19 nt, Homo sapiens
  misc_RNA (1)...(19): siRNA sense strand
uggcaaagcuuuuaaccua

SEQ ID NO: 2006751 - RNA, 19 nt, Homo sapiens
  misc_RNA (1)...(19): siRNA sense strand
ccucacaccuuacuagaca

SEQ ID NO: 2006752 - RNA, 19 nt, Homo sapiens
  misc_RNA (1)...(19): siRNA sense strand
ccucaauccuuacuaaaca

SEQ ID NO: 2006753 - RNA, 19 nt, Homo sapiens
  misc_RNA (1)...(19): siRNA sense strand
caagauaagacauacugaa

SEQ ID NO: 2006754 - RNA, 19 nt, Homo sapiens
  misc_RNA (1)...(19): siRNA sense strand
agacacaagauaagacaua

SEQ ID NO: 2006755 - RNA, 19 nt, Homo sapiens
  misc_RNA (1)...(19): siRNA sense strand
acgccuaacucaacauaaa

SEQ ID NO: 2006756 - RNA, 19 nt, Homo sapiens
  misc_RNA (1)...(19): siRNA sense strand
aaccaguccucacaccuua

SEQ ID NO: 2006757 - RNA, 19 nt, Homo sapiens
  misc_RNA (1)...(19): siRNA sense strand
auacaaaugugaggaaugu

SEQ ID NO: 2006758 - RNA, 19 nt, Homo sapiens
  misc_RNA (1)...(19): siRNA sense strand
cuauaaaugugcacacugu

SEQ ID NO: 2006759 - RNA, 19 nt, Homo sapiens
  misc_RNA (1)...(19): siRNA sense strand
agaaaaggcuguaaaagug

SEQ ID NO: 2006760 - RNA, 19 nt, Homo sapiens
  misc_RNA (1)...(19): siRNA sense strand
aaugaaacccuacaaaugu

SEQ ID NO: 2006761 - RNA, 19 nt, Homo sapiens
  misc_RNA (1)...(19): siRNA sense strand
ucacaacuugcuauacaua

SEQ ID NO: 2006762 - RNA, 19 nt, Homo sapiens
  misc_RNA (1)...(19): siRNA sense strand
ucucacaacuugcuauaca

SEQ ID NO: 2006763 - RNA, 19 nt, Homo sapiens
  misc_RNA (1)...(19): siRNA sense strand
cuuaacaacuuacugaaca

SEQ ID NO: 2006764 - RNA, 19 nt, Homo sapiens
  misc_RNA (1)...(19): siRNA sense strand
gagcagaacauaaaagauu

SEQ ID NO: 2006765 - RNA, 19 nt, Homo sapiens
  misc_RNA (1)...(19): siRNA sense strand
gaggaaccauacaaaugug

SEQ ID NO: 2006766 - RNA, 19 nt, Homo sapiens
  misc_RNA (1)...(19): siRNA sense strand
aagagaaacccuacaaaug

SEQ ID NO: 2006767 - RNA, 19 nt, Homo sapiens
  misc_RNA (1)...(19): siRNA sense strand
gaauguauauaggcaugug

SEQ ID NO: 2006768 - RNA, 19 nt, Homo sapiens
  misc_RNA (1)...(19): siRNA sense strand
ggagaaaccccacaaaugu

SEQ ID NO: 2006769 - RNA, 19 nt, Homo sapiens
  misc_RNA (1)...(19): siRNA sense strand
aauccucaauccuuacuaa

SEQ ID NO: 2006770 - RNA, 19 nt, Homo sapiens
  misc_RNA (1)...(19): siRNA sense strand
caaauagacacaagauaag

SEQ ID NO: 2006771 - RNA, 19 nt, Homo sapiens
  misc_RNA (1)...(19): siRNA sense strand
gagcaaaaccuuggaaauu

SEQ ID NO: 2006772 - RNA, 19 nt, Homo sapiens
  misc_RNA (1)...(19): siRNA sense strand
ugaaugaaacccuacaaau

SEQ ID NO: 2006773 - RNA, 19 nt, Homo sapiens
  misc_RNA (1)...(19): siRNA sense strand
auaagaugauucacacuug

SEQ ID NO: 2006774 - RNA, 19 nt, Homo sapiens
  misc_RNA (1)...(19): siRNA sense strand
cacaagaagauucauacua

SEQ ID NO: 2006775 - RNA, 19 nt, Homo sapiens
  misc_RNA (1)...(19): siRNA sense strand
gaaaauucauacuggagaa

SEQ ID NO: 2006776 - RNA, 19 nt, Homo sapiens
  misc_RNA (1)...(19): siRNA sense strand
acaaaccuuucuaaaccua

SEQ ID NO: 2006777 - RNA, 19 nt, Homo sapiens
  misc_RNA (1)...(19): siRNA sense strand
ggcuagagcagaacauaaa

SEQ ID NO: 2006778 - RNA, 19 nt, Homo sapiens
  misc_RNA (1)...(19): siRNA sense strand
gcaaaaccuuggaaauuca

SEQ ID NO: 2006779 - RNA, 19 nt, Homo sapiens
  misc_RNA (1)...(19): siRNA sense strand
ggcaugugauguuagagaa

SEQ ID NO: 2006780 - RNA, 19 nt, Homo sapiens
  misc_RNA (1)...(19): siRNA sense strand
caaagcucacugaacauaa

SEQ ID NO: 2006781 - RNA, 19 nt, Homo sapiens
  misc_RNA (1)...(19): siRNA sense strand
ugaagaauguggcaaagcu

SEQ ID NO: 2006782 - RNA, 19 nt, Homo sapiens
  misc_RNA (1)...(19): siRNA sense strand
gaaacucuacaaaugugaa

SEQ ID NO: 2006783 - RNA, 19 nt, Homo sapiens
  misc_RNA (1)...(19): siRNA sense strand
caacuugcuauacauaaga

SEQ ID NO: 2006784 - RNA, 19 nt, Homo sapiens
  misc_RNA (1)...(19): siRNA sense strand
caacucuuacugcacauaa

SEQ ID NO: 2006785 - RNA, 19 nt, Homo sapiens
  misc_RNA (1)...(19): siRNA sense strand
ugaagaauguggcaaagcu

SEQ ID NO: 2006786 - RNA, 19 nt, Homo sapiens
  misc_RNA (1)...(19): siRNA sense strand
uaauggacuuaaccaaugu

SEQ ID NO: 2006787 - RNA, 19 nt, Homo sapiens
  misc_RNA (1)...(19): siRNA sense strand
aauucaaacuggagagaaa

SEQ ID NO: 2006788 - RNA, 19 nt, Homo sapiens
  misc_RNA (1)...(19): siRNA sense strand
gauguuagagaacuacaga

SEQ ID NO: 2006789 - RNA, 19 nt, Homo sapiens
  misc_RNA (1)...(19): siRNA sense strand
auauaggcaugugauguua

SEQ ID NO: 2006790 - RNA, 19 nt, Homo sapiens
  misc_RNA (1)...(19): siRNA sense strand
ggauguggccauagaguuc

SEQ ID NO: 2006791 - RNA, 19 nt, Homo sapiens
  misc_RNA (1)...(19): siRNA sense strand
ugaggaauguggcaaaggu

SEQ ID NO: 2006792 - RNA, 19 nt, Homo sapiens
  misc_RNA (1)...(19): siRNA sense strand
gaaagccuacaaaugugaa

SEQ ID NO: 2006793 - RNA, 19 nt, Homo sapiens
  misc_RNA (1)...(19): siRNA sense strand
uaugaagaaugugguaaug

SEQ ID NO: 2006794 - RNA, 19 nt, Homo sapiens
  misc_RNA (1)...(19): siRNA sense strand
caaagaaugugguaaaacu

SEQ ID NO: 2006795 - RNA, 19 nt, Homo sapiens
  misc_RNA (1)...(19): siRNA sense strand
guccucaacucuuauuaca

SEQ ID NO: 2006796 - RNA, 19 nt, Homo sapiens
  misc_RNA (1)...(19): siRNA sense strand
uuucaacccuuauuacaca

SEQ ID NO: 2006797 - RNA, 19 nt, Homo sapiens
  misc_RNA (1)...(19): siRNA sense strand
gaacgauguggcaguuguu

SEQ ID NO: 2006798 - RNA, 19 nt, Homo sapiens
  misc_RNA (1)...(19): siRNA sense strand
gaagaaugugguaaugcuu

SEQ ID NO: 2006799 - RNA, 19 nt, Homo sapiens
  misc_RNA (1)...(19): siRNA sense strand
ugaagaaugugguaaugcu

SEQ ID NO: 2006800 - RNA, 19 nt, Homo sapiens
  misc_RNA (1)...(19): siRNA sense strand
uggcaaagcuuuuaaccaa

SEQ ID NO: 2006801 - RNA, 19 nt, Homo sapiens
  misc_RNA (1)...(19): siRNA sense strand
caaacuauguccuggaaua

SEQ ID NO: 2006802 - RNA, 19 nt, Homo sapiens
  misc_RNA (1)...(19): siRNA sense strand
gcagaaagcucuauagcau

SEQ ID NO: 2006803 - RNA, 19 nt, Homo sapiens
  misc_RNA (1)...(19): siRNA sense strand
gaagaacgcccaaggcaaa

SEQ ID NO: 2006804 - RNA, 19 nt, Homo sapiens
  misc_RNA (1)...(19): siRNA sense strand
gcacuggcguggcgacaaa

SEQ ID NO: 2006805 - RNA, 19 nt, Homo sapiens
  misc_RNA (1)...(19): siRNA sense strand
guacauugccauuccauuu

SEQ ID NO: 2006806 - RNA, 19 nt, Homo sapiens
  misc_RNA (1)...(19): siRNA sense strand
cguaagaguucccuauuuc

SEQ ID NO: 2006807 - RNA, 19 nt, Homo sapiens
  misc_RNA (1)...(19): siRNA sense strand
cagaugcccuuauauugga

SEQ ID NO: 2006808 - RNA, 19 nt, Homo sapiens
  misc_RNA (1)...(19): siRNA sense strand
gaagauacuuuucuguguu

SEQ ID NO: 2006809 - RNA, 19 nt, Homo sapiens
  misc_RNA (1)...(19): siRNA sense strand
gcguggagcuuuacaaggu

SEQ ID NO: 2006810 - RNA, 19 nt, Homo sapiens
  misc_RNA (1)...(19): siRNA sense strand
ggaauacaggccaaacuga

SEQ ID NO: 2006811 - RNA, 19 nt, Homo sapiens
  misc_RNA (1)...(19): siRNA sense strand
agaguucccuauuucauug

SEQ ID NO: 2006812 - RNA, 19 nt, Homo sapiens
  misc_RNA (1)...(19): siRNA sense strand
gugcugaguucccuugguu

SEQ ID NO: 2006813 - RNA, 19 nt, Homo sapiens
  misc_RNA (1)...(19): siRNA sense strand
gaggaagacgugaccauug

SEQ ID NO: 2006814 - RNA, 19 nt, Homo sapiens
  misc_RNA (1)...(19): siRNA sense strand
cuuccgagauuucaaaguu

SEQ ID NO: 2006815 - RNA, 19 nt, Homo sapiens
  misc_RNA (1)...(19): siRNA sense strand
gcuaagagccauccauuuu

SEQ ID NO: 2006816 - RNA, 19 nt, Homo sapiens
  misc_RNA (1)...(19): siRNA sense strand
ucguaagaguucccuauuu

SEQ ID NO: 2006817 - RNA, 19 nt, Homo sapiens
  misc_RNA (1)...(19): siRNA sense strand
gccauuccauuucucauca

SEQ ID NO: 2006818 - RNA, 19 nt, Homo sapiens
  misc_RNA (1)...(19): siRNA sense strand
gaauacaggccaaacugau

SEQ ID NO: 2006819 - RNA, 19 nt, Homo sapiens
  misc_RNA (1)...(19): siRNA sense strand
agugauauaucgauacuuc

SEQ ID NO: 2006820 - RNA, 19 nt, Homo sapiens
  misc_RNA (1)...(19): siRNA sense strand
gagcugccacggauacuga

SEQ ID NO: 2006821 - RNA, 19 nt, Homo sapiens
  misc_RNA (1)...(19): siRNA sense strand
ggaagauacuuuucugugu

SEQ ID NO: 2006822 - RNA, 19 nt, Homo sapiens
  misc_RNA (1)...(19): siRNA sense strand
cgagagacgccuccagaug

SEQ ID NO: 2006823 - RNA, 19 nt, Homo sapiens
  misc_RNA (1)...(19): siRNA sense strand
guucuuccuugauccuauu

SEQ ID NO: 2006824 - RNA, 19 nt, Homo sapiens
  misc_RNA (1)...(19): siRNA sense strand
ccagaugcccuuauauugg

SEQ ID NO: 2006825 - RNA, 19 nt, Homo sapiens
  misc_RNA (1)...(19): siRNA sense strand
guuugaaucacacguguaa

SEQ ID NO: 2006826 - RNA, 19 nt, Homo sapiens
  misc_RNA (1)...(19): siRNA sense strand
gccuccagaugcccuuaua

SEQ ID NO: 2006827 - RNA, 19 nt, Homo sapiens
  misc_RNA (1)...(19): siRNA sense strand
guaagaguucccuauuuca

SEQ ID NO: 2006828 - RNA, 19 nt, Homo sapiens
  misc_RNA (1)...(19): siRNA sense strand
cuacaggcacaaauacauu

SEQ ID NO: 2006829 - RNA, 19 nt, Homo sapiens
  misc_RNA (1)...(19): siRNA sense strand
uaauauccgugaagaagcu

SEQ ID NO: 2006830 - RNA, 19 nt, Homo sapiens
  misc_RNA (1)...(19): siRNA sense strand
ccauuucucaucaaacuau

SEQ ID NO: 2006831 - RNA, 19 nt, Homo sapiens
  misc_RNA (1)...(19): siRNA sense strand
auacaggccaaacugauuu

SEQ ID NO: 2006832 - RNA, 19 nt, Homo sapiens
  misc_RNA (1)...(19): siRNA sense strand
uuuacaaggugcugaguuc

SEQ ID NO: 2006833 - RNA, 19 nt, Homo sapiens
  misc_RNA (1)...(19): siRNA sense strand
ugaaucacacguguaacua

SEQ ID NO: 2006834 - RNA, 19 nt, Homo sapiens
  misc_RNA (1)...(19): siRNA sense strand
uaagagccauccauuuuca

SEQ ID NO: 2006835 - RNA, 19 nt, Homo sapiens
  misc_RNA (1)...(19): siRNA sense strand
ccaaacugauuuucuugaa

SEQ ID NO: 2006836 - RNA, 19 nt, Homo sapiens
  misc_RNA (1)...(19): siRNA sense strand
gauccuauuacaaguagug

SEQ ID NO: 2006837 - RNA, 19 nt, Homo sapiens
  misc_RNA (1)...(19): siRNA sense strand
ucagugauauaucgauacu

SEQ ID NO: 2006838 - RNA, 19 nt, Homo sapiens
  misc_RNA (1)...(19): siRNA sense strand
gaggaugccuuggcuucca

SEQ ID NO: 2006839 - RNA, 19 nt, Homo sapiens
  misc_RNA (1)...(19): siRNA sense strand
aggaagacgugaccauugg

SEQ ID NO: 2006840 - RNA, 19 nt, Homo sapiens
  misc_RNA (1)...(19): siRNA sense strand
ucacacguguaacuacuac

SEQ ID NO: 2006841 - RNA, 19 nt, Homo sapiens
  misc_RNA (1)...(19): siRNA sense strand
uaagaguucccuauuucau

SEQ ID NO: 2006842 - RNA, 19 nt, Homo sapiens
  misc_RNA (1)...(19): siRNA sense strand
aagcuaagagccauccauu

SEQ ID NO: 2006843 - RNA, 19 nt, Homo sapiens
  misc_RNA (1)...(19): siRNA sense strand
gaaucacacguguaacuac

SEQ ID NO: 2006844 - RNA, 19 nt, Homo sapiens
  misc_RNA (1)...(19): siRNA sense strand
aagaguucccuauuucauu

SEQ ID NO: 2006845 - RNA, 19 nt, Homo sapiens
  misc_RNA (1)...(19): siRNA sense strand
gccacccuaucauucugua

SEQ ID NO: 2006846 - RNA, 19 nt, Homo sapiens
  misc_RNA (1)...(19): siRNA sense strand
gcuacaggcacaaauacau

SEQ ID NO: 2006847 - RNA, 19 nt, Homo sapiens
  misc_RNA (1)...(19): siRNA sense strand
ccuauuacaaguaguggaa

SEQ ID NO: 2006848 - RNA, 19 nt, Homo sapiens
  misc_RNA (1)...(19): siRNA sense strand
aauacaggccaaacugauu

SEQ ID NO: 2006849 - RNA, 19 nt, Homo sapiens
  misc_RNA (1)...(19): siRNA sense strand
ggcagaaagcucuauagca

SEQ ID NO: 2006850 - RNA, 19 nt, Homo sapiens
  misc_RNA (1)...(19): siRNA sense strand
gaagcuaagagccauccau

SEQ ID NO: 2006851 - RNA, 19 nt, Homo sapiens
  misc_RNA (1)...(19): siRNA sense strand
ggcgaaagggcgugugguu

SEQ ID NO: 2006852 - RNA, 19 nt, Homo sapiens
  misc_RNA (1)...(19): siRNA sense strand
uccagaugcccuuauauug

SEQ ID NO: 2006853 - RNA, 19 nt, Homo sapiens
  misc_RNA (1)...(19): siRNA sense strand
ccugcagucugguggaaga

SEQ ID NO: 2006854 - RNA, 19 nt, Homo sapiens
  misc_RNA (1)...(19): siRNA sense strand
ggaagacgugaccauugga

SEQ ID NO: 2006855 - RNA, 19 nt, Homo sapiens
  misc_RNA (1)...(19): siRNA sense strand
cauuccauuucucaucaaa

SEQ ID NO: 2006856 - RNA, 19 nt, Homo sapiens
  misc_RNA (1)...(19): siRNA sense strand
gacugguucuuccuugauc

SEQ ID NO: 2006857 - RNA, 19 nt, Homo sapiens
  misc_RNA (1)...(19): siRNA sense strand
ccaaggcaaagaccagaug

SEQ ID NO: 2006858 - RNA, 19 nt, Homo sapiens
  misc_RNA (1)...(19): siRNA sense strand
cuccagaugcccuuauauu

SEQ ID NO: 2006859 - RNA, 19 nt, Homo sapiens
  misc_RNA (1)...(19): siRNA sense strand
gcccuuucauucagaccuu

SEQ ID NO: 2006860 - RNA, 19 nt, Homo sapiens
  misc_RNA (1)...(19): siRNA sense strand
gguucuuccuugauccuau

SEQ ID NO: 2006861 - RNA, 19 nt, Homo sapiens
  misc_RNA (1)...(19): siRNA sense strand
gauacuucccuggguuuga

SEQ ID NO: 2006862 - RNA, 19 nt, Homo sapiens
  misc_RNA (1)...(19): siRNA sense strand
gcccagaucccagcaugug

SEQ ID NO: 2006863 - RNA, 19 nt, Homo sapiens
  misc_RNA (1)...(19): siRNA sense strand
cgccugaggaagauacuuu

SEQ ID NO: 2006864 - RNA, 19 nt, Homo sapiens
  misc_RNA (1)...(19): siRNA sense strand
aaucacacguguaacuacu

SEQ ID NO: 2006865 - RNA, 19 nt, Homo sapiens
  misc_RNA (1)...(19): siRNA sense strand
gguggugcccuuccagcuu

SEQ ID NO: 2006866 - RNA, 19 nt, Homo sapiens
  misc_RNA (1)...(19): siRNA sense strand
gcccuuauauuggaaucuc

SEQ ID NO: 2006867 - RNA, 19 nt, Homo sapiens
  misc_RNA (1)...(19): siRNA sense strand
agaggaagacgugaccauu

SEQ ID NO: 2006868 - RNA, 19 nt, Homo sapiens
  misc_RNA (1)...(19): siRNA sense strand
cagccacccuaucauucug

SEQ ID NO: 2006869 - RNA, 19 nt, Homo sapiens
  misc_RNA (1)...(19): siRNA sense strand
gagauuucaaaguucaguu

SEQ ID NO: 2006870 - RNA, 19 nt, Homo sapiens
  misc_RNA (1)...(19): siRNA sense strand
uccgagauuucaaaguuca

SEQ ID NO: 2006871 - RNA, 19 nt, Homo sapiens
  misc_RNA (1)...(19): siRNA sense strand
ccuuccagcuuggcagaaa

SEQ ID NO: 2006872 - RNA, 19 nt, Homo sapiens
  misc_RNA (1)...(19): siRNA sense strand
gagaauauccugcuacuuu

SEQ ID NO: 2006873 - RNA, 19 nt, Homo sapiens
  misc_RNA (1)...(19): siRNA sense strand
caaagccgcugaaacauga

SEQ ID NO: 2006874 - RNA, 19 nt, Homo sapiens
  misc_RNA (1)...(19): siRNA sense strand
gagaaucagucuguagaua

SEQ ID NO: 2006875 - RNA, 19 nt, Homo sapiens
  misc_RNA (1)...(19): siRNA sense strand
caaauggugugguaacaaa

SEQ ID NO: 2006876 - RNA, 19 nt, Homo sapiens
  misc_RNA (1)...(19): siRNA sense strand
ucaaggugcuuuaguguuu

SEQ ID NO: 2006877 - RNA, 19 nt, Homo sapiens
  misc_RNA (1)...(19): siRNA sense strand
guagauaagucugauacua

SEQ ID NO: 2006878 - RNA, 19 nt, Homo sapiens
  misc_RNA (1)...(19): siRNA sense strand
ggacaugagucuaacuuca

SEQ ID NO: 2006879 - RNA, 19 nt, Homo sapiens
  misc_RNA (1)...(19): siRNA sense strand
gaacugagcauccuguguu

SEQ ID NO: 2006880 - RNA, 19 nt, Homo sapiens
  misc_RNA (1)...(19): siRNA sense strand
ggacugauggaaauguuua

SEQ ID NO: 2006881 - RNA, 19 nt, Homo sapiens
  misc_RNA (1)...(19): siRNA sense strand
ccaaaaggauaaucacuua

SEQ ID NO: 2006882 - RNA, 19 nt, Homo sapiens
  misc_RNA (1)...(19): siRNA sense strand
ccugagggcugcuauugua

SEQ ID NO: 2006883 - RNA, 19 nt, Homo sapiens
  misc_RNA (1)...(19): siRNA sense strand
gaaaauaaaucuggagaga

SEQ ID NO: 2006884 - RNA, 19 nt, Homo sapiens
  misc_RNA (1)...(19): siRNA sense strand
caaauuaagacuagccuuu

SEQ ID NO: 2006885 - RNA, 19 nt, Homo sapiens
  misc_RNA (1)...(19): siRNA sense strand
gcugaaaucuguuacuucu

SEQ ID NO: 2006886 - RNA, 19 nt, Homo sapiens
  misc_RNA (1)...(19): siRNA sense strand
gggcugcuauuguauauca

SEQ ID NO: 2006887 - RNA, 19 nt, Homo sapiens
  misc_RNA (1)...(19): siRNA sense strand
acagggugcugaaauaauu

SEQ ID NO: 2006888 - RNA, 19 nt, Homo sapiens
  misc_RNA (1)...(19): siRNA sense strand
guuaggcucugccaaagaa

SEQ ID NO: 2006889 - RNA, 19 nt, Homo sapiens
  misc_RNA (1)...(19): siRNA sense strand
gcugaaacaugagcagaaa

SEQ ID NO: 2006890 - RNA, 19 nt, Homo sapiens
  misc_RNA (1)...(19): siRNA sense strand
guaaaggagcagauaauga

SEQ ID NO: 2006891 - RNA, 19 nt, Homo sapiens
  misc_RNA (1)...(19): siRNA sense strand
gaaucagucuguagauaag

SEQ ID NO: 2006892 - RNA, 19 nt, Homo sapiens
  misc_RNA (1)...(19): siRNA sense strand
uaaaggagcagauaaugau

SEQ ID NO: 2006893 - RNA, 19 nt, Homo sapiens
  misc_RNA (1)...(19): siRNA sense strand
gcuauuguauaucacacua

SEQ ID NO: 2006894 - RNA, 19 nt, Homo sapiens
  misc_RNA (1)...(19): siRNA sense strand
aaagggaaaucgaguagau

SEQ ID NO: 2006895 - RNA, 19 nt, Homo sapiens
  misc_RNA (1)...(19): siRNA sense strand
guucgaagcccauuuggaa

SEQ ID NO: 2006896 - RNA, 19 nt, Homo sapiens
  misc_RNA (1)...(19): siRNA sense strand
gaagccaccaacccuauuu

SEQ ID NO: 2006897 - RNA, 19 nt, Homo sapiens
  misc_RNA (1)...(19): siRNA sense strand
ggauaaucacuuacaauga

SEQ ID NO: 2006898 - RNA, 19 nt, Homo sapiens
  misc_RNA (1)...(19): siRNA sense strand
gagggcugcuauuguauau

SEQ ID NO: 2006899 - RNA, 19 nt, Homo sapiens
  misc_RNA (1)...(19): siRNA sense strand
gcuaauacucuaacaccua

SEQ ID NO: 2006900 - RNA, 19 nt, Homo sapiens
  misc_RNA (1)...(19): siRNA sense strand
aacagggacuugaaacuuu

SEQ ID NO: 2006901 - RNA, 19 nt, Homo sapiens
  misc_RNA (1)...(19): siRNA sense strand
cggaaaagcucagauagua

SEQ ID NO: 2006902 - RNA, 19 nt, Homo sapiens
  misc_RNA (1)...(19): siRNA sense strand
gaagucaucagagcauaaa

SEQ ID NO: 2006903 - RNA, 19 nt, Homo sapiens
  misc_RNA (1)...(19): siRNA sense strand
cuaauacucuaacaccuau

SEQ ID NO: 2006904 - RNA, 19 nt, Homo sapiens
  misc_RNA (1)...(19): siRNA sense strand
aaugggaagucuuaugaaa

SEQ ID NO: 2006905 - RNA, 19 nt, Homo sapiens
  misc_RNA (1)...(19): siRNA sense strand
ccaccaccauuauuauuuc

SEQ ID NO: 2006906 - RNA, 19 nt, Homo sapiens
  misc_RNA (1)...(19): siRNA sense strand
ugauggaggugacauuuca

SEQ ID NO: 2006907 - RNA, 19 nt, Homo sapiens
  misc_RNA (1)...(19): siRNA sense strand
gcgcugaaaucuguuacuu

SEQ ID NO: 2006908 - RNA, 19 nt, Homo sapiens
  misc_RNA (1)...(19): siRNA sense strand
gcaagcaaaguuaaggaaa

SEQ ID NO: 2006909 - RNA, 19 nt, Homo sapiens
  misc_RNA (1)...(19): siRNA sense strand
gagagaaucagucuguaga

SEQ ID NO: 2006910 - RNA, 19 nt, Homo sapiens
  misc_RNA (1)...(19): siRNA sense strand
ggaaaucgaguagaugguu

SEQ ID NO: 2006911 - RNA, 19 nt, Homo sapiens
  misc_RNA (1)...(19): siRNA sense strand
ggaagucaucagagcauaa

SEQ ID NO: 2006912 - RNA, 19 nt, Homo sapiens
  misc_RNA (1)...(19): siRNA sense strand
ccaaucaucaagucgcuua

SEQ ID NO: 2006913 - RNA, 19 nt, Homo sapiens
  misc_RNA (1)...(19): siRNA sense strand
cgaagcccauuuggaagua

SEQ ID NO: 2006914 - RNA, 19 nt, Homo sapiens
  misc_RNA (1)...(19): siRNA sense strand
ggauaguccagaucaauga

SEQ ID NO: 2006915 - RNA, 19 nt, Homo sapiens
  misc_RNA (1)...(19): siRNA sense strand
ggucagccacugcuaacua

SEQ ID NO: 2006916 - RNA, 19 nt, Homo sapiens
  misc_RNA (1)...(19): siRNA sense strand
gaugaucggcccaaaggaa

SEQ ID NO: 2006917 - RNA, 19 nt, Homo sapiens
  misc_RNA (1)...(19): siRNA sense strand
gauaguaaaccugguguga

SEQ ID NO: 2006918 - RNA, 19 nt, Homo sapiens
  misc_RNA (1)...(19): siRNA sense strand
gaaaagcucagauaguaaa

SEQ ID NO: 2006919 - RNA, 19 nt, Homo sapiens
  misc_RNA (1)...(19): siRNA sense strand
gagcacagcacaaguggau

SEQ ID NO: 2006920 - RNA, 19 nt, Homo sapiens
  misc_RNA (1)...(19): siRNA sense strand
agaauauccugcuacuuug

SEQ ID NO: 2006921 - RNA, 19 nt, Homo sapiens
  misc_RNA (1)...(19): siRNA sense strand
ggugacauuucaaggagaa

SEQ ID NO: 2006922 - RNA, 19 nt, Homo sapiens
  misc_RNA (1)...(19): siRNA sense strand
agaaucagucuguagauaa

SEQ ID NO: 2006923 - RNA, 19 nt, Homo sapiens
  misc_RNA (1)...(19): siRNA sense strand
ggaggugacauuucaagga

SEQ ID NO: 2006924 - RNA, 19 nt, Homo sapiens
  misc_RNA (1)...(19): siRNA sense strand
gggaagucaucagagcaua

SEQ ID NO: 2006925 - RNA, 19 nt, Homo sapiens
  misc_RNA (1)...(19): siRNA sense strand
ugggaaagcaggaauuaaa

SEQ ID NO: 2006926 - RNA, 19 nt, Homo sapiens
  misc_RNA (1)...(19): siRNA sense strand
agagaggccuagaaaggaa

SEQ ID NO: 2006927 - RNA, 19 nt, Homo sapiens
  misc_RNA (1)...(19): siRNA sense strand
caacaaaacuauacagaac

SEQ ID NO: 2006928 - RNA, 19 nt, Homo sapiens
  misc_RNA (1)...(19): siRNA sense strand
gcggauauacaacuccuaa

SEQ ID NO: 2006929 - RNA, 19 nt, Homo sapiens
  misc_RNA (1)...(19): siRNA sense strand
gauacuauaccaauuccaa

SEQ ID NO: 2006930 - RNA, 19 nt, Homo sapiens
  misc_RNA (1)...(19): siRNA sense strand
agaaugggaagucuuauga

SEQ ID NO: 2006931 - RNA, 19 nt, Homo sapiens
  misc_RNA (1)...(19): siRNA sense strand
gcagaagcaagaucccaaa

SEQ ID NO: 2006932 - RNA, 19 nt, Homo sapiens
  misc_RNA (1)...(19): siRNA sense strand
gaaucuauuuggaauuugc

SEQ ID NO: 2006933 - RNA, 19 nt, Homo sapiens
  misc_RNA (1)...(19): siRNA sense strand
gaaaacaggcuauggugaa

SEQ ID NO: 2006934 - RNA, 19 nt, Homo sapiens
  misc_RNA (1)...(19): siRNA sense strand
ucaaaggacuacgagauag

SEQ ID NO: 2006935 - RNA, 19 nt, Homo sapiens
  misc_RNA (1)...(19): siRNA sense strand
aaacgguaaugcuggagaa

SEQ ID NO: 2006936 - RNA, 19 nt, Homo sapiens
  misc_RNA (1)...(19): siRNA sense strand
ggaggaacaagucgaggaa

SEQ ID NO: 2006937 - RNA, 19 nt, Homo sapiens
  misc_RNA (1)...(19): siRNA sense strand
gaccagugucccaaccuua

SEQ ID NO: 2006938 - RNA, 19 nt, Homo sapiens
  misc_RNA (1)...(19): siRNA sense strand
cgguaaugcuggagaaaga

SEQ ID NO: 2006939 - RNA, 19 nt, Homo sapiens
  misc_RNA (1)...(19): siRNA sense strand
caagcaaaguuaaggaaaa

SEQ ID NO: 2006940 - RNA, 19 nt, Homo sapiens
  misc_RNA (1)...(19): siRNA sense strand
ccaaagccgcugaaacaug

SEQ ID NO: 2006941 - RNA, 19 nt, Homo sapiens
  misc_RNA (1)...(19): siRNA sense strand
ggacuacgagauagaaagu

SEQ ID NO: 2006942 - RNA, 19 nt, Homo sapiens
  misc_RNA (1)...(19): siRNA sense strand
gaaagcagacaccaguagu

SEQ ID NO: 2006943 - RNA, 19 nt, Homo sapiens
  misc_RNA (1)...(19): siRNA sense strand
gcuaacuacugcugcuaau

SEQ ID NO: 2006944 - RNA, 19 nt, Homo sapiens
  misc_RNA (1)...(19): siRNA sense strand
aggaaacgccgaagaagaa

SEQ ID NO: 2006945 - RNA, 19 nt, Homo sapiens
  misc_RNA (1)...(19): siRNA sense strand
ggaaucuauuuggaauuug

SEQ ID NO: 2006946 - RNA, 19 nt, Homo sapiens
  misc_RNA (1)...(19): siRNA sense strand
gcaccaccaccaccauuau

SEQ ID NO: 2006947 - RNA, 19 nt, Homo sapiens
  misc_RNA (1)...(19): siRNA sense strand
gcagacaccaguagucaag

SEQ ID NO: 2006948 - RNA, 19 nt, Homo sapiens
  misc_RNA (1)...(19): siRNA sense strand
ggaacccagucauauaggu

SEQ ID NO: 2006949 - RNA, 19 nt, Homo sapiens
  misc_RNA (1)...(19): siRNA sense strand
gaaugggaagucuuaugaa

SEQ ID NO: 2006950 - RNA, 19 nt, Homo sapiens
  misc_RNA (1)...(19): siRNA sense strand
gaagcaagaucccaaaagg

SEQ ID NO: 2006951 - RNA, 19 nt, Homo sapiens
  misc_RNA (1)...(19): siRNA sense strand
ccagagaggccuagaaagg

SEQ ID NO: 2006952 - RNA, 19 nt, Homo sapiens
  misc_RNA (1)...(19): siRNA sense strand
caaaggacuacgagauaga

SEQ ID NO: 2006953 - RNA, 19 nt, Homo sapiens
  misc_RNA (1)...(19): siRNA sense strand
gggauaucuuccagaauca

SEQ ID NO: 2006954 - RNA, 19 nt, Homo sapiens
  misc_RNA (1)...(19): siRNA sense strand
uaacuacugcugcuaauac

SEQ ID NO: 2006955 - RNA, 19 nt, Homo sapiens
  misc_RNA (1)...(19): siRNA sense strand
ggacucguggacccuauuu

SEQ ID NO: 2006956 - RNA, 19 nt, Homo sapiens
  misc_RNA (1)...(19): siRNA sense strand
gaaacugggccuggaggaa

SEQ ID NO: 2006957 - RNA, 19 nt, Homo sapiens
  misc_RNA (1)...(19): siRNA sense strand
aaacagggacuugaaacuu

SEQ ID NO: 2006958 - RNA, 19 nt, Homo sapiens
  misc_RNA (1)...(19): siRNA sense strand
ggagagaaucagucuguag

SEQ ID NO: 2006959 - RNA, 19 nt, Homo sapiens
  misc_RNA (1)...(19): siRNA sense strand
gaaaaccucaacaaaacua

SEQ ID NO: 2006960 - RNA, 19 nt, Homo sapiens
  misc_RNA (1)...(19): siRNA sense strand
ccagcagccucaccaauac

SEQ ID NO: 2006961 - RNA, 19 nt, Homo sapiens
  misc_RNA (1)...(19): siRNA sense strand
uagugagaguggagccuua

SEQ ID NO: 2006962 - RNA, 19 nt, Homo sapiens
  misc_RNA (1)...(19): siRNA sense strand
ucacagggugcugaaauaa

SEQ ID NO: 2006963 - RNA, 19 nt, Homo sapiens
  misc_RNA (1)...(19): siRNA sense strand
ucagugggguuuaucauuu

SEQ ID NO: 2006964 - RNA, 19 nt, Homo sapiens
  misc_RNA (1)...(19): siRNA sense strand
ggugugguaacaaauaauu

SEQ ID NO: 2006965 - RNA, 19 nt, Homo sapiens
  misc_RNA (1)...(19): siRNA sense strand
uagcagggacugauggaaa

SEQ ID NO: 2006966 - RNA, 19 nt, Homo sapiens
  misc_RNA (1)...(19): siRNA sense strand
ggaaagcuaggcgcaauag

SEQ ID NO: 2006967 - RNA, 19 nt, Homo sapiens
  misc_RNA (1)...(19): siRNA sense strand
gguaaaggagcagauaaug

SEQ ID NO: 2006968 - RNA, 19 nt, Homo sapiens
  misc_RNA (1)...(19): siRNA sense strand
aaacucagacccaaucauc

SEQ ID NO: 2006969 - RNA, 19 nt, Homo sapiens
  misc_RNA (1)...(19): siRNA sense strand
ggggauaucuuccagaauc

SEQ ID NO: 2006970 - RNA, 19 nt, Homo sapiens
  misc_RNA (1)...(19): siRNA sense strand
gcacagcacaaguggaucu

SEQ ID NO: 2006971 - RNA, 19 nt, Homo sapiens
  misc_RNA (1)...(19): siRNA sense strand
ucaaauaugcaaacuaugc

SEQ ID NO: 2006972 - RNA, 19 nt, Homo sapiens
  misc_RNA (1)...(19): siRNA sense strand
ggaaaugucuauaaacuca

SEQ ID NO: 2006973 - RNA, 19 nt, Homo sapiens
  misc_RNA (1)...(19): siRNA sense strand
gcacaugguucuuauacaa

SEQ ID NO: 2006974 - RNA, 19 nt, Homo sapiens
  misc_RNA (1)...(19): siRNA sense strand
gaaacgaucuacagcaaga

SEQ ID NO: 2006975 - RNA, 19 nt, Homo sapiens
  misc_RNA (1)...(19): siRNA sense strand
ggucucaacuuaagcauaa

SEQ ID NO: 2006976 - RNA, 19 nt, Homo sapiens
  misc_RNA (1)...(19): siRNA sense strand
caacuucacuggcauuuau

SEQ ID NO: 2006977 - RNA, 19 nt, Homo sapiens
  misc_RNA (1)...(19): siRNA sense strand
gaaagugcacccaacaaua

SEQ ID NO: 2006978 - RNA, 19 nt, Homo sapiens
  misc_RNA (1)...(19): siRNA sense strand
gcaagaaguucggcaauau

SEQ ID NO: 2006979 - RNA, 19 nt, Homo sapiens
  misc_RNA (1)...(19): siRNA sense strand
gcacaaaggaucagaaguu

SEQ ID NO: 2006980 - RNA, 19 nt, Homo sapiens
  misc_RNA (1)...(19): siRNA sense strand
agaaagguauugcaacaua

SEQ ID NO: 2006981 - RNA, 19 nt, Homo sapiens
  misc_RNA (1)...(19): siRNA sense strand
ucacauuccuagcaaauuu

SEQ ID NO: 2006982 - RNA, 19 nt, Homo sapiens
  misc_RNA (1)...(19): siRNA sense strand
gaagaaaccaagagaaguu

SEQ ID NO: 2006983 - RNA, 19 nt, Homo sapiens
  misc_RNA (1)...(19): siRNA sense strand
uaauaaagcuggaaauguc

SEQ ID NO: 2006984 - RNA, 19 nt, Homo sapiens
  misc_RNA (1)...(19): siRNA sense strand
gcaaaggaauggacgaaca

SEQ ID NO: 2006985 - RNA, 19 nt, Homo sapiens
  misc_RNA (1)...(19): siRNA sense strand
caagagaaguuuucaagua

SEQ ID NO: 2006986 - RNA, 19 nt, Homo sapiens
  misc_RNA (1)...(19): siRNA sense strand
gcaaacccauaccaagaaa

SEQ ID NO: 2006987 - RNA, 19 nt, Homo sapiens
  misc_RNA (1)...(19): siRNA sense strand
uaagaaagguauugcaaca

SEQ ID NO: 2006988 - RNA, 19 nt, Homo sapiens
  misc_RNA (1)...(19): siRNA sense strand
ggacgaacauggaaaauau

SEQ ID NO: 2006989 - RNA, 19 nt, Homo sapiens
  misc_RNA (1)...(19): siRNA sense strand
aaugagagcucuuguuugu

SEQ ID NO: 2006990 - RNA, 19 nt, Homo sapiens
  misc_RNA (1)...(19): siRNA sense strand
uaaacucacucuugauuca

SEQ ID NO: 2006991 - RNA, 19 nt, Homo sapiens
  misc_RNA (1)...(19): siRNA sense strand
cagcacaccuccuuagaug

SEQ ID NO: 2006992 - RNA, 19 nt, Homo sapiens
  misc_RNA (1)...(19): siRNA sense strand
gaaaaccgguaaauucaaa

SEQ ID NO: 2006993 - RNA, 19 nt, Homo sapiens
  misc_RNA (1)...(19): siRNA sense strand
gaagauacagauauagaga

SEQ ID NO: 2006994 - RNA, 19 nt, Homo sapiens
  misc_RNA (1)...(19): siRNA sense strand
ucuauaaacucacucuuga

SEQ ID NO: 2006995 - RNA, 19 nt, Homo sapiens
  misc_RNA (1)...(19): siRNA sense strand
gcacaccuccuuagaugaa

SEQ ID NO: 2006996 - RNA, 19 nt, Homo sapiens
  misc_RNA (1)...(19): siRNA sense strand
ucacuggcauuuauuaugu

SEQ ID NO: 2006997 - RNA, 19 nt, Homo sapiens
  misc_RNA (1)...(19): siRNA sense strand
ugaaugagagcucuuguuu

SEQ ID NO: 2006998 - RNA, 19 nt, Homo sapiens
  misc_RNA (1)...(19): siRNA sense strand
aaacuuugccgauaaacua

SEQ ID NO: 2006999 - RNA, 19 nt, Homo sapiens
  misc_RNA (1)...(19): siRNA sense strand
cgcuuuaaguuuccaauua

SEQ ID NO: 2007000 - RNA, 19 nt, Homo sapiens
  misc_RNA (1)...(19): siRNA sense strand
caagaaguucggcaauaua

SEQ ID NO: 2007001 - RNA, 19 nt, Homo sapiens
  misc_RNA (1)...(19): siRNA sense strand
cacaauauccaguuucuuu

SEQ ID NO: 2007002 - RNA, 19 nt, Homo sapiens
  misc_RNA (1)...(19): siRNA sense strand
cacaaaggaucagaaguuu

SEQ ID NO: 2007003 - RNA, 19 nt, Homo sapiens
  misc_RNA (1)...(19): siRNA sense strand
gaucagaaguuuucacaug

SEQ ID NO: 2007004 - RNA, 19 nt, Homo sapiens
  misc_RNA (1)...(19): siRNA sense strand
gcuauuccacucacagaua

SEQ ID NO: 2007005 - RNA, 19 nt, Homo sapiens
  misc_RNA (1)...(19): siRNA sense strand
ggaggacauuccaaagaug

SEQ ID NO: 2007006 - RNA, 19 nt, Homo sapiens
  misc_RNA (1)...(19): siRNA sense strand
gaguguaacugcacaaagg

SEQ ID NO: 2007007 - RNA, 19 nt, Homo sapiens
  misc_RNA (1)...(19): siRNA sense strand
caacauacgacuccuaaag

SEQ ID NO: 2007008 - RNA, 19 nt, Homo sapiens
  misc_RNA (1)...(19): siRNA sense strand
gaccgucauuucaggagua

SEQ ID NO: 2007009 - RNA, 19 nt, Homo sapiens
  misc_RNA (1)...(19): siRNA sense strand
cuacaggccuccaucuaau

SEQ ID NO: 2007010 - RNA, 19 nt, Homo sapiens
  misc_RNA (1)...(19): siRNA sense strand
ccuaauuuguuggaaguua

SEQ ID NO: 2007011 - RNA, 19 nt, Homo sapiens
  misc_RNA (1)...(19): siRNA sense strand
uggaaacccuaauuuguug

SEQ ID NO: 2007012 - RNA, 19 nt, Homo sapiens
  misc_RNA (1)...(19): siRNA sense strand
gcaauauacacuauggaaa

SEQ ID NO: 2007013 - RNA, 19 nt, Homo sapiens
  misc_RNA (1)...(19): siRNA sense strand
gcacaacuggaaacugaaa

SEQ ID NO: 2007014 - RNA, 19 nt, Homo sapiens
  misc_RNA (1)...(19): siRNA sense strand
aggcacaacuggaaacuga

SEQ ID NO: 2007015 - RNA, 19 nt, Homo sapiens
  misc_RNA (1)...(19): siRNA sense strand
ugagagcucuuguuugucu

SEQ ID NO: 2007016 - RNA, 19 nt, Homo sapiens
  misc_RNA (1)...(19): siRNA sense strand
ucuacugagugcuuuguua

SEQ ID NO: 2007017 - RNA, 19 nt, Homo sapiens
  misc_RNA (1)...(19): siRNA sense strand
caccaucccucaacauugu

SEQ ID NO: 2007018 - RNA, 19 nt, Homo sapiens
  misc_RNA (1)...(19): siRNA sense strand
agagaagacuguagugcuu

SEQ ID NO: 2007019 - RNA, 19 nt, Homo sapiens
  misc_RNA (1)...(19): siRNA sense strand
caaucuccauaucugguua

SEQ ID NO: 2007020 - RNA, 19 nt, Homo sapiens
  misc_RNA (1)...(19): siRNA sense strand
aaagugcacccaacaauau

SEQ ID NO: 2007021 - RNA, 19 nt, Homo sapiens
  misc_RNA (1)...(19): siRNA sense strand
ccaacaauaugaccuuucu

SEQ ID NO: 2007022 - RNA, 19 nt, Homo sapiens
  misc_RNA (1)...(19): siRNA sense strand
caaagauggauuagaagaa

SEQ ID NO: 2007023 - RNA, 19 nt, Homo sapiens
  misc_RNA (1)...(19): siRNA sense strand
uacagcagcuuccucauca

SEQ ID NO: 2007024 - RNA, 19 nt, Homo sapiens
  misc_RNA (1)...(19): siRNA sense strand
guuccucgcuuuaaguuuc

SEQ ID NO: 2007025 - RNA, 19 nt, Homo sapiens
  misc_RNA (1)...(19): siRNA sense strand
cuauuccacucacagauaa

SEQ ID NO: 2007026 - RNA, 19 nt, Homo sapiens
  misc_RNA (1)...(19): siRNA sense strand
gcucuuguuugucuaguuc

SEQ ID NO: 2007027 - RNA, 19 nt, Homo sapiens
  misc_RNA (1)...(19): siRNA sense strand
cacuugggauuccuacaua

SEQ ID NO: 2007028 - RNA, 19 nt, Homo sapiens
  misc_RNA (1)...(19): siRNA sense strand
ccacagccuuuggaaauuc

SEQ ID NO: 2007029 - RNA, 19 nt, Homo sapiens
  misc_RNA (1)...(19): siRNA sense strand
gauuagaagaagugaauga

SEQ ID NO: 2007030 - RNA, 19 nt, Homo sapiens
  misc_RNA (1)...(19): siRNA sense strand
cauaaagggcucugaacuu

SEQ ID NO: 2007031 - RNA, 19 nt, Homo sapiens
  misc_RNA (1)...(19): siRNA sense strand
cuccauaucugguuacugu

SEQ ID NO: 2007032 - RNA, 19 nt, Homo sapiens
  misc_RNA (1)...(19): siRNA sense strand
uuaguggaguucauaaaga

SEQ ID NO: 2007033 - RNA, 19 nt, Homo sapiens
  misc_RNA (1)...(19): siRNA sense strand
ggaauggacgaacauggaa

SEQ ID NO: 2007034 - RNA, 19 nt, Homo sapiens
  misc_RNA (1)...(19): siRNA sense strand
gaaugagagcucuuguuug

SEQ ID NO: 2007035 - RNA, 19 nt, Homo sapiens
  misc_RNA (1)...(19): siRNA sense strand
ugacugaagugaacaugag

SEQ ID NO: 2007036 - RNA, 19 nt, Homo sapiens
  misc_RNA (1)...(19): siRNA sense strand
gcuaaggucauacggaaug

SEQ ID NO: 2007037 - RNA, 19 nt, Homo sapiens
  misc_RNA (1)...(19): siRNA sense strand
ccaaagauggauuagaaga

SEQ ID NO: 2007038 - RNA, 19 nt, Homo sapiens
  misc_RNA (1)...(19): siRNA sense strand
ucaugcagauccuagcaaa

SEQ ID NO: 2007039 - RNA, 19 nt, Homo sapiens
  misc_RNA (1)...(19): siRNA sense strand
ugacuguguuuguuggaaa

SEQ ID NO: 2007040 - RNA, 19 nt, Homo sapiens
  misc_RNA (1)...(19): siRNA sense strand
uagcaaacccauaccaaga

SEQ ID NO: 2007041 - RNA, 19 nt, Homo sapiens
  misc_RNA (1)...(19): siRNA sense strand
gcuuuaaguuuccaauuac

SEQ ID NO: 2007042 - RNA, 19 nt, Homo sapiens
  misc_RNA (1)...(19): siRNA sense strand
gaaguuacagcugaaguca

SEQ ID NO: 2007043 - RNA, 19 nt, Homo sapiens
  misc_RNA (1)...(19): siRNA sense strand
ggcaacagcgguagugcua

SEQ ID NO: 2007044 - RNA, 19 nt, Homo sapiens
  misc_RNA (1)...(19): siRNA sense strand
gaaguguuacugagagaau

SEQ ID NO: 2007045 - RNA, 19 nt, Homo sapiens
  misc_RNA (1)...(19): siRNA sense strand
guucggcaauauacacuau

SEQ ID NO: 2007046 - RNA, 19 nt, Homo sapiens
  misc_RNA (1)...(19): siRNA sense strand
ccaggacacacgcuuauug

SEQ ID NO: 2007047 - RNA, 19 nt, Homo sapiens
  misc_RNA (1)...(19): siRNA sense strand
gagcacaugguucuuauac

SEQ ID NO: 2007048 - RNA, 19 nt, Homo sapiens
  misc_RNA (1)...(19): siRNA sense strand
cauaagaaagguauugcaa

SEQ ID NO: 2007049 - RNA, 19 nt, Homo sapiens
  misc_RNA (1)...(19): siRNA sense strand
gcucugaacuuuuccacuu

SEQ ID NO: 2007050 - RNA, 19 nt, Homo sapiens
  misc_RNA (1)...(19): siRNA sense strand
gaaaagcagcuguaguuau

SEQ ID NO: 2007051 - RNA, 19 nt, Homo sapiens
  misc_RNA (1)...(19): siRNA sense strand
ccagauaugggcuuugaga

SEQ ID NO: 2007052 - RNA, 19 nt, Homo sapiens
  misc_RNA (1)...(19): siRNA sense strand
cuaguucccuuuugauuaa

SEQ ID NO: 2007053 - RNA, 19 nt, Homo sapiens
  misc_RNA (1)...(19): siRNA sense strand
aggaaacgaucuacagcaa

SEQ ID NO: 2007054 - RNA, 19 nt, Homo sapiens
  misc_RNA (1)...(19): siRNA sense strand
uccuucaggucucaacuua

SEQ ID NO: 2007055 - RNA, 19 nt, Homo sapiens
  misc_RNA (1)...(19): siRNA sense strand
ucaaacagugugcuaaugu

SEQ ID NO: 2007056 - RNA, 19 nt, Homo sapiens
  misc_RNA (1)...(19): siRNA sense strand
aaaagcagcuguaguuauc

SEQ ID NO: 2007057 - RNA, 19 nt, Homo sapiens
  misc_RNA (1)...(19): siRNA sense strand
cgacaauggugccaacacu

SEQ ID NO: 2007058 - RNA, 19 nt, Homo sapiens
  misc_RNA (1)...(19): siRNA sense strand
cccucaacauugugaaaua

SEQ ID NO: 2007059 - RNA, 19 nt, Homo sapiens
  misc_RNA (1)...(19): siRNA sense strand
cuaaagagcacaugguucu

SEQ ID NO: 2007060 - RNA, 19 nt, Homo sapiens
  misc_RNA (1)...(19): siRNA sense strand
gcagcuuccucaucacaag

SEQ ID NO: 2007061 - RNA, 19 nt, Homo sapiens
  misc_RNA (1)...(19): siRNA sense strand
guacagcagcuuccucauc

SEQ ID NO: 2007062 - RNA, 19 nt, Homo sapiens
  misc_RNA (1)...(19): siRNA sense strand
ggcaauauacacuauggaa

SEQ ID NO: 2007063 - RNA, 19 nt, Homo sapiens
  misc_RNA (1)...(19): siRNA sense strand
agcaagaaguucggcaaua

SEQ ID NO: 2007064 - RNA, 19 nt, Homo sapiens
  misc_RNA (1)...(19): siRNA sense strand
guuggaaacccuaauuugu

SEQ ID NO: 2007065 - RNA, 19 nt, Homo sapiens
  misc_RNA (1)...(19): siRNA sense strand
cuucaggucucaacuuaag

SEQ ID NO: 2007066 - RNA, 19 nt, Homo sapiens
  misc_RNA (1)...(19): siRNA sense strand
aaagaaaaccgguaaauuc

SEQ ID NO: 2007067 - RNA, 19 nt, Homo sapiens
  misc_RNA (1)...(19): siRNA sense strand
gcaucacauuccuagcaaa

SEQ ID NO: 2007068 - RNA, 19 nt, Homo sapiens
  misc_RNA (1)...(19): siRNA sense strand
ucagaucuaugcaucacau

SEQ ID NO: 2007069 - RNA, 19 nt, Homo sapiens
  misc_RNA (1)...(19): siRNA sense strand
cagcuguaguuaucucaga

SEQ ID NO: 2007070 - RNA, 19 nt, Homo sapiens
  misc_RNA (1)...(19): siRNA sense strand
uuugaagacuggauuagug

SEQ ID NO: 2007071 - RNA, 19 nt, Homo sapiens
  misc_RNA (1)...(19): siRNA sense strand
aucaaagucugaagaguga

SEQ ID NO: 2007072 - RNA, 19 nt, Homo sapiens
  misc_RNA (1)...(19): siRNA sense strand
ggagaaagauuuagcuguu

SEQ ID NO: 2007073 - RNA, 19 nt, Homo sapiens
  misc_RNA (1)...(19): siRNA sense strand
gaaauucgaugucaguaug

SEQ ID NO: 2007074 - RNA, 19 nt, Homo sapiens
  misc_RNA (1)...(19): siRNA sense strand
ccacagauguuauggauau

SEQ ID NO: 2007075 - RNA, 19 nt, Homo sapiens
  misc_RNA (1)...(19): siRNA sense strand
gcagguggcuuugucauuu

SEQ ID NO: 2007076 - RNA, 19 nt, Homo sapiens
  misc_RNA (1)...(19): siRNA sense strand
uaaagaaaguccuucaaga

SEQ ID NO: 2007077 - RNA, 19 nt, Homo sapiens
  misc_RNA (1)...(19): siRNA sense strand
ggaaaucgcauucuucaug

SEQ ID NO: 2007078 - RNA, 19 nt, Homo sapiens
  misc_RNA (1)...(19): siRNA sense strand
caaauuauguguacaaggu

SEQ ID NO: 2007079 - RNA, 19 nt, Homo sapiens
  misc_RNA (1)...(19): siRNA sense strand
ugaaauggcuaaagaaagu

SEQ ID NO: 2007080 - RNA, 19 nt, Homo sapiens
  misc_RNA (1)...(19): siRNA sense strand
gaaaucgcauucuucaugu

SEQ ID NO: 2007081 - RNA, 19 nt, Homo sapiens
  misc_RNA (1)...(19): siRNA sense strand
cgacauccaucacuuucua

SEQ ID NO: 2007082 - RNA, 19 nt, Homo sapiens
  misc_RNA (1)...(19): siRNA sense strand
gugcagcccuccucuauga

SEQ ID NO: 2007083 - RNA, 19 nt, Homo sapiens
  misc_RNA (1)...(19): siRNA sense strand
guauugaaauggcuaaaga

SEQ ID NO: 2007084 - RNA, 19 nt, Homo sapiens
  misc_RNA (1)...(19): siRNA sense strand
ggaguucacuucacaccaa

SEQ ID NO: 2007085 - RNA, 19 nt, Homo sapiens
  misc_RNA (1)...(19): siRNA sense strand
gagaaaggccuccagaaug

SEQ ID NO: 2007086 - RNA, 19 nt, Homo sapiens
  misc_RNA (1)...(19): siRNA sense strand
gcuauugauuguccacaua

SEQ ID NO: 2007087 - RNA, 19 nt, Homo sapiens
  misc_RNA (1)...(19): siRNA sense strand
gcagguggcucugucuuga

SEQ ID NO: 2007088 - RNA, 19 nt, Homo sapiens
  misc_RNA (1)...(19): siRNA sense strand
gugcaggacuuuacucaga

SEQ ID NO: 2007089 - RNA, 19 nt, Homo sapiens
  misc_RNA (1)...(19): siRNA sense strand
gggcccagcuggaguaaga

SEQ ID NO: 2007090 - RNA, 19 nt, Homo sapiens
  misc_RNA (1)...(19): siRNA sense strand
gagaggaaauucgauguca

SEQ ID NO: 2007091 - RNA, 19 nt, Homo sapiens
  misc_RNA (1)...(19): siRNA sense strand
aaagaaaguccuucaagaa

SEQ ID NO: 2007092 - RNA, 19 nt, Homo sapiens
  misc_RNA (1)...(19): siRNA sense strand
gauugcagaugaaguacaa

SEQ ID NO: 2007093 - RNA, 19 nt, Homo sapiens
  misc_RNA (1)...(19): siRNA sense strand
gagauuaccugcuuuugaa

SEQ ID NO: 2007094 - RNA, 19 nt, Homo sapiens
  misc_RNA (1)...(19): siRNA sense strand
uaacaguggugucauacau

SEQ ID NO: 2007095 - RNA, 19 nt, Homo sapiens
  misc_RNA (1)...(19): siRNA sense strand
gcagaugaaguacaacaaa

SEQ ID NO: 2007096 - RNA, 19 nt, Homo sapiens
  misc_RNA (1)...(19): siRNA sense strand
ccagauagccgguuuccuu

SEQ ID NO: 2007097 - RNA, 19 nt, Homo sapiens
  misc_RNA (1)...(19): siRNA sense strand
acauaacaguggugucaua

SEQ ID NO: 2007098 - RNA, 19 nt, Homo sapiens
  misc_RNA (1)...(19): siRNA sense strand
agaaaggccuccagaaugg

SEQ ID NO: 2007099 - RNA, 19 nt, Homo sapiens
  misc_RNA (1)...(19): siRNA sense strand
ugucauacauaguggaauu

SEQ ID NO: 2007100 - RNA, 19 nt, Homo sapiens
  misc_RNA (1)...(19): siRNA sense strand
gcucugucuugaccaauuu

SEQ ID NO: 2007101 - RNA, 19 nt, Homo sapiens
  misc_RNA (1)...(19): siRNA sense strand
ucuaauggcuauugauugu

SEQ ID NO: 2007102 - RNA, 19 nt, Homo sapiens
  misc_RNA (1)...(19): siRNA sense strand
gaaagccaaauuaugugua

SEQ ID NO: 2007103 - RNA, 19 nt, Homo sapiens
  misc_RNA (1)...(19): siRNA sense strand
ggaaaaggagaaagauuua

SEQ ID NO: 2007104 - RNA, 19 nt, Homo sapiens
  misc_RNA (1)...(19): siRNA sense strand
caagaaguauagauggaau

SEQ ID NO: 2007105 - RNA, 19 nt, Homo sapiens
  misc_RNA (1)...(19): siRNA sense strand
gagaaagauuuagcuguuc

SEQ ID NO: 2007106 - RNA, 19 nt, Homo sapiens
  misc_RNA (1)...(19): siRNA sense strand
uaaugcaguucuugccuuu

SEQ ID NO: 2007107 - RNA, 19 nt, Homo sapiens
  misc_RNA (1)...(19): siRNA sense strand
uuacagacccuuugacuuc

SEQ ID NO: 2007108 - RNA, 19 nt, Homo sapiens
  misc_RNA (1)...(19): siRNA sense strand
aauaguggcuugauuaaac

SEQ ID NO: 2007109 - RNA, 19 nt, Homo sapiens
  misc_RNA (1)...(19): siRNA sense strand
ugccagcgcugcguuauuu

SEQ ID NO: 2007110 - RNA, 19 nt, Homo sapiens
  misc_RNA (1)...(19): siRNA sense strand
gcacucauccugcgacauc

SEQ ID NO: 2007111 - RNA, 19 nt, Homo sapiens
  misc_RNA (1)...(19): siRNA sense strand
guauagauggaaugcaaua

SEQ ID NO: 2007112 - RNA, 19 nt, Homo sapiens
  misc_RNA (1)...(19): siRNA sense strand
caccagcucauuugauaua

SEQ ID NO: 2007113 - RNA, 19 nt, Homo sapiens
  misc_RNA (1)...(19): siRNA sense strand
ggucuaauggcuauugauu

SEQ ID NO: 2007114 - RNA, 19 nt, Homo sapiens
  misc_RNA (1)...(19): siRNA sense strand
ggaaauucgaugucaguau

SEQ ID NO: 2007115 - RNA, 19 nt, Homo sapiens
  misc_RNA (1)...(19): siRNA sense strand
gugcaacagugaaguaucu

SEQ ID NO: 2007116 - RNA, 19 nt, Homo sapiens
  misc_RNA (1)...(19): siRNA sense strand
caucguugguggcggaauu

SEQ ID NO: 2007117 - RNA, 19 nt, Homo sapiens
  misc_RNA (1)...(19): siRNA sense strand
ggaguuacugaaauguaua

SEQ ID NO: 2007118 - RNA, 19 nt, Homo sapiens
  misc_RNA (1)...(19): siRNA sense strand
gaauacaaagggagaggaa

SEQ ID NO: 2007119 - RNA, 19 nt, Homo sapiens
  misc_RNA (1)...(19): siRNA sense strand
uaugaguacugucagcaaa

SEQ ID NO: 2007120 - RNA, 19 nt, Homo sapiens
  misc_RNA (1)...(19): siRNA sense strand
agcaccagcucauuugaua

SEQ ID NO: 2007121 - RNA, 19 nt, Homo sapiens
  misc_RNA (1)...(19): siRNA sense strand
aaguauagauggaaugcaa

SEQ ID NO: 2007122 - RNA, 19 nt, Homo sapiens
  misc_RNA (1)...(19): siRNA sense strand
ugagaaaggccuccagaau

SEQ ID NO: 2007123 - RNA, 19 nt, Homo sapiens
  misc_RNA (1)...(19): siRNA sense strand
ucugaaagccaaauuaugu

SEQ ID NO: 2007124 - RNA, 19 nt, Homo sapiens
  misc_RNA (1)...(19): siRNA sense strand
aaggauggauggcaguauu

SEQ ID NO: 2007125 - RNA, 19 nt, Homo sapiens
  misc_RNA (1)...(19): siRNA sense strand
agaaggagccauauuguag

SEQ ID NO: 2007126 - RNA, 19 nt, Homo sapiens
  misc_RNA (1)...(19): siRNA sense strand
agaaagauuuagcuguuca

SEQ ID NO: 2007127 - RNA, 19 nt, Homo sapiens
  misc_RNA (1)...(19): siRNA sense strand
ugcaauuucuggaaugauu

SEQ ID NO: 2007128 - RNA, 19 nt, Homo sapiens
  misc_RNA (1)...(19): siRNA sense strand
gcugcuacuucuuccauug

SEQ ID NO: 2007129 - RNA, 19 nt, Homo sapiens
  misc_RNA (1)...(19): siRNA sense strand
uaaacgagaggguuacaga

SEQ ID NO: 2007130 - RNA, 19 nt, Homo sapiens
  misc_RNA (1)...(19): siRNA sense strand
ggucccagauagccgguuu

SEQ ID NO: 2007131 - RNA, 19 nt, Homo sapiens
  misc_RNA (1)...(19): siRNA sense strand
agaagaaauucccagacuu

SEQ ID NO: 2007132 - RNA, 19 nt, Homo sapiens
  misc_RNA (1)...(19): siRNA sense strand
gaccguauuucagaguuga

SEQ ID NO: 2007133 - RNA, 19 nt, Homo sapiens
  misc_RNA (1)...(19): siRNA sense strand
cagaugaaguacaacaaag

SEQ ID NO: 2007134 - RNA, 19 nt, Homo sapiens
  misc_RNA (1)...(19): siRNA sense strand
auggaaaucugguagaaga

SEQ ID NO: 2007135 - RNA, 19 nt, Homo sapiens
  misc_RNA (1)...(19): siRNA sense strand
uggaguuacugaaauguau

SEQ ID NO: 2007136 - RNA, 19 nt, Homo sapiens
  misc_RNA (1)...(19): siRNA sense strand
ccuaggaguucacuucaca

SEQ ID NO: 2007137 - RNA, 19 nt, Homo sapiens
  misc_RNA (1)...(19): siRNA sense strand
ccuauggaguuacugaaau

SEQ ID NO: 2007138 - RNA, 19 nt, Homo sapiens
  misc_RNA (1)...(19): siRNA sense strand
augcaguucuugccuuuaa

SEQ ID NO: 2007139 - RNA, 19 nt, Homo sapiens
  misc_RNA (1)...(19): siRNA sense strand
auacuggcauuguggacua

SEQ ID NO: 2007140 - RNA, 19 nt, Homo sapiens
  misc_RNA (1)...(19): siRNA sense strand
aaugauugcagaugaagua

SEQ ID NO: 2007141 - RNA, 19 nt, Homo sapiens
  misc_RNA (1)...(19): siRNA sense strand
cuauggaguuacugaaaug

SEQ ID NO: 2007142 - RNA, 19 nt, Homo sapiens
  misc_RNA (1)...(19): siRNA sense strand
ugacuucagugccacagau

SEQ ID NO: 2007143 - RNA, 19 nt, Homo sapiens
  misc_RNA (1)...(19): siRNA sense strand
aagaagaaauucccagacu

SEQ ID NO: 2007144 - RNA, 19 nt, Homo sapiens
  misc_RNA (1)...(19): siRNA sense strand
gauauuggaaaucgcauuc

SEQ ID NO: 2007145 - RNA, 19 nt, Homo sapiens
  misc_RNA (1)...(19): siRNA sense strand
aagaaggagccauauugua

SEQ ID NO: 2007146 - RNA, 19 nt, Homo sapiens
  misc_RNA (1)...(19): siRNA sense strand
gacuucaggcccuauauga

SEQ ID NO: 2007147 - RNA, 19 nt, Homo sapiens
  misc_RNA (1)...(19): siRNA sense strand
gaugaaguacaacaaagau

SEQ ID NO: 2007148 - RNA, 19 nt, Homo sapiens
  misc_RNA (1)...(19): siRNA sense strand
cagauagccgguuuccuuu

SEQ ID NO: 2007149 - RNA, 19 nt, Homo sapiens
  misc_RNA (1)...(19): siRNA sense strand
aaaaggggauuuccuacaa

SEQ ID NO: 2007150 - RNA, 19 nt, Homo sapiens
  misc_RNA (1)...(19): siRNA sense strand
uggaaugauugcagaugaa

SEQ ID NO: 2007151 - RNA, 19 nt, Homo sapiens
  misc_RNA (1)...(19): siRNA sense strand
gaggaaauucgaugucagu

SEQ ID NO: 2007152 - RNA, 19 nt, Homo sapiens
  misc_RNA (1)...(19): siRNA sense strand
cagcucauuugauauaguc

SEQ ID NO: 2007153 - RNA, 19 nt, Homo sapiens
  misc_RNA (1)...(19): siRNA sense strand
aaagaaggagccauauugu

SEQ ID NO: 2007154 - RNA, 19 nt, Homo sapiens
  misc_RNA (1)...(19): siRNA sense strand
acaguggugucauacauag

SEQ ID NO: 2007155 - RNA, 19 nt, Homo sapiens
  misc_RNA (1)...(19): siRNA sense strand
cuggaaugauugcagauga

SEQ ID NO: 2007156 - RNA, 19 nt, Homo sapiens
  misc_RNA (1)...(19): siRNA sense strand
cagguggcuuugucauuug

SEQ ID NO: 2007157 - RNA, 19 nt, Homo sapiens
  misc_RNA (1)...(19): siRNA sense strand
aaaccugagucucugaaag

SEQ ID NO: 2007158 - RNA, 19 nt, Homo sapiens
  misc_RNA (1)...(19): siRNA sense strand
ccauugcaauuucuggaau

SEQ ID NO: 2007159 - RNA, 19 nt, Homo sapiens
  misc_RNA (1)...(19): siRNA sense strand
uguauuugaugcaggaguu

SEQ ID NO: 2007160 - RNA, 19 nt, Homo sapiens
  misc_RNA (1)...(19): siRNA sense strand
ugacaugugcaggacuuua

SEQ ID NO: 2007161 - RNA, 19 nt, Homo sapiens
  misc_RNA (1)...(19): siRNA sense strand
cagcccuccucuaugagua

SEQ ID NO: 2007162 - RNA, 19 nt, Homo sapiens
  misc_RNA (1)...(19): siRNA sense strand
caauaguggcuugauuaaa

SEQ ID NO: 2007163 - RNA, 19 nt, Homo sapiens
  misc_RNA (1)...(19): siRNA sense strand
gcaguguggcaagcuuaua

SEQ ID NO: 2007164 - RNA, 19 nt, Homo sapiens
  misc_RNA (1)...(19): siRNA sense strand
aaagccaaauuauguguac

SEQ ID NO: 2007165 - RNA, 19 nt, Homo sapiens
  misc_RNA (1)...(19): siRNA sense strand
cuucuuccauugcaauuuc

SEQ ID NO: 2007166 - RNA, 19 nt, Homo sapiens
  misc_RNA (1)...(19): siRNA sense strand
uauuggaaaucgcauucuu

SEQ ID NO: 2007167 - RNA, 19 nt, Homo sapiens
  misc_RNA (1)...(19): siRNA sense strand
uuacucagaccguauuuca

SEQ ID NO: 2007168 - RNA, 19 nt, Homo sapiens
  misc_RNA (1)...(19): siRNA sense strand
cuaaagaaaguccuucaag

SEQ ID NO: 2007169 - RNA, 19 nt, Homo sapiens
  misc_RNA (1)...(19): siRNA sense strand
gcuaaagaaaguccuucaa

SEQ ID NO: 2007170 - RNA, 19 nt, Homo sapiens
  misc_RNA (1)...(19): siRNA sense strand
ggcucugucuugaccaauu

SEQ ID NO: 2007171 - RNA, 19 nt, Homo sapiens
  misc_RNA (1)...(19): siRNA sense strand
ugccacagauguuauggau

SEQ ID NO: 2007172 - RNA, 19 nt, Homo sapiens
  misc_RNA (1)...(19): siRNA sense strand
gaaccgaaauuuagaaagc

SEQ ID NO: 2007173 - RNA, 19 nt, Homo sapiens
  misc_RNA (1)...(19): siRNA sense strand
gaucgaaucaucaauuuag

SEQ ID NO: 2007174 - RNA, 19 nt, Homo sapiens
  misc_RNA (1)...(19): siRNA sense strand
cagcuuaacauccuuauug

SEQ ID NO: 2007175 - RNA, 19 nt, Homo sapiens
  misc_RNA (1)...(19): siRNA sense strand
gcauacuuaucuacuggua

SEQ ID NO: 2007176 - RNA, 19 nt, Homo sapiens
  misc_RNA (1)...(19): siRNA sense strand
gauaagugcuuuuguuuuc

SEQ ID NO: 2007177 - RNA, 19 nt, Homo sapiens
  misc_RNA (1)...(19): siRNA sense strand
ccaaaaccguugaauauau

SEQ ID NO: 2007178 - RNA, 19 nt, Homo sapiens
  misc_RNA (1)...(19): siRNA sense strand
gugcaaaccuguacuucca

SEQ ID NO: 2007179 - RNA, 19 nt, Homo sapiens
  misc_RNA (1)...(19): siRNA sense strand
agacuuagaaccgaaauuu

SEQ ID NO: 2007180 - RNA, 19 nt, Homo sapiens
  misc_RNA (1)...(19): siRNA sense strand
ggaucgaaucaucaauuua

SEQ ID NO: 2007181 - RNA, 19 nt, Homo sapiens
  misc_RNA (1)...(19): siRNA sense strand
cuacugguaucgacaagga

SEQ ID NO: 2007182 - RNA, 19 nt, Homo sapiens
  misc_RNA (1)...(19): siRNA sense strand
gacuuagaaccgaaauuua

SEQ ID NO: 2007183 - RNA, 19 nt, Homo sapiens
  misc_RNA (1)...(19): siRNA sense strand
cgaaucaucaauuuaguug

SEQ ID NO: 2007184 - RNA, 19 nt, Homo sapiens
  misc_RNA (1)...(19): siRNA sense strand
auuacugccugcauacuua

SEQ ID NO: 2007185 - RNA, 19 nt, Homo sapiens
  misc_RNA (1)...(19): siRNA sense strand
aggaucgaaucaucaauuu

SEQ ID NO: 2007186 - RNA, 19 nt, Homo sapiens
  misc_RNA (1)...(19): siRNA sense strand
guaucgacaaggagacuua

SEQ ID NO: 2007187 - RNA, 19 nt, Homo sapiens
  misc_RNA (1)...(19): siRNA sense strand
gucugcaucucuuugagua

SEQ ID NO: 2007188 - RNA, 19 nt, Homo sapiens
  misc_RNA (1)...(19): siRNA sense strand
gcugauaagugcuuuuguu

SEQ ID NO: 2007189 - RNA, 19 nt, Homo sapiens
  misc_RNA (1)...(19): siRNA sense strand
ccaaggaucgaaucaucaa

SEQ ID NO: 2007190 - RNA, 19 nt, Homo sapiens
  misc_RNA (1)...(19): siRNA sense strand
cgccaaggaucgaaucauc

SEQ ID NO: 2007191 - RNA, 19 nt, Homo sapiens
  misc_RNA (1)...(19): siRNA sense strand
ggagacguccgccaaggau

SEQ ID NO: 2007192 - RNA, 19 nt, Homo sapiens
  misc_RNA (1)...(19): siRNA sense strand
uaacgcugauaagugcuuu

SEQ ID NO: 2007193 - RNA, 19 nt, Homo sapiens
  misc_RNA (1)...(19): siRNA sense strand
uuuaguuguuggcagcuua

SEQ ID NO: 2007194 - RNA, 19 nt, Homo sapiens
  misc_RNA (1)...(19): siRNA sense strand
cuaguaacgcugauaagug

SEQ ID NO: 2007195 - RNA, 19 nt, Homo sapiens
  misc_RNA (1)...(19): siRNA sense strand
guauaugugcaaaccugua

SEQ ID NO: 2007196 - RNA, 19 nt, Homo sapiens
  misc_RNA (1)...(19): siRNA sense strand
caucauguuguguauaugu

SEQ ID NO: 2007197 - RNA, 19 nt, Homo sapiens
  misc_RNA (1)...(19): siRNA sense strand
gcaucucuuugaguaguau

SEQ ID NO: 2007198 - RNA, 19 nt, Homo sapiens
  misc_RNA (1)...(19): siRNA sense strand
aaggaucgaaucaucaauu

SEQ ID NO: 2007199 - RNA, 19 nt, Homo sapiens
  misc_RNA (1)...(19): siRNA sense strand
ucuaucaucauguugugua

SEQ ID NO: 2007200 - RNA, 19 nt, Homo sapiens
  misc_RNA (1)...(19): siRNA sense strand
aaccuguacuuccaugaug

SEQ ID NO: 2007201 - RNA, 19 nt, Homo sapiens
  misc_RNA (1)...(19): siRNA sense strand
ucccucaacuaccuccaaa

SEQ ID NO: 2007202 - RNA, 19 nt, Homo sapiens
  misc_RNA (1)...(19): siRNA sense strand
agcuuaacauccuuauuga

SEQ ID NO: 2007203 - RNA, 19 nt, Homo sapiens
  misc_RNA (1)...(19): siRNA sense strand
gcagcuuaacauccuuauu

SEQ ID NO: 2007204 - RNA, 19 nt, Homo sapiens
  misc_RNA (1)...(19): siRNA sense strand
gcugucugcaucucuuuga

SEQ ID NO: 2007205 - RNA, 19 nt, Homo sapiens
  misc_RNA (1)...(19): siRNA sense strand
acuuagaaccgaaauuuag

SEQ ID NO: 2007206 - RNA, 19 nt, Homo sapiens
  misc_RNA (1)...(19): siRNA sense strand
ucgacaaggagacuuagaa

SEQ ID NO: 2007207 - RNA, 19 nt, Homo sapiens
  misc_RNA (1)...(19): siRNA sense strand
gccaaggaucgaaucauca

SEQ ID NO: 2007208 - RNA, 19 nt, Homo sapiens
  misc_RNA (1)...(19): siRNA sense strand
guuggcagcuuaacauccu

SEQ ID NO: 2007209 - RNA, 19 nt, Homo sapiens
  misc_RNA (1)...(19): siRNA sense strand
cuuagaaccgaaauuuaga

SEQ ID NO: 2007210 - RNA, 19 nt, Homo sapiens
  misc_RNA (1)...(19): siRNA sense strand
ggugggagaucuuuguaua

SEQ ID NO: 2007211 - RNA, 19 nt, Homo sapiens
  misc_RNA (1)...(19): siRNA sense strand
ggauauauaugcucacauc

SEQ ID NO: 2007212 - RNA, 19 nt, Homo sapiens
  misc_RNA (1)...(19): siRNA sense strand
gaagcuuucucuaggugua

SEQ ID NO: 2007213 - RNA, 19 nt, Homo sapiens
  misc_RNA (1)...(19): siRNA sense strand
gcucagaaguggccucuca

SEQ ID NO: 2007214 - RNA, 19 nt, Homo sapiens
  misc_RNA (1)...(19): siRNA sense strand
gaaauaaaggucucucucu

SEQ ID NO: 2007215 - RNA, 19 nt, Homo sapiens
  misc_RNA (1)...(19): siRNA sense strand
ugggagaucuuuguauaaa

SEQ ID NO: 2007216 - RNA, 19 nt, Homo sapiens
  misc_RNA (1)...(19): siRNA sense strand
agaaacugcugcugucaug

SEQ ID NO: 2007217 - RNA, 19 nt, Homo sapiens
  misc_RNA (1)...(19): siRNA sense strand
gggaauccauugggacuuc

SEQ ID NO: 2007218 - RNA, 19 nt, Homo sapiens
  misc_RNA (1)...(19): siRNA sense strand
gagagaggccagcauucaa

SEQ ID NO: 2007219 - RNA, 19 nt, Homo sapiens
  misc_RNA (1)...(19): siRNA sense strand
ucaaggaagcuuucucuag

SEQ ID NO: 2007220 - RNA, 19 nt, Homo sapiens
  misc_RNA (1)...(19): siRNA sense strand
uauauaugcucacaucacu

SEQ ID NO: 2007221 - RNA, 19 nt, Homo sapiens
  misc_RNA (1)...(19): siRNA sense strand
ggaggugggagaucuuugu

SEQ ID NO: 2007222 - RNA, 19 nt, Homo sapiens
  misc_RNA (1)...(19): siRNA sense strand
ggaacccaaacuauaauuc

SEQ ID NO: 2007223 - RNA, 19 nt, Homo sapiens
  misc_RNA (1)...(19): siRNA sense strand
gaggugggagaucuuugua

SEQ ID NO: 2007224 - RNA, 19 nt, Homo sapiens
  misc_RNA (1)...(19): siRNA sense strand
acacagagagagagagaga

SEQ ID NO: 2007225 - RNA, 19 nt, Homo sapiens
  misc_RNA (1)...(19): siRNA sense strand
cccaggauguacugaauuc

SEQ ID NO: 2007226 - RNA, 19 nt, Homo sapiens
  misc_RNA (1)...(19): siRNA sense strand
agagaggccagcauucaaa

SEQ ID NO: 2007227 - RNA, 19 nt, Homo sapiens
  misc_RNA (1)...(19): siRNA sense strand
agagagagaggccagcauu

SEQ ID NO: 2007228 - RNA, 19 nt, Homo sapiens
  misc_RNA (1)...(19): siRNA sense strand
gugggagaucuuuguauaa

SEQ ID NO: 2007229 - RNA, 19 nt, Homo sapiens
  misc_RNA (1)...(19): siRNA sense strand
gaacccaaacuauaauucc

SEQ ID NO: 2007230 - RNA, 19 nt, Homo sapiens
  misc_RNA (1)...(19): siRNA sense strand
gagagagaggccagcauuc

SEQ ID NO: 2007231 - RNA, 19 nt, Homo sapiens
  misc_RNA (1)...(19): siRNA sense strand
gauucaaagcucagaagug

SEQ ID NO: 2007232 - RNA, 19 nt, Homo sapiens
  misc_RNA (1)...(19): siRNA sense strand
acagagagagagagagaga

SEQ ID NO: 2007233 - RNA, 19 nt, Homo sapiens
  misc_RNA (1)...(19): siRNA sense strand
caggauguacugaauucaa

SEQ ID NO: 2007234 - RNA, 19 nt, Homo sapiens
  misc_RNA (1)...(19): siRNA sense strand
agagagagagagagagaga

SEQ ID NO: 2007235 - RNA, 19 nt, Homo sapiens
  misc_RNA (1)...(19): siRNA sense strand
agagagagagagagagaga

SEQ ID NO: 2007236 - RNA, 19 nt, Homo sapiens
  misc_RNA (1)...(19): siRNA sense strand
agagagagagagagagaga

SEQ ID NO: 2007237 - RNA, 19 nt, Homo sapiens
  misc_RNA (1)...(19): siRNA sense strand
agagagagagagagagaga

SEQ ID NO: 2007238 - RNA, 19 nt, Homo sapiens
  misc_RNA (1)...(19): siRNA sense strand
agagagagagagagagaga

SEQ ID NO: 2007239 - RNA, 19 nt, Homo sapiens
  misc_RNA (1)...(19): siRNA sense strand
agagagagagagagagaga

SEQ ID NO: 2007240 - RNA, 19 nt, Homo sapiens
  misc_RNA (1)...(19): siRNA sense strand
agagagagagagagagaga

SEQ ID NO: 2007241 - RNA, 19 nt, Homo sapiens
  misc_RNA (1)...(19): siRNA sense strand
agagagagagagagagaga

SEQ ID NO: 2007242 - RNA, 19 nt, Homo sapiens
  misc_RNA (1)...(19): siRNA sense strand
agagagagagagagagaga

SEQ ID NO: 2007243 - RNA, 19 nt, Homo sapiens
  misc_RNA (1)...(19): siRNA sense strand
agagagagagagagagaga

SEQ ID NO: 2007244 - RNA, 19 nt, Homo sapiens
  misc_RNA (1)...(19): siRNA sense strand
agagagagagagagagaga

SEQ ID NO: 2007245 - RNA, 19 nt, Homo sapiens
  misc_RNA (1)...(19): siRNA sense strand
acacacagagagagagaga

SEQ ID NO: 2007246 - RNA, 19 nt, Homo sapiens
  misc_RNA (1)...(19): siRNA sense strand
ggacuucuccccaggaugu

SEQ ID NO: 2007247 - RNA, 19 nt, Homo sapiens
  misc_RNA (1)...(19): siRNA sense strand
gggagaucuuuguauaaaa

SEQ ID NO: 2007248 - RNA, 19 nt, Homo sapiens
  misc_RNA (1)...(19): siRNA sense strand
agagagaggccagcauuca

SEQ ID NO: 2007249 - RNA, 19 nt, Homo sapiens
  misc_RNA (1)...(19): siRNA sense strand
acacacacacacacacaga

SEQ ID NO: 2007250 - RNA, 19 nt, Homo sapiens
  misc_RNA (1)...(19): siRNA sense strand
acacacacacagagagaga

SEQ ID NO: 2007251 - RNA, 19 nt, Homo sapiens
  misc_RNA (1)...(19): siRNA sense strand
acacacacacacagagaga

SEQ ID NO: 2007252 - RNA, 19 nt, Homo sapiens
  misc_RNA (1)...(19): siRNA sense strand
acacacacacacacagaga

SEQ ID NO: 2007253 - RNA, 19 nt, Homo sapiens
  misc_RNA (1)...(19): siRNA sense strand
gauguacugaauucaagga

SEQ ID NO: 2007254 - RNA, 19 nt, Homo sapiens
  misc_RNA (1)...(19): siRNA sense strand
gauauauaugcucacauca

SEQ ID NO: 2007255 - RNA, 19 nt, Homo sapiens
  misc_RNA (1)...(19): siRNA sense strand
ugaauucaaggaagcuuuc

SEQ ID NO: 2007256 - RNA, 19 nt, Homo sapiens
  misc_RNA (1)...(19): siRNA sense strand
ucacacacacacacacaca

SEQ ID NO: 2007257 - RNA, 19 nt, Homo sapiens
  misc_RNA (1)...(19): siRNA sense strand
aggauguacugaauucaag

SEQ ID NO: 2007258 - RNA, 19 nt, Homo sapiens
  misc_RNA (1)...(19): siRNA sense strand
gaggccagcauucaaaauu

SEQ ID NO: 2007259 - RNA, 19 nt, Homo sapiens
  misc_RNA (1)...(19): siRNA sense strand
gggcugcggauuucaggua

SEQ ID NO: 2007260 - RNA, 19 nt, Homo sapiens
  misc_RNA (1)...(19): siRNA sense strand
guacuccacugggcauuuu

SEQ ID NO: 2007261 - RNA, 19 nt, Homo sapiens
  misc_RNA (1)...(19): siRNA sense strand
caacuugcgaaccgggaaa

SEQ ID NO: 2007262 - RNA, 19 nt, Homo sapiens
  misc_RNA (1)...(19): siRNA sense strand
ccgcagaucccggcaacuu

SEQ ID NO: 2007263 - RNA, 19 nt, Homo sapiens
  misc_RNA (1)...(19): siRNA sense strand
caccucgggcugcggauuu

SEQ ID NO: 2007264 - RNA, 19 nt, Homo sapiens
  misc_RNA (1)...(19): siRNA sense strand
gguacuccacugggcauuu

SEQ ID NO: 2007265 - RNA, 19 nt, Homo sapiens
  misc_RNA (1)...(19): siRNA sense strand
gaaaugagauuccugaaau

SEQ ID NO: 2007266 - RNA, 19 nt, Homo sapiens
  misc_RNA (1)...(19): siRNA sense strand
uaaccuggcuucacuggaa

SEQ ID NO: 2007267 - RNA, 19 nt, Homo sapiens
  misc_RNA (1)...(19): siRNA sense strand
ggagcccucuuacaucuaa

SEQ ID NO: 2007268 - RNA, 19 nt, Homo sapiens
  misc_RNA (1)...(19): siRNA sense strand
gaacugagagagaaucuuc

SEQ ID NO: 2007269 - RNA, 19 nt, Homo sapiens
  misc_RNA (1)...(19): siRNA sense strand
gcggcucccuccagaaaua

SEQ ID NO: 2007270 - RNA, 19 nt, Homo sapiens
  misc_RNA (1)...(19): siRNA sense strand
gaacuugauuuaggaaaca

SEQ ID NO: 2007271 - RNA, 19 nt, Homo sapiens
  misc_RNA (1)...(19): siRNA sense strand
gaggagaucuaccgcuaug

SEQ ID NO: 2007272 - RNA, 19 nt, Homo sapiens
  misc_RNA (1)...(19): siRNA sense strand
uaaaugacaucucacuaca

SEQ ID NO: 2007273 - RNA, 19 nt, Homo sapiens
  misc_RNA (1)...(19): siRNA sense strand
ggacuuagugauaaugaaa

SEQ ID NO: 2007274 - RNA, 19 nt, Homo sapiens
  misc_RNA (1)...(19): siRNA sense strand
uagaagaacuugauuuagg

SEQ ID NO: 2007275 - RNA, 19 nt, Homo sapiens
  misc_RNA (1)...(19): siRNA sense strand
cuagaugugucucgaaaug

SEQ ID NO: 2007276 - RNA, 19 nt, Homo sapiens
  misc_RNA (1)...(19): siRNA sense strand
agaagaacuugauuuagga

SEQ ID NO: 2007277 - RNA, 19 nt, Homo sapiens
  misc_RNA (1)...(19): siRNA sense strand
agaaauagcaaacuucaug

SEQ ID NO: 2007278 - RNA, 19 nt, Homo sapiens
  misc_RNA (1)...(19): siRNA sense strand
cgaaaugagauuccugaaa

SEQ ID NO: 2007279 - RNA, 19 nt, Homo sapiens
  misc_RNA (1)...(19): siRNA sense strand
gaacuagaugugucucgaa

SEQ ID NO: 2007280 - RNA, 19 nt, Homo sapiens
  misc_RNA (1)...(19): siRNA sense strand
guaaaugacaucucacuac

SEQ ID NO: 2007281 - RNA, 19 nt, Homo sapiens
  misc_RNA (1)...(19): siRNA sense strand
aagcuuggacuuagugaua

SEQ ID NO: 2007282 - RNA, 19 nt, Homo sapiens
  misc_RNA (1)...(19): siRNA sense strand
uuacgaaagcuuggacuua

SEQ ID NO: 2007283 - RNA, 19 nt, Homo sapiens
  misc_RNA (1)...(19): siRNA sense strand
cugacuagguugccagaaa

SEQ ID NO: 2007284 - RNA, 19 nt, Homo sapiens
  misc_RNA (1)...(19): siRNA sense strand
gaagaacuugauuuaggaa

SEQ ID NO: 2007285 - RNA, 19 nt, Homo sapiens
  misc_RNA (1)...(19): siRNA sense strand
aaugacaucucacuacagu

SEQ ID NO: 2007286 - RNA, 19 nt, Homo sapiens
  misc_RNA (1)...(19): siRNA sense strand
ugacuagguugccagaaag

SEQ ID NO: 2007287 - RNA, 19 nt, Homo sapiens
  misc_RNA (1)...(19): siRNA sense strand
uacgaaagcuuggacuuag

SEQ ID NO: 2007288 - RNA, 19 nt, Homo sapiens
  misc_RNA (1)...(19): siRNA sense strand
ccagaaauagcaaacuuca

SEQ ID NO: 2007289 - RNA, 19 nt, Homo sapiens
  misc_RNA (1)...(19): siRNA sense strand
ggaaacccacugacuaggu

SEQ ID NO: 2007290 - RNA, 19 nt, Homo sapiens
  misc_RNA (1)...(19): siRNA sense strand
ugaaauuccagaaagcauu

SEQ ID NO: 2007291 - RNA, 19 nt, Homo sapiens
  misc_RNA (1)...(19): siRNA sense strand
cagcggcucccuccagaaa

SEQ ID NO: 2007292 - RNA, 19 nt, Homo sapiens
  misc_RNA (1)...(19): siRNA sense strand
gcgaagacuagaagaacuu

SEQ ID NO: 2007293 - RNA, 19 nt, Homo sapiens
  misc_RNA (1)...(19): siRNA sense strand
gcggaaacccacugacuag

SEQ ID NO: 2007294 - RNA, 19 nt, Homo sapiens
  misc_RNA (1)...(19): siRNA sense strand
gacuagaagaacuugauuu

SEQ ID NO: 2007295 - RNA, 19 nt, Homo sapiens
  misc_RNA (1)...(19): siRNA sense strand
ugagauuccugaaauucca

SEQ ID NO: 2007296 - RNA, 19 nt, Homo sapiens
  misc_RNA (1)...(19): siRNA sense strand
gaaagcuuggacuuaguga

SEQ ID NO: 2007297 - RNA, 19 nt, Homo sapiens
  misc_RNA (1)...(19): siRNA sense strand
ucacuggaacugagagaga

SEQ ID NO: 2007298 - RNA, 19 nt, Homo sapiens
  misc_RNA (1)...(19): siRNA sense strand
ugacaucucacuacagucu

SEQ ID NO: 2007299 - RNA, 19 nt, Homo sapiens
  misc_RNA (1)...(19): siRNA sense strand
cuccagaaauagcaaacuu

SEQ ID NO: 2007300 - RNA, 19 nt, Homo sapiens
  misc_RNA (1)...(19): siRNA sense strand
aacuagaugugucucgaaa

SEQ ID NO: 2007301 - RNA, 19 nt, Homo sapiens
  misc_RNA (1)...(19): siRNA sense strand
gcgagcugcccgagcaauu

SEQ ID NO: 2007302 - RNA, 19 nt, Homo sapiens
  misc_RNA (1)...(19): siRNA sense strand
cgagcugcccgagcaauuu

SEQ ID NO: 2007303 - RNA, 19 nt, Homo sapiens
  misc_RNA (1)...(19): siRNA sense strand
ucaugcagcugguggaacu

SEQ ID NO: 2007304 - RNA, 19 nt, Homo sapiens
  misc_RNA (1)...(19): siRNA sense strand
cgaaagcuuggacuuagug

SEQ ID NO: 2007305 - RNA, 19 nt, Homo sapiens
  misc_RNA (1)...(19): siRNA sense strand
uuuauaaccuggcuucacu

SEQ ID NO: 2007306 - RNA, 19 nt, Homo sapiens
  misc_RNA (1)...(19): siRNA sense strand
gcuuggacuuagugauaau

SEQ ID NO: 2007307 - RNA, 19 nt, Homo sapiens
  misc_RNA (1)...(19): siRNA sense strand
cagcuagucaaauuacgaa

SEQ ID NO: 2007308 - RNA, 19 nt, Homo sapiens
  misc_RNA (1)...(19): siRNA sense strand
gaagacuagaagaacuuga

SEQ ID NO: 2007309 - RNA, 19 nt, Homo sapiens
  misc_RNA (1)...(19): siRNA sense strand
cacuggaacugagagagaa

SEQ ID NO: 2007310 - RNA, 19 nt, Homo sapiens
  misc_RNA (1)...(19): siRNA sense strand
cuagucaaauuacgaaagc

SEQ ID NO: 2007311 - RNA, 19 nt, Homo sapiens
  misc_RNA (1)...(19): siRNA sense strand
uagguugccagaaagcuuu

SEQ ID NO: 2007312 - RNA, 19 nt, Homo sapiens
  misc_RNA (1)...(19): siRNA sense strand
gcugcgaagacuagaagaa

SEQ ID NO: 2007313 - RNA, 19 nt, Homo sapiens
  misc_RNA (1)...(19): siRNA sense strand
acuacagucucuaccugaa

SEQ ID NO: 2007314 - RNA, 19 nt, Homo sapiens
  misc_RNA (1)...(19): siRNA sense strand
uaucuuccugacucucuua

SEQ ID NO: 2007315 - RNA, 19 nt, Homo sapiens
  misc_RNA (1)...(19): siRNA sense strand
cuacagucucuaccugaaa

SEQ ID NO: 2007316 - RNA, 19 nt, Homo sapiens
  misc_RNA (1)...(19): siRNA sense strand
agaugugucucgaaaugag

SEQ ID NO: 2007317 - RNA, 19 nt, Homo sapiens
  misc_RNA (1)...(19): siRNA sense strand
agaacuugauuuaggaaac

SEQ ID NO: 2007318 - RNA, 19 nt, Homo sapiens
  misc_RNA (1)...(19): siRNA sense strand
caaauuacgaaagcuugga

SEQ ID NO: 2007319 - RNA, 19 nt, Homo sapiens
  misc_RNA (1)...(19): siRNA sense strand
aagcuuuccugaauuacag

SEQ ID NO: 2007320 - RNA, 19 nt, Homo sapiens
  misc_RNA (1)...(19): siRNA sense strand
agacuagaagaacuugauu

SEQ ID NO: 2007321 - RNA, 19 nt, Homo sapiens
  misc_RNA (1)...(19): siRNA sense strand
gcuagucaaauuacgaaag

SEQ ID NO: 2007322 - RNA, 19 nt, Homo sapiens
  misc_RNA (1)...(19): siRNA sense strand
uguaaaugacaucucacua

SEQ ID NO: 2007323 - RNA, 19 nt, Homo sapiens
  misc_RNA (1)...(19): siRNA sense strand
gaaaugagauuccugaaau

SEQ ID NO: 2007324 - RNA, 19 nt, Homo sapiens
  misc_RNA (1)...(19): siRNA sense strand
uaaccuggcuucacuggaa

SEQ ID NO: 2007325 - RNA, 19 nt, Homo sapiens
  misc_RNA (1)...(19): siRNA sense strand
ggagcccucuuacaucuaa

SEQ ID NO: 2007326 - RNA, 19 nt, Homo sapiens
  misc_RNA (1)...(19): siRNA sense strand
gaacugagagagaaucuuc

SEQ ID NO: 2007327 - RNA, 19 nt, Homo sapiens
  misc_RNA (1)...(19): siRNA sense strand
gcggcucccuccagaaaua

SEQ ID NO: 2007328 - RNA, 19 nt, Homo sapiens
  misc_RNA (1)...(19): siRNA sense strand
gaacuugauuuaggaaaca

SEQ ID NO: 2007329 - RNA, 19 nt, Homo sapiens
  misc_RNA (1)...(19): siRNA sense strand
gaggagaucuaccgcuaug

SEQ ID NO: 2007330 - RNA, 19 nt, Homo sapiens
  misc_RNA (1)...(19): siRNA sense strand
uaaaugacaucucacuaca

SEQ ID NO: 2007331 - RNA, 19 nt, Homo sapiens
  misc_RNA (1)...(19): siRNA sense strand
ggacuuagugauaaugaaa

SEQ ID NO: 2007332 - RNA, 19 nt, Homo sapiens
  misc_RNA (1)...(19): siRNA sense strand
uagaagaacuugauuuagg

SEQ ID NO: 2007333 - RNA, 19 nt, Homo sapiens
  misc_RNA (1)...(19): siRNA sense strand
cuagaugugucucgaaaug

SEQ ID NO: 2007334 - RNA, 19 nt, Homo sapiens
  misc_RNA (1)...(19): siRNA sense strand
agaagaacuugauuuagga

SEQ ID NO: 2007335 - RNA, 19 nt, Homo sapiens
  misc_RNA (1)...(19): siRNA sense strand
agaaauagcaaacuucaug

SEQ ID NO: 2007336 - RNA, 19 nt, Homo sapiens
  misc_RNA (1)...(19): siRNA sense strand
cgaaaugagauuccugaaa

SEQ ID NO: 2007337 - RNA, 19 nt, Homo sapiens
  misc_RNA (1)...(19): siRNA sense strand
gaacuagaugugucucgaa

SEQ ID NO: 2007338 - RNA, 19 nt, Homo sapiens
  misc_RNA (1)...(19): siRNA sense strand
guaaaugacaucucacuac

SEQ ID NO: 2007339 - RNA, 19 nt, Homo sapiens
  misc_RNA (1)...(19): siRNA sense strand
aagcuuggacuuagugaua

SEQ ID NO: 2007340 - RNA, 19 nt, Homo sapiens
  misc_RNA (1)...(19): siRNA sense strand
uuacgaaagcuuggacuua

SEQ ID NO: 2007341 - RNA, 19 nt, Homo sapiens
  misc_RNA (1)...(19): siRNA sense strand
cugacuagguugccagaaa

SEQ ID NO: 2007342 - RNA, 19 nt, Homo sapiens
  misc_RNA (1)...(19): siRNA sense strand
gaagaacuugauuuaggaa

SEQ ID NO: 2007343 - RNA, 19 nt, Homo sapiens
  misc_RNA (1)...(19): siRNA sense strand
aaugacaucucacuacagu

SEQ ID NO: 2007344 - RNA, 19 nt, Homo sapiens
  misc_RNA (1)...(19): siRNA sense strand
ugacuagguugccagaaag

SEQ ID NO: 2007345 - RNA, 19 nt, Homo sapiens
  misc_RNA (1)...(19): siRNA sense strand
uacgaaagcuuggacuuag

SEQ ID NO: 2007346 - RNA, 19 nt, Homo sapiens
  misc_RNA (1)...(19): siRNA sense strand
ccagaaauagcaaacuuca

SEQ ID NO: 2007347 - RNA, 19 nt, Homo sapiens
  misc_RNA (1)...(19): siRNA sense strand
ggaaacccacugacuaggu

SEQ ID NO: 2007348 - RNA, 19 nt, Homo sapiens
  misc_RNA (1)...(19): siRNA sense strand
ugaaauuccagaaagcauu

SEQ ID NO: 2007349 - RNA, 19 nt, Homo sapiens
  misc_RNA (1)...(19): siRNA sense strand
cagcggcucccuccagaaa

SEQ ID NO: 2007350 - RNA, 19 nt, Homo sapiens
  misc_RNA (1)...(19): siRNA sense strand
gcgaagacuagaagaacuu

SEQ ID NO: 2007351 - RNA, 19 nt, Homo sapiens
  misc_RNA (1)...(19): siRNA sense strand
gcggaaacccacugacuag

SEQ ID NO: 2007352 - RNA, 19 nt, Homo sapiens
  misc_RNA (1)...(19): siRNA sense strand
gacuagaagaacuugauuu

SEQ ID NO: 2007353 - RNA, 19 nt, Homo sapiens
  misc_RNA (1)...(19): siRNA sense strand
ugagauuccugaaauucca

SEQ ID NO: 2007354 - RNA, 19 nt, Homo sapiens
  misc_RNA (1)...(19): siRNA sense strand
gaaagcuuggacuuaguga

SEQ ID NO: 2007355 - RNA, 19 nt, Homo sapiens
  misc_RNA (1)...(19): siRNA sense strand
ucacuggaacugagagaga

SEQ ID NO: 2007356 - RNA, 19 nt, Homo sapiens
  misc_RNA (1)...(19): siRNA sense strand
ugacaucucacuacagucu

SEQ ID NO: 2007357 - RNA, 19 nt, Homo sapiens
  misc_RNA (1)...(19): siRNA sense strand
cuccagaaauagcaaacuu

SEQ ID NO: 2007358 - RNA, 19 nt, Homo sapiens
  misc_RNA (1)...(19): siRNA sense strand
aacuagaugugucucgaaa

SEQ ID NO: 2007359 - RNA, 19 nt, Homo sapiens
  misc_RNA (1)...(19): siRNA sense strand
gcgagcugcccgagcaauu

SEQ ID NO: 2007360 - RNA, 19 nt, Homo sapiens
  misc_RNA (1)...(19): siRNA sense strand
cgagcugcccgagcaauuu

SEQ ID NO: 2007361 - RNA, 19 nt, Homo sapiens
  misc_RNA (1)...(19): siRNA sense strand
ucaugcagcugguggaacu

SEQ ID NO: 2007362 - RNA, 19 nt, Homo sapiens
  misc_RNA (1)...(19): siRNA sense strand
cgaaagcuuggacuuagug

SEQ ID NO: 2007363 - RNA, 19 nt, Homo sapiens
  misc_RNA (1)...(19): siRNA sense strand
uuuauaaccuggcuucacu

SEQ ID NO: 2007364 - RNA, 19 nt, Homo sapiens
  misc_RNA (1)...(19): siRNA sense strand
gcuuggacuuagugauaau

SEQ ID NO: 2007365 - RNA, 19 nt, Homo sapiens
  misc_RNA (1)...(19): siRNA sense strand
cagcuagucaaauuacgaa

SEQ ID NO: 2007366 - RNA, 19 nt, Homo sapiens
  misc_RNA (1)...(19): siRNA sense strand
gaagacuagaagaacuuga

SEQ ID NO: 2007367 - RNA, 19 nt, Homo sapiens
  misc_RNA (1)...(19): siRNA sense strand
cacuggaacugagagagaa

SEQ ID NO: 2007368 - RNA, 19 nt, Homo sapiens
  misc_RNA (1)...(19): siRNA sense strand
cuagucaaauuacgaaagc

SEQ ID NO: 2007369 - RNA, 19 nt, Homo sapiens
  misc_RNA (1)...(19): siRNA sense strand
uagguugccagaaagcuuu

SEQ ID NO: 2007370 - RNA, 19 nt, Homo sapiens
  misc_RNA (1)...(19): siRNA sense strand
gcugcgaagacuagaagaa

SEQ ID NO: 2007371 - RNA, 19 nt, Homo sapiens
  misc_RNA (1)...(19): siRNA sense strand
acuacagucucuaccugaa

SEQ ID NO: 2007372 - RNA, 19 nt, Homo sapiens
  misc_RNA (1)...(19): siRNA sense strand
uaucuuccugacucucuua

SEQ ID NO: 2007373 - RNA, 19 nt, Homo sapiens
  misc_RNA (1)...(19): siRNA sense strand
cuacagucucuaccugaaa

SEQ ID NO: 2007374 - RNA, 19 nt, Homo sapiens
  misc_RNA (1)...(19): siRNA sense strand
agaugugucucgaaaugag

SEQ ID NO: 2007375 - RNA, 19 nt, Homo sapiens
  misc_RNA (1)...(19): siRNA sense strand
agaacuugauuuaggaaac

SEQ ID NO: 2007376 - RNA, 19 nt, Homo sapiens
  misc_RNA (1)...(19): siRNA sense strand
caaauuacgaaagcuugga

SEQ ID NO: 2007377 - RNA, 19 nt, Homo sapiens
  misc_RNA (1)...(19): siRNA sense strand
aagcuuuccugaauuacag

SEQ ID NO: 2007378 - RNA, 19 nt, Homo sapiens
  misc_RNA (1)...(19): siRNA sense strand
agacuagaagaacuugauu

SEQ ID NO: 2007379 - RNA, 19 nt, Homo sapiens
  misc_RNA (1)...(19): siRNA sense strand
gcuagucaaauuacgaaag

SEQ ID NO: 2007380 - RNA, 19 nt, Homo sapiens
  misc_RNA (1)...(19): siRNA sense strand
uguaaaugacaucucacua

SEQ ID NO: 2007381 - RNA, 19 nt, Homo sapiens
  misc_RNA (1)...(19): siRNA sense strand
guccaggccugcucagaga

SEQ ID NO: 2007382 - RNA, 19 nt, Homo sapiens
  misc_RNA (1)...(19): siRNA sense strand
ggaccacauucuccacagu

SEQ ID NO: 2007383 - RNA, 19 nt, Homo sapiens
  misc_RNA (1)...(19): siRNA sense strand
gaccacauucuccacaguu

SEQ ID NO: 2007384 - RNA, 19 nt, Homo sapiens
  misc_RNA (1)...(19): siRNA sense strand
ccaggccucuguccucaag

SEQ ID NO: 2007385 - RNA, 19 nt, Homo sapiens
  misc_RNA (1)...(19): siRNA sense strand
accacauucuccacaguuu

SEQ ID NO: 2007386 - RNA, 19 nt, Homo sapiens
  misc_RNA (1)...(19): siRNA sense strand
gaagagauguuugcuagua

SEQ ID NO: 2007387 - RNA, 19 nt, Homo sapiens
  misc_RNA (1)...(19): siRNA sense strand
gcuaguagauucacagaaa

SEQ ID NO: 2007388 - RNA, 19 nt, Homo sapiens
  misc_RNA (1)...(19): siRNA sense strand
gacaaucgauccaaucagu

SEQ ID NO: 2007389 - RNA, 19 nt, Homo sapiens
  misc_RNA (1)...(19): siRNA sense strand
gauguuugcuaguagauuc

SEQ ID NO: 2007390 - RNA, 19 nt, Homo sapiens
  misc_RNA (1)...(19): siRNA sense strand
ccagcaauauggacauuau

SEQ ID NO: 2007391 - RNA, 19 nt, Homo sapiens
  misc_RNA (1)...(19): siRNA sense strand
ccgaagcuguuccaaaguu

SEQ ID NO: 2007392 - RNA, 19 nt, Homo sapiens
  misc_RNA (1)...(19): siRNA sense strand
cgaagcuguuccaaaguuu

SEQ ID NO: 2007393 - RNA, 19 nt, Homo sapiens
  misc_RNA (1)...(19): siRNA sense strand
acaaggaguaucaggaaua

SEQ ID NO: 2007394 - RNA, 19 nt, Homo sapiens
  misc_RNA (1)...(19): siRNA sense strand
caacuacccgcaacacaga

SEQ ID NO: 2007395 - RNA, 19 nt, Homo sapiens
  misc_RNA (1)...(19): siRNA sense strand
gacaagaaccuuacuaucc

SEQ ID NO: 2007396 - RNA, 19 nt, Homo sapiens
  misc_RNA (1)...(19): siRNA sense strand
ugacaaggaguaucaggaa

SEQ ID NO: 2007397 - RNA, 19 nt, Homo sapiens
  misc_RNA (1)...(19): siRNA sense strand
caauauggacauuaugguu

SEQ ID NO: 2007398 - RNA, 19 nt, Homo sapiens
  misc_RNA (1)...(19): siRNA sense strand
gacaaggaguaucaggaau

SEQ ID NO: 2007399 - RNA, 19 nt, Homo sapiens
  misc_RNA (1)...(19): siRNA sense strand
caagacaacagacaguuca

SEQ ID NO: 2007400 - RNA, 19 nt, Homo sapiens
  misc_RNA (1)...(19): siRNA sense strand
gcaagacaacagacaguuc

SEQ ID NO: 2007401 - RNA, 19 nt, Homo sapiens
  misc_RNA (1)...(19): siRNA sense strand
caaagaaacagaggcaauc

SEQ ID NO: 2007402 - RNA, 19 nt, Homo sapiens
  misc_RNA (1)...(19): siRNA sense strand
ccaaagaaacagaggcaau

SEQ ID NO: 2007403 - RNA, 19 nt, Homo sapiens
  misc_RNA (1)...(19): siRNA sense strand
acaaccagcggccuccuua

SEQ ID NO: 2007404 - RNA, 19 nt, Homo sapiens
  misc_RNA (1)...(19): siRNA sense strand
ugccgaagcuguuccaaag

SEQ ID NO: 2007405 - RNA, 19 nt, Homo sapiens
  misc_RNA (1)...(19): siRNA sense strand
guugaggaauggaauagca

SEQ ID NO: 2007406 - RNA, 19 nt, Homo sapiens
  misc_RNA (1)...(19): siRNA sense strand
cagacaagaaccuuacuau

SEQ ID NO: 2007407 - RNA, 19 nt, Homo sapiens
  misc_RNA (1)...(19): siRNA sense strand
ggugggaaccaaagaaaca

SEQ ID NO: 2007408 - RNA, 19 nt, Homo sapiens
  misc_RNA (1)...(19): siRNA sense strand
caacacagacaagaaccuu

SEQ ID NO: 2007409 - RNA, 19 nt, Homo sapiens
  misc_RNA (1)...(19): siRNA sense strand
agagauguuugcuaguaga

SEQ ID NO: 2007410 - RNA, 19 nt, Homo sapiens
  misc_RNA (1)...(19): siRNA sense strand
ugagucuccuccaauuguu

SEQ ID NO: 2007411 - RNA, 19 nt, Homo sapiens
  misc_RNA (1)...(19): siRNA sense strand
gcaauauggacauuauggu

SEQ ID NO: 2007412 - RNA, 19 nt, Homo sapiens
  misc_RNA (1)...(19): siRNA sense strand
ugacacugccgaagcuguu

SEQ ID NO: 2007413 - RNA, 19 nt, Homo sapiens
  misc_RNA (1)...(19): siRNA sense strand
gugacaaucgauccaauca

SEQ ID NO: 2007414 - RNA, 19 nt, Homo sapiens
  misc_RNA (1)...(19): siRNA sense strand
aagagauguuugcuaguag

SEQ ID NO: 2007415 - RNA, 19 nt, Homo sapiens
  misc_RNA (1)...(19): siRNA sense strand
agacaagaaccuuacuauc

SEQ ID NO: 2007416 - RNA, 19 nt, Homo sapiens
  misc_RNA (1)...(19): siRNA sense strand
cagaaaaugacaaggagua

SEQ ID NO: 2007417 - RNA, 19 nt, Homo sapiens
  misc_RNA (1)...(19): siRNA sense strand
uccuuacgguuacuacuga

SEQ ID NO: 2007418 - RNA, 19 nt, Homo sapiens
  misc_RNA (1)...(19): siRNA sense strand
caagugacaaucgauccaa

SEQ ID NO: 2007419 - RNA, 19 nt, Homo sapiens
  misc_RNA (1)...(19): siRNA sense strand
acagacaagaaccuuacua

SEQ ID NO: 2007420 - RNA, 19 nt, Homo sapiens
  misc_RNA (1)...(19): siRNA sense strand
uccugagucuccuccaauu

SEQ ID NO: 2007421 - RNA, 19 nt, Homo sapiens
  misc_RNA (1)...(19): siRNA sense strand
gaaaggaaauccggaauua

SEQ ID NO: 2007422 - RNA, 19 nt, Homo sapiens
  misc_RNA (1)...(19): siRNA sense strand
gacauucccuuacaccuua

SEQ ID NO: 2007423 - RNA, 19 nt, Homo sapiens
  misc_RNA (1)...(19): siRNA sense strand
ugaagaaagugaaccagua

SEQ ID NO: 2007424 - RNA, 19 nt, Homo sapiens
  misc_RNA (1)...(19): siRNA sense strand
ugaggccucucuugaauua

SEQ ID NO: 2007425 - RNA, 19 nt, Homo sapiens
  misc_RNA (1)...(19): siRNA sense strand
ggagaggccuuaugguaau

SEQ ID NO: 2007426 - RNA, 19 nt, Homo sapiens
  misc_RNA (1)...(19): siRNA sense strand
caaagaagaacacaaauca

SEQ ID NO: 2007427 - RNA, 19 nt, Homo sapiens
  misc_RNA (1)...(19): siRNA sense strand
gccaucaccuucagaauga

SEQ ID NO: 2007428 - RNA, 19 nt, Homo sapiens
  misc_RNA (1)...(19): siRNA sense strand
ucacagagcaaccuaauga

SEQ ID NO: 2007429 - RNA, 19 nt, Homo sapiens
  misc_RNA (1)...(19): siRNA sense strand
gaaagugaaccaguaguuu

SEQ ID NO: 2007430 - RNA, 19 nt, Homo sapiens
  misc_RNA (1)...(19): siRNA sense strand
caagggugcugagauguuu

SEQ ID NO: 2007431 - RNA, 19 nt, Homo sapiens
  misc_RNA (1)...(19): siRNA sense strand
ugaugaaucugaaaggaaa

SEQ ID NO: 2007432 - RNA, 19 nt, Homo sapiens
  misc_RNA (1)...(19): siRNA sense strand
gugaugaggccaaagcuua

SEQ ID NO: 2007433 - RNA, 19 nt, Homo sapiens
  misc_RNA (1)...(19): siRNA sense strand
acacaagggugcugagaug

SEQ ID NO: 2007434 - RNA, 19 nt, Homo sapiens
  misc_RNA (1)...(19): siRNA sense strand
gaugaugaaucugaaagga

SEQ ID NO: 2007435 - RNA, 19 nt, Homo sapiens
  misc_RNA (1)...(19): siRNA sense strand
gaagaaagugaaccaguag

SEQ ID NO: 2007436 - RNA, 19 nt, Homo sapiens
  misc_RNA (1)...(19): siRNA sense strand
gaggauugcuguggaagug

SEQ ID NO: 2007437 - RNA, 19 nt, Homo sapiens
  misc_RNA (1)...(19): siRNA sense strand
gauacaggccagccaauug

SEQ ID NO: 2007438 - RNA, 19 nt, Homo sapiens
  misc_RNA (1)...(19): siRNA sense strand
guaagaagauugccaucac

SEQ ID NO: 2007439 - RNA, 19 nt, Homo sapiens
  misc_RNA (1)...(19): siRNA sense strand
gaccuucaguuccaaagau

SEQ ID NO: 2007440 - RNA, 19 nt, Homo sapiens
  misc_RNA (1)...(19): siRNA sense strand
gcaaggaaacuagcacaga

SEQ ID NO: 2007441 - RNA, 19 nt, Homo sapiens
  misc_RNA (1)...(19): siRNA sense strand
aagggaagcuucagauaca

SEQ ID NO: 2007442 - RNA, 19 nt, Homo sapiens
  misc_RNA (1)...(19): siRNA sense strand
gaauuaugguauugcuugu

SEQ ID NO: 2007443 - RNA, 19 nt, Homo sapiens
  misc_RNA (1)...(19): siRNA sense strand
uuaucagucucacagaaua

SEQ ID NO: 2007444 - RNA, 19 nt, Homo sapiens
  misc_RNA (1)...(19): siRNA sense strand
gguauugcuuguaugucua

SEQ ID NO: 2007445 - RNA, 19 nt, Homo sapiens
  misc_RNA (1)...(19): siRNA sense strand
cuaaugaggccucucuuga

SEQ ID NO: 2007446 - RNA, 19 nt, Homo sapiens
  misc_RNA (1)...(19): siRNA sense strand
ugucggccauugagaaauu

SEQ ID NO: 2007447 - RNA, 19 nt, Homo sapiens
  misc_RNA (1)...(19): siRNA sense strand
gcagaaaccgauagaaggu

SEQ ID NO: 2007448 - RNA, 19 nt, Homo sapiens
  misc_RNA (1)...(19): siRNA sense strand
aaagcuuacuugaggauug

SEQ ID NO: 2007449 - RNA, 19 nt, Homo sapiens
  misc_RNA (1)...(19): siRNA sense strand
ggauguguauggaccuuca

SEQ ID NO: 2007450 - RNA, 19 nt, Homo sapiens
  misc_RNA (1)...(19): siRNA sense strand
gaugugcaguuaucagucu

SEQ ID NO: 2007451 - RNA, 19 nt, Homo sapiens
  misc_RNA (1)...(19): siRNA sense strand
ugaaagugaugaggccaaa

SEQ ID NO: 2007452 - RNA, 19 nt, Homo sapiens
  misc_RNA (1)...(19): siRNA sense strand
gaagaacacaaaucauguc

SEQ ID NO: 2007453 - RNA, 19 nt, Homo sapiens
  misc_RNA (1)...(19): siRNA sense strand
gccauugguuugcuagaug

SEQ ID NO: 2007454 - RNA, 19 nt, Homo sapiens
  misc_RNA (1)...(19): siRNA sense strand
ggaagugguaagaagauug

SEQ ID NO: 2007455 - RNA, 19 nt, Homo sapiens
  misc_RNA (1)...(19): siRNA sense strand
uaggagacauucccuuaca

SEQ ID NO: 2007456 - RNA, 19 nt, Homo sapiens
  misc_RNA (1)...(19): siRNA sense strand
aaugaggccucucuugaau

SEQ ID NO: 2007457 - RNA, 19 nt, Homo sapiens
  misc_RNA (1)...(19): siRNA sense strand
uaaugaggccucucuugaa

SEQ ID NO: 2007458 - RNA, 19 nt, Homo sapiens
  misc_RNA (1)...(19): siRNA sense strand
aagaagaacacaaaucaug

SEQ ID NO: 2007459 - RNA, 19 nt, Homo sapiens
  misc_RNA (1)...(19): siRNA sense strand
ucuaggagacauucccuua

SEQ ID NO: 2007460 - RNA, 19 nt, Homo sapiens
  misc_RNA (1)...(19): siRNA sense strand
gcacuagcagcgaacgauu

SEQ ID NO: 2007461 - RNA, 19 nt, Homo sapiens
  misc_RNA (1)...(19): siRNA sense strand
aaagugaaccaguaguuug

SEQ ID NO: 2007462 - RNA, 19 nt, Homo sapiens
  misc_RNA (1)...(19): siRNA sense strand
ugaaaggaaauccggaauu

SEQ ID NO: 2007463 - RNA, 19 nt, Homo sapiens
  misc_RNA (1)...(19): siRNA sense strand
caaggccauugguuugcua

SEQ ID NO: 2007464 - RNA, 19 nt, Homo sapiens
  misc_RNA (1)...(19): siRNA sense strand
gaaaggguggagucggaaa

SEQ ID NO: 2007465 - RNA, 19 nt, Homo sapiens
  misc_RNA (1)...(19): siRNA sense strand
uggagaggccuuaugguaa

SEQ ID NO: 2007466 - RNA, 19 nt, Homo sapiens
  misc_RNA (1)...(19): siRNA sense strand
guagacaugccaccaggaa

SEQ ID NO: 2007467 - RNA, 19 nt, Homo sapiens
  misc_RNA (1)...(19): siRNA sense strand
gaaauccggaauuaucaca

SEQ ID NO: 2007468 - RNA, 19 nt, Homo sapiens
  misc_RNA (1)...(19): siRNA sense strand
caaagcagaaaccgauaga

SEQ ID NO: 2007469 - RNA, 19 nt, Homo sapiens
  misc_RNA (1)...(19): siRNA sense strand
cacagaauauuccuauaac

SEQ ID NO: 2007470 - RNA, 19 nt, Homo sapiens
  misc_RNA (1)...(19): siRNA sense strand
ucccuuacaccuuaauaua

SEQ ID NO: 2007471 - RNA, 19 nt, Homo sapiens
  misc_RNA (1)...(19): siRNA sense strand
gagaggccuuaugguaaug

SEQ ID NO: 2007472 - RNA, 19 nt, Homo sapiens
  misc_RNA (1)...(19): siRNA sense strand
gagaugugcaguuaucagu

SEQ ID NO: 2007473 - RNA, 19 nt, Homo sapiens
  misc_RNA (1)...(19): siRNA sense strand
aaggaaauccggaauuauc

SEQ ID NO: 2007474 - RNA, 19 nt, Homo sapiens
  misc_RNA (1)...(19): siRNA sense strand
uaagggaagcuucagauac

SEQ ID NO: 2007475 - RNA, 19 nt, Homo sapiens
  misc_RNA (1)...(19): siRNA sense strand
gaaguucuaggagacauuc

SEQ ID NO: 2007476 - RNA, 19 nt, Homo sapiens
  misc_RNA (1)...(19): siRNA sense strand
gaaauuguugaggcaggua

SEQ ID NO: 2007477 - RNA, 19 nt, Homo sapiens
  misc_RNA (1)...(19): siRNA sense strand
agaaagugaaccaguaguu

SEQ ID NO: 2007478 - RNA, 19 nt, Homo sapiens
  misc_RNA (1)...(19): siRNA sense strand
acaaagaagaacacaaauc

SEQ ID NO: 2007479 - RNA, 19 nt, Homo sapiens
  misc_RNA (1)...(19): siRNA sense strand
gguaagaagauugccauca

SEQ ID NO: 2007480 - RNA, 19 nt, Homo sapiens
  misc_RNA (1)...(19): siRNA sense strand
uaauauaagggaagcuuca

SEQ ID NO: 2007481 - RNA, 19 nt, Homo sapiens
  misc_RNA (1)...(19): siRNA sense strand
cccuuacaccuuaauauaa

SEQ ID NO: 2007482 - RNA, 19 nt, Homo sapiens
  misc_RNA (1)...(19): siRNA sense strand
ggagugagacccuaaaaca

SEQ ID NO: 2007483 - RNA, 19 nt, Homo sapiens
  misc_RNA (1)...(19): siRNA sense strand
uuggagaggccuuauggua

SEQ ID NO: 2007484 - RNA, 19 nt, Homo sapiens
  misc_RNA (1)...(19): siRNA sense strand
ggccauugguuugcuagau

SEQ ID NO: 2007485 - RNA, 19 nt, Homo sapiens
  misc_RNA (1)...(19): siRNA sense strand
agaagaacacaaaucaugu

SEQ ID NO: 2007486 - RNA, 19 nt, Homo sapiens
  misc_RNA (1)...(19): siRNA sense strand
aaaccgauagaagguguua

SEQ ID NO: 2007487 - RNA, 19 nt, Homo sapiens
  misc_RNA (1)...(19): siRNA sense strand
aauccggaauuaucacaga

SEQ ID NO: 2007488 - RNA, 19 nt, Homo sapiens
  misc_RNA (1)...(19): siRNA sense strand
ccauugguuugcuagaugu

SEQ ID NO: 2007489 - RNA, 19 nt, Homo sapiens
  misc_RNA (1)...(19): siRNA sense strand
gaagugguaagaagauugc

SEQ ID NO: 2007490 - RNA, 19 nt, Homo sapiens
  misc_RNA (1)...(19): siRNA sense strand
cuggagaugugcaguuauc

SEQ ID NO: 2007491 - RNA, 19 nt, Homo sapiens
  misc_RNA (1)...(19): siRNA sense strand
ggaccuucaguuccaaaga

SEQ ID NO: 2007492 - RNA, 19 nt, Homo sapiens
  misc_RNA (1)...(19): siRNA sense strand
ugcuagauguggaugugua

SEQ ID NO: 2007493 - RNA, 19 nt, Homo sapiens
  misc_RNA (1)...(19): siRNA sense strand
auaagggaagcuucagaua

SEQ ID NO: 2007494 - RNA, 19 nt, Homo sapiens
  misc_RNA (1)...(19): siRNA sense strand
cagaauauuccuauaacag

SEQ ID NO: 2007495 - RNA, 19 nt, Homo sapiens
  misc_RNA (1)...(19): siRNA sense strand
aggccucucuugaauuaug

SEQ ID NO: 2007496 - RNA, 19 nt, Homo sapiens
  misc_RNA (1)...(19): siRNA sense strand
agacauucccuuacaccuu

SEQ ID NO: 2007497 - RNA, 19 nt, Homo sapiens
  misc_RNA (1)...(19): siRNA sense strand
ucucacagaauauuccuau

SEQ ID NO: 2007498 - RNA, 19 nt, Homo sapiens
  misc_RNA (1)...(19): siRNA sense strand
cccgaggacuuccaaagca

SEQ ID NO: 2007499 - RNA, 19 nt, Homo sapiens
  misc_RNA (1)...(19): siRNA sense strand
guuaucagucucacagaau

SEQ ID NO: 2007500 - RNA, 19 nt, Homo sapiens
  misc_RNA (1)...(19): siRNA sense strand
aagcagaaaccgauagaag

SEQ ID NO: 2007501 - RNA, 19 nt, Homo sapiens
  misc_RNA (1)...(19): siRNA sense strand
guaguuuggagaggccuua

SEQ ID NO: 2007502 - RNA, 19 nt, Homo sapiens
  misc_RNA (1)...(19): siRNA sense strand
uaucacagagcaaccuaau

SEQ ID NO: 2007503 - RNA, 19 nt, Homo sapiens
  misc_RNA (1)...(19): siRNA sense strand
uggaagugguaagaagauu

SEQ ID NO: 2007504 - RNA, 19 nt, Homo sapiens
  misc_RNA (1)...(19): siRNA sense strand
uauaagggaagcuucagau

SEQ ID NO: 2007505 - RNA, 19 nt, Homo sapiens
  misc_RNA (1)...(19): siRNA sense strand
cccaggacaucgcauugau

SEQ ID NO: 2007506 - RNA, 19 nt, Homo sapiens
  misc_RNA (1)...(19): siRNA sense strand
ccuaaugaggccucucuug

SEQ ID NO: 2007507 - RNA, 19 nt, Homo sapiens
  misc_RNA (1)...(19): siRNA sense strand
ccaaagcagaaaccgauag

SEQ ID NO: 2007508 - RNA, 19 nt, Homo sapiens
  misc_RNA (1)...(19): siRNA sense strand
gugcugauggugcaaggaa

SEQ ID NO: 2007509 - RNA, 19 nt, Homo sapiens
  misc_RNA (1)...(19): siRNA sense strand
acaagggugcugagauguu

SEQ ID NO: 2007510 - RNA, 19 nt, Homo sapiens
  misc_RNA (1)...(19): siRNA sense strand
gggucaacuggacuacuua

SEQ ID NO: 2007511 - RNA, 19 nt, Homo sapiens
  misc_RNA (1)...(19): siRNA sense strand
ugguauugcuuguaugucu

SEQ ID NO: 2007512 - RNA, 19 nt, Homo sapiens
  misc_RNA (1)...(19): siRNA sense strand
aaaggaaauccggaauuau

SEQ ID NO: 2007513 - RNA, 19 nt, Homo sapiens
  misc_RNA (1)...(19): siRNA sense strand
gauggugcaaggaaacuag

SEQ ID NO: 2007514 - RNA, 19 nt, Homo sapiens
  misc_RNA (1)...(19): siRNA sense strand
aguuaucagucucacagaa

SEQ ID NO: 2007515 - RNA, 19 nt, Homo sapiens
  misc_RNA (1)...(19): siRNA sense strand
ggggucaacuggacuacuu

SEQ ID NO: 2007516 - RNA, 19 nt, Homo sapiens
  misc_RNA (1)...(19): siRNA sense strand
gcagguagauuggggucaa

SEQ ID NO: 2007517 - RNA, 19 nt, Homo sapiens
  misc_RNA (1)...(19): siRNA sense strand
gaggacuuccaaagcagaa

SEQ ID NO: 2007518 - RNA, 19 nt, Homo sapiens
  misc_RNA (1)...(19): siRNA sense strand
guguauggaccuucaguuc

SEQ ID NO: 2007519 - RNA, 19 nt, Homo sapiens
  misc_RNA (1)...(19): siRNA sense strand
ggccauugagaaauuguug

SEQ ID NO: 2007520 - RNA, 19 nt, Homo sapiens
  misc_RNA (1)...(19): siRNA sense strand
ugccaucaccuucagaaug

SEQ ID NO: 2007521 - RNA, 19 nt, Homo sapiens
  misc_RNA (1)...(19): siRNA sense strand
gcagagaccuugacucguu

SEQ ID NO: 2007522 - RNA, 19 nt, Homo sapiens
  misc_RNA (1)...(19): siRNA sense strand
ggaauaaccuucaucaagu

SEQ ID NO: 2007523 - RNA, 19 nt, Homo sapiens
  misc_RNA (1)...(19): siRNA sense strand
gcacaaggcgaccacuuua

SEQ ID NO: 2007524 - RNA, 19 nt, Homo sapiens
  misc_RNA (1)...(19): siRNA sense strand
gaauaaccuucaucaaguu

SEQ ID NO: 2007525 - RNA, 19 nt, Homo sapiens
  misc_RNA (1)...(19): siRNA sense strand
uaacuucgaugacaccauu

SEQ ID NO: 2007526 - RNA, 19 nt, Homo sapiens
  misc_RNA (1)...(19): siRNA sense strand
ggaaugaccugggagacaa

SEQ ID NO: 2007527 - RNA, 19 nt, Homo sapiens
  misc_RNA (1)...(19): siRNA sense strand
gaaaauaacuucgaugaca

SEQ ID NO: 2007528 - RNA, 19 nt, Homo sapiens
  misc_RNA (1)...(19): siRNA sense strand
ccaagaagcugugaaguac

SEQ ID NO: 2007529 - RNA, 19 nt, Homo sapiens
  misc_RNA (1)...(19): siRNA sense strand
gccaagaagcugugaagua

SEQ ID NO: 2007530 - RNA, 19 nt, Homo sapiens
  misc_RNA (1)...(19): siRNA sense strand
cggaauaucugcagcaagu

SEQ ID NO: 2007531 - RNA, 19 nt, Homo sapiens
  misc_RNA (1)...(19): siRNA sense strand
ggaagaugccaaagucuau

SEQ ID NO: 2007532 - RNA, 19 nt, Homo sapiens
  misc_RNA (1)...(19): siRNA sense strand
caaagucuauguggcuaaa

SEQ ID NO: 2007533 - RNA, 19 nt, Homo sapiens
  misc_RNA (1)...(19): siRNA sense strand
gaaagucagugagcacagu

SEQ ID NO: 2007534 - RNA, 19 nt, Homo sapiens
  misc_RNA (1)...(19): siRNA sense strand
cagagaccuugacucguua

SEQ ID NO: 2007535 - RNA, 19 nt, Homo sapiens
  misc_RNA (1)...(19): siRNA sense strand
gaacauuccgaaacuguca

SEQ ID NO: 2007536 - RNA, 19 nt, Homo sapiens
  misc_RNA (1)...(19): siRNA sense strand
cauggaagaugccaaaguc

SEQ ID NO: 2007537 - RNA, 19 nt, Homo sapiens
  misc_RNA (1)...(19): siRNA sense strand
gaauaucugcagcaaguau

SEQ ID NO: 2007538 - RNA, 19 nt, Homo sapiens
  misc_RNA (1)...(19): siRNA sense strand
gcucucagcaagcaacuuu

SEQ ID NO: 2007539 - RNA, 19 nt, Homo sapiens
  misc_RNA (1)...(19): siRNA sense strand
gaacgaggagccagugaca

SEQ ID NO: 2007540 - RNA, 19 nt, Homo sapiens
  misc_RNA (1)...(19): siRNA sense strand
ggucaagaucgccgaagua

SEQ ID NO: 2007541 - RNA, 19 nt, Homo sapiens
  misc_RNA (1)...(19): siRNA sense strand
caagaucgccgaaguagac

SEQ ID NO: 2007542 - RNA, 19 nt, Homo sapiens
  misc_RNA (1)...(19): siRNA sense strand
guacacagcacuaugaacu

SEQ ID NO: 2007543 - RNA, 19 nt, Homo sapiens
  misc_RNA (1)...(19): siRNA sense strand
caccauugcagaaggaaua

SEQ ID NO: 2007544 - RNA, 19 nt, Homo sapiens
  misc_RNA (1)...(19): siRNA sense strand
gcucugggccuugaacauu

SEQ ID NO: 2007545 - RNA, 19 nt, Homo sapiens
  misc_RNA (1)...(19): siRNA sense strand
uuccgaaacugucaagauu

SEQ ID NO: 2007546 - RNA, 19 nt, Homo sapiens
  misc_RNA (1)...(19): siRNA sense strand
caaauacaacagcauggaa

SEQ ID NO: 2007547 - RNA, 19 nt, Homo sapiens
  misc_RNA (1)...(19): siRNA sense strand
gagggaagaaagucaguga

SEQ ID NO: 2007548 - RNA, 19 nt, Homo sapiens
  misc_RNA (1)...(19): siRNA sense strand
ugacaagggcacuguguug

SEQ ID NO: 2007549 - RNA, 19 nt, Homo sapiens
  misc_RNA (1)...(19): siRNA sense strand
gaggauaccccaccuuaaa

SEQ ID NO: 2007550 - RNA, 19 nt, Homo sapiens
  misc_RNA (1)...(19): siRNA sense strand
ugacaccauugcagaagga

SEQ ID NO: 2007551 - RNA, 19 nt, Homo sapiens
  misc_RNA (1)...(19): siRNA sense strand
ucaagcaagggcuguauga

SEQ ID NO: 2007552 - RNA, 19 nt, Homo sapiens
  misc_RNA (1)...(19): siRNA sense strand
uggagucacugagggagua

SEQ ID NO: 2007553 - RNA, 19 nt, Homo sapiens
  misc_RNA (1)...(19): siRNA sense strand
ccgaaacugucaagauugg

SEQ ID NO: 2007554 - RNA, 19 nt, Homo sapiens
  misc_RNA (1)...(19): siRNA sense strand
cagcaaguauucgguacga

SEQ ID NO: 2007555 - RNA, 19 nt, Homo sapiens
  misc_RNA (1)...(19): siRNA sense strand
gaagaugccaaagucuaug

SEQ ID NO: 2007556 - RNA, 19 nt, Homo sapiens
  misc_RNA (1)...(19): siRNA sense strand
caaggcgaccacuuuauca

SEQ ID NO: 2007557 - RNA, 19 nt, Homo sapiens
  misc_RNA (1)...(19): siRNA sense strand
ugucaagauuggcaagguu

SEQ ID NO: 2007558 - RNA, 19 nt, Homo sapiens
  misc_RNA (1)...(19): siRNA sense strand
gaaugaccugggagacaaa

SEQ ID NO: 2007559 - RNA, 19 nt, Homo sapiens
  misc_RNA (1)...(19): siRNA sense strand
gaacucugcuccggaaacc

SEQ ID NO: 2007560 - RNA, 19 nt, Homo sapiens
  misc_RNA (1)...(19): siRNA sense strand
aggaauaaccuucaucaag

SEQ ID NO: 2007561 - RNA, 19 nt, Homo sapiens
  misc_RNA (1)...(19): siRNA sense strand
aaagguggaucaguacaag

SEQ ID NO: 2007562 - RNA, 19 nt, Homo sapiens
  misc_RNA (1)...(19): siRNA sense strand
uggaagaugccaaagucua

SEQ ID NO: 2007563 - RNA, 19 nt, Homo sapiens
  misc_RNA (1)...(19): siRNA sense strand
aagaagcugugaaguacca

SEQ ID NO: 2007564 - RNA, 19 nt, Homo sapiens
  misc_RNA (1)...(19): siRNA sense strand
ggaauaucugcagcaagua

SEQ ID NO: 2007565 - RNA, 19 nt, Homo sapiens
  misc_RNA (1)...(19): siRNA sense strand
gcuccaugguguggucauu

SEQ ID NO: 2007566 - RNA, 19 nt, Homo sapiens
  misc_RNA (1)...(19): siRNA sense strand
acacagcacuaugaacucu

SEQ ID NO: 2007567 - RNA, 19 nt, Homo sapiens
  misc_RNA (1)...(19): siRNA sense strand
gugguguggucacugcaaa

SEQ ID NO: 2007568 - RNA, 19 nt, Homo sapiens
  misc_RNA (1)...(19): siRNA sense strand
caagggaaagcgggauuug

SEQ ID NO: 2007569 - RNA, 19 nt, Homo sapiens
  misc_RNA (1)...(19): siRNA sense strand
gcacugcugaacggaauau

SEQ ID NO: 2007570 - RNA, 19 nt, Homo sapiens
  misc_RNA (1)...(19): siRNA sense strand
gggucaagaucgccgaagu

SEQ ID NO: 2007571 - RNA, 19 nt, Homo sapiens
  misc_RNA (1)...(19): siRNA sense strand
caugguguggucauuguaa

SEQ ID NO: 2007572 - RNA, 19 nt, Homo sapiens
  misc_RNA (1)...(19): siRNA sense strand
uggcaagguugauuguaca

SEQ ID NO: 2007573 - RNA, 19 nt, Homo sapiens
  misc_RNA (1)...(19): siRNA sense strand
aaagcgggauuuggaguca

SEQ ID NO: 2007574 - RNA, 19 nt, Homo sapiens
  misc_RNA (1)...(19): siRNA sense strand
ccaaagucuauguggcuaa

SEQ ID NO: 2007575 - RNA, 19 nt, Homo sapiens
  misc_RNA (1)...(19): siRNA sense strand
gcgaggauaccccaccuua

SEQ ID NO: 2007576 - RNA, 19 nt, Homo sapiens
  misc_RNA (1)...(19): siRNA sense strand
acaaggcgaccacuuuauc

SEQ ID NO: 2007577 - RNA, 19 nt, Homo sapiens
  misc_RNA (1)...(19): siRNA sense strand
ucucagcaagcaacuuuga

SEQ ID NO: 2007578 - RNA, 19 nt, Homo sapiens
  misc_RNA (1)...(19): siRNA sense strand
ugcacaaggcgaccacuuu

SEQ ID NO: 2007579 - RNA, 19 nt, Homo sapiens
  misc_RNA (1)...(19): siRNA sense strand
cgaugacaccauugcagaa

SEQ ID NO: 2007580 - RNA, 19 nt, Homo sapiens
  misc_RNA (1)...(19): siRNA sense strand
caacuuugagcugcacguu

SEQ ID NO: 2007581 - RNA, 19 nt, Homo sapiens
  misc_RNA (1)...(19): siRNA sense strand
cugcacugcugaacggaau

SEQ ID NO: 2007582 - RNA, 19 nt, Homo sapiens
  misc_RNA (1)...(19): siRNA sense strand
gaugacaccauugcagaag

SEQ ID NO: 2007583 - RNA, 19 nt, Homo sapiens
  misc_RNA (1)...(19): siRNA sense strand
gauuguacacagcacuaug

SEQ ID NO: 2007584 - RNA, 19 nt, Homo sapiens
  misc_RNA (1)...(19): siRNA sense strand
ccuugaacauuccgaaacu

SEQ ID NO: 2007585 - RNA, 19 nt, Homo sapiens
  misc_RNA (1)...(19): siRNA sense strand
gcagagaccuugacucguu

SEQ ID NO: 2007586 - RNA, 19 nt, Homo sapiens
  misc_RNA (1)...(19): siRNA sense strand
ggaauaaccuucaucaagu

SEQ ID NO: 2007587 - RNA, 19 nt, Homo sapiens
  misc_RNA (1)...(19): siRNA sense strand
gcacaaggcgaccacuuua

SEQ ID NO: 2007588 - RNA, 19 nt, Homo sapiens
  misc_RNA (1)...(19): siRNA sense strand
gaauaaccuucaucaaguu

SEQ ID NO: 2007589 - RNA, 19 nt, Homo sapiens
  misc_RNA (1)...(19): siRNA sense strand
uaacuucgaugacaccauu

SEQ ID NO: 2007590 - RNA, 19 nt, Homo sapiens
  misc_RNA (1)...(19): siRNA sense strand
gaaaauaacuucgaugaca

SEQ ID NO: 2007591 - RNA, 19 nt, Homo sapiens
  misc_RNA (1)...(19): siRNA sense strand
ccaagaagcugugaaguac

SEQ ID NO: 2007592 - RNA, 19 nt, Homo sapiens
  misc_RNA (1)...(19): siRNA sense strand
gccaagaagcugugaagua

SEQ ID NO: 2007593 - RNA, 19 nt, Homo sapiens
  misc_RNA (1)...(19): siRNA sense strand
cggaauaucugcagcaagu

SEQ ID NO: 2007594 - RNA, 19 nt, Homo sapiens
  misc_RNA (1)...(19): siRNA sense strand
caaagucuauguggcuaaa

SEQ ID NO: 2007595 - RNA, 19 nt, Homo sapiens
  misc_RNA (1)...(19): siRNA sense strand
ggaagaugccaaagucuau

SEQ ID NO: 2007596 - RNA, 19 nt, Homo sapiens
  misc_RNA (1)...(19): siRNA sense strand
gaaagucagugagcacagu

SEQ ID NO: 2007597 - RNA, 19 nt, Homo sapiens
  misc_RNA (1)...(19): siRNA sense strand
cagagaccuugacucguua

SEQ ID NO: 2007598 - RNA, 19 nt, Homo sapiens
  misc_RNA (1)...(19): siRNA sense strand
gaacauuccgaaacuguca

SEQ ID NO: 2007599 - RNA, 19 nt, Homo sapiens
  misc_RNA (1)...(19): siRNA sense strand
gaauaucugcagcaaguau

SEQ ID NO: 2007600 - RNA, 19 nt, Homo sapiens
  misc_RNA (1)...(19): siRNA sense strand
gcucucagcaagcaacuuu

SEQ ID NO: 2007601 - RNA, 19 nt, Homo sapiens
  misc_RNA (1)...(19): siRNA sense strand
gaacgaggagccagugaca

SEQ ID NO: 2007602 - RNA, 19 nt, Homo sapiens
  misc_RNA (1)...(19): siRNA sense strand
ggucaagaucgccgaagua

SEQ ID NO: 2007603 - RNA, 19 nt, Homo sapiens
  misc_RNA (1)...(19): siRNA sense strand
caagaucgccgaaguagac

SEQ ID NO: 2007604 - RNA, 19 nt, Homo sapiens
  misc_RNA (1)...(19): siRNA sense strand
guacacagcacuaugaacu

SEQ ID NO: 2007605 - RNA, 19 nt, Homo sapiens
  misc_RNA (1)...(19): siRNA sense strand
caccauugcagaaggaaua

SEQ ID NO: 2007606 - RNA, 19 nt, Homo sapiens
  misc_RNA (1)...(19): siRNA sense strand
gcucugggccuugaacauu

SEQ ID NO: 2007607 - RNA, 19 nt, Homo sapiens
  misc_RNA (1)...(19): siRNA sense strand
uuccgaaacugucaagauu

SEQ ID NO: 2007608 - RNA, 19 nt, Homo sapiens
  misc_RNA (1)...(19): siRNA sense strand
gagggaagaaagucaguga

SEQ ID NO: 2007609 - RNA, 19 nt, Homo sapiens
  misc_RNA (1)...(19): siRNA sense strand
ugacaagggcacuguguug

SEQ ID NO: 2007610 - RNA, 19 nt, Homo sapiens
  misc_RNA (1)...(19): siRNA sense strand
ugacaccauugcagaagga

SEQ ID NO: 2007611 - RNA, 19 nt, Homo sapiens
  misc_RNA (1)...(19): siRNA sense strand
gaggauaccccaccuuaaa

SEQ ID NO: 2007612 - RNA, 19 nt, Homo sapiens
  misc_RNA (1)...(19): siRNA sense strand
ucaagcaagggcuguauga

SEQ ID NO: 2007613 - RNA, 19 nt, Homo sapiens
  misc_RNA (1)...(19): siRNA sense strand
uggagucacugagggagua

SEQ ID NO: 2007614 - RNA, 19 nt, Homo sapiens
  misc_RNA (1)...(19): siRNA sense strand
ccgaaacugucaagauugg

SEQ ID NO: 2007615 - RNA, 19 nt, Homo sapiens
  misc_RNA (1)...(19): siRNA sense strand
gaagaugccaaagucuaug

SEQ ID NO: 2007616 - RNA, 19 nt, Homo sapiens
  misc_RNA (1)...(19): siRNA sense strand
cagcaaguauucgguacga

SEQ ID NO: 2007617 - RNA, 19 nt, Homo sapiens
  misc_RNA (1)...(19): siRNA sense strand
caaggcgaccacuuuauca

SEQ ID NO: 2007618 - RNA, 19 nt, Homo sapiens
  misc_RNA (1)...(19): siRNA sense strand
ugucaagauuggcaagguu

SEQ ID NO: 2007619 - RNA, 19 nt, Homo sapiens
  misc_RNA (1)...(19): siRNA sense strand
gaacucugcuccggaaacc

SEQ ID NO: 2007620 - RNA, 19 nt, Homo sapiens
  misc_RNA (1)...(19): siRNA sense strand
aggaauaaccuucaucaag

SEQ ID NO: 2007621 - RNA, 19 nt, Homo sapiens
  misc_RNA (1)...(19): siRNA sense strand
aaagguggaucaguacaag

SEQ ID NO: 2007622 - RNA, 19 nt, Homo sapiens
  misc_RNA (1)...(19): siRNA sense strand
aagaagcugugaaguacca

SEQ ID NO: 2007623 - RNA, 19 nt, Homo sapiens
  misc_RNA (1)...(19): siRNA sense strand
ggaauaucugcagcaagua

SEQ ID NO: 2007624 - RNA, 19 nt, Homo sapiens
  misc_RNA (1)...(19): siRNA sense strand
gcuccaugguguggucauu

SEQ ID NO: 2007625 - RNA, 19 nt, Homo sapiens
  misc_RNA (1)...(19): siRNA sense strand
acacagcacuaugaacucu

SEQ ID NO: 2007626 - RNA, 19 nt, Homo sapiens
  misc_RNA (1)...(19): siRNA sense strand
gugguguggucacugcaaa

SEQ ID NO: 2007627 - RNA, 19 nt, Homo sapiens
  misc_RNA (1)...(19): siRNA sense strand
caagggaaagcgggauuug

SEQ ID NO: 2007628 - RNA, 19 nt, Homo sapiens
  misc_RNA (1)...(19): siRNA sense strand
gcacugcugaacggaauau

SEQ ID NO: 2007629 - RNA, 19 nt, Homo sapiens
  misc_RNA (1)...(19): siRNA sense strand
gggucaagaucgccgaagu

SEQ ID NO: 2007630 - RNA, 19 nt, Homo sapiens
  misc_RNA (1)...(19): siRNA sense strand
caugguguggucauuguaa

SEQ ID NO: 2007631 - RNA, 19 nt, Homo sapiens
  misc_RNA (1)...(19): siRNA sense strand
uggcaagguugauuguaca

SEQ ID NO: 2007632 - RNA, 19 nt, Homo sapiens
  misc_RNA (1)...(19): siRNA sense strand
aaagcgggauuuggaguca

SEQ ID NO: 2007633 - RNA, 19 nt, Homo sapiens
  misc_RNA (1)...(19): siRNA sense strand
gcgaggauaccccaccuua

SEQ ID NO: 2007634 - RNA, 19 nt, Homo sapiens
  misc_RNA (1)...(19): siRNA sense strand
ccaaagucuauguggcuaa

SEQ ID NO: 2007635 - RNA, 19 nt, Homo sapiens
  misc_RNA (1)...(19): siRNA sense strand
acaaggcgaccacuuuauc

SEQ ID NO: 2007636 - RNA, 19 nt, Homo sapiens
  misc_RNA (1)...(19): siRNA sense strand
ucucagcaagcaacuuuga

SEQ ID NO: 2007637 - RNA, 19 nt, Homo sapiens
  misc_RNA (1)...(19): siRNA sense strand
ugcacaaggcgaccacuuu

SEQ ID NO: 2007638 - RNA, 19 nt, Homo sapiens
  misc_RNA (1)...(19): siRNA sense strand
cgaugacaccauugcagaa

SEQ ID NO: 2007639 - RNA, 19 nt, Homo sapiens
  misc_RNA (1)...(19): siRNA sense strand
caacuuugagcugcacguu

SEQ ID NO: 2007640 - RNA, 19 nt, Homo sapiens
  misc_RNA (1)...(19): siRNA sense strand
cugcacugcugaacggaau

SEQ ID NO: 2007641 - RNA, 19 nt, Homo sapiens
  misc_RNA (1)...(19): siRNA sense strand
gaugacaccauugcagaag

SEQ ID NO: 2007642 - RNA, 19 nt, Homo sapiens
  misc_RNA (1)...(19): siRNA sense strand
gauuguacacagcacuaug

SEQ ID NO: 2007643 - RNA, 19 nt, Homo sapiens
  misc_RNA (1)...(19): siRNA sense strand
ccuugaacauuccgaaacu

SEQ ID NO: 2007644 - RNA, 19 nt, Homo sapiens
  misc_RNA (1)...(19): siRNA sense strand
ccagccagcuaacaaguga

SEQ ID NO: 2007645 - RNA, 19 nt, Homo sapiens
  misc_RNA (1)...(19): siRNA sense strand
ggaaaacaagccugucuuu

SEQ ID NO: 2007646 - RNA, 19 nt, Homo sapiens
  misc_RNA (1)...(19): siRNA sense strand
ugaaggcgaagcacccaaa

SEQ ID NO: 2007647 - RNA, 19 nt, Homo sapiens
  misc_RNA (1)...(19): siRNA sense strand
gaaaacaagccugucuuug

SEQ ID NO: 2007648 - RNA, 19 nt, Homo sapiens
  misc_RNA (1)...(19): siRNA sense strand
ggaagaaacugcaggagaa

SEQ ID NO: 2007649 - RNA, 19 nt, Homo sapiens
  misc_RNA (1)...(19): siRNA sense strand
uggaagagcuuaaggaaau

SEQ ID NO: 2007650 - RNA, 19 nt, Homo sapiens
  misc_RNA (1)...(19): siRNA sense strand
ggaagagcuuaaggaaaua

SEQ ID NO: 2007651 - RNA, 19 nt, Homo sapiens
  misc_RNA (1)...(19): siRNA sense strand
gauaaaggcauguggaaga

SEQ ID NO: 2007652 - RNA, 19 nt, Homo sapiens
  misc_RNA (1)...(19): siRNA sense strand
gagcuuaaggaaauagaua

SEQ ID NO: 2007653 - RNA, 19 nt, Homo sapiens
  misc_RNA (1)...(19): siRNA sense strand
ccacagacaccuuggaaga

SEQ ID NO: 2007654 - RNA, 19 nt, Homo sapiens
  misc_RNA (1)...(19): siRNA sense strand
uagcgcgacuccauucaaa

SEQ ID NO: 2007655 - RNA, 19 nt, Homo sapiens
  misc_RNA (1)...(19): siRNA sense strand
gagcuuagcgcgacuccau

SEQ ID NO: 2007656 - RNA, 19 nt, Homo sapiens
  misc_RNA (1)...(19): siRNA sense strand
gggagagaauacccagguu

SEQ ID NO: 2007657 - RNA, 19 nt, Homo sapiens
  misc_RNA (1)...(19): siRNA sense strand
ucaguggccugucguugga

SEQ ID NO: 2007658 - RNA, 19 nt, Homo sapiens
  misc_RNA (1)...(19): siRNA sense strand
auaaaggcauguggaagaa

SEQ ID NO: 2007659 - RNA, 19 nt, Homo sapiens
  misc_RNA (1)...(19): siRNA sense strand
ucagauguacgagagcuua

SEQ ID NO: 2007660 - RNA, 19 nt, Homo sapiens
  misc_RNA (1)...(19): siRNA sense strand
ucaaacuacuacaaacaca

SEQ ID NO: 2007661 - RNA, 19 nt, Homo sapiens
  misc_RNA (1)...(19): siRNA sense strand
ccauucaaacuacuacaaa

SEQ ID NO: 2007662 - RNA, 19 nt, Homo sapiens
  misc_RNA (1)...(19): siRNA sense strand
gcgacuccauucaaacuac

SEQ ID NO: 2007663 - RNA, 19 nt, Homo sapiens
  misc_RNA (1)...(19): siRNA sense strand
gccugucguuggaagagua

SEQ ID NO: 2007664 - RNA, 19 nt, Homo sapiens
  misc_RNA (1)...(19): siRNA sense strand
gcggguagcacaggccuuu

SEQ ID NO: 2007665 - RNA, 19 nt, Homo sapiens
  misc_RNA (1)...(19): siRNA sense strand
caaacuacuacaaacacaa

SEQ ID NO: 2007666 - RNA, 19 nt, Homo sapiens
  misc_RNA (1)...(19): siRNA sense strand
uagauaaaggcauguggaa

SEQ ID NO: 2007667 - RNA, 19 nt, Homo sapiens
  misc_RNA (1)...(19): siRNA sense strand
gaagaaacugcaggagaag

SEQ ID NO: 2007668 - RNA, 19 nt, Homo sapiens
  misc_RNA (1)...(19): siRNA sense strand
aaaggcauguggaagaaac

SEQ ID NO: 2007669 - RNA, 19 nt, Homo sapiens
  misc_RNA (1)...(19): siRNA sense strand
ugaggccugugaucagaug

SEQ ID NO: 2007670 - RNA, 19 nt, Homo sapiens
  misc_RNA (1)...(19): siRNA sense strand
gaagagcuuaaggaaauag

SEQ ID NO: 2007671 - RNA, 19 nt, Homo sapiens
  misc_RNA (1)...(19): siRNA sense strand
cuuaagcucugugaggaau

SEQ ID NO: 2007672 - RNA, 19 nt, Homo sapiens
  misc_RNA (1)...(19): siRNA sense strand
gaaauagauaaaggcaugu

SEQ ID NO: 2007673 - RNA, 19 nt, Homo sapiens
  misc_RNA (1)...(19): siRNA sense strand
uaagcucugugaggaaugg

SEQ ID NO: 2007674 - RNA, 19 nt, Homo sapiens
  misc_RNA (1)...(19): siRNA sense strand
cauucaaacuacuacaaac

SEQ ID NO: 2007675 - RNA, 19 nt, Homo sapiens
  misc_RNA (1)...(19): siRNA sense strand
ggaagaguacaagcugauc

SEQ ID NO: 2007676 - RNA, 19 nt, Homo sapiens
  misc_RNA (1)...(19): siRNA sense strand
aaacuacuacaaacacaag

SEQ ID NO: 2007677 - RNA, 19 nt, Homo sapiens
  misc_RNA (1)...(19): siRNA sense strand
gcuuagcgcgacuccauuc

SEQ ID NO: 2007678 - RNA, 19 nt, Homo sapiens
  misc_RNA (1)...(19): siRNA sense strand
uaaaggcauguggaagaaa

SEQ ID NO: 2007679 - RNA, 19 nt, Homo sapiens
  misc_RNA (1)...(19): siRNA sense strand
ccaccuggcuuuuauuaua

SEQ ID NO: 2007680 - RNA, 19 nt, Homo sapiens
  misc_RNA (1)...(19): siRNA sense strand
ccacuaccagccuaacuuu

SEQ ID NO: 2007681 - RNA, 19 nt, Homo sapiens
  misc_RNA (1)...(19): siRNA sense strand
gagaagccaagacguggau

SEQ ID NO: 2007682 - RNA, 19 nt, Homo sapiens
  misc_RNA (1)...(19): siRNA sense strand
ccaagacguggaucgagaa

SEQ ID NO: 2007683 - RNA, 19 nt, Homo sapiens
  misc_RNA (1)...(19): siRNA sense strand
gauucaguacguucuguga

SEQ ID NO: 2007684 - RNA, 19 nt, Homo sapiens
  misc_RNA (1)...(19): siRNA sense strand
gccacuaccagccuaacuu

SEQ ID NO: 2007685 - RNA, 19 nt, Homo sapiens
  misc_RNA (1)...(19): siRNA sense strand
ucaguacguucugugaaag

SEQ ID NO: 2007686 - RNA, 19 nt, Homo sapiens
  misc_RNA (1)...(19): siRNA sense strand
gggagaaccucuacaagua

SEQ ID NO: 2007687 - RNA, 19 nt, Homo sapiens
  misc_RNA (1)...(19): siRNA sense strand
cggcagagcuggaugauga

SEQ ID NO: 2007688 - RNA, 19 nt, Homo sapiens
  misc_RNA (1)...(19): siRNA sense strand
gcaagugcaagaagaauuu

SEQ ID NO: 2007689 - RNA, 19 nt, Homo sapiens
  misc_RNA (1)...(19): siRNA sense strand
gaugagaacgucugcauug

SEQ ID NO: 2007690 - RNA, 19 nt, Homo sapiens
  misc_RNA (1)...(19): siRNA sense strand
ccaagggccucaaggaguu

SEQ ID NO: 2007691 - RNA, 19 nt, Homo sapiens
  misc_RNA (1)...(19): siRNA sense strand
gagaacgucugcauugagu

SEQ ID NO: 2007692 - RNA, 19 nt, Homo sapiens
  misc_RNA (1)...(19): siRNA sense strand
gagaaucccuaccuaugca

SEQ ID NO: 2007693 - RNA, 19 nt, Homo sapiens
  misc_RNA (1)...(19): siRNA sense strand
gaagccaacaucacccuuu

SEQ ID NO: 2007694 - RNA, 19 nt, Homo sapiens
  misc_RNA (1)...(19): siRNA sense strand
gaacgucugcauugagugu

SEQ ID NO: 2007695 - RNA, 19 nt, Homo sapiens
  misc_RNA (1)...(19): siRNA sense strand
gcauggaggccuucgguau

SEQ ID NO: 2007696 - RNA, 19 nt, Homo sapiens
  misc_RNA (1)...(19): siRNA sense strand
ggacuaugacaucugcaaa

SEQ ID NO: 2007697 - RNA, 19 nt, Homo sapiens
  misc_RNA (1)...(19): siRNA sense strand
ccaugagaaucccuaccua

SEQ ID NO: 2007698 - RNA, 19 nt, Homo sapiens
  misc_RNA (1)...(19): siRNA sense strand
caacauggacaaccucuac

SEQ ID NO: 2007699 - RNA, 19 nt, Homo sapiens
  misc_RNA (1)...(19): siRNA sense strand
ggaccgcuucgccaucuuu

SEQ ID NO: 2007700 - RNA, 19 nt, Homo sapiens
  misc_RNA (1)...(19): siRNA sense strand
gagaaccucuacaaguacu

SEQ ID NO: 2007701 - RNA, 19 nt, Homo sapiens
  misc_RNA (1)...(19): siRNA sense strand
ugaugcgccugaaggacua

SEQ ID NO: 2007702 - RNA, 19 nt, Homo sapiens
  misc_RNA (1)...(19): siRNA sense strand
gcauugaguguaacugcaa

SEQ ID NO: 2007703 - RNA, 19 nt, Homo sapiens
  misc_RNA (1)...(19): siRNA sense strand
cuacauugacuuccugaau

SEQ ID NO: 2007704 - RNA, 19 nt, Homo sapiens
  misc_RNA (1)...(19): siRNA sense strand
ggagaaccucuacaaguac

SEQ ID NO: 2007705 - RNA, 19 nt, Homo sapiens
  misc_RNA (1)...(19): siRNA sense strand
ggugaugaccuucgaguac

SEQ ID NO: 2007706 - RNA, 19 nt, Homo sapiens
  misc_RNA (1)...(19): siRNA sense strand
aauccugggugaccacaga

SEQ ID NO: 2007707 - RNA, 19 nt, Homo sapiens
  misc_RNA (1)...(19): siRNA sense strand
gcagcuacauugacuuccu

SEQ ID NO: 2007708 - RNA, 19 nt, Homo sapiens
  misc_RNA (1)...(19): siRNA sense strand
ggcaagugcaagaagaauu

SEQ ID NO: 2007709 - RNA, 19 nt, Homo sapiens
  misc_RNA (1)...(19): siRNA sense strand
guggagcccucaggcauca

SEQ ID NO: 2007710 - RNA, 19 nt, Homo sapiens
  misc_RNA (1)...(19): siRNA sense strand
gaaccucuacaaguacuuc

SEQ ID NO: 2007711 - RNA, 19 nt, Homo sapiens
  misc_RNA (1)...(19): siRNA sense strand
caugagaaucccuaccuau

SEQ ID NO: 2007712 - RNA, 19 nt, Homo sapiens
  misc_RNA (1)...(19): siRNA sense strand
caaccgcugcagcuacauu

SEQ ID NO: 2007713 - RNA, 19 nt, Homo sapiens
  misc_RNA (1)...(19): siRNA sense strand
ccaaggugaugcgccugaa

SEQ ID NO: 2007714 - RNA, 19 nt, Homo sapiens
  misc_RNA (1)...(19): siRNA sense strand
cgggagaaccucuacaagu

SEQ ID NO: 2007715 - RNA, 19 nt, Homo sapiens
  misc_RNA (1)...(19): siRNA sense strand
gcaacauggacaaccucua

SEQ ID NO: 2007716 - RNA, 19 nt, Homo sapiens
  misc_RNA (1)...(19): siRNA sense strand
acaucacccuuucguggaa

SEQ ID NO: 2007717 - RNA, 19 nt, Homo sapiens
  misc_RNA (1)...(19): siRNA sense strand
aagccaacaucacccuuuc

SEQ ID NO: 2007718 - RNA, 19 nt, Homo sapiens
  misc_RNA (1)...(19): siRNA sense strand
gacuaugacaucugcaaau

SEQ ID NO: 2007719 - RNA, 19 nt, Homo sapiens
  misc_RNA (1)...(19): siRNA sense strand
acuaugacaucugcaaauc

SEQ ID NO: 2007720 - RNA, 19 nt, Homo sapiens
  misc_RNA (1)...(19): siRNA sense strand
gcagguuccuuuggcaacu

SEQ ID NO: 2007721 - RNA, 19 nt, Homo sapiens
  misc_RNA (1)...(19): siRNA sense strand
cauggaggccuucgguaug

SEQ ID NO: 2007722 - RNA, 19 nt, Homo sapiens
  misc_RNA (1)...(19): siRNA sense strand
gggcaggcuccaagaagga

SEQ ID NO: 2007723 - RNA, 19 nt, Homo sapiens
  misc_RNA (1)...(19): siRNA sense strand
gcaacgagaccggcuucug

SEQ ID NO: 2007724 - RNA, 19 nt, Homo sapiens
  misc_RNA (1)...(19): siRNA sense strand
uaugacaucugcaaauccu

SEQ ID NO: 2007725 - RNA, 19 nt, Homo sapiens
  misc_RNA (1)...(19): siRNA sense strand
guguaacugcaaccagaua

SEQ ID NO: 2007726 - RNA, 19 nt, Homo sapiens
  misc_RNA (1)...(19): siRNA sense strand
gcggcaagugcaagaagaa

SEQ ID NO: 2007727 - RNA, 19 nt, Homo sapiens
  misc_RNA (1)...(19): siRNA sense strand
ucaugguccuggagaaguc

SEQ ID NO: 2007728 - RNA, 19 nt, Homo sapiens
  misc_RNA (1)...(19): siRNA sense strand
augagaacgucugcauuga

SEQ ID NO: 2007729 - RNA, 19 nt, Homo sapiens
  misc_RNA (1)...(19): siRNA sense strand
ccacaaggugcguucauuu

SEQ ID NO: 2007730 - RNA, 19 nt, Homo sapiens
  misc_RNA (1)...(19): siRNA sense strand
ggcagagccuccaccuugu

SEQ ID NO: 2007731 - RNA, 19 nt, Homo sapiens
  misc_RNA (1)...(19): siRNA sense strand
gcagagccuccaccuugug

SEQ ID NO: 2007732 - RNA, 19 nt, Homo sapiens
  misc_RNA (1)...(19): siRNA sense strand
guugcgcuguccuggcuuu

SEQ ID NO: 2007733 - RNA, 19 nt, Homo sapiens
  misc_RNA (1)...(19): siRNA sense strand
ggaagacucacuaguaaua

SEQ ID NO: 2007734 - RNA, 19 nt, Homo sapiens
  misc_RNA (1)...(19): siRNA sense strand
agaaauaacucccaaacaa

SEQ ID NO: 2007735 - RNA, 19 nt, Homo sapiens
  misc_RNA (1)...(19): siRNA sense strand
caaauuaccugccgcacaa

SEQ ID NO: 2007736 - RNA, 19 nt, Homo sapiens
  misc_RNA (1)...(19): siRNA sense strand
gagcagcagucagaaauaa

SEQ ID NO: 2007737 - RNA, 19 nt, Homo sapiens
  misc_RNA (1)...(19): siRNA sense strand
gugcaagucugaagaauga

SEQ ID NO: 2007738 - RNA, 19 nt, Homo sapiens
  misc_RNA (1)...(19): siRNA sense strand
gggaacaccugcuucauga

SEQ ID NO: 2007739 - RNA, 19 nt, Homo sapiens
  misc_RNA (1)...(19): siRNA sense strand
gaaauaacucccaaacaaa

SEQ ID NO: 2007740 - RNA, 19 nt, Homo sapiens
  misc_RNA (1)...(19): siRNA sense strand
acaggaugcucacgaauua

SEQ ID NO: 2007741 - RNA, 19 nt, Homo sapiens
  misc_RNA (1)...(19): siRNA sense strand
caacacaacccuaaacuga

SEQ ID NO: 2007742 - RNA, 19 nt, Homo sapiens
  misc_RNA (1)...(19): siRNA sense strand
gccaagaaguuacugauga

SEQ ID NO: 2007743 - RNA, 19 nt, Homo sapiens
  misc_RNA (1)...(19): siRNA sense strand
uggcagaucucaucauuug

SEQ ID NO: 2007744 - RNA, 19 nt, Homo sapiens
  misc_RNA (1)...(19): siRNA sense strand
ccagaguccuguucgauuu

SEQ ID NO: 2007745 - RNA, 19 nt, Homo sapiens
  misc_RNA (1)...(19): siRNA sense strand
ugauggacauuuacaagua

SEQ ID NO: 2007746 - RNA, 19 nt, Homo sapiens
  misc_RNA (1)...(19): siRNA sense strand
gauagccuuucacuaagua

SEQ ID NO: 2007747 - RNA, 19 nt, Homo sapiens
  misc_RNA (1)...(19): siRNA sense strand
gcagcaggaauauauguua

SEQ ID NO: 2007748 - RNA, 19 nt, Homo sapiens
  misc_RNA (1)...(19): siRNA sense strand
gaaagaaagaagcguagaa

SEQ ID NO: 2007749 - RNA, 19 nt, Homo sapiens
  misc_RNA (1)...(19): siRNA sense strand
ugacaacuguacaaagauu

SEQ ID NO: 2007750 - RNA, 19 nt, Homo sapiens
  misc_RNA (1)...(19): siRNA sense strand
gcgccuaccugcuguucua

SEQ ID NO: 2007751 - RNA, 19 nt, Homo sapiens
  misc_RNA (1)...(19): siRNA sense strand
acaccaguauuuauccuua

SEQ ID NO: 2007752 - RNA, 19 nt, Homo sapiens
  misc_RNA (1)...(19): siRNA sense strand
gaucucaucauuugaagaa

SEQ ID NO: 2007753 - RNA, 19 nt, Homo sapiens
  misc_RNA (1)...(19): siRNA sense strand
gcagaucucaucauuugaa

SEQ ID NO: 2007754 - RNA, 19 nt, Homo sapiens
  misc_RNA (1)...(19): siRNA sense strand
ccacaccaguucugaauca

SEQ ID NO: 2007755 - RNA, 19 nt, Homo sapiens
  misc_RNA (1)...(19): siRNA sense strand
ucagguggcuggaagaguu

SEQ ID NO: 2007756 - RNA, 19 nt, Homo sapiens
  misc_RNA (1)...(19): siRNA sense strand
cauggaagacucacuagua

SEQ ID NO: 2007757 - RNA, 19 nt, Homo sapiens
  misc_RNA (1)...(19): siRNA sense strand
ggacauaaaccuagucaac

SEQ ID NO: 2007758 - RNA, 19 nt, Homo sapiens
  misc_RNA (1)...(19): siRNA sense strand
ggaacccucucucaacuag

SEQ ID NO: 2007759 - RNA, 19 nt, Homo sapiens
  misc_RNA (1)...(19): siRNA sense strand
gaugaggucuuagaugcaa

SEQ ID NO: 2007760 - RNA, 19 nt, Homo sapiens
  misc_RNA (1)...(19): siRNA sense strand
ugugacaacuguacaaaga

SEQ ID NO: 2007761 - RNA, 19 nt, Homo sapiens
  misc_RNA (1)...(19): siRNA sense strand
ugccuggccuuguuaauuu

SEQ ID NO: 2007762 - RNA, 19 nt, Homo sapiens
  misc_RNA (1)...(19): siRNA sense strand
ucaaugaguuccugaugau

SEQ ID NO: 2007763 - RNA, 19 nt, Homo sapiens
  misc_RNA (1)...(19): siRNA sense strand
uuugauagccuuucacuaa

SEQ ID NO: 2007764 - RNA, 19 nt, Homo sapiens
  misc_RNA (1)...(19): siRNA sense strand
ggaagucucaacauccuuu

SEQ ID NO: 2007765 - RNA, 19 nt, Homo sapiens
  misc_RNA (1)...(19): siRNA sense strand
cgucagauauaaagucaug

SEQ ID NO: 2007766 - RNA, 19 nt, Homo sapiens
  misc_RNA (1)...(19): siRNA sense strand
caugcacucuggacacuuu

SEQ ID NO: 2007767 - RNA, 19 nt, Homo sapiens
  misc_RNA (1)...(19): siRNA sense strand
ccaagaaguuacugaugau

SEQ ID NO: 2007768 - RNA, 19 nt, Homo sapiens
  misc_RNA (1)...(19): siRNA sense strand
ggagcagcagucagaaaua

SEQ ID NO: 2007769 - RNA, 19 nt, Homo sapiens
  misc_RNA (1)...(19): siRNA sense strand
cagcaggaauauauguuau

SEQ ID NO: 2007770 - RNA, 19 nt, Homo sapiens
  misc_RNA (1)...(19): siRNA sense strand
acccuaaacugaacaagaa

SEQ ID NO: 2007771 - RNA, 19 nt, Homo sapiens
  misc_RNA (1)...(19): siRNA sense strand
ggaguuauagguggaauug

SEQ ID NO: 2007772 - RNA, 19 nt, Homo sapiens
  misc_RNA (1)...(19): siRNA sense strand
cuaguaauauggucugcaa

SEQ ID NO: 2007773 - RNA, 19 nt, Homo sapiens
  misc_RNA (1)...(19): siRNA sense strand
guaauauggucugcaaaca

SEQ ID NO: 2007774 - RNA, 19 nt, Homo sapiens
  misc_RNA (1)...(19): siRNA sense strand
auggaagacucacuaguaa

SEQ ID NO: 2007775 - RNA, 19 nt, Homo sapiens
  misc_RNA (1)...(19): siRNA sense strand
gcccuucccucucccaguu

SEQ ID NO: 2007776 - RNA, 19 nt, Homo sapiens
  misc_RNA (1)...(19): siRNA sense strand
gaggaccacuuuuguuaaa

SEQ ID NO: 2007777 - RNA, 19 nt, Homo sapiens
  misc_RNA (1)...(19): siRNA sense strand
aaagaaagaagcguagaaa

SEQ ID NO: 2007778 - RNA, 19 nt, Homo sapiens
  misc_RNA (1)...(19): siRNA sense strand
uuggaugucuuaagaaugu

SEQ ID NO: 2007779 - RNA, 19 nt, Homo sapiens
  misc_RNA (1)...(19): siRNA sense strand
ggagugcaagucugaagaa

SEQ ID NO: 2007780 - RNA, 19 nt, Homo sapiens
  misc_RNA (1)...(19): siRNA sense strand
ccaccuccuuggacauaaa

SEQ ID NO: 2007781 - RNA, 19 nt, Homo sapiens
  misc_RNA (1)...(19): siRNA sense strand
gucauuaccucgucauugg

SEQ ID NO: 2007782 - RNA, 19 nt, Homo sapiens
  misc_RNA (1)...(19): siRNA sense strand
agaacaggaugcucacgaa

SEQ ID NO: 2007783 - RNA, 19 nt, Homo sapiens
  misc_RNA (1)...(19): siRNA sense strand
gccuggccuuguuaauuua

SEQ ID NO: 2007784 - RNA, 19 nt, Homo sapiens
  misc_RNA (1)...(19): siRNA sense strand
gaagacucacuaguaauau

SEQ ID NO: 2007785 - RNA, 19 nt, Homo sapiens
  misc_RNA (1)...(19): siRNA sense strand
ggucacacauuuguuugau

SEQ ID NO: 2007786 - RNA, 19 nt, Homo sapiens
  misc_RNA (1)...(19): siRNA sense strand
gaacaccugcuucaugaac

SEQ ID NO: 2007787 - RNA, 19 nt, Homo sapiens
  misc_RNA (1)...(19): siRNA sense strand
gacuacagcuccuccacau

SEQ ID NO: 2007788 - RNA, 19 nt, Homo sapiens
  misc_RNA (1)...(19): siRNA sense strand
ccacugccuucaccacuuc

SEQ ID NO: 2007789 - RNA, 19 nt, Homo sapiens
  misc_RNA (1)...(19): siRNA sense strand
gaacaggaugcucacgaau

SEQ ID NO: 2007790 - RNA, 19 nt, Homo sapiens
  misc_RNA (1)...(19): siRNA sense strand
cuuguuggaugucuuaaga

SEQ ID NO: 2007791 - RNA, 19 nt, Homo sapiens
  misc_RNA (1)...(19): siRNA sense strand
caacauccuuuucauggaa

SEQ ID NO: 2007792 - RNA, 19 nt, Homo sapiens
  misc_RNA (1)...(19): siRNA sense strand
gauggacauuuacaaguac

SEQ ID NO: 2007793 - RNA, 19 nt, Homo sapiens
  misc_RNA (1)...(19): siRNA sense strand
gauuugauaccuuugauag

SEQ ID NO: 2007794 - RNA, 19 nt, Homo sapiens
  misc_RNA (1)...(19): siRNA sense strand
caccaguauuuauccuuaa

SEQ ID NO: 2007795 - RNA, 19 nt, Homo sapiens
  misc_RNA (1)...(19): siRNA sense strand
ggcaugagcacgugcaguu

SEQ ID NO: 2007796 - RNA, 19 nt, Homo sapiens
  misc_RNA (1)...(19): siRNA sense strand
gaacaccagaggaccacuu

SEQ ID NO: 2007797 - RNA, 19 nt, Homo sapiens
  misc_RNA (1)...(19): siRNA sense strand
gcuugugccuggccuuguu

SEQ ID NO: 2007798 - RNA, 19 nt, Homo sapiens
  misc_RNA (1)...(19): siRNA sense strand
acacaacccuaaacugaac

SEQ ID NO: 2007799 - RNA, 19 nt, Homo sapiens
  misc_RNA (1)...(19): siRNA sense strand
gaugaugaggucuuagaug

SEQ ID NO: 2007800 - RNA, 19 nt, Homo sapiens
  misc_RNA (1)...(19): siRNA sense strand
gacauaaaccuagucaaca

SEQ ID NO: 2007801 - RNA, 19 nt, Homo sapiens
  misc_RNA (1)...(19): siRNA sense strand
gaugauggacauuuacaag

SEQ ID NO: 2007802 - RNA, 19 nt, Homo sapiens
  misc_RNA (1)...(19): siRNA sense strand
gccgucagauauaaaguca

SEQ ID NO: 2007803 - RNA, 19 nt, Homo sapiens
  misc_RNA (1)...(19): siRNA sense strand
cagaggaccacuuuuguua

SEQ ID NO: 2007804 - RNA, 19 nt, Homo sapiens
  misc_RNA (1)...(19): siRNA sense strand
caggaacccucucucaacu

SEQ ID NO: 2007805 - RNA, 19 nt, Homo sapiens
  misc_RNA (1)...(19): siRNA sense strand
cagaaucagugcgggaugu

SEQ ID NO: 2007806 - RNA, 19 nt, Homo sapiens
  misc_RNA (1)...(19): siRNA sense strand
uggaauugcugcugcucuu

SEQ ID NO: 2007807 - RNA, 19 nt, Homo sapiens
  misc_RNA (1)...(19): siRNA sense strand
ggcugugggucuccgauga

SEQ ID NO: 2007808 - RNA, 19 nt, Homo sapiens
  misc_RNA (1)...(19): siRNA sense strand
aagacucacuaguaauaug

SEQ ID NO: 2007809 - RNA, 19 nt, Homo sapiens
  misc_RNA (1)...(19): siRNA sense strand
cuacagcuccuccacauac

SEQ ID NO: 2007810 - RNA, 19 nt, Homo sapiens
  misc_RNA (1)...(19): siRNA sense strand
uucaaugaguuccugauga

SEQ ID NO: 2007811 - RNA, 19 nt, Homo sapiens
  misc_RNA (1)...(19): siRNA sense strand
gaagccaagggaacguuga

SEQ ID NO: 2007812 - RNA, 19 nt, Homo sapiens
  misc_RNA (1)...(19): siRNA sense strand
ccacuucaucucaucagaa

SEQ ID NO: 2007813 - RNA, 19 nt, Homo sapiens
  misc_RNA (1)...(19): siRNA sense strand
ugauagccuuucacuaagu

SEQ ID NO: 2007814 - RNA, 19 nt, Homo sapiens
  misc_RNA (1)...(19): siRNA sense strand
agaaguuacugaugaugag

SEQ ID NO: 2007815 - RNA, 19 nt, Homo sapiens
  misc_RNA (1)...(19): siRNA sense strand
cuagucaacacaacccuaa

SEQ ID NO: 2007816 - RNA, 19 nt, Homo sapiens
  misc_RNA (1)...(19): siRNA sense strand
gugccuggccuuguuaauu

SEQ ID NO: 2007817 - RNA, 19 nt, Homo sapiens
  misc_RNA (1)...(19): siRNA sense strand
cacuucaucucaucagaau

SEQ ID NO: 2007818 - RNA, 19 nt, Homo sapiens
  misc_RNA (1)...(19): siRNA sense strand
gaaagaagcguagaaaagg

SEQ ID NO: 2007819 - RNA, 19 nt, Homo sapiens
  misc_RNA (1)...(19): siRNA sense strand
aauauggucugcaaacacu

SEQ ID NO: 2007820 - RNA, 19 nt, Homo sapiens
  misc_RNA (1)...(19): siRNA sense strand
ucucaucauuugaagaaca

SEQ ID NO: 2007821 - RNA, 19 nt, Homo sapiens
  misc_RNA (1)...(19): siRNA sense strand
ucuuaagaauguacagaug

SEQ ID NO: 2007822 - RNA, 19 nt, Homo sapiens
  misc_RNA (1)...(19): siRNA sense strand
auaaagucaugaagaacug

SEQ ID NO: 2007823 - RNA, 19 nt, Homo sapiens
  misc_RNA (1)...(19): siRNA sense strand
cuucaucucaucagaauca

SEQ ID NO: 2007824 - RNA, 19 nt, Homo sapiens
  misc_RNA (1)...(19): siRNA sense strand
uccugaugauggacauuua

SEQ ID NO: 2007825 - RNA, 19 nt, Homo sapiens
  misc_RNA (1)...(19): siRNA sense strand
uguuggaugucuuaagaau

SEQ ID NO: 2007826 - RNA, 19 nt, Homo sapiens
  misc_RNA (1)...(19): siRNA sense strand
gagugcaagucugaagaau

SEQ ID NO: 2007827 - RNA, 19 nt, Homo sapiens
  misc_RNA (1)...(19): siRNA sense strand
gccaggagugcaagucuga

SEQ ID NO: 2007828 - RNA, 19 nt, Homo sapiens
  misc_RNA (1)...(19): siRNA sense strand
ugcgggauguuguguguga

SEQ ID NO: 2007829 - RNA, 19 nt, Homo sapiens
  misc_RNA (1)...(19): siRNA sense strand
cagaaauaacucccaaaca

SEQ ID NO: 2007830 - RNA, 19 nt, Homo sapiens
  misc_RNA (1)...(19): siRNA sense strand
ccaggaacccucucucaac

SEQ ID NO: 2007831 - RNA, 19 nt, Homo sapiens
  misc_RNA (1)...(19): siRNA sense strand
gagcacgugcaguucaaug

SEQ ID NO: 2007832 - RNA, 19 nt, Homo sapiens
  misc_RNA (1)...(19): siRNA sense strand
cgauuugauaccuuugaua

SEQ ID NO: 2007833 - RNA, 19 nt, Homo sapiens
  misc_RNA (1)...(19): siRNA sense strand
gaagaacucccagaccuuu

SEQ ID NO: 2007834 - RNA, 19 nt, Homo sapiens
  misc_RNA (1)...(19): siRNA sense strand
ggaagaacucccagaccuu

SEQ ID NO: 2007835 - RNA, 19 nt, Homo sapiens
  misc_RNA (1)...(19): siRNA sense strand
cguccaagcagcacaauga

SEQ ID NO: 2007836 - RNA, 19 nt, Homo sapiens
  misc_RNA (1)...(19): siRNA sense strand
ccuggccgauccacgaaga

SEQ ID NO: 2007837 - RNA, 19 nt, Homo sapiens
  misc_RNA (1)...(19): siRNA sense strand
gagaagagauaucuguuua

SEQ ID NO: 2007838 - RNA, 19 nt, Homo sapiens
  misc_RNA (1)...(19): siRNA sense strand
gaaaggaguuuggauauuu

SEQ ID NO: 2007839 - RNA, 19 nt, Homo sapiens
  misc_RNA (1)...(19): siRNA sense strand
ugaagaaacuggagaauuu

SEQ ID NO: 2007840 - RNA, 19 nt, Homo sapiens
  misc_RNA (1)...(19): siRNA sense strand
gaagagauaucuguuuaug

SEQ ID NO: 2007841 - RNA, 19 nt, Homo sapiens
  misc_RNA (1)...(19): siRNA sense strand
agacgaaucugauacuaua

SEQ ID NO: 2007842 - RNA, 19 nt, Homo sapiens
  misc_RNA (1)...(19): siRNA sense strand
guucauaucugaggaaauu

SEQ ID NO: 2007843 - RNA, 19 nt, Homo sapiens
  misc_RNA (1)...(19): siRNA sense strand
gaacaugaacauccucuaa

SEQ ID NO: 2007844 - RNA, 19 nt, Homo sapiens
  misc_RNA (1)...(19): siRNA sense strand
ggaaaggaguuuggauauu

SEQ ID NO: 2007845 - RNA, 19 nt, Homo sapiens
  misc_RNA (1)...(19): siRNA sense strand
ggauacagggcuugaauua

SEQ ID NO: 2007846 - RNA, 19 nt, Homo sapiens
  misc_RNA (1)...(19): siRNA sense strand
ggaaugugaagcuuuaaua

SEQ ID NO: 2007847 - RNA, 19 nt, Homo sapiens
  misc_RNA (1)...(19): siRNA sense strand
gaacuucacuaagggagaa

SEQ ID NO: 2007848 - RNA, 19 nt, Homo sapiens
  misc_RNA (1)...(19): siRNA sense strand
agaccaaguuccagcauua

SEQ ID NO: 2007849 - RNA, 19 nt, Homo sapiens
  misc_RNA (1)...(19): siRNA sense strand
gagaugcaguccagauuga

SEQ ID NO: 2007850 - RNA, 19 nt, Homo sapiens
  misc_RNA (1)...(19): siRNA sense strand
gaagagguguucauaucug

SEQ ID NO: 2007851 - RNA, 19 nt, Homo sapiens
  misc_RNA (1)...(19): siRNA sense strand
agaaugaccuagaggaauu

SEQ ID NO: 2007852 - RNA, 19 nt, Homo sapiens
  misc_RNA (1)...(19): siRNA sense strand
caaagugucuggagaguac

SEQ ID NO: 2007853 - RNA, 19 nt, Homo sapiens
  misc_RNA (1)...(19): siRNA sense strand
ccaaacagauacuggauca

SEQ ID NO: 2007854 - RNA, 19 nt, Homo sapiens
  misc_RNA (1)...(19): siRNA sense strand
ggaaacagaauugccauuu

SEQ ID NO: 2007855 - RNA, 19 nt, Homo sapiens
  misc_RNA (1)...(19): siRNA sense strand
gggaagaaguaguuguuga

SEQ ID NO: 2007856 - RNA, 19 nt, Homo sapiens
  misc_RNA (1)...(19): siRNA sense strand
auacagggcuugaauuaau

SEQ ID NO: 2007857 - RNA, 19 nt, Homo sapiens
  misc_RNA (1)...(19): siRNA sense strand
gauagaaccuggauuuuau

SEQ ID NO: 2007858 - RNA, 19 nt, Homo sapiens
  misc_RNA (1)...(19): siRNA sense strand
guggaggauuuacaaguua

SEQ ID NO: 2007859 - RNA, 19 nt, Homo sapiens
  misc_RNA (1)...(19): siRNA sense strand
gguggaggauuuacaaguu

SEQ ID NO: 2007860 - RNA, 19 nt, Homo sapiens
  misc_RNA (1)...(19): siRNA sense strand
ggagaagagauaucuguuu

SEQ ID NO: 2007861 - RNA, 19 nt, Homo sapiens
  misc_RNA (1)...(19): siRNA sense strand
gaacauccucuaacaagug

SEQ ID NO: 2007862 - RNA, 19 nt, Homo sapiens
  misc_RNA (1)...(19): siRNA sense strand
gaagauaucggaaguacca

SEQ ID NO: 2007863 - RNA, 19 nt, Homo sapiens
  misc_RNA (1)...(19): siRNA sense strand
caagaaaccagucucagaa

SEQ ID NO: 2007864 - RNA, 19 nt, Homo sapiens
  misc_RNA (1)...(19): siRNA sense strand
ucaauccacugguugguuu

SEQ ID NO: 2007865 - RNA, 19 nt, Homo sapiens
  misc_RNA (1)...(19): siRNA sense strand
uauguuagaugacaggaaa

SEQ ID NO: 2007866 - RNA, 19 nt, Homo sapiens
  misc_RNA (1)...(19): siRNA sense strand
ccaauuccauaucaucuga

SEQ ID NO: 2007867 - RNA, 19 nt, Homo sapiens
  misc_RNA (1)...(19): siRNA sense strand
ucagauagaaccuggauuu

SEQ ID NO: 2007868 - RNA, 19 nt, Homo sapiens
  misc_RNA (1)...(19): siRNA sense strand
aaacagaacaucagcaaga

SEQ ID NO: 2007869 - RNA, 19 nt, Homo sapiens
  misc_RNA (1)...(19): siRNA sense strand
ggaagaaguaguuguugaa

SEQ ID NO: 2007870 - RNA, 19 nt, Homo sapiens
  misc_RNA (1)...(19): siRNA sense strand
agaaguaguuguugaaagu

SEQ ID NO: 2007871 - RNA, 19 nt, Homo sapiens
  misc_RNA (1)...(19): siRNA sense strand
agaaagcaauccaccacua

SEQ ID NO: 2007872 - RNA, 19 nt, Homo sapiens
  misc_RNA (1)...(19): siRNA sense strand
uauugaaccuguacaagaa

SEQ ID NO: 2007873 - RNA, 19 nt, Homo sapiens
  misc_RNA (1)...(19): siRNA sense strand
gaaguaccagugaaucaaa

SEQ ID NO: 2007874 - RNA, 19 nt, Homo sapiens
  misc_RNA (1)...(19): siRNA sense strand
agaacaagcugaagagaag

SEQ ID NO: 2007875 - RNA, 19 nt, Homo sapiens
  misc_RNA (1)...(19): siRNA sense strand
aaauagcaguggaagauga

SEQ ID NO: 2007876 - RNA, 19 nt, Homo sapiens
  misc_RNA (1)...(19): siRNA sense strand
gaagauuugugggcaggaa

SEQ ID NO: 2007877 - RNA, 19 nt, Homo sapiens
  misc_RNA (1)...(19): siRNA sense strand
ugacaacccuuggaacuuc

SEQ ID NO: 2007878 - RNA, 19 nt, Homo sapiens
  misc_RNA (1)...(19): siRNA sense strand
gagaacaagcugaagagaa

SEQ ID NO: 2007879 - RNA, 19 nt, Homo sapiens
  misc_RNA (1)...(19): siRNA sense strand
gaagaaguaguuguugaaa

SEQ ID NO: 2007880 - RNA, 19 nt, Homo sapiens
  misc_RNA (1)...(19): siRNA sense strand
gaaucugacuuucuuuguc

SEQ ID NO: 2007881 - RNA, 19 nt, Homo sapiens
  misc_RNA (1)...(19): siRNA sense strand
aaauucagaugucaacgaa

SEQ ID NO: 2007882 - RNA, 19 nt, Homo sapiens
  misc_RNA (1)...(19): siRNA sense strand
aaacagauacuggaucaaa

SEQ ID NO: 2007883 - RNA, 19 nt, Homo sapiens
  misc_RNA (1)...(19): siRNA sense strand
uacagggcuugaauuaaua

SEQ ID NO: 2007884 - RNA, 19 nt, Homo sapiens
  misc_RNA (1)...(19): siRNA sense strand
cuuggaaugugaagcuuua

SEQ ID NO: 2007885 - RNA, 19 nt, Homo sapiens
  misc_RNA (1)...(19): siRNA sense strand
gaaauucagaugucaacga

SEQ ID NO: 2007886 - RNA, 19 nt, Homo sapiens
  misc_RNA (1)...(19): siRNA sense strand
gaauuaaacggugauuaug

SEQ ID NO: 2007887 - RNA, 19 nt, Homo sapiens
  misc_RNA (1)...(19): siRNA sense strand
aaacggugauuauggugaa

SEQ ID NO: 2007888 - RNA, 19 nt, Homo sapiens
  misc_RNA (1)...(19): siRNA sense strand
gaacaagaaauagaaacga

SEQ ID NO: 2007889 - RNA, 19 nt, Homo sapiens
  misc_RNA (1)...(19): siRNA sense strand
acaguuccauguacagaaa

SEQ ID NO: 2007890 - RNA, 19 nt, Homo sapiens
  misc_RNA (1)...(19): siRNA sense strand
gaaccuggauuuuaugcaa

SEQ ID NO: 2007891 - RNA, 19 nt, Homo sapiens
  misc_RNA (1)...(19): siRNA sense strand
gaaguaguuguugaaagua

SEQ ID NO: 2007892 - RNA, 19 nt, Homo sapiens
  misc_RNA (1)...(19): siRNA sense strand
gaauugccauuucccaaac

SEQ ID NO: 2007893 - RNA, 19 nt, Homo sapiens
  misc_RNA (1)...(19): siRNA sense strand
gaagaucaaauagacaaga

SEQ ID NO: 2007894 - RNA, 19 nt, Homo sapiens
  misc_RNA (1)...(19): siRNA sense strand
agucugaacuagcaucuga

SEQ ID NO: 2007895 - RNA, 19 nt, Homo sapiens
  misc_RNA (1)...(19): siRNA sense strand
ggaaguaccagugaaucaa

SEQ ID NO: 2007896 - RNA, 19 nt, Homo sapiens
  misc_RNA (1)...(19): siRNA sense strand
ggagaauuuuccauugaua

SEQ ID NO: 2007897 - RNA, 19 nt, Homo sapiens
  misc_RNA (1)...(19): siRNA sense strand
aagacacaaucacuaauga

SEQ ID NO: 2007898 - RNA, 19 nt, Homo sapiens
  misc_RNA (1)...(19): siRNA sense strand
gauacagggcuugaauuaa

SEQ ID NO: 2007899 - RNA, 19 nt, Homo sapiens
  misc_RNA (1)...(19): siRNA sense strand
gaccuagaggaauuaaaua

SEQ ID NO: 2007900 - RNA, 19 nt, Homo sapiens
  misc_RNA (1)...(19): siRNA sense strand
gaaugaccuagaggaauua

SEQ ID NO: 2007901 - RNA, 19 nt, Homo sapiens
  misc_RNA (1)...(19): siRNA sense strand
caggagaaagggaagauuu

SEQ ID NO: 2007902 - RNA, 19 nt, Homo sapiens
  misc_RNA (1)...(19): siRNA sense strand
gauaaagaagccacaguuc

SEQ ID NO: 2007903 - RNA, 19 nt, Homo sapiens
  misc_RNA (1)...(19): siRNA sense strand
gaggagaacaagcugaaga

SEQ ID NO: 2007904 - RNA, 19 nt, Homo sapiens
  misc_RNA (1)...(19): siRNA sense strand
agagaaggcuuuugaauca

SEQ ID NO: 2007905 - RNA, 19 nt, Homo sapiens
  misc_RNA (1)...(19): siRNA sense strand
gaaacagaagaucaaauag

SEQ ID NO: 2007906 - RNA, 19 nt, Homo sapiens
  misc_RNA (1)...(19): siRNA sense strand
gaagccacaguuccaugua

SEQ ID NO: 2007907 - RNA, 19 nt, Homo sapiens
  misc_RNA (1)...(19): siRNA sense strand
gcaauccaccacuacaaga

SEQ ID NO: 2007908 - RNA, 19 nt, Homo sapiens
  misc_RNA (1)...(19): siRNA sense strand
auuaauagcugaagaaagc

SEQ ID NO: 2007909 - RNA, 19 nt, Homo sapiens
  misc_RNA (1)...(19): siRNA sense strand
cuauuucucugacaaagug

SEQ ID NO: 2007910 - RNA, 19 nt, Homo sapiens
  misc_RNA (1)...(19): siRNA sense strand
gacacagucugaacuagca

SEQ ID NO: 2007911 - RNA, 19 nt, Homo sapiens
  misc_RNA (1)...(19): siRNA sense strand
guggugacuuggaauguga

SEQ ID NO: 2007912 - RNA, 19 nt, Homo sapiens
  misc_RNA (1)...(19): siRNA sense strand
auacuaggcuuugcauaug

SEQ ID NO: 2007913 - RNA, 19 nt, Homo sapiens
  misc_RNA (1)...(19): siRNA sense strand
ugaacuagcaucugaguca

SEQ ID NO: 2007914 - RNA, 19 nt, Homo sapiens
  misc_RNA (1)...(19): siRNA sense strand
gaagauagugaauuaaacg

SEQ ID NO: 2007915 - RNA, 19 nt, Homo sapiens
  misc_RNA (1)...(19): siRNA sense strand
ugaccuagaggaauuaaau

SEQ ID NO: 2007916 - RNA, 19 nt, Homo sapiens
  misc_RNA (1)...(19): siRNA sense strand
aaggaaaggaguuuggaua

SEQ ID NO: 2007917 - RNA, 19 nt, Homo sapiens
  misc_RNA (1)...(19): siRNA sense strand
uauacuaggcuuugcauau

SEQ ID NO: 2007918 - RNA, 19 nt, Homo sapiens
  misc_RNA (1)...(19): siRNA sense strand
gaaagcaauccaccacuac

SEQ ID NO: 2007919 - RNA, 19 nt, Homo sapiens
  misc_RNA (1)...(19): siRNA sense strand
gagaaugaccuagaggaau

SEQ ID NO: 2007920 - RNA, 19 nt, Homo sapiens
  misc_RNA (1)...(19): siRNA sense strand
aaacagaauugccauuucc

SEQ ID NO: 2007921 - RNA, 19 nt, Homo sapiens
  misc_RNA (1)...(19): siRNA sense strand
cagaagaucaaauagacaa

SEQ ID NO: 2007922 - RNA, 19 nt, Homo sapiens
  misc_RNA (1)...(19): siRNA sense strand
gcauaugccaaggaagaua

SEQ ID NO: 2007923 - RNA, 19 nt, Homo sapiens
  misc_RNA (1)...(19): siRNA sense strand
gaauccuucuucuggcuau

SEQ ID NO: 2007924 - RNA, 19 nt, Homo sapiens
  misc_RNA (1)...(19): siRNA sense strand
gaggauacagggcuugaau

SEQ ID NO: 2007925 - RNA, 19 nt, Homo sapiens
  misc_RNA (1)...(19): siRNA sense strand
uaaagaagccacaguucca

SEQ ID NO: 2007926 - RNA, 19 nt, Homo sapiens
  misc_RNA (1)...(19): siRNA sense strand
acaagaaaccagucucaga

SEQ ID NO: 2007927 - RNA, 19 nt, Homo sapiens
  misc_RNA (1)...(19): siRNA sense strand
acaugaacauccucuaaca

SEQ ID NO: 2007928 - RNA, 19 nt, Homo sapiens
  misc_RNA (1)...(19): siRNA sense strand
ggaagaugagaaugaccua

SEQ ID NO: 2007929 - RNA, 19 nt, Homo sapiens
  misc_RNA (1)...(19): siRNA sense strand
ggagaaagggaagauuugu

SEQ ID NO: 2007930 - RNA, 19 nt, Homo sapiens
  misc_RNA (1)...(19): siRNA sense strand
cauaugccaaggaagauaa

SEQ ID NO: 2007931 - RNA, 19 nt, Homo sapiens
  misc_RNA (1)...(19): siRNA sense strand
aaagacacaaucacuaaug

SEQ ID NO: 2007932 - RNA, 19 nt, Homo sapiens
  misc_RNA (1)...(19): siRNA sense strand
ucaaacagaacaucagcaa

SEQ ID NO: 2007933 - RNA, 19 nt, Homo sapiens
  misc_RNA (1)...(19): siRNA sense strand
gacuuucuuugucuucuug

SEQ ID NO: 2007934 - RNA, 19 nt, Homo sapiens
  misc_RNA (1)...(19): siRNA sense strand
uagaggcuccugaagauau

SEQ ID NO: 2007935 - RNA, 19 nt, Homo sapiens
  misc_RNA (1)...(19): siRNA sense strand
cauuagaggcuccugaaga

SEQ ID NO: 2007936 - RNA, 19 nt, Homo sapiens
  misc_RNA (1)...(19): siRNA sense strand
gagaaagggaagauuugug

SEQ ID NO: 2007937 - RNA, 19 nt, Homo sapiens
  misc_RNA (1)...(19): siRNA sense strand
ggacaucacuggcuacauu

SEQ ID NO: 2007938 - RNA, 19 nt, Homo sapiens
  misc_RNA (1)...(19): siRNA sense strand
ggagggaugugcuucauga

SEQ ID NO: 2007939 - RNA, 19 nt, Homo sapiens
  misc_RNA (1)...(19): siRNA sense strand
ggaaagagaagagaaacua

SEQ ID NO: 2007940 - RNA, 19 nt, Homo sapiens
  misc_RNA (1)...(19): siRNA sense strand
gaaacuagcauucuaugga

SEQ ID NO: 2007941 - RNA, 19 nt, Homo sapiens
  misc_RNA (1)...(19): siRNA sense strand
ggaaauauucucagucaug

SEQ ID NO: 2007942 - RNA, 19 nt, Homo sapiens
  misc_RNA (1)...(19): siRNA sense strand
guaaggaaauauucucagu

SEQ ID NO: 2007943 - RNA, 19 nt, Homo sapiens
  misc_RNA (1)...(19): siRNA sense strand
gucaaaggcauauaagaua

SEQ ID NO: 2007944 - RNA, 19 nt, Homo sapiens
  misc_RNA (1)...(19): siRNA sense strand
gauauggaaugugcucuga

SEQ ID NO: 2007945 - RNA, 19 nt, Homo sapiens
  misc_RNA (1)...(19): siRNA sense strand
gagaagagaaacuagcauu

SEQ ID NO: 2007946 - RNA, 19 nt, Homo sapiens
  misc_RNA (1)...(19): siRNA sense strand
ggucaaaggcauauaagau

SEQ ID NO: 2007947 - RNA, 19 nt, Homo sapiens
  misc_RNA (1)...(19): siRNA sense strand
aaggaaauauucucaguca

SEQ ID NO: 2007948 - RNA, 19 nt, Homo sapiens
  misc_RNA (1)...(19): siRNA sense strand
caaacgaauucaacaucug

SEQ ID NO: 2007949 - RNA, 19 nt, Homo sapiens
  misc_RNA (1)...(19): siRNA sense strand
uauggaaugugcucugaga

SEQ ID NO: 2007950 - RNA, 19 nt, Homo sapiens
  misc_RNA (1)...(19): siRNA sense strand
gaaagagaagagaaacuag

SEQ ID NO: 2007951 - RNA, 19 nt, Homo sapiens
  misc_RNA (1)...(19): siRNA sense strand
ucaaacgaauucaacaucu

SEQ ID NO: 2007952 - RNA, 19 nt, Homo sapiens
  misc_RNA (1)...(19): siRNA sense strand
aaaggucaaaggcauauaa

SEQ ID NO: 2007953 - RNA, 19 nt, Homo sapiens
  misc_RNA (1)...(19): siRNA sense strand
ccagacccagucaagauua

SEQ ID NO: 2007954 - RNA, 19 nt, Homo sapiens
  misc_RNA (1)...(19): siRNA sense strand
ccagucaagauuacagaua

SEQ ID NO: 2007955 - RNA, 19 nt, Homo sapiens
  misc_RNA (1)...(19): siRNA sense strand
gagagaacucaucaucuau

SEQ ID NO: 2007956 - RNA, 19 nt, Homo sapiens
  misc_RNA (1)...(19): siRNA sense strand
agaaccuacucaucacuuu

SEQ ID NO: 2007957 - RNA, 19 nt, Homo sapiens
  misc_RNA (1)...(19): siRNA sense strand
gcaauugcccuucuuucca

SEQ ID NO: 2007958 - RNA, 19 nt, Homo sapiens
  misc_RNA (1)...(19): siRNA sense strand
cagucaagauuacagauag

SEQ ID NO: 2007959 - RNA, 19 nt, Homo sapiens
  misc_RNA (1)...(19): siRNA sense strand
ggaagccagugggacauca

SEQ ID NO: 2007960 - RNA, 19 nt, Homo sapiens
  misc_RNA (1)...(19): siRNA sense strand
cgaauucaacaucuguauu

SEQ ID NO: 2007961 - RNA, 19 nt, Homo sapiens
  misc_RNA (1)...(19): siRNA sense strand
cugaguggcuacaaugugu

SEQ ID NO: 2007962 - RNA, 19 nt, Homo sapiens
  misc_RNA (1)...(19): siRNA sense strand
cuuaccaugugccagauuu

SEQ ID NO: 2007963 - RNA, 19 nt, Homo sapiens
  misc_RNA (1)...(19): siRNA sense strand
cuguauuccucacccauuu

SEQ ID NO: 2007964 - RNA, 19 nt, Homo sapiens
  misc_RNA (1)...(19): siRNA sense strand
gagaacucaucaucuaucc

SEQ ID NO: 2007965 - RNA, 19 nt, Homo sapiens
  misc_RNA (1)...(19): siRNA sense strand
caucaucuauccagaaccu

SEQ ID NO: 2007966 - RNA, 19 nt, Homo sapiens
  misc_RNA (1)...(19): siRNA sense strand
caacaggauuuuccaacug

SEQ ID NO: 2007967 - RNA, 19 nt, Homo sapiens
  misc_RNA (1)...(19): siRNA sense strand
aaacgaauucaacaucugu

SEQ ID NO: 2007968 - RNA, 19 nt, Homo sapiens
  misc_RNA (1)...(19): siRNA sense strand
cugcaguauuuaucgguuu

SEQ ID NO: 2007969 - RNA, 19 nt, Homo sapiens
  misc_RNA (1)...(19): siRNA sense strand
gaaaaggucaaaggcauau

SEQ ID NO: 2007970 - RNA, 19 nt, Homo sapiens
  misc_RNA (1)...(19): siRNA sense strand
uuacugaguggcuacaaug

SEQ ID NO: 2007971 - RNA, 19 nt, Homo sapiens
  misc_RNA (1)...(19): siRNA sense strand
agucaagauuacagauaga

SEQ ID NO: 2007972 - RNA, 19 nt, Homo sapiens
  misc_RNA (1)...(19): siRNA sense strand
gaaccuacucaucacuuuu

SEQ ID NO: 2007973 - RNA, 19 nt, Homo sapiens
  misc_RNA (1)...(19): siRNA sense strand
uguauuccucacccauuua

SEQ ID NO: 2007974 - RNA, 19 nt, Homo sapiens
  misc_RNA (1)...(19): siRNA sense strand
cagaaccuacucaucacuu

SEQ ID NO: 2007975 - RNA, 19 nt, Homo sapiens
  misc_RNA (1)...(19): siRNA sense strand
agaagagaaacuagcauuc

SEQ ID NO: 2007976 - RNA, 19 nt, Homo sapiens
  misc_RNA (1)...(19): siRNA sense strand
caggagggaugugcuucau

SEQ ID NO: 2007977 - RNA, 19 nt, Homo sapiens
  misc_RNA (1)...(19): siRNA sense strand
agcauucuauggaguacuu

SEQ ID NO: 2007978 - RNA, 19 nt, Homo sapiens
  misc_RNA (1)...(19): siRNA sense strand
ggaaggauuugaaagaaca

SEQ ID NO: 2007979 - RNA, 19 nt, Homo sapiens
  misc_RNA (1)...(19): siRNA sense strand
gaccugcgcuguccagaga

SEQ ID NO: 2007980 - RNA, 19 nt, Homo sapiens
  misc_RNA (1)...(19): siRNA sense strand
caucggagcuggcaucauc

SEQ ID NO: 2007981 - RNA, 19 nt, Homo sapiens
  misc_RNA (1)...(19): siRNA sense strand
gaucagaaaguaugugaga

SEQ ID NO: 2007982 - RNA, 19 nt, Homo sapiens
  misc_RNA (1)...(19): siRNA sense strand
ccugugagauuguggauga

SEQ ID NO: 2007983 - RNA, 19 nt, Homo sapiens
  misc_RNA (1)...(19): siRNA sense strand
cagaugaggugcagguguu

SEQ ID NO: 2007984 - RNA, 19 nt, Homo sapiens
  misc_RNA (1)...(19): siRNA sense strand
ugaaagaacagcaugauca

SEQ ID NO: 2007985 - RNA, 19 nt, Homo sapiens
  misc_RNA (1)...(19): siRNA sense strand
ggacaacggccaccuguac

SEQ ID NO: 2007986 - RNA, 19 nt, Homo sapiens
  misc_RNA (1)...(19): siRNA sense strand
agaacagcaugaucagaaa

SEQ ID NO: 2007987 - RNA, 19 nt, Homo sapiens
  misc_RNA (1)...(19): siRNA sense strand
gaaucacucugcccuuguc

SEQ ID NO: 2007988 - RNA, 19 nt, Homo sapiens
  misc_RNA (1)...(19): siRNA sense strand
gaaagaacagcaugaucag

SEQ ID NO: 2007989 - RNA, 19 nt, Homo sapiens
  misc_RNA (1)...(19): siRNA sense strand
agagggagaugcagcgaau

SEQ ID NO: 2007990 - RNA, 19 nt, Homo sapiens
  misc_RNA (1)...(19): siRNA sense strand
aagaacagcaugaucagaa

SEQ ID NO: 2007991 - RNA, 19 nt, Homo sapiens
  misc_RNA (1)...(19): siRNA sense strand
gugcugggcauuaccauga

SEQ ID NO: 2007992 - RNA, 19 nt, Homo sapiens
  misc_RNA (1)...(19): siRNA sense strand
gcuccuagcagaagccuau

SEQ ID NO: 2007993 - RNA, 19 nt, Homo sapiens
  misc_RNA (1)...(19): siRNA sense strand
gggaaggauuugaaagaac

SEQ ID NO: 2007994 - RNA, 19 nt, Homo sapiens
  misc_RNA (1)...(19): siRNA sense strand
aagcauuccucgucagcaa

SEQ ID NO: 2007995 - RNA, 19 nt, Homo sapiens
  misc_RNA (1)...(19): siRNA sense strand
gugagauuguggaugagaa

SEQ ID NO: 2007996 - RNA, 19 nt, Homo sapiens
  misc_RNA (1)...(19): siRNA sense strand
gaacagcaugaucagaaag

SEQ ID NO: 2007997 - RNA, 19 nt, Homo sapiens
  misc_RNA (1)...(19): siRNA sense strand
acagcaugaucagaaagua

SEQ ID NO: 2007998 - RNA, 19 nt, Homo sapiens
  misc_RNA (1)...(19): siRNA sense strand
ggggaaggauuugaaagaa

SEQ ID NO: 2007999 - RNA, 19 nt, Homo sapiens
  misc_RNA (1)...(19): siRNA sense strand
gcuguuggccuggguacaa

SEQ ID NO: 2008000 - RNA, 19 nt, Homo sapiens
  misc_RNA (1)...(19): siRNA sense strand
cagcaugaucagaaaguau

SEQ ID NO: 2008001 - RNA, 19 nt, Homo sapiens
  misc_RNA (1)...(19): siRNA sense strand
gcugggcauuaccaugaug

SEQ ID NO: 2008002 - RNA, 19 nt, Homo sapiens
  misc_RNA (1)...(19): siRNA sense strand
ccagccagacuccaguuga

SEQ ID NO: 2008003 - RNA, 19 nt, Homo sapiens
  misc_RNA (1)...(19): siRNA sense strand
gggugcggaugaacuccaa

SEQ ID NO: 2008004 - RNA, 19 nt, Homo sapiens
  misc_RNA (1)...(19): siRNA sense strand
gauuguggaugagaagacu

SEQ ID NO: 2008005 - RNA, 19 nt, Homo sapiens
  misc_RNA (1)...(19): siRNA sense strand
ggagaugcagcgaaucacu

SEQ ID NO: 2008006 - RNA, 19 nt, Homo sapiens
  misc_RNA (1)...(19): siRNA sense strand
gaagggccaggugcagaug

SEQ ID NO: 2008007 - RNA, 19 nt, Homo sapiens
  misc_RNA (1)...(19): siRNA sense strand
gggacaacggccaccugua

SEQ ID NO: 2008008 - RNA, 19 nt, Homo sapiens
  misc_RNA (1)...(19): siRNA sense strand
gcuacgugcugggcauuac

SEQ ID NO: 2008009 - RNA, 19 nt, Homo sapiens
  misc_RNA (1)...(19): siRNA sense strand
gaagaaacaugcaauauca

SEQ ID NO: 2008010 - RNA, 19 nt, Homo sapiens
  misc_RNA (1)...(19): siRNA sense strand
caagggagcugauaaagaa

SEQ ID NO: 2008011 - RNA, 19 nt, Homo sapiens
  misc_RNA (1)...(19): siRNA sense strand
gaagaaggguuugaacuuu

SEQ ID NO: 2008012 - RNA, 19 nt, Homo sapiens
  misc_RNA (1)...(19): siRNA sense strand
gaacuuuacucucaauuug

SEQ ID NO: 2008013 - RNA, 19 nt, Homo sapiens
  misc_RNA (1)...(19): siRNA sense strand
gaaauuaagugagacagaa

SEQ ID NO: 2008014 - RNA, 19 nt, Homo sapiens
  misc_RNA (1)...(19): siRNA sense strand
gcaagcaugucucuauauu

SEQ ID NO: 2008015 - RNA, 19 nt, Homo sapiens
  misc_RNA (1)...(19): siRNA sense strand
ggaucuaccuggcaacauu

SEQ ID NO: 2008016 - RNA, 19 nt, Homo sapiens
  misc_RNA (1)...(19): siRNA sense strand
aaagaggacuggugaucua

SEQ ID NO: 2008017 - RNA, 19 nt, Homo sapiens
  misc_RNA (1)...(19): siRNA sense strand
aagaaggguuugaacuuua

SEQ ID NO: 2008018 - RNA, 19 nt, Homo sapiens
  misc_RNA (1)...(19): siRNA sense strand
ggaagaaacaugcaauauc

SEQ ID NO: 2008019 - RNA, 19 nt, Homo sapiens
  misc_RNA (1)...(19): siRNA sense strand
gguuugaacuuuacucuca

SEQ ID NO: 2008020 - RNA, 19 nt, Homo sapiens
  misc_RNA (1)...(19): siRNA sense strand
uggcaagcaugucucuaua

SEQ ID NO: 2008021 - RNA, 19 nt, Homo sapiens
  misc_RNA (1)...(19): siRNA sense strand
gcaugucucuauauuggau

SEQ ID NO: 2008022 - RNA, 19 nt, Homo sapiens
  misc_RNA (1)...(19): siRNA sense strand
ccuggcaacauucuuauua

SEQ ID NO: 2008023 - RNA, 19 nt, Homo sapiens
  misc_RNA (1)...(19): siRNA sense strand
aagcaugucucuauauugg

SEQ ID NO: 2008024 - RNA, 19 nt, Homo sapiens
  misc_RNA (1)...(19): siRNA sense strand
uguuaaagcuggacaccaa

SEQ ID NO: 2008025 - RNA, 19 nt, Homo sapiens
  misc_RNA (1)...(19): siRNA sense strand
ucacacacuuaauugaguu

SEQ ID NO: 2008026 - RNA, 19 nt, Homo sapiens
  misc_RNA (1)...(19): siRNA sense strand
cuaccuggcaacauucuua

SEQ ID NO: 2008027 - RNA, 19 nt, Homo sapiens
  misc_RNA (1)...(19): siRNA sense strand
ggacaccaacggaccauuc

SEQ ID NO: 2008028 - RNA, 19 nt, Homo sapiens
  misc_RNA (1)...(19): siRNA sense strand
ggaccauucacacacuuaa

SEQ ID NO: 2008029 - RNA, 19 nt, Homo sapiens
  misc_RNA (1)...(19): siRNA sense strand
ucaagggagcugauaaaga

SEQ ID NO: 2008030 - RNA, 19 nt, Homo sapiens
  misc_RNA (1)...(19): siRNA sense strand
agaagaaggguuugaacuu

SEQ ID NO: 2008031 - RNA, 19 nt, Homo sapiens
  misc_RNA (1)...(19): siRNA sense strand
cuuauuaucccucaagcua

SEQ ID NO: 2008032 - RNA, 19 nt, Homo sapiens
  misc_RNA (1)...(19): siRNA sense strand
ggaggaagacuaaaaggaa

SEQ ID NO: 2008033 - RNA, 19 nt, Homo sapiens
  misc_RNA (1)...(19): siRNA sense strand
caagcaugucucuauauug

SEQ ID NO: 2008034 - RNA, 19 nt, Homo sapiens
  misc_RNA (1)...(19): siRNA sense strand
gcaauaucacucuaacucu

SEQ ID NO: 2008035 - RNA, 19 nt, Homo sapiens
  misc_RNA (1)...(19): siRNA sense strand
gggagcugauaaagaacuu

SEQ ID NO: 2008036 - RNA, 19 nt, Homo sapiens
  misc_RNA (1)...(19): siRNA sense strand
ccaaagaggacuggugauc

SEQ ID NO: 2008037 - RNA, 19 nt, Homo sapiens
  misc_RNA (1)...(19): siRNA sense strand
aaggaagaaacaugcaaua

SEQ ID NO: 2008038 - RNA, 19 nt, Homo sapiens
  misc_RNA (1)...(19): siRNA sense strand
uggcaacauucuuauuauc

SEQ ID NO: 2008039 - RNA, 19 nt, Homo sapiens
  misc_RNA (1)...(19): siRNA sense strand
gaaaauggcaagcaugucu

SEQ ID NO: 2008040 - RNA, 19 nt, Homo sapiens
  misc_RNA (1)...(19): siRNA sense strand
cuggcaacauucuuauuau

SEQ ID NO: 2008041 - RNA, 19 nt, Homo sapiens
  misc_RNA (1)...(19): siRNA sense strand
agaaggguuugaacuuuac

SEQ ID NO: 2008042 - RNA, 19 nt, Homo sapiens
  misc_RNA (1)...(19): siRNA sense strand
caaagaggacuggugaucu

SEQ ID NO: 2008043 - RNA, 19 nt, Homo sapiens
  misc_RNA (1)...(19): siRNA sense strand
ccauucacacacuuaauug

SEQ ID NO: 2008044 - RNA, 19 nt, Homo sapiens
  misc_RNA (1)...(19): siRNA sense strand
ugaaauuaagugagacaga

SEQ ID NO: 2008045 - RNA, 19 nt, Homo sapiens
  misc_RNA (1)...(19): siRNA sense strand
gaggacuggugaucuacgu

SEQ ID NO: 2008046 - RNA, 19 nt, Homo sapiens
  misc_RNA (1)...(19): siRNA sense strand
gaaaagaagaaggguuuga

SEQ ID NO: 2008047 - RNA, 19 nt, Homo sapiens
  misc_RNA (1)...(19): siRNA sense strand
aaacaugcaauaucacucu

SEQ ID NO: 2008048 - RNA, 19 nt, Homo sapiens
  misc_RNA (1)...(19): siRNA sense strand
ggcaagcaugucucuauau

SEQ ID NO: 2008049 - RNA, 19 nt, Homo sapiens
  misc_RNA (1)...(19): siRNA sense strand
ggugaucuacgugugcuuu

SEQ ID NO: 2008050 - RNA, 19 nt, Homo sapiens
  misc_RNA (1)...(19): siRNA sense strand
gaucuaccuggcaacauuc

SEQ ID NO: 2008051 - RNA, 19 nt, Homo sapiens
  misc_RNA (1)...(19): siRNA sense strand
acaggcagguguuaaagcu

SEQ ID NO: 2008052 - RNA, 19 nt, Homo sapiens
  misc_RNA (1)...(19): siRNA sense strand
aaaggaagaaacaugcaau

SEQ ID NO: 2008053 - RNA, 19 nt, Homo sapiens
  misc_RNA (1)...(19): siRNA sense strand
gaacuucuucccaaaaugg

SEQ ID NO: 2008054 - RNA, 19 nt, Homo sapiens
  misc_RNA (1)...(19): siRNA sense strand
ccaaaaugguuaauacacu

SEQ ID NO: 2008055 - RNA, 19 nt, Homo sapiens
  misc_RNA (1)...(19): siRNA sense strand
uuucaagggagcugauaaa

SEQ ID NO: 2008056 - RNA, 19 nt, Homo sapiens
  misc_RNA (1)...(19): siRNA sense strand
caugcaauaucacucuaac

SEQ ID NO: 2008057 - RNA, 19 nt, Homo sapiens
  misc_RNA (1)...(19): siRNA sense strand
gacaccaacggaccauuca

SEQ ID NO: 2008058 - RNA, 19 nt, Homo sapiens
  misc_RNA (1)...(19): siRNA sense strand
acuuuacucucaauuugug

SEQ ID NO: 2008059 - RNA, 19 nt, Homo sapiens
  misc_RNA (1)...(19): siRNA sense strand
agaagaaccucagaacaua

SEQ ID NO: 2008060 - RNA, 19 nt, Homo sapiens
  misc_RNA (1)...(19): siRNA sense strand
gaaccaaaaucggaucuua

SEQ ID NO: 2008061 - RNA, 19 nt, Homo sapiens
  misc_RNA (1)...(19): siRNA sense strand
cagcaucuccuucuacuaa

SEQ ID NO: 2008062 - RNA, 19 nt, Homo sapiens
  misc_RNA (1)...(19): siRNA sense strand
caaacaaacccaaggauca

SEQ ID NO: 2008063 - RNA, 19 nt, Homo sapiens
  misc_RNA (1)...(19): siRNA sense strand
ggaggagaaucgagcaauc

SEQ ID NO: 2008064 - RNA, 19 nt, Homo sapiens
  misc_RNA (1)...(19): siRNA sense strand
gagcagagccaggugagaa

SEQ ID NO: 2008065 - RNA, 19 nt, Homo sapiens
  misc_RNA (1)...(19): siRNA sense strand
gggaagaccagcgacauuu

SEQ ID NO: 2008066 - RNA, 19 nt, Homo sapiens
  misc_RNA (1)...(19): siRNA sense strand
caacagaagaaccucagaa

SEQ ID NO: 2008067 - RNA, 19 nt, Homo sapiens
  misc_RNA (1)...(19): siRNA sense strand
ggaggcaaauccagcaucu

SEQ ID NO: 2008068 - RNA, 19 nt, Homo sapiens
  misc_RNA (1)...(19): siRNA sense strand
cagaagaaccucagaacau

SEQ ID NO: 2008069 - RNA, 19 nt, Homo sapiens
  misc_RNA (1)...(19): siRNA sense strand
ggagaaucgagcaaucuuu

SEQ ID NO: 2008070 - RNA, 19 nt, Homo sapiens
  misc_RNA (1)...(19): siRNA sense strand
caaggaucauguuuucuua

SEQ ID NO: 2008071 - RNA, 19 nt, Homo sapiens
  misc_RNA (1)...(19): siRNA sense strand
gaacccaccgggaggcaaa

SEQ ID NO: 2008072 - RNA, 19 nt, Homo sapiens
  misc_RNA (1)...(19): siRNA sense strand
gcaaauccagcaucuccuu

SEQ ID NO: 2008073 - RNA, 19 nt, Homo sapiens
  misc_RNA (1)...(19): siRNA sense strand
gagaaaggcagcgccagaa

SEQ ID NO: 2008074 - RNA, 19 nt, Homo sapiens
  misc_RNA (1)...(19): siRNA sense strand
ccucagaacauacccaaga

SEQ ID NO: 2008075 - RNA, 19 nt, Homo sapiens
  misc_RNA (1)...(19): siRNA sense strand
gaagaaccucagaacauac

SEQ ID NO: 2008076 - RNA, 19 nt, Homo sapiens
  misc_RNA (1)...(19): siRNA sense strand
gaaaggcagcgccagaaaa

SEQ ID NO: 2008077 - RNA, 19 nt, Homo sapiens
  misc_RNA (1)...(19): siRNA sense strand
gaucuuaaagcugcaagga

SEQ ID NO: 2008078 - RNA, 19 nt, Homo sapiens
  misc_RNA (1)...(19): siRNA sense strand
gagaaucgagcaaucuuuu

SEQ ID NO: 2008079 - RNA, 19 nt, Homo sapiens
  misc_RNA (1)...(19): siRNA sense strand
gaucauguuuucuuaugug

SEQ ID NO: 2008080 - RNA, 19 nt, Homo sapiens
  misc_RNA (1)...(19): siRNA sense strand
cggccucgcucucacaaca

SEQ ID NO: 2008081 - RNA, 19 nt, Homo sapiens
  misc_RNA (1)...(19): siRNA sense strand
aauccagcaucuccuucua

SEQ ID NO: 2008082 - RNA, 19 nt, Homo sapiens
  misc_RNA (1)...(19): siRNA sense strand
agaaaggcagcgccagaaa

SEQ ID NO: 2008083 - RNA, 19 nt, Homo sapiens
  misc_RNA (1)...(19): siRNA sense strand
ggaagaccagcgacauuuu

SEQ ID NO: 2008084 - RNA, 19 nt, Homo sapiens
  misc_RNA (1)...(19): siRNA sense strand
gguaaaggaagugguaucu

SEQ ID NO: 2008085 - RNA, 19 nt, Homo sapiens
  misc_RNA (1)...(19): siRNA sense strand
aaacaaacccaaggaucau

SEQ ID NO: 2008086 - RNA, 19 nt, Homo sapiens
  misc_RNA (1)...(19): siRNA sense strand
guaaaggaagugguaucuu

SEQ ID NO: 2008087 - RNA, 19 nt, Homo sapiens
  misc_RNA (1)...(19): siRNA sense strand
ugguaucuuugacgaauca

SEQ ID NO: 2008088 - RNA, 19 nt, Homo sapiens
  misc_RNA (1)...(19): siRNA sense strand
ugaaggagaagaaccaaaa

SEQ ID NO: 2008089 - RNA, 19 nt, Homo sapiens
  misc_RNA (1)...(19): siRNA sense strand
gaggagaaucgagcaaucu

SEQ ID NO: 2008090 - RNA, 19 nt, Homo sapiens
  misc_RNA (1)...(19): siRNA sense strand
ccuuccagcaggccuaaua

SEQ ID NO: 2008091 - RNA, 19 nt, Homo sapiens
  misc_RNA (1)...(19): siRNA sense strand
agugguaucuuugacgaau

SEQ ID NO: 2008092 - RNA, 19 nt, Homo sapiens
  misc_RNA (1)...(19): siRNA sense strand
uagaggaccugguagcuaa

SEQ ID NO: 2008093 - RNA, 19 nt, Homo sapiens
  misc_RNA (1)...(19): siRNA sense strand
ggagucauccucuucaaug

SEQ ID NO: 2008094 - RNA, 19 nt, Homo sapiens
  misc_RNA (1)...(19): siRNA sense strand
gcaggagcgcaaugaauuu

SEQ ID NO: 2008095 - RNA, 19 nt, Homo sapiens
  misc_RNA (1)...(19): siRNA sense strand
ccgaccaccuucuaucuuu

SEQ ID NO: 2008096 - RNA, 19 nt, Homo sapiens
  misc_RNA (1)...(19): siRNA sense strand
cccaggagaugaaguguau

SEQ ID NO: 2008097 - RNA, 19 nt, Homo sapiens
  misc_RNA (1)...(19): siRNA sense strand
gcagaccgaccaccuucua

SEQ ID NO: 2008098 - RNA, 19 nt, Homo sapiens
  misc_RNA (1)...(19): siRNA sense strand
gagcaggagcgcaaugaau

SEQ ID NO: 2008099 - RNA, 19 nt, Homo sapiens
  misc_RNA (1)...(19): siRNA sense strand
ggagaugaaguguauucuu

SEQ ID NO: 2008100 - RNA, 19 nt, Homo sapiens
  misc_RNA (1)...(19): siRNA sense strand
ucagacagcuggaguucag

SEQ ID NO: 2008101 - RNA, 19 nt, Homo sapiens
  misc_RNA (1)...(19): siRNA sense strand
gauagucuggagcagcuua

SEQ ID NO: 2008102 - RNA, 19 nt, Homo sapiens
  misc_RNA (1)...(19): siRNA sense strand
uuacaaccacugcuggaua

SEQ ID NO: 2008103 - RNA, 19 nt, Homo sapiens
  misc_RNA (1)...(19): siRNA sense strand
ccacuggagucauccucuu

SEQ ID NO: 2008104 - RNA, 19 nt, Homo sapiens
  misc_RNA (1)...(19): siRNA sense strand
ggagcgcaaugaauuuguc

SEQ ID NO: 2008105 - RNA, 19 nt, Homo sapiens
  misc_RNA (1)...(19): siRNA sense strand
cgaccaccuucuaucuuug

SEQ ID NO: 2008106 - RNA, 19 nt, Homo sapiens
  misc_RNA (1)...(19): siRNA sense strand
uacaaccacugcuggauag

SEQ ID NO: 2008107 - RNA, 19 nt, Homo sapiens
  misc_RNA (1)...(19): siRNA sense strand
gcgcaaugaauuugucaga

SEQ ID NO: 2008108 - RNA, 19 nt, Homo sapiens
  misc_RNA (1)...(19): siRNA sense strand
gcgugaacguuuccuagag

SEQ ID NO: 2008109 - RNA, 19 nt, Homo sapiens
  misc_RNA (1)...(19): siRNA sense strand
ccacuauccuucccaucuc

SEQ ID NO: 2008110 - RNA, 19 nt, Homo sapiens
  misc_RNA (1)...(19): siRNA sense strand
gaccaccuucuaucuuuga

SEQ ID NO: 2008111 - RNA, 19 nt, Homo sapiens
  misc_RNA (1)...(19): siRNA sense strand
ucacugguuugccaauugg

SEQ ID NO: 2008112 - RNA, 19 nt, Homo sapiens
  misc_RNA (1)...(19): siRNA sense strand
caggagaugaaguguauuc

SEQ ID NO: 2008113 - RNA, 19 nt, Homo sapiens
  misc_RNA (1)...(19): siRNA sense strand
gagugccagcuacaucuuu

SEQ ID NO: 2008114 - RNA, 19 nt, Homo sapiens
  misc_RNA (1)...(19): siRNA sense strand
ccucuucaaugccacuauc

SEQ ID NO: 2008115 - RNA, 19 nt, Homo sapiens
  misc_RNA (1)...(19): siRNA sense strand
agcaggagcgcaaugaauu

SEQ ID NO: 2008116 - RNA, 19 nt, Homo sapiens
  misc_RNA (1)...(19): siRNA sense strand
cuagaggaccugguagcua

SEQ ID NO: 2008117 - RNA, 19 nt, Homo sapiens
  misc_RNA (1)...(19): siRNA sense strand
guguauucuucacugguuu

SEQ ID NO: 2008118 - RNA, 19 nt, Homo sapiens
  misc_RNA (1)...(19): siRNA sense strand
gaccgaccaccuucuaucu

SEQ ID NO: 2008119 - RNA, 19 nt, Homo sapiens
  misc_RNA (1)...(19): siRNA sense strand
cuacaucuuugggaucagu

SEQ ID NO: 2008120 - RNA, 19 nt, Homo sapiens
  misc_RNA (1)...(19): siRNA sense strand
gagucauccucuucaaugc

SEQ ID NO: 2008121 - RNA, 19 nt, Homo sapiens
  misc_RNA (1)...(19): siRNA sense strand
ccccuccucugaugucuua

SEQ ID NO: 2008122 - RNA, 19 nt, Homo sapiens
  misc_RNA (1)...(19): siRNA sense strand
caggagcgcaaugaauuug

SEQ ID NO: 2008123 - RNA, 19 nt, Homo sapiens
  misc_RNA (1)...(19): siRNA sense strand
gccacuauccuucccaucu

SEQ ID NO: 2008124 - RNA, 19 nt, Homo sapiens
  misc_RNA (1)...(19): siRNA sense strand
gcaugaagcuauacaauug

SEQ ID NO: 2008125 - RNA, 19 nt, Homo sapiens
  misc_RNA (1)...(19): siRNA sense strand
gaagugaacuggagaugga

SEQ ID NO: 2008126 - RNA, 19 nt, Homo sapiens
  misc_RNA (1)...(19): siRNA sense strand
gauauuuggugaucucuug

SEQ ID NO: 2008127 - RNA, 19 nt, Homo sapiens
  misc_RNA (1)...(19): siRNA sense strand
gaagaggugugaaauacuc

SEQ ID NO: 2008128 - RNA, 19 nt, Homo sapiens
  misc_RNA (1)...(19): siRNA sense strand
gcagacagguacaggaugu

SEQ ID NO: 2008129 - RNA, 19 nt, Homo sapiens
  misc_RNA (1)...(19): siRNA sense strand
gcagaaugauagacucaga

SEQ ID NO: 2008130 - RNA, 19 nt, Homo sapiens
  misc_RNA (1)...(19): siRNA sense strand
gaaaaccaacuuacucuua

SEQ ID NO: 2008131 - RNA, 19 nt, Homo sapiens
  misc_RNA (1)...(19): siRNA sense strand
caagaucuccugaagaaug

SEQ ID NO: 2008132 - RNA, 19 nt, Homo sapiens
  misc_RNA (1)...(19): siRNA sense strand
gcaaaggaacgaucagaau

SEQ ID NO: 2008133 - RNA, 19 nt, Homo sapiens
  misc_RNA (1)...(19): siRNA sense strand
ggaugaauaugaacucuac

SEQ ID NO: 2008134 - RNA, 19 nt, Homo sapiens
  misc_RNA (1)...(19): siRNA sense strand
gagugaagacccuguguaa

SEQ ID NO: 2008135 - RNA, 19 nt, Homo sapiens
  misc_RNA (1)...(19): siRNA sense strand
aaagaagaggugugaaaua

SEQ ID NO: 2008136 - RNA, 19 nt, Homo sapiens
  misc_RNA (1)...(19): siRNA sense strand
caagcaagaucuccugaag

SEQ ID NO: 2008137 - RNA, 19 nt, Homo sapiens
  misc_RNA (1)...(19): siRNA sense strand
uuacagcacuggcccaaug

SEQ ID NO: 2008138 - RNA, 19 nt, Homo sapiens
  misc_RNA (1)...(19): siRNA sense strand
agcaagaucuccugaagaa

SEQ ID NO: 2008139 - RNA, 19 nt, Homo sapiens
  misc_RNA (1)...(19): siRNA sense strand
caacuuacucuuacugaga

SEQ ID NO: 2008140 - RNA, 19 nt, Homo sapiens
  misc_RNA (1)...(19): siRNA sense strand
gaaaagaagaggugugaaa

SEQ ID NO: 2008141 - RNA, 19 nt, Homo sapiens
  misc_RNA (1)...(19): siRNA sense strand
gaagcuauacaauuggaaa

SEQ ID NO: 2008142 - RNA, 19 nt, Homo sapiens
  misc_RNA (1)...(19): siRNA sense strand
gugaagacccuguguaauc

SEQ ID NO: 2008143 - RNA, 19 nt, Homo sapiens
  misc_RNA (1)...(19): siRNA sense strand
gugaagacccuguguaauc

SEQ ID NO: 2008144 - RNA, 19 nt, Homo sapiens
  misc_RNA (1)...(19): siRNA sense strand
uaagugggaugagauacaa

SEQ ID NO: 2008145 - RNA, 19 nt, Homo sapiens
  misc_RNA (1)...(19): siRNA sense strand
aaacaacuuugguucauac

SEQ ID NO: 2008146 - RNA, 19 nt, Homo sapiens
  misc_RNA (1)...(19): siRNA sense strand
aagaagaggugugaaauac

SEQ ID NO: 2008147 - RNA, 19 nt, Homo sapiens
  misc_RNA (1)...(19): siRNA sense strand
ucacugagaauaggauuaa

SEQ ID NO: 2008148 - RNA, 19 nt, Homo sapiens
  misc_RNA (1)...(19): siRNA sense strand
aagcagcccuggagcagaa

SEQ ID NO: 2008149 - RNA, 19 nt, Homo sapiens
  misc_RNA (1)...(19): siRNA sense strand
cagaggaaacagaagauaa

SEQ ID NO: 2008150 - RNA, 19 nt, Homo sapiens
  misc_RNA (1)...(19): siRNA sense strand
ggagugaagacccugugua

SEQ ID NO: 2008151 - RNA, 19 nt, Homo sapiens
  misc_RNA (1)...(19): siRNA sense strand
gcgugaagacccuguguaa

SEQ ID NO: 2008152 - RNA, 19 nt, Homo sapiens
  misc_RNA (1)...(19): siRNA sense strand
gaagacggcggacauggau

SEQ ID NO: 2008153 - RNA, 19 nt, Homo sapiens
  misc_RNA (1)...(19): siRNA sense strand
gggaagagcugaggaugcu

SEQ ID NO: 2008154 - RNA, 19 nt, Homo sapiens
  misc_RNA (1)...(19): siRNA sense strand
ggaacgaucagaaucaucu

SEQ ID NO: 2008155 - RNA, 19 nt, Homo sapiens
  misc_RNA (1)...(19): siRNA sense strand
caaaggaacgaucagaauc

SEQ ID NO: 2008156 - RNA, 19 nt, Homo sapiens
  misc_RNA (1)...(19): siRNA sense strand
gagcaugaagcuauacaau

SEQ ID NO: 2008157 - RNA, 19 nt, Homo sapiens
  misc_RNA (1)...(19): siRNA sense strand
ugaagacccuguguaaucu

SEQ ID NO: 2008158 - RNA, 19 nt, Homo sapiens
  misc_RNA (1)...(19): siRNA sense strand
cauacuggaauuucagaua

SEQ ID NO: 2008159 - RNA, 19 nt, Homo sapiens
  misc_RNA (1)...(19): siRNA sense strand
aauuguaccugaaguggaa

SEQ ID NO: 2008160 - RNA, 19 nt, Homo sapiens
  misc_RNA (1)...(19): siRNA sense strand
ugaagacccuguguaaucu

SEQ ID NO: 2008161 - RNA, 19 nt, Homo sapiens
  misc_RNA (1)...(19): siRNA sense strand
ggacgucuaccucuacauc

SEQ ID NO: 2008162 - RNA, 19 nt, Homo sapiens
  misc_RNA (1)...(19): siRNA sense strand
aagaucuccugaagaauga

SEQ ID NO: 2008163 - RNA, 19 nt, Homo sapiens
  misc_RNA (1)...(19): siRNA sense strand
uguguaaucugaagaaacu

SEQ ID NO: 2008164 - RNA, 19 nt, Homo sapiens
  misc_RNA (1)...(19): siRNA sense strand
ggagauggagcuggcauug

SEQ ID NO: 2008165 - RNA, 19 nt, Homo sapiens
  misc_RNA (1)...(19): siRNA sense strand
gcgggagccugaauuguac

SEQ ID NO: 2008166 - RNA, 19 nt, Homo sapiens
  misc_RNA (1)...(19): siRNA sense strand
ggagcgggagccugaauug

SEQ ID NO: 2008167 - RNA, 19 nt, Homo sapiens
  misc_RNA (1)...(19): siRNA sense strand
aaugauagacucagaagug

SEQ ID NO: 2008168 - RNA, 19 nt, Homo sapiens
  misc_RNA (1)...(19): siRNA sense strand
cagggaagguggcgaggau

SEQ ID NO: 2008169 - RNA, 19 nt, Homo sapiens
  misc_RNA (1)...(19): siRNA sense strand
gagauacaagcucuggaaa

SEQ ID NO: 2008170 - RNA, 19 nt, Homo sapiens
  misc_RNA (1)...(19): siRNA sense strand
agaaucaucugagaaacau

SEQ ID NO: 2008171 - RNA, 19 nt, Homo sapiens
  misc_RNA (1)...(19): siRNA sense strand
gcagcaggagcuccagaaa

SEQ ID NO: 2008172 - RNA, 19 nt, Homo sapiens
  misc_RNA (1)...(19): siRNA sense strand
cuauacaauuggaaacaga

SEQ ID NO: 2008173 - RNA, 19 nt, Homo sapiens
  misc_RNA (1)...(19): siRNA sense strand
aaaggaacgaucagaauca

SEQ ID NO: 2008174 - RNA, 19 nt, Homo sapiens
  misc_RNA (1)...(19): siRNA sense strand
gagcagaaugauagacuca

SEQ ID NO: 2008175 - RNA, 19 nt, Homo sapiens
  misc_RNA (1)...(19): siRNA sense strand
ugagauacaagcucuggaa

SEQ ID NO: 2008176 - RNA, 19 nt, Homo sapiens
  misc_RNA (1)...(19): siRNA sense strand
guaagugggaugagauaca

SEQ ID NO: 2008177 - RNA, 19 nt, Homo sapiens
  misc_RNA (1)...(19): siRNA sense strand
gggaagguggcgaggauga

SEQ ID NO: 2008178 - RNA, 19 nt, Homo sapiens
  misc_RNA (1)...(19): siRNA sense strand
acacuucagaggaggauuu

SEQ ID NO: 2008179 - RNA, 19 nt, Homo sapiens
  misc_RNA (1)...(19): siRNA sense strand
gagaauaggauuaaaagca

SEQ ID NO: 2008180 - RNA, 19 nt, Homo sapiens
  misc_RNA (1)...(19): siRNA sense strand
acuugaaggugcugugcua

SEQ ID NO: 2008181 - RNA, 19 nt, Homo sapiens
  misc_RNA (1)...(19): siRNA sense strand
ucagaggaaacagaagaua

SEQ ID NO: 2008182 - RNA, 19 nt, Homo sapiens
  misc_RNA (1)...(19): siRNA sense strand
gauagacucagaagugaac

SEQ ID NO: 2008183 - RNA, 19 nt, Homo sapiens
  misc_RNA (1)...(19): siRNA sense strand
ggaagguggcgaggaugaa

SEQ ID NO: 2008184 - RNA, 19 nt, Homo sapiens
  misc_RNA (1)...(19): siRNA sense strand
aaucagaggaaacagaaga

SEQ ID NO: 2008185 - RNA, 19 nt, Homo sapiens
  misc_RNA (1)...(19): siRNA sense strand
caguaagugggaugagaua

SEQ ID NO: 2008186 - RNA, 19 nt, Homo sapiens
  misc_RNA (1)...(19): siRNA sense strand
cugagaagguugaaaagaa

SEQ ID NO: 2008187 - RNA, 19 nt, Homo sapiens
  misc_RNA (1)...(19): siRNA sense strand
gcgcagacagguacaggau

SEQ ID NO: 2008188 - RNA, 19 nt, Homo sapiens
  misc_RNA (1)...(19): siRNA sense strand
gcuauacaauuggaaacag

SEQ ID NO: 2008189 - RNA, 19 nt, Homo sapiens
  misc_RNA (1)...(19): siRNA sense strand
gguucauacuggaauuuca

SEQ ID NO: 2008190 - RNA, 19 nt, Homo sapiens
  misc_RNA (1)...(19): siRNA sense strand
gcccuggagcagaaugaua

SEQ ID NO: 2008191 - RNA, 19 nt, Homo sapiens
  misc_RNA (1)...(19): siRNA sense strand
ugaauaugaacucuacaug

SEQ ID NO: 2008192 - RNA, 19 nt, Homo sapiens
  misc_RNA (1)...(19): siRNA sense strand
ugaagacggcggacaugga

SEQ ID NO: 2008193 - RNA, 19 nt, Homo sapiens
  misc_RNA (1)...(19): siRNA sense strand
gaccggcaccacuauguca

SEQ ID NO: 2008194 - RNA, 19 nt, Homo sapiens
  misc_RNA (1)...(19): siRNA sense strand
aacuuacucuuacugagaa

SEQ ID NO: 2008195 - RNA, 19 nt, Homo sapiens
  misc_RNA (1)...(19): siRNA sense strand
gaaccggcuucagaaagac

SEQ ID NO: 2008196 - RNA, 19 nt, Homo sapiens
  misc_RNA (1)...(19): siRNA sense strand
agauggagcuggcauugcu

SEQ ID NO: 2008197 - RNA, 19 nt, Homo sapiens
  misc_RNA (1)...(19): siRNA sense strand
ugaaggugcugugcuacca

SEQ ID NO: 2008198 - RNA, 19 nt, Homo sapiens
  misc_RNA (1)...(19): siRNA sense strand
augauagacucagaaguga

SEQ ID NO: 2008199 - RNA, 19 nt, Homo sapiens
  misc_RNA (1)...(19): siRNA sense strand
acaguucuuugauauuugg

SEQ ID NO: 2008200 - RNA, 19 nt, Homo sapiens
  misc_RNA (1)...(19): siRNA sense strand
agcgggagccugaauugua

SEQ ID NO: 2008201 - RNA, 19 nt, Homo sapiens
  misc_RNA (1)...(19): siRNA sense strand
gaagguggcgaggaugaag

SEQ ID NO: 2008202 - RNA, 19 nt, Homo sapiens
  misc_RNA (1)...(19): siRNA sense strand
cagauaucacugagaauag

SEQ ID NO: 2008203 - RNA, 19 nt, Homo sapiens
  misc_RNA (1)...(19): siRNA sense strand
aagacccuguguaaucuga

SEQ ID NO: 2008204 - RNA, 19 nt, Homo sapiens
  misc_RNA (1)...(19): siRNA sense strand
aagacccuguguaaucuga

SEQ ID NO: 2008205 - RNA, 19 nt, Homo sapiens
  misc_RNA (1)...(19): siRNA sense strand
cagaaugauagacucagaa

SEQ ID NO: 2008206 - RNA, 19 nt, Homo sapiens
  misc_RNA (1)...(19): siRNA sense strand
caguggaggcugucagaga

SEQ ID NO: 2008207 - RNA, 19 nt, Homo sapiens
  misc_RNA (1)...(19): siRNA sense strand
uuaaaagcauagagcauga

SEQ ID NO: 2008208 - RNA, 19 nt, Homo sapiens
  misc_RNA (1)...(19): siRNA sense strand
ccaagcaagaucuccugaa

SEQ ID NO: 2008209 - RNA, 19 nt, Homo sapiens
  misc_RNA (1)...(19): siRNA sense strand
gauaucacugagaauagga

SEQ ID NO: 2008210 - RNA, 19 nt, Homo sapiens
  misc_RNA (1)...(19): siRNA sense strand
gcucuucuggcucaacuca

SEQ ID NO: 2008211 - RNA, 19 nt, Homo sapiens
  misc_RNA (1)...(19): siRNA sense strand
gacccuguguaaucugaag

SEQ ID NO: 2008212 - RNA, 19 nt, Homo sapiens
  misc_RNA (1)...(19): siRNA sense strand
agcaugaagcuauacaauu

SEQ ID NO: 2008213 - RNA, 19 nt, Homo sapiens
  misc_RNA (1)...(19): siRNA sense strand
gacccuguguaaucugaag

SEQ ID NO: 2008214 - RNA, 19 nt, Homo sapiens
  misc_RNA (1)...(19): siRNA sense strand
aaaccaacuuacucuuacu

SEQ ID NO: 2008215 - RNA, 19 nt, Homo sapiens
  misc_RNA (1)...(19): siRNA sense strand
gcacaguacgaggcucuuc

SEQ ID NO: 2008216 - RNA, 19 nt, Homo sapiens
  misc_RNA (1)...(19): siRNA sense strand
gaggagcgggagccugaau

SEQ ID NO: 2008217 - RNA, 19 nt, Homo sapiens
  misc_RNA (1)...(19): siRNA sense strand
caagugaacuaauuguuga

SEQ ID NO: 2008218 - RNA, 19 nt, Homo sapiens
  misc_RNA (1)...(19): siRNA sense strand
gggaagcacugaauauuuc

SEQ ID NO: 2008219 - RNA, 19 nt, Homo sapiens
  misc_RNA (1)...(19): siRNA sense strand
ggaauuacauaagcccuaa

SEQ ID NO: 2008220 - RNA, 19 nt, Homo sapiens
  misc_RNA (1)...(19): siRNA sense strand
agaaggaucugaagucgaa

SEQ ID NO: 2008221 - RNA, 19 nt, Homo sapiens
  misc_RNA (1)...(19): siRNA sense strand
gaaccagaaugugaacaaa

SEQ ID NO: 2008222 - RNA, 19 nt, Homo sapiens
  misc_RNA (1)...(19): siRNA sense strand
gcauugguguauggaauua

SEQ ID NO: 2008223 - RNA, 19 nt, Homo sapiens
  misc_RNA (1)...(19): siRNA sense strand
gugcauaucuuuuaccaua

SEQ ID NO: 2008224 - RNA, 19 nt, Homo sapiens
  misc_RNA (1)...(19): siRNA sense strand
agagaaagauacagauguu

SEQ ID NO: 2008225 - RNA, 19 nt, Homo sapiens
  misc_RNA (1)...(19): siRNA sense strand
ucaaaggcauucagucuuc

SEQ ID NO: 2008226 - RNA, 19 nt, Homo sapiens
  misc_RNA (1)...(19): siRNA sense strand
gaaagauacagauguugaa

SEQ ID NO: 2008227 - RNA, 19 nt, Homo sapiens
  misc_RNA (1)...(19): siRNA sense strand
gaagagaaagauacagaug

SEQ ID NO: 2008228 - RNA, 19 nt, Homo sapiens
  misc_RNA (1)...(19): siRNA sense strand
agauacagauguugaagaa

SEQ ID NO: 2008229 - RNA, 19 nt, Homo sapiens
  misc_RNA (1)...(19): siRNA sense strand
gggauuggauuugcaaguu

SEQ ID NO: 2008230 - RNA, 19 nt, Homo sapiens
  misc_RNA (1)...(19): siRNA sense strand
ggcuuaaacuggaagauga

SEQ ID NO: 2008231 - RNA, 19 nt, Homo sapiens
  misc_RNA (1)...(19): siRNA sense strand
ggauuggauuugcaaguug

SEQ ID NO: 2008232 - RNA, 19 nt, Homo sapiens
  misc_RNA (1)...(19): siRNA sense strand
caaguuguguagugugcua

SEQ ID NO: 2008233 - RNA, 19 nt, Homo sapiens
  misc_RNA (1)...(19): siRNA sense strand
guucugccaccaccuauua

SEQ ID NO: 2008234 - RNA, 19 nt, Homo sapiens
  misc_RNA (1)...(19): siRNA sense strand
gaacaguaaacuacaauac

SEQ ID NO: 2008235 - RNA, 19 nt, Homo sapiens
  misc_RNA (1)...(19): siRNA sense strand
gaucaaaggcauucagucu

SEQ ID NO: 2008236 - RNA, 19 nt, Homo sapiens
  misc_RNA (1)...(19): siRNA sense strand
ggaacaguaaacuacaaua

SEQ ID NO: 2008237 - RNA, 19 nt, Homo sapiens
  misc_RNA (1)...(19): siRNA sense strand
cuacuuaugguaauaggua

SEQ ID NO: 2008238 - RNA, 19 nt, Homo sapiens
  misc_RNA (1)...(19): siRNA sense strand
gaagaugaaagaccagcuu

SEQ ID NO: 2008239 - RNA, 19 nt, Homo sapiens
  misc_RNA (1)...(19): siRNA sense strand
guacagggaagcacugaau

SEQ ID NO: 2008240 - RNA, 19 nt, Homo sapiens
  misc_RNA (1)...(19): siRNA sense strand
gaaagaccagcuuggaaca

SEQ ID NO: 2008241 - RNA, 19 nt, Homo sapiens
  misc_RNA (1)...(19): siRNA sense strand
ggcauucagucuucuggaa

SEQ ID NO: 2008242 - RNA, 19 nt, Homo sapiens
  misc_RNA (1)...(19): siRNA sense strand
cagcauugguguauggaau

SEQ ID NO: 2008243 - RNA, 19 nt, Homo sapiens
  misc_RNA (1)...(19): siRNA sense strand
ugaagucgaagaugaaaga

SEQ ID NO: 2008244 - RNA, 19 nt, Homo sapiens
  misc_RNA (1)...(19): siRNA sense strand
agaaagauacagauguuga

SEQ ID NO: 2008245 - RNA, 19 nt, Homo sapiens
  misc_RNA (1)...(19): siRNA sense strand
uuacugagucugucaaaga

SEQ ID NO: 2008246 - RNA, 19 nt, Homo sapiens
  misc_RNA (1)...(19): siRNA sense strand
ggaacucucugugggucaa

SEQ ID NO: 2008247 - RNA, 19 nt, Homo sapiens
  misc_RNA (1)...(19): siRNA sense strand
gaugaaagaccagcuugga

SEQ ID NO: 2008248 - RNA, 19 nt, Homo sapiens
  misc_RNA (1)...(19): siRNA sense strand
gauuggauuugcaaguugu

SEQ ID NO: 2008249 - RNA, 19 nt, Homo sapiens
  misc_RNA (1)...(19): siRNA sense strand
ggaagagaaagauacagau

SEQ ID NO: 2008250 - RNA, 19 nt, Homo sapiens
  misc_RNA (1)...(19): siRNA sense strand
caaguuggauuuucuguag

SEQ ID NO: 2008251 - RNA, 19 nt, Homo sapiens
  misc_RNA (1)...(19): siRNA sense strand
gcauucagucuucuggaaa

SEQ ID NO: 2008252 - RNA, 19 nt, Homo sapiens
  misc_RNA (1)...(19): siRNA sense strand
cuacuacaacgucaucauu

SEQ ID NO: 2008253 - RNA, 19 nt, Homo sapiens
  misc_RNA (1)...(19): siRNA sense strand
uagaugaugauguuacuga

SEQ ID NO: 2008254 - RNA, 19 nt, Homo sapiens
  misc_RNA (1)...(19): siRNA sense strand
uaggaaauguguggcgauu

SEQ ID NO: 2008255 - RNA, 19 nt, Homo sapiens
  misc_RNA (1)...(19): siRNA sense strand
gaccagcuuggaacaguaa

SEQ ID NO: 2008256 - RNA, 19 nt, Homo sapiens
  misc_RNA (1)...(19): siRNA sense strand
ugaagaaggaucugaaguc

SEQ ID NO: 2008257 - RNA, 19 nt, Homo sapiens
  misc_RNA (1)...(19): siRNA sense strand
ucaguguccuuuggugaaa

SEQ ID NO: 2008258 - RNA, 19 nt, Homo sapiens
  misc_RNA (1)...(19): siRNA sense strand
uuacauaagcccuaaacug

SEQ ID NO: 2008259 - RNA, 19 nt, Homo sapiens
  misc_RNA (1)...(19): siRNA sense strand
agaccagcuuggaacagua

SEQ ID NO: 2008260 - RNA, 19 nt, Homo sapiens
  misc_RNA (1)...(19): siRNA sense strand
gagaauuagaugaugaugu

SEQ ID NO: 2008261 - RNA, 19 nt, Homo sapiens
  misc_RNA (1)...(19): siRNA sense strand
agacgcagcugaugaugcu

SEQ ID NO: 2008262 - RNA, 19 nt, Homo sapiens
  misc_RNA (1)...(19): siRNA sense strand
cagggaagcacugaauauu

SEQ ID NO: 2008263 - RNA, 19 nt, Homo sapiens
  misc_RNA (1)...(19): siRNA sense strand
gcuggaguuuguuuuauuu

SEQ ID NO: 2008264 - RNA, 19 nt, Homo sapiens
  misc_RNA (1)...(19): siRNA sense strand
guuguguagugugcuauuu

SEQ ID NO: 2008265 - RNA, 19 nt, Homo sapiens
  misc_RNA (1)...(19): siRNA sense strand
ggccaggaagagaaagaua

SEQ ID NO: 2008266 - RNA, 19 nt, Homo sapiens
  misc_RNA (1)...(19): siRNA sense strand
agggaagcacugaauauuu

SEQ ID NO: 2008267 - RNA, 19 nt, Homo sapiens
  misc_RNA (1)...(19): siRNA sense strand
gagaaagauacagauguug

SEQ ID NO: 2008268 - RNA, 19 nt, Homo sapiens
  misc_RNA (1)...(19): siRNA sense strand
gggcuuaaacuggaagaug

SEQ ID NO: 2008269 - RNA, 19 nt, Homo sapiens
  misc_RNA (1)...(19): siRNA sense strand
ugaagacgcagcugaugau

SEQ ID NO: 2008270 - RNA, 19 nt, Homo sapiens
  misc_RNA (1)...(19): siRNA sense strand
guggcgauuuccauaccua

SEQ ID NO: 2008271 - RNA, 19 nt, Homo sapiens
  misc_RNA (1)...(19): siRNA sense strand
uugcuuggcuaugaucaaa

SEQ ID NO: 2008272 - RNA, 19 nt, Homo sapiens
  misc_RNA (1)...(19): siRNA sense strand
caaugaagacgcagcugau

SEQ ID NO: 2008273 - RNA, 19 nt, Homo sapiens
  misc_RNA (1)...(19): siRNA sense strand
aaaguucugccaccaccua

SEQ ID NO: 2008274 - RNA, 19 nt, Homo sapiens
  misc_RNA (1)...(19): siRNA sense strand
acagggaagcacugaauau

SEQ ID NO: 2008275 - RNA, 19 nt, Homo sapiens
  misc_RNA (1)...(19): siRNA sense strand
accagaaugugaacaaagu

SEQ ID NO: 2008276 - RNA, 19 nt, Homo sapiens
  misc_RNA (1)...(19): siRNA sense strand
uggauuuucuguagguuua

SEQ ID NO: 2008277 - RNA, 19 nt, Homo sapiens
  misc_RNA (1)...(19): siRNA sense strand
cgaggcagcauugguguau

SEQ ID NO: 2008278 - RNA, 19 nt, Homo sapiens
  misc_RNA (1)...(19): siRNA sense strand
gggcggugcauaucuuuua

SEQ ID NO: 2008279 - RNA, 19 nt, Homo sapiens
  misc_RNA (1)...(19): siRNA sense strand
gaugaugcuuuuaagacaa

SEQ ID NO: 2008280 - RNA, 19 nt, Homo sapiens
  misc_RNA (1)...(19): siRNA sense strand
caaaggcauucagucuucu

SEQ ID NO: 2008281 - RNA, 19 nt, Homo sapiens
  misc_RNA (1)...(19): siRNA sense strand
gcuaugaucaaaggcauuc

SEQ ID NO: 2008282 - RNA, 19 nt, Homo sapiens
  misc_RNA (1)...(19): siRNA sense strand
gcuuggcuaugaucaaagg

SEQ ID NO: 2008283 - RNA, 19 nt, Homo sapiens
  misc_RNA (1)...(19): siRNA sense strand
ggauuugcaaguuguguag

SEQ ID NO: 2008284 - RNA, 19 nt, Homo sapiens
  misc_RNA (1)...(19): siRNA sense strand
gaagacgcagcugaugaug

SEQ ID NO: 2008285 - RNA, 19 nt, Homo sapiens
  misc_RNA (1)...(19): siRNA sense strand
uacagauguugaagaagga

SEQ ID NO: 2008286 - RNA, 19 nt, Homo sapiens
  misc_RNA (1)...(19): siRNA sense strand
ccaggaagagaaagauaca

SEQ ID NO: 2008287 - RNA, 19 nt, Homo sapiens
  misc_RNA (1)...(19): siRNA sense strand
uguagaaccagaaugugaa

SEQ ID NO: 2008288 - RNA, 19 nt, Homo sapiens
  misc_RNA (1)...(19): siRNA sense strand
auaccuaugucagaagaau

SEQ ID NO: 2008289 - RNA, 19 nt, Homo sapiens
  misc_RNA (1)...(19): siRNA sense strand
aucauuggcuggaguuugu

SEQ ID NO: 2008290 - RNA, 19 nt, Homo sapiens
  misc_RNA (1)...(19): siRNA sense strand
guagugugcuauuuuguag

SEQ ID NO: 2008291 - RNA, 19 nt, Homo sapiens
  misc_RNA (1)...(19): siRNA sense strand
gaauuacauaagcccuaaa

SEQ ID NO: 2008292 - RNA, 19 nt, Homo sapiens
  misc_RNA (1)...(19): siRNA sense strand
gcgaggcagcauuggugua

SEQ ID NO: 2008293 - RNA, 19 nt, Homo sapiens
  misc_RNA (1)...(19): siRNA sense strand
uacagggaagcacugaaua

SEQ ID NO: 2008294 - RNA, 19 nt, Homo sapiens
  misc_RNA (1)...(19): siRNA sense strand
gcuuggaacaguaaacuac

SEQ ID NO: 2008295 - RNA, 19 nt, Homo sapiens
  misc_RNA (1)...(19): siRNA sense strand
aggaagagaaagauacaga

SEQ ID NO: 2008296 - RNA, 19 nt, Homo sapiens
  misc_RNA (1)...(19): siRNA sense strand
aagagaaagauacagaugu

SEQ ID NO: 2008297 - RNA, 19 nt, Homo sapiens
  misc_RNA (1)...(19): siRNA sense strand
gaugaugauguuacugagu

SEQ ID NO: 2008298 - RNA, 19 nt, Homo sapiens
  misc_RNA (1)...(19): siRNA sense strand
ucuguagguuuaggaaaug

SEQ ID NO: 2008299 - RNA, 19 nt, Homo sapiens
  misc_RNA (1)...(19): siRNA sense strand
agaaccagaaugugaacaa

SEQ ID NO: 2008300 - RNA, 19 nt, Homo sapiens
  misc_RNA (1)...(19): siRNA sense strand
cugccugggucaugguuug

SEQ ID NO: 2008301 - RNA, 19 nt, Homo sapiens
  misc_RNA (1)...(19): siRNA sense strand
caagugaacuaauuguuga

SEQ ID NO: 2008302 - RNA, 19 nt, Homo sapiens
  misc_RNA (1)...(19): siRNA sense strand
gggaagcacugaauauuuc

SEQ ID NO: 2008303 - RNA, 19 nt, Homo sapiens
  misc_RNA (1)...(19): siRNA sense strand
ggaauuacauaagcccuaa

SEQ ID NO: 2008304 - RNA, 19 nt, Homo sapiens
  misc_RNA (1)...(19): siRNA sense strand
agaaggaucugaagucgaa

SEQ ID NO: 2008305 - RNA, 19 nt, Homo sapiens
  misc_RNA (1)...(19): siRNA sense strand
gaaccagaaugugaacaaa

SEQ ID NO: 2008306 - RNA, 19 nt, Homo sapiens
  misc_RNA (1)...(19): siRNA sense strand
gcauugguguauggaauua

SEQ ID NO: 2008307 - RNA, 19 nt, Homo sapiens
  misc_RNA (1)...(19): siRNA sense strand
gugcauaucuuuuaccaua

SEQ ID NO: 2008308 - RNA, 19 nt, Homo sapiens
  misc_RNA (1)...(19): siRNA sense strand
agagaaagauacagauguu

SEQ ID NO: 2008309 - RNA, 19 nt, Homo sapiens
  misc_RNA (1)...(19): siRNA sense strand
ucaaaggcauucagucuuc

SEQ ID NO: 2008310 - RNA, 19 nt, Homo sapiens
  misc_RNA (1)...(19): siRNA sense strand
gaaagauacagauguugaa

SEQ ID NO: 2008311 - RNA, 19 nt, Homo sapiens
  misc_RNA (1)...(19): siRNA sense strand
gaagagaaagauacagaug

SEQ ID NO: 2008312 - RNA, 19 nt, Homo sapiens
  misc_RNA (1)...(19): siRNA sense strand
agauacagauguugaagaa

SEQ ID NO: 2008313 - RNA, 19 nt, Homo sapiens
  misc_RNA (1)...(19): siRNA sense strand
gggauuggauuugcaaguu

SEQ ID NO: 2008314 - RNA, 19 nt, Homo sapiens
  misc_RNA (1)...(19): siRNA sense strand
ggcuuaaacuggaagauga

SEQ ID NO: 2008315 - RNA, 19 nt, Homo sapiens
  misc_RNA (1)...(19): siRNA sense strand
ggauuggauuugcaaguug

SEQ ID NO: 2008316 - RNA, 19 nt, Homo sapiens
  misc_RNA (1)...(19): siRNA sense strand
caaguuguguagugugcua

SEQ ID NO: 2008317 - RNA, 19 nt, Homo sapiens
  misc_RNA (1)...(19): siRNA sense strand
guucugccaccaccuauua

SEQ ID NO: 2008318 - RNA, 19 nt, Homo sapiens
  misc_RNA (1)...(19): siRNA sense strand
gaacaguaaacuacaauac

SEQ ID NO: 2008319 - RNA, 19 nt, Homo sapiens
  misc_RNA (1)...(19): siRNA sense strand
gaucaaaggcauucagucu

SEQ ID NO: 2008320 - RNA, 19 nt, Homo sapiens
  misc_RNA (1)...(19): siRNA sense strand
ggaacaguaaacuacaaua

SEQ ID NO: 2008321 - RNA, 19 nt, Homo sapiens
  misc_RNA (1)...(19): siRNA sense strand
cuacuuaugguaauaggua

SEQ ID NO: 2008322 - RNA, 19 nt, Homo sapiens
  misc_RNA (1)...(19): siRNA sense strand
gaagaugaaagaccagcuu

SEQ ID NO: 2008323 - RNA, 19 nt, Homo sapiens
  misc_RNA (1)...(19): siRNA sense strand
guacagggaagcacugaau

SEQ ID NO: 2008324 - RNA, 19 nt, Homo sapiens
  misc_RNA (1)...(19): siRNA sense strand
gaaagaccagcuuggaaca

SEQ ID NO: 2008325 - RNA, 19 nt, Homo sapiens
  misc_RNA (1)...(19): siRNA sense strand
ggcauucagucuucuggaa

SEQ ID NO: 2008326 - RNA, 19 nt, Homo sapiens
  misc_RNA (1)...(19): siRNA sense strand
cagcauugguguauggaau

SEQ ID NO: 2008327 - RNA, 19 nt, Homo sapiens
  misc_RNA (1)...(19): siRNA sense strand
ugaagucgaagaugaaaga

SEQ ID NO: 2008328 - RNA, 19 nt, Homo sapiens
  misc_RNA (1)...(19): siRNA sense strand
agaaagauacagauguuga

SEQ ID NO: 2008329 - RNA, 19 nt, Homo sapiens
  misc_RNA (1)...(19): siRNA sense strand
uuacugagucugucaaaga

SEQ ID NO: 2008330 - RNA, 19 nt, Homo sapiens
  misc_RNA (1)...(19): siRNA sense strand
ggaacucucugugggucaa

SEQ ID NO: 2008331 - RNA, 19 nt, Homo sapiens
  misc_RNA (1)...(19): siRNA sense strand
gaugaaagaccagcuugga

SEQ ID NO: 2008332 - RNA, 19 nt, Homo sapiens
  misc_RNA (1)...(19): siRNA sense strand
gauuggauuugcaaguugu

SEQ ID NO: 2008333 - RNA, 19 nt, Homo sapiens
  misc_RNA (1)...(19): siRNA sense strand
ggaagagaaagauacagau

SEQ ID NO: 2008334 - RNA, 19 nt, Homo sapiens
  misc_RNA (1)...(19): siRNA sense strand
caaguuggauuuucuguag

SEQ ID NO: 2008335 - RNA, 19 nt, Homo sapiens
  misc_RNA (1)...(19): siRNA sense strand
gcauucagucuucuggaaa

SEQ ID NO: 2008336 - RNA, 19 nt, Homo sapiens
  misc_RNA (1)...(19): siRNA sense strand
cuacuacaacgucaucauu

SEQ ID NO: 2008337 - RNA, 19 nt, Homo sapiens
  misc_RNA (1)...(19): siRNA sense strand
uagaugaugauguuacuga

SEQ ID NO: 2008338 - RNA, 19 nt, Homo sapiens
  misc_RNA (1)...(19): siRNA sense strand
uaggaaauguguggcgauu

SEQ ID NO: 2008339 - RNA, 19 nt, Homo sapiens
  misc_RNA (1)...(19): siRNA sense strand
gaccagcuuggaacaguaa

SEQ ID NO: 2008340 - RNA, 19 nt, Homo sapiens
  misc_RNA (1)...(19): siRNA sense strand
ugaagaaggaucugaaguc

SEQ ID NO: 2008341 - RNA, 19 nt, Homo sapiens
  misc_RNA (1)...(19): siRNA sense strand
ucaguguccuuuggugaaa

SEQ ID NO: 2008342 - RNA, 19 nt, Homo sapiens
  misc_RNA (1)...(19): siRNA sense strand
uuacauaagcccuaaacug

SEQ ID NO: 2008343 - RNA, 19 nt, Homo sapiens
  misc_RNA (1)...(19): siRNA sense strand
agaccagcuuggaacagua

SEQ ID NO: 2008344 - RNA, 19 nt, Homo sapiens
  misc_RNA (1)...(19): siRNA sense strand
gagaauuagaugaugaugu

SEQ ID NO: 2008345 - RNA, 19 nt, Homo sapiens
  misc_RNA (1)...(19): siRNA sense strand
agacgcagcugaugaugcu

SEQ ID NO: 2008346 - RNA, 19 nt, Homo sapiens
  misc_RNA (1)...(19): siRNA sense strand
cagggaagcacugaauauu

SEQ ID NO: 2008347 - RNA, 19 nt, Homo sapiens
  misc_RNA (1)...(19): siRNA sense strand
gcuggaguuuguuuuauuu

SEQ ID NO: 2008348 - RNA, 19 nt, Homo sapiens
  misc_RNA (1)...(19): siRNA sense strand
guuguguagugugcuauuu

SEQ ID NO: 2008349 - RNA, 19 nt, Homo sapiens
  misc_RNA (1)...(19): siRNA sense strand
ggccaggaagagaaagaua

SEQ ID NO: 2008350 - RNA, 19 nt, Homo sapiens
  misc_RNA (1)...(19): siRNA sense strand
agggaagcacugaauauuu

SEQ ID NO: 2008351 - RNA, 19 nt, Homo sapiens
  misc_RNA (1)...(19): siRNA sense strand
gagaaagauacagauguug

SEQ ID NO: 2008352 - RNA, 19 nt, Homo sapiens
  misc_RNA (1)...(19): siRNA sense strand
gggcuuaaacuggaagaug

SEQ ID NO: 2008353 - RNA, 19 nt, Homo sapiens
  misc_RNA (1)...(19): siRNA sense strand
ugaagacgcagcugaugau

SEQ ID NO: 2008354 - RNA, 19 nt, Homo sapiens
  misc_RNA (1)...(19): siRNA sense strand
guggcgauuuccauaccua

SEQ ID NO: 2008355 - RNA, 19 nt, Homo sapiens
  misc_RNA (1)...(19): siRNA sense strand
uugcuuggcuaugaucaaa

SEQ ID NO: 2008356 - RNA, 19 nt, Homo sapiens
  misc_RNA (1)...(19): siRNA sense strand
caaugaagacgcagcugau

SEQ ID NO: 2008357 - RNA, 19 nt, Homo sapiens
  misc_RNA (1)...(19): siRNA sense strand
aaaguucugccaccaccua

SEQ ID NO: 2008358 - RNA, 19 nt, Homo sapiens
  misc_RNA (1)...(19): siRNA sense strand
acagggaagcacugaauau

SEQ ID NO: 2008359 - RNA, 19 nt, Homo sapiens
  misc_RNA (1)...(19): siRNA sense strand
accagaaugugaacaaagu

SEQ ID NO: 2008360 - RNA, 19 nt, Homo sapiens
  misc_RNA (1)...(19): siRNA sense strand
uggauuuucuguagguuua

SEQ ID NO: 2008361 - RNA, 19 nt, Homo sapiens
  misc_RNA (1)...(19): siRNA sense strand
cgaggcagcauugguguau

SEQ ID NO: 2008362 - RNA, 19 nt, Homo sapiens
  misc_RNA (1)...(19): siRNA sense strand
gggcggugcauaucuuuua

SEQ ID NO: 2008363 - RNA, 19 nt, Homo sapiens
  misc_RNA (1)...(19): siRNA sense strand
gaugaugcuuuuaagacaa

SEQ ID NO: 2008364 - RNA, 19 nt, Homo sapiens
  misc_RNA (1)...(19): siRNA sense strand
caaaggcauucagucuucu

SEQ ID NO: 2008365 - RNA, 19 nt, Homo sapiens
  misc_RNA (1)...(19): siRNA sense strand
gcuaugaucaaaggcauuc

SEQ ID NO: 2008366 - RNA, 19 nt, Homo sapiens
  misc_RNA (1)...(19): siRNA sense strand
gcuuggcuaugaucaaagg

SEQ ID NO: 2008367 - RNA, 19 nt, Homo sapiens
  misc_RNA (1)...(19): siRNA sense strand
ggauuugcaaguuguguag

SEQ ID NO: 2008368 - RNA, 19 nt, Homo sapiens
  misc_RNA (1)...(19): siRNA sense strand
gaagacgcagcugaugaug

SEQ ID NO: 2008369 - RNA, 19 nt, Homo sapiens
  misc_RNA (1)...(19): siRNA sense strand
uacagauguugaagaagga

SEQ ID NO: 2008370 - RNA, 19 nt, Homo sapiens
  misc_RNA (1)...(19): siRNA sense strand
ccaggaagagaaagauaca

SEQ ID NO: 2008371 - RNA, 19 nt, Homo sapiens
  misc_RNA (1)...(19): siRNA sense strand
uguagaaccagaaugugaa

SEQ ID NO: 2008372 - RNA, 19 nt, Homo sapiens
  misc_RNA (1)...(19): siRNA sense strand
auaccuaugucagaagaau

SEQ ID NO: 2008373 - RNA, 19 nt, Homo sapiens
  misc_RNA (1)...(19): siRNA sense strand
aucauuggcuggaguuugu

SEQ ID NO: 2008374 - RNA, 19 nt, Homo sapiens
  misc_RNA (1)...(19): siRNA sense strand
guagugugcuauuuuguag

SEQ ID NO: 2008375 - RNA, 19 nt, Homo sapiens
  misc_RNA (1)...(19): siRNA sense strand
gaauuacauaagcccuaaa

SEQ ID NO: 2008376 - RNA, 19 nt, Homo sapiens
  misc_RNA (1)...(19): siRNA sense strand
gcgaggcagcauuggugua

SEQ ID NO: 2008377 - RNA, 19 nt, Homo sapiens
  misc_RNA (1)...(19): siRNA sense strand
uacagggaagcacugaaua

SEQ ID NO: 2008378 - RNA, 19 nt, Homo sapiens
  misc_RNA (1)...(19): siRNA sense strand
gcuuggaacaguaaacuac

SEQ ID NO: 2008379 - RNA, 19 nt, Homo sapiens
  misc_RNA (1)...(19): siRNA sense strand
aggaagagaaagauacaga

SEQ ID NO: 2008380 - RNA, 19 nt, Homo sapiens
  misc_RNA (1)...(19): siRNA sense strand
aagagaaagauacagaugu

SEQ ID NO: 2008381 - RNA, 19 nt, Homo sapiens
  misc_RNA (1)...(19): siRNA sense strand
gaugaugauguuacugagu

SEQ ID NO: 2008382 - RNA, 19 nt, Homo sapiens
  misc_RNA (1)...(19): siRNA sense strand
ucuguagguuuaggaaaug

SEQ ID NO: 2008383 - RNA, 19 nt, Homo sapiens
  misc_RNA (1)...(19): siRNA sense strand
agaaccagaaugugaacaa

SEQ ID NO: 2008384 - RNA, 19 nt, Homo sapiens
  misc_RNA (1)...(19): siRNA sense strand
cugccugggucaugguuug

SEQ ID NO: 2008385 - RNA, 19 nt, Homo sapiens
  misc_RNA (1)...(19): siRNA sense strand
ggagagaccuaagaaagag

SEQ ID NO: 2008386 - RNA, 19 nt, Homo sapiens
  misc_RNA (1)...(19): siRNA sense strand
ggaaggaggagagaccuaa

SEQ ID NO: 2008387 - RNA, 19 nt, Homo sapiens
  misc_RNA (1)...(19): siRNA sense strand
gaggagagaccuaagaaag

SEQ ID NO: 2008388 - RNA, 19 nt, Homo sapiens
  misc_RNA (1)...(19): siRNA sense strand
ggagaccugucgcucaaca

SEQ ID NO: 2008389 - RNA, 19 nt, Homo sapiens
  misc_RNA (1)...(19): siRNA sense strand
ggaggagagaccuaagaaa

SEQ ID NO: 2008390 - RNA, 19 nt, Homo sapiens
  misc_RNA (1)...(19): siRNA sense strand
ggaaggagaggcugaaagc

SEQ ID NO: 2008391 - RNA, 19 nt, Homo sapiens
  misc_RNA (1)...(19): siRNA sense strand
acaccaggcccaagaagau

SEQ ID NO: 2008392 - RNA, 19 nt, Homo sapiens
  misc_RNA (1)...(19): siRNA sense strand
aggagagaccuaagaaaga

SEQ ID NO: 2008393 - RNA, 19 nt, Homo sapiens
  misc_RNA (1)...(19): siRNA sense strand
gacaccaggcccaagaaga

SEQ ID NO: 2008394 - RNA, 19 nt, Homo sapiens
  misc_RNA (1)...(19): siRNA sense strand
cugcagagaacgacgaaga

SEQ ID NO: 2008395 - RNA, 19 nt, Homo sapiens
  misc_RNA (1)...(19): siRNA sense strand
gaaggaggagagaccuaag

SEQ ID NO: 2008396 - RNA, 19 nt, Homo sapiens
  misc_RNA (1)...(19): siRNA sense strand
ggacaccaggcccaagaag

SEQ ID NO: 2008397 - RNA, 19 nt, Homo sapiens
  misc_RNA (1)...(19): siRNA sense strand
ggggagaccugucgcucaa

SEQ ID NO: 2008398 - RNA, 19 nt, Homo sapiens
  misc_RNA (1)...(19): siRNA sense strand
aaagaaaccuuaugcaugu

SEQ ID NO: 2008399 - RNA, 19 nt, Homo sapiens
  misc_RNA (1)...(19): siRNA sense strand
caacagaaaugugaugaau

SEQ ID NO: 2008400 - RNA, 19 nt, Homo sapiens
  misc_RNA (1)...(19): siRNA sense strand
ugaacaagaugguagguuu

SEQ ID NO: 2008401 - RNA, 19 nt, Homo sapiens
  misc_RNA (1)...(19): siRNA sense strand
agaaaucacugaggaauug

SEQ ID NO: 2008402 - RNA, 19 nt, Homo sapiens
  misc_RNA (1)...(19): siRNA sense strand
acagaaaugugaugaaugu

SEQ ID NO: 2008403 - RNA, 19 nt, Homo sapiens
  misc_RNA (1)...(19): siRNA sense strand
agucagagcucagcccuua

SEQ ID NO: 2008404 - RNA, 19 nt, Homo sapiens
  misc_RNA (1)...(19): siRNA sense strand
gcuagcaccuucagaaauc

SEQ ID NO: 2008405 - RNA, 19 nt, Homo sapiens
  misc_RNA (1)...(19): siRNA sense strand
gaacccauacugauucaaa

SEQ ID NO: 2008406 - RNA, 19 nt, Homo sapiens
  misc_RNA (1)...(19): siRNA sense strand
gaagcgcaauucugauuca

SEQ ID NO: 2008407 - RNA, 19 nt, Homo sapiens
  misc_RNA (1)...(19): siRNA sense strand
caucaucacuccuaacaca

SEQ ID NO: 2008408 - RNA, 19 nt, Homo sapiens
  misc_RNA (1)...(19): siRNA sense strand
ggacaugauugcagagaag

SEQ ID NO: 2008409 - RNA, 19 nt, Homo sapiens
  misc_RNA (1)...(19): siRNA sense strand
ggaaagaaaccuuaugcau

SEQ ID NO: 2008410 - RNA, 19 nt, Homo sapiens
  misc_RNA (1)...(19): siRNA sense strand
gagaggaaacugugacuau

SEQ ID NO: 2008411 - RNA, 19 nt, Homo sapiens
  misc_RNA (1)...(19): siRNA sense strand
gagcucagcccuuauuuua

SEQ ID NO: 2008412 - RNA, 19 nt, Homo sapiens
  misc_RNA (1)...(19): siRNA sense strand
ucccagaguuccacauaua

SEQ ID NO: 2008413 - RNA, 19 nt, Homo sapiens
  misc_RNA (1)...(19): siRNA sense strand
caugggagcuucaguccuu

SEQ ID NO: 2008414 - RNA, 19 nt, Homo sapiens
  misc_RNA (1)...(19): siRNA sense strand
ugacuaugcuggaggaugu

SEQ ID NO: 2008415 - RNA, 19 nt, Homo sapiens
  misc_RNA (1)...(19): siRNA sense strand
cgacgaacccauacugauu

SEQ ID NO: 2008416 - RNA, 19 nt, Homo sapiens
  misc_RNA (1)...(19): siRNA sense strand
gaacaagaugguagguuug

SEQ ID NO: 2008417 - RNA, 19 nt, Homo sapiens
  misc_RNA (1)...(19): siRNA sense strand
ggagagagagcuugaugga

SEQ ID NO: 2008418 - RNA, 19 nt, Homo sapiens
  misc_RNA (1)...(19): siRNA sense strand
ugacagagaagauggaaga

SEQ ID NO: 2008419 - RNA, 19 nt, Homo sapiens
  misc_RNA (1)...(19): siRNA sense strand
cagcaucgacgaacccaua

SEQ ID NO: 2008420 - RNA, 19 nt, Homo sapiens
  misc_RNA (1)...(19): siRNA sense strand
caagaugguagguuugaaa

SEQ ID NO: 2008421 - RNA, 19 nt, Homo sapiens
  misc_RNA (1)...(19): siRNA sense strand
ggcaaaaucuuuagucaga

SEQ ID NO: 2008422 - RNA, 19 nt, Homo sapiens
  misc_RNA (1)...(19): siRNA sense strand
gaagcaucauccagagaau

SEQ ID NO: 2008423 - RNA, 19 nt, Homo sapiens
  misc_RNA (1)...(19): siRNA sense strand
aggaaacccuucuuggaaa

SEQ ID NO: 2008424 - RNA, 19 nt, Homo sapiens
  misc_RNA (1)...(19): siRNA sense strand
uagaggaaccuaugaacaa

SEQ ID NO: 2008425 - RNA, 19 nt, Homo sapiens
  misc_RNA (1)...(19): siRNA sense strand
gaaggaaggacaugauugc

SEQ ID NO: 2008426 - RNA, 19 nt, Homo sapiens
  misc_RNA (1)...(19): siRNA sense strand
acugaggaauugccaagua

SEQ ID NO: 2008427 - RNA, 19 nt, Homo sapiens
  misc_RNA (1)...(19): siRNA sense strand
gagcuucaguccuuaagac

SEQ ID NO: 2008428 - RNA, 19 nt, Homo sapiens
  misc_RNA (1)...(19): siRNA sense strand
ggacgaaggaaggacauga

SEQ ID NO: 2008429 - RNA, 19 nt, Homo sapiens
  misc_RNA (1)...(19): siRNA sense strand
aaacuucagaggaguguaa

SEQ ID NO: 2008430 - RNA, 19 nt, Homo sapiens
  misc_RNA (1)...(19): siRNA sense strand
augaauggcucccagaguu

SEQ ID NO: 2008431 - RNA, 19 nt, Homo sapiens
  misc_RNA (1)...(19): siRNA sense strand
gaagagcagaccugugauc

SEQ ID NO: 2008432 - RNA, 19 nt, Homo sapiens
  misc_RNA (1)...(19): siRNA sense strand
gaugguagguuugaaaaga

SEQ ID NO: 2008433 - RNA, 19 nt, Homo sapiens
  misc_RNA (1)...(19): siRNA sense strand
aggaagagcagaccuguga

SEQ ID NO: 2008434 - RNA, 19 nt, Homo sapiens
  misc_RNA (1)...(19): siRNA sense strand
gaauauguacuucaagacu

SEQ ID NO: 2008435 - RNA, 19 nt, Homo sapiens
  misc_RNA (1)...(19): siRNA sense strand
gcagaggcccaaaagaaua

SEQ ID NO: 2008436 - RNA, 19 nt, Homo sapiens
  misc_RNA (1)...(19): siRNA sense strand
ggaaacccuucuuggaaaa

SEQ ID NO: 2008437 - RNA, 19 nt, Homo sapiens
  misc_RNA (1)...(19): siRNA sense strand
uggaggauguggagagaga

SEQ ID NO: 2008438 - RNA, 19 nt, Homo sapiens
  misc_RNA (1)...(19): siRNA sense strand
gaauguggcaaaaucuuua

SEQ ID NO: 2008439 - RNA, 19 nt, Homo sapiens
  misc_RNA (1)...(19): siRNA sense strand
gcucccagaguuccacaua

SEQ ID NO: 2008440 - RNA, 19 nt, Homo sapiens
  misc_RNA (1)...(19): siRNA sense strand
caguuuggcuaccaggauu

SEQ ID NO: 2008441 - RNA, 19 nt, Homo sapiens
  misc_RNA (1)...(19): siRNA sense strand
gcagagaagcuagcaccuu

SEQ ID NO: 2008442 - RNA, 19 nt, Homo sapiens
  misc_RNA (1)...(19): siRNA sense strand
agaggaaacugugacuaug

SEQ ID NO: 2008443 - RNA, 19 nt, Homo sapiens
  misc_RNA (1)...(19): siRNA sense strand
ggccggaagugcacaccaa

SEQ ID NO: 2008444 - RNA, 19 nt, Homo sapiens
  misc_RNA (1)...(19): siRNA sense strand
uaagaccacaugaugaaga

SEQ ID NO: 2008445 - RNA, 19 nt, Homo sapiens
  misc_RNA (1)...(19): siRNA sense strand
ucagagcucagcccuuauu

SEQ ID NO: 2008446 - RNA, 19 nt, Homo sapiens
  misc_RNA (1)...(19): siRNA sense strand
caucaaaacuacaaaugug

SEQ ID NO: 2008447 - RNA, 19 nt, Homo sapiens
  misc_RNA (1)...(19): siRNA sense strand
gaagauggaagaggaagag

SEQ ID NO: 2008448 - RNA, 19 nt, Homo sapiens
  misc_RNA (1)...(19): siRNA sense strand
gcucagcccuuauuuuaca

SEQ ID NO: 2008449 - RNA, 19 nt, Homo sapiens
  misc_RNA (1)...(19): siRNA sense strand
aaagucaucaucacuccua

SEQ ID NO: 2008450 - RNA, 19 nt, Homo sapiens
  misc_RNA (1)...(19): siRNA sense strand
cgaaggaaggacaugauug

SEQ ID NO: 2008451 - RNA, 19 nt, Homo sapiens
  misc_RNA (1)...(19): siRNA sense strand
gcuggaggauguggagaga

SEQ ID NO: 2008452 - RNA, 19 nt, Homo sapiens
  misc_RNA (1)...(19): siRNA sense strand
cagaaaucacugaggaauu

SEQ ID NO: 2008453 - RNA, 19 nt, Homo sapiens
  misc_RNA (1)...(19): siRNA sense strand
cuuaagaccacaugaugaa

SEQ ID NO: 2008454 - RNA, 19 nt, Homo sapiens
  misc_RNA (1)...(19): siRNA sense strand
gacgaacccauacugauuc

SEQ ID NO: 2008455 - RNA, 19 nt, Homo sapiens
  misc_RNA (1)...(19): siRNA sense strand
ccgaagcgcaauucugauu

SEQ ID NO: 2008456 - RNA, 19 nt, Homo sapiens
  misc_RNA (1)...(19): siRNA sense strand
ggagaggaaacugugacua

SEQ ID NO: 2008457 - RNA, 19 nt, Homo sapiens
  misc_RNA (1)...(19): siRNA sense strand
gaccugugauccagacucu

SEQ ID NO: 2008458 - RNA, 19 nt, Homo sapiens
  misc_RNA (1)...(19): siRNA sense strand
gaagacaucaaaacuacaa

SEQ ID NO: 2008459 - RNA, 19 nt, Homo sapiens
  misc_RNA (1)...(19): siRNA sense strand
acaguggaaagaaaccuua

SEQ ID NO: 2008460 - RNA, 19 nt, Homo sapiens
  misc_RNA (1)...(19): siRNA sense strand
agaagcaucauccagagaa

SEQ ID NO: 2008461 - RNA, 19 nt, Homo sapiens
  misc_RNA (1)...(19): siRNA sense strand
aaacaacagaaaugugaug

SEQ ID NO: 2008462 - RNA, 19 nt, Homo sapiens
  misc_RNA (1)...(19): siRNA sense strand
ccacauauagaggaaccua

SEQ ID NO: 2008463 - RNA, 19 nt, Homo sapiens
  misc_RNA (1)...(19): siRNA sense strand
ccagaguuccacauauaga

SEQ ID NO: 2008464 - RNA, 19 nt, Homo sapiens
  misc_RNA (1)...(19): siRNA sense strand
gaggaaccuaugaacaaga

SEQ ID NO: 2008465 - RNA, 19 nt, Homo sapiens
  misc_RNA (1)...(19): siRNA sense strand
gaguguaaugggauucuga

SEQ ID NO: 2008466 - RNA, 19 nt, Homo sapiens
  misc_RNA (1)...(19): siRNA sense strand
agaggaguguaaugggauu

SEQ ID NO: 2008467 - RNA, 19 nt, Homo sapiens
  misc_RNA (1)...(19): siRNA sense strand
gcaguuuggcuaccaggau

SEQ ID NO: 2008468 - RNA, 19 nt, Homo sapiens
  misc_RNA (1)...(19): siRNA sense strand
ucaucacuccuaacacaaa

SEQ ID NO: 2008469 - RNA, 19 nt, Homo sapiens
  misc_RNA (1)...(19): siRNA sense strand
cagcaauucaggcaguuug

SEQ ID NO: 2008470 - RNA, 19 nt, Homo sapiens
  misc_RNA (1)...(19): siRNA sense strand
aggaaccuaugaacaagau

SEQ ID NO: 2008471 - RNA, 19 nt, Homo sapiens
  misc_RNA (1)...(19): siRNA sense strand
agaggaaccuaugaacaag

SEQ ID NO: 2008472 - RNA, 19 nt, Homo sapiens
  misc_RNA (1)...(19): siRNA sense strand
cugaggaauugccaaguag

SEQ ID NO: 2008473 - RNA, 19 nt, Homo sapiens
  misc_RNA (1)...(19): siRNA sense strand
gaggaaacugugacuaugc

SEQ ID NO: 2008474 - RNA, 19 nt, Homo sapiens
  misc_RNA (1)...(19): siRNA sense strand
aagcuagcaccuucagaaa

SEQ ID NO: 2008475 - RNA, 19 nt, Homo sapiens
  misc_RNA (1)...(19): siRNA sense strand
gcucaugcccgugaagaag

SEQ ID NO: 2008476 - RNA, 19 nt, Homo sapiens
  misc_RNA (1)...(19): siRNA sense strand
ggaguguaaugggauucug

SEQ ID NO: 2008477 - RNA, 19 nt, Homo sapiens
  misc_RNA (1)...(19): siRNA sense strand
agccgaagcgcaauucuga

SEQ ID NO: 2008478 - RNA, 19 nt, Homo sapiens
  misc_RNA (1)...(19): siRNA sense strand
gagcaucaugggagcuuca

SEQ ID NO: 2008479 - RNA, 19 nt, Homo sapiens
  misc_RNA (1)...(19): siRNA sense strand
ucaagacuaggcugaagug

SEQ ID NO: 2008480 - RNA, 19 nt, Homo sapiens
  misc_RNA (1)...(19): siRNA sense strand
acaagaugguagguuugaa

SEQ ID NO: 2008481 - RNA, 19 nt, Homo sapiens
  misc_RNA (1)...(19): siRNA sense strand
guggagagagagcuugaug

SEQ ID NO: 2008482 - RNA, 19 nt, Homo sapiens
  misc_RNA (1)...(19): siRNA sense strand
auauguacuucaagacuag

SEQ ID NO: 2008483 - RNA, 19 nt, Homo sapiens
  misc_RNA (1)...(19): siRNA sense strand
gcccuuauuuuacaucaga

SEQ ID NO: 2008484 - RNA, 19 nt, Homo sapiens
  misc_RNA (1)...(19): siRNA sense strand
cggaagugcacaccaagga

SEQ ID NO: 2008485 - RNA, 19 nt, Homo sapiens
  misc_RNA (1)...(19): siRNA sense strand
aaaucugcuucaaggcaaa

SEQ ID NO: 2008486 - RNA, 19 nt, Homo sapiens
  misc_RNA (1)...(19): siRNA sense strand
ccuuaagaccacaugauga

SEQ ID NO: 2008487 - RNA, 19 nt, Homo sapiens
  misc_RNA (1)...(19): siRNA sense strand
ggagcuucaguccuuaaga

SEQ ID NO: 2008488 - RNA, 19 nt, Homo sapiens
  misc_RNA (1)...(19): siRNA sense strand
ucugggaacuuugucaucu

SEQ ID NO: 2008489 - RNA, 19 nt, Homo sapiens
  misc_RNA (1)...(19): siRNA sense strand
gacgaaggaaggacaugau

SEQ ID NO: 2008490 - RNA, 19 nt, Homo sapiens
  misc_RNA (1)...(19): siRNA sense strand
gagaauggagaggaaacug

SEQ ID NO: 2008491 - RNA, 19 nt, Homo sapiens
  misc_RNA (1)...(19): siRNA sense strand
uuaugcaugugacgagugu

SEQ ID NO: 2008492 - RNA, 19 nt, Homo sapiens
  misc_RNA (1)...(19): siRNA sense strand
guacauguccugugaauuu

SEQ ID NO: 2008493 - RNA, 19 nt, Homo sapiens
  misc_RNA (1)...(19): siRNA sense strand
gaggagcucuuuaugauug

SEQ ID NO: 2008494 - RNA, 19 nt, Homo sapiens
  misc_RNA (1)...(19): siRNA sense strand
ccugaaaccugauguuaua

SEQ ID NO: 2008495 - RNA, 19 nt, Homo sapiens
  misc_RNA (1)...(19): siRNA sense strand
gaaaccagguguugggaaa

SEQ ID NO: 2008496 - RNA, 19 nt, Homo sapiens
  misc_RNA (1)...(19): siRNA sense strand
gaacuugucauaaagcuaa

SEQ ID NO: 2008497 - RNA, 19 nt, Homo sapiens
  misc_RNA (1)...(19): siRNA sense strand
gaucagcggucaaagcauu

SEQ ID NO: 2008498 - RNA, 19 nt, Homo sapiens
  misc_RNA (1)...(19): siRNA sense strand
ggaagaagagcaagaagaa

SEQ ID NO: 2008499 - RNA, 19 nt, Homo sapiens
  misc_RNA (1)...(19): siRNA sense strand
ggaaauguauucguguuga

SEQ ID NO: 2008500 - RNA, 19 nt, Homo sapiens
  misc_RNA (1)...(19): siRNA sense strand
ggaguuauguugcaaucaa

SEQ ID NO: 2008501 - RNA, 19 nt, Homo sapiens
  misc_RNA (1)...(19): siRNA sense strand
gaaaccgaaucaggaguua

SEQ ID NO: 2008502 - RNA, 19 nt, Homo sapiens
  misc_RNA (1)...(19): siRNA sense strand
gaagaagaggcauuuauug

SEQ ID NO: 2008503 - RNA, 19 nt, Homo sapiens
  misc_RNA (1)...(19): siRNA sense strand
uaaaguguccugacuauga

SEQ ID NO: 2008504 - RNA, 19 nt, Homo sapiens
  misc_RNA (1)...(19): siRNA sense strand
ccagaggccugaagauuau

SEQ ID NO: 2008505 - RNA, 19 nt, Homo sapiens
  misc_RNA (1)...(19): siRNA sense strand
gggcaaagacagcacaaua

SEQ ID NO: 2008506 - RNA, 19 nt, Homo sapiens
  misc_RNA (1)...(19): siRNA sense strand
aaggaaaggugacuaacua

SEQ ID NO: 2008507 - RNA, 19 nt, Homo sapiens
  misc_RNA (1)...(19): siRNA sense strand
gaugguggcugaaauucuu

SEQ ID NO: 2008508 - RNA, 19 nt, Homo sapiens
  misc_RNA (1)...(19): siRNA sense strand
gaaauguauucguguugaa

SEQ ID NO: 2008509 - RNA, 19 nt, Homo sapiens
  misc_RNA (1)...(19): siRNA sense strand
ggaccaccauguaaaguau

SEQ ID NO: 2008510 - RNA, 19 nt, Homo sapiens
  misc_RNA (1)...(19): siRNA sense strand
caaagacagcacaauaaua

SEQ ID NO: 2008511 - RNA, 19 nt, Homo sapiens
  misc_RNA (1)...(19): siRNA sense strand
gagcagcuauucuaaccaa

SEQ ID NO: 2008512 - RNA, 19 nt, Homo sapiens
  misc_RNA (1)...(19): siRNA sense strand
gcagauauauuugaugaag

SEQ ID NO: 2008513 - RNA, 19 nt, Homo sapiens
  misc_RNA (1)...(19): siRNA sense strand
aaacaacauuagcccguua

SEQ ID NO: 2008514 - RNA, 19 nt, Homo sapiens
  misc_RNA (1)...(19): siRNA sense strand
gguaaaaucuacugucuuu

SEQ ID NO: 2008515 - RNA, 19 nt, Homo sapiens
  misc_RNA (1)...(19): siRNA sense strand
gaaaccugauguuauaauc

SEQ ID NO: 2008516 - RNA, 19 nt, Homo sapiens
  misc_RNA (1)...(19): siRNA sense strand
acacaggcauggaaaugua

SEQ ID NO: 2008517 - RNA, 19 nt, Homo sapiens
  misc_RNA (1)...(19): siRNA sense strand
ggucaaagcauuccagaug

SEQ ID NO: 2008518 - RNA, 19 nt, Homo sapiens
  misc_RNA (1)...(19): siRNA sense strand
ggaagaaauuaaugacaca

SEQ ID NO: 2008519 - RNA, 19 nt, Homo sapiens
  misc_RNA (1)...(19): siRNA sense strand
ggaaacaauucuccaaacu

SEQ ID NO: 2008520 - RNA, 19 nt, Homo sapiens
  misc_RNA (1)...(19): siRNA sense strand
gcaaagacagcacaauaau

SEQ ID NO: 2008521 - RNA, 19 nt, Homo sapiens
  misc_RNA (1)...(19): siRNA sense strand
ucauaaagcuaauguugga

SEQ ID NO: 2008522 - RNA, 19 nt, Homo sapiens
  misc_RNA (1)...(19): siRNA sense strand
uauaaaguguccugacuau

SEQ ID NO: 2008523 - RNA, 19 nt, Homo sapiens
  misc_RNA (1)...(19): siRNA sense strand
gaaacaauucuccaaacuu

SEQ ID NO: 2008524 - RNA, 19 nt, Homo sapiens
  misc_RNA (1)...(19): siRNA sense strand
guugaagcuuugccaauuu

SEQ ID NO: 2008525 - RNA, 19 nt, Homo sapiens
  misc_RNA (1)...(19): siRNA sense strand
ucuccaaacuuuagaagaa

SEQ ID NO: 2008526 - RNA, 19 nt, Homo sapiens
  misc_RNA (1)...(19): siRNA sense strand
aacauuagcccguuacaua

SEQ ID NO: 2008527 - RNA, 19 nt, Homo sapiens
  misc_RNA (1)...(19): siRNA sense strand
gaagaagaagaggcauuua

SEQ ID NO: 2008528 - RNA, 19 nt, Homo sapiens
  misc_RNA (1)...(19): siRNA sense strand
ggcaaagacagcacaauaa

SEQ ID NO: 2008529 - RNA, 19 nt, Homo sapiens
  misc_RNA (1)...(19): siRNA sense strand
gaacagauugcugcugaaa

SEQ ID NO: 2008530 - RNA, 19 nt, Homo sapiens
  misc_RNA (1)...(19): siRNA sense strand
gcagaugguggcugaaauu

SEQ ID NO: 2008531 - RNA, 19 nt, Homo sapiens
  misc_RNA (1)...(19): siRNA sense strand
aguaauggcugaacacaau

SEQ ID NO: 2008532 - RNA, 19 nt, Homo sapiens
  misc_RNA (1)...(19): siRNA sense strand
agauacagauggcaaagaa

SEQ ID NO: 2008533 - RNA, 19 nt, Homo sapiens
  misc_RNA (1)...(19): siRNA sense strand
ucaaagcauuccagaugaa

SEQ ID NO: 2008534 - RNA, 19 nt, Homo sapiens
  misc_RNA (1)...(19): siRNA sense strand
ggaagaagaggaagaagag

SEQ ID NO: 2008535 - RNA, 19 nt, Homo sapiens
  misc_RNA (1)...(19): siRNA sense strand
ugaugaagaugaaacugaa

SEQ ID NO: 2008536 - RNA, 19 nt, Homo sapiens
  misc_RNA (1)...(19): siRNA sense strand
caauaauacgggauacaua

SEQ ID NO: 2008537 - RNA, 19 nt, Homo sapiens
  misc_RNA (1)...(19): siRNA sense strand
gucaaagcauuccagauga

SEQ ID NO: 2008538 - RNA, 19 nt, Homo sapiens
  misc_RNA (1)...(19): siRNA sense strand
gccugaagauuauuuggaa

SEQ ID NO: 2008539 - RNA, 19 nt, Homo sapiens
  misc_RNA (1)...(19): siRNA sense strand
gaagucauugagaaucaua

SEQ ID NO: 2008540 - RNA, 19 nt, Homo sapiens
  misc_RNA (1)...(19): siRNA sense strand
gugcagaggaagaaauuaa

SEQ ID NO: 2008541 - RNA, 19 nt, Homo sapiens
  misc_RNA (1)...(19): siRNA sense strand
gaugagcuauuucguacuc

SEQ ID NO: 2008542 - RNA, 19 nt, Homo sapiens
  misc_RNA (1)...(19): siRNA sense strand
agaagaagaggcauuuauu

SEQ ID NO: 2008543 - RNA, 19 nt, Homo sapiens
  misc_RNA (1)...(19): siRNA sense strand
gaacccacgucccuaucug

SEQ ID NO: 2008544 - RNA, 19 nt, Homo sapiens
  misc_RNA (1)...(19): siRNA sense strand
gaaauuaaugacacaaugg

SEQ ID NO: 2008545 - RNA, 19 nt, Homo sapiens
  misc_RNA (1)...(19): siRNA sense strand
aaagacagcacaauaauac

SEQ ID NO: 2008546 - RNA, 19 nt, Homo sapiens
  misc_RNA (1)...(19): siRNA sense strand
cgaaucaggaguuauguug

SEQ ID NO: 2008547 - RNA, 19 nt, Homo sapiens
  misc_RNA (1)...(19): siRNA sense strand
gaaauucuucaucaucuag

SEQ ID NO: 2008548 - RNA, 19 nt, Homo sapiens
  misc_RNA (1)...(19): siRNA sense strand
ggauacauauacaguagag

SEQ ID NO: 2008549 - RNA, 19 nt, Homo sapiens
  misc_RNA (1)...(19): siRNA sense strand
gauuugugccagagaauuu

SEQ ID NO: 2008550 - RNA, 19 nt, Homo sapiens
  misc_RNA (1)...(19): siRNA sense strand
agacagaagaguauccuuu

SEQ ID NO: 2008551 - RNA, 19 nt, Homo sapiens
  misc_RNA (1)...(19): siRNA sense strand
uacauguccugugaauuua

SEQ ID NO: 2008552 - RNA, 19 nt, Homo sapiens
  misc_RNA (1)...(19): siRNA sense strand
gcagaggaagaaauuaaug

SEQ ID NO: 2008553 - RNA, 19 nt, Homo sapiens
  misc_RNA (1)...(19): siRNA sense strand
uccagaggccugaagauua

SEQ ID NO: 2008554 - RNA, 19 nt, Homo sapiens
  misc_RNA (1)...(19): siRNA sense strand
guauucguguugaagcuuu

SEQ ID NO: 2008555 - RNA, 19 nt, Homo sapiens
  misc_RNA (1)...(19): siRNA sense strand
agaugaaacugaaaggaau

SEQ ID NO: 2008556 - RNA, 19 nt, Homo sapiens
  misc_RNA (1)...(19): siRNA sense strand
uguuauggaucgacuuaaa

SEQ ID NO: 2008557 - RNA, 19 nt, Homo sapiens
  misc_RNA (1)...(19): siRNA sense strand
uaaagcuaauguuggagaa

SEQ ID NO: 2008558 - RNA, 19 nt, Homo sapiens
  misc_RNA (1)...(19): siRNA sense strand
gaagaugaaacugaaagga

SEQ ID NO: 2008559 - RNA, 19 nt, Homo sapiens
  misc_RNA (1)...(19): siRNA sense strand
ccagugggauccugaaguc

SEQ ID NO: 2008560 - RNA, 19 nt, Homo sapiens
  misc_RNA (1)...(19): siRNA sense strand
uucguacucuugcaucuua

SEQ ID NO: 2008561 - RNA, 19 nt, Homo sapiens
  misc_RNA (1)...(19): siRNA sense strand
acaaaggaaaggugacuaa

SEQ ID NO: 2008562 - RNA, 19 nt, Homo sapiens
  misc_RNA (1)...(19): siRNA sense strand
cauguccugugaauuuaaa

SEQ ID NO: 2008563 - RNA, 19 nt, Homo sapiens
  misc_RNA (1)...(19): siRNA sense strand
gcagaaaauuacaaaggaa

SEQ ID NO: 2008564 - RNA, 19 nt, Homo sapiens
  misc_RNA (1)...(19): siRNA sense strand
cagaggaagaaauuaauga

SEQ ID NO: 2008565 - RNA, 19 nt, Homo sapiens
  misc_RNA (1)...(19): siRNA sense strand
gaagaagcauuaaaaccau

SEQ ID NO: 2008566 - RNA, 19 nt, Homo sapiens
  misc_RNA (1)...(19): siRNA sense strand
uguugaagcuuugccaauu

SEQ ID NO: 2008567 - RNA, 19 nt, Homo sapiens
  misc_RNA (1)...(19): siRNA sense strand
caucagaagaagcauuaaa

SEQ ID NO: 2008568 - RNA, 19 nt, Homo sapiens
  misc_RNA (1)...(19): siRNA sense strand
aaucuacugucuuucauca

SEQ ID NO: 2008569 - RNA, 19 nt, Homo sapiens
  misc_RNA (1)...(19): siRNA sense strand
gguaacauuuauucaggau

SEQ ID NO: 2008570 - RNA, 19 nt, Homo sapiens
  misc_RNA (1)...(19): siRNA sense strand
aagagaagacagaagagua

SEQ ID NO: 2008571 - RNA, 19 nt, Homo sapiens
  misc_RNA (1)...(19): siRNA sense strand
gaugaaacugaaaggaauu

SEQ ID NO: 2008572 - RNA, 19 nt, Homo sapiens
  misc_RNA (1)...(19): siRNA sense strand
aagaagagcaagaagaaga

SEQ ID NO: 2008573 - RNA, 19 nt, Homo sapiens
  misc_RNA (1)...(19): siRNA sense strand
uaacacaggcauggaaaug

SEQ ID NO: 2008574 - RNA, 19 nt, Homo sapiens
  misc_RNA (1)...(19): siRNA sense strand
gugggauccugaagucauu

SEQ ID NO: 2008575 - RNA, 19 nt, Homo sapiens
  misc_RNA (1)...(19): siRNA sense strand
gaaaacaacacuuugcaau

SEQ ID NO: 2008576 - RNA, 19 nt, Homo sapiens
  misc_RNA (1)...(19): siRNA sense strand
ucuacugucuuucaucaga

SEQ ID NO: 2008577 - RNA, 19 nt, Homo sapiens
  misc_RNA (1)...(19): siRNA sense strand
agaagaagaagaggcauuu

SEQ ID NO: 2008578 - RNA, 19 nt, Homo sapiens
  misc_RNA (1)...(19): siRNA sense strand
gaagaaagaagcccaaaag

SEQ ID NO: 2008579 - RNA, 19 nt, Homo sapiens
  misc_RNA (1)...(19): siRNA sense strand
ugucauaaagcuaauguug

SEQ ID NO: 2008580 - RNA, 19 nt, Homo sapiens
  misc_RNA (1)...(19): siRNA sense strand
guacucuugcaucuuauaa

SEQ ID NO: 2008581 - RNA, 19 nt, Homo sapiens
  misc_RNA (1)...(19): siRNA sense strand
cauugagaaucauaggaaa

SEQ ID NO: 2008582 - RNA, 19 nt, Homo sapiens
  misc_RNA (1)...(19): siRNA sense strand
cgggauacauauacaguag

SEQ ID NO: 2008583 - RNA, 19 nt, Homo sapiens
  misc_RNA (1)...(19): siRNA sense strand
acugaaauaccaucacuuu

SEQ ID NO: 2008584 - RNA, 19 nt, Homo sapiens
  misc_RNA (1)...(19): siRNA sense strand
aaaguguccugacuaugau

SEQ ID NO: 2008585 - RNA, 19 nt, Homo sapiens
  misc_RNA (1)...(19): siRNA sense strand
acauuagcccguuacauaa

SEQ ID NO: 2008586 - RNA, 19 nt, Homo sapiens
  misc_RNA (1)...(19): siRNA sense strand
gaguuauguugcaaucaau

SEQ ID NO: 2008587 - RNA, 19 nt, Homo sapiens
  misc_RNA (1)...(19): siRNA sense strand
auacuuggaccucaauauu

SEQ ID NO: 2008588 - RNA, 19 nt, Homo sapiens
  misc_RNA (1)...(19): siRNA sense strand
auucaggauuaccagauua

SEQ ID NO: 2008589 - RNA, 19 nt, Homo sapiens
  misc_RNA (1)...(19): siRNA sense strand
uaaacuuauugcaccaaga

SEQ ID NO: 2008590 - RNA, 19 nt, Homo sapiens
  misc_RNA (1)...(19): siRNA sense strand
gcacaauaauacgggauac

SEQ ID NO: 2008591 - RNA, 19 nt, Homo sapiens
  misc_RNA (1)...(19): siRNA sense strand
ucacugaaauaccaucacu

SEQ ID NO: 2008592 - RNA, 19 nt, Homo sapiens
  misc_RNA (1)...(19): siRNA sense strand
gaaacaaguucaugaagga

SEQ ID NO: 2008593 - RNA, 19 nt, Homo sapiens
  misc_RNA (1)...(19): siRNA sense strand
gagaagaaguguugaccua

SEQ ID NO: 2008594 - RNA, 19 nt, Homo sapiens
  misc_RNA (1)...(19): siRNA sense strand
ggauauauaugcuuugcuu

SEQ ID NO: 2008595 - RNA, 19 nt, Homo sapiens
  misc_RNA (1)...(19): siRNA sense strand
gaaaucaaaggcagcauaa

SEQ ID NO: 2008596 - RNA, 19 nt, Homo sapiens
  misc_RNA (1)...(19): siRNA sense strand
ggaagcaaaucugugaauu

SEQ ID NO: 2008597 - RNA, 19 nt, Homo sapiens
  misc_RNA (1)...(19): siRNA sense strand
gaagaaguguugaccuaag

SEQ ID NO: 2008598 - RNA, 19 nt, Homo sapiens
  misc_RNA (1)...(19): siRNA sense strand
caagauguaugguuauauc

SEQ ID NO: 2008599 - RNA, 19 nt, Homo sapiens
  misc_RNA (1)...(19): siRNA sense strand
gaagugaguccuuggaguu

SEQ ID NO: 2008600 - RNA, 19 nt, Homo sapiens
  misc_RNA (1)...(19): siRNA sense strand
cuuaacaucugguuugaaa

SEQ ID NO: 2008601 - RNA, 19 nt, Homo sapiens
  misc_RNA (1)...(19): siRNA sense strand
ucaauucaguucuauguuc

SEQ ID NO: 2008602 - RNA, 19 nt, Homo sapiens
  misc_RNA (1)...(19): siRNA sense strand
uaacacagcugggauucug

SEQ ID NO: 2008603 - RNA, 19 nt, Homo sapiens
  misc_RNA (1)...(19): siRNA sense strand
cauacuaaauggaagcaaa

SEQ ID NO: 2008604 - RNA, 19 nt, Homo sapiens
  misc_RNA (1)...(19): siRNA sense strand
guuguuggcuucuuauuag

SEQ ID NO: 2008605 - RNA, 19 nt, Homo sapiens
  misc_RNA (1)...(19): siRNA sense strand
ccacaaccuuccaauagug

SEQ ID NO: 2008606 - RNA, 19 nt, Homo sapiens
  misc_RNA (1)...(19): siRNA sense strand
aacauuagcuacuuuagga

SEQ ID NO: 2008607 - RNA, 19 nt, Homo sapiens
  misc_RNA (1)...(19): siRNA sense strand
cagcugggauucuguagug

SEQ ID NO: 2008608 - RNA, 19 nt, Homo sapiens
  misc_RNA (1)...(19): siRNA sense strand
gggauucuguaguguuuau

SEQ ID NO: 2008609 - RNA, 19 nt, Homo sapiens
  misc_RNA (1)...(19): siRNA sense strand
gaauucaacaugcuuaaca

SEQ ID NO: 2008610 - RNA, 19 nt, Homo sapiens
  misc_RNA (1)...(19): siRNA sense strand
guuuagacauugugauuuc

SEQ ID NO: 2008611 - RNA, 19 nt, Homo sapiens
  misc_RNA (1)...(19): siRNA sense strand
caaauaguaccaauucauc

SEQ ID NO: 2008612 - RNA, 19 nt, Homo sapiens
  misc_RNA (1)...(19): siRNA sense strand
ucaaagcguuucccucaag

SEQ ID NO: 2008613 - RNA, 19 nt, Homo sapiens
  misc_RNA (1)...(19): siRNA sense strand
ugaaaucaaaggcagcaua

SEQ ID NO: 2008614 - RNA, 19 nt, Homo sapiens
  misc_RNA (1)...(19): siRNA sense strand
uggaguuguuggcuucuua

SEQ ID NO: 2008615 - RNA, 19 nt, Homo sapiens
  misc_RNA (1)...(19): siRNA sense strand
gcuuugcuuucuuccauuu

SEQ ID NO: 2008616 - RNA, 19 nt, Homo sapiens
  misc_RNA (1)...(19): siRNA sense strand
ugaaagaaucaaagcguuu

SEQ ID NO: 2008617 - RNA, 19 nt, Homo sapiens
  misc_RNA (1)...(19): siRNA sense strand
cccaagauguaugguuaua

SEQ ID NO: 2008618 - RNA, 19 nt, Homo sapiens
  misc_RNA (1)...(19): siRNA sense strand
guguugaccuaaggauaua

SEQ ID NO: 2008619 - RNA, 19 nt, Homo sapiens
  misc_RNA (1)...(19): siRNA sense strand
ggcugucagucuugugaua

SEQ ID NO: 2008620 - RNA, 19 nt, Homo sapiens
  misc_RNA (1)...(19): siRNA sense strand
ccacagaguccuuuucuaa

SEQ ID NO: 2008621 - RNA, 19 nt, Homo sapiens
  misc_RNA (1)...(19): siRNA sense strand
gaucacauccaaauuucau

SEQ ID NO: 2008622 - RNA, 19 nt, Homo sapiens
  misc_RNA (1)...(19): siRNA sense strand
cuauauuccuuuggcauuu

SEQ ID NO: 2008623 - RNA, 19 nt, Homo sapiens
  misc_RNA (1)...(19): siRNA sense strand
gcaauucuuauuccucguu

SEQ ID NO: 2008624 - RNA, 19 nt, Homo sapiens
  misc_RNA (1)...(19): siRNA sense strand
guuggcuucuuauuaggua

SEQ ID NO: 2008625 - RNA, 19 nt, Homo sapiens
  misc_RNA (1)...(19): siRNA sense strand
caauucuuauuccucguuu

SEQ ID NO: 2008626 - RNA, 19 nt, Homo sapiens
  misc_RNA (1)...(19): siRNA sense strand
uauaugcuuugcuuucuuc

SEQ ID NO: 2008627 - RNA, 19 nt, Homo sapiens
  misc_RNA (1)...(19): siRNA sense strand
ucaacaugcuuaacaucug

SEQ ID NO: 2008628 - RNA, 19 nt, Homo sapiens
  misc_RNA (1)...(19): siRNA sense strand
gauccuucuugguuaguau

SEQ ID NO: 2008629 - RNA, 19 nt, Homo sapiens
  misc_RNA (1)...(19): siRNA sense strand
gaccuaaggauauauaugc

SEQ ID NO: 2008630 - RNA, 19 nt, Homo sapiens
  misc_RNA (1)...(19): siRNA sense strand
acaaguucaugaaggauuc

SEQ ID NO: 2008631 - RNA, 19 nt, Homo sapiens
  misc_RNA (1)...(19): siRNA sense strand
cauuagcuacuuuaggaua

SEQ ID NO: 2008632 - RNA, 19 nt, Homo sapiens
  misc_RNA (1)...(19): siRNA sense strand
ccuggagaguaaaguguuu

SEQ ID NO: 2008633 - RNA, 19 nt, Homo sapiens
  misc_RNA (1)...(19): siRNA sense strand
uaaauggaagcaaaucugu

SEQ ID NO: 2008634 - RNA, 19 nt, Homo sapiens
  misc_RNA (1)...(19): siRNA sense strand
gugauaauuuaccaguaug

SEQ ID NO: 2008635 - RNA, 19 nt, Homo sapiens
  misc_RNA (1)...(19): siRNA sense strand
ccaaaugaaagaaucaaag

SEQ ID NO: 2008636 - RNA, 19 nt, Homo sapiens
  misc_RNA (1)...(19): siRNA sense strand
cugggauucuguaguguuu

SEQ ID NO: 2008637 - RNA, 19 nt, Homo sapiens
  misc_RNA (1)...(19): siRNA sense strand
uauauguguuuccgugaug

SEQ ID NO: 2008638 - RNA, 19 nt, Homo sapiens
  misc_RNA (1)...(19): siRNA sense strand
ugugagagaagaaguguug

SEQ ID NO: 2008639 - RNA, 19 nt, Homo sapiens
  misc_RNA (1)...(19): siRNA sense strand
gcccuaauccugccaccuu

SEQ ID NO: 2008640 - RNA, 19 nt, Homo sapiens
  misc_RNA (1)...(19): siRNA sense strand
ccuuggaguugucuucaga

SEQ ID NO: 2008641 - RNA, 19 nt, Homo sapiens
  misc_RNA (1)...(19): siRNA sense strand
auauauggaugguccugaa

SEQ ID NO: 2008642 - RNA, 19 nt, Homo sapiens
  misc_RNA (1)...(19): siRNA sense strand
aauggaagcaaaucuguga

SEQ ID NO: 2008643 - RNA, 19 nt, Homo sapiens
  misc_RNA (1)...(19): siRNA sense strand
uggaagaaauacccacucu

SEQ ID NO: 2008644 - RNA, 19 nt, Homo sapiens
  misc_RNA (1)...(19): siRNA sense strand
gcagcacauuggcccuaau

SEQ ID NO: 2008645 - RNA, 19 nt, Homo sapiens
  misc_RNA (1)...(19): siRNA sense strand
guugaccuaaggauauaua

SEQ ID NO: 2008646 - RNA, 19 nt, Homo sapiens
  misc_RNA (1)...(19): siRNA sense strand
guagcuggcacuccacaga

SEQ ID NO: 2008647 - RNA, 19 nt, Homo sapiens
  misc_RNA (1)...(19): siRNA sense strand
gguuauaucaaucagugaa

SEQ ID NO: 2008648 - RNA, 19 nt, Homo sapiens
  misc_RNA (1)...(19): siRNA sense strand
caaaugaaagaaucaaagc

SEQ ID NO: 2008649 - RNA, 19 nt, Homo sapiens
  misc_RNA (1)...(19): siRNA sense strand
accaguauguugucaggaa

SEQ ID NO: 2008650 - RNA, 19 nt, Homo sapiens
  misc_RNA (1)...(19): siRNA sense strand
gcugucagucuugugauaa

SEQ ID NO: 2008651 - RNA, 19 nt, Homo sapiens
  misc_RNA (1)...(19): siRNA sense strand
cccacaaccuuccaauagu

SEQ ID NO: 2008652 - RNA, 19 nt, Homo sapiens
  misc_RNA (1)...(19): siRNA sense strand
gauaacacagcugggauuc

SEQ ID NO: 2008653 - RNA, 19 nt, Homo sapiens
  misc_RNA (1)...(19): siRNA sense strand
cagaguccuuuucuaaauu

SEQ ID NO: 2008654 - RNA, 19 nt, Homo sapiens
  misc_RNA (1)...(19): siRNA sense strand
agcauucacuggaguuguu

SEQ ID NO: 2008655 - RNA, 19 nt, Homo sapiens
  misc_RNA (1)...(19): siRNA sense strand
gaaaaugugaaacaaguuc

SEQ ID NO: 2008656 - RNA, 19 nt, Homo sapiens
  misc_RNA (1)...(19): siRNA sense strand
ucaaacccuugugagagaa

SEQ ID NO: 2008657 - RNA, 19 nt, Homo sapiens
  misc_RNA (1)...(19): siRNA sense strand
aucaaacccuugugagaga

SEQ ID NO: 2008658 - RNA, 19 nt, Homo sapiens
  misc_RNA (1)...(19): siRNA sense strand
ucaucaaacccuugugaga

SEQ ID NO: 2008659 - RNA, 19 nt, Homo sapiens
  misc_RNA (1)...(19): siRNA sense strand
agaagaaguguugaccuaa

SEQ ID NO: 2008660 - RNA, 19 nt, Homo sapiens
  misc_RNA (1)...(19): siRNA sense strand
ggaguuguuggcuucuuau

SEQ ID NO: 2008661 - RNA, 19 nt, Homo sapiens
  misc_RNA (1)...(19): siRNA sense strand
caccuuugguugaaauucu

SEQ ID NO: 2008662 - RNA, 19 nt, Homo sapiens
  misc_RNA (1)...(19): siRNA sense strand
cuucuuagcugaaaaugug

SEQ ID NO: 2008663 - RNA, 19 nt, Homo sapiens
  misc_RNA (1)...(19): siRNA sense strand
cuaaauggaagcaaaucug

SEQ ID NO: 2008664 - RNA, 19 nt, Homo sapiens
  misc_RNA (1)...(19): siRNA sense strand
uaacauuagcuacuuuagg

SEQ ID NO: 2008665 - RNA, 19 nt, Homo sapiens
  misc_RNA (1)...(19): siRNA sense strand
ugucagucuugugauaauu

SEQ ID NO: 2008666 - RNA, 19 nt, Homo sapiens
  misc_RNA (1)...(19): siRNA sense strand
cauugugauuuccuucguu

SEQ ID NO: 2008667 - RNA, 19 nt, Homo sapiens
  misc_RNA (1)...(19): siRNA sense strand
gcagcauaacuuuaaaucu

SEQ ID NO: 2008668 - RNA, 19 nt, Homo sapiens
  misc_RNA (1)...(19): siRNA sense strand
ugauaacacagcugggauu

SEQ ID NO: 2008669 - RNA, 19 nt, Homo sapiens
  misc_RNA (1)...(19): siRNA sense strand
uuccauggcugucagucuu

SEQ ID NO: 2008670 - RNA, 19 nt, Homo sapiens
  misc_RNA (1)...(19): siRNA sense strand
aguuguuggcuucuuauua

SEQ ID NO: 2008671 - RNA, 19 nt, Homo sapiens
  misc_RNA (1)...(19): siRNA sense strand
aaucaaaggcagcauaacu

SEQ ID NO: 2008672 - RNA, 19 nt, Homo sapiens
  misc_RNA (1)...(19): siRNA sense strand
gcggagugugguugacuuu

SEQ ID NO: 2008673 - RNA, 19 nt, Homo sapiens
  misc_RNA (1)...(19): siRNA sense strand
gaaguguugaccuaaggau

SEQ ID NO: 2008674 - RNA, 19 nt, Homo sapiens
  misc_RNA (1)...(19): siRNA sense strand
gucagucuugugauaauuu

SEQ ID NO: 2008675 - RNA, 19 nt, Homo sapiens
  misc_RNA (1)...(19): siRNA sense strand
acagaguccuuuucuaaau

SEQ ID NO: 2008676 - RNA, 19 nt, Homo sapiens
  misc_RNA (1)...(19): siRNA sense strand
guuccagcagagaucauua

SEQ ID NO: 2008677 - RNA, 19 nt, Homo sapiens
  misc_RNA (1)...(19): siRNA sense strand
aagaaguguugaccuaagg

SEQ ID NO: 2008678 - RNA, 19 nt, Homo sapiens
  misc_RNA (1)...(19): siRNA sense strand
aaucugugaauuugggaua

SEQ ID NO: 2008679 - RNA, 19 nt, Homo sapiens
  misc_RNA (1)...(19): siRNA sense strand
ggcggagugugguugacuu

SEQ ID NO: 2008680 - RNA, 19 nt, Homo sapiens
  misc_RNA (1)...(19): siRNA sense strand
uggcugguuggaagaaaua

SEQ ID NO: 2008681 - RNA, 19 nt, Homo sapiens
  misc_RNA (1)...(19): siRNA sense strand
uauccuacucccaaaguug

SEQ ID NO: 2008682 - RNA, 19 nt, Homo sapiens
  misc_RNA (1)...(19): siRNA sense strand
cccuaauccugccaccuuu

SEQ ID NO: 2008683 - RNA, 19 nt, Homo sapiens
  misc_RNA (1)...(19): siRNA sense strand
gcacauuggcccuaauccu

SEQ ID NO: 2008684 - RNA, 19 nt, Homo sapiens
  misc_RNA (1)...(19): siRNA sense strand
ugccggagcaauucuuauu

SEQ ID NO: 2008685 - RNA, 19 nt, Homo sapiens
  misc_RNA (1)...(19): siRNA sense strand
gacauauucaauucaguuc

SEQ ID NO: 2008686 - RNA, 19 nt, Homo sapiens
  misc_RNA (1)...(19): siRNA sense strand
uccccaagauguaugguua

SEQ ID NO: 2008687 - RNA, 19 nt, Homo sapiens
  misc_RNA (1)...(19): siRNA sense strand
ccaagauguaugguuauau

SEQ ID NO: 2008688 - RNA, 19 nt, Homo sapiens
  misc_RNA (1)...(19): siRNA sense strand
uauuuauccuacucccaaa

SEQ ID NO: 2008689 - RNA, 19 nt, Homo sapiens
  misc_RNA (1)...(19): siRNA sense strand
gcugggauucuguaguguu

SEQ ID NO: 2008690 - RNA, 19 nt, Homo sapiens
  misc_RNA (1)...(19): siRNA sense strand
ugaccuaaggauauauaug

SEQ ID NO: 2008691 - RNA, 19 nt, Homo sapiens
  misc_RNA (1)...(19): siRNA sense strand
ucuauauuccuuuggcauu

SEQ ID NO: 2008692 - RNA, 19 nt, Homo sapiens
  misc_RNA (1)...(19): siRNA sense strand
guagggaaauuguuguuua

SEQ ID NO: 2008693 - RNA, 19 nt, Homo sapiens
  misc_RNA (1)...(19): siRNA sense strand
gaacagagaccaaggaaga

SEQ ID NO: 2008694 - RNA, 19 nt, Homo sapiens
  misc_RNA (1)...(19): siRNA sense strand
gcaagaaacaucugugaua

SEQ ID NO: 2008695 - RNA, 19 nt, Homo sapiens
  misc_RNA (1)...(19): siRNA sense strand
ggaauacgcuuuagacaag

SEQ ID NO: 2008696 - RNA, 19 nt, Homo sapiens
  misc_RNA (1)...(19): siRNA sense strand
caggaaagauacccaaaua

SEQ ID NO: 2008697 - RNA, 19 nt, Homo sapiens
  misc_RNA (1)...(19): siRNA sense strand
gaaauuggaagaacaguuu

SEQ ID NO: 2008698 - RNA, 19 nt, Homo sapiens
  misc_RNA (1)...(19): siRNA sense strand
uaucuuagcuucuuccaaa

SEQ ID NO: 2008699 - RNA, 19 nt, Homo sapiens
  misc_RNA (1)...(19): siRNA sense strand
ucacagaaaucccagaauu

SEQ ID NO: 2008700 - RNA, 19 nt, Homo sapiens
  misc_RNA (1)...(19): siRNA sense strand
gaaagaaggacaacaacaa

SEQ ID NO: 2008701 - RNA, 19 nt, Homo sapiens
  misc_RNA (1)...(19): siRNA sense strand
ggaaagauacccaaauaau

SEQ ID NO: 2008702 - RNA, 19 nt, Homo sapiens
  misc_RNA (1)...(19): siRNA sense strand
gaugaaagacaguacauuu

SEQ ID NO: 2008703 - RNA, 19 nt, Homo sapiens
  misc_RNA (1)...(19): siRNA sense strand
cagcaacgcuugaucucua

SEQ ID NO: 2008704 - RNA, 19 nt, Homo sapiens
  misc_RNA (1)...(19): siRNA sense strand
ccagggaccucaacaauca

SEQ ID NO: 2008705 - RNA, 19 nt, Homo sapiens
  misc_RNA (1)...(19): siRNA sense strand
gugguuaccuucaaagaaa

SEQ ID NO: 2008706 - RNA, 19 nt, Homo sapiens
  misc_RNA (1)...(19): siRNA sense strand
aaaccgagcagcacacuua

SEQ ID NO: 2008707 - RNA, 19 nt, Homo sapiens
  misc_RNA (1)...(19): siRNA sense strand
ccucagagcucaugucaca

SEQ ID NO: 2008708 - RNA, 19 nt, Homo sapiens
  misc_RNA (1)...(19): siRNA sense strand
gcaaguguccucuacagaa

SEQ ID NO: 2008709 - RNA, 19 nt, Homo sapiens
  misc_RNA (1)...(19): siRNA sense strand
agacauugcucgauacaga

SEQ ID NO: 2008710 - RNA, 19 nt, Homo sapiens
  misc_RNA (1)...(19): siRNA sense strand
gagaagggacuauagcaaa

SEQ ID NO: 2008711 - RNA, 19 nt, Homo sapiens
  misc_RNA (1)...(19): siRNA sense strand
ggagagaagccagugguua

SEQ ID NO: 2008712 - RNA, 19 nt, Homo sapiens
  misc_RNA (1)...(19): siRNA sense strand
caagaaacaucugugauag

SEQ ID NO: 2008713 - RNA, 19 nt, Homo sapiens
  misc_RNA (1)...(19): siRNA sense strand
gggaaauuguuguuuauca

SEQ ID NO: 2008714 - RNA, 19 nt, Homo sapiens
  misc_RNA (1)...(19): siRNA sense strand
ggaaucacgccuuuaagaa

SEQ ID NO: 2008715 - RNA, 19 nt, Homo sapiens
  misc_RNA (1)...(19): siRNA sense strand
caugaacccuccacacuga

SEQ ID NO: 2008716 - RNA, 19 nt, Homo sapiens
  misc_RNA (1)...(19): siRNA sense strand
ggucauguguaccugagua

SEQ ID NO: 2008717 - RNA, 19 nt, Homo sapiens
  misc_RNA (1)...(19): siRNA sense strand
ccaauggucagccuuauaa

SEQ ID NO: 2008718 - RNA, 19 nt, Homo sapiens
  misc_RNA (1)...(19): siRNA sense strand
ggacaaagaaggccagcaa

SEQ ID NO: 2008719 - RNA, 19 nt, Homo sapiens
  misc_RNA (1)...(19): siRNA sense strand
caggaaacaucucuguauu

SEQ ID NO: 2008720 - RNA, 19 nt, Homo sapiens
  misc_RNA (1)...(19): siRNA sense strand
ggaauaacuguaacuaaga

SEQ ID NO: 2008721 - RNA, 19 nt, Homo sapiens
  misc_RNA (1)...(19): siRNA sense strand
gagagaaauuggaagaaca

SEQ ID NO: 2008722 - RNA, 19 nt, Homo sapiens
  misc_RNA (1)...(19): siRNA sense strand
gcuaguggcuucuauacuc

SEQ ID NO: 2008723 - RNA, 19 nt, Homo sapiens
  misc_RNA (1)...(19): siRNA sense strand
caaauggauugcugauaau

SEQ ID NO: 2008724 - RNA, 19 nt, Homo sapiens
  misc_RNA (1)...(19): siRNA sense strand
gagaccaucugaccacaau

SEQ ID NO: 2008725 - RNA, 19 nt, Homo sapiens
  misc_RNA (1)...(19): siRNA sense strand
caagaaaugcaccuuagaa

SEQ ID NO: 2008726 - RNA, 19 nt, Homo sapiens
  misc_RNA (1)...(19): siRNA sense strand
gcaauaaacagacgcauac

SEQ ID NO: 2008727 - RNA, 19 nt, Homo sapiens
  misc_RNA (1)...(19): siRNA sense strand
aaacugaaaccaagaaaug

SEQ ID NO: 2008728 - RNA, 19 nt, Homo sapiens
  misc_RNA (1)...(19): siRNA sense strand
gcaguuaguucaugucacu

SEQ ID NO: 2008729 - RNA, 19 nt, Homo sapiens
  misc_RNA (1)...(19): siRNA sense strand
caacacacaaccauaauuc

SEQ ID NO: 2008730 - RNA, 19 nt, Homo sapiens
  misc_RNA (1)...(19): siRNA sense strand
gaaucacgccuuuaagaau

SEQ ID NO: 2008731 - RNA, 19 nt, Homo sapiens
  misc_RNA (1)...(19): siRNA sense strand
gaacucagucccucaaugg

SEQ ID NO: 2008732 - RNA, 19 nt, Homo sapiens
  misc_RNA (1)...(19): siRNA sense strand
gaaacagcccuacuaccuu

SEQ ID NO: 2008733 - RNA, 19 nt, Homo sapiens
  misc_RNA (1)...(19): siRNA sense strand
ucuacaagccgaaauuuaa

SEQ ID NO: 2008734 - RNA, 19 nt, Homo sapiens
  misc_RNA (1)...(19): siRNA sense strand
cacagaaaucccagaauua

SEQ ID NO: 2008735 - RNA, 19 nt, Homo sapiens
  misc_RNA (1)...(19): siRNA sense strand
gcauugagaccuucuuuca

SEQ ID NO: 2008736 - RNA, 19 nt, Homo sapiens
  misc_RNA (1)...(19): siRNA sense strand
ugauuucucuucugaauag

SEQ ID NO: 2008737 - RNA, 19 nt, Homo sapiens
  misc_RNA (1)...(19): siRNA sense strand
caaguguccucuacagaau

SEQ ID NO: 2008738 - RNA, 19 nt, Homo sapiens
  misc_RNA (1)...(19): siRNA sense strand
gaaguucaggcaaaccuuu

SEQ ID NO: 2008739 - RNA, 19 nt, Homo sapiens
  misc_RNA (1)...(19): siRNA sense strand
gaccaucugaccacaauuu

SEQ ID NO: 2008740 - RNA, 19 nt, Homo sapiens
  misc_RNA (1)...(19): siRNA sense strand
gaaugccguuugagaaauc

SEQ ID NO: 2008741 - RNA, 19 nt, Homo sapiens
  misc_RNA (1)...(19): siRNA sense strand
cauaaucccucagaaguca

SEQ ID NO: 2008742 - RNA, 19 nt, Homo sapiens
  misc_RNA (1)...(19): siRNA sense strand
uaagaaugauggaaagaag

SEQ ID NO: 2008743 - RNA, 19 nt, Homo sapiens
  misc_RNA (1)...(19): siRNA sense strand
ggacuauagcaaaggaaua

SEQ ID NO: 2008744 - RNA, 19 nt, Homo sapiens
  misc_RNA (1)...(19): siRNA sense strand
acagaaaucccagaauuaa

SEQ ID NO: 2008745 - RNA, 19 nt, Homo sapiens
  misc_RNA (1)...(19): siRNA sense strand
cagaggaguuugaauuaca

SEQ ID NO: 2008746 - RNA, 19 nt, Homo sapiens
  misc_RNA (1)...(19): siRNA sense strand
caagccagcugcagguuca

SEQ ID NO: 2008747 - RNA, 19 nt, Homo sapiens
  misc_RNA (1)...(19): siRNA sense strand
uggcuucuauacucaguua

SEQ ID NO: 2008748 - RNA, 19 nt, Homo sapiens
  misc_RNA (1)...(19): siRNA sense strand
ccauaauucuguuccauuc

SEQ ID NO: 2008749 - RNA, 19 nt, Homo sapiens
  misc_RNA (1)...(19): siRNA sense strand
gcaaaggaauaacuguaac

SEQ ID NO: 2008750 - RNA, 19 nt, Homo sapiens
  misc_RNA (1)...(19): siRNA sense strand
gauuuaccaugccguguga

SEQ ID NO: 2008751 - RNA, 19 nt, Homo sapiens
  misc_RNA (1)...(19): siRNA sense strand
ggcaaagaaucgagcaaau

SEQ ID NO: 2008752 - RNA, 19 nt, Homo sapiens
  misc_RNA (1)...(19): siRNA sense strand
aggcaaaccuuucucuguu

SEQ ID NO: 2008753 - RNA, 19 nt, Homo sapiens
  misc_RNA (1)...(19): siRNA sense strand
gcaaagaaucgagcaaauc

SEQ ID NO: 2008754 - RNA, 19 nt, Homo sapiens
  misc_RNA (1)...(19): siRNA sense strand
uggaaagccuaaagucuau

SEQ ID NO: 2008755 - RNA, 19 nt, Homo sapiens
  misc_RNA (1)...(19): siRNA sense strand
gcacagcaagcaaacauag

SEQ ID NO: 2008756 - RNA, 19 nt, Homo sapiens
  misc_RNA (1)...(19): siRNA sense strand
guucaugucacugucauua

SEQ ID NO: 2008757 - RNA, 19 nt, Homo sapiens
  misc_RNA (1)...(19): siRNA sense strand
uuaaggagcugcuauucca

SEQ ID NO: 2008758 - RNA, 19 nt, Homo sapiens
  misc_RNA (1)...(19): siRNA sense strand
gacuauagcaaaggaauaa

SEQ ID NO: 2008759 - RNA, 19 nt, Homo sapiens
  misc_RNA (1)...(19): siRNA sense strand
cagaaugccguuugagaaa

SEQ ID NO: 2008760 - RNA, 19 nt, Homo sapiens
  misc_RNA (1)...(19): siRNA sense strand
ccaaacagcuguggaaucc

SEQ ID NO: 2008761 - RNA, 19 nt, Homo sapiens
  misc_RNA (1)...(19): siRNA sense strand
gagaugaggugaaaaccaa

SEQ ID NO: 2008762 - RNA, 19 nt, Homo sapiens
  misc_RNA (1)...(19): siRNA sense strand
gcaacgucauccucugaga

SEQ ID NO: 2008763 - RNA, 19 nt, Homo sapiens
  misc_RNA (1)...(19): siRNA sense strand
ccaggaaacaucucuguau

SEQ ID NO: 2008764 - RNA, 19 nt, Homo sapiens
  misc_RNA (1)...(19): siRNA sense strand
ccugaaggcugacaugaca

SEQ ID NO: 2008765 - RNA, 19 nt, Homo sapiens
  misc_RNA (1)...(19): siRNA sense strand
gaaccagggaccucaacaa

SEQ ID NO: 2008766 - RNA, 19 nt, Homo sapiens
  misc_RNA (1)...(19): siRNA sense strand
gaauguggcagugcaggua

SEQ ID NO: 2008767 - RNA, 19 nt, Homo sapiens
  misc_RNA (1)...(19): siRNA sense strand
ggaaagaaggacaacaaca

SEQ ID NO: 2008768 - RNA, 19 nt, Homo sapiens
  misc_RNA (1)...(19): siRNA sense strand
cacgagaagugaacagaga

SEQ ID NO: 2008769 - RNA, 19 nt, Homo sapiens
  misc_RNA (1)...(19): siRNA sense strand
gcagcuaguggcuucuaua

SEQ ID NO: 2008770 - RNA, 19 nt, Homo sapiens
  misc_RNA (1)...(19): siRNA sense strand
ccagaaugccguuugagaa

SEQ ID NO: 2008771 - RNA, 19 nt, Homo sapiens
  misc_RNA (1)...(19): siRNA sense strand
aggaauaacuguaacuaag

SEQ ID NO: 2008772 - RNA, 19 nt, Homo sapiens
  misc_RNA (1)...(19): siRNA sense strand
guugauuucucuucugaau

SEQ ID NO: 2008773 - RNA, 19 nt, Homo sapiens
  misc_RNA (1)...(19): siRNA sense strand
gcacacuuauagccaagau

SEQ ID NO: 2008774 - RNA, 19 nt, Homo sapiens
  misc_RNA (1)...(19): siRNA sense strand
aagaugagcagcuauguug

SEQ ID NO: 2008775 - RNA, 19 nt, Homo sapiens
  misc_RNA (1)...(19): siRNA sense strand
gauaacagggauagaagga

SEQ ID NO: 2008776 - RNA, 19 nt, Homo sapiens
  misc_RNA (1)...(19): siRNA sense strand
ccagauaacagggauagaa

SEQ ID NO: 2008777 - RNA, 19 nt, Homo sapiens
  misc_RNA (1)...(19): siRNA sense strand
caacaacaauccccuacaa

SEQ ID NO: 2008778 - RNA, 19 nt, Homo sapiens
  misc_RNA (1)...(19): siRNA sense strand
caacagcacagucuacaag

SEQ ID NO: 2008779 - RNA, 19 nt, Homo sapiens
  misc_RNA (1)...(19): siRNA sense strand
gaaaguagaacaggaucug

SEQ ID NO: 2008780 - RNA, 19 nt, Homo sapiens
  misc_RNA (1)...(19): siRNA sense strand
ggaaauuguuguuuaucac

SEQ ID NO: 2008781 - RNA, 19 nt, Homo sapiens
  misc_RNA (1)...(19): siRNA sense strand
uuggagacauugcucgaua

SEQ ID NO: 2008782 - RNA, 19 nt, Homo sapiens
  misc_RNA (1)...(19): siRNA sense strand
ggagccauauaaccauaau

SEQ ID NO: 2008783 - RNA, 19 nt, Homo sapiens
  misc_RNA (1)...(19): siRNA sense strand
agaaacaucugugauagag

SEQ ID NO: 2008784 - RNA, 19 nt, Homo sapiens
  misc_RNA (1)...(19): siRNA sense strand
aaaggucaccaggguauua

SEQ ID NO: 2008785 - RNA, 19 nt, Homo sapiens
  misc_RNA (1)...(19): siRNA sense strand
ucaucaaggccuuuauuaa

SEQ ID NO: 2008786 - RNA, 19 nt, Homo sapiens
  misc_RNA (1)...(19): siRNA sense strand
acacaaccauaauucuguu

SEQ ID NO: 2008787 - RNA, 19 nt, Homo sapiens
  misc_RNA (1)...(19): siRNA sense strand
cuacccagcucuccuccaa

SEQ ID NO: 2008788 - RNA, 19 nt, Homo sapiens
  misc_RNA (1)...(19): siRNA sense strand
gaauacgcuuuagacaaga

SEQ ID NO: 2008789 - RNA, 19 nt, Homo sapiens
  misc_RNA (1)...(19): siRNA sense strand
gaaacaggaaagcagaaug

SEQ ID NO: 2008790 - RNA, 19 nt, Homo sapiens
  misc_RNA (1)...(19): siRNA sense strand
gaaaugcaccuuagaaaag

SEQ ID NO: 2008791 - RNA, 19 nt, Homo sapiens
  misc_RNA (1)...(19): siRNA sense strand
ccauugggacuccagauaa

SEQ ID NO: 2008792 - RNA, 19 nt, Homo sapiens
  misc_RNA (1)...(19): siRNA sense strand
ggugaaagcuuguguguuu

SEQ ID NO: 2008793 - RNA, 19 nt, Homo sapiens
  misc_RNA (1)...(19): siRNA sense strand
auacgaagcucuuaaguuc

SEQ ID NO: 2008794 - RNA, 19 nt, Homo sapiens
  misc_RNA (1)...(19): siRNA sense strand
ggagggaacccgcuucaug

SEQ ID NO: 2008795 - RNA, 19 nt, Homo sapiens
  misc_RNA (1)...(19): siRNA sense strand
ggugaaugcugcuggcuau

SEQ ID NO: 2008796 - RNA, 19 nt, Homo sapiens
  misc_RNA (1)...(19): siRNA sense strand
ggacccagcuaugguucuu

SEQ ID NO: 2008797 - RNA, 19 nt, Homo sapiens
  misc_RNA (1)...(19): siRNA sense strand
gcuaugguucuuccgauuu

SEQ ID NO: 2008798 - RNA, 19 nt, Homo sapiens
  misc_RNA (1)...(19): siRNA sense strand
ucaucuuacuggcagguua

SEQ ID NO: 2008799 - RNA, 19 nt, Homo sapiens
  misc_RNA (1)...(19): siRNA sense strand
acucucaggccucaucuua

SEQ ID NO: 2008800 - RNA, 19 nt, Homo sapiens
  misc_RNA (1)...(19): siRNA sense strand
ggccagcucuucaucuuuu

SEQ ID NO: 2008801 - RNA, 19 nt, Homo sapiens
  misc_RNA (1)...(19): siRNA sense strand
gcuaccuccuggugcagua

SEQ ID NO: 2008802 - RNA, 19 nt, Homo sapiens
  misc_RNA (1)...(19): siRNA sense strand
gcuggccucuccuguguuc

SEQ ID NO: 2008803 - RNA, 19 nt, Homo sapiens
  misc_RNA (1)...(19): siRNA sense strand
cuaugguucuuccgauuug

SEQ ID NO: 2008804 - RNA, 19 nt, Homo sapiens
  misc_RNA (1)...(19): siRNA sense strand
cuuagcagcuggugccaau

SEQ ID NO: 2008805 - RNA, 19 nt, Homo sapiens
  misc_RNA (1)...(19): siRNA sense strand
cagguuauauugcuuuuga

SEQ ID NO: 2008806 - RNA, 19 nt, Homo sapiens
  misc_RNA (1)...(19): siRNA sense strand
cuccaggugucuuaucuga

SEQ ID NO: 2008807 - RNA, 19 nt, Homo sapiens
  misc_RNA (1)...(19): siRNA sense strand
guggccagcucuucaucuu

SEQ ID NO: 2008808 - RNA, 19 nt, Homo sapiens
  misc_RNA (1)...(19): siRNA sense strand
gccaauacgaagcucuuaa

SEQ ID NO: 2008809 - RNA, 19 nt, Homo sapiens
  misc_RNA (1)...(19): siRNA sense strand
gugaugacccgcagcuaug

SEQ ID NO: 2008810 - RNA, 19 nt, Homo sapiens
  misc_RNA (1)...(19): siRNA sense strand
gugaaagcuuguguguuug

SEQ ID NO: 2008811 - RNA, 19 nt, Homo sapiens
  misc_RNA (1)...(19): siRNA sense strand
gcauguggccagcucuuca

SEQ ID NO: 2008812 - RNA, 19 nt, Homo sapiens
  misc_RNA (1)...(19): siRNA sense strand
uuacuggcagguuauauug

SEQ ID NO: 2008813 - RNA, 19 nt, Homo sapiens
  misc_RNA (1)...(19): siRNA sense strand
ucucaggccucaucuuacu

SEQ ID NO: 2008814 - RNA, 19 nt, Homo sapiens
  misc_RNA (1)...(19): siRNA sense strand
gcuacgaacacugggagua

SEQ ID NO: 2008815 - RNA, 19 nt, Homo sapiens
  misc_RNA (1)...(19): siRNA sense strand
uggcuggccucuccugugu

SEQ ID NO: 2008816 - RNA, 19 nt, Homo sapiens
  misc_RNA (1)...(19): siRNA sense strand
ccaauacgaagcucuuaag

SEQ ID NO: 2008817 - RNA, 19 nt, Homo sapiens
  misc_RNA (1)...(19): siRNA sense strand
gcugccgucuucaccauca

SEQ ID NO: 2008818 - RNA, 19 nt, Homo sapiens
  misc_RNA (1)...(19): siRNA sense strand
uuacaccauugggcaguuu

SEQ ID NO: 2008819 - RNA, 19 nt, Homo sapiens
  misc_RNA (1)...(19): siRNA sense strand
gaugcccuguuugccuaua

SEQ ID NO: 2008820 - RNA, 19 nt, Homo sapiens
  misc_RNA (1)...(19): siRNA sense strand
aauacgaagcucuuaaguu

SEQ ID NO: 2008821 - RNA, 19 nt, Homo sapiens
  misc_RNA (1)...(19): siRNA sense strand
gggcugccgucuucaccau

SEQ ID NO: 2008822 - RNA, 19 nt, Homo sapiens
  misc_RNA (1)...(19): siRNA sense strand
gcccaaggccucugaugag

SEQ ID NO: 2008823 - RNA, 19 nt, Homo sapiens
  misc_RNA (1)...(19): siRNA sense strand
cagcuggugccaauacgaa

SEQ ID NO: 2008824 - RNA, 19 nt, Homo sapiens
  misc_RNA (1)...(19): siRNA sense strand
gaugggaaagcuugugucu

SEQ ID NO: 2008825 - RNA, 19 nt, Homo sapiens
  misc_RNA (1)...(19): siRNA sense strand
ggagucauggacccagcua

SEQ ID NO: 2008826 - RNA, 19 nt, Homo sapiens
  misc_RNA (1)...(19): siRNA sense strand
caaggccucuaaggugauc

SEQ ID NO: 2008827 - RNA, 19 nt, Homo sapiens
  misc_RNA (1)...(19): siRNA sense strand
gcagagaccaccccgaugu

SEQ ID NO: 2008828 - RNA, 19 nt, Homo sapiens
  misc_RNA (1)...(19): siRNA sense strand
gcccaugcccugcuacucu

SEQ ID NO: 2008829 - RNA, 19 nt, Homo sapiens
  misc_RNA (1)...(19): siRNA sense strand
ccuguuugccuauaagaug

SEQ ID NO: 2008830 - RNA, 19 nt, Homo sapiens
  misc_RNA (1)...(19): siRNA sense strand
gcuuguguguuuggcaaug

SEQ ID NO: 2008831 - RNA, 19 nt, Homo sapiens
  misc_RNA (1)...(19): siRNA sense strand
gccuuugccauccuucuuu

SEQ ID NO: 2008832 - RNA, 19 nt, Homo sapiens
  misc_RNA (1)...(19): siRNA sense strand
uaaggugaucccugucaug

SEQ ID NO: 2008833 - RNA, 19 nt, Homo sapiens
  misc_RNA (1)...(19): siRNA sense strand
uugccagccuguccaaugu

SEQ ID NO: 2008834 - RNA, 19 nt, Homo sapiens
  misc_RNA (1)...(19): siRNA sense strand
cuuacuggcagguuauauu

SEQ ID NO: 2008835 - RNA, 19 nt, Homo sapiens
  misc_RNA (1)...(19): siRNA sense strand
cgucuucaccaucaucaug

SEQ ID NO: 2008836 - RNA, 19 nt, Homo sapiens
  misc_RNA (1)...(19): siRNA sense strand
gaaggaagcuacaauagau

SEQ ID NO: 2008837 - RNA, 19 nt, Homo sapiens
  misc_RNA (1)...(19): siRNA sense strand
agagauggcuuuagaagaa

SEQ ID NO: 2008838 - RNA, 19 nt, Homo sapiens
  misc_RNA (1)...(19): siRNA sense strand
caucaaagguguuagacaa

SEQ ID NO: 2008839 - RNA, 19 nt, Homo sapiens
  misc_RNA (1)...(19): siRNA sense strand
gaaaucagaugaaaguaac

SEQ ID NO: 2008840 - RNA, 19 nt, Homo sapiens
  misc_RNA (1)...(19): siRNA sense strand
agacagaccuggugaagga

SEQ ID NO: 2008841 - RNA, 19 nt, Homo sapiens
  misc_RNA (1)...(19): siRNA sense strand
caugagagauggcuuuaga

SEQ ID NO: 2008842 - RNA, 19 nt, Homo sapiens
  misc_RNA (1)...(19): siRNA sense strand
gaaccugagucaaacacaa

SEQ ID NO: 2008843 - RNA, 19 nt, Homo sapiens
  misc_RNA (1)...(19): siRNA sense strand
gaggaacacugaaauggau

SEQ ID NO: 2008844 - RNA, 19 nt, Homo sapiens
  misc_RNA (1)...(19): siRNA sense strand
uaacuugccugaaauuucu

SEQ ID NO: 2008845 - RNA, 19 nt, Homo sapiens
  misc_RNA (1)...(19): siRNA sense strand
cgacaagacugugaaacuu

SEQ ID NO: 2008846 - RNA, 19 nt, Homo sapiens
  misc_RNA (1)...(19): siRNA sense strand
gcuaaccacucgcucuaaa

SEQ ID NO: 2008847 - RNA, 19 nt, Homo sapiens
  misc_RNA (1)...(19): siRNA sense strand
gagcaaaucauacucuuuc

SEQ ID NO: 2008848 - RNA, 19 nt, Homo sapiens
  misc_RNA (1)...(19): siRNA sense strand
caaagagauugaacagguu

SEQ ID NO: 2008849 - RNA, 19 nt, Homo sapiens
  misc_RNA (1)...(19): siRNA sense strand
cagaaaggagcaaaucaua

SEQ ID NO: 2008850 - RNA, 19 nt, Homo sapiens
  misc_RNA (1)...(19): siRNA sense strand
cuaaagcaauagcaucaaa

SEQ ID NO: 2008851 - RNA, 19 nt, Homo sapiens
  misc_RNA (1)...(19): siRNA sense strand
aaacacaacacaugggaua

SEQ ID NO: 2008852 - RNA, 19 nt, Homo sapiens
  misc_RNA (1)...(19): siRNA sense strand
ggacaugagagauggcuuu

SEQ ID NO: 2008853 - RNA, 19 nt, Homo sapiens
  misc_RNA (1)...(19): siRNA sense strand
gaaaauuuguuccuugcua

SEQ ID NO: 2008854 - RNA, 19 nt, Homo sapiens
  misc_RNA (1)...(19): siRNA sense strand
gaacagguuuaccgacaag

SEQ ID NO: 2008855 - RNA, 19 nt, Homo sapiens
  misc_RNA (1)...(19): siRNA sense strand
gaaaggagcaaaucauacu

SEQ ID NO: 2008856 - RNA, 19 nt, Homo sapiens
  misc_RNA (1)...(19): siRNA sense strand
caacacaugggauagaauu

SEQ ID NO: 2008857 - RNA, 19 nt, Homo sapiens
  misc_RNA (1)...(19): siRNA sense strand
cuagagaaaucagaugaaa

SEQ ID NO: 2008858 - RNA, 19 nt, Homo sapiens
  misc_RNA (1)...(19): siRNA sense strand
ggaaauccugaaagagaua

SEQ ID NO: 2008859 - RNA, 19 nt, Homo sapiens
  misc_RNA (1)...(19): siRNA sense strand
gguuauagauggacaagag

SEQ ID NO: 2008860 - RNA, 19 nt, Homo sapiens
  misc_RNA (1)...(19): siRNA sense strand
cagaggaaccugagucaaa

SEQ ID NO: 2008861 - RNA, 19 nt, Homo sapiens
  misc_RNA (1)...(19): siRNA sense strand
ggugaaggaagcuacaaua

SEQ ID NO: 2008862 - RNA, 19 nt, Homo sapiens
  misc_RNA (1)...(19): siRNA sense strand
gauauuacagucauguuga

SEQ ID NO: 2008863 - RNA, 19 nt, Homo sapiens
  misc_RNA (1)...(19): siRNA sense strand
ccacacagcagaucugguu

SEQ ID NO: 2008864 - RNA, 19 nt, Homo sapiens
  misc_RNA (1)...(19): siRNA sense strand
gggauagaauuauuugaag

SEQ ID NO: 2008865 - RNA, 19 nt, Homo sapiens
  misc_RNA (1)...(19): siRNA sense strand
gacaagacugugaaacuuu

SEQ ID NO: 2008866 - RNA, 19 nt, Homo sapiens
  misc_RNA (1)...(19): siRNA sense strand
aaagaaaccaccacugcua

SEQ ID NO: 2008867 - RNA, 19 nt, Homo sapiens
  misc_RNA (1)...(19): siRNA sense strand
ugaaagaauuccgagagaa

SEQ ID NO: 2008868 - RNA, 19 nt, Homo sapiens
  misc_RNA (1)...(19): siRNA sense strand
ucaagugguucagcaguuu

SEQ ID NO: 2008869 - RNA, 19 nt, Homo sapiens
  misc_RNA (1)...(19): siRNA sense strand
gagauggcuuuagaagaaa

SEQ ID NO: 2008870 - RNA, 19 nt, Homo sapiens
  misc_RNA (1)...(19): siRNA sense strand
ggacaagagacgaucauuc

SEQ ID NO: 2008871 - RNA, 19 nt, Homo sapiens
  misc_RNA (1)...(19): siRNA sense strand
gacaaacccaguaggcuaa

SEQ ID NO: 2008872 - RNA, 19 nt, Homo sapiens
  misc_RNA (1)...(19): siRNA sense strand
aggcagaauuuacaugaaa

SEQ ID NO: 2008873 - RNA, 19 nt, Homo sapiens
  misc_RNA (1)...(19): siRNA sense strand
gacaagagacgaucauucu

SEQ ID NO: 2008874 - RNA, 19 nt, Homo sapiens
  misc_RNA (1)...(19): siRNA sense strand
gaggcagaauuuacaugaa

SEQ ID NO: 2008875 - RNA, 19 nt, Homo sapiens
  misc_RNA (1)...(19): siRNA sense strand
cacaugggauagaauuauu

SEQ ID NO: 2008876 - RNA, 19 nt, Homo sapiens
  misc_RNA (1)...(19): siRNA sense strand
ugccugaaauuucugagua

SEQ ID NO: 2008877 - RNA, 19 nt, Homo sapiens
  misc_RNA (1)...(19): siRNA sense strand
gaagauagucagcuaacca

SEQ ID NO: 2008878 - RNA, 19 nt, Homo sapiens
  misc_RNA (1)...(19): siRNA sense strand
cgaaaggauucuccacaca

SEQ ID NO: 2008879 - RNA, 19 nt, Homo sapiens
  misc_RNA (1)...(19): siRNA sense strand
gaaagaauuccgagagaac

SEQ ID NO: 2008880 - RNA, 19 nt, Homo sapiens
  misc_RNA (1)...(19): siRNA sense strand
ugaaggaagcuacaauaga

SEQ ID NO: 2008881 - RNA, 19 nt, Homo sapiens
  misc_RNA (1)...(19): siRNA sense strand
cagcaccauuguuuacuga

SEQ ID NO: 2008882 - RNA, 19 nt, Homo sapiens
  misc_RNA (1)...(19): siRNA sense strand
guucagcaguuucuucauc

SEQ ID NO: 2008883 - RNA, 19 nt, Homo sapiens
  misc_RNA (1)...(19): siRNA sense strand
agagcggucuccuuauaaa

SEQ ID NO: 2008884 - RNA, 19 nt, Homo sapiens
  misc_RNA (1)...(19): siRNA sense strand
ggagcaaaucauacucuuu

SEQ ID NO: 2008885 - RNA, 19 nt, Homo sapiens
  misc_RNA (1)...(19): siRNA sense strand
guaacuugccugaaauuuc

SEQ ID NO: 2008886 - RNA, 19 nt, Homo sapiens
  misc_RNA (1)...(19): siRNA sense strand
gagagauggcuuuagaaga

SEQ ID NO: 2008887 - RNA, 19 nt, Homo sapiens
  misc_RNA (1)...(19): siRNA sense strand
uuucuacucuucccauuau

SEQ ID NO: 2008888 - RNA, 19 nt, Homo sapiens
  misc_RNA (1)...(19): siRNA sense strand
ccaucagucucaacauaga

SEQ ID NO: 2008889 - RNA, 19 nt, Homo sapiens
  misc_RNA (1)...(19): siRNA sense strand
agaagcuacucuccagaaa

SEQ ID NO: 2008890 - RNA, 19 nt, Homo sapiens
  misc_RNA (1)...(19): siRNA sense strand
uuccaucagucucaacaua

SEQ ID NO: 2008891 - RNA, 19 nt, Homo sapiens
  misc_RNA (1)...(19): siRNA sense strand
agagaaaucagaugaaagu

SEQ ID NO: 2008892 - RNA, 19 nt, Homo sapiens
  misc_RNA (1)...(19): siRNA sense strand
gaaauccugaaagagauaa

SEQ ID NO: 2008893 - RNA, 19 nt, Homo sapiens
  misc_RNA (1)...(19): siRNA sense strand
gcuaugcucucuguuguac

SEQ ID NO: 2008894 - RNA, 19 nt, Homo sapiens
  misc_RNA (1)...(19): siRNA sense strand
guuaauauugugccaaaga

SEQ ID NO: 2008895 - RNA, 19 nt, Homo sapiens
  misc_RNA (1)...(19): siRNA sense strand
cacaacacaugggauagaa

SEQ ID NO: 2008896 - RNA, 19 nt, Homo sapiens
  misc_RNA (1)...(19): siRNA sense strand
gacaugagagauggcuuua

SEQ ID NO: 2008897 - RNA, 19 nt, Homo sapiens
  misc_RNA (1)...(19): siRNA sense strand
gcaacucacgcaaggaugu

SEQ ID NO: 2008898 - RNA, 19 nt, Homo sapiens
  misc_RNA (1)...(19): siRNA sense strand
caagugggcugcugaaaag

SEQ ID NO: 2008899 - RNA, 19 nt, Homo sapiens
  misc_RNA (1)...(19): siRNA sense strand
caaaucauacucuuuccau

SEQ ID NO: 2008900 - RNA, 19 nt, Homo sapiens
  misc_RNA (1)...(19): siRNA sense strand
cagaagcuacucuccagaa

SEQ ID NO: 2008901 - RNA, 19 nt, Homo sapiens
  misc_RNA (1)...(19): siRNA sense strand
gaacacagacaccauucac

SEQ ID NO: 2008902 - RNA, 19 nt, Homo sapiens
  misc_RNA (1)...(19): siRNA sense strand
ugaggcagaauuuacauga

SEQ ID NO: 2008903 - RNA, 19 nt, Homo sapiens
  misc_RNA (1)...(19): siRNA sense strand
ugaacagguuuaccgacaa

SEQ ID NO: 2008904 - RNA, 19 nt, Homo sapiens
  misc_RNA (1)...(19): siRNA sense strand
agagaggccuguccagucu

SEQ ID NO: 2008905 - RNA, 19 nt, Homo sapiens
  misc_RNA (1)...(19): siRNA sense strand
ccuacaaacggcagaauga

SEQ ID NO: 2008906 - RNA, 19 nt, Homo sapiens
  misc_RNA (1)...(19): siRNA sense strand
agaggccuguccagucuuu

SEQ ID NO: 2008907 - RNA, 19 nt, Homo sapiens
  misc_RNA (1)...(19): siRNA sense strand
gcauugaggcagaauuuac

SEQ ID NO: 2008908 - RNA, 19 nt, Homo sapiens
  misc_RNA (1)...(19): siRNA sense strand
ccacagcaccauuguuuac

SEQ ID NO: 2008909 - RNA, 19 nt, Homo sapiens
  misc_RNA (1)...(19): siRNA sense strand
gccugaaauuucugaguau

SEQ ID NO: 2008910 - RNA, 19 nt, Homo sapiens
  misc_RNA (1)...(19): siRNA sense strand
gcaagugggcugcugaaaa

SEQ ID NO: 2008911 - RNA, 19 nt, Homo sapiens
  misc_RNA (1)...(19): siRNA sense strand
gcaguuucuucaucaaagg

SEQ ID NO: 2008912 - RNA, 19 nt, Homo sapiens
  misc_RNA (1)...(19): siRNA sense strand
ccagugauggcuacaauag

SEQ ID NO: 2008913 - RNA, 19 nt, Homo sapiens
  misc_RNA (1)...(19): siRNA sense strand
ugaaauuucugaguaugag

SEQ ID NO: 2008914 - RNA, 19 nt, Homo sapiens
  misc_RNA (1)...(19): siRNA sense strand
agagauacuucacccucaa

SEQ ID NO: 2008915 - RNA, 19 nt, Homo sapiens
  misc_RNA (1)...(19): siRNA sense strand
aagcuacucuccagaaagg

SEQ ID NO: 2008916 - RNA, 19 nt, Homo sapiens
  misc_RNA (1)...(19): siRNA sense strand
gaagcuacucuccagaaag

SEQ ID NO: 2008917 - RNA, 19 nt, Homo sapiens
  misc_RNA (1)...(19): siRNA sense strand
ucuauacaguuugcauuga

SEQ ID NO: 2008918 - RNA, 19 nt, Homo sapiens
  misc_RNA (1)...(19): siRNA sense strand
cagcuaaccacucgcucua

SEQ ID NO: 2008919 - RNA, 19 nt, Homo sapiens
  misc_RNA (1)...(19): siRNA sense strand
uggcuacaauagacuaguu

SEQ ID NO: 2008920 - RNA, 19 nt, Homo sapiens
  misc_RNA (1)...(19): siRNA sense strand
gcuacaauagacuaguuaa

SEQ ID NO: 2008921 - RNA, 19 nt, Homo sapiens
  misc_RNA (1)...(19): siRNA sense strand
gacaggagccccagacauu

SEQ ID NO: 2008922 - RNA, 19 nt, Homo sapiens
  misc_RNA (1)...(19): siRNA sense strand
aaacgaaggcgaagagacu

SEQ ID NO: 2008923 - RNA, 19 nt, Homo sapiens
  misc_RNA (1)...(19): siRNA sense strand
ggucugagggacgauauga

SEQ ID NO: 2008924 - RNA, 19 nt, Homo sapiens
  misc_RNA (1)...(19): siRNA sense strand
gagaaaucagaugaaagua

SEQ ID NO: 2008925 - RNA, 19 nt, Homo sapiens
  misc_RNA (1)...(19): siRNA sense strand
ucaaagguguuagacaaac

SEQ ID NO: 2008926 - RNA, 19 nt, Homo sapiens
  misc_RNA (1)...(19): siRNA sense strand
uuacagucauguugauuac

SEQ ID NO: 2008927 - RNA, 19 nt, Homo sapiens
  misc_RNA (1)...(19): siRNA sense strand
ccagaaaggagcaaaucau

SEQ ID NO: 2008928 - RNA, 19 nt, Homo sapiens
  misc_RNA (1)...(19): siRNA sense strand
aaucauacucuuuccauca

SEQ ID NO: 2008929 - RNA, 19 nt, Homo sapiens
  misc_RNA (1)...(19): siRNA sense strand
caacucacgcaaggaugua

SEQ ID NO: 2008930 - RNA, 19 nt, Homo sapiens
  misc_RNA (1)...(19): siRNA sense strand
aaagagauugaacagguuu

SEQ ID NO: 2008931 - RNA, 19 nt, Homo sapiens
  misc_RNA (1)...(19): siRNA sense strand
gcuagagaaaucagaugaa

SEQ ID NO: 2008932 - RNA, 19 nt, Homo sapiens
  misc_RNA (1)...(19): siRNA sense strand
aaacaucaagagauacuuc

SEQ ID NO: 2008933 - RNA, 19 nt, Homo sapiens
  misc_RNA (1)...(19): siRNA sense strand
cugaaaagcuagagaaauc

SEQ ID NO: 2008934 - RNA, 19 nt, Homo sapiens
  misc_RNA (1)...(19): siRNA sense strand
gagcaccuccucgaaguca

SEQ ID NO: 2008935 - RNA, 19 nt, Homo sapiens
  misc_RNA (1)...(19): siRNA sense strand
ugaggaacacugaaaugga

SEQ ID NO: 2008936 - RNA, 19 nt, Homo sapiens
  misc_RNA (1)...(19): siRNA sense strand
gcagagaccuugacucguu

SEQ ID NO: 2008937 - RNA, 19 nt, Homo sapiens
  misc_RNA (1)...(19): siRNA sense strand
ggaauaaccuucaucaagu

SEQ ID NO: 2008938 - RNA, 19 nt, Homo sapiens
  misc_RNA (1)...(19): siRNA sense strand
gcacaaggcgaccacuuua

SEQ ID NO: 2008939 - RNA, 19 nt, Homo sapiens
  misc_RNA (1)...(19): siRNA sense strand
gaauaaccuucaucaaguu

SEQ ID NO: 2008940 - RNA, 19 nt, Homo sapiens
  misc_RNA (1)...(19): siRNA sense strand
uaacuucgaugacaccauu

SEQ ID NO: 2008941 - RNA, 19 nt, Homo sapiens
  misc_RNA (1)...(19): siRNA sense strand
ggaaugaccugggagacaa

SEQ ID NO: 2008942 - RNA, 19 nt, Homo sapiens
  misc_RNA (1)...(19): siRNA sense strand
gaaaauaacuucgaugaca

SEQ ID NO: 2008943 - RNA, 19 nt, Homo sapiens
  misc_RNA (1)...(19): siRNA sense strand
ccaagaagcugugaaguac

SEQ ID NO: 2008944 - RNA, 19 nt, Homo sapiens
  misc_RNA (1)...(19): siRNA sense strand
gccaagaagcugugaagua

SEQ ID NO: 2008945 - RNA, 19 nt, Homo sapiens
  misc_RNA (1)...(19): siRNA sense strand
cggaauaucugcagcaagu

SEQ ID NO: 2008946 - RNA, 19 nt, Homo sapiens
  misc_RNA (1)...(19): siRNA sense strand
ggaagaugccaaagucuau

SEQ ID NO: 2008947 - RNA, 19 nt, Homo sapiens
  misc_RNA (1)...(19): siRNA sense strand
caaagucuauguggcuaaa

SEQ ID NO: 2008948 - RNA, 19 nt, Homo sapiens
  misc_RNA (1)...(19): siRNA sense strand
gaaagucagugagcacagu

SEQ ID NO: 2008949 - RNA, 19 nt, Homo sapiens
  misc_RNA (1)...(19): siRNA sense strand
cagagaccuugacucguua

SEQ ID NO: 2008950 - RNA, 19 nt, Homo sapiens
  misc_RNA (1)...(19): siRNA sense strand
gaacauuccgaaacuguca

SEQ ID NO: 2008951 - RNA, 19 nt, Homo sapiens
  misc_RNA (1)...(19): siRNA sense strand
cauggaagaugccaaaguc

SEQ ID NO: 2008952 - RNA, 19 nt, Homo sapiens
  misc_RNA (1)...(19): siRNA sense strand
gaauaucugcagcaaguau

SEQ ID NO: 2008953 - RNA, 19 nt, Homo sapiens
  misc_RNA (1)...(19): siRNA sense strand
gcucucagcaagcaacuuu

SEQ ID NO: 2008954 - RNA, 19 nt, Homo sapiens
  misc_RNA (1)...(19): siRNA sense strand
gaacgaggagccagugaca

SEQ ID NO: 2008955 - RNA, 19 nt, Homo sapiens
  misc_RNA (1)...(19): siRNA sense strand
ggucaagaucgccgaagua

SEQ ID NO: 2008956 - RNA, 19 nt, Homo sapiens
  misc_RNA (1)...(19): siRNA sense strand
caagaucgccgaaguagac

SEQ ID NO: 2008957 - RNA, 19 nt, Homo sapiens
  misc_RNA (1)...(19): siRNA sense strand
guacacagcacuaugaacu

SEQ ID NO: 2008958 - RNA, 19 nt, Homo sapiens
  misc_RNA (1)...(19): siRNA sense strand
caccauugcagaaggaaua

SEQ ID NO: 2008959 - RNA, 19 nt, Homo sapiens
  misc_RNA (1)...(19): siRNA sense strand
gcucugggccuugaacauu

SEQ ID NO: 2008960 - RNA, 19 nt, Homo sapiens
  misc_RNA (1)...(19): siRNA sense strand
uuccgaaacugucaagauu

SEQ ID NO: 2008961 - RNA, 19 nt, Homo sapiens
  misc_RNA (1)...(19): siRNA sense strand
caaauacaacagcauggaa

SEQ ID NO: 2008962 - RNA, 19 nt, Homo sapiens
  misc_RNA (1)...(19): siRNA sense strand
gagggaagaaagucaguga

SEQ ID NO: 2008963 - RNA, 19 nt, Homo sapiens
  misc_RNA (1)...(19): siRNA sense strand
ugacaagggcacuguguug

SEQ ID NO: 2008964 - RNA, 19 nt, Homo sapiens
  misc_RNA (1)...(19): siRNA sense strand
gaggauaccccaccuuaaa

SEQ ID NO: 2008965 - RNA, 19 nt, Homo sapiens
  misc_RNA (1)...(19): siRNA sense strand
ugacaccauugcagaagga

SEQ ID NO: 2008966 - RNA, 19 nt, Homo sapiens
  misc_RNA (1)...(19): siRNA sense strand
ucaagcaagggcuguauga

SEQ ID NO: 2008967 - RNA, 19 nt, Homo sapiens
  misc_RNA (1)...(19): siRNA sense strand
uggagucacugagggagua

SEQ ID NO: 2008968 - RNA, 19 nt, Homo sapiens
  misc_RNA (1)...(19): siRNA sense strand
ccgaaacugucaagauugg

SEQ ID NO: 2008969 - RNA, 19 nt, Homo sapiens
  misc_RNA (1)...(19): siRNA sense strand
cagcaaguauucgguacga

SEQ ID NO: 2008970 - RNA, 19 nt, Homo sapiens
  misc_RNA (1)...(19): siRNA sense strand
gaagaugccaaagucuaug

SEQ ID NO: 2008971 - RNA, 19 nt, Homo sapiens
  misc_RNA (1)...(19): siRNA sense strand
caaggcgaccacuuuauca

SEQ ID NO: 2008972 - RNA, 19 nt, Homo sapiens
  misc_RNA (1)...(19): siRNA sense strand
ugucaagauuggcaagguu

SEQ ID NO: 2008973 - RNA, 19 nt, Homo sapiens
  misc_RNA (1)...(19): siRNA sense strand
gaaugaccugggagacaaa

SEQ ID NO: 2008974 - RNA, 19 nt, Homo sapiens
  misc_RNA (1)...(19): siRNA sense strand
gaacucugcuccggaaacc

SEQ ID NO: 2008975 - RNA, 19 nt, Homo sapiens
  misc_RNA (1)...(19): siRNA sense strand
aggaauaaccuucaucaag

SEQ ID NO: 2008976 - RNA, 19 nt, Homo sapiens
  misc_RNA (1)...(19): siRNA sense strand
aaagguggaucaguacaag

SEQ ID NO: 2008977 - RNA, 19 nt, Homo sapiens
  misc_RNA (1)...(19): siRNA sense strand
uggaagaugccaaagucua

SEQ ID NO: 2008978 - RNA, 19 nt, Homo sapiens
  misc_RNA (1)...(19): siRNA sense strand
aagaagcugugaaguacca

SEQ ID NO: 2008979 - RNA, 19 nt, Homo sapiens
  misc_RNA (1)...(19): siRNA sense strand
ggaauaucugcagcaagua

SEQ ID NO: 2008980 - RNA, 19 nt, Homo sapiens
  misc_RNA (1)...(19): siRNA sense strand
gcuccaugguguggucauu

SEQ ID NO: 2008981 - RNA, 19 nt, Homo sapiens
  misc_RNA (1)...(19): siRNA sense strand
acacagcacuaugaacucu

SEQ ID NO: 2008982 - RNA, 19 nt, Homo sapiens
  misc_RNA (1)...(19): siRNA sense strand
gugguguggucacugcaaa

SEQ ID NO: 2008983 - RNA, 19 nt, Homo sapiens
  misc_RNA (1)...(19): siRNA sense strand
caagggaaagcgggauuug

SEQ ID NO: 2008984 - RNA, 19 nt, Homo sapiens
  misc_RNA (1)...(19): siRNA sense strand
gcacugcugaacggaauau

SEQ ID NO: 2008985 - RNA, 19 nt, Homo sapiens
  misc_RNA (1)...(19): siRNA sense strand
gggucaagaucgccgaagu

SEQ ID NO: 2008986 - RNA, 19 nt, Homo sapiens
  misc_RNA (1)...(19): siRNA sense strand
caugguguggucauuguaa

SEQ ID NO: 2008987 - RNA, 19 nt, Homo sapiens
  misc_RNA (1)...(19): siRNA sense strand
uggcaagguugauuguaca

SEQ ID NO: 2008988 - RNA, 19 nt, Homo sapiens
  misc_RNA (1)...(19): siRNA sense strand
aaagcgggauuuggaguca

SEQ ID NO: 2008989 - RNA, 19 nt, Homo sapiens
  misc_RNA (1)...(19): siRNA sense strand
ccaaagucuauguggcuaa

SEQ ID NO: 2008990 - RNA, 19 nt, Homo sapiens
  misc_RNA (1)...(19): siRNA sense strand
gcgaggauaccccaccuua

SEQ ID NO: 2008991 - RNA, 19 nt, Homo sapiens
  misc_RNA (1)...(19): siRNA sense strand
acaaggcgaccacuuuauc

SEQ ID NO: 2008992 - RNA, 19 nt, Homo sapiens
  misc_RNA (1)...(19): siRNA sense strand
ucucagcaagcaacuuuga

SEQ ID NO: 2008993 - RNA, 19 nt, Homo sapiens
  misc_RNA (1)...(19): siRNA sense strand
ugcacaaggcgaccacuuu

SEQ ID NO: 2008994 - RNA, 19 nt, Homo sapiens
  misc_RNA (1)...(19): siRNA sense strand
cgaugacaccauugcagaa

SEQ ID NO: 2008995 - RNA, 19 nt, Homo sapiens
  misc_RNA (1)...(19): siRNA sense strand
caacuuugagcugcacguu

SEQ ID NO: 2008996 - RNA, 19 nt, Homo sapiens
  misc_RNA (1)...(19): siRNA sense strand
cugcacugcugaacggaau

SEQ ID NO: 2008997 - RNA, 19 nt, Homo sapiens
  misc_RNA (1)...(19): siRNA sense strand
gaugacaccauugcagaag

SEQ ID NO: 2008998 - RNA, 19 nt, Homo sapiens
  misc_RNA (1)...(19): siRNA sense strand
gauuguacacagcacuaug

SEQ ID NO: 2008999 - RNA, 19 nt, Homo sapiens
  misc_RNA (1)...(19): siRNA sense strand
ccuugaacauuccgaaacu

SEQ ID NO: 2009000 - RNA, 19 nt, Homo sapiens
  misc_RNA (1)...(19): siRNA sense strand
gcagagaccuugacucguu

SEQ ID NO: 2009001 - RNA, 19 nt, Homo sapiens
  misc_RNA (1)...(19): siRNA sense strand
ggaauaaccuucaucaagu

SEQ ID NO: 2009002 - RNA, 19 nt, Homo sapiens
  misc_RNA (1)...(19): siRNA sense strand
gcacaaggcgaccacuuua

SEQ ID NO: 2009003 - RNA, 19 nt, Homo sapiens
  misc_RNA (1)...(19): siRNA sense strand
gaauaaccuucaucaaguu

SEQ ID NO: 2009004 - RNA, 19 nt, Homo sapiens
  misc_RNA (1)...(19): siRNA sense strand
uaacuucgaugacaccauu

SEQ ID NO: 2009005 - RNA, 19 nt, Homo sapiens
  misc_RNA (1)...(19): siRNA sense strand
gaaaauaacuucgaugaca

SEQ ID NO: 2009006 - RNA, 19 nt, Homo sapiens
  misc_RNA (1)...(19): siRNA sense strand
ccaagaagcugugaaguac

SEQ ID NO: 2009007 - RNA, 19 nt, Homo sapiens
  misc_RNA (1)...(19): siRNA sense strand
gccaagaagcugugaagua

SEQ ID NO: 2009008 - RNA, 19 nt, Homo sapiens
  misc_RNA (1)...(19): siRNA sense strand
cggaauaucugcagcaagu

SEQ ID NO: 2009009 - RNA, 19 nt, Homo sapiens
  misc_RNA (1)...(19): siRNA sense strand
caaagucuauguggcuaaa

SEQ ID NO: 2009010 - RNA, 19 nt, Homo sapiens
  misc_RNA (1)...(19): siRNA sense strand
ggaagaugccaaagucuau

SEQ ID NO: 2009011 - RNA, 19 nt, Homo sapiens
  misc_RNA (1)...(19): siRNA sense strand
gaaagucagugagcacagu

SEQ ID NO: 2009012 - RNA, 19 nt, Homo sapiens
  misc_RNA (1)...(19): siRNA sense strand
cagagaccuugacucguua

SEQ ID NO: 2009013 - RNA, 19 nt, Homo sapiens
  misc_RNA (1)...(19): siRNA sense strand
gaacauuccgaaacuguca

SEQ ID NO: 2009014 - RNA, 19 nt, Homo sapiens
  misc_RNA (1)...(19): siRNA sense strand
gaauaucugcagcaaguau

SEQ ID NO: 2009015 - RNA, 19 nt, Homo sapiens
  misc_RNA (1)...(19): siRNA sense strand
gcucucagcaagcaacuuu

SEQ ID NO: 2009016 - RNA, 19 nt, Homo sapiens
  misc_RNA (1)...(19): siRNA sense strand
gaacgaggagccagugaca

SEQ ID NO: 2009017 - RNA, 19 nt, Homo sapiens
  misc_RNA (1)...(19): siRNA sense strand
ggucaagaucgccgaagua

SEQ ID NO: 2009018 - RNA, 19 nt, Homo sapiens
  misc_RNA (1)...(19): siRNA sense strand
caagaucgccgaaguagac

SEQ ID NO: 2009019 - RNA, 19 nt, Homo sapiens
  misc_RNA (1)...(19): siRNA sense strand
guacacagcacuaugaacu

SEQ ID NO: 2009020 - RNA, 19 nt, Homo sapiens
  misc_RNA (1)...(19): siRNA sense strand
caccauugcagaaggaaua

SEQ ID NO: 2009021 - RNA, 19 nt, Homo sapiens
  misc_RNA (1)...(19): siRNA sense strand
gcucugggccuugaacauu

SEQ ID NO: 2009022 - RNA, 19 nt, Homo sapiens
  misc_RNA (1)...(19): siRNA sense strand
uuccgaaacugucaagauu

SEQ ID NO: 2009023 - RNA, 19 nt, Homo sapiens
  misc_RNA (1)...(19): siRNA sense strand
gagggaagaaagucaguga

SEQ ID NO: 2009024 - RNA, 19 nt, Homo sapiens
  misc_RNA (1)...(19): siRNA sense strand
ugacaagggcacuguguug

SEQ ID NO: 2009025 - RNA, 19 nt, Homo sapiens
  misc_RNA (1)...(19): siRNA sense strand
ugacaccauugcagaagga

SEQ ID NO: 2009026 - RNA, 19 nt, Homo sapiens
  misc_RNA (1)...(19): siRNA sense strand
gaggauaccccaccuuaaa

SEQ ID NO: 2009027 - RNA, 19 nt, Homo sapiens
  misc_RNA (1)...(19): siRNA sense strand
ucaagcaagggcuguauga

SEQ ID NO: 2009028 - RNA, 19 nt, Homo sapiens
  misc_RNA (1)...(19): siRNA sense strand
uggagucacugagggagua

SEQ ID NO: 2009029 - RNA, 19 nt, Homo sapiens
  misc_RNA (1)...(19): siRNA sense strand
ccgaaacugucaagauugg

SEQ ID NO: 2009030 - RNA, 19 nt, Homo sapiens
  misc_RNA (1)...(19): siRNA sense strand
gaagaugccaaagucuaug

SEQ ID NO: 2009031 - RNA, 19 nt, Homo sapiens
  misc_RNA (1)...(19): siRNA sense strand
cagcaaguauucgguacga

SEQ ID NO: 2009032 - RNA, 19 nt, Homo sapiens
  misc_RNA (1)...(19): siRNA sense strand
caaggcgaccacuuuauca

SEQ ID NO: 2009033 - RNA, 19 nt, Homo sapiens
  misc_RNA (1)...(19): siRNA sense strand
ugucaagauuggcaagguu

SEQ ID NO: 2009034 - RNA, 19 nt, Homo sapiens
  misc_RNA (1)...(19): siRNA sense strand
gaacucugcuccggaaacc

SEQ ID NO: 2009035 - RNA, 19 nt, Homo sapiens
  misc_RNA (1)...(19): siRNA sense strand
aggaauaaccuucaucaag

SEQ ID NO: 2009036 - RNA, 19 nt, Homo sapiens
  misc_RNA (1)...(19): siRNA sense strand
aaagguggaucaguacaag

SEQ ID NO: 2009037 - RNA, 19 nt, Homo sapiens
  misc_RNA (1)...(19): siRNA sense strand
aagaagcugugaaguacca

SEQ ID NO: 2009038 - RNA, 19 nt, Homo sapiens
  misc_RNA (1)...(19): siRNA sense strand
ggaauaucugcagcaagua

SEQ ID NO: 2009039 - RNA, 19 nt, Homo sapiens
  misc_RNA (1)...(19): siRNA sense strand
gcuccaugguguggucauu

SEQ ID NO: 2009040 - RNA, 19 nt, Homo sapiens
  misc_RNA (1)...(19): siRNA sense strand
acacagcacuaugaacucu

SEQ ID NO: 2009041 - RNA, 19 nt, Homo sapiens
  misc_RNA (1)...(19): siRNA sense strand
gugguguggucacugcaaa

SEQ ID NO: 2009042 - RNA, 19 nt, Homo sapiens
  misc_RNA (1)...(19): siRNA sense strand
caagggaaagcgggauuug

SEQ ID NO: 2009043 - RNA, 19 nt, Homo sapiens
  misc_RNA (1)...(19): siRNA sense strand
gcacugcugaacggaauau

SEQ ID NO: 2009044 - RNA, 19 nt, Homo sapiens
  misc_RNA (1)...(19): siRNA sense strand
gggucaagaucgccgaagu

SEQ ID NO: 2009045 - RNA, 19 nt, Homo sapiens
  misc_RNA (1)...(19): siRNA sense strand
caugguguggucauuguaa

SEQ ID NO: 2009046 - RNA, 19 nt, Homo sapiens
  misc_RNA (1)...(19): siRNA sense strand
uggcaagguugauuguaca

SEQ ID NO: 2009047 - RNA, 19 nt, Homo sapiens
  misc_RNA (1)...(19): siRNA sense strand
aaagcgggauuuggaguca

SEQ ID NO: 2009048 - RNA, 19 nt, Homo sapiens
  misc_RNA (1)...(19): siRNA sense strand
gcgaggauaccccaccuua

SEQ ID NO: 2009049 - RNA, 19 nt, Homo sapiens
  misc_RNA (1)...(19): siRNA sense strand
ccaaagucuauguggcuaa

SEQ ID NO: 2009050 - RNA, 19 nt, Homo sapiens
  misc_RNA (1)...(19): siRNA sense strand
acaaggcgaccacuuuauc

SEQ ID NO: 2009051 - RNA, 19 nt, Homo sapiens
  misc_RNA (1)...(19): siRNA sense strand
ucucagcaagcaacuuuga

SEQ ID NO: 2009052 - RNA, 19 nt, Homo sapiens
  misc_RNA (1)...(19): siRNA sense strand
ugcacaaggcgaccacuuu

SEQ ID NO: 2009053 - RNA, 19 nt, Homo sapiens
  misc_RNA (1)...(19): siRNA sense strand
cgaugacaccauugcagaa

SEQ ID NO: 2009054 - RNA, 19 nt, Homo sapiens
  misc_RNA (1)...(19): siRNA sense strand
caacuuugagcugcacguu

SEQ ID NO: 2009055 - RNA, 19 nt, Homo sapiens
  misc_RNA (1)...(19): siRNA sense strand
cugcacugcugaacggaau

SEQ ID NO: 2009056 - RNA, 19 nt, Homo sapiens
  misc_RNA (1)...(19): siRNA sense strand
gaugacaccauugcagaag

SEQ ID NO: 2009057 - RNA, 19 nt, Homo sapiens
  misc_RNA (1)...(19): siRNA sense strand
gauuguacacagcacuaug

SEQ ID NO: 2009058 - RNA, 19 nt, Homo sapiens
  misc_RNA (1)...(19): siRNA sense strand
ccuugaacauuccgaaacu

SEQ ID NO: 2009059 - RNA, 19 nt, Homo sapiens
  misc_RNA (1)...(19): siRNA sense strand
caagugaacuaauuguuga

SEQ ID NO: 2009060 - RNA, 19 nt, Homo sapiens
  misc_RNA (1)...(19): siRNA sense strand
gggaagcacugaauauuuc

SEQ ID NO: 2009061 - RNA, 19 nt, Homo sapiens
  misc_RNA (1)...(19): siRNA sense strand
ggaauuacauaagcccuaa

SEQ ID NO: 2009062 - RNA, 19 nt, Homo sapiens
  misc_RNA (1)...(19): siRNA sense strand
agaaggaucugaagucgaa

SEQ ID NO: 2009063 - RNA, 19 nt, Homo sapiens
  misc_RNA (1)...(19): siRNA sense strand
gaaccagaaugugaacaaa

SEQ ID NO: 2009064 - RNA, 19 nt, Homo sapiens
  misc_RNA (1)...(19): siRNA sense strand
gcauugguguauggaauua

SEQ ID NO: 2009065 - RNA, 19 nt, Homo sapiens
  misc_RNA (1)...(19): siRNA sense strand
gugcauaucuuuuaccaua

SEQ ID NO: 2009066 - RNA, 19 nt, Homo sapiens
  misc_RNA (1)...(19): siRNA sense strand
agagaaagauacagauguu

SEQ ID NO: 2009067 - RNA, 19 nt, Homo sapiens
  misc_RNA (1)...(19): siRNA sense strand
ucaaaggcauucagucuuc

SEQ ID NO: 2009068 - RNA, 19 nt, Homo sapiens
  misc_RNA (1)...(19): siRNA sense strand
gaaagauacagauguugaa

SEQ ID NO: 2009069 - RNA, 19 nt, Homo sapiens
  misc_RNA (1)...(19): siRNA sense strand
gaagagaaagauacagaug

SEQ ID NO: 2009070 - RNA, 19 nt, Homo sapiens
  misc_RNA (1)...(19): siRNA sense strand
agauacagauguugaagaa

SEQ ID NO: 2009071 - RNA, 19 nt, Homo sapiens
  misc_RNA (1)...(19): siRNA sense strand
gggauuggauuugcaaguu

SEQ ID NO: 2009072 - RNA, 19 nt, Homo sapiens
  misc_RNA (1)...(19): siRNA sense strand
ggcuuaaacuggaagauga

SEQ ID NO: 2009073 - RNA, 19 nt, Homo sapiens
  misc_RNA (1)...(19): siRNA sense strand
ggauuggauuugcaaguug

SEQ ID NO: 2009074 - RNA, 19 nt, Homo sapiens
  misc_RNA (1)...(19): siRNA sense strand
caaguuguguagugugcua

SEQ ID NO: 2009075 - RNA, 19 nt, Homo sapiens
  misc_RNA (1)...(19): siRNA sense strand
guucugccaccaccuauua

SEQ ID NO: 2009076 - RNA, 19 nt, Homo sapiens
  misc_RNA (1)...(19): siRNA sense strand
gaacaguaaacuacaauac

SEQ ID NO: 2009077 - RNA, 19 nt, Homo sapiens
  misc_RNA (1)...(19): siRNA sense strand
gaucaaaggcauucagucu

SEQ ID NO: 2009078 - RNA, 19 nt, Homo sapiens
  misc_RNA (1)...(19): siRNA sense strand
ggaacaguaaacuacaaua

SEQ ID NO: 2009079 - RNA, 19 nt, Homo sapiens
  misc_RNA (1)...(19): siRNA sense strand
cuacuuaugguaauaggua

SEQ ID NO: 2009080 - RNA, 19 nt, Homo sapiens
  misc_RNA (1)...(19): siRNA sense strand
gaagaugaaagaccagcuu

SEQ ID NO: 2009081 - RNA, 19 nt, Homo sapiens
  misc_RNA (1)...(19): siRNA sense strand
guacagggaagcacugaau

SEQ ID NO: 2009082 - RNA, 19 nt, Homo sapiens
  misc_RNA (1)...(19): siRNA sense strand
gaaagaccagcuuggaaca

SEQ ID NO: 2009083 - RNA, 19 nt, Homo sapiens
  misc_RNA (1)...(19): siRNA sense strand
ggcauucagucuucuggaa

SEQ ID NO: 2009084 - RNA, 19 nt, Homo sapiens
  misc_RNA (1)...(19): siRNA sense strand
cagcauugguguauggaau

SEQ ID NO: 2009085 - RNA, 19 nt, Homo sapiens
  misc_RNA (1)...(19): siRNA sense strand
ugaagucgaagaugaaaga

SEQ ID NO: 2009086 - RNA, 19 nt, Homo sapiens
  misc_RNA (1)...(19): siRNA sense strand
agaaagauacagauguuga

SEQ ID NO: 2009087 - RNA, 19 nt, Homo sapiens
  misc_RNA (1)...(19): siRNA sense strand
uuacugagucugucaaaga

SEQ ID NO: 2009088 - RNA, 19 nt, Homo sapiens
  misc_RNA (1)...(19): siRNA sense strand
ggaacucucugugggucaa

SEQ ID NO: 2009089 - RNA, 19 nt, Homo sapiens
  misc_RNA (1)...(19): siRNA sense strand
gaugaaagaccagcuugga

SEQ ID NO: 2009090 - RNA, 19 nt, Homo sapiens
  misc_RNA (1)...(19): siRNA sense strand
gauuggauuugcaaguugu

SEQ ID NO: 2009091 - RNA, 19 nt, Homo sapiens
  misc_RNA (1)...(19): siRNA sense strand
ggaagagaaagauacagau

SEQ ID NO: 2009092 - RNA, 19 nt, Homo sapiens
  misc_RNA (1)...(19): siRNA sense strand
caaguuggauuuucuguag

SEQ ID NO: 2009093 - RNA, 19 nt, Homo sapiens
  misc_RNA (1)...(19): siRNA sense strand
gcauucagucuucuggaaa

SEQ ID NO: 2009094 - RNA, 19 nt, Homo sapiens
  misc_RNA (1)...(19): siRNA sense strand
cuacuacaacgucaucauu

SEQ ID NO: 2009095 - RNA, 19 nt, Homo sapiens
  misc_RNA (1)...(19): siRNA sense strand
uagaugaugauguuacuga

SEQ ID NO: 2009096 - RNA, 19 nt, Homo sapiens
  misc_RNA (1)...(19): siRNA sense strand
uaggaaauguguggcgauu

SEQ ID NO: 2009097 - RNA, 19 nt, Homo sapiens
  misc_RNA (1)...(19): siRNA sense strand
gaccagcuuggaacaguaa

SEQ ID NO: 2009098 - RNA, 19 nt, Homo sapiens
  misc_RNA (1)...(19): siRNA sense strand
ugaagaaggaucugaaguc

SEQ ID NO: 2009099 - RNA, 19 nt, Homo sapiens
  misc_RNA (1)...(19): siRNA sense strand
ucaguguccuuuggugaaa

SEQ ID NO: 2009100 - RNA, 19 nt, Homo sapiens
  misc_RNA (1)...(19): siRNA sense strand
uuacauaagcccuaaacug

SEQ ID NO: 2009101 - RNA, 19 nt, Homo sapiens
  misc_RNA (1)...(19): siRNA sense strand
agaccagcuuggaacagua

SEQ ID NO: 2009102 - RNA, 19 nt, Homo sapiens
  misc_RNA (1)...(19): siRNA sense strand
gagaauuagaugaugaugu

SEQ ID NO: 2009103 - RNA, 19 nt, Homo sapiens
  misc_RNA (1)...(19): siRNA sense strand
agacgcagcugaugaugcu

SEQ ID NO: 2009104 - RNA, 19 nt, Homo sapiens
  misc_RNA (1)...(19): siRNA sense strand
cagggaagcacugaauauu

SEQ ID NO: 2009105 - RNA, 19 nt, Homo sapiens
  misc_RNA (1)...(19): siRNA sense strand
gcuggaguuuguuuuauuu

SEQ ID NO: 2009106 - RNA, 19 nt, Homo sapiens
  misc_RNA (1)...(19): siRNA sense strand
guuguguagugugcuauuu

SEQ ID NO: 2009107 - RNA, 19 nt, Homo sapiens
  misc_RNA (1)...(19): siRNA sense strand
ggccaggaagagaaagaua

SEQ ID NO: 2009108 - RNA, 19 nt, Homo sapiens
  misc_RNA (1)...(19): siRNA sense strand
agggaagcacugaauauuu

SEQ ID NO: 2009109 - RNA, 19 nt, Homo sapiens
  misc_RNA (1)...(19): siRNA sense strand
gagaaagauacagauguug

SEQ ID NO: 2009110 - RNA, 19 nt, Homo sapiens
  misc_RNA (1)...(19): siRNA sense strand
gggcuuaaacuggaagaug

SEQ ID NO: 2009111 - RNA, 19 nt, Homo sapiens
  misc_RNA (1)...(19): siRNA sense strand
ugaagacgcagcugaugau

SEQ ID NO: 2009112 - RNA, 19 nt, Homo sapiens
  misc_RNA (1)...(19): siRNA sense strand
guggcgauuuccauaccua

SEQ ID NO: 2009113 - RNA, 19 nt, Homo sapiens
  misc_RNA (1)...(19): siRNA sense strand
uugcuuggcuaugaucaaa

SEQ ID NO: 2009114 - RNA, 19 nt, Homo sapiens
  misc_RNA (1)...(19): siRNA sense strand
caaugaagacgcagcugau

SEQ ID NO: 2009115 - RNA, 19 nt, Homo sapiens
  misc_RNA (1)...(19): siRNA sense strand
aaaguucugccaccaccua

SEQ ID NO: 2009116 - RNA, 19 nt, Homo sapiens
  misc_RNA (1)...(19): siRNA sense strand
acagggaagcacugaauau

SEQ ID NO: 2009117 - RNA, 19 nt, Homo sapiens
  misc_RNA (1)...(19): siRNA sense strand
accagaaugugaacaaagu

SEQ ID NO: 2009118 - RNA, 19 nt, Homo sapiens
  misc_RNA (1)...(19): siRNA sense strand
uggauuuucuguagguuua

SEQ ID NO: 2009119 - RNA, 19 nt, Homo sapiens
  misc_RNA (1)...(19): siRNA sense strand
cgaggcagcauugguguau

SEQ ID NO: 2009120 - RNA, 19 nt, Homo sapiens
  misc_RNA (1)...(19): siRNA sense strand
gggcggugcauaucuuuua

SEQ ID NO: 2009121 - RNA, 19 nt, Homo sapiens
  misc_RNA (1)...(19): siRNA sense strand
gaugaugcuuuuaagacaa

SEQ ID NO: 2009122 - RNA, 19 nt, Homo sapiens
  misc_RNA (1)...(19): siRNA sense strand
caaaggcauucagucuucu

SEQ ID NO: 2009123 - RNA, 19 nt, Homo sapiens
  misc_RNA (1)...(19): siRNA sense strand
gcuaugaucaaaggcauuc

SEQ ID NO: 2009124 - RNA, 19 nt, Homo sapiens
  misc_RNA (1)...(19): siRNA sense strand
gcuuggcuaugaucaaagg

SEQ ID NO: 2009125 - RNA, 19 nt, Homo sapiens
  misc_RNA (1)...(19): siRNA sense strand
ggauuugcaaguuguguag

SEQ ID NO: 2009126 - RNA, 19 nt, Homo sapiens
  misc_RNA (1)...(19): siRNA sense strand
gaagacgcagcugaugaug

SEQ ID NO: 2009127 - RNA, 19 nt, Homo sapiens
  misc_RNA (1)...(19): siRNA sense strand
uacagauguugaagaagga

SEQ ID NO: 2009128 - RNA, 19 nt, Homo sapiens
  misc_RNA (1)...(19): siRNA sense strand
ccaggaagagaaagauaca

SEQ ID NO: 2009129 - RNA, 19 nt, Homo sapiens
  misc_RNA (1)...(19): siRNA sense strand
uguagaaccagaaugugaa

SEQ ID NO: 2009130 - RNA, 19 nt, Homo sapiens
  misc_RNA (1)...(19): siRNA sense strand
auaccuaugucagaagaau

SEQ ID NO: 2009131 - RNA, 19 nt, Homo sapiens
  misc_RNA (1)...(19): siRNA sense strand
aucauuggcuggaguuugu

SEQ ID NO: 2009132 - RNA, 19 nt, Homo sapiens
  misc_RNA (1)...(19): siRNA sense strand
guagugugcuauuuuguag

SEQ ID NO: 2009133 - RNA, 19 nt, Homo sapiens
  misc_RNA (1)...(19): siRNA sense strand
gaauuacauaagcccuaaa

SEQ ID NO: 2009134 - RNA, 19 nt, Homo sapiens
  misc_RNA (1)...(19): siRNA sense strand
gcgaggcagcauuggugua

SEQ ID NO: 2009135 - RNA, 19 nt, Homo sapiens
  misc_RNA (1)...(19): siRNA sense strand
uacagggaagcacugaaua

SEQ ID NO: 2009136 - RNA, 19 nt, Homo sapiens
  misc_RNA (1)...(19): siRNA sense strand
gcuuggaacaguaaacuac

SEQ ID NO: 2009137 - RNA, 19 nt, Homo sapiens
  misc_RNA (1)...(19): siRNA sense strand
aggaagagaaagauacaga

SEQ ID NO: 2009138 - RNA, 19 nt, Homo sapiens
  misc_RNA (1)...(19): siRNA sense strand
aagagaaagauacagaugu

SEQ ID NO: 2009139 - RNA, 19 nt, Homo sapiens
  misc_RNA (1)...(19): siRNA sense strand
gaugaugauguuacugagu

SEQ ID NO: 2009140 - RNA, 19 nt, Homo sapiens
  misc_RNA (1)...(19): siRNA sense strand
ucuguagguuuaggaaaug

SEQ ID NO: 2009141 - RNA, 19 nt, Homo sapiens
  misc_RNA (1)...(19): siRNA sense strand
agaaccagaaugugaacaa

SEQ ID NO: 2009142 - RNA, 19 nt, Homo sapiens
  misc_RNA (1)...(19): siRNA sense strand
cugccugggucaugguuug

SEQ ID NO: 2009143 - RNA, 19 nt, Homo sapiens
  misc_RNA (1)...(19): siRNA sense strand
caagugaacuaauuguuga

SEQ ID NO: 2009144 - RNA, 19 nt, Homo sapiens
  misc_RNA (1)...(19): siRNA sense strand
gggaagcacugaauauuuc

SEQ ID NO: 2009145 - RNA, 19 nt, Homo sapiens
  misc_RNA (1)...(19): siRNA sense strand
ggaauuacauaagcccuaa

SEQ ID NO: 2009146 - RNA, 19 nt, Homo sapiens
  misc_RNA (1)...(19): siRNA sense strand
agaaggaucugaagucgaa

SEQ ID NO: 2009147 - RNA, 19 nt, Homo sapiens
  misc_RNA (1)...(19): siRNA sense strand
gaaccagaaugugaacaaa

SEQ ID NO: 2009148 - RNA, 19 nt, Homo sapiens
  misc_RNA (1)...(19): siRNA sense strand
gcauugguguauggaauua

SEQ ID NO: 2009149 - RNA, 19 nt, Homo sapiens
  misc_RNA (1)...(19): siRNA sense strand
gugcauaucuuuuaccaua

SEQ ID NO: 2009150 - RNA, 19 nt, Homo sapiens
  misc_RNA (1)...(19): siRNA sense strand
agagaaagauacagauguu

SEQ ID NO: 2009151 - RNA, 19 nt, Homo sapiens
  misc_RNA (1)...(19): siRNA sense strand
ucaaaggcauucagucuuc

SEQ ID NO: 2009152 - RNA, 19 nt, Homo sapiens
  misc_RNA (1)...(19): siRNA sense strand
gaaagauacagauguugaa

SEQ ID NO: 2009153 - RNA, 19 nt, Homo sapiens
  misc_RNA (1)...(19): siRNA sense strand
gaagagaaagauacagaug

SEQ ID NO: 2009154 - RNA, 19 nt, Homo sapiens
  misc_RNA (1)...(19): siRNA sense strand
agauacagauguugaagaa

SEQ ID NO: 2009155 - RNA, 19 nt, Homo sapiens
  misc_RNA (1)...(19): siRNA sense strand
gggauuggauuugcaaguu

SEQ ID NO: 2009156 - RNA, 19 nt, Homo sapiens
  misc_RNA (1)...(19): siRNA sense strand
ggcuuaaacuggaagauga

SEQ ID NO: 2009157 - RNA, 19 nt, Homo sapiens
  misc_RNA (1)...(19): siRNA sense strand
ggauuggauuugcaaguug

SEQ ID NO: 2009158 - RNA, 19 nt, Homo sapiens
  misc_RNA (1)...(19): siRNA sense strand
caaguuguguagugugcua

SEQ ID NO: 2009159 - RNA, 19 nt, Homo sapiens
  misc_RNA (1)...(19): siRNA sense strand
guucugccaccaccuauua

SEQ ID NO: 2009160 - RNA, 19 nt, Homo sapiens
  misc_RNA (1)...(19): siRNA sense strand
gaacaguaaacuacaauac

SEQ ID NO: 2009161 - RNA, 19 nt, Homo sapiens
  misc_RNA (1)...(19): siRNA sense strand
gaucaaaggcauucagucu

SEQ ID NO: 2009162 - RNA, 19 nt, Homo sapiens
  misc_RNA (1)...(19): siRNA sense strand
ggaacaguaaacuacaaua

SEQ ID NO: 2009163 - RNA, 19 nt, Homo sapiens
  misc_RNA (1)...(19): siRNA sense strand
cuacuuaugguaauaggua

SEQ ID NO: 2009164 - RNA, 19 nt, Homo sapiens
  misc_RNA (1)...(19): siRNA sense strand
gaagaugaaagaccagcuu

SEQ ID NO: 2009165 - RNA, 19 nt, Homo sapiens
  misc_RNA (1)...(19): siRNA sense strand
guacagggaagcacugaau

SEQ ID NO: 2009166 - RNA, 19 nt, Homo sapiens
  misc_RNA (1)...(19): siRNA sense strand
gaaagaccagcuuggaaca

SEQ ID NO: 2009167 - RNA, 19 nt, Homo sapiens
  misc_RNA (1)...(19): siRNA sense strand
ggcauucagucuucuggaa

SEQ ID NO: 2009168 - RNA, 19 nt, Homo sapiens
  misc_RNA (1)...(19): siRNA sense strand
cagcauugguguauggaau

SEQ ID NO: 2009169 - RNA, 19 nt, Homo sapiens
  misc_RNA (1)...(19): siRNA sense strand
ugaagucgaagaugaaaga

SEQ ID NO: 2009170 - RNA, 19 nt, Homo sapiens
  misc_RNA (1)...(19): siRNA sense strand
agaaagauacagauguuga

SEQ ID NO: 2009171 - RNA, 19 nt, Homo sapiens
  misc_RNA (1)...(19): siRNA sense strand
uuacugagucugucaaaga

SEQ ID NO: 2009172 - RNA, 19 nt, Homo sapiens
  misc_RNA (1)...(19): siRNA sense strand
ggaacucucugugggucaa

SEQ ID NO: 2009173 - RNA, 19 nt, Homo sapiens
  misc_RNA (1)...(19): siRNA sense strand
gaugaaagaccagcuugga

SEQ ID NO: 2009174 - RNA, 19 nt, Homo sapiens
  misc_RNA (1)...(19): siRNA sense strand
gauuggauuugcaaguugu

SEQ ID NO: 2009175 - RNA, 19 nt, Homo sapiens
  misc_RNA (1)...(19): siRNA sense strand
ggaagagaaagauacagau

SEQ ID NO: 2009176 - RNA, 19 nt, Homo sapiens
  misc_RNA (1)...(19): siRNA sense strand
caaguuggauuuucuguag

SEQ ID NO: 2009177 - RNA, 19 nt, Homo sapiens
  misc_RNA (1)...(19): siRNA sense strand
gcauucagucuucuggaaa

SEQ ID NO: 2009178 - RNA, 19 nt, Homo sapiens
  misc_RNA (1)...(19): siRNA sense strand
cuacuacaacgucaucauu

SEQ ID NO: 2009179 - RNA, 19 nt, Homo sapiens
  misc_RNA (1)...(19): siRNA sense strand
uagaugaugauguuacuga

SEQ ID NO: 2009180 - RNA, 19 nt, Homo sapiens
  misc_RNA (1)...(19): siRNA sense strand
uaggaaauguguggcgauu

SEQ ID NO: 2009181 - RNA, 19 nt, Homo sapiens
  misc_RNA (1)...(19): siRNA sense strand
gaccagcuuggaacaguaa

SEQ ID NO: 2009182 - RNA, 19 nt, Homo sapiens
  misc_RNA (1)...(19): siRNA sense strand
ugaagaaggaucugaaguc

SEQ ID NO: 2009183 - RNA, 19 nt, Homo sapiens
  misc_RNA (1)...(19): siRNA sense strand
ucaguguccuuuggugaaa

SEQ ID NO: 2009184 - RNA, 19 nt, Homo sapiens
  misc_RNA (1)...(19): siRNA sense strand
uuacauaagcccuaaacug

SEQ ID NO: 2009185 - RNA, 19 nt, Homo sapiens
  misc_RNA (1)...(19): siRNA sense strand
agaccagcuuggaacagua

SEQ ID NO: 2009186 - RNA, 19 nt, Homo sapiens
  misc_RNA (1)...(19): siRNA sense strand
gagaauuagaugaugaugu

SEQ ID NO: 2009187 - RNA, 19 nt, Homo sapiens
  misc_RNA (1)...(19): siRNA sense strand
agacgcagcugaugaugcu

SEQ ID NO: 2009188 - RNA, 19 nt, Homo sapiens
  misc_RNA (1)...(19): siRNA sense strand
cagggaagcacugaauauu

SEQ ID NO: 2009189 - RNA, 19 nt, Homo sapiens
  misc_RNA (1)...(19): siRNA sense strand
gcuggaguuuguuuuauuu

SEQ ID NO: 2009190 - RNA, 19 nt, Homo sapiens
  misc_RNA (1)...(19): siRNA sense strand
guuguguagugugcuauuu

SEQ ID NO: 2009191 - RNA, 19 nt, Homo sapiens
  misc_RNA (1)...(19): siRNA sense strand
ggccaggaagagaaagaua

SEQ ID NO: 2009192 - RNA, 19 nt, Homo sapiens
  misc_RNA (1)...(19): siRNA sense strand
agggaagcacugaauauuu

SEQ ID NO: 2009193 - RNA, 19 nt, Homo sapiens
  misc_RNA (1)...(19): siRNA sense strand
gagaaagauacagauguug

SEQ ID NO: 2009194 - RNA, 19 nt, Homo sapiens
  misc_RNA (1)...(19): siRNA sense strand
gggcuuaaacuggaagaug

SEQ ID NO: 2009195 - RNA, 19 nt, Homo sapiens
  misc_RNA (1)...(19): siRNA sense strand
ugaagacgcagcugaugau

SEQ ID NO: 2009196 - RNA, 19 nt, Homo sapiens
  misc_RNA (1)...(19): siRNA sense strand
guggcgauuuccauaccua

SEQ ID NO: 2009197 - RNA, 19 nt, Homo sapiens
  misc_RNA (1)...(19): siRNA sense strand
uugcuuggcuaugaucaaa

SEQ ID NO: 2009198 - RNA, 19 nt, Homo sapiens
  misc_RNA (1)...(19): siRNA sense strand
caaugaagacgcagcugau

SEQ ID NO: 2009199 - RNA, 19 nt, Homo sapiens
  misc_RNA (1)...(19): siRNA sense strand
aaaguucugccaccaccua

SEQ ID NO: 2009200 - RNA, 19 nt, Homo sapiens
  misc_RNA (1)...(19): siRNA sense strand
acagggaagcacugaauau

SEQ ID NO: 2009201 - RNA, 19 nt, Homo sapiens
  misc_RNA (1)...(19): siRNA sense strand
accagaaugugaacaaagu

SEQ ID NO: 2009202 - RNA, 19 nt, Homo sapiens
  misc_RNA (1)...(19): siRNA sense strand
uggauuuucuguagguuua

SEQ ID NO: 2009203 - RNA, 19 nt, Homo sapiens
  misc_RNA (1)...(19): siRNA sense strand
cgaggcagcauugguguau

SEQ ID NO: 2009204 - RNA, 19 nt, Homo sapiens
  misc_RNA (1)...(19): siRNA sense strand
gggcggugcauaucuuuua

SEQ ID NO: 2009205 - RNA, 19 nt, Homo sapiens
  misc_RNA (1)...(19): siRNA sense strand
gaugaugcuuuuaagacaa

SEQ ID NO: 2009206 - RNA, 19 nt, Homo sapiens
  misc_RNA (1)...(19): siRNA sense strand
caaaggcauucagucuucu

SEQ ID NO: 2009207 - RNA, 19 nt, Homo sapiens
  misc_RNA (1)...(19): siRNA sense strand
gcuaugaucaaaggcauuc

SEQ ID NO: 2009208 - RNA, 19 nt, Homo sapiens
  misc_RNA (1)...(19): siRNA sense strand
gcuuggcuaugaucaaagg

SEQ ID NO: 2009209 - RNA, 19 nt, Homo sapiens
  misc_RNA (1)...(19): siRNA sense strand
ggauuugcaaguuguguag

SEQ ID NO: 2009210 - RNA, 19 nt, Homo sapiens
  misc_RNA (1)...(19): siRNA sense strand
gaagacgcagcugaugaug

SEQ ID NO: 2009211 - RNA, 19 nt, Homo sapiens
  misc_RNA (1)...(19): siRNA sense strand
uacagauguugaagaagga

SEQ ID NO: 2009212 - RNA, 19 nt, Homo sapiens
  misc_RNA (1)...(19): siRNA sense strand
ccaggaagagaaagauaca

SEQ ID NO: 2009213 - RNA, 19 nt, Homo sapiens
  misc_RNA (1)...(19): siRNA sense strand
uguagaaccagaaugugaa

SEQ ID NO: 2009214 - RNA, 19 nt, Homo sapiens
  misc_RNA (1)...(19): siRNA sense strand
auaccuaugucagaagaau

SEQ ID NO: 2009215 - RNA, 19 nt, Homo sapiens
  misc_RNA (1)...(19): siRNA sense strand
aucauuggcuggaguuugu

SEQ ID NO: 2009216 - RNA, 19 nt, Homo sapiens
  misc_RNA (1)...(19): siRNA sense strand
guagugugcuauuuuguag

SEQ ID NO: 2009217 - RNA, 19 nt, Homo sapiens
  misc_RNA (1)...(19): siRNA sense strand
gaauuacauaagcccuaaa

SEQ ID NO: 2009218 - RNA, 19 nt, Homo sapiens
  misc_RNA (1)...(19): siRNA sense strand
gcgaggcagcauuggugua

SEQ ID NO: 2009219 - RNA, 19 nt, Homo sapiens
  misc_RNA (1)...(19): siRNA sense strand
uacagggaagcacugaaua

SEQ ID NO: 2009220 - RNA, 19 nt, Homo sapiens
  misc_RNA (1)...(19): siRNA sense strand
gcuuggaacaguaaacuac

SEQ ID NO: 2009221 - RNA, 19 nt, Homo sapiens
  misc_RNA (1)...(19): siRNA sense strand
aggaagagaaagauacaga

SEQ ID NO: 2009222 - RNA, 19 nt, Homo sapiens
  misc_RNA (1)...(19): siRNA sense strand
aagagaaagauacagaugu

SEQ ID NO: 2009223 - RNA, 19 nt, Homo sapiens
  misc_RNA (1)...(19): siRNA sense strand
gaugaugauguuacugagu

SEQ ID NO: 2009224 - RNA, 19 nt, Homo sapiens
  misc_RNA (1)...(19): siRNA sense strand
ucuguagguuuaggaaaug

SEQ ID NO: 2009225 - RNA, 19 nt, Homo sapiens
  misc_RNA (1)...(19): siRNA sense strand
agaaccagaaugugaacaa

SEQ ID NO: 2009226 - RNA, 19 nt, Homo sapiens
  misc_RNA (1)...(19): siRNA sense strand
cugccugggucaugguuug

SEQ ID NO: 2009227 - RNA, 19 nt, Homo sapiens
  misc_RNA (1)...(19): siRNA sense strand
gagaagaaccugacuguuu

SEQ ID NO: 2009228 - RNA, 19 nt, Homo sapiens
  misc_RNA (1)...(19): siRNA sense strand
agaagaaccugacuguuua

SEQ ID NO: 2009229 - RNA, 19 nt, Homo sapiens
  misc_RNA (1)...(19): siRNA sense strand
gaaccugacuguuuacaca

SEQ ID NO: 2009230 - RNA, 19 nt, Homo sapiens
  misc_RNA (1)...(19): siRNA sense strand
ccaagugucuggucaauag

SEQ ID NO: 2009231 - RNA, 19 nt, Homo sapiens
  misc_RNA (1)...(19): siRNA sense strand
guuuaugacuucccuuaua

SEQ ID NO: 2009232 - RNA, 19 nt, Homo sapiens
  misc_RNA (1)...(19): siRNA sense strand
ugacuucccuuauacuauu

SEQ ID NO: 2009233 - RNA, 19 nt, Homo sapiens
  misc_RNA (1)...(19): siRNA sense strand
gaaauugacauuccaguag

SEQ ID NO: 2009234 - RNA, 19 nt, Homo sapiens
  misc_RNA (1)...(19): siRNA sense strand
ggugaaaugugcccgguau

SEQ ID NO: 2009235 - RNA, 19 nt, Homo sapiens
  misc_RNA (1)...(19): siRNA sense strand
gaaguuugagccagucuuu

SEQ ID NO: 2009236 - RNA, 19 nt, Homo sapiens
  misc_RNA (1)...(19): siRNA sense strand
ggacucugcuucccaacug

SEQ ID NO: 2009237 - RNA, 19 nt, Homo sapiens
  misc_RNA (1)...(19): siRNA sense strand
uaacauccaucugaacaag

SEQ ID NO: 2009238 - RNA, 19 nt, Homo sapiens
  misc_RNA (1)...(19): siRNA sense strand
ugaaauugacauuccagua

SEQ ID NO: 2009239 - RNA, 19 nt, Homo sapiens
  misc_RNA (1)...(19): siRNA sense strand
ucucugccauugaaauuga

SEQ ID NO: 2009240 - RNA, 19 nt, Homo sapiens
  misc_RNA (1)...(19): siRNA sense strand
gagccagucuuuucauuug

SEQ ID NO: 2009241 - RNA, 19 nt, Homo sapiens
  misc_RNA (1)...(19): siRNA sense strand
cugcugcucugccugauug

SEQ ID NO: 2009242 - RNA, 19 nt, Homo sapiens
  misc_RNA (1)...(19): siRNA sense strand
acauccaucugaacaagaa

SEQ ID NO: 2009243 - RNA, 19 nt, Homo sapiens
  misc_RNA (1)...(19): siRNA sense strand
ugaaaugugcccgguauga

SEQ ID NO: 2009244 - RNA, 19 nt, Homo sapiens
  misc_RNA (1)...(19): siRNA sense strand
cgacacuacuugguacuca

SEQ ID NO: 2009245 - RNA, 19 nt, Homo sapiens
  misc_RNA (1)...(19): siRNA sense strand
acaucaaacuggccaagug

SEQ ID NO: 2009246 - RNA, 19 nt, Homo sapiens
  misc_RNA (1)...(19): siRNA sense strand
caacagaaacgagaagaac

SEQ ID NO: 2009247 - RNA, 19 nt, Homo sapiens
  misc_RNA (1)...(19): siRNA sense strand
aaauugacauuccaguagu

SEQ ID NO: 2009248 - RNA, 19 nt, Homo sapiens
  misc_RNA (1)...(19): siRNA sense strand
aaucuuugccuucuccuuu

SEQ ID NO: 2009249 - RNA, 19 nt, Homo sapiens
  misc_RNA (1)...(19): siRNA sense strand
caucugaacaagaaguuug

SEQ ID NO: 2009250 - RNA, 19 nt, Homo sapiens
  misc_RNA (1)...(19): siRNA sense strand
gugacugccugauguacga

SEQ ID NO: 2009251 - RNA, 19 nt, Homo sapiens
  misc_RNA (1)...(19): siRNA sense strand
uaguuucacacaccacuua

SEQ ID NO: 2009252 - RNA, 19 nt, Homo sapiens
  misc_RNA (1)...(19): siRNA sense strand
gguccucggugcccaacau

SEQ ID NO: 2009253 - RNA, 19 nt, Homo sapiens
  misc_RNA (1)...(19): siRNA sense strand
ugacauuccaguaguuuca

SEQ ID NO: 2009254 - RNA, 19 nt, Homo sapiens
  misc_RNA (1)...(19): siRNA sense strand
gacuucccuuauacuauuu

SEQ ID NO: 2009255 - RNA, 19 nt, Homo sapiens
  misc_RNA (1)...(19): siRNA sense strand
ccacgcagccacaguccuu

SEQ ID NO: 2009256 - RNA, 19 nt, Homo sapiens
  misc_RNA (1)...(19): siRNA sense strand
ggccaagugucuggucaau

SEQ ID NO: 2009257 - RNA, 19 nt, Homo sapiens
  misc_RNA (1)...(19): siRNA sense strand
cauccacccaguaugcaua

SEQ ID NO: 2009258 - RNA, 19 nt, Homo sapiens
  misc_RNA (1)...(19): siRNA sense strand
uauaacauccaucugaaca

SEQ ID NO: 2009259 - RNA, 19 nt, Homo sapiens
  misc_RNA (1)...(19): siRNA sense strand
cucaguagcaggccucuuu

SEQ ID NO: 2009260 - RNA, 19 nt, Homo sapiens
  misc_RNA (1)...(19): siRNA sense strand
uggaaucgccucaguagca

SEQ ID NO: 2009261 - RNA, 19 nt, Homo sapiens
  misc_RNA (1)...(19): siRNA sense strand
ucgccucucugccauugaa

SEQ ID NO: 2009262 - RNA, 19 nt, Homo sapiens
  misc_RNA (1)...(19): siRNA sense strand
ugaucacauucaacagaaa

SEQ ID NO: 2009263 - RNA, 19 nt, Homo sapiens
  misc_RNA (1)...(19): siRNA sense strand
ccauugaaauugacauucc

SEQ ID NO: 2009264 - RNA, 19 nt, Homo sapiens
  misc_RNA (1)...(19): siRNA sense strand
uaugacuucccuuauacua

SEQ ID NO: 2009265 - RNA, 19 nt, Homo sapiens
  misc_RNA (1)...(19): siRNA sense strand
gaaaugugcccgguaugac

SEQ ID NO: 2009266 - RNA, 19 nt, Homo sapiens
  misc_RNA (1)...(19): siRNA sense strand
uggagaaaauuacgauuga

SEQ ID NO: 2009267 - RNA, 19 nt, Homo sapiens
  misc_RNA (1)...(19): siRNA sense strand
ccacaguccuuuccuuccu

SEQ ID NO: 2009268 - RNA, 19 nt, Homo sapiens
  misc_RNA (1)...(19): siRNA sense strand
uguacgacacuacuuggua

SEQ ID NO: 2009269 - RNA, 19 nt, Homo sapiens
  misc_RNA (1)...(19): siRNA sense strand
cagccacaguccuuuccuu

SEQ ID NO: 2009270 - RNA, 19 nt, Homo sapiens
  misc_RNA (1)...(19): siRNA sense strand
uuuaugacuucccuuauac

SEQ ID NO: 2009271 - RNA, 19 nt, Homo sapiens
  misc_RNA (1)...(19): siRNA sense strand
gaagaaccugacuguuuac

SEQ ID NO: 2009272 - RNA, 19 nt, Homo sapiens
  misc_RNA (1)...(19): siRNA sense strand
guguaugucacuauugcua

SEQ ID NO: 2009273 - RNA, 19 nt, Homo sapiens
  misc_RNA (1)...(19): siRNA sense strand
cuaucugggucaucuuuua

SEQ ID NO: 2009274 - RNA, 19 nt, Homo sapiens
  misc_RNA (1)...(19): siRNA sense strand
caucaaacuggccaagugu

SEQ ID NO: 2009275 - RNA, 19 nt, Homo sapiens
  misc_RNA (1)...(19): siRNA sense strand
gguaugacgggagcaguga

SEQ ID NO: 2009276 - RNA, 19 nt, Homo sapiens
  misc_RNA (1)...(19): siRNA sense strand
ggucaucuuuuauaacauc

SEQ ID NO: 2009277 - RNA, 19 nt, Homo sapiens
  misc_RNA (1)...(19): siRNA sense strand
ucaacagaaacgagaagaa

SEQ ID NO: 2009278 - RNA, 19 nt, Homo sapiens
  misc_RNA (1)...(19): siRNA sense strand
ugauguacgacacuacuug

SEQ ID NO: 2009279 - RNA, 19 nt, Homo sapiens
  misc_RNA (1)...(19): siRNA sense strand
ccaucuaucugggucaucu

SEQ ID NO: 2009280 - RNA, 19 nt, Homo sapiens
  misc_RNA (1)...(19): siRNA sense strand
gccaagugucuggucaaua

SEQ ID NO: 2009281 - RNA, 19 nt, Homo sapiens
  misc_RNA (1)...(19): siRNA sense strand
ccucucugccauugaaauu

SEQ ID NO: 2009282 - RNA, 19 nt, Homo sapiens
  misc_RNA (1)...(19): siRNA sense strand
gacacuacuugguacucau

SEQ ID NO: 2009283 - RNA, 19 nt, Homo sapiens
  misc_RNA (1)...(19): siRNA sense strand
aauugacauuccaguaguu

SEQ ID NO: 2009284 - RNA, 19 nt, Homo sapiens
  misc_RNA (1)...(19): siRNA sense strand
ucauuugacuaugcagugu

SEQ ID NO: 2009285 - RNA, 19 nt, Homo sapiens
  misc_RNA (1)...(19): siRNA sense strand
gaucacauucaacagaaac

SEQ ID NO: 2009286 - RNA, 19 nt, Homo sapiens
  misc_RNA (1)...(19): siRNA sense strand
guacagcuuugguuuaaua

SEQ ID NO: 2009287 - RNA, 19 nt, Homo sapiens
  misc_RNA (1)...(19): siRNA sense strand
ggaaguacaugaaggacua

SEQ ID NO: 2009288 - RNA, 19 nt, Homo sapiens
  misc_RNA (1)...(19): siRNA sense strand
ggagagugcugcucacauu

SEQ ID NO: 2009289 - RNA, 19 nt, Homo sapiens
  misc_RNA (1)...(19): siRNA sense strand
gcaccagcguuauaucaaa

SEQ ID NO: 2009290 - RNA, 19 nt, Homo sapiens
  misc_RNA (1)...(19): siRNA sense strand
cagaaucgguugcagaaga

SEQ ID NO: 2009291 - RNA, 19 nt, Homo sapiens
  misc_RNA (1)...(19): siRNA sense strand
caguacagcuuugguuuaa

SEQ ID NO: 2009292 - RNA, 19 nt, Homo sapiens
  misc_RNA (1)...(19): siRNA sense strand
cuucagagauuacaucaug

SEQ ID NO: 2009293 - RNA, 19 nt, Homo sapiens
  misc_RNA (1)...(19): siRNA sense strand
cuucauagcccuccuguuu

SEQ ID NO: 2009294 - RNA, 19 nt, Homo sapiens
  misc_RNA (1)...(19): siRNA sense strand
gcacaggcuucucuucgau

SEQ ID NO: 2009295 - RNA, 19 nt, Homo sapiens
  misc_RNA (1)...(19): siRNA sense strand
gcuccucacuguccuguau

SEQ ID NO: 2009296 - RNA, 19 nt, Homo sapiens
  misc_RNA (1)...(19): siRNA sense strand
ugaccuauuugaccagauu

SEQ ID NO: 2009297 - RNA, 19 nt, Homo sapiens
  misc_RNA (1)...(19): siRNA sense strand
gccaucaggugcuggacua

SEQ ID NO: 2009298 - RNA, 19 nt, Homo sapiens
  misc_RNA (1)...(19): siRNA sense strand
gaaggguggcggaaacuug

SEQ ID NO: 2009299 - RNA, 19 nt, Homo sapiens
  misc_RNA (1)...(19): siRNA sense strand
ccaguacagcuuugguuua

SEQ ID NO: 2009300 - RNA, 19 nt, Homo sapiens
  misc_RNA (1)...(19): siRNA sense strand
gauucuggcuccucacugu

SEQ ID NO: 2009301 - RNA, 19 nt, Homo sapiens
  misc_RNA (1)...(19): siRNA sense strand
ucaaagagcugugcaaccu

SEQ ID NO: 2009302 - RNA, 19 nt, Homo sapiens
  misc_RNA (1)...(19): siRNA sense strand
guacaugaaggacuauuuc

SEQ ID NO: 2009303 - RNA, 19 nt, Homo sapiens
  misc_RNA (1)...(19): siRNA sense strand
gaaacuugcugggcaucau

SEQ ID NO: 2009304 - RNA, 19 nt, Homo sapiens
  misc_RNA (1)...(19): siRNA sense strand
gggagaaugaccuauuuga

SEQ ID NO: 2009305 - RNA, 19 nt, Homo sapiens
  misc_RNA (1)...(19): siRNA sense strand
gcuggacuauauggaagua

SEQ ID NO: 2009306 - RNA, 19 nt, Homo sapiens
  misc_RNA (1)...(19): siRNA sense strand
gccguggugucuuccagua

SEQ ID NO: 2009307 - RNA, 19 nt, Homo sapiens
  misc_RNA (1)...(19): siRNA sense strand
ggaagcccaucgagguaca

SEQ ID NO: 2009308 - RNA, 19 nt, Homo sapiens
  misc_RNA (1)...(19): siRNA sense strand
ucauagcccuccuguuuac

SEQ ID NO: 2009309 - RNA, 19 nt, Homo sapiens
  misc_RNA (1)...(19): siRNA sense strand
gccaaccugugcacugaga

SEQ ID NO: 2009310 - RNA, 19 nt, Homo sapiens
  misc_RNA (1)...(19): siRNA sense strand
gcaucucccucccacucuu

SEQ ID NO: 2009311 - RNA, 19 nt, Homo sapiens
  misc_RNA (1)...(19): siRNA sense strand
gaccagcacuuggaguucu

SEQ ID NO: 2009312 - RNA, 19 nt, Homo sapiens
  misc_RNA (1)...(19): siRNA sense strand
caggguuggucacaucaga

SEQ ID NO: 2009313 - RNA, 19 nt, Homo sapiens
  misc_RNA (1)...(19): siRNA sense strand
ugaugaugcugaccuugug

SEQ ID NO: 2009314 - RNA, 19 nt, Homo sapiens
  misc_RNA (1)...(19): siRNA sense strand
agaaucgguugcagaagau

SEQ ID NO: 2009315 - RNA, 19 nt, Homo sapiens
  misc_RNA (1)...(19): siRNA sense strand
caucaggugcuggacuaua

SEQ ID NO: 2009316 - RNA, 19 nt, Homo sapiens
  misc_RNA (1)...(19): siRNA sense strand
gcccuccuguuuacaagau

SEQ ID NO: 2009317 - RNA, 19 nt, Homo sapiens
  misc_RNA (1)...(19): siRNA sense strand
caggaaggguggcggaaac

SEQ ID NO: 2009318 - RNA, 19 nt, Homo sapiens
  misc_RNA (1)...(19): siRNA sense strand
ggagaaugaccuauuugac

SEQ ID NO: 2009319 - RNA, 19 nt, Homo sapiens
  misc_RNA (1)...(19): siRNA sense strand
gcuccugguuacgcuauau

SEQ ID NO: 2009320 - RNA, 19 nt, Homo sapiens
  misc_RNA (1)...(19): siRNA sense strand
gaccagauucccaacucuu

SEQ ID NO: 2009321 - RNA, 19 nt, Homo sapiens
  misc_RNA (1)...(19): siRNA sense strand
caccagcguuauaucaaag

SEQ ID NO: 2009322 - RNA, 19 nt, Homo sapiens
  misc_RNA (1)...(19): siRNA sense strand
ggugcuggacuauauggaa

SEQ ID NO: 2009323 - RNA, 19 nt, Homo sapiens
  misc_RNA (1)...(19): siRNA sense strand
cuauauggaaguacaugaa

SEQ ID NO: 2009324 - RNA, 19 nt, Homo sapiens
  misc_RNA (1)...(19): siRNA sense strand
ucauggccguggugucuuc

SEQ ID NO: 2009325 - RNA, 19 nt, Homo sapiens
  misc_RNA (1)...(19): siRNA sense strand
ggguuggucacaucagaaa

SEQ ID NO: 2009326 - RNA, 19 nt, Homo sapiens
  misc_RNA (1)...(19): siRNA sense strand
ccaucucgcuggucaagac

SEQ ID NO: 2009327 - RNA, 19 nt, Homo sapiens
  misc_RNA (1)...(19): siRNA sense strand
aucaggugcuggacuauau

SEQ ID NO: 2009328 - RNA, 19 nt, Homo sapiens
  misc_RNA (1)...(19): siRNA sense strand
cuucgaggcccacaaacuu

SEQ ID NO: 2009329 - RNA, 19 nt, Homo sapiens
  misc_RNA (1)...(19): siRNA sense strand
guuacgcuauauccagaau

SEQ ID NO: 2009330 - RNA, 19 nt, Homo sapiens
  misc_RNA (1)...(19): siRNA sense strand
aaacuugcugggcaucauu

SEQ ID NO: 2009331 - RNA, 19 nt, Homo sapiens
  misc_RNA (1)...(19): siRNA sense strand
gagugcugcucacauucug

SEQ ID NO: 2009332 - RNA, 19 nt, Homo sapiens
  misc_RNA (1)...(19): siRNA sense strand
ggaaggguggcggaaacuu

SEQ ID NO: 2009333 - RNA, 19 nt, Homo sapiens
  misc_RNA (1)...(19): siRNA sense strand
caguuugucuucuccuucu

SEQ ID NO: 2009334 - RNA, 19 nt, Homo sapiens
  misc_RNA (1)...(19): siRNA sense strand
cguggugucuuccaguaca

SEQ ID NO: 2009335 - RNA, 19 nt, Homo sapiens
  misc_RNA (1)...(19): siRNA sense strand
uggacuauauggaaguaca

SEQ ID NO: 2009336 - RNA, 19 nt, Homo sapiens
  misc_RNA (1)...(19): siRNA sense strand
uucauagcccuccuguuua

SEQ ID NO: 2009337 - RNA, 19 nt, Homo sapiens
  misc_RNA (1)...(19): siRNA sense strand
gagagugcugcucacauuc

SEQ ID NO: 2009338 - RNA, 19 nt, Homo sapiens
  misc_RNA (1)...(19): siRNA sense strand
cugcaggguuggucacauc

SEQ ID NO: 2009339 - RNA, 19 nt, Homo sapiens
  misc_RNA (1)...(19): siRNA sense strand
aggcuucucuucgaucuuc

SEQ ID NO: 2009340 - RNA, 19 nt, Homo sapiens
  misc_RNA (1)...(19): siRNA sense strand
uugccaaccugugcacuga

SEQ ID NO: 2009341 - RNA, 19 nt, Homo sapiens
  misc_RNA (1)...(19): siRNA sense strand
ucgaggcccacaaacuuaa

SEQ ID NO: 2009342 - RNA, 19 nt, Homo sapiens
  misc_RNA (1)...(19): siRNA sense strand
uauggaaguacaugaagga

SEQ ID NO: 2009343 - RNA, 19 nt, Homo sapiens
  misc_RNA (1)...(19): siRNA sense strand
ggaaacuugcugggcauca

SEQ ID NO: 2009344 - RNA, 19 nt, Homo sapiens
  misc_RNA (1)...(19): siRNA sense strand
gaaguacaugaaggacuau

SEQ ID NO: 2009345 - RNA, 19 nt, Homo sapiens
  misc_RNA (1)...(19): siRNA sense strand
ggaaacauguggcccuaca

SEQ ID NO: 2009346 - RNA, 19 nt, Homo sapiens
  misc_RNA (1)...(19): siRNA sense strand
ggcccuacaucaggaauuu

SEQ ID NO: 2009347 - RNA, 19 nt, Homo sapiens
  misc_RNA (1)...(19): siRNA sense strand
gugcagagcccaacaugag

SEQ ID NO: 2009348 - RNA, 19 nt, Homo sapiens
  misc_RNA (1)...(19): siRNA sense strand
gccuaucgguaccuuguga

SEQ ID NO: 2009349 - RNA, 19 nt, Homo sapiens
  misc_RNA (1)...(19): siRNA sense strand
uuuccaagcugccaccuau

SEQ ID NO: 2009350 - RNA, 19 nt, Homo sapiens
  misc_RNA (1)...(19): siRNA sense strand
gaggacuucugcgggaguu

SEQ ID NO: 2009351 - RNA, 19 nt, Homo sapiens
  misc_RNA (1)...(19): siRNA sense strand
cguagcauccggaaacaug

SEQ ID NO: 2009352 - RNA, 19 nt, Homo sapiens
  misc_RNA (1)...(19): siRNA sense strand
gagcccaacaugagcuuca

SEQ ID NO: 2009353 - RNA, 19 nt, Homo sapiens
  misc_RNA (1)...(19): siRNA sense strand
cuacaucaggaauuucaug

SEQ ID NO: 2009354 - RNA, 19 nt, Homo sapiens
  misc_RNA (1)...(19): siRNA sense strand
ggaaacauguggcccuaca

SEQ ID NO: 2009355 - RNA, 19 nt, Homo sapiens
  misc_RNA (1)...(19): siRNA sense strand
ggcccuacaucaggaauuu

SEQ ID NO: 2009356 - RNA, 19 nt, Homo sapiens
  misc_RNA (1)...(19): siRNA sense strand
gugcagagcccaacaugag

SEQ ID NO: 2009357 - RNA, 19 nt, Homo sapiens
  misc_RNA (1)...(19): siRNA sense strand
gccuaucgguaccuuguga

SEQ ID NO: 2009358 - RNA, 19 nt, Homo sapiens
  misc_RNA (1)...(19): siRNA sense strand
uuuccaagcugccaccuau

SEQ ID NO: 2009359 - RNA, 19 nt, Homo sapiens
  misc_RNA (1)...(19): siRNA sense strand
gaggacuucugcgggaguu

SEQ ID NO: 2009360 - RNA, 19 nt, Homo sapiens
  misc_RNA (1)...(19): siRNA sense strand
cguagcauccggaaacaug

SEQ ID NO: 2009361 - RNA, 19 nt, Homo sapiens
  misc_RNA (1)...(19): siRNA sense strand
gagcccaacaugagcuuca

SEQ ID NO: 2009362 - RNA, 19 nt, Homo sapiens
  misc_RNA (1)...(19): siRNA sense strand
cuacaucaggaauuucaug

SEQ ID NO: 2009363 - RNA, 19 nt, Homo sapiens
  misc_RNA (1)...(19): siRNA sense strand
gaaaggaucuuggaauuca

SEQ ID NO: 2009364 - RNA, 19 nt, Homo sapiens
  misc_RNA (1)...(19): siRNA sense strand
gaacucagguugcacagaa

SEQ ID NO: 2009365 - RNA, 19 nt, Homo sapiens
  misc_RNA (1)...(19): siRNA sense strand
gcgaaaggaucuuggaauu

SEQ ID NO: 2009366 - RNA, 19 nt, Homo sapiens
  misc_RNA (1)...(19): siRNA sense strand
gaccaucaguuucaucuuu

SEQ ID NO: 2009367 - RNA, 19 nt, Homo sapiens
  misc_RNA (1)...(19): siRNA sense strand
gaaacuggagcucagaaua

SEQ ID NO: 2009368 - RNA, 19 nt, Homo sapiens
  misc_RNA (1)...(19): siRNA sense strand
gaucucagcaucaguauga

SEQ ID NO: 2009369 - RNA, 19 nt, Homo sapiens
  misc_RNA (1)...(19): siRNA sense strand
gcugauagauggauuucuu

SEQ ID NO: 2009370 - RNA, 19 nt, Homo sapiens
  misc_RNA (1)...(19): siRNA sense strand
caaaggugcaggacaauuu

SEQ ID NO: 2009371 - RNA, 19 nt, Homo sapiens
  misc_RNA (1)...(19): siRNA sense strand
ggcaccaucucuaacauuu

SEQ ID NO: 2009372 - RNA, 19 nt, Homo sapiens
  misc_RNA (1)...(19): siRNA sense strand
gccauuagcuuuucucuga

SEQ ID NO: 2009373 - RNA, 19 nt, Homo sapiens
  misc_RNA (1)...(19): siRNA sense strand
ggaggugaaugaagaaggu

SEQ ID NO: 2009374 - RNA, 19 nt, Homo sapiens
  misc_RNA (1)...(19): siRNA sense strand
cagcauaucagacguacaa

SEQ ID NO: 2009375 - RNA, 19 nt, Homo sapiens
  misc_RNA (1)...(19): siRNA sense strand
gacuggaggugcauggaaa

SEQ ID NO: 2009376 - RNA, 19 nt, Homo sapiens
  misc_RNA (1)...(19): siRNA sense strand
aagaggagauugaagaaca

SEQ ID NO: 2009377 - RNA, 19 nt, Homo sapiens
  misc_RNA (1)...(19): siRNA sense strand
uggcaaaggugcaggacaa

SEQ ID NO: 2009378 - RNA, 19 nt, Homo sapiens
  misc_RNA (1)...(19): siRNA sense strand
ugaagaaggugccaucacu

SEQ ID NO: 2009379 - RNA, 19 nt, Homo sapiens
  misc_RNA (1)...(19): siRNA sense strand
gaccauuccuguggccuuu

SEQ ID NO: 2009380 - RNA, 19 nt, Homo sapiens
  misc_RNA (1)...(19): siRNA sense strand
ccaaaacaauccaaaauca

SEQ ID NO: 2009381 - RNA, 19 nt, Homo sapiens
  misc_RNA (1)...(19): siRNA sense strand
aaacuggagcucagaauau

SEQ ID NO: 2009382 - RNA, 19 nt, Homo sapiens
  misc_RNA (1)...(19): siRNA sense strand
gcuuaucuccuggccauua

SEQ ID NO: 2009383 - RNA, 19 nt, Homo sapiens
  misc_RNA (1)...(19): siRNA sense strand
ucaguuucaucuuuccuuu

SEQ ID NO: 2009384 - RNA, 19 nt, Homo sapiens
  misc_RNA (1)...(19): siRNA sense strand
ggagauugaagaacaaaca

SEQ ID NO: 2009385 - RNA, 19 nt, Homo sapiens
  misc_RNA (1)...(19): siRNA sense strand
gcaaaggugcaggacaauu

SEQ ID NO: 2009386 - RNA, 19 nt, Homo sapiens
  misc_RNA (1)...(19): siRNA sense strand
gcacuugguccagauguug

SEQ ID NO: 2009387 - RNA, 19 nt, Homo sapiens
  misc_RNA (1)...(19): siRNA sense strand
gaagccaguccaagcuauu

SEQ ID NO: 2009388 - RNA, 19 nt, Homo sapiens
  misc_RNA (1)...(19): siRNA sense strand
agagaccaaugccuucuug

SEQ ID NO: 2009389 - RNA, 19 nt, Homo sapiens
  misc_RNA (1)...(19): siRNA sense strand
ggacuggaggugcauggaa

SEQ ID NO: 2009390 - RNA, 19 nt, Homo sapiens
  misc_RNA (1)...(19): siRNA sense strand
ucaccaugcuccaguuauc

SEQ ID NO: 2009391 - RNA, 19 nt, Homo sapiens
  misc_RNA (1)...(19): siRNA sense strand
ccuggagucuucagcagaa

SEQ ID NO: 2009392 - RNA, 19 nt, Homo sapiens
  misc_RNA (1)...(19): siRNA sense strand
gagcucagaauauucagau

SEQ ID NO: 2009393 - RNA, 19 nt, Homo sapiens
  misc_RNA (1)...(19): siRNA sense strand
gcucagaauauucagaugu

SEQ ID NO: 2009394 - RNA, 19 nt, Homo sapiens
  misc_RNA (1)...(19): siRNA sense strand
gaagaacaaacauggaaaa

SEQ ID NO: 2009395 - RNA, 19 nt, Homo sapiens
  misc_RNA (1)...(19): siRNA sense strand
gcauaucagacguacaaga

SEQ ID NO: 2009396 - RNA, 19 nt, Homo sapiens
  misc_RNA (1)...(19): siRNA sense strand
ugaagccaguccaagcuau

SEQ ID NO: 2009397 - RNA, 19 nt, Homo sapiens
  misc_RNA (1)...(19): siRNA sense strand
gauauggaucucagcauca

SEQ ID NO: 2009398 - RNA, 19 nt, Homo sapiens
  misc_RNA (1)...(19): siRNA sense strand
uacaagaggagauugaaga

SEQ ID NO: 2009399 - RNA, 19 nt, Homo sapiens
  misc_RNA (1)...(19): siRNA sense strand
cauguucucuuugggaugu

SEQ ID NO: 2009400 - RNA, 19 nt, Homo sapiens
  misc_RNA (1)...(19): siRNA sense strand
aguuugggcucaugccuuu

SEQ ID NO: 2009401 - RNA, 19 nt, Homo sapiens
  misc_RNA (1)...(19): siRNA sense strand
aguuucaucuuuccuuuga

SEQ ID NO: 2009402 - RNA, 19 nt, Homo sapiens
  misc_RNA (1)...(19): siRNA sense strand
ucagcagaaucucaccauu

SEQ ID NO: 2009403 - RNA, 19 nt, Homo sapiens
  misc_RNA (1)...(19): siRNA sense strand
cauaggaauuacccuugug

SEQ ID NO: 2009404 - RNA, 19 nt, Homo sapiens
  misc_RNA (1)...(19): siRNA sense strand
aacuggagcucagaauauu

SEQ ID NO: 2009405 - RNA, 19 nt, Homo sapiens
  misc_RNA (1)...(19): siRNA sense strand
agaggagauugaagaacaa

SEQ ID NO: 2009406 - RNA, 19 nt, Homo sapiens
  misc_RNA (1)...(19): siRNA sense strand
caucaccaugcuccaguua

SEQ ID NO: 2009407 - RNA, 19 nt, Homo sapiens
  misc_RNA (1)...(19): siRNA sense strand
aguccaagcuauugcuguu

SEQ ID NO: 2009408 - RNA, 19 nt, Homo sapiens
  misc_RNA (1)...(19): siRNA sense strand
ugaagaacaaacauggaaa

SEQ ID NO: 2009409 - RNA, 19 nt, Homo sapiens
  misc_RNA (1)...(19): siRNA sense strand
gaucuuggaauucagacau

SEQ ID NO: 2009410 - RNA, 19 nt, Homo sapiens
  misc_RNA (1)...(19): siRNA sense strand
cgaaaggaucuuggaauuc

SEQ ID NO: 2009411 - RNA, 19 nt, Homo sapiens
  misc_RNA (1)...(19): siRNA sense strand
ggccuuuggugucuaugug

SEQ ID NO: 2009412 - RNA, 19 nt, Homo sapiens
  misc_RNA (1)...(19): siRNA sense strand
ccaccagggccaauggauu

SEQ ID NO: 2009413 - RNA, 19 nt, Homo sapiens
  misc_RNA (1)...(19): siRNA sense strand
cgaggaaaucgacuucuuc

SEQ ID NO: 2009414 - RNA, 19 nt, Homo sapiens
  misc_RNA (1)...(19): siRNA sense strand
acgaggaaaucgacuucuu

SEQ ID NO: 2009415 - RNA, 19 nt, Homo sapiens
  misc_RNA (1)...(19): siRNA sense strand
gggcaccaucucuaacauu

SEQ ID NO: 2009416 - RNA, 19 nt, Homo sapiens
  misc_RNA (1)...(19): siRNA sense strand
ccaguuggccacaucacuu

SEQ ID NO: 2009417 - RNA, 19 nt, Homo sapiens
  misc_RNA (1)...(19): siRNA sense strand
cauaucagacguacaagag

SEQ ID NO: 2009418 - RNA, 19 nt, Homo sapiens
  misc_RNA (1)...(19): siRNA sense strand
gauggauuucuuauuguug

SEQ ID NO: 2009419 - RNA, 19 nt, Homo sapiens
  misc_RNA (1)...(19): siRNA sense strand
gguguccacugugaugaug

SEQ ID NO: 2009420 - RNA, 19 nt, Homo sapiens
  misc_RNA (1)...(19): siRNA sense strand
acauaggaauuacccuugu

SEQ ID NO: 2009421 - RNA, 19 nt, Homo sapiens
  misc_RNA (1)...(19): siRNA sense strand
caccauuccuuaucagaac

SEQ ID NO: 2009422 - RNA, 19 nt, Homo sapiens
  misc_RNA (1)...(19): siRNA sense strand
ugguccagauguugaguuu

SEQ ID NO: 2009423 - RNA, 19 nt, Homo sapiens
  misc_RNA (1)...(19): siRNA sense strand
acaagaggagauugaagaa

SEQ ID NO: 2009424 - RNA, 19 nt, Homo sapiens
  misc_RNA (1)...(19): siRNA sense strand
ccaaaaucauucucaagau

SEQ ID NO: 2009425 - RNA, 19 nt, Homo sapiens
  misc_RNA (1)...(19): siRNA sense strand
ccaccagucuuggcaaagg

SEQ ID NO: 2009426 - RNA, 19 nt, Homo sapiens
  misc_RNA (1)...(19): siRNA sense strand
ucaccauuccuuaucagaa

SEQ ID NO: 2009427 - RNA, 19 nt, Homo sapiens
  misc_RNA (1)...(19): siRNA sense strand
cucagaauauucagaugug

SEQ ID NO: 2009428 - RNA, 19 nt, Homo sapiens
  misc_RNA (1)...(19): siRNA sense strand
ccacuggccuauggacucu

SEQ ID NO: 2009429 - RNA, 19 nt, Homo sapiens
  misc_RNA (1)...(19): siRNA sense strand
gagagaccaaugccuucuu

SEQ ID NO: 2009430 - RNA, 19 nt, Homo sapiens
  misc_RNA (1)...(19): siRNA sense strand
ggacucuuccagcugauag

SEQ ID NO: 2009431 - RNA, 19 nt, Homo sapiens
  misc_RNA (1)...(19): siRNA sense strand
ggcgaaaggaucuuggaau

SEQ ID NO: 2009432 - RNA, 19 nt, Homo sapiens
  misc_RNA (1)...(19): siRNA sense strand
gaggagauugaagaacaaa

SEQ ID NO: 2009433 - RNA, 19 nt, Homo sapiens
  misc_RNA (1)...(19): siRNA sense strand
guacaagaggagauugaag

SEQ ID NO: 2009434 - RNA, 19 nt, Homo sapiens
  misc_RNA (1)...(19): siRNA sense strand
cugauagauggauuucuua

SEQ ID NO: 2009435 - RNA, 19 nt, Homo sapiens
  misc_RNA (1)...(19): siRNA sense strand
guccagauguugaguuucc

SEQ ID NO: 2009436 - RNA, 19 nt, Homo sapiens
  misc_RNA (1)...(19): siRNA sense strand
gagauugaagaacaaacau

SEQ ID NO: 2009437 - RNA, 19 nt, Homo sapiens
  misc_RNA (1)...(19): siRNA sense strand
ucuuauuguugcagcauau

SEQ ID NO: 2009438 - RNA, 19 nt, Homo sapiens
  misc_RNA (1)...(19): siRNA sense strand
uugaagaacaaacauggaa

SEQ ID NO: 2009439 - RNA, 19 nt, Homo sapiens
  misc_RNA (1)...(19): siRNA sense strand
caccaucucuaacauuuuc

SEQ ID NO: 2009440 - RNA, 19 nt, Homo sapiens
  misc_RNA (1)...(19): siRNA sense strand
agacguacaagaggagauu

SEQ ID NO: 2009441 - RNA, 19 nt, Homo sapiens
  misc_RNA (1)...(19): siRNA sense strand
gaaaggaucuuggaauuca

SEQ ID NO: 2009442 - RNA, 19 nt, Homo sapiens
  misc_RNA (1)...(19): siRNA sense strand
gaacucagguugcacagaa

SEQ ID NO: 2009443 - RNA, 19 nt, Homo sapiens
  misc_RNA (1)...(19): siRNA sense strand
gcgaaaggaucuuggaauu

SEQ ID NO: 2009444 - RNA, 19 nt, Homo sapiens
  misc_RNA (1)...(19): siRNA sense strand
gaccaucaguuucaucuuu

SEQ ID NO: 2009445 - RNA, 19 nt, Homo sapiens
  misc_RNA (1)...(19): siRNA sense strand
gaaacuggagcucagaaua

SEQ ID NO: 2009446 - RNA, 19 nt, Homo sapiens
  misc_RNA (1)...(19): siRNA sense strand
gaucucagcaucaguauga

SEQ ID NO: 2009447 - RNA, 19 nt, Homo sapiens
  misc_RNA (1)...(19): siRNA sense strand
gcugauagauggauuucuu

SEQ ID NO: 2009448 - RNA, 19 nt, Homo sapiens
  misc_RNA (1)...(19): siRNA sense strand
caaaggugcaggacaauuu

SEQ ID NO: 2009449 - RNA, 19 nt, Homo sapiens
  misc_RNA (1)...(19): siRNA sense strand
ggcaccaucucuaacauuu

SEQ ID NO: 2009450 - RNA, 19 nt, Homo sapiens
  misc_RNA (1)...(19): siRNA sense strand
gccauuagcuuuucucuga

SEQ ID NO: 2009451 - RNA, 19 nt, Homo sapiens
  misc_RNA (1)...(19): siRNA sense strand
ggaggugaaugaagaaggu

SEQ ID NO: 2009452 - RNA, 19 nt, Homo sapiens
  misc_RNA (1)...(19): siRNA sense strand
cagcauaucagacguacaa

SEQ ID NO: 2009453 - RNA, 19 nt, Homo sapiens
  misc_RNA (1)...(19): siRNA sense strand
gacuggaggugcauggaaa

SEQ ID NO: 2009454 - RNA, 19 nt, Homo sapiens
  misc_RNA (1)...(19): siRNA sense strand
aagaggagauugaagaaca

SEQ ID NO: 2009455 - RNA, 19 nt, Homo sapiens
  misc_RNA (1)...(19): siRNA sense strand
uggcaaaggugcaggacaa

SEQ ID NO: 2009456 - RNA, 19 nt, Homo sapiens
  misc_RNA (1)...(19): siRNA sense strand
ugaagaaggugccaucacu

SEQ ID NO: 2009457 - RNA, 19 nt, Homo sapiens
  misc_RNA (1)...(19): siRNA sense strand
gaccauuccuguggccuuu

SEQ ID NO: 2009458 - RNA, 19 nt, Homo sapiens
  misc_RNA (1)...(19): siRNA sense strand
ccaaaacaauccaaaauca

SEQ ID NO: 2009459 - RNA, 19 nt, Homo sapiens
  misc_RNA (1)...(19): siRNA sense strand
aaacuggagcucagaauau

SEQ ID NO: 2009460 - RNA, 19 nt, Homo sapiens
  misc_RNA (1)...(19): siRNA sense strand
gcuuaucuccuggccauua

SEQ ID NO: 2009461 - RNA, 19 nt, Homo sapiens
  misc_RNA (1)...(19): siRNA sense strand
ucaguuucaucuuuccuuu

SEQ ID NO: 2009462 - RNA, 19 nt, Homo sapiens
  misc_RNA (1)...(19): siRNA sense strand
ggagauugaagaacaaaca

SEQ ID NO: 2009463 - RNA, 19 nt, Homo sapiens
  misc_RNA (1)...(19): siRNA sense strand
gcaaaggugcaggacaauu

SEQ ID NO: 2009464 - RNA, 19 nt, Homo sapiens
  misc_RNA (1)...(19): siRNA sense strand
gcacuugguccagauguug

SEQ ID NO: 2009465 - RNA, 19 nt, Homo sapiens
  misc_RNA (1)...(19): siRNA sense strand
gaagccaguccaagcuauu

SEQ ID NO: 2009466 - RNA, 19 nt, Homo sapiens
  misc_RNA (1)...(19): siRNA sense strand
agagaccaaugccuucuug

SEQ ID NO: 2009467 - RNA, 19 nt, Homo sapiens
  misc_RNA (1)...(19): siRNA sense strand
ggacuggaggugcauggaa

SEQ ID NO: 2009468 - RNA, 19 nt, Homo sapiens
  misc_RNA (1)...(19): siRNA sense strand
ucaccaugcuccaguuauc

SEQ ID NO: 2009469 - RNA, 19 nt, Homo sapiens
  misc_RNA (1)...(19): siRNA sense strand
ccuggagucuucagcagaa

SEQ ID NO: 2009470 - RNA, 19 nt, Homo sapiens
  misc_RNA (1)...(19): siRNA sense strand
gagcucagaauauucagau

SEQ ID NO: 2009471 - RNA, 19 nt, Homo sapiens
  misc_RNA (1)...(19): siRNA sense strand
gcucagaauauucagaugu

SEQ ID NO: 2009472 - RNA, 19 nt, Homo sapiens
  misc_RNA (1)...(19): siRNA sense strand
gaagaacaaacauggaaaa

SEQ ID NO: 2009473 - RNA, 19 nt, Homo sapiens
  misc_RNA (1)...(19): siRNA sense strand
gcauaucagacguacaaga

SEQ ID NO: 2009474 - RNA, 19 nt, Homo sapiens
  misc_RNA (1)...(19): siRNA sense strand
ugaagccaguccaagcuau

SEQ ID NO: 2009475 - RNA, 19 nt, Homo sapiens
  misc_RNA (1)...(19): siRNA sense strand
gauauggaucucagcauca

SEQ ID NO: 2009476 - RNA, 19 nt, Homo sapiens
  misc_RNA (1)...(19): siRNA sense strand
uacaagaggagauugaaga

SEQ ID NO: 2009477 - RNA, 19 nt, Homo sapiens
  misc_RNA (1)...(19): siRNA sense strand
cauguucucuuugggaugu

SEQ ID NO: 2009478 - RNA, 19 nt, Homo sapiens
  misc_RNA (1)...(19): siRNA sense strand
aguuugggcucaugccuuu

SEQ ID NO: 2009479 - RNA, 19 nt, Homo sapiens
  misc_RNA (1)...(19): siRNA sense strand
aguuucaucuuuccuuuga

SEQ ID NO: 2009480 - RNA, 19 nt, Homo sapiens
  misc_RNA (1)...(19): siRNA sense strand
ucagcagaaucucaccauu

SEQ ID NO: 2009481 - RNA, 19 nt, Homo sapiens
  misc_RNA (1)...(19): siRNA sense strand
cauaggaauuacccuugug

SEQ ID NO: 2009482 - RNA, 19 nt, Homo sapiens
  misc_RNA (1)...(19): siRNA sense strand
aacuggagcucagaauauu

SEQ ID NO: 2009483 - RNA, 19 nt, Homo sapiens
  misc_RNA (1)...(19): siRNA sense strand
agaggagauugaagaacaa

SEQ ID NO: 2009484 - RNA, 19 nt, Homo sapiens
  misc_RNA (1)...(19): siRNA sense strand
caucaccaugcuccaguua

SEQ ID NO: 2009485 - RNA, 19 nt, Homo sapiens
  misc_RNA (1)...(19): siRNA sense strand
aguccaagcuauugcuguu

SEQ ID NO: 2009486 - RNA, 19 nt, Homo sapiens
  misc_RNA (1)...(19): siRNA sense strand
ugaagaacaaacauggaaa

SEQ ID NO: 2009487 - RNA, 19 nt, Homo sapiens
  misc_RNA (1)...(19): siRNA sense strand
gaucuuggaauucagacau

SEQ ID NO: 2009488 - RNA, 19 nt, Homo sapiens
  misc_RNA (1)...(19): siRNA sense strand
cgaaaggaucuuggaauuc

SEQ ID NO: 2009489 - RNA, 19 nt, Homo sapiens
  misc_RNA (1)...(19): siRNA sense strand
ggccuuuggugucuaugug

SEQ ID NO: 2009490 - RNA, 19 nt, Homo sapiens
  misc_RNA (1)...(19): siRNA sense strand
ccaccagggccaauggauu

SEQ ID NO: 2009491 - RNA, 19 nt, Homo sapiens
  misc_RNA (1)...(19): siRNA sense strand
cgaggaaaucgacuucuuc

SEQ ID NO: 2009492 - RNA, 19 nt, Homo sapiens
  misc_RNA (1)...(19): siRNA sense strand
acgaggaaaucgacuucuu

SEQ ID NO: 2009493 - RNA, 19 nt, Homo sapiens
  misc_RNA (1)...(19): siRNA sense strand
gggcaccaucucuaacauu

SEQ ID NO: 2009494 - RNA, 19 nt, Homo sapiens
  misc_RNA (1)...(19): siRNA sense strand
ccaguuggccacaucacuu

SEQ ID NO: 2009495 - RNA, 19 nt, Homo sapiens
  misc_RNA (1)...(19): siRNA sense strand
cauaucagacguacaagag

SEQ ID NO: 2009496 - RNA, 19 nt, Homo sapiens
  misc_RNA (1)...(19): siRNA sense strand
gauggauuucuuauuguug

SEQ ID NO: 2009497 - RNA, 19 nt, Homo sapiens
  misc_RNA (1)...(19): siRNA sense strand
gguguccacugugaugaug

SEQ ID NO: 2009498 - RNA, 19 nt, Homo sapiens
  misc_RNA (1)...(19): siRNA sense strand
acauaggaauuacccuugu

SEQ ID NO: 2009499 - RNA, 19 nt, Homo sapiens
  misc_RNA (1)...(19): siRNA sense strand
caccauuccuuaucagaac

SEQ ID NO: 2009500 - RNA, 19 nt, Homo sapiens
  misc_RNA (1)...(19): siRNA sense strand
ugguccagauguugaguuu

SEQ ID NO: 2009501 - RNA, 19 nt, Homo sapiens
  misc_RNA (1)...(19): siRNA sense strand
acaagaggagauugaagaa

SEQ ID NO: 2009502 - RNA, 19 nt, Homo sapiens
  misc_RNA (1)...(19): siRNA sense strand
ccaaaaucauucucaagau

SEQ ID NO: 2009503 - RNA, 19 nt, Homo sapiens
  misc_RNA (1)...(19): siRNA sense strand
ccaccagucuuggcaaagg

SEQ ID NO: 2009504 - RNA, 19 nt, Homo sapiens
  misc_RNA (1)...(19): siRNA sense strand
ucaccauuccuuaucagaa

SEQ ID NO: 2009505 - RNA, 19 nt, Homo sapiens
  misc_RNA (1)...(19): siRNA sense strand
cucagaauauucagaugug

SEQ ID NO: 2009506 - RNA, 19 nt, Homo sapiens
  misc_RNA (1)...(19): siRNA sense strand
ccacuggccuauggacucu

SEQ ID NO: 2009507 - RNA, 19 nt, Homo sapiens
  misc_RNA (1)...(19): siRNA sense strand
gagagaccaaugccuucuu

SEQ ID NO: 2009508 - RNA, 19 nt, Homo sapiens
  misc_RNA (1)...(19): siRNA sense strand
ggacucuuccagcugauag

SEQ ID NO: 2009509 - RNA, 19 nt, Homo sapiens
  misc_RNA (1)...(19): siRNA sense strand
ggcgaaaggaucuuggaau

SEQ ID NO: 2009510 - RNA, 19 nt, Homo sapiens
  misc_RNA (1)...(19): siRNA sense strand
gaggagauugaagaacaaa

SEQ ID NO: 2009511 - RNA, 19 nt, Homo sapiens
  misc_RNA (1)...(19): siRNA sense strand
guacaagaggagauugaag

SEQ ID NO: 2009512 - RNA, 19 nt, Homo sapiens
  misc_RNA (1)...(19): siRNA sense strand
cugauagauggauuucuua

SEQ ID NO: 2009513 - RNA, 19 nt, Homo sapiens
  misc_RNA (1)...(19): siRNA sense strand
guccagauguugaguuucc

SEQ ID NO: 2009514 - RNA, 19 nt, Homo sapiens
  misc_RNA (1)...(19): siRNA sense strand
gagauugaagaacaaacau

SEQ ID NO: 2009515 - RNA, 19 nt, Homo sapiens
  misc_RNA (1)...(19): siRNA sense strand
ucuuauuguugcagcauau

SEQ ID NO: 2009516 - RNA, 19 nt, Homo sapiens
  misc_RNA (1)...(19): siRNA sense strand
uugaagaacaaacauggaa

SEQ ID NO: 2009517 - RNA, 19 nt, Homo sapiens
  misc_RNA (1)...(19): siRNA sense strand
caccaucucuaacauuuuc

SEQ ID NO: 2009518 - RNA, 19 nt, Homo sapiens
  misc_RNA (1)...(19): siRNA sense strand
agacguacaagaggagauu

SEQ ID NO: 2009519 - RNA, 19 nt, Homo sapiens
  misc_RNA (1)...(19): siRNA sense strand
ccaaagaugucgaauauaa

SEQ ID NO: 2009520 - RNA, 19 nt, Homo sapiens
  misc_RNA (1)...(19): siRNA sense strand
gaauauagcugcucaugag

SEQ ID NO: 2009521 - RNA, 19 nt, Homo sapiens
  misc_RNA (1)...(19): siRNA sense strand
gaaggaaguugaaaugcaa

SEQ ID NO: 2009522 - RNA, 19 nt, Homo sapiens
  misc_RNA (1)...(19): siRNA sense strand
ggaaggaaguugaaaugca

SEQ ID NO: 2009523 - RNA, 19 nt, Homo sapiens
  misc_RNA (1)...(19): siRNA sense strand
ccgaaacaaugaaauguaa

SEQ ID NO: 2009524 - RNA, 19 nt, Homo sapiens
  misc_RNA (1)...(19): siRNA sense strand
ggaguucgaggaauuuaua

SEQ ID NO: 2009525 - RNA, 19 nt, Homo sapiens
  misc_RNA (1)...(19): siRNA sense strand
uaagacaagugaaagaaga

SEQ ID NO: 2009526 - RNA, 19 nt, Homo sapiens
  misc_RNA (1)...(19): siRNA sense strand
gagaauuguuugcuguauu

SEQ ID NO: 2009527 - RNA, 19 nt, Homo sapiens
  misc_RNA (1)...(19): siRNA sense strand
gauguggaaucaguaaaga

SEQ ID NO: 2009528 - RNA, 19 nt, Homo sapiens
  misc_RNA (1)...(19): siRNA sense strand
gaggaaggaaguugaaaug

SEQ ID NO: 2009529 - RNA, 19 nt, Homo sapiens
  misc_RNA (1)...(19): siRNA sense strand
caagaaggacgacgcaguu

SEQ ID NO: 2009530 - RNA, 19 nt, Homo sapiens
  misc_RNA (1)...(19): siRNA sense strand
aaagaaauccagagaggaa

SEQ ID NO: 2009531 - RNA, 19 nt, Homo sapiens
  misc_RNA (1)...(19): siRNA sense strand
ugauggaguucgaggaauu

SEQ ID NO: 2009532 - RNA, 19 nt, Homo sapiens
  misc_RNA (1)...(19): siRNA sense strand
uauaauguccuguacuuug

SEQ ID NO: 2009533 - RNA, 19 nt, Homo sapiens
  misc_RNA (1)...(19): siRNA sense strand
cuucaggacuuguggaaug

SEQ ID NO: 2009534 - RNA, 19 nt, Homo sapiens
  misc_RNA (1)...(19): siRNA sense strand
uggaaucaguaaagaaaga

SEQ ID NO: 2009535 - RNA, 19 nt, Homo sapiens
  misc_RNA (1)...(19): siRNA sense strand
aaagaaagaaauccagaga

SEQ ID NO: 2009536 - RNA, 19 nt, Homo sapiens
  misc_RNA (1)...(19): siRNA sense strand
gagaauauagcugcucaug

SEQ ID NO: 2009537 - RNA, 19 nt, Homo sapiens
  misc_RNA (1)...(19): siRNA sense strand
gcuguauucuucaggacuu

SEQ ID NO: 2009538 - RNA, 19 nt, Homo sapiens
  misc_RNA (1)...(19): siRNA sense strand
caccgugggaugugauuua

SEQ ID NO: 2009539 - RNA, 19 nt, Homo sapiens
  misc_RNA (1)...(19): siRNA sense strand
cgaauauaauguccuguac

SEQ ID NO: 2009540 - RNA, 19 nt, Homo sapiens
  misc_RNA (1)...(19): siRNA sense strand
gcacaaucagagaauauag

SEQ ID NO: 2009541 - RNA, 19 nt, Homo sapiens
  misc_RNA (1)...(19): siRNA sense strand
uauagcugcucaugagaau

SEQ ID NO: 2009542 - RNA, 19 nt, Homo sapiens
  misc_RNA (1)...(19): siRNA sense strand
uagcugcucaugagaauug

SEQ ID NO: 2009543 - RNA, 19 nt, Homo sapiens
  misc_RNA (1)...(19): siRNA sense strand
cauaagacaagugaaagaa

SEQ ID NO: 2009544 - RNA, 19 nt, Homo sapiens
  misc_RNA (1)...(19): siRNA sense strand
cgacgcaguuccacagucu

SEQ ID NO: 2009545 - RNA, 19 nt, Homo sapiens
  misc_RNA (1)...(19): siRNA sense strand
ccacuuaauccugauagaa

SEQ ID NO: 2009546 - RNA, 19 nt, Homo sapiens
  misc_RNA (1)...(19): siRNA sense strand
ccccaaagaugucgaauau

SEQ ID NO: 2009547 - RNA, 19 nt, Homo sapiens
  misc_RNA (1)...(19): siRNA sense strand
ggaaguugaaaugcaaauu

SEQ ID NO: 2009548 - RNA, 19 nt, Homo sapiens
  misc_RNA (1)...(19): siRNA sense strand
ugagaauuguuugcuguau

SEQ ID NO: 2009549 - RNA, 19 nt, Homo sapiens
  misc_RNA (1)...(19): siRNA sense strand
gcucaaagugcuaaauuuu

SEQ ID NO: 2009550 - RNA, 19 nt, Homo sapiens
  misc_RNA (1)...(19): siRNA sense strand
cgcucaaagugcuaaauuu

SEQ ID NO: 2009551 - RNA, 19 nt, Homo sapiens
  misc_RNA (1)...(19): siRNA sense strand
ggaaucaguaaagaaagaa

SEQ ID NO: 2009552 - RNA, 19 nt, Homo sapiens
  misc_RNA (1)...(19): siRNA sense strand
ucgaauauaauguccugua

SEQ ID NO: 2009553 - RNA, 19 nt, Homo sapiens
  misc_RNA (1)...(19): siRNA sense strand
ucgaggaauuuauaaacug

SEQ ID NO: 2009554 - RNA, 19 nt, Homo sapiens
  misc_RNA (1)...(19): siRNA sense strand
gaaggacgacgcaguucca

SEQ ID NO: 2009555 - RNA, 19 nt, Homo sapiens
  misc_RNA (1)...(19): siRNA sense strand
gauggaguucgaggaauuu

SEQ ID NO: 2009556 - RNA, 19 nt, Homo sapiens
  misc_RNA (1)...(19): siRNA sense strand
caggacuuguggaauguga

SEQ ID NO: 2009557 - RNA, 19 nt, Homo sapiens
  misc_RNA (1)...(19): siRNA sense strand
gaagagcauggcagacaca

SEQ ID NO: 2009558 - RNA, 19 nt, Homo sapiens
  misc_RNA (1)...(19): siRNA sense strand
guacagccacccgaaacaa

SEQ ID NO: 2009559 - RNA, 19 nt, Homo sapiens
  misc_RNA (1)...(19): siRNA sense strand
uguggaaucaguaaagaaa

SEQ ID NO: 2009560 - RNA, 19 nt, Homo sapiens
  misc_RNA (1)...(19): siRNA sense strand
ggaaugugaggaucaggau

SEQ ID NO: 2009561 - RNA, 19 nt, Homo sapiens
  misc_RNA (1)...(19): siRNA sense strand
gcaguuccacagucugaug

SEQ ID NO: 2009562 - RNA, 19 nt, Homo sapiens
  misc_RNA (1)...(19): siRNA sense strand
gagaggaaggaaguugaaa

SEQ ID NO: 2009563 - RNA, 19 nt, Homo sapiens
  misc_RNA (1)...(19): siRNA sense strand
cgugggaugugauuuaaaa

SEQ ID NO: 2009564 - RNA, 19 nt, Homo sapiens
  misc_RNA (1)...(19): siRNA sense strand
ccuguacuuugcacaauca

SEQ ID NO: 2009565 - RNA, 19 nt, Homo sapiens
  misc_RNA (1)...(19): siRNA sense strand
gaaauccagagaggaagga

SEQ ID NO: 2009566 - RNA, 19 nt, Homo sapiens
  misc_RNA (1)...(19): siRNA sense strand
ucauaagacaagugaaaga

SEQ ID NO: 2009567 - RNA, 19 nt, Homo sapiens
  misc_RNA (1)...(19): siRNA sense strand
ccucucaggcaaucaugua

SEQ ID NO: 2009568 - RNA, 19 nt, Homo sapiens
  misc_RNA (1)...(19): siRNA sense strand
cagagaggaaggaaguuga

SEQ ID NO: 2009569 - RNA, 19 nt, Homo sapiens
  misc_RNA (1)...(19): siRNA sense strand
gauccacuuaauccugaua

SEQ ID NO: 2009570 - RNA, 19 nt, Homo sapiens
  misc_RNA (1)...(19): siRNA sense strand
caugcucaauucccgauca

SEQ ID NO: 2009571 - RNA, 19 nt, Homo sapiens
  misc_RNA (1)...(19): siRNA sense strand
ccagagaggaaggaaguug

SEQ ID NO: 2009572 - RNA, 19 nt, Homo sapiens
  misc_RNA (1)...(19): siRNA sense strand
agaauauagcugcucauga

SEQ ID NO: 2009573 - RNA, 19 nt, Homo sapiens
  misc_RNA (1)...(19): siRNA sense strand
cagaugcaacugugaaagu

SEQ ID NO: 2009574 - RNA, 19 nt, Homo sapiens
  misc_RNA (1)...(19): siRNA sense strand
gaauauaauguccuguacu

SEQ ID NO: 2009575 - RNA, 19 nt, Homo sapiens
  misc_RNA (1)...(19): siRNA sense strand
cccgaaacaaugaaaugua

SEQ ID NO: 2009576 - RNA, 19 nt, Homo sapiens
  misc_RNA (1)...(19): siRNA sense strand
gaguucgaggaauuuauaa

SEQ ID NO: 2009577 - RNA, 19 nt, Homo sapiens
  misc_RNA (1)...(19): siRNA sense strand
auuguuugcuguauucuuc

SEQ ID NO: 2009578 - RNA, 19 nt, Homo sapiens
  misc_RNA (1)...(19): siRNA sense strand
ucgcucaaagugcuaaauu

SEQ ID NO: 2009579 - RNA, 19 nt, Homo sapiens
  misc_RNA (1)...(19): siRNA sense strand
ugauagaaguuuugaugug

SEQ ID NO: 2009580 - RNA, 19 nt, Homo sapiens
  misc_RNA (1)...(19): siRNA sense strand
aagaagagcauggcagaca

SEQ ID NO: 2009581 - RNA, 19 nt, Homo sapiens
  misc_RNA (1)...(19): siRNA sense strand
cagccacccgaaacaauga

SEQ ID NO: 2009582 - RNA, 19 nt, Homo sapiens
  misc_RNA (1)...(19): siRNA sense strand
guucgaggaauuuauaaac

SEQ ID NO: 2009583 - RNA, 19 nt, Homo sapiens
  misc_RNA (1)...(19): siRNA sense strand
auaauguccuguacuuugc

SEQ ID NO: 2009584 - RNA, 19 nt, Homo sapiens
  misc_RNA (1)...(19): siRNA sense strand
ugacagaacuggaggagaa

SEQ ID NO: 2009585 - RNA, 19 nt, Homo sapiens
  misc_RNA (1)...(19): siRNA sense strand
gaaagagaaaugcaaguuu

SEQ ID NO: 2009586 - RNA, 19 nt, Homo sapiens
  misc_RNA (1)...(19): siRNA sense strand
aaagagaaaugcaaguuug

SEQ ID NO: 2009587 - RNA, 19 nt, Homo sapiens
  misc_RNA (1)...(19): siRNA sense strand
agaaacaguugcaaugaaa

SEQ ID NO: 2009588 - RNA, 19 nt, Homo sapiens
  misc_RNA (1)...(19): siRNA sense strand
gggcaugucuggagaaaca

SEQ ID NO: 2009589 - RNA, 19 nt, Homo sapiens
  misc_RNA (1)...(19): siRNA sense strand
caaagaaacaguugcaaug

SEQ ID NO: 2009590 - RNA, 19 nt, Homo sapiens
  misc_RNA (1)...(19): siRNA sense strand
gcaugaaucuggaaaauug

SEQ ID NO: 2009591 - RNA, 19 nt, Homo sapiens
  misc_RNA (1)...(19): siRNA sense strand
ggaaugacauccacaaucc

SEQ ID NO: 2009592 - RNA, 19 nt, Homo sapiens
  misc_RNA (1)...(19): siRNA sense strand
gaaaugcaaguuuggaaug

SEQ ID NO: 2009593 - RNA, 19 nt, Homo sapiens
  misc_RNA (1)...(19): siRNA sense strand
ggaauccugucuccuguag

SEQ ID NO: 2009594 - RNA, 19 nt, Homo sapiens
  misc_RNA (1)...(19): siRNA sense strand
ucaaagagauggaguaccu

SEQ ID NO: 2009595 - RNA, 19 nt, Homo sapiens
  misc_RNA (1)...(19): siRNA sense strand
gccaguggauggaauacuu

SEQ ID NO: 2009596 - RNA, 19 nt, Homo sapiens
  misc_RNA (1)...(19): siRNA sense strand
aagaaacaguugcaaugaa

SEQ ID NO: 2009597 - RNA, 19 nt, Homo sapiens
  misc_RNA (1)...(19): siRNA sense strand
ggaaaacucauauaccuaa

SEQ ID NO: 2009598 - RNA, 19 nt, Homo sapiens
  misc_RNA (1)...(19): siRNA sense strand
aaacucauauaccuaaugg

SEQ ID NO: 2009599 - RNA, 19 nt, Homo sapiens
  misc_RNA (1)...(19): siRNA sense strand
gagaaaugcaaguuuggaa

SEQ ID NO: 2009600 - RNA, 19 nt, Homo sapiens
  misc_RNA (1)...(19): siRNA sense strand
aaagaaacaguugcaauga

SEQ ID NO: 2009601 - RNA, 19 nt, Homo sapiens
  misc_RNA (1)...(19): siRNA sense strand
gaucaaugaccuauucagu

SEQ ID NO: 2009602 - RNA, 19 nt, Homo sapiens
  misc_RNA (1)...(19): siRNA sense strand
aauccugucuccuguaguu

SEQ ID NO: 2009603 - RNA, 19 nt, Homo sapiens
  misc_RNA (1)...(19): siRNA sense strand
caaaugcaacaaagaaaca

SEQ ID NO: 2009604 - RNA, 19 nt, Homo sapiens
  misc_RNA (1)...(19): siRNA sense strand
caguggaucugcaugaauc

SEQ ID NO: 2009605 - RNA, 19 nt, Homo sapiens
  misc_RNA (1)...(19): siRNA sense strand
aaaugcaaguuuggaauga

SEQ ID NO: 2009606 - RNA, 19 nt, Homo sapiens
  misc_RNA (1)...(19): siRNA sense strand
ugaaagagaaaugcaaguu

SEQ ID NO: 2009607 - RNA, 19 nt, Homo sapiens
  misc_RNA (1)...(19): siRNA sense strand
caaagccaguaucaacaca

SEQ ID NO: 2009608 - RNA, 19 nt, Homo sapiens
  misc_RNA (1)...(19): siRNA sense strand
ucagacccuuucccauuga

SEQ ID NO: 2009609 - RNA, 19 nt, Homo sapiens
  misc_RNA (1)...(19): siRNA sense strand
caauuagugccuccaaaug

SEQ ID NO: 2009610 - RNA, 19 nt, Homo sapiens
  misc_RNA (1)...(19): siRNA sense strand
guggauggaauacuucaaa

SEQ ID NO: 2009611 - RNA, 19 nt, Homo sapiens
  misc_RNA (1)...(19): siRNA sense strand
caguugcaaugaaagagaa

SEQ ID NO: 2009612 - RNA, 19 nt, Homo sapiens
  misc_RNA (1)...(19): siRNA sense strand
gcaaugaaagagaaaugca

SEQ ID NO: 2009613 - RNA, 19 nt, Homo sapiens
  misc_RNA (1)...(19): siRNA sense strand
aaacaguugcaaugaaaga

SEQ ID NO: 2009614 - RNA, 19 nt, Homo sapiens
  misc_RNA (1)...(19): siRNA sense strand
ccuauucagucaaagagau

SEQ ID NO: 2009615 - RNA, 19 nt, Homo sapiens
  misc_RNA (1)...(19): siRNA sense strand
ggauuuggauaggaacauc

SEQ ID NO: 2009616 - RNA, 19 nt, Homo sapiens
  misc_RNA (1)...(19): siRNA sense strand
uuucagacccuuucccauu

SEQ ID NO: 2009617 - RNA, 19 nt, Homo sapiens
  misc_RNA (1)...(19): siRNA sense strand
uacaauuagugccuccaaa

SEQ ID NO: 2009618 - RNA, 19 nt, Homo sapiens
  misc_RNA (1)...(19): siRNA sense strand
gaggaaaacucauauaccu

SEQ ID NO: 2009619 - RNA, 19 nt, Homo sapiens
  misc_RNA (1)...(19): siRNA sense strand
acaaagaaacaguugcaau

SEQ ID NO: 2009620 - RNA, 19 nt, Homo sapiens
  misc_RNA (1)...(19): siRNA sense strand
aggaaugccugagaggaaa

SEQ ID NO: 2009621 - RNA, 19 nt, Homo sapiens
  misc_RNA (1)...(19): siRNA sense strand
caaugaaagagaaaugcaa

SEQ ID NO: 2009622 - RNA, 19 nt, Homo sapiens
  misc_RNA (1)...(19): siRNA sense strand
gaaacaguugcaaugaaag

SEQ ID NO: 2009623 - RNA, 19 nt, Homo sapiens
  misc_RNA (1)...(19): siRNA sense strand
ggauaggaacaucaacauc

SEQ ID NO: 2009624 - RNA, 19 nt, Homo sapiens
  misc_RNA (1)...(19): siRNA sense strand
uucagacccuuucccauug

SEQ ID NO: 2009625 - RNA, 19 nt, Homo sapiens
  misc_RNA (1)...(19): siRNA sense strand
acaauuagugccuccaaau

SEQ ID NO: 2009626 - RNA, 19 nt, Homo sapiens
  misc_RNA (1)...(19): siRNA sense strand
gaagucaguggaucugcau

SEQ ID NO: 2009627 - RNA, 19 nt, Homo sapiens
  misc_RNA (1)...(19): siRNA sense strand
gucaguggaucugcaugaa

SEQ ID NO: 2009628 - RNA, 19 nt, Homo sapiens
  misc_RNA (1)...(19): siRNA sense strand
ccaaaugcaacaaagaaac

SEQ ID NO: 2009629 - RNA, 19 nt, Homo sapiens
  misc_RNA (1)...(19): siRNA sense strand
gugggcaugucuggagaaa

SEQ ID NO: 2009630 - RNA, 19 nt, Homo sapiens
  misc_RNA (1)...(19): siRNA sense strand
aaggaaugccugagaggaa

SEQ ID NO: 2009631 - RNA, 19 nt, Homo sapiens
  misc_RNA (1)...(19): siRNA sense strand
gcuguggauuuggauagga

SEQ ID NO: 2009632 - RNA, 19 nt, Homo sapiens
  misc_RNA (1)...(19): siRNA sense strand
cuucaaagccaguaucaac

SEQ ID NO: 2009633 - RNA, 19 nt, Homo sapiens
  misc_RNA (1)...(19): siRNA sense strand
agaaaugcaaguuuggaau

SEQ ID NO: 2009634 - RNA, 19 nt, Homo sapiens
  misc_RNA (1)...(19): siRNA sense strand
uaucaacacacugaaguca

SEQ ID NO: 2009635 - RNA, 19 nt, Homo sapiens
  misc_RNA (1)...(19): siRNA sense strand
uggagaaacacauggaauc

SEQ ID NO: 2009636 - RNA, 19 nt, Homo sapiens
  misc_RNA (1)...(19): siRNA sense strand
ggaagagccuguguacauu

SEQ ID NO: 2009637 - RNA, 19 nt, Homo sapiens
  misc_RNA (1)...(19): siRNA sense strand
caaaggaguuggacaaggu

SEQ ID NO: 2009638 - RNA, 19 nt, Homo sapiens
  misc_RNA (1)...(19): siRNA sense strand
gaaagcaggcucacagaag

SEQ ID NO: 2009639 - RNA, 19 nt, Homo sapiens
  misc_RNA (1)...(19): siRNA sense strand
ggaggcagcacaaggaaga

SEQ ID NO: 2009640 - RNA, 19 nt, Homo sapiens
  misc_RNA (1)...(19): siRNA sense strand
gaagagccuguguacauug

SEQ ID NO: 2009641 - RNA, 19 nt, Homo sapiens
  misc_RNA (1)...(19): siRNA sense strand
aagaggagcuccaguaagg

SEQ ID NO: 2009642 - RNA, 19 nt, Homo sapiens
  misc_RNA (1)...(19): siRNA sense strand
ccaagaggagcuccaguaa

SEQ ID NO: 2009643 - RNA, 19 nt, Homo sapiens
  misc_RNA (1)...(19): siRNA sense strand
agagugaggccaucuauga

SEQ ID NO: 2009644 - RNA, 19 nt, Homo sapiens
  misc_RNA (1)...(19): siRNA sense strand
gccaagaggagcuccagua

SEQ ID NO: 2009645 - RNA, 19 nt, Homo sapiens
  misc_RNA (1)...(19): siRNA sense strand
gaccacuccuugugaaauc

SEQ ID NO: 2009646 - RNA, 19 nt, Homo sapiens
  misc_RNA (1)...(19): siRNA sense strand
ggaagcugcuggaggugau

SEQ ID NO: 2009647 - RNA, 19 nt, Homo sapiens
  misc_RNA (1)...(19): siRNA sense strand
gugaggccaucuaugaaga

SEQ ID NO: 2009648 - RNA, 19 nt, Homo sapiens
  misc_RNA (1)...(19): siRNA sense strand
ggacagcagcacccgaaga

SEQ ID NO: 2009649 - RNA, 19 nt, Homo sapiens
  misc_RNA (1)...(19): siRNA sense strand
gagccuguguacauugaga

SEQ ID NO: 2009650 - RNA, 19 nt, Homo sapiens
  misc_RNA (1)...(19): siRNA sense strand
gaagguuccuccgcagaag

SEQ ID NO: 2009651 - RNA, 19 nt, Homo sapiens
  misc_RNA (1)...(19): siRNA sense strand
ccaccgcaauggagacuuc

SEQ ID NO: 2009652 - RNA, 19 nt, Homo sapiens
  misc_RNA (1)...(19): siRNA sense strand
ucuaugaagagaugaagua

SEQ ID NO: 2009653 - RNA, 19 nt, Homo sapiens
  misc_RNA (1)...(19): siRNA sense strand
ggacaccagaggaggaaga

SEQ ID NO: 2009654 - RNA, 19 nt, Homo sapiens
  misc_RNA (1)...(19): siRNA sense strand
caaagacggagaaggagau

SEQ ID NO: 2009655 - RNA, 19 nt, Homo sapiens
  misc_RNA (1)...(19): siRNA sense strand
ggauggguuucaugacgau

SEQ ID NO: 2009656 - RNA, 19 nt, Homo sapiens
  misc_RNA (1)...(19): siRNA sense strand
gagugaggccaucuaugaa

SEQ ID NO: 2009657 - RNA, 19 nt, Homo sapiens
  misc_RNA (1)...(19): siRNA sense strand
aggaagagccuguguacau

SEQ ID NO: 2009658 - RNA, 19 nt, Homo sapiens
  misc_RNA (1)...(19): siRNA sense strand
caccagaggaggaagaaga

SEQ ID NO: 2009659 - RNA, 19 nt, Homo sapiens
  misc_RNA (1)...(19): siRNA sense strand
aagagccuguguacauuga

SEQ ID NO: 2009660 - RNA, 19 nt, Homo sapiens
  misc_RNA (1)...(19): siRNA sense strand
gaggccaucuaugaagaga

SEQ ID NO: 2009661 - RNA, 19 nt, Homo sapiens
  misc_RNA (1)...(19): siRNA sense strand
aagcaaaggaguuggacaa

SEQ ID NO: 2009662 - RNA, 19 nt, Homo sapiens
  misc_RNA (1)...(19): siRNA sense strand
gcaagaaagcaggcucaca

SEQ ID NO: 2009663 - RNA, 19 nt, Homo sapiens
  misc_RNA (1)...(19): siRNA sense strand
gagaaaagcaaaggaguug

SEQ ID NO: 2009664 - RNA, 19 nt, Homo sapiens
  misc_RNA (1)...(19): siRNA sense strand
gaaaagcaaaggaguugga

SEQ ID NO: 2009665 - RNA, 19 nt, Homo sapiens
  misc_RNA (1)...(19): siRNA sense strand
agaaagcaggcucacagaa

SEQ ID NO: 2009666 - RNA, 19 nt, Homo sapiens
  misc_RNA (1)...(19): siRNA sense strand
ggagaaaagcaaaggaguu

SEQ ID NO: 2009667 - RNA, 19 nt, Homo sapiens
  misc_RNA (1)...(19): siRNA sense strand
caagaggagcuccaguaag

SEQ ID NO: 2009668 - RNA, 19 nt, Homo sapiens
  misc_RNA (1)...(19): siRNA sense strand
gagagugaggccaucuaug

SEQ ID NO: 2009669 - RNA, 19 nt, Homo sapiens
  misc_RNA (1)...(19): siRNA sense strand
gaagagagugaggccaucu

SEQ ID NO: 2009670 - RNA, 19 nt, Homo sapiens
  misc_RNA (1)...(19): siRNA sense strand
agccaaagacggagaagga

SEQ ID NO: 2009671 - RNA, 19 nt, Homo sapiens
  misc_RNA (1)...(19): siRNA sense strand
ggaagagccuguguacauu

SEQ ID NO: 2009672 - RNA, 19 nt, Homo sapiens
  misc_RNA (1)...(19): siRNA sense strand
caaaggaguuggacaaggu

SEQ ID NO: 2009673 - RNA, 19 nt, Homo sapiens
  misc_RNA (1)...(19): siRNA sense strand
gaaagcaggcucacagaag

SEQ ID NO: 2009674 - RNA, 19 nt, Homo sapiens
  misc_RNA (1)...(19): siRNA sense strand
ggaggcagcacaaggaaga

SEQ ID NO: 2009675 - RNA, 19 nt, Homo sapiens
  misc_RNA (1)...(19): siRNA sense strand
gaagagccuguguacauug

SEQ ID NO: 2009676 - RNA, 19 nt, Homo sapiens
  misc_RNA (1)...(19): siRNA sense strand
aagaggagcuccaguaagg

SEQ ID NO: 2009677 - RNA, 19 nt, Homo sapiens
  misc_RNA (1)...(19): siRNA sense strand
ccaagaggagcuccaguaa

SEQ ID NO: 2009678 - RNA, 19 nt, Homo sapiens
  misc_RNA (1)...(19): siRNA sense strand
agagugaggccaucuauga

SEQ ID NO: 2009679 - RNA, 19 nt, Homo sapiens
  misc_RNA (1)...(19): siRNA sense strand
gccaagaggagcuccagua

SEQ ID NO: 2009680 - RNA, 19 nt, Homo sapiens
  misc_RNA (1)...(19): siRNA sense strand
gaccacuccuugugaaauc

SEQ ID NO: 2009681 - RNA, 19 nt, Homo sapiens
  misc_RNA (1)...(19): siRNA sense strand
ggaagcugcuggaggugau

SEQ ID NO: 2009682 - RNA, 19 nt, Homo sapiens
  misc_RNA (1)...(19): siRNA sense strand
gugaggccaucuaugaaga

SEQ ID NO: 2009683 - RNA, 19 nt, Homo sapiens
  misc_RNA (1)...(19): siRNA sense strand
ggacagcagcacccgaaga

SEQ ID NO: 2009684 - RNA, 19 nt, Homo sapiens
  misc_RNA (1)...(19): siRNA sense strand
gagccuguguacauugaga

SEQ ID NO: 2009685 - RNA, 19 nt, Homo sapiens
  misc_RNA (1)...(19): siRNA sense strand
gaagguuccuccgcagaag

SEQ ID NO: 2009686 - RNA, 19 nt, Homo sapiens
  misc_RNA (1)...(19): siRNA sense strand
ccaccgcaauggagacuuc

SEQ ID NO: 2009687 - RNA, 19 nt, Homo sapiens
  misc_RNA (1)...(19): siRNA sense strand
ucuaugaagagaugaagua

SEQ ID NO: 2009688 - RNA, 19 nt, Homo sapiens
  misc_RNA (1)...(19): siRNA sense strand
ggacaccagaggaggaaga

SEQ ID NO: 2009689 - RNA, 19 nt, Homo sapiens
  misc_RNA (1)...(19): siRNA sense strand
caaagacggagaaggagau

SEQ ID NO: 2009690 - RNA, 19 nt, Homo sapiens
  misc_RNA (1)...(19): siRNA sense strand
ggauggguuucaugacgau

SEQ ID NO: 2009691 - RNA, 19 nt, Homo sapiens
  misc_RNA (1)...(19): siRNA sense strand
gagugaggccaucuaugaa

SEQ ID NO: 2009692 - RNA, 19 nt, Homo sapiens
  misc_RNA (1)...(19): siRNA sense strand
aggaagagccuguguacau

SEQ ID NO: 2009693 - RNA, 19 nt, Homo sapiens
  misc_RNA (1)...(19): siRNA sense strand
caccagaggaggaagaaga

SEQ ID NO: 2009694 - RNA, 19 nt, Homo sapiens
  misc_RNA (1)...(19): siRNA sense strand
aagagccuguguacauuga

SEQ ID NO: 2009695 - RNA, 19 nt, Homo sapiens
  misc_RNA (1)...(19): siRNA sense strand
gaggccaucuaugaagaga

SEQ ID NO: 2009696 - RNA, 19 nt, Homo sapiens
  misc_RNA (1)...(19): siRNA sense strand
aagcaaaggaguuggacaa

SEQ ID NO: 2009697 - RNA, 19 nt, Homo sapiens
  misc_RNA (1)...(19): siRNA sense strand
gcaagaaagcaggcucaca

SEQ ID NO: 2009698 - RNA, 19 nt, Homo sapiens
  misc_RNA (1)...(19): siRNA sense strand
gagaaaagcaaaggaguug

SEQ ID NO: 2009699 - RNA, 19 nt, Homo sapiens
  misc_RNA (1)...(19): siRNA sense strand
gaaaagcaaaggaguugga

SEQ ID NO: 2009700 - RNA, 19 nt, Homo sapiens
  misc_RNA (1)...(19): siRNA sense strand
agaaagcaggcucacagaa

SEQ ID NO: 2009701 - RNA, 19 nt, Homo sapiens
  misc_RNA (1)...(19): siRNA sense strand
ggagaaaagcaaaggaguu

SEQ ID NO: 2009702 - RNA, 19 nt, Homo sapiens
  misc_RNA (1)...(19): siRNA sense strand
caagaggagcuccaguaag

SEQ ID NO: 2009703 - RNA, 19 nt, Homo sapiens
  misc_RNA (1)...(19): siRNA sense strand
gagagugaggccaucuaug

SEQ ID NO: 2009704 - RNA, 19 nt, Homo sapiens
  misc_RNA (1)...(19): siRNA sense strand
gaagagagugaggccaucu

SEQ ID NO: 2009705 - RNA, 19 nt, Homo sapiens
  misc_RNA (1)...(19): siRNA sense strand
agccaaagacggagaagga

SEQ ID NO: 2009706 - RNA, 19 nt, Homo sapiens
  misc_RNA (1)...(19): siRNA sense strand
ggaagagccuguguacauu

SEQ ID NO: 2009707 - RNA, 19 nt, Homo sapiens
  misc_RNA (1)...(19): siRNA sense strand
caaaggaguuggacaaggu

SEQ ID NO: 2009708 - RNA, 19 nt, Homo sapiens
  misc_RNA (1)...(19): siRNA sense strand
gaaagcaggcucacagaag

SEQ ID NO: 2009709 - RNA, 19 nt, Homo sapiens
  misc_RNA (1)...(19): siRNA sense strand
ggaggcagcacaaggaaga

SEQ ID NO: 2009710 - RNA, 19 nt, Homo sapiens
  misc_RNA (1)...(19): siRNA sense strand
gaagagccuguguacauug

SEQ ID NO: 2009711 - RNA, 19 nt, Homo sapiens
  misc_RNA (1)...(19): siRNA sense strand
aagaggagcuccaguaagg

SEQ ID NO: 2009712 - RNA, 19 nt, Homo sapiens
  misc_RNA (1)...(19): siRNA sense strand
ccaagaggagcuccaguaa

SEQ ID NO: 2009713 - RNA, 19 nt, Homo sapiens
  misc_RNA (1)...(19): siRNA sense strand
agagugaggccaucuauga

SEQ ID NO: 2009714 - RNA, 19 nt, Homo sapiens
  misc_RNA (1)...(19): siRNA sense strand
gccaagaggagcuccagua

SEQ ID NO: 2009715 - RNA, 19 nt, Homo sapiens
  misc_RNA (1)...(19): siRNA sense strand
gaccacuccuugugaaauc

SEQ ID NO: 2009716 - RNA, 19 nt, Homo sapiens
  misc_RNA (1)...(19): siRNA sense strand
ggaagcugcuggaggugau

SEQ ID NO: 2009717 - RNA, 19 nt, Homo sapiens
  misc_RNA (1)...(19): siRNA sense strand
gugaggccaucuaugaaga

SEQ ID NO: 2009718 - RNA, 19 nt, Homo sapiens
  misc_RNA (1)...(19): siRNA sense strand
ggacagcagcacccgaaga

SEQ ID NO: 2009719 - RNA, 19 nt, Homo sapiens
  misc_RNA (1)...(19): siRNA sense strand
gagccuguguacauugaga

SEQ ID NO: 2009720 - RNA, 19 nt, Homo sapiens
  misc_RNA (1)...(19): siRNA sense strand
gaagguuccuccgcagaag

SEQ ID NO: 2009721 - RNA, 19 nt, Homo sapiens
  misc_RNA (1)...(19): siRNA sense strand
ccaccgcaauggagacuuc

SEQ ID NO: 2009722 - RNA, 19 nt, Homo sapiens
  misc_RNA (1)...(19): siRNA sense strand
ucuaugaagagaugaagua

SEQ ID NO: 2009723 - RNA, 19 nt, Homo sapiens
  misc_RNA (1)...(19): siRNA sense strand
ggacaccagaggaggaaga

SEQ ID NO: 2009724 - RNA, 19 nt, Homo sapiens
  misc_RNA (1)...(19): siRNA sense strand
caaagacggagaaggagau

SEQ ID NO: 2009725 - RNA, 19 nt, Homo sapiens
  misc_RNA (1)...(19): siRNA sense strand
ggauggguuucaugacgau

SEQ ID NO: 2009726 - RNA, 19 nt, Homo sapiens
  misc_RNA (1)...(19): siRNA sense strand
gagugaggccaucuaugaa

SEQ ID NO: 2009727 - RNA, 19 nt, Homo sapiens
  misc_RNA (1)...(19): siRNA sense strand
aggaagagccuguguacau

SEQ ID NO: 2009728 - RNA, 19 nt, Homo sapiens
  misc_RNA (1)...(19): siRNA sense strand
caccagaggaggaagaaga

SEQ ID NO: 2009729 - RNA, 19 nt, Homo sapiens
  misc_RNA (1)...(19): siRNA sense strand
aagagccuguguacauuga

SEQ ID NO: 2009730 - RNA, 19 nt, Homo sapiens
  misc_RNA (1)...(19): siRNA sense strand
gaggccaucuaugaagaga

SEQ ID NO: 2009731 - RNA, 19 nt, Homo sapiens
  misc_RNA (1)...(19): siRNA sense strand
aagcaaaggaguuggacaa

SEQ ID NO: 2009732 - RNA, 19 nt, Homo sapiens
  misc_RNA (1)...(19): siRNA sense strand
gcaagaaagcaggcucaca

SEQ ID NO: 2009733 - RNA, 19 nt, Homo sapiens
  misc_RNA (1)...(19): siRNA sense strand
gagaaaagcaaaggaguug

SEQ ID NO: 2009734 - RNA, 19 nt, Homo sapiens
  misc_RNA (1)...(19): siRNA sense strand
gaaaagcaaaggaguugga

SEQ ID NO: 2009735 - RNA, 19 nt, Homo sapiens
  misc_RNA (1)...(19): siRNA sense strand
agaaagcaggcucacagaa

SEQ ID NO: 2009736 - RNA, 19 nt, Homo sapiens
  misc_RNA (1)...(19): siRNA sense strand
ggagaaaagcaaaggaguu

SEQ ID NO: 2009737 - RNA, 19 nt, Homo sapiens
  misc_RNA (1)...(19): siRNA sense strand
caagaggagcuccaguaag

SEQ ID NO: 2009738 - RNA, 19 nt, Homo sapiens
  misc_RNA (1)...(19): siRNA sense strand
gagagugaggccaucuaug

SEQ ID NO: 2009739 - RNA, 19 nt, Homo sapiens
  misc_RNA (1)...(19): siRNA sense strand
gaagagagugaggccaucu

SEQ ID NO: 2009740 - RNA, 19 nt, Homo sapiens
  misc_RNA (1)...(19): siRNA sense strand
agccaaagacggagaagga

SEQ ID NO: 2009741 - RNA, 19 nt, Homo sapiens
  misc_RNA (1)...(19): siRNA sense strand
agaaagagguuaugugauu

SEQ ID NO: 2009742 - RNA, 19 nt, Homo sapiens
  misc_RNA (1)...(19): siRNA sense strand
ggaggcagcugucagaaga

SEQ ID NO: 2009743 - RNA, 19 nt, Homo sapiens
  misc_RNA (1)...(19): siRNA sense strand
uaaaggagguuguucacuu

SEQ ID NO: 2009744 - RNA, 19 nt, Homo sapiens
  misc_RNA (1)...(19): siRNA sense strand
gaaagacgacguaucagaa

SEQ ID NO: 2009745 - RNA, 19 nt, Homo sapiens
  misc_RNA (1)...(19): siRNA sense strand
gaaagagaaagacgacgua

SEQ ID NO: 2009746 - RNA, 19 nt, Homo sapiens
  misc_RNA (1)...(19): siRNA sense strand
ggacaagcccguuucuuuc

SEQ ID NO: 2009747 - RNA, 19 nt, Homo sapiens
  misc_RNA (1)...(19): siRNA sense strand
ugaaauaguugaaguacca

SEQ ID NO: 2009748 - RNA, 19 nt, Homo sapiens
  misc_RNA (1)...(19): siRNA sense strand
gaaagagguuaugugauuc

SEQ ID NO: 2009749 - RNA, 19 nt, Homo sapiens
  misc_RNA (1)...(19): siRNA sense strand
caacaacaaguuacugaaa

SEQ ID NO: 2009750 - RNA, 19 nt, Homo sapiens
  misc_RNA (1)...(19): siRNA sense strand
gaaaaggauucaucagcua

SEQ ID NO: 2009751 - RNA, 19 nt, Homo sapiens
  misc_RNA (1)...(19): siRNA sense strand
gcaagaaccgcuacgacaa

SEQ ID NO: 2009752 - RNA, 19 nt, Homo sapiens
  misc_RNA (1)...(19): siRNA sense strand
guacugagccacaugacaa

SEQ ID NO: 2009753 - RNA, 19 nt, Homo sapiens
  misc_RNA (1)...(19): siRNA sense strand
ucagaaagagguuauguga

SEQ ID NO: 2009754 - RNA, 19 nt, Homo sapiens
  misc_RNA (1)...(19): siRNA sense strand
gcacagcagcgaugcagaa

SEQ ID NO: 2009755 - RNA, 19 nt, Homo sapiens
  misc_RNA (1)...(19): siRNA sense strand
acaaguuacugaaagagaa

SEQ ID NO: 2009756 - RNA, 19 nt, Homo sapiens
  misc_RNA (1)...(19): siRNA sense strand
agagaaagacgacguauca

SEQ ID NO: 2009757 - RNA, 19 nt, Homo sapiens
  misc_RNA (1)...(19): siRNA sense strand
acaacaaguuacugaaaga

SEQ ID NO: 2009758 - RNA, 19 nt, Homo sapiens
  misc_RNA (1)...(19): siRNA sense strand
guuaugugauucuaccaaa

SEQ ID NO: 2009759 - RNA, 19 nt, Homo sapiens
  misc_RNA (1)...(19): siRNA sense strand
ugaugcugcuauuggauua

SEQ ID NO: 2009760 - RNA, 19 nt, Homo sapiens
  misc_RNA (1)...(19): siRNA sense strand
uuccacaaguuuccucuua

SEQ ID NO: 2009761 - RNA, 19 nt, Homo sapiens
  misc_RNA (1)...(19): siRNA sense strand
aaaggagguuguucacuuc

SEQ ID NO: 2009762 - RNA, 19 nt, Homo sapiens
  misc_RNA (1)...(19): siRNA sense strand
ccagguugaugcugcuauu

SEQ ID NO: 2009763 - RNA, 19 nt, Homo sapiens
  misc_RNA (1)...(19): siRNA sense strand
gcaacaacaaguuacugaa

SEQ ID NO: 2009764 - RNA, 19 nt, Homo sapiens
  misc_RNA (1)...(19): siRNA sense strand
ucuaccaaaugacuacuuu

SEQ ID NO: 2009765 - RNA, 19 nt, Homo sapiens
  misc_RNA (1)...(19): siRNA sense strand
gagagugcaacaacaaguu

SEQ ID NO: 2009766 - RNA, 19 nt, Homo sapiens
  misc_RNA (1)...(19): siRNA sense strand
caacuauacuguggaggau

SEQ ID NO: 2009767 - RNA, 19 nt, Homo sapiens
  misc_RNA (1)...(19): siRNA sense strand
guauagcaguauuuguuca

SEQ ID NO: 2009768 - RNA, 19 nt, Homo sapiens
  misc_RNA (1)...(19): siRNA sense strand
ugagccacaugacaagaaa

SEQ ID NO: 2009769 - RNA, 19 nt, Homo sapiens
  misc_RNA (1)...(19): siRNA sense strand
caccaaguauagcaguauu

SEQ ID NO: 2009770 - RNA, 19 nt, Homo sapiens
  misc_RNA (1)...(19): siRNA sense strand
gcuagaacagcaaguugaa

SEQ ID NO: 2009771 - RNA, 19 nt, Homo sapiens
  misc_RNA (1)...(19): siRNA sense strand
aggacaagcccguuucuuu

SEQ ID NO: 2009772 - RNA, 19 nt, Homo sapiens
  misc_RNA (1)...(19): siRNA sense strand
ccacaaguuuccucuuacu

SEQ ID NO: 2009773 - RNA, 19 nt, Homo sapiens
  misc_RNA (1)...(19): siRNA sense strand
uaguugaaguaccagcaua

SEQ ID NO: 2009774 - RNA, 19 nt, Homo sapiens
  misc_RNA (1)...(19): siRNA sense strand
aaagacgacguaucagaaa

SEQ ID NO: 2009775 - RNA, 19 nt, Homo sapiens
  misc_RNA (1)...(19): siRNA sense strand
guuguucacuuccagaaag

SEQ ID NO: 2009776 - RNA, 19 nt, Homo sapiens
  misc_RNA (1)...(19): siRNA sense strand
ccaaguauagcaguauuug

SEQ ID NO: 2009777 - RNA, 19 nt, Homo sapiens
  misc_RNA (1)...(19): siRNA sense strand
agaaagacgacguaucaga

SEQ ID NO: 2009778 - RNA, 19 nt, Homo sapiens
  misc_RNA (1)...(19): siRNA sense strand
gguugaugcugcuauugga

SEQ ID NO: 2009779 - RNA, 19 nt, Homo sapiens
  misc_RNA (1)...(19): siRNA sense strand
acuccagacugcuuuaaga

SEQ ID NO: 2009780 - RNA, 19 nt, Homo sapiens
  misc_RNA (1)...(19): siRNA sense strand
gacaaggacaagcccguuu

SEQ ID NO: 2009781 - RNA, 19 nt, Homo sapiens
  misc_RNA (1)...(19): siRNA sense strand
agagugcaacaacaaguua

SEQ ID NO: 2009782 - RNA, 19 nt, Homo sapiens
  misc_RNA (1)...(19): siRNA sense strand
uaagagagagugcaacaac

SEQ ID NO: 2009783 - RNA, 19 nt, Homo sapiens
  misc_RNA (1)...(19): siRNA sense strand
caagaaccgcuacgacaag

SEQ ID NO: 2009784 - RNA, 19 nt, Homo sapiens
  misc_RNA (1)...(19): siRNA sense strand
cagacugcuuuaagagaga

SEQ ID NO: 2009785 - RNA, 19 nt, Homo sapiens
  misc_RNA (1)...(19): siRNA sense strand
ggauucaucagcuagaaca

SEQ ID NO: 2009786 - RNA, 19 nt, Homo sapiens
  misc_RNA (1)...(19): siRNA sense strand
ccuguuaaucucucaguuu

SEQ ID NO: 2009787 - RNA, 19 nt, Homo sapiens
  misc_RNA (1)...(19): siRNA sense strand
uuuaaacccaccaaguaua

SEQ ID NO: 2009788 - RNA, 19 nt, Homo sapiens
  misc_RNA (1)...(19): siRNA sense strand
ccacaugacaagaaagaag

SEQ ID NO: 2009789 - RNA, 19 nt, Homo sapiens
  misc_RNA (1)...(19): siRNA sense strand
aacaacaaguuacugaaag

SEQ ID NO: 2009790 - RNA, 19 nt, Homo sapiens
  misc_RNA (1)...(19): siRNA sense strand
agagagagugcaacaacaa

SEQ ID NO: 2009791 - RNA, 19 nt, Homo sapiens
  misc_RNA (1)...(19): siRNA sense strand
uuacuaaugccgccucuuc

SEQ ID NO: 2009792 - RNA, 19 nt, Homo sapiens
  misc_RNA (1)...(19): siRNA sense strand
gcugcuauuggauuacuaa

SEQ ID NO: 2009793 - RNA, 19 nt, Homo sapiens
  misc_RNA (1)...(19): siRNA sense strand
gcccguuucuuuccacaag

SEQ ID NO: 2009794 - RNA, 19 nt, Homo sapiens
  misc_RNA (1)...(19): siRNA sense strand
aagagagagugcaacaaca

SEQ ID NO: 2009795 - RNA, 19 nt, Homo sapiens
  misc_RNA (1)...(19): siRNA sense strand
uaugugauucuaccaaaug

SEQ ID NO: 2009796 - RNA, 19 nt, Homo sapiens
  misc_RNA (1)...(19): siRNA sense strand
uuaaacccaccaaguauag

SEQ ID NO: 2009797 - RNA, 19 nt, Homo sapiens
  misc_RNA (1)...(19): siRNA sense strand
ucagaaagaagcucaagac

SEQ ID NO: 2009798 - RNA, 19 nt, Homo sapiens
  misc_RNA (1)...(19): siRNA sense strand
aggcagcugucagaagaaa

SEQ ID NO: 2009799 - RNA, 19 nt, Homo sapiens
  misc_RNA (1)...(19): siRNA sense strand
caaguuacugaaagagaau

SEQ ID NO: 2009800 - RNA, 19 nt, Homo sapiens
  misc_RNA (1)...(19): siRNA sense strand
agacgacguaucagaaaga

SEQ ID NO: 2009801 - RNA, 19 nt, Homo sapiens
  misc_RNA (1)...(19): siRNA sense strand
ucacuuccagaaagagaaa

SEQ ID NO: 2009802 - RNA, 19 nt, Homo sapiens
  misc_RNA (1)...(19): siRNA sense strand
cacaugacaagaaagaaga

SEQ ID NO: 2009803 - RNA, 19 nt, Homo sapiens
  misc_RNA (1)...(19): siRNA sense strand
cuaaugccgccucuucaga

SEQ ID NO: 2009804 - RNA, 19 nt, Homo sapiens
  misc_RNA (1)...(19): siRNA sense strand
cagcuagaacagcaaguug

SEQ ID NO: 2009805 - RNA, 19 nt, Homo sapiens
  misc_RNA (1)...(19): siRNA sense strand
gugcccacaauauuucuuu

SEQ ID NO: 2009806 - RNA, 19 nt, Homo sapiens
  misc_RNA (1)...(19): siRNA sense strand
gagagagugcaacaacaag

SEQ ID NO: 2009807 - RNA, 19 nt, Homo sapiens
  misc_RNA (1)...(19): siRNA sense strand
caaguauagcaguauuugu

SEQ ID NO: 2009808 - RNA, 19 nt, Homo sapiens
  misc_RNA (1)...(19): siRNA sense strand
ccaccaaguauagcaguau

SEQ ID NO: 2009809 - RNA, 19 nt, Homo sapiens
  misc_RNA (1)...(19): siRNA sense strand
cuuacucgacccagucuuu

SEQ ID NO: 2009810 - RNA, 19 nt, Homo sapiens
  misc_RNA (1)...(19): siRNA sense strand
ccguuucuuuccacaaguu

SEQ ID NO: 2009811 - RNA, 19 nt, Homo sapiens
  misc_RNA (1)...(19): siRNA sense strand
aaggauucaucagcuagaa

SEQ ID NO: 2009812 - RNA, 19 nt, Homo sapiens
  misc_RNA (1)...(19): siRNA sense strand
ccacagagaccaccuauca

SEQ ID NO: 2009813 - RNA, 19 nt, Homo sapiens
  misc_RNA (1)...(19): siRNA sense strand
ggccuaugaucaaagauuu

SEQ ID NO: 2009814 - RNA, 19 nt, Homo sapiens
  misc_RNA (1)...(19): siRNA sense strand
ugccugaggucaagaagaa

SEQ ID NO: 2009815 - RNA, 19 nt, Homo sapiens
  misc_RNA (1)...(19): siRNA sense strand
caacuccgccaagcugaua

SEQ ID NO: 2009816 - RNA, 19 nt, Homo sapiens
  misc_RNA (1)...(19): siRNA sense strand
cgagguccgucgcaagguu

SEQ ID NO: 2009817 - RNA, 19 nt, Homo sapiens
  misc_RNA (1)...(19): siRNA sense strand
ucaagaagaaguggucuga

SEQ ID NO: 2009818 - RNA, 19 nt, Homo sapiens
  misc_RNA (1)...(19): siRNA sense strand
ugacacagauccccacaga

SEQ ID NO: 2009819 - RNA, 19 nt, Homo sapiens
  misc_RNA (1)...(19): siRNA sense strand
agaacgaccuacugcagau

SEQ ID NO: 2009820 - RNA, 19 nt, Homo sapiens
  misc_RNA (1)...(19): siRNA sense strand
gccgcuaccugcagagcaa

SEQ ID NO: 2009821 - RNA, 19 nt, Homo sapiens
  misc_RNA (1)...(19): siRNA sense strand
gaucgcacagcaccuggaa

SEQ ID NO: 2009822 - RNA, 19 nt, Homo sapiens
  misc_RNA (1)...(19): siRNA sense strand
acagagaccaccuaucaca

SEQ ID NO: 2009823 - RNA, 19 nt, Homo sapiens
  misc_RNA (1)...(19): siRNA sense strand
cugcagagcaacacagcua

SEQ ID NO: 2009824 - RNA, 19 nt, Homo sapiens
  misc_RNA (1)...(19): siRNA sense strand
aggagggcgugguggagua

SEQ ID NO: 2009825 - RNA, 19 nt, Homo sapiens
  misc_RNA (1)...(19): siRNA sense strand
ggaacagcagaacgaccua

SEQ ID NO: 2009826 - RNA, 19 nt, Homo sapiens
  misc_RNA (1)...(19): siRNA sense strand
cagguccuccggccuauga

SEQ ID NO: 2009827 - RNA, 19 nt, Homo sapiens
  misc_RNA (1)...(19): siRNA sense strand
gaacgaccuacugcagaug

SEQ ID NO: 2009828 - RNA, 19 nt, Homo sapiens
  misc_RNA (1)...(19): siRNA sense strand
ggccgucccagccaagaaa

SEQ ID NO: 2009829 - RNA, 19 nt, Homo sapiens
  misc_RNA (1)...(19): siRNA sense strand
gagagcugccugaggucaa

SEQ ID NO: 2009830 - RNA, 19 nt, Homo sapiens
  misc_RNA (1)...(19): siRNA sense strand
agacagcaucauccaguga

SEQ ID NO: 2009831 - RNA, 19 nt, Homo sapiens
  misc_RNA (1)...(19): siRNA sense strand
acacagauccccacagaga

SEQ ID NO: 2009832 - RNA, 19 nt, Homo sapiens
  misc_RNA (1)...(19): siRNA sense strand
ggacaugauggcccagcau

SEQ ID NO: 2009833 - RNA, 19 nt, Homo sapiens
  misc_RNA (1)...(19): siRNA sense strand
gcagccagacagcaucauc

SEQ ID NO: 2009834 - RNA, 19 nt, Homo sapiens
  misc_RNA (1)...(19): siRNA sense strand
cagaaugggcagccagaca

SEQ ID NO: 2009835 - RNA, 19 nt, Homo sapiens
  misc_RNA (1)...(19): siRNA sense strand
gagagaaacccuacaaaua

SEQ ID NO: 2009836 - RNA, 19 nt, Homo sapiens
  misc_RNA (1)...(19): siRNA sense strand
caaaggagguuauaaugga

SEQ ID NO: 2009837 - RNA, 19 nt, Homo sapiens
  misc_RNA (1)...(19): siRNA sense strand
gaagggaaauccuacaaau

SEQ ID NO: 2009838 - RNA, 19 nt, Homo sapiens
  misc_RNA (1)...(19): siRNA sense strand
gagaaacccugcaaacaug

SEQ ID NO: 2009839 - RNA, 19 nt, Homo sapiens
  misc_RNA (1)...(19): siRNA sense strand
aaacaguccucaacccuua

SEQ ID NO: 2009840 - RNA, 19 nt, Homo sapiens
  misc_RNA (1)...(19): siRNA sense strand
cuacaaaugugaagaaugu

SEQ ID NO: 2009841 - RNA, 19 nt, Homo sapiens
  misc_RNA (1)...(19): siRNA sense strand
gagaaacccuacaaauaug

SEQ ID NO: 2009842 - RNA, 19 nt, Homo sapiens
  misc_RNA (1)...(19): siRNA sense strand
cuacaaaugugaagaaugu

SEQ ID NO: 2009843 - RNA, 19 nt, Homo sapiens
  misc_RNA (1)...(19): siRNA sense strand
cuacaaaugugaagaaugu

SEQ ID NO: 2009844 - RNA, 19 nt, Homo sapiens
  misc_RNA (1)...(19): siRNA sense strand
gaagauaaacccuacaaau

SEQ ID NO: 2009845 - RNA, 19 nt, Homo sapiens
  misc_RNA (1)...(19): siRNA sense strand
cuacaaaugugaagaaugu

SEQ ID NO: 2009846 - RNA, 19 nt, Homo sapiens
  misc_RNA (1)...(19): siRNA sense strand
cuacaaaugugaugaaugu

SEQ ID NO: 2009847 - RNA, 19 nt, Homo sapiens
  misc_RNA (1)...(19): siRNA sense strand
cuacaaaugugaagaaugu

SEQ ID NO: 2009848 - RNA, 19 nt, Homo sapiens
  misc_RNA (1)...(19): siRNA sense strand
gaagauaaacccuacaaau

SEQ ID NO: 2009849 - RNA, 19 nt, Homo sapiens
  misc_RNA (1)...(19): siRNA sense strand
cuacaaaugugaagaaugu

SEQ ID NO: 2009850 - RNA, 19 nt, Homo sapiens
  misc_RNA (1)...(19): siRNA sense strand
cuacaaaugugaagaaugu

SEQ ID NO: 2009851 - RNA, 19 nt, Homo sapiens
  misc_RNA (1)...(19): siRNA sense strand
ccucaaaucuuacuaaaca

SEQ ID NO: 2009852 - RNA, 19 nt, Homo sapiens
  misc_RNA (1)...(19): siRNA sense strand
ggacuuaaccaguguuuga

SEQ ID NO: 2009853 - RNA, 19 nt, Homo sapiens
  misc_RNA (1)...(19): siRNA sense strand
gagagaaacccuacaaaug

SEQ ID NO: 2009854 - RNA, 19 nt, Homo sapiens
  misc_RNA (1)...(19): siRNA sense strand
gagagaaacccuacaaaug

SEQ ID NO: 2009855 - RNA, 19 nt, Homo sapiens
  misc_RNA (1)...(19): siRNA sense strand
gagagaaacccuacaaaug

SEQ ID NO: 2009856 - RNA, 19 nt, Homo sapiens
  misc_RNA (1)...(19): siRNA sense strand
gaagagaaacccuacaaau

SEQ ID NO: 2009857 - RNA, 19 nt, Homo sapiens
  misc_RNA (1)...(19): siRNA sense strand
ccaguuauguguucucauu

SEQ ID NO: 2009858 - RNA, 19 nt, Homo sapiens
  misc_RNA (1)...(19): siRNA sense strand
gauaaacccuacaaaugug

SEQ ID NO: 2009859 - RNA, 19 nt, Homo sapiens
  misc_RNA (1)...(19): siRNA sense strand
gauaaacccuacaaaugug

SEQ ID NO: 2009860 - RNA, 19 nt, Homo sapiens
  misc_RNA (1)...(19): siRNA sense strand
ucucaaaccuuacuaaaca

SEQ ID NO: 2009861 - RNA, 19 nt, Homo sapiens
  misc_RNA (1)...(19): siRNA sense strand
gagaaacccuacaaaugug

SEQ ID NO: 2009862 - RNA, 19 nt, Homo sapiens
  misc_RNA (1)...(19): siRNA sense strand
gagaaacccuacaaaugug

SEQ ID NO: 2009863 - RNA, 19 nt, Homo sapiens
  misc_RNA (1)...(19): siRNA sense strand
gagaaacccuacaaaugug

SEQ ID NO: 2009864 - RNA, 19 nt, Homo sapiens
  misc_RNA (1)...(19): siRNA sense strand
gagaaacccuacaaaugug

SEQ ID NO: 2009865 - RNA, 19 nt, Homo sapiens
  misc_RNA (1)...(19): siRNA sense strand
gauaagacauacuggaaag

SEQ ID NO: 2009866 - RNA, 19 nt, Homo sapiens
  misc_RNA (1)...(19): siRNA sense strand
caugagaauuuacagcuaa

SEQ ID NO: 2009867 - RNA, 19 nt, Homo sapiens
  misc_RNA (1)...(19): siRNA sense strand
gcagagccuuuaacaaauc

SEQ ID NO: 2009868 - RNA, 19 nt, Homo sapiens
  misc_RNA (1)...(19): siRNA sense strand
gcaagauauuucaguguga

SEQ ID NO: 2009869 - RNA, 19 nt, Homo sapiens
  misc_RNA (1)...(19): siRNA sense strand
guacaaaggagguuauaau

SEQ ID NO: 2009870 - RNA, 19 nt, Homo sapiens
  misc_RNA (1)...(19): siRNA sense strand
agagaaacccuacaaauau

SEQ ID NO: 2009871 - RNA, 19 nt, Homo sapiens
  misc_RNA (1)...(19): siRNA sense strand
gcaaggccuuuaaccaguu

SEQ ID NO: 2009872 - RNA, 19 nt, Homo sapiens
  misc_RNA (1)...(19): siRNA sense strand
ggagagaaacccuacaaau

SEQ ID NO: 2009873 - RNA, 19 nt, Homo sapiens
  misc_RNA (1)...(19): siRNA sense strand
ggagagaaacccuacaaau

SEQ ID NO: 2009874 - RNA, 19 nt, Homo sapiens
  misc_RNA (1)...(19): siRNA sense strand
ggagagaaacccuacaaau

SEQ ID NO: 2009875 - RNA, 19 nt, Homo sapiens
  misc_RNA (1)...(19): siRNA sense strand
ggagagaaacccuacaaau

SEQ ID NO: 2009876 - RNA, 19 nt, Homo sapiens
  misc_RNA (1)...(19): siRNA sense strand
aaccaguucucgauucuua

SEQ ID NO: 2009877 - RNA, 19 nt, Homo sapiens
  misc_RNA (1)...(19): siRNA sense strand
uggcagagccuuuaacaaa

SEQ ID NO: 2009878 - RNA, 19 nt, Homo sapiens
  misc_RNA (1)...(19): siRNA sense strand
uugcaugcuuucacaauua

SEQ ID NO: 2009879 - RNA, 19 nt, Homo sapiens
  misc_RNA (1)...(19): siRNA sense strand
ccucaacccuuacuaaaca

SEQ ID NO: 2009880 - RNA, 19 nt, Homo sapiens
  misc_RNA (1)...(19): siRNA sense strand
ccucaacccuuacuaaaca

SEQ ID NO: 2009881 - RNA, 19 nt, Homo sapiens
  misc_RNA (1)...(19): siRNA sense strand
ccucaacccuuacuaaaca

SEQ ID NO: 2009882 - RNA, 19 nt, Homo sapiens
  misc_RNA (1)...(19): siRNA sense strand
gagaguauucuuacaaaug

SEQ ID NO: 2009883 - RNA, 19 nt, Homo sapiens
  misc_RNA (1)...(19): siRNA sense strand
gauaauucauacuggagaa

SEQ ID NO: 2009884 - RNA, 19 nt, Homo sapiens
  misc_RNA (1)...(19): siRNA sense strand
gaaaagaccauaaaagugu

SEQ ID NO: 2009885 - RNA, 19 nt, Homo sapiens
  misc_RNA (1)...(19): siRNA sense strand
gaauguggcagagccuuua

SEQ ID NO: 2009886 - RNA, 19 nt, Homo sapiens
  misc_RNA (1)...(19): siRNA sense strand
ggaaauccuacaaauguga

SEQ ID NO: 2009887 - RNA, 19 nt, Homo sapiens
  misc_RNA (1)...(19): siRNA sense strand
agagaaacccuacaaaugu

SEQ ID NO: 2009888 - RNA, 19 nt, Homo sapiens
  misc_RNA (1)...(19): siRNA sense strand
aacaaguucucaacccuua

SEQ ID NO: 2009889 - RNA, 19 nt, Homo sapiens
  misc_RNA (1)...(19): siRNA sense strand
ucucaacccuuacuaaaca

SEQ ID NO: 2009890 - RNA, 19 nt, Homo sapiens
  misc_RNA (1)...(19): siRNA sense strand
agagaaacccuacaaaugu

SEQ ID NO: 2009891 - RNA, 19 nt, Homo sapiens
  misc_RNA (1)...(19): siRNA sense strand
agagaaacccuacaaaugu

SEQ ID NO: 2009892 - RNA, 19 nt, Homo sapiens
  misc_RNA (1)...(19): siRNA sense strand
aaccaguucucaaaccuua

SEQ ID NO: 2009893 - RNA, 19 nt, Homo sapiens
  misc_RNA (1)...(19): siRNA sense strand
agagaaacccuacaaaugu

SEQ ID NO: 2009894 - RNA, 19 nt, Homo sapiens
  misc_RNA (1)...(19): siRNA sense strand
ggcagagccuuuaacaaau

SEQ ID NO: 2009895 - RNA, 19 nt, Homo sapiens
  misc_RNA (1)...(19): siRNA sense strand
aaccaguccucaaaccuua

SEQ ID NO: 2009896 - RNA, 19 nt, Homo sapiens
  misc_RNA (1)...(19): siRNA sense strand
aagauaaacccuacaaaug

SEQ ID NO: 2009897 - RNA, 19 nt, Homo sapiens
  misc_RNA (1)...(19): siRNA sense strand
aagauaaacccuacaaaug

SEQ ID NO: 2009898 - RNA, 19 nt, Homo sapiens
  misc_RNA (1)...(19): siRNA sense strand
aaccgguccucaaaucuua

SEQ ID NO: 2009899 - RNA, 19 nt, Homo sapiens
  misc_RNA (1)...(19): siRNA sense strand
ccucaacccuuacugaaca

SEQ ID NO: 2009900 - RNA, 19 nt, Homo sapiens
  misc_RNA (1)...(19): siRNA sense strand
aaccaguccucaacccuua

SEQ ID NO: 2009901 - RNA, 19 nt, Homo sapiens
  misc_RNA (1)...(19): siRNA sense strand
ucucaacccuuauuacaca

SEQ ID NO: 2009902 - RNA, 19 nt, Homo sapiens
  misc_RNA (1)...(19): siRNA sense strand
aagagaaacccuacaaaug

SEQ ID NO: 2009903 - RNA, 19 nt, Homo sapiens
  misc_RNA (1)...(19): siRNA sense strand
gagagaaacccugcaaaca

SEQ ID NO: 2009904 - RNA, 19 nt, Homo sapiens
  misc_RNA (1)...(19): siRNA sense strand
agauaaacccuacaaaugu

SEQ ID NO: 2009905 - RNA, 19 nt, Homo sapiens
  misc_RNA (1)...(19): siRNA sense strand
agauaaacccuacaaaugu

SEQ ID NO: 2009906 - RNA, 19 nt, Homo sapiens
  misc_RNA (1)...(19): siRNA sense strand
gaauguggcaaggccuuua

SEQ ID NO: 2009907 - RNA, 19 nt, Homo sapiens
  misc_RNA (1)...(19): siRNA sense strand
gggaaauccuacaaaugug

SEQ ID NO: 2009908 - RNA, 19 nt, Homo sapiens
  misc_RNA (1)...(19): siRNA sense strand
uuuaaccaguccucaauuu

SEQ ID NO: 2009909 - RNA, 19 nt, Homo sapiens
  misc_RNA (1)...(19): siRNA sense strand
agagaaaucauauggaaga

SEQ ID NO: 2009910 - RNA, 19 nt, Homo sapiens
  misc_RNA (1)...(19): siRNA sense strand
gagaauuuacagcuaagaa

SEQ ID NO: 2009911 - RNA, 19 nt, Homo sapiens
  misc_RNA (1)...(19): siRNA sense strand
ggaagauaaacccuacaaa

SEQ ID NO: 2009912 - RNA, 19 nt, Homo sapiens
  misc_RNA (1)...(19): siRNA sense strand
ggaagauaaacccuacaaa

SEQ ID NO: 2009913 - RNA, 19 nt, Homo sapiens
  misc_RNA (1)...(19): siRNA sense strand
gagcacagcauaaaagauu

SEQ ID NO: 2009914 - RNA, 19 nt, Homo sapiens
  misc_RNA (1)...(19): siRNA sense strand
gaaauccuacaaaugugaa

SEQ ID NO: 2009915 - RNA, 19 nt, Homo sapiens
  misc_RNA (1)...(19): siRNA sense strand
ugaagaauguggcaaagcu

SEQ ID NO: 2009916 - RNA, 19 nt, Homo sapiens
  misc_RNA (1)...(19): siRNA sense strand
ugaagaauguggcaaagcu

SEQ ID NO: 2009917 - RNA, 19 nt, Homo sapiens
  misc_RNA (1)...(19): siRNA sense strand
ugaagaauguggcaaagcu

SEQ ID NO: 2009918 - RNA, 19 nt, Homo sapiens
  misc_RNA (1)...(19): siRNA sense strand
caagauauuucagugugau

SEQ ID NO: 2009919 - RNA, 19 nt, Homo sapiens
  misc_RNA (1)...(19): siRNA sense strand
gaauucauacagaagagaa

SEQ ID NO: 2009920 - RNA, 19 nt, Homo sapiens
  misc_RNA (1)...(19): siRNA sense strand
ggagagaaacccugcaaac

SEQ ID NO: 2009921 - RNA, 19 nt, Homo sapiens
  misc_RNA (1)...(19): siRNA sense strand
ggccagagcacagcauaaa

SEQ ID NO: 2009922 - RNA, 19 nt, Homo sapiens
  misc_RNA (1)...(19): siRNA sense strand
guccucaaaucuuacuaaa

SEQ ID NO: 2009923 - RNA, 19 nt, Homo sapiens
  misc_RNA (1)...(19): siRNA sense strand
uaagacauacuggaaagaa

SEQ ID NO: 2009924 - RNA, 19 nt, Homo sapiens
  misc_RNA (1)...(19): siRNA sense strand
caaguucucaacccuuauu

SEQ ID NO: 2009925 - RNA, 19 nt, Homo sapiens
  misc_RNA (1)...(19): siRNA sense strand
gaaaauauggacaugagaa

SEQ ID NO: 2009926 - RNA, 19 nt, Homo sapiens
  misc_RNA (1)...(19): siRNA sense strand
aguguauucucaacccuua

SEQ ID NO: 2009927 - RNA, 19 nt, Homo sapiens
  misc_RNA (1)...(19): siRNA sense strand
cuacugacagcaagauauu

SEQ ID NO: 2009928 - RNA, 19 nt, Homo sapiens
  misc_RNA (1)...(19): siRNA sense strand
gaaacccuacaaauaugaa

SEQ ID NO: 2009929 - RNA, 19 nt, Homo sapiens
  misc_RNA (1)...(19): siRNA sense strand
gguccucaacccuuacuaa

SEQ ID NO: 2009930 - RNA, 19 nt, Homo sapiens
  misc_RNA (1)...(19): siRNA sense strand
gagaaaucauauggaagau

SEQ ID NO: 2009931 - RNA, 19 nt, Homo sapiens
  misc_RNA (1)...(19): siRNA sense strand
acaugagaauuuacagcua

SEQ ID NO: 2009932 - RNA, 19 nt, Homo sapiens
  misc_RNA (1)...(19): siRNA sense strand
cauaagauaauccauacug

SEQ ID NO: 2009933 - RNA, 19 nt, Homo sapiens
  misc_RNA (1)...(19): siRNA sense strand
gagaauucauauggaagau

SEQ ID NO: 2009934 - RNA, 19 nt, Homo sapiens
  misc_RNA (1)...(19): siRNA sense strand
cagaagagaaacccuacaa

SEQ ID NO: 2009935 - RNA, 19 nt, Homo sapiens
  misc_RNA (1)...(19): siRNA sense strand
gagagaaacccuacaaaua

SEQ ID NO: 2009936 - RNA, 19 nt, Homo sapiens
  misc_RNA (1)...(19): siRNA sense strand
gaagagacaugagauggua

SEQ ID NO: 2009937 - RNA, 19 nt, Homo sapiens
  misc_RNA (1)...(19): siRNA sense strand
caaaggagguuauaaugga

SEQ ID NO: 2009938 - RNA, 19 nt, Homo sapiens
  misc_RNA (1)...(19): siRNA sense strand
gaagggaaauccuacaaau

SEQ ID NO: 2009939 - RNA, 19 nt, Homo sapiens
  misc_RNA (1)...(19): siRNA sense strand
gagaaacccugcaaacaug

SEQ ID NO: 2009940 - RNA, 19 nt, Homo sapiens
  misc_RNA (1)...(19): siRNA sense strand
aaacaguccucaacccuua

SEQ ID NO: 2009941 - RNA, 19 nt, Homo sapiens
  misc_RNA (1)...(19): siRNA sense strand
cuacaaaugugaagaaugu

SEQ ID NO: 2009942 - RNA, 19 nt, Homo sapiens
  misc_RNA (1)...(19): siRNA sense strand
gagaaacccuacaaauaug

SEQ ID NO: 2009943 - RNA, 19 nt, Homo sapiens
  misc_RNA (1)...(19): siRNA sense strand
cuacaaaugugaagaaugu

SEQ ID NO: 2009944 - RNA, 19 nt, Homo sapiens
  misc_RNA (1)...(19): siRNA sense strand
cuacaaaugugaagaaugu

SEQ ID NO: 2009945 - RNA, 19 nt, Homo sapiens
  misc_RNA (1)...(19): siRNA sense strand
gaagauaaacccuacaaau

SEQ ID NO: 2009946 - RNA, 19 nt, Homo sapiens
  misc_RNA (1)...(19): siRNA sense strand
cuacaaaugugaagaaugu

SEQ ID NO: 2009947 - RNA, 19 nt, Homo sapiens
  misc_RNA (1)...(19): siRNA sense strand
cuacaaaugugaugaaugu

SEQ ID NO: 2009948 - RNA, 19 nt, Homo sapiens
  misc_RNA (1)...(19): siRNA sense strand
cuacaaaugugaagaaugu

SEQ ID NO: 2009949 - RNA, 19 nt, Homo sapiens
  misc_RNA (1)...(19): siRNA sense strand
gaagauaaacccuacaaau

SEQ ID NO: 2009950 - RNA, 19 nt, Homo sapiens
  misc_RNA (1)...(19): siRNA sense strand
cuacaaaugugaagaaugu

SEQ ID NO: 2009951 - RNA, 19 nt, Homo sapiens
  misc_RNA (1)...(19): siRNA sense strand
cuacaaaugugaagaaugu

SEQ ID NO: 2009952 - RNA, 19 nt, Homo sapiens
  misc_RNA (1)...(19): siRNA sense strand
ccucaaaucuuacuaaaca

SEQ ID NO: 2009953 - RNA, 19 nt, Homo sapiens
  misc_RNA (1)...(19): siRNA sense strand
ggacuuaaccaguguuuga

SEQ ID NO: 2009954 - RNA, 19 nt, Homo sapiens
  misc_RNA (1)...(19): siRNA sense strand
gagagaaacccuacaaaug

SEQ ID NO: 2009955 - RNA, 19 nt, Homo sapiens
  misc_RNA (1)...(19): siRNA sense strand
gagagaaacccuacaaaug

SEQ ID NO: 2009956 - RNA, 19 nt, Homo sapiens
  misc_RNA (1)...(19): siRNA sense strand
gagagaaacccuacaaaug

SEQ ID NO: 2009957 - RNA, 19 nt, Homo sapiens
  misc_RNA (1)...(19): siRNA sense strand
gaagagaaacccuacaaau

SEQ ID NO: 2009958 - RNA, 19 nt, Homo sapiens
  misc_RNA (1)...(19): siRNA sense strand
ccaguuauguguucucauu

SEQ ID NO: 2009959 - RNA, 19 nt, Homo sapiens
  misc_RNA (1)...(19): siRNA sense strand
aaagagcccuggaaucuga

SEQ ID NO: 2009960 - RNA, 19 nt, Homo sapiens
  misc_RNA (1)...(19): siRNA sense strand
gauaaacccuacaaaugug

SEQ ID NO: 2009961 - RNA, 19 nt, Homo sapiens
  misc_RNA (1)...(19): siRNA sense strand
gauaaacccuacaaaugug

SEQ ID NO: 2009962 - RNA, 19 nt, Homo sapiens
  misc_RNA (1)...(19): siRNA sense strand
gacaugagaugguagacaa

SEQ ID NO: 2009963 - RNA, 19 nt, Homo sapiens
  misc_RNA (1)...(19): siRNA sense strand
ucucaaaccuuacuaaaca

SEQ ID NO: 2009964 - RNA, 19 nt, Homo sapiens
  misc_RNA (1)...(19): siRNA sense strand
gagaaacccuacaaaugug

SEQ ID NO: 2009965 - RNA, 19 nt, Homo sapiens
  misc_RNA (1)...(19): siRNA sense strand
gagaaacccuacaaaugug

SEQ ID NO: 2009966 - RNA, 19 nt, Homo sapiens
  misc_RNA (1)...(19): siRNA sense strand
gagaaacccuacaaaugug

SEQ ID NO: 2009967 - RNA, 19 nt, Homo sapiens
  misc_RNA (1)...(19): siRNA sense strand
gagaaacccuacaaaugug

SEQ ID NO: 2009968 - RNA, 19 nt, Homo sapiens
  misc_RNA (1)...(19): siRNA sense strand
gauaagacauacuggaaag

SEQ ID NO: 2009969 - RNA, 19 nt, Homo sapiens
  misc_RNA (1)...(19): siRNA sense strand
caugagaauuuacagcuaa

SEQ ID NO: 2009970 - RNA, 19 nt, Homo sapiens
  misc_RNA (1)...(19): siRNA sense strand
gcagagccuuuaacaaauc

SEQ ID NO: 2009971 - RNA, 19 nt, Homo sapiens
  misc_RNA (1)...(19): siRNA sense strand
gcaagauauuucaguguga

SEQ ID NO: 2009972 - RNA, 19 nt, Homo sapiens
  misc_RNA (1)...(19): siRNA sense strand
guacaaaggagguuauaau

SEQ ID NO: 2009973 - RNA, 19 nt, Homo sapiens
  misc_RNA (1)...(19): siRNA sense strand
agagaaacccuacaaauau

SEQ ID NO: 2009974 - RNA, 19 nt, Homo sapiens
  misc_RNA (1)...(19): siRNA sense strand
gcaaggccuuuaaccaguu

SEQ ID NO: 2009975 - RNA, 19 nt, Homo sapiens
  misc_RNA (1)...(19): siRNA sense strand
ggagagaaacccuacaaau

SEQ ID NO: 2009976 - RNA, 19 nt, Homo sapiens
  misc_RNA (1)...(19): siRNA sense strand
ggagagaaacccuacaaau

SEQ ID NO: 2009977 - RNA, 19 nt, Homo sapiens
  misc_RNA (1)...(19): siRNA sense strand
ggagagaaacccuacaaau

SEQ ID NO: 2009978 - RNA, 19 nt, Homo sapiens
  misc_RNA (1)...(19): siRNA sense strand
ggagagaaacccuacaaau

SEQ ID NO: 2009979 - RNA, 19 nt, Homo sapiens
  misc_RNA (1)...(19): siRNA sense strand
aaccaguucucgauucuua

SEQ ID NO: 2009980 - RNA, 19 nt, Homo sapiens
  misc_RNA (1)...(19): siRNA sense strand
uggcagagccuuuaacaaa

SEQ ID NO: 2009981 - RNA, 19 nt, Homo sapiens
  misc_RNA (1)...(19): siRNA sense strand
uugcaugcuuucacaauua

SEQ ID NO: 2009982 - RNA, 19 nt, Homo sapiens
  misc_RNA (1)...(19): siRNA sense strand
ccucaacccuuacuaaaca

SEQ ID NO: 2009983 - RNA, 19 nt, Homo sapiens
  misc_RNA (1)...(19): siRNA sense strand
ccucaacccuuacuaaaca

SEQ ID NO: 2009984 - RNA, 19 nt, Homo sapiens
  misc_RNA (1)...(19): siRNA sense strand
ccucaacccuuacuaaaca

SEQ ID NO: 2009985 - RNA, 19 nt, Homo sapiens
  misc_RNA (1)...(19): siRNA sense strand
gagaguauucuuacaaaug

SEQ ID NO: 2009986 - RNA, 19 nt, Homo sapiens
  misc_RNA (1)...(19): siRNA sense strand
gauaauucauacuggagaa

SEQ ID NO: 2009987 - RNA, 19 nt, Homo sapiens
  misc_RNA (1)...(19): siRNA sense strand
gaaaagaccauaaaagugu

SEQ ID NO: 2009988 - RNA, 19 nt, Homo sapiens
  misc_RNA (1)...(19): siRNA sense strand
gaauguggcagagccuuua

SEQ ID NO: 2009989 - RNA, 19 nt, Homo sapiens
  misc_RNA (1)...(19): siRNA sense strand
ggaaauccuacaaauguga

SEQ ID NO: 2009990 - RNA, 19 nt, Homo sapiens
  misc_RNA (1)...(19): siRNA sense strand
agagaaacccuacaaaugu

SEQ ID NO: 2009991 - RNA, 19 nt, Homo sapiens
  misc_RNA (1)...(19): siRNA sense strand
aacaaguucucaacccuua

SEQ ID NO: 2009992 - RNA, 19 nt, Homo sapiens
  misc_RNA (1)...(19): siRNA sense strand
ucucaacccuuacuaaaca

SEQ ID NO: 2009993 - RNA, 19 nt, Homo sapiens
  misc_RNA (1)...(19): siRNA sense strand
agagaaacccuacaaaugu

SEQ ID NO: 2009994 - RNA, 19 nt, Homo sapiens
  misc_RNA (1)...(19): siRNA sense strand
agagaaacccuacaaaugu

SEQ ID NO: 2009995 - RNA, 19 nt, Homo sapiens
  misc_RNA (1)...(19): siRNA sense strand
aaccaguucucaaaccuua

SEQ ID NO: 2009996 - RNA, 19 nt, Homo sapiens
  misc_RNA (1)...(19): siRNA sense strand
agagaaacccuacaaaugu

SEQ ID NO: 2009997 - RNA, 19 nt, Homo sapiens
  misc_RNA (1)...(19): siRNA sense strand
ggcagagccuuuaacaaau

SEQ ID NO: 2009998 - RNA, 19 nt, Homo sapiens
  misc_RNA (1)...(19): siRNA sense strand
aaccaguccucaaaccuua

SEQ ID NO: 2009999 - RNA, 19 nt, Homo sapiens
  misc_RNA (1)...(19): siRNA sense strand
aagauaaacccuacaaaug

SEQ ID NO: 2010000 - RNA, 19 nt, Homo sapiens
  misc_RNA (1)...(19): siRNA sense strand
aagauaaacccuacaaaug

SEQ ID NO: 2010001 - RNA, 19 nt, Homo sapiens
  misc_RNA (1)...(19): siRNA sense strand
aaccgguccucaaaucuua

SEQ ID NO: 2010002 - RNA, 19 nt, Homo sapiens
  misc_RNA (1)...(19): siRNA sense strand
ccucaacccuuacugaaca

SEQ ID NO: 2010003 - RNA, 19 nt, Homo sapiens
  misc_RNA (1)...(19): siRNA sense strand
gaaaagagcccuggaaucu

SEQ ID NO: 2010004 - RNA, 19 nt, Homo sapiens
  misc_RNA (1)...(19): siRNA sense strand
ucucaacccuuauuacaca

SEQ ID NO: 2010005 - RNA, 19 nt, Homo sapiens
  misc_RNA (1)...(19): siRNA sense strand
aaccaguccucaacccuua

SEQ ID NO: 2010006 - RNA, 19 nt, Homo sapiens
  misc_RNA (1)...(19): siRNA sense strand
aagagaaacccuacaaaug

SEQ ID NO: 2010007 - RNA, 19 nt, Homo sapiens
  misc_RNA (1)...(19): siRNA sense strand
gagagaaacccugcaaaca

SEQ ID NO: 2010008 - RNA, 19 nt, Homo sapiens
  misc_RNA (1)...(19): siRNA sense strand
agauaaacccuacaaaugu

SEQ ID NO: 2010009 - RNA, 19 nt, Homo sapiens
  misc_RNA (1)...(19): siRNA sense strand
agauaaacccuacaaaugu

SEQ ID NO: 2010010 - RNA, 19 nt, Homo sapiens
  misc_RNA (1)...(19): siRNA sense strand
gaauguggcaaggccuuua

SEQ ID NO: 2010011 - RNA, 19 nt, Homo sapiens
  misc_RNA (1)...(19): siRNA sense strand
gggaaauccuacaaaugug

SEQ ID NO: 2010012 - RNA, 19 nt, Homo sapiens
  misc_RNA (1)...(19): siRNA sense strand
uuuaaccaguccucaauuu

SEQ ID NO: 2010013 - RNA, 19 nt, Homo sapiens
  misc_RNA (1)...(19): siRNA sense strand
agagaaaucauauggaaga

SEQ ID NO: 2010014 - RNA, 19 nt, Homo sapiens
  misc_RNA (1)...(19): siRNA sense strand
gagaauuuacagcuaagaa

SEQ ID NO: 2010015 - RNA, 19 nt, Homo sapiens
  misc_RNA (1)...(19): siRNA sense strand
ggaagauaaacccuacaaa

SEQ ID NO: 2010016 - RNA, 19 nt, Homo sapiens
  misc_RNA (1)...(19): siRNA sense strand
ggaagauaaacccuacaaa

SEQ ID NO: 2010017 - RNA, 19 nt, Homo sapiens
  misc_RNA (1)...(19): siRNA sense strand
caagauauuucagugugau

SEQ ID NO: 2010018 - RNA, 19 nt, Homo sapiens
  misc_RNA (1)...(19): siRNA sense strand
gaaauccuacaaaugugaa

SEQ ID NO: 2010019 - RNA, 19 nt, Homo sapiens
  misc_RNA (1)...(19): siRNA sense strand
ccuggaaucugaagagaca

SEQ ID NO: 2010020 - RNA, 19 nt, Homo sapiens
  misc_RNA (1)...(19): siRNA sense strand
ugaagaauguggcaaagcu

SEQ ID NO: 2010021 - RNA, 19 nt, Homo sapiens
  misc_RNA (1)...(19): siRNA sense strand
gagcacagcauaaaagauu

SEQ ID NO: 2010022 - RNA, 19 nt, Homo sapiens
  misc_RNA (1)...(19): siRNA sense strand
ugaagaauguggcaaagcu

SEQ ID NO: 2010023 - RNA, 19 nt, Homo sapiens
  misc_RNA (1)...(19): siRNA sense strand
ugaagaauguggcaaagcu

SEQ ID NO: 2010024 - RNA, 19 nt, Homo sapiens
  misc_RNA (1)...(19): siRNA sense strand
gaauucauacagaagagaa

SEQ ID NO: 2010025 - RNA, 19 nt, Homo sapiens
  misc_RNA (1)...(19): siRNA sense strand
ggagagaaacccugcaaac

SEQ ID NO: 2010026 - RNA, 19 nt, Homo sapiens
  misc_RNA (1)...(19): siRNA sense strand
ggccagagcacagcauaaa

SEQ ID NO: 2010027 - RNA, 19 nt, Homo sapiens
  misc_RNA (1)...(19): siRNA sense strand
guccucaaaucuuacuaaa

SEQ ID NO: 2010028 - RNA, 19 nt, Homo sapiens
  misc_RNA (1)...(19): siRNA sense strand
uaagacauacuggaaagaa

SEQ ID NO: 2010029 - RNA, 19 nt, Homo sapiens
  misc_RNA (1)...(19): siRNA sense strand
caaguucucaacccuuauu

SEQ ID NO: 2010030 - RNA, 19 nt, Homo sapiens
  misc_RNA (1)...(19): siRNA sense strand
aguguauucucaacccuua

SEQ ID NO: 2010031 - RNA, 19 nt, Homo sapiens
  misc_RNA (1)...(19): siRNA sense strand
gaaaauauggacaugagaa

SEQ ID NO: 2010032 - RNA, 19 nt, Homo sapiens
  misc_RNA (1)...(19): siRNA sense strand
cuacugacagcaagauauu

SEQ ID NO: 2010033 - RNA, 19 nt, Homo sapiens
  misc_RNA (1)...(19): siRNA sense strand
gaaacccuacaaauaugaa

SEQ ID NO: 2010034 - RNA, 19 nt, Homo sapiens
  misc_RNA (1)...(19): siRNA sense strand
gagaaaucauauggaagau

SEQ ID NO: 2010035 - RNA, 19 nt, Homo sapiens
  misc_RNA (1)...(19): siRNA sense strand
gagagaaacccuacaaaua

SEQ ID NO: 2010036 - RNA, 19 nt, Homo sapiens
  misc_RNA (1)...(19): siRNA sense strand
caaaggagguuauaaugga

SEQ ID NO: 2010037 - RNA, 19 nt, Homo sapiens
  misc_RNA (1)...(19): siRNA sense strand
gaagggaaauccuacaaau

SEQ ID NO: 2010038 - RNA, 19 nt, Homo sapiens
  misc_RNA (1)...(19): siRNA sense strand
gagaaacccugcaaacaug

SEQ ID NO: 2010039 - RNA, 19 nt, Homo sapiens
  misc_RNA (1)...(19): siRNA sense strand
aaacaguccucaacccuua

SEQ ID NO: 2010040 - RNA, 19 nt, Homo sapiens
  misc_RNA (1)...(19): siRNA sense strand
cuacaaaugugaagaaugu

SEQ ID NO: 2010041 - RNA, 19 nt, Homo sapiens
  misc_RNA (1)...(19): siRNA sense strand
gagaaacccuacaaauaug

SEQ ID NO: 2010042 - RNA, 19 nt, Homo sapiens
  misc_RNA (1)...(19): siRNA sense strand
cuacaaaugugaagaaugu

SEQ ID NO: 2010043 - RNA, 19 nt, Homo sapiens
  misc_RNA (1)...(19): siRNA sense strand
cuacaaaugugaagaaugu

SEQ ID NO: 2010044 - RNA, 19 nt, Homo sapiens
  misc_RNA (1)...(19): siRNA sense strand
gaagauaaacccuacaaau

SEQ ID NO: 2010045 - RNA, 19 nt, Homo sapiens
  misc_RNA (1)...(19): siRNA sense strand
cuacaaaugugaagaaugu

SEQ ID NO: 2010046 - RNA, 19 nt, Homo sapiens
  misc_RNA (1)...(19): siRNA sense strand
cuacaaaugugaugaaugu

SEQ ID NO: 2010047 - RNA, 19 nt, Homo sapiens
  misc_RNA (1)...(19): siRNA sense strand
cuacaaaugugaagaaugu

SEQ ID NO: 2010048 - RNA, 19 nt, Homo sapiens
  misc_RNA (1)...(19): siRNA sense strand
gaagauaaacccuacaaau

SEQ ID NO: 2010049 - RNA, 19 nt, Homo sapiens
  misc_RNA (1)...(19): siRNA sense strand
cuacaaaugugaagaaugu

SEQ ID NO: 2010050 - RNA, 19 nt, Homo sapiens
  misc_RNA (1)...(19): siRNA sense strand
cuacaaaugugaagaaugu

SEQ ID NO: 2010051 - RNA, 19 nt, Homo sapiens
  misc_RNA (1)...(19): siRNA sense strand
ccucaaaucuuacuaaaca

SEQ ID NO: 2010052 - RNA, 19 nt, Homo sapiens
  misc_RNA (1)...(19): siRNA sense strand
ggacuuaaccaguguuuga

SEQ ID NO: 2010053 - RNA, 19 nt, Homo sapiens
  misc_RNA (1)...(19): siRNA sense strand
gagagaaacccuacaaaug

SEQ ID NO: 2010054 - RNA, 19 nt, Homo sapiens
  misc_RNA (1)...(19): siRNA sense strand
gagagaaacccuacaaaug

SEQ ID NO: 2010055 - RNA, 19 nt, Homo sapiens
  misc_RNA (1)...(19): siRNA sense strand
gagagaaacccuacaaaug

SEQ ID NO: 2010056 - RNA, 19 nt, Homo sapiens
  misc_RNA (1)...(19): siRNA sense strand
gaagagaaacccuacaaau

SEQ ID NO: 2010057 - RNA, 19 nt, Homo sapiens
  misc_RNA (1)...(19): siRNA sense strand
ccaguuauguguucucauu

SEQ ID NO: 2010058 - RNA, 19 nt, Homo sapiens
  misc_RNA (1)...(19): siRNA sense strand
gauaaacccuacaaaugug

SEQ ID NO: 2010059 - RNA, 19 nt, Homo sapiens
  misc_RNA (1)...(19): siRNA sense strand
gauaaacccuacaaaugug

SEQ ID NO: 2010060 - RNA, 19 nt, Homo sapiens
  misc_RNA (1)...(19): siRNA sense strand
ucucaaaccuuacuaaaca

SEQ ID NO: 2010061 - RNA, 19 nt, Homo sapiens
  misc_RNA (1)...(19): siRNA sense strand
gagaaacccuacaaaugug

SEQ ID NO: 2010062 - RNA, 19 nt, Homo sapiens
  misc_RNA (1)...(19): siRNA sense strand
gagaaacccuacaaaugug

SEQ ID NO: 2010063 - RNA, 19 nt, Homo sapiens
  misc_RNA (1)...(19): siRNA sense strand
gagaaacccuacaaaugug

SEQ ID NO: 2010064 - RNA, 19 nt, Homo sapiens
  misc_RNA (1)...(19): siRNA sense strand
gagaaacccuacaaaugug

SEQ ID NO: 2010065 - RNA, 19 nt, Homo sapiens
  misc_RNA (1)...(19): siRNA sense strand
gauaagacauacuggaaag

SEQ ID NO: 2010066 - RNA, 19 nt, Homo sapiens
  misc_RNA (1)...(19): siRNA sense strand
caugagaauuuacagcuaa

SEQ ID NO: 2010067 - RNA, 19 nt, Homo sapiens
  misc_RNA (1)...(19): siRNA sense strand
gcagagccuuuaacaaauc

SEQ ID NO: 2010068 - RNA, 19 nt, Homo sapiens
  misc_RNA (1)...(19): siRNA sense strand
gcaagauauuucaguguga

SEQ ID NO: 2010069 - RNA, 19 nt, Homo sapiens
  misc_RNA (1)...(19): siRNA sense strand
guacaaaggagguuauaau

SEQ ID NO: 2010070 - RNA, 19 nt, Homo sapiens
  misc_RNA (1)...(19): siRNA sense strand
agagaaacccuacaaauau

SEQ ID NO: 2010071 - RNA, 19 nt, Homo sapiens
  misc_RNA (1)...(19): siRNA sense strand
gcaaggccuuuaaccaguu

SEQ ID NO: 2010072 - RNA, 19 nt, Homo sapiens
  misc_RNA (1)...(19): siRNA sense strand
ggagagaaacccuacaaau

SEQ ID NO: 2010073 - RNA, 19 nt, Homo sapiens
  misc_RNA (1)...(19): siRNA sense strand
ggagagaaacccuacaaau

SEQ ID NO: 2010074 - RNA, 19 nt, Homo sapiens
  misc_RNA (1)...(19): siRNA sense strand
ggagagaaacccuacaaau

SEQ ID NO: 2010075 - RNA, 19 nt, Homo sapiens
  misc_RNA (1)...(19): siRNA sense strand
ggagagaaacccuacaaau

SEQ ID NO: 2010076 - RNA, 19 nt, Homo sapiens
  misc_RNA (1)...(19): siRNA sense strand
aaccaguucucgauucuua

SEQ ID NO: 2010077 - RNA, 19 nt, Homo sapiens
  misc_RNA (1)...(19): siRNA sense strand
uggcagagccuuuaacaaa

SEQ ID NO: 2010078 - RNA, 19 nt, Homo sapiens
  misc_RNA (1)...(19): siRNA sense strand
uugcaugcuuucacaauua

SEQ ID NO: 2010079 - RNA, 19 nt, Homo sapiens
  misc_RNA (1)...(19): siRNA sense strand
ccucaacccuuacuaaaca

SEQ ID NO: 2010080 - RNA, 19 nt, Homo sapiens
  misc_RNA (1)...(19): siRNA sense strand
ccucaacccuuacuaaaca

SEQ ID NO: 2010081 - RNA, 19 nt, Homo sapiens
  misc_RNA (1)...(19): siRNA sense strand
ccucaacccuuacuaaaca

SEQ ID NO: 2010082 - RNA, 19 nt, Homo sapiens
  misc_RNA (1)...(19): siRNA sense strand
gagaguauucuuacaaaug

SEQ ID NO: 2010083 - RNA, 19 nt, Homo sapiens
  misc_RNA (1)...(19): siRNA sense strand
gauaauucauacuggagaa

SEQ ID NO: 2010084 - RNA, 19 nt, Homo sapiens
  misc_RNA (1)...(19): siRNA sense strand
gaaaagaccauaaaagugu

SEQ ID NO: 2010085 - RNA, 19 nt, Homo sapiens
  misc_RNA (1)...(19): siRNA sense strand
gaauguggcagagccuuua

SEQ ID NO: 2010086 - RNA, 19 nt, Homo sapiens
  misc_RNA (1)...(19): siRNA sense strand
ggaaauccuacaaauguga

SEQ ID NO: 2010087 - RNA, 19 nt, Homo sapiens
  misc_RNA (1)...(19): siRNA sense strand
agagaaacccuacaaaugu

SEQ ID NO: 2010088 - RNA, 19 nt, Homo sapiens
  misc_RNA (1)...(19): siRNA sense strand
aacaaguucucaacccuua

SEQ ID NO: 2010089 - RNA, 19 nt, Homo sapiens
  misc_RNA (1)...(19): siRNA sense strand
ucucaacccuuacuaaaca

SEQ ID NO: 2010090 - RNA, 19 nt, Homo sapiens
  misc_RNA (1)...(19): siRNA sense strand
agagaaacccuacaaaugu

SEQ ID NO: 2010091 - RNA, 19 nt, Homo sapiens
  misc_RNA (1)...(19): siRNA sense strand
agagaaacccuacaaaugu

SEQ ID NO: 2010092 - RNA, 19 nt, Homo sapiens
  misc_RNA (1)...(19): siRNA sense strand
aaccaguucucaaaccuua

SEQ ID NO: 2010093 - RNA, 19 nt, Homo sapiens
  misc_RNA (1)...(19): siRNA sense strand
agagaaacccuacaaaugu

SEQ ID NO: 2010094 - RNA, 19 nt, Homo sapiens
  misc_RNA (1)...(19): siRNA sense strand
ggcagagccuuuaacaaau

SEQ ID NO: 2010095 - RNA, 19 nt, Homo sapiens
  misc_RNA (1)...(19): siRNA sense strand
aaccaguccucaaaccuua

SEQ ID NO: 2010096 - RNA, 19 nt, Homo sapiens
  misc_RNA (1)...(19): siRNA sense strand
aagauaaacccuacaaaug

SEQ ID NO: 2010097 - RNA, 19 nt, Homo sapiens
  misc_RNA (1)...(19): siRNA sense strand
aagauaaacccuacaaaug

SEQ ID NO: 2010098 - RNA, 19 nt, Homo sapiens
  misc_RNA (1)...(19): siRNA sense strand
aaccgguccucaaaucuua

SEQ ID NO: 2010099 - RNA, 19 nt, Homo sapiens
  misc_RNA (1)...(19): siRNA sense strand
ccucaacccuuacugaaca

SEQ ID NO: 2010100 - RNA, 19 nt, Homo sapiens
  misc_RNA (1)...(19): siRNA sense strand
aaccaguccucaacccuua

SEQ ID NO: 2010101 - RNA, 19 nt, Homo sapiens
  misc_RNA (1)...(19): siRNA sense strand
ucucaacccuuauuacaca

SEQ ID NO: 2010102 - RNA, 19 nt, Homo sapiens
  misc_RNA (1)...(19): siRNA sense strand
aagagaaacccuacaaaug

SEQ ID NO: 2010103 - RNA, 19 nt, Homo sapiens
  misc_RNA (1)...(19): siRNA sense strand
gagagaaacccugcaaaca

SEQ ID NO: 2010104 - RNA, 19 nt, Homo sapiens
  misc_RNA (1)...(19): siRNA sense strand
agauaaacccuacaaaugu

SEQ ID NO: 2010105 - RNA, 19 nt, Homo sapiens
  misc_RNA (1)...(19): siRNA sense strand
agauaaacccuacaaaugu

SEQ ID NO: 2010106 - RNA, 19 nt, Homo sapiens
  misc_RNA (1)...(19): siRNA sense strand
gaauguggcaaggccuuua

SEQ ID NO: 2010107 - RNA, 19 nt, Homo sapiens
  misc_RNA (1)...(19): siRNA sense strand
gggaaauccuacaaaugug

SEQ ID NO: 2010108 - RNA, 19 nt, Homo sapiens
  misc_RNA (1)...(19): siRNA sense strand
uuuaaccaguccucaauuu

SEQ ID NO: 2010109 - RNA, 19 nt, Homo sapiens
  misc_RNA (1)...(19): siRNA sense strand
agagaaaucauauggaaga

SEQ ID NO: 2010110 - RNA, 19 nt, Homo sapiens
  misc_RNA (1)...(19): siRNA sense strand
gagaauuuacagcuaagaa

SEQ ID NO: 2010111 - RNA, 19 nt, Homo sapiens
  misc_RNA (1)...(19): siRNA sense strand
ggaagauaaacccuacaaa

SEQ ID NO: 2010112 - RNA, 19 nt, Homo sapiens
  misc_RNA (1)...(19): siRNA sense strand
ggaagauaaacccuacaaa

SEQ ID NO: 2010113 - RNA, 19 nt, Homo sapiens
  misc_RNA (1)...(19): siRNA sense strand
gagcacagcauaaaagauu

SEQ ID NO: 2010114 - RNA, 19 nt, Homo sapiens
  misc_RNA (1)...(19): siRNA sense strand
gaaauccuacaaaugugaa

SEQ ID NO: 2010115 - RNA, 19 nt, Homo sapiens
  misc_RNA (1)...(19): siRNA sense strand
ugaagaauguggcaaagcu

SEQ ID NO: 2010116 - RNA, 19 nt, Homo sapiens
  misc_RNA (1)...(19): siRNA sense strand
ugaagaauguggcaaagcu

SEQ ID NO: 2010117 - RNA, 19 nt, Homo sapiens
  misc_RNA (1)...(19): siRNA sense strand
ugaagaauguggcaaagcu

SEQ ID NO: 2010118 - RNA, 19 nt, Homo sapiens
  misc_RNA (1)...(19): siRNA sense strand
caagauauuucagugugau

SEQ ID NO: 2010119 - RNA, 19 nt, Homo sapiens
  misc_RNA (1)...(19): siRNA sense strand
gaauucauacagaagagaa

SEQ ID NO: 2010120 - RNA, 19 nt, Homo sapiens
  misc_RNA (1)...(19): siRNA sense strand
ggagagaaacccugcaaac

SEQ ID NO: 2010121 - RNA, 19 nt, Homo sapiens
  misc_RNA (1)...(19): siRNA sense strand
ggccagagcacagcauaaa

SEQ ID NO: 2010122 - RNA, 19 nt, Homo sapiens
  misc_RNA (1)...(19): siRNA sense strand
guccucaaaucuuacuaaa

SEQ ID NO: 2010123 - RNA, 19 nt, Homo sapiens
  misc_RNA (1)...(19): siRNA sense strand
uaagacauacuggaaagaa

SEQ ID NO: 2010124 - RNA, 19 nt, Homo sapiens
  misc_RNA (1)...(19): siRNA sense strand
caaguucucaacccuuauu

SEQ ID NO: 2010125 - RNA, 19 nt, Homo sapiens
  misc_RNA (1)...(19): siRNA sense strand
gaaaauauggacaugagaa

SEQ ID NO: 2010126 - RNA, 19 nt, Homo sapiens
  misc_RNA (1)...(19): siRNA sense strand
aguguauucucaacccuua

SEQ ID NO: 2010127 - RNA, 19 nt, Homo sapiens
  misc_RNA (1)...(19): siRNA sense strand
cuacugacagcaagauauu

SEQ ID NO: 2010128 - RNA, 19 nt, Homo sapiens
  misc_RNA (1)...(19): siRNA sense strand
gaaacccuacaaauaugaa

SEQ ID NO: 2010129 - RNA, 19 nt, Homo sapiens
  misc_RNA (1)...(19): siRNA sense strand
gguccucaacccuuacuaa

SEQ ID NO: 2010130 - RNA, 19 nt, Homo sapiens
  misc_RNA (1)...(19): siRNA sense strand
gagaaaucauauggaagau

SEQ ID NO: 2010131 - RNA, 19 nt, Homo sapiens
  misc_RNA (1)...(19): siRNA sense strand
acaugagaauuuacagcua

SEQ ID NO: 2010132 - RNA, 19 nt, Homo sapiens
  misc_RNA (1)...(19): siRNA sense strand
cauaagauaauccauacug

SEQ ID NO: 2010133 - RNA, 19 nt, Homo sapiens
  misc_RNA (1)...(19): siRNA sense strand
gagaauucauauggaagau

SEQ ID NO: 2010134 - RNA, 19 nt, Homo sapiens
  misc_RNA (1)...(19): siRNA sense strand
cagaagagaaacccuacaa

SEQ ID NO: 2010135 - RNA, 19 nt, Homo sapiens
  misc_RNA (1)...(19): siRNA sense strand
gagagaaacccuacaaaua

SEQ ID NO: 2010136 - RNA, 19 nt, Homo sapiens
  misc_RNA (1)...(19): siRNA sense strand
gaagagacaugagauggua

SEQ ID NO: 2010137 - RNA, 19 nt, Homo sapiens
  misc_RNA (1)...(19): siRNA sense strand
caaaggagguuauaaugga

SEQ ID NO: 2010138 - RNA, 19 nt, Homo sapiens
  misc_RNA (1)...(19): siRNA sense strand
gaagggaaauccuacaaau

SEQ ID NO: 2010139 - RNA, 19 nt, Homo sapiens
  misc_RNA (1)...(19): siRNA sense strand
gagaaacccugcaaacaug

SEQ ID NO: 2010140 - RNA, 19 nt, Homo sapiens
  misc_RNA (1)...(19): siRNA sense strand
aaacaguccucaacccuua

SEQ ID NO: 2010141 - RNA, 19 nt, Homo sapiens
  misc_RNA (1)...(19): siRNA sense strand
cuacaaaugugaagaaugu

SEQ ID NO: 2010142 - RNA, 19 nt, Homo sapiens
  misc_RNA (1)...(19): siRNA sense strand
gagaaacccuacaaauaug

SEQ ID NO: 2010143 - RNA, 19 nt, Homo sapiens
  misc_RNA (1)...(19): siRNA sense strand
cuacaaaugugaagaaugu

SEQ ID NO: 2010144 - RNA, 19 nt, Homo sapiens
  misc_RNA (1)...(19): siRNA sense strand
cuacaaaugugaagaaugu

SEQ ID NO: 2010145 - RNA, 19 nt, Homo sapiens
  misc_RNA (1)...(19): siRNA sense strand
gaagauaaacccuacaaau

SEQ ID NO: 2010146 - RNA, 19 nt, Homo sapiens
  misc_RNA (1)...(19): siRNA sense strand
cuacaaaugugaagaaugu

SEQ ID NO: 2010147 - RNA, 19 nt, Homo sapiens
  misc_RNA (1)...(19): siRNA sense strand
cuacaaaugugaugaaugu

SEQ ID NO: 2010148 - RNA, 19 nt, Homo sapiens
  misc_RNA (1)...(19): siRNA sense strand
cuacaaaugugaagaaugu

SEQ ID NO: 2010149 - RNA, 19 nt, Homo sapiens
  misc_RNA (1)...(19): siRNA sense strand
gaagauaaacccuacaaau

SEQ ID NO: 2010150 - RNA, 19 nt, Homo sapiens
  misc_RNA (1)...(19): siRNA sense strand
cuacaaaugugaagaaugu

SEQ ID NO: 2010151 - RNA, 19 nt, Homo sapiens
  misc_RNA (1)...(19): siRNA sense strand
cuacaaaugugaagaaugu

SEQ ID NO: 2010152 - RNA, 19 nt, Homo sapiens
  misc_RNA (1)...(19): siRNA sense strand
ccucaaaucuuacuaaaca

SEQ ID NO: 2010153 - RNA, 19 nt, Homo sapiens
  misc_RNA (1)...(19): siRNA sense strand
ggacuuaaccaguguuuga

SEQ ID NO: 2010154 - RNA, 19 nt, Homo sapiens
  misc_RNA (1)...(19): siRNA sense strand
gagagaaacccuacaaaug

SEQ ID NO: 2010155 - RNA, 19 nt, Homo sapiens
  misc_RNA (1)...(19): siRNA sense strand
gagagaaacccuacaaaug

SEQ ID NO: 2010156 - RNA, 19 nt, Homo sapiens
  misc_RNA (1)...(19): siRNA sense strand
gagagaaacccuacaaaug

SEQ ID NO: 2010157 - RNA, 19 nt, Homo sapiens
  misc_RNA (1)...(19): siRNA sense strand
gaagagaaacccuacaaau

SEQ ID NO: 2010158 - RNA, 19 nt, Homo sapiens
  misc_RNA (1)...(19): siRNA sense strand
ccaguuauguguucucauu

SEQ ID NO: 2010159 - RNA, 19 nt, Homo sapiens
  misc_RNA (1)...(19): siRNA sense strand
aaagagcccuggaaucuga

SEQ ID NO: 2010160 - RNA, 19 nt, Homo sapiens
  misc_RNA (1)...(19): siRNA sense strand
gauaaacccuacaaaugug

SEQ ID NO: 2010161 - RNA, 19 nt, Homo sapiens
  misc_RNA (1)...(19): siRNA sense strand
gauaaacccuacaaaugug

SEQ ID NO: 2010162 - RNA, 19 nt, Homo sapiens
  misc_RNA (1)...(19): siRNA sense strand
gacaugagaugguagacaa

SEQ ID NO: 2010163 - RNA, 19 nt, Homo sapiens
  misc_RNA (1)...(19): siRNA sense strand
ucucaaaccuuacuaaaca

SEQ ID NO: 2010164 - RNA, 19 nt, Homo sapiens
  misc_RNA (1)...(19): siRNA sense strand
gagaaacccuacaaaugug

SEQ ID NO: 2010165 - RNA, 19 nt, Homo sapiens
  misc_RNA (1)...(19): siRNA sense strand
gagaaacccuacaaaugug

SEQ ID NO: 2010166 - RNA, 19 nt, Homo sapiens
  misc_RNA (1)...(19): siRNA sense strand
gagaaacccuacaaaugug

SEQ ID NO: 2010167 - RNA, 19 nt, Homo sapiens
  misc_RNA (1)...(19): siRNA sense strand
gagaaacccuacaaaugug

SEQ ID NO: 2010168 - RNA, 19 nt, Homo sapiens
  misc_RNA (1)...(19): siRNA sense strand
gauaagacauacuggaaag

SEQ ID NO: 2010169 - RNA, 19 nt, Homo sapiens
  misc_RNA (1)...(19): siRNA sense strand
caugagaauuuacagcuaa

SEQ ID NO: 2010170 - RNA, 19 nt, Homo sapiens
  misc_RNA (1)...(19): siRNA sense strand
gcagagccuuuaacaaauc

SEQ ID NO: 2010171 - RNA, 19 nt, Homo sapiens
  misc_RNA (1)...(19): siRNA sense strand
gcaagauauuucaguguga

SEQ ID NO: 2010172 - RNA, 19 nt, Homo sapiens
  misc_RNA (1)...(19): siRNA sense strand
guacaaaggagguuauaau

SEQ ID NO: 2010173 - RNA, 19 nt, Homo sapiens
  misc_RNA (1)...(19): siRNA sense strand
agagaaacccuacaaauau

SEQ ID NO: 2010174 - RNA, 19 nt, Homo sapiens
  misc_RNA (1)...(19): siRNA sense strand
gcaaggccuuuaaccaguu

SEQ ID NO: 2010175 - RNA, 19 nt, Homo sapiens
  misc_RNA (1)...(19): siRNA sense strand
ggagagaaacccuacaaau

SEQ ID NO: 2010176 - RNA, 19 nt, Homo sapiens
  misc_RNA (1)...(19): siRNA sense strand
ggagagaaacccuacaaau

SEQ ID NO: 2010177 - RNA, 19 nt, Homo sapiens
  misc_RNA (1)...(19): siRNA sense strand
ggagagaaacccuacaaau

SEQ ID NO: 2010178 - RNA, 19 nt, Homo sapiens
  misc_RNA (1)...(19): siRNA sense strand
ggagagaaacccuacaaau

SEQ ID NO: 2010179 - RNA, 19 nt, Homo sapiens
  misc_RNA (1)...(19): siRNA sense strand
aaccaguucucgauucuua

SEQ ID NO: 2010180 - RNA, 19 nt, Homo sapiens
  misc_RNA (1)...(19): siRNA sense strand
uggcagagccuuuaacaaa

SEQ ID NO: 2010181 - RNA, 19 nt, Homo sapiens
  misc_RNA (1)...(19): siRNA sense strand
uugcaugcuuucacaauua

SEQ ID NO: 2010182 - RNA, 19 nt, Homo sapiens
  misc_RNA (1)...(19): siRNA sense strand
ccucaacccuuacuaaaca

SEQ ID NO: 2010183 - RNA, 19 nt, Homo sapiens
  misc_RNA (1)...(19): siRNA sense strand
ccucaacccuuacuaaaca

SEQ ID NO: 2010184 - RNA, 19 nt, Homo sapiens
  misc_RNA (1)...(19): siRNA sense strand
ccucaacccuuacuaaaca

SEQ ID NO: 2010185 - RNA, 19 nt, Homo sapiens
  misc_RNA (1)...(19): siRNA sense strand
gagaguauucuuacaaaug

SEQ ID NO: 2010186 - RNA, 19 nt, Homo sapiens
  misc_RNA (1)...(19): siRNA sense strand
gauaauucauacuggagaa

SEQ ID NO: 2010187 - RNA, 19 nt, Homo sapiens
  misc_RNA (1)...(19): siRNA sense strand
gaaaagaccauaaaagugu

SEQ ID NO: 2010188 - RNA, 19 nt, Homo sapiens
  misc_RNA (1)...(19): siRNA sense strand
gaauguggcagagccuuua

SEQ ID NO: 2010189 - RNA, 19 nt, Homo sapiens
  misc_RNA (1)...(19): siRNA sense strand
ggaaauccuacaaauguga

SEQ ID NO: 2010190 - RNA, 19 nt, Homo sapiens
  misc_RNA (1)...(19): siRNA sense strand
agagaaacccuacaaaugu

SEQ ID NO: 2010191 - RNA, 19 nt, Homo sapiens
  misc_RNA (1)...(19): siRNA sense strand
aacaaguucucaacccuua

SEQ ID NO: 2010192 - RNA, 19 nt, Homo sapiens
  misc_RNA (1)...(19): siRNA sense strand
ucucaacccuuacuaaaca

SEQ ID NO: 2010193 - RNA, 19 nt, Homo sapiens
  misc_RNA (1)...(19): siRNA sense strand
agagaaacccuacaaaugu

SEQ ID NO: 2010194 - RNA, 19 nt, Homo sapiens
  misc_RNA (1)...(19): siRNA sense strand
agagaaacccuacaaaugu

SEQ ID NO: 2010195 - RNA, 19 nt, Homo sapiens
  misc_RNA (1)...(19): siRNA sense strand
aaccaguucucaaaccuua

SEQ ID NO: 2010196 - RNA, 19 nt, Homo sapiens
  misc_RNA (1)...(19): siRNA sense strand
agagaaacccuacaaaugu

SEQ ID NO: 2010197 - RNA, 19 nt, Homo sapiens
  misc_RNA (1)...(19): siRNA sense strand
ggcagagccuuuaacaaau

SEQ ID NO: 2010198 - RNA, 19 nt, Homo sapiens
  misc_RNA (1)...(19): siRNA sense strand
aaccaguccucaaaccuua

SEQ ID NO: 2010199 - RNA, 19 nt, Homo sapiens
  misc_RNA (1)...(19): siRNA sense strand
aagauaaacccuacaaaug

SEQ ID NO: 2010200 - RNA, 19 nt, Homo sapiens
  misc_RNA (1)...(19): siRNA sense strand
aagauaaacccuacaaaug

SEQ ID NO: 2010201 - RNA, 19 nt, Homo sapiens
  misc_RNA (1)...(19): siRNA sense strand
aaccgguccucaaaucuua

SEQ ID NO: 2010202 - RNA, 19 nt, Homo sapiens
  misc_RNA (1)...(19): siRNA sense strand
ccucaacccuuacugaaca

SEQ ID NO: 2010203 - RNA, 19 nt, Homo sapiens
  misc_RNA (1)...(19): siRNA sense strand
gaaaagagcccuggaaucu

SEQ ID NO: 2010204 - RNA, 19 nt, Homo sapiens
  misc_RNA (1)...(19): siRNA sense strand
ucucaacccuuauuacaca

SEQ ID NO: 2010205 - RNA, 19 nt, Homo sapiens
  misc_RNA (1)...(19): siRNA sense strand
aaccaguccucaacccuua

SEQ ID NO: 2010206 - RNA, 19 nt, Homo sapiens
  misc_RNA (1)...(19): siRNA sense strand
aagagaaacccuacaaaug

SEQ ID NO: 2010207 - RNA, 19 nt, Homo sapiens
  misc_RNA (1)...(19): siRNA sense strand
gagagaaacccugcaaaca

SEQ ID NO: 2010208 - RNA, 19 nt, Homo sapiens
  misc_RNA (1)...(19): siRNA sense strand
agauaaacccuacaaaugu

SEQ ID NO: 2010209 - RNA, 19 nt, Homo sapiens
  misc_RNA (1)...(19): siRNA sense strand
agauaaacccuacaaaugu

SEQ ID NO: 2010210 - RNA, 19 nt, Homo sapiens
  misc_RNA (1)...(19): siRNA sense strand
gaauguggcaaggccuuua

SEQ ID NO: 2010211 - RNA, 19 nt, Homo sapiens
  misc_RNA (1)...(19): siRNA sense strand
gggaaauccuacaaaugug

SEQ ID NO: 2010212 - RNA, 19 nt, Homo sapiens
  misc_RNA (1)...(19): siRNA sense strand
uuuaaccaguccucaauuu

SEQ ID NO: 2010213 - RNA, 19 nt, Homo sapiens
  misc_RNA (1)...(19): siRNA sense strand
agagaaaucauauggaaga

SEQ ID NO: 2010214 - RNA, 19 nt, Homo sapiens
  misc_RNA (1)...(19): siRNA sense strand
gagaauuuacagcuaagaa

SEQ ID NO: 2010215 - RNA, 19 nt, Homo sapiens
  misc_RNA (1)...(19): siRNA sense strand
ggaagauaaacccuacaaa

SEQ ID NO: 2010216 - RNA, 19 nt, Homo sapiens
  misc_RNA (1)...(19): siRNA sense strand
ggaagauaaacccuacaaa

SEQ ID NO: 2010217 - RNA, 19 nt, Homo sapiens
  misc_RNA (1)...(19): siRNA sense strand
caagauauuucagugugau

SEQ ID NO: 2010218 - RNA, 19 nt, Homo sapiens
  misc_RNA (1)...(19): siRNA sense strand
gaaauccuacaaaugugaa

SEQ ID NO: 2010219 - RNA, 19 nt, Homo sapiens
  misc_RNA (1)...(19): siRNA sense strand
ccuggaaucugaagagaca

SEQ ID NO: 2010220 - RNA, 19 nt, Homo sapiens
  misc_RNA (1)...(19): siRNA sense strand
ugaagaauguggcaaagcu

SEQ ID NO: 2010221 - RNA, 19 nt, Homo sapiens
  misc_RNA (1)...(19): siRNA sense strand
gagcacagcauaaaagauu

SEQ ID NO: 2010222 - RNA, 19 nt, Homo sapiens
  misc_RNA (1)...(19): siRNA sense strand
ugaagaauguggcaaagcu

SEQ ID NO: 2010223 - RNA, 19 nt, Homo sapiens
  misc_RNA (1)...(19): siRNA sense strand
ugaagaauguggcaaagcu

SEQ ID NO: 2010224 - RNA, 19 nt, Homo sapiens
  misc_RNA (1)...(19): siRNA sense strand
gaauucauacagaagagaa

SEQ ID NO: 2010225 - RNA, 19 nt, Homo sapiens
  misc_RNA (1)...(19): siRNA sense strand
ggagagaaacccugcaaac

SEQ ID NO: 2010226 - RNA, 19 nt, Homo sapiens
  misc_RNA (1)...(19): siRNA sense strand
ggccagagcacagcauaaa

SEQ ID NO: 2010227 - RNA, 19 nt, Homo sapiens
  misc_RNA (1)...(19): siRNA sense strand
guccucaaaucuuacuaaa

SEQ ID NO: 2010228 - RNA, 19 nt, Homo sapiens
  misc_RNA (1)...(19): siRNA sense strand
uaagacauacuggaaagaa

SEQ ID NO: 2010229 - RNA, 19 nt, Homo sapiens
  misc_RNA (1)...(19): siRNA sense strand
caaguucucaacccuuauu

SEQ ID NO: 2010230 - RNA, 19 nt, Homo sapiens
  misc_RNA (1)...(19): siRNA sense strand
aguguauucucaacccuua

SEQ ID NO: 2010231 - RNA, 19 nt, Homo sapiens
  misc_RNA (1)...(19): siRNA sense strand
gaaaauauggacaugagaa

SEQ ID NO: 2010232 - RNA, 19 nt, Homo sapiens
  misc_RNA (1)...(19): siRNA sense strand
cuacugacagcaagauauu

SEQ ID NO: 2010233 - RNA, 19 nt, Homo sapiens
  misc_RNA (1)...(19): siRNA sense strand
gaaacccuacaaauaugaa

SEQ ID NO: 2010234 - RNA, 19 nt, Homo sapiens
  misc_RNA (1)...(19): siRNA sense strand
gagaaaucauauggaagau

SEQ ID NO: 2010235 - RNA, 19 nt, Homo sapiens
  misc_RNA (1)...(19): siRNA sense strand
ggaaagaccuucuguagca

SEQ ID NO: 2010236 - RNA, 19 nt, Homo sapiens
  misc_RNA (1)...(19): siRNA sense strand
gagaaucaguuccuacuaa

SEQ ID NO: 2010237 - RNA, 19 nt, Homo sapiens
  misc_RNA (1)...(19): siRNA sense strand
ggagagagacguuauauau

SEQ ID NO: 2010238 - RNA, 19 nt, Homo sapiens
  misc_RNA (1)...(19): siRNA sense strand
caagaaagguagagaauca

SEQ ID NO: 2010239 - RNA, 19 nt, Homo sapiens
  misc_RNA (1)...(19): siRNA sense strand
gcucaaaucucaccaaaca

SEQ ID NO: 2010240 - RNA, 19 nt, Homo sapiens
  misc_RNA (1)...(19): siRNA sense strand
gcucagaccuucuuaaaca

SEQ ID NO: 2010241 - RNA, 19 nt, Homo sapiens
  misc_RNA (1)...(19): siRNA sense strand
ggagaagccuuaucagugu

SEQ ID NO: 2010242 - RNA, 19 nt, Homo sapiens
  misc_RNA (1)...(19): siRNA sense strand
caagaaagguccgagauug

SEQ ID NO: 2010243 - RNA, 19 nt, Homo sapiens
  misc_RNA (1)...(19): siRNA sense strand
aguaauagcucaaaucuca

SEQ ID NO: 2010244 - RNA, 19 nt, Homo sapiens
  misc_RNA (1)...(19): siRNA sense strand
gagaagccauauaagugua

SEQ ID NO: 2010245 - RNA, 19 nt, Homo sapiens
  misc_RNA (1)...(19): siRNA sense strand
gguccgagauugcagauug

SEQ ID NO: 2010246 - RNA, 19 nt, Homo sapiens
  misc_RNA (1)...(19): siRNA sense strand
agagagacguuauauaugu

SEQ ID NO: 2010247 - RNA, 19 nt, Homo sapiens
  misc_RNA (1)...(19): siRNA sense strand
gagagaagccauauaagug

SEQ ID NO: 2010248 - RNA, 19 nt, Homo sapiens
  misc_RNA (1)...(19): siRNA sense strand
ggagagaagccauauaagu

SEQ ID NO: 2010249 - RNA, 19 nt, Homo sapiens
  misc_RNA (1)...(19): siRNA sense strand
gagcucagaccuucuuaaa

SEQ ID NO: 2010250 - RNA, 19 nt, Homo sapiens
  misc_RNA (1)...(19): siRNA sense strand
ggaguucgcucaagaucca

SEQ ID NO: 2010251 - RNA, 19 nt, Homo sapiens
  misc_RNA (1)...(19): siRNA sense strand
ccauaucagugcaaagauu

SEQ ID NO: 2010252 - RNA, 19 nt, Homo sapiens
  misc_RNA (1)...(19): siRNA sense strand
ggagaccagucacaaauac

SEQ ID NO: 2010253 - RNA, 19 nt, Homo sapiens
  misc_RNA (1)...(19): siRNA sense strand
gagaagccuuaucagugua

SEQ ID NO: 2010254 - RNA, 19 nt, Homo sapiens
  misc_RNA (1)...(19): siRNA sense strand
cagaagaggcgccauauca

SEQ ID NO: 2010255 - RNA, 19 nt, Homo sapiens
  misc_RNA (1)...(19): siRNA sense strand
gcguaaaccuugaaaauga

SEQ ID NO: 2010256 - RNA, 19 nt, Homo sapiens
  misc_RNA (1)...(19): siRNA sense strand
gaaagaccuucuguagcaa

SEQ ID NO: 2010257 - RNA, 19 nt, Homo sapiens
  misc_RNA (1)...(19): siRNA sense strand
caaguccaaucuuuccaaa

SEQ ID NO: 2010258 - RNA, 19 nt, Homo sapiens
  misc_RNA (1)...(19): siRNA sense strand
agaaucaguuccuacuaaa

SEQ ID NO: 2010259 - RNA, 19 nt, Homo sapiens
  misc_RNA (1)...(19): siRNA sense strand
cgagauugcagauugagua

SEQ ID NO: 2010260 - RNA, 19 nt, Homo sapiens
  misc_RNA (1)...(19): siRNA sense strand
uguagcaaguccaaucuuu

SEQ ID NO: 2010261 - RNA, 19 nt, Homo sapiens
  misc_RNA (1)...(19): siRNA sense strand
gagagacguuauauaugug

SEQ ID NO: 2010262 - RNA, 19 nt, Homo sapiens
  misc_RNA (1)...(19): siRNA sense strand
gagagagacguuauauaug

SEQ ID NO: 2010263 - RNA, 19 nt, Homo sapiens
  misc_RNA (1)...(19): siRNA sense strand
ccggagagaagccauauaa

SEQ ID NO: 2010264 - RNA, 19 nt, Homo sapiens
  misc_RNA (1)...(19): siRNA sense strand
gcuccaacuucaauaaaca

SEQ ID NO: 2010265 - RNA, 19 nt, Homo sapiens
  misc_RNA (1)...(19): siRNA sense strand
caguuuggguaccaugaua

SEQ ID NO: 2010266 - RNA, 19 nt, Homo sapiens
  misc_RNA (1)...(19): siRNA sense strand
ucaauaaacaccacagaau

SEQ ID NO: 2010267 - RNA, 19 nt, Homo sapiens
  misc_RNA (1)...(19): siRNA sense strand
gaagaggcgccauaucagu

SEQ ID NO: 2010268 - RNA, 19 nt, Homo sapiens
  misc_RNA (1)...(19): siRNA sense strand
gaggcaggcuccaagaaag

SEQ ID NO: 2010269 - RNA, 19 nt, Homo sapiens
  misc_RNA (1)...(19): siRNA sense strand
gguagagaaucaguuccua

SEQ ID NO: 2010270 - RNA, 19 nt, Homo sapiens
  misc_RNA (1)...(19): siRNA sense strand
ugucaucacuguggaaaga

SEQ ID NO: 2010271 - RNA, 19 nt, Homo sapiens
  misc_RNA (1)...(19): siRNA sense strand
uagcucaaaucucaccaaa

SEQ ID NO: 2010272 - RNA, 19 nt, Homo sapiens
  misc_RNA (1)...(19): siRNA sense strand
ccaagaaagguccgagauu

SEQ ID NO: 2010273 - RNA, 19 nt, Homo sapiens
  misc_RNA (1)...(19): siRNA sense strand
gaaagguagagaaucaguu

SEQ ID NO: 2010274 - RNA, 19 nt, Homo sapiens
  misc_RNA (1)...(19): siRNA sense strand
ggucucaacuccuccaaac

SEQ ID NO: 2010275 - RNA, 19 nt, Homo sapiens
  misc_RNA (1)...(19): siRNA sense strand
caauaaacaccacagaauc

SEQ ID NO: 2010276 - RNA, 19 nt, Homo sapiens
  misc_RNA (1)...(19): siRNA sense strand
gcagagcucagaccuucuu

SEQ ID NO: 2010277 - RNA, 19 nt, Homo sapiens
  misc_RNA (1)...(19): siRNA sense strand
aaccacagcuccaacuuca

SEQ ID NO: 2010278 - RNA, 19 nt, Homo sapiens
  misc_RNA (1)...(19): siRNA sense strand
gcagaugagcagaaagguu

SEQ ID NO: 2010279 - RNA, 19 nt, Homo sapiens
  misc_RNA (1)...(19): siRNA sense strand
cuacuggugucaucacugu

SEQ ID NO: 2010280 - RNA, 19 nt, Homo sapiens
  misc_RNA (1)...(19): siRNA sense strand
ccacagcuccaacuucaau

SEQ ID NO: 2010281 - RNA, 19 nt, Homo sapiens
  misc_RNA (1)...(19): siRNA sense strand
gcucaaaggggauauaauu

SEQ ID NO: 2010282 - RNA, 19 nt, Homo sapiens
  misc_RNA (1)...(19): siRNA sense strand
acacagaagaggcgccaua

SEQ ID NO: 2010283 - RNA, 19 nt, Homo sapiens
  misc_RNA (1)...(19): siRNA sense strand
gcaaguccaaucuuuccaa

SEQ ID NO: 2010284 - RNA, 19 nt, Homo sapiens
  misc_RNA (1)...(19): siRNA sense strand
aguccaaucuuuccaaaca

SEQ ID NO: 2010285 - RNA, 19 nt, Homo sapiens
  misc_RNA (1)...(19): siRNA sense strand
cucaggaacugcaaaggaa

SEQ ID NO: 2010286 - RNA, 19 nt, Homo sapiens
  misc_RNA (1)...(19): siRNA sense strand
guggaaagaccuucuguag

SEQ ID NO: 2010287 - RNA, 19 nt, Homo sapiens
  misc_RNA (1)...(19): siRNA sense strand
gcacgaggaaucagcagau

SEQ ID NO: 2010288 - RNA, 19 nt, Homo sapiens
  misc_RNA (1)...(19): siRNA sense strand
ucaaaucucaccaaacaca

SEQ ID NO: 2010289 - RNA, 19 nt, Homo sapiens
  misc_RNA (1)...(19): siRNA sense strand
ggcccgagauccacaccaa

SEQ ID NO: 2010290 - RNA, 19 nt, Homo sapiens
  misc_RNA (1)...(19): siRNA sense strand
uuagagaggcagugcguaa

SEQ ID NO: 2010291 - RNA, 19 nt, Homo sapiens
  misc_RNA (1)...(19): siRNA sense strand
ccaagugugggaaagcuuu

SEQ ID NO: 2010292 - RNA, 19 nt, Homo sapiens
  misc_RNA (1)...(19): siRNA sense strand
ccaggagagagacguuaua

SEQ ID NO: 2010293 - RNA, 19 nt, Homo sapiens
  misc_RNA (1)...(19): siRNA sense strand
aaacacaggagaacacaca

SEQ ID NO: 2010294 - RNA, 19 nt, Homo sapiens
  misc_RNA (1)...(19): siRNA sense strand
agaaaccggugugggagaa

SEQ ID NO: 2010295 - RNA, 19 nt, Homo sapiens
  misc_RNA (1)...(19): siRNA sense strand
gggauauaauuucugugau

SEQ ID NO: 2010296 - RNA, 19 nt, Homo sapiens
  misc_RNA (1)...(19): siRNA sense strand
caagaggcaggcuccaaga

SEQ ID NO: 2010297 - RNA, 19 nt, Homo sapiens
  misc_RNA (1)...(19): siRNA sense strand
caaccacagcuccaacuuc

SEQ ID NO: 2010298 - RNA, 19 nt, Homo sapiens
  misc_RNA (1)...(19): siRNA sense strand
cauaucagugcaaagauug

SEQ ID NO: 2010299 - RNA, 19 nt, Homo sapiens
  misc_RNA (1)...(19): siRNA sense strand
aagaagagaaaggcaagua

SEQ ID NO: 2010300 - RNA, 19 nt, Homo sapiens
  misc_RNA (1)...(19): siRNA sense strand
agagggagaagcaccguaa

SEQ ID NO: 2010301 - RNA, 19 nt, Homo sapiens
  misc_RNA (1)...(19): siRNA sense strand
aaagguagagaaucaguuc

SEQ ID NO: 2010302 - RNA, 19 nt, Homo sapiens
  misc_RNA (1)...(19): siRNA sense strand
ggcugucacucuccucgaa

SEQ ID NO: 2010303 - RNA, 19 nt, Homo sapiens
  misc_RNA (1)...(19): siRNA sense strand
ggcagugcguaaaccuuga

SEQ ID NO: 2010304 - RNA, 19 nt, Homo sapiens
  misc_RNA (1)...(19): siRNA sense strand
uggagaccagucacaaaua

SEQ ID NO: 2010305 - RNA, 19 nt, Homo sapiens
  misc_RNA (1)...(19): siRNA sense strand
ccucagcucccaccagaga

SEQ ID NO: 2010306 - RNA, 19 nt, Homo sapiens
  misc_RNA (1)...(19): siRNA sense strand
cagccucauucgucacuau

SEQ ID NO: 2010307 - RNA, 19 nt, Homo sapiens
  misc_RNA (1)...(19): siRNA sense strand
gagaaugcacacagaagag

SEQ ID NO: 2010308 - RNA, 19 nt, Homo sapiens
  misc_RNA (1)...(19): siRNA sense strand
cagaccuucuuaaacauca

SEQ ID NO: 2010309 - RNA, 19 nt, Homo sapiens
  misc_RNA (1)...(19): siRNA sense strand
cgaggagaaagaagagaaa

SEQ ID NO: 2010310 - RNA, 19 nt, Homo sapiens
  misc_RNA (1)...(19): siRNA sense strand
gagaggcccugagccaacu

SEQ ID NO: 2010311 - RNA, 19 nt, Homo sapiens
  misc_RNA (1)...(19): siRNA sense strand
guccgagauugcagauuga

SEQ ID NO: 2010312 - RNA, 19 nt, Homo sapiens
  misc_RNA (1)...(19): siRNA sense strand
guacccagcacgaggaauc

SEQ ID NO: 2010313 - RNA, 19 nt, Homo sapiens
  misc_RNA (1)...(19): siRNA sense strand
guagcaaguccaaucuuuc

SEQ ID NO: 2010314 - RNA, 19 nt, Homo sapiens
  misc_RNA (1)...(19): siRNA sense strand
cagcuccaacuucaauaaa

SEQ ID NO: 2010315 - RNA, 19 nt, Homo sapiens
  misc_RNA (1)...(19): siRNA sense strand
agagaagccauauaagugu

SEQ ID NO: 2010316 - RNA, 19 nt, Homo sapiens
  misc_RNA (1)...(19): siRNA sense strand
cguuauauaugugcugaau

SEQ ID NO: 2010317 - RNA, 19 nt, Homo sapiens
  misc_RNA (1)...(19): siRNA sense strand
agaggcaggcuccaagaaa

SEQ ID NO: 2010318 - RNA, 19 nt, Homo sapiens
  misc_RNA (1)...(19): siRNA sense strand
caaaggggauauaauuucu

SEQ ID NO: 2010319 - RNA, 19 nt, Homo sapiens
  misc_RNA (1)...(19): siRNA sense strand
caacuccuccaaacgaaca

SEQ ID NO: 2010320 - RNA, 19 nt, Homo sapiens
  misc_RNA (1)...(19): siRNA sense strand
gcaggaguucgcucaagau

SEQ ID NO: 2010321 - RNA, 19 nt, Homo sapiens
  misc_RNA (1)...(19): siRNA sense strand
ucagagaaugcacacagaa

SEQ ID NO: 2010322 - RNA, 19 nt, Homo sapiens
  misc_RNA (1)...(19): siRNA sense strand
agagaaugcacacagaaga

SEQ ID NO: 2010323 - RNA, 19 nt, Homo sapiens
  misc_RNA (1)...(19): siRNA sense strand
caggagagagacguuauau

SEQ ID NO: 2010324 - RNA, 19 nt, Homo sapiens
  misc_RNA (1)...(19): siRNA sense strand
gaagccauauaaguguaag

SEQ ID NO: 2010325 - RNA, 19 nt, Homo sapiens
  misc_RNA (1)...(19): siRNA sense strand
ucacucuccucgaagaucu

SEQ ID NO: 2010326 - RNA, 19 nt, Homo sapiens
  misc_RNA (1)...(19): siRNA sense strand
ucuuaaacaucagagaaug

SEQ ID NO: 2010327 - RNA, 19 nt, Homo sapiens
  misc_RNA (1)...(19): siRNA sense strand
aaaccggugugggagaaga

SEQ ID NO: 2010328 - RNA, 19 nt, Homo sapiens
  misc_RNA (1)...(19): siRNA sense strand
ucucaacuccuccaaacga

SEQ ID NO: 2010329 - RNA, 19 nt, Homo sapiens
  misc_RNA (1)...(19): siRNA sense strand
ccacuacagaacacacuug

SEQ ID NO: 2010330 - RNA, 19 nt, Homo sapiens
  misc_RNA (1)...(19): siRNA sense strand
gcagugcguaaaccuugaa

SEQ ID NO: 2010331 - RNA, 19 nt, Homo sapiens
  misc_RNA (1)...(19): siRNA sense strand
uaaaccugaggccagcuua

SEQ ID NO: 2010332 - RNA, 19 nt, Homo sapiens
  misc_RNA (1)...(19): siRNA sense strand
ccucaggaacugcaaagga

SEQ ID NO: 2010333 - RNA, 19 nt, Homo sapiens
  misc_RNA (1)...(19): siRNA sense strand
ccuuaucaguguaacgaau

SEQ ID NO: 2010334 - RNA, 19 nt, Homo sapiens
  misc_RNA (1)...(19): siRNA sense strand
acagcuccaacuucaauaa

SEQ ID NO: 2010335 - RNA, 19 nt, Homo sapiens
  misc_RNA (1)...(19): siRNA sense strand
ggaggacagugggaugauu

SEQ ID NO: 2010336 - RNA, 19 nt, Homo sapiens
  misc_RNA (1)...(19): siRNA sense strand
gaggacagugggaugauuc

SEQ ID NO: 2010337 - RNA, 19 nt, Homo sapiens
  misc_RNA (1)...(19): siRNA sense strand
acaccaaggagcagauguu

SEQ ID NO: 2010338 - RNA, 19 nt, Homo sapiens
  misc_RNA (1)...(19): siRNA sense strand
cccgaugggucgucagcaa

SEQ ID NO: 2010339 - RNA, 19 nt, Homo sapiens
  misc_RNA (1)...(19): siRNA sense strand
gcacaccaaggagcagaug

SEQ ID NO: 2010340 - RNA, 19 nt, Homo sapiens
  misc_RNA (1)...(19): siRNA sense strand
gagacugacuguacuaaua

SEQ ID NO: 2010341 - RNA, 19 nt, Homo sapiens
  misc_RNA (1)...(19): siRNA sense strand
ggaaggagaugaacgagau

SEQ ID NO: 2010342 - RNA, 19 nt, Homo sapiens
  misc_RNA (1)...(19): siRNA sense strand
gggaacauguacuuauaua

SEQ ID NO: 2010343 - RNA, 19 nt, Homo sapiens
  misc_RNA (1)...(19): siRNA sense strand
ggacacauuucuagcaaga

SEQ ID NO: 2010344 - RNA, 19 nt, Homo sapiens
  misc_RNA (1)...(19): siRNA sense strand
gaucacaagcgaaaucaua

SEQ ID NO: 2010345 - RNA, 19 nt, Homo sapiens
  misc_RNA (1)...(19): siRNA sense strand
aaacggaacucuacagaca

SEQ ID NO: 2010346 - RNA, 19 nt, Homo sapiens
  misc_RNA (1)...(19): siRNA sense strand
gugggaacauguacuuaua

SEQ ID NO: 2010347 - RNA, 19 nt, Homo sapiens
  misc_RNA (1)...(19): siRNA sense strand
gggaaggccugguaaagug

SEQ ID NO: 2010348 - RNA, 19 nt, Homo sapiens
  misc_RNA (1)...(19): siRNA sense strand
uagagccgcugauauguaa

SEQ ID NO: 2010349 - RNA, 19 nt, Homo sapiens
  misc_RNA (1)...(19): siRNA sense strand
gccgggagcuguacuucua

SEQ ID NO: 2010350 - RNA, 19 nt, Homo sapiens
  misc_RNA (1)...(19): siRNA sense strand
auagacaagucacgaguua

SEQ ID NO: 2010351 - RNA, 19 nt, Homo sapiens
  misc_RNA (1)...(19): siRNA sense strand
caacagccuuccacauuca

SEQ ID NO: 2010352 - RNA, 19 nt, Homo sapiens
  misc_RNA (1)...(19): siRNA sense strand
gagcuguacuucuauaucu

SEQ ID NO: 2010353 - RNA, 19 nt, Homo sapiens
  misc_RNA (1)...(19): siRNA sense strand
aaagauagcacaugagaga

SEQ ID NO: 2010354 - RNA, 19 nt, Homo sapiens
  misc_RNA (1)...(19): siRNA sense strand
ggaacccucuccuuaagug

SEQ ID NO: 2010355 - RNA, 19 nt, Homo sapiens
  misc_RNA (1)...(19): siRNA sense strand
gcagagaucgagcaaauag

SEQ ID NO: 2010356 - RNA, 19 nt, Homo sapiens
  misc_RNA (1)...(19): siRNA sense strand
gagaugaacgagauuaaga

SEQ ID NO: 2010357 - RNA, 19 nt, Homo sapiens
  misc_RNA (1)...(19): siRNA sense strand
gcaaggacacacacaaaug

SEQ ID NO: 2010358 - RNA, 19 nt, Homo sapiens
  misc_RNA (1)...(19): siRNA sense strand
acacaaaugucaugaaugc

SEQ ID NO: 2010359 - RNA, 19 nt, Homo sapiens
  misc_RNA (1)...(19): siRNA sense strand
ggucaguguuguagcguuu

SEQ ID NO: 2010360 - RNA, 19 nt, Homo sapiens
  misc_RNA (1)...(19): siRNA sense strand
acacacaaaugucaugaau

SEQ ID NO: 2010361 - RNA, 19 nt, Homo sapiens
  misc_RNA (1)...(19): siRNA sense strand
gagcaaggacacacacaaa

SEQ ID NO: 2010362 - RNA, 19 nt, Homo sapiens
  misc_RNA (1)...(19): siRNA sense strand
uaugggaccuuacagaaga

SEQ ID NO: 2010363 - RNA, 19 nt, Homo sapiens
  misc_RNA (1)...(19): siRNA sense strand
agaagaaggugacccuaug

SEQ ID NO: 2010364 - RNA, 19 nt, Homo sapiens
  misc_RNA (1)...(19): siRNA sense strand
gcaacacuuucacuacaug

SEQ ID NO: 2010365 - RNA, 19 nt, Homo sapiens
  misc_RNA (1)...(19): siRNA sense strand
cgaguuaccugugucaaau

SEQ ID NO: 2010366 - RNA, 19 nt, Homo sapiens
  misc_RNA (1)...(19): siRNA sense strand
ccaacagccuuccacauuc

SEQ ID NO: 2010367 - RNA, 19 nt, Homo sapiens
  misc_RNA (1)...(19): siRNA sense strand
uggcagagaucgagcaaau

SEQ ID NO: 2010368 - RNA, 19 nt, Homo sapiens
  misc_RNA (1)...(19): siRNA sense strand
ggagaggcaccacgagaaa

SEQ ID NO: 2010369 - RNA, 19 nt, Homo sapiens
  misc_RNA (1)...(19): siRNA sense strand
agaaagaucacaagcgaaa

SEQ ID NO: 2010370 - RNA, 19 nt, Homo sapiens
  misc_RNA (1)...(19): siRNA sense strand
gggaaggucuguacaagcu

SEQ ID NO: 2010371 - RNA, 19 nt, Homo sapiens
  misc_RNA (1)...(19): siRNA sense strand
guacuucuauaucuacaag

SEQ ID NO: 2010372 - RNA, 19 nt, Homo sapiens
  misc_RNA (1)...(19): siRNA sense strand
agagaucgagcaaauagua

SEQ ID NO: 2010373 - RNA, 19 nt, Homo sapiens
  misc_RNA (1)...(19): siRNA sense strand
gagcugcacgguacgauga

SEQ ID NO: 2010374 - RNA, 19 nt, Homo sapiens
  misc_RNA (1)...(19): siRNA sense strand
gagauuaagacccaauuca

SEQ ID NO: 2010375 - RNA, 19 nt, Homo sapiens
  misc_RNA (1)...(19): siRNA sense strand
gaccgccucugcuucaaug

SEQ ID NO: 2010376 - RNA, 19 nt, Homo sapiens
  misc_RNA (1)...(19): siRNA sense strand
caaggacacacacaaaugu

SEQ ID NO: 2010377 - RNA, 19 nt, Homo sapiens
  misc_RNA (1)...(19): siRNA sense strand
gaagauguucccuuguuag

SEQ ID NO: 2010378 - RNA, 19 nt, Homo sapiens
  misc_RNA (1)...(19): siRNA sense strand
caggagggauuuauuugca

SEQ ID NO: 2010379 - RNA, 19 nt, Homo sapiens
  misc_RNA (1)...(19): siRNA sense strand
gcgaugaggacuuccaaga

SEQ ID NO: 2010380 - RNA, 19 nt, Homo sapiens
  misc_RNA (1)...(19): siRNA sense strand
gugacaaacugaaucuagu

SEQ ID NO: 2010381 - RNA, 19 nt, Homo sapiens
  misc_RNA (1)...(19): siRNA sense strand
gcacaaguccugggucagu

SEQ ID NO: 2010382 - RNA, 19 nt, Homo sapiens
  misc_RNA (1)...(19): siRNA sense strand
caaauuugcaacacuuuca

SEQ ID NO: 2010383 - RNA, 19 nt, Homo sapiens
  misc_RNA (1)...(19): siRNA sense strand
gaagcaaugggaacagugu

SEQ ID NO: 2010384 - RNA, 19 nt, Homo sapiens
  misc_RNA (1)...(19): siRNA sense strand
gugacagucugguccuuug

SEQ ID NO: 2010385 - RNA, 19 nt, Homo sapiens
  misc_RNA (1)...(19): siRNA sense strand
uuuguagacugccgaguaa

SEQ ID NO: 2010386 - RNA, 19 nt, Homo sapiens
  misc_RNA (1)...(19): siRNA sense strand
gaggagggaaggagaugaa

SEQ ID NO: 2010387 - RNA, 19 nt, Homo sapiens
  misc_RNA (1)...(19): siRNA sense strand
cgggagcuguacuucuaua

SEQ ID NO: 2010388 - RNA, 19 nt, Homo sapiens
  misc_RNA (1)...(19): siRNA sense strand
uguagacugccgaguaaua

SEQ ID NO: 2010389 - RNA, 19 nt, Homo sapiens
  misc_RNA (1)...(19): siRNA sense strand
gacugacuguacuaauauu

SEQ ID NO: 2010390 - RNA, 19 nt, Homo sapiens
  misc_RNA (1)...(19): siRNA sense strand
ugucaggagggauuuauuu

SEQ ID NO: 2010391 - RNA, 19 nt, Homo sapiens
  misc_RNA (1)...(19): siRNA sense strand
gcuuugccgugcacacuug

SEQ ID NO: 2010392 - RNA, 19 nt, Homo sapiens
  misc_RNA (1)...(19): siRNA sense strand
gagagacugacuguacuaa

SEQ ID NO: 2010393 - RNA, 19 nt, Homo sapiens
  misc_RNA (1)...(19): siRNA sense strand
caugagagacugacuguac

SEQ ID NO: 2010394 - RNA, 19 nt, Homo sapiens
  misc_RNA (1)...(19): siRNA sense strand
uccaacagccuuccacauu

SEQ ID NO: 2010395 - RNA, 19 nt, Homo sapiens
  misc_RNA (1)...(19): siRNA sense strand
ccaaacggaacucuacaga

SEQ ID NO: 2010396 - RNA, 19 nt, Homo sapiens
  misc_RNA (1)...(19): siRNA sense strand
gaagaaggugacccuaugg

SEQ ID NO: 2010397 - RNA, 19 nt, Homo sapiens
  misc_RNA (1)...(19): siRNA sense strand
guccgcgucuccuucguaa

SEQ ID NO: 2010398 - RNA, 19 nt, Homo sapiens
  misc_RNA (1)...(19): siRNA sense strand
agacugacuguacuaauau

SEQ ID NO: 2010399 - RNA, 19 nt, Homo sapiens
  misc_RNA (1)...(19): siRNA sense strand
cauagcaugggacacauuu

SEQ ID NO: 2010400 - RNA, 19 nt, Homo sapiens
  misc_RNA (1)...(19): siRNA sense strand
gagggaaggagaugaacga

SEQ ID NO: 2010401 - RNA, 19 nt, Homo sapiens
  misc_RNA (1)...(19): siRNA sense strand
uuauaccacuaguguagaa

SEQ ID NO: 2010402 - RNA, 19 nt, Homo sapiens
  misc_RNA (1)...(19): siRNA sense strand
gacagucugguccuuugua

SEQ ID NO: 2010403 - RNA, 19 nt, Homo sapiens
  misc_RNA (1)...(19): siRNA sense strand
gaaggagaugaacgagauu

SEQ ID NO: 2010404 - RNA, 19 nt, Homo sapiens
  misc_RNA (1)...(19): siRNA sense strand
gcaugggacacauuucuag

SEQ ID NO: 2010405 - RNA, 19 nt, Homo sapiens
  misc_RNA (1)...(19): siRNA sense strand
uuagagccgcugauaugua

SEQ ID NO: 2010406 - RNA, 19 nt, Homo sapiens
  misc_RNA (1)...(19): siRNA sense strand
ucaacgaguuugcuuucuc

SEQ ID NO: 2010407 - RNA, 19 nt, Homo sapiens
  misc_RNA (1)...(19): siRNA sense strand
uguuagagccgcugauaug

SEQ ID NO: 2010408 - RNA, 19 nt, Homo sapiens
  misc_RNA (1)...(19): siRNA sense strand
gcaagagcagugacaaacu

SEQ ID NO: 2010409 - RNA, 19 nt, Homo sapiens
  misc_RNA (1)...(19): siRNA sense strand
uuguagcguuugacccuua

SEQ ID NO: 2010410 - RNA, 19 nt, Homo sapiens
  misc_RNA (1)...(19): siRNA sense strand
gagcccggauggcaaguac

SEQ ID NO: 2010411 - RNA, 19 nt, Homo sapiens
  misc_RNA (1)...(19): siRNA sense strand
uagaagaaggugacccuau

SEQ ID NO: 2010412 - RNA, 19 nt, Homo sapiens
  misc_RNA (1)...(19): siRNA sense strand
ggagaugaacgagauuaag

SEQ ID NO: 2010413 - RNA, 19 nt, Homo sapiens
  misc_RNA (1)...(19): siRNA sense strand
uugcaacacuuucacuaca

SEQ ID NO: 2010414 - RNA, 19 nt, Homo sapiens
  misc_RNA (1)...(19): siRNA sense strand
ucaguguuguagcguuuga

SEQ ID NO: 2010415 - RNA, 19 nt, Homo sapiens
  misc_RNA (1)...(19): siRNA sense strand
ggagcuguacuucuauauc

SEQ ID NO: 2010416 - RNA, 19 nt, Homo sapiens
  misc_RNA (1)...(19): siRNA sense strand
aaagaucacaagcgaaauc

SEQ ID NO: 2010417 - RNA, 19 nt, Homo sapiens
  misc_RNA (1)...(19): siRNA sense strand
ccaaccgggugcccuucaa

SEQ ID NO: 2010418 - RNA, 19 nt, Homo sapiens
  misc_RNA (1)...(19): siRNA sense strand
ccagauggcaaguucuuag

SEQ ID NO: 2010419 - RNA, 19 nt, Homo sapiens
  misc_RNA (1)...(19): siRNA sense strand
uagcaagagcagugacaaa

SEQ ID NO: 2010420 - RNA, 19 nt, Homo sapiens
  misc_RNA (1)...(19): siRNA sense strand
ugggacacauuucuagcaa

SEQ ID NO: 2010421 - RNA, 19 nt, Homo sapiens
  misc_RNA (1)...(19): siRNA sense strand
cgagugggaacauguacuu

SEQ ID NO: 2010422 - RNA, 19 nt, Homo sapiens
  misc_RNA (1)...(19): siRNA sense strand
uggcagcgaugaggacuuc

SEQ ID NO: 2010423 - RNA, 19 nt, Homo sapiens
  misc_RNA (1)...(19): siRNA sense strand
uaccacuaguguagaagaa

SEQ ID NO: 2010424 - RNA, 19 nt, Homo sapiens
  misc_RNA (1)...(19): siRNA sense strand
guagacugccgaguaauag

SEQ ID NO: 2010425 - RNA, 19 nt, Homo sapiens
  misc_RNA (1)...(19): siRNA sense strand
gagugggaacauguacuua

SEQ ID NO: 2010426 - RNA, 19 nt, Homo sapiens
  misc_RNA (1)...(19): siRNA sense strand
ccuguguccucgaauggaa

SEQ ID NO: 2010427 - RNA, 19 nt, Homo sapiens
  misc_RNA (1)...(19): siRNA sense strand
ggaccuuacagaagauauc

SEQ ID NO: 2010428 - RNA, 19 nt, Homo sapiens
  misc_RNA (1)...(19): siRNA sense strand
aaggugacccuauggaguu

SEQ ID NO: 2010429 - RNA, 19 nt, Homo sapiens
  misc_RNA (1)...(19): siRNA sense strand
caacacccgggaacucugu

SEQ ID NO: 2010430 - RNA, 19 nt, Homo sapiens
  misc_RNA (1)...(19): siRNA sense strand
ugagagacugacuguacua

SEQ ID NO: 2010431 - RNA, 19 nt, Homo sapiens
  misc_RNA (1)...(19): siRNA sense strand
gaaagaucacaagcgaaau

SEQ ID NO: 2010432 - RNA, 19 nt, Homo sapiens
  misc_RNA (1)...(19): siRNA sense strand
caacacuuucacuacauga

SEQ ID NO: 2010433 - RNA, 19 nt, Homo sapiens
  misc_RNA (1)...(19): siRNA sense strand
cugcggguguucaacuuug

SEQ ID NO: 2010434 - RNA, 19 nt, Homo sapiens
  misc_RNA (1)...(19): siRNA sense strand
aaucauagcaugggacaca

SEQ ID NO: 2010435 - RNA, 19 nt, Homo sapiens
  misc_RNA (1)...(19): siRNA sense strand
ggcagagaucgagcaaaua

SEQ ID NO: 2010436 - RNA, 19 nt, Homo sapiens
  misc_RNA (1)...(19): siRNA sense strand
ggugacagucugguccuuu

SEQ ID NO: 2010437 - RNA, 19 nt, Homo sapiens
  misc_RNA (1)...(19): siRNA sense strand
gcugcacgguacgaugaaa

SEQ ID NO: 2010438 - RNA, 19 nt, Homo sapiens
  misc_RNA (1)...(19): siRNA sense strand
gucaggagggauuuauuug

SEQ ID NO: 2010439 - RNA, 19 nt, Homo sapiens
  misc_RNA (1)...(19): siRNA sense strand
caaaacggacccugcuaaa

SEQ ID NO: 2010440 - RNA, 19 nt, Homo sapiens
  misc_RNA (1)...(19): siRNA sense strand
gagacugacuguacuaaua

SEQ ID NO: 2010441 - RNA, 19 nt, Homo sapiens
  misc_RNA (1)...(19): siRNA sense strand
ggaaggagaugaacgagau

SEQ ID NO: 2010442 - RNA, 19 nt, Homo sapiens
  misc_RNA (1)...(19): siRNA sense strand
gggaacauguacuuauaua

SEQ ID NO: 2010443 - RNA, 19 nt, Homo sapiens
  misc_RNA (1)...(19): siRNA sense strand
ggacacauuucuagcaaga

SEQ ID NO: 2010444 - RNA, 19 nt, Homo sapiens
  misc_RNA (1)...(19): siRNA sense strand
gaucacaagcgaaaucaua

SEQ ID NO: 2010445 - RNA, 19 nt, Homo sapiens
  misc_RNA (1)...(19): siRNA sense strand
aaacggaacucuacagaca

SEQ ID NO: 2010446 - RNA, 19 nt, Homo sapiens
  misc_RNA (1)...(19): siRNA sense strand
gugggaacauguacuuaua

SEQ ID NO: 2010447 - RNA, 19 nt, Homo sapiens
  misc_RNA (1)...(19): siRNA sense strand
gggaaggccugguaaagug

SEQ ID NO: 2010448 - RNA, 19 nt, Homo sapiens
  misc_RNA (1)...(19): siRNA sense strand
uagagccgcugauauguaa

SEQ ID NO: 2010449 - RNA, 19 nt, Homo sapiens
  misc_RNA (1)...(19): siRNA sense strand
gccgggagcuguacuucua

SEQ ID NO: 2010450 - RNA, 19 nt, Homo sapiens
  misc_RNA (1)...(19): siRNA sense strand
auagacaagucacgaguua

SEQ ID NO: 2010451 - RNA, 19 nt, Homo sapiens
  misc_RNA (1)...(19): siRNA sense strand
caacagccuuccacauuca

SEQ ID NO: 2010452 - RNA, 19 nt, Homo sapiens
  misc_RNA (1)...(19): siRNA sense strand
gagcuguacuucuauaucu

SEQ ID NO: 2010453 - RNA, 19 nt, Homo sapiens
  misc_RNA (1)...(19): siRNA sense strand
aaagauagcacaugagaga

SEQ ID NO: 2010454 - RNA, 19 nt, Homo sapiens
  misc_RNA (1)...(19): siRNA sense strand
ggaacccucuccuuaagug

SEQ ID NO: 2010455 - RNA, 19 nt, Homo sapiens
  misc_RNA (1)...(19): siRNA sense strand
gcagagaucgagcaaauag

SEQ ID NO: 2010456 - RNA, 19 nt, Homo sapiens
  misc_RNA (1)...(19): siRNA sense strand
gagaugaacgagauuaaga

SEQ ID NO: 2010457 - RNA, 19 nt, Homo sapiens
  misc_RNA (1)...(19): siRNA sense strand
gcaaggacacacacaaaug

SEQ ID NO: 2010458 - RNA, 19 nt, Homo sapiens
  misc_RNA (1)...(19): siRNA sense strand
acacaaaugucaugaaugc

SEQ ID NO: 2010459 - RNA, 19 nt, Homo sapiens
  misc_RNA (1)...(19): siRNA sense strand
ggucaguguuguagcguuu

SEQ ID NO: 2010460 - RNA, 19 nt, Homo sapiens
  misc_RNA (1)...(19): siRNA sense strand
acacacaaaugucaugaau

SEQ ID NO: 2010461 - RNA, 19 nt, Homo sapiens
  misc_RNA (1)...(19): siRNA sense strand
gagcaaggacacacacaaa

SEQ ID NO: 2010462 - RNA, 19 nt, Homo sapiens
  misc_RNA (1)...(19): siRNA sense strand
uaugggaccuuacagaaga

SEQ ID NO: 2010463 - RNA, 19 nt, Homo sapiens
  misc_RNA (1)...(19): siRNA sense strand
agaagaaggugacccuaug

SEQ ID NO: 2010464 - RNA, 19 nt, Homo sapiens
  misc_RNA (1)...(19): siRNA sense strand
gcaacacuuucacuacaug

SEQ ID NO: 2010465 - RNA, 19 nt, Homo sapiens
  misc_RNA (1)...(19): siRNA sense strand
cgaguuaccugugucaaau

SEQ ID NO: 2010466 - RNA, 19 nt, Homo sapiens
  misc_RNA (1)...(19): siRNA sense strand
ccaacagccuuccacauuc

SEQ ID NO: 2010467 - RNA, 19 nt, Homo sapiens
  misc_RNA (1)...(19): siRNA sense strand
uggcagagaucgagcaaau

SEQ ID NO: 2010468 - RNA, 19 nt, Homo sapiens
  misc_RNA (1)...(19): siRNA sense strand
ggagaggcaccacgagaaa

SEQ ID NO: 2010469 - RNA, 19 nt, Homo sapiens
  misc_RNA (1)...(19): siRNA sense strand
agaaagaucacaagcgaaa

SEQ ID NO: 2010470 - RNA, 19 nt, Homo sapiens
  misc_RNA (1)...(19): siRNA sense strand
gggaaggucuguacaagcu

SEQ ID NO: 2010471 - RNA, 19 nt, Homo sapiens
  misc_RNA (1)...(19): siRNA sense strand
guacuucuauaucuacaag

SEQ ID NO: 2010472 - RNA, 19 nt, Homo sapiens
  misc_RNA (1)...(19): siRNA sense strand
agagaucgagcaaauagua

SEQ ID NO: 2010473 - RNA, 19 nt, Homo sapiens
  misc_RNA (1)...(19): siRNA sense strand
gagcugcacgguacgauga

SEQ ID NO: 2010474 - RNA, 19 nt, Homo sapiens
  misc_RNA (1)...(19): siRNA sense strand
gagauuaagacccaauuca

SEQ ID NO: 2010475 - RNA, 19 nt, Homo sapiens
  misc_RNA (1)...(19): siRNA sense strand
gaccgccucugcuucaaug

SEQ ID NO: 2010476 - RNA, 19 nt, Homo sapiens
  misc_RNA (1)...(19): siRNA sense strand
caaggacacacacaaaugu

SEQ ID NO: 2010477 - RNA, 19 nt, Homo sapiens
  misc_RNA (1)...(19): siRNA sense strand
gaagauguucccuuguuag

SEQ ID NO: 2010478 - RNA, 19 nt, Homo sapiens
  misc_RNA (1)...(19): siRNA sense strand
caggagggauuuauuugca

SEQ ID NO: 2010479 - RNA, 19 nt, Homo sapiens
  misc_RNA (1)...(19): siRNA sense strand
gcgaugaggacuuccaaga

SEQ ID NO: 2010480 - RNA, 19 nt, Homo sapiens
  misc_RNA (1)...(19): siRNA sense strand
gugacaaacugaaucuagu

SEQ ID NO: 2010481 - RNA, 19 nt, Homo sapiens
  misc_RNA (1)...(19): siRNA sense strand
gcacaaguccugggucagu

SEQ ID NO: 2010482 - RNA, 19 nt, Homo sapiens
  misc_RNA (1)...(19): siRNA sense strand
caaauuugcaacacuuuca

SEQ ID NO: 2010483 - RNA, 19 nt, Homo sapiens
  misc_RNA (1)...(19): siRNA sense strand
gaagcaaugggaacagugu

SEQ ID NO: 2010484 - RNA, 19 nt, Homo sapiens
  misc_RNA (1)...(19): siRNA sense strand
gugacagucugguccuuug

SEQ ID NO: 2010485 - RNA, 19 nt, Homo sapiens
  misc_RNA (1)...(19): siRNA sense strand
uuuguagacugccgaguaa

SEQ ID NO: 2010486 - RNA, 19 nt, Homo sapiens
  misc_RNA (1)...(19): siRNA sense strand
gaggagggaaggagaugaa

SEQ ID NO: 2010487 - RNA, 19 nt, Homo sapiens
  misc_RNA (1)...(19): siRNA sense strand
cgggagcuguacuucuaua

SEQ ID NO: 2010488 - RNA, 19 nt, Homo sapiens
  misc_RNA (1)...(19): siRNA sense strand
uguagacugccgaguaaua

SEQ ID NO: 2010489 - RNA, 19 nt, Homo sapiens
  misc_RNA (1)...(19): siRNA sense strand
gacugacuguacuaauauu

SEQ ID NO: 2010490 - RNA, 19 nt, Homo sapiens
  misc_RNA (1)...(19): siRNA sense strand
ugucaggagggauuuauuu

SEQ ID NO: 2010491 - RNA, 19 nt, Homo sapiens
  misc_RNA (1)...(19): siRNA sense strand
gcuuugccgugcacacuug

SEQ ID NO: 2010492 - RNA, 19 nt, Homo sapiens
  misc_RNA (1)...(19): siRNA sense strand
gagagacugacuguacuaa

SEQ ID NO: 2010493 - RNA, 19 nt, Homo sapiens
  misc_RNA (1)...(19): siRNA sense strand
caugagagacugacuguac

SEQ ID NO: 2010494 - RNA, 19 nt, Homo sapiens
  misc_RNA (1)...(19): siRNA sense strand
uccaacagccuuccacauu

SEQ ID NO: 2010495 - RNA, 19 nt, Homo sapiens
  misc_RNA (1)...(19): siRNA sense strand
ccaaacggaacucuacaga

SEQ ID NO: 2010496 - RNA, 19 nt, Homo sapiens
  misc_RNA (1)...(19): siRNA sense strand
gaagaaggugacccuaugg

SEQ ID NO: 2010497 - RNA, 19 nt, Homo sapiens
  misc_RNA (1)...(19): siRNA sense strand
guccgcgucuccuucguaa

SEQ ID NO: 2010498 - RNA, 19 nt, Homo sapiens
  misc_RNA (1)...(19): siRNA sense strand
agacugacuguacuaauau

SEQ ID NO: 2010499 - RNA, 19 nt, Homo sapiens
  misc_RNA (1)...(19): siRNA sense strand
cauagcaugggacacauuu

SEQ ID NO: 2010500 - RNA, 19 nt, Homo sapiens
  misc_RNA (1)...(19): siRNA sense strand
gagggaaggagaugaacga

SEQ ID NO: 2010501 - RNA, 19 nt, Homo sapiens
  misc_RNA (1)...(19): siRNA sense strand
uuauaccacuaguguagaa

SEQ ID NO: 2010502 - RNA, 19 nt, Homo sapiens
  misc_RNA (1)...(19): siRNA sense strand
gacagucugguccuuugua

SEQ ID NO: 2010503 - RNA, 19 nt, Homo sapiens
  misc_RNA (1)...(19): siRNA sense strand
gaaggagaugaacgagauu

SEQ ID NO: 2010504 - RNA, 19 nt, Homo sapiens
  misc_RNA (1)...(19): siRNA sense strand
gcaugggacacauuucuag

SEQ ID NO: 2010505 - RNA, 19 nt, Homo sapiens
  misc_RNA (1)...(19): siRNA sense strand
uuagagccgcugauaugua

SEQ ID NO: 2010506 - RNA, 19 nt, Homo sapiens
  misc_RNA (1)...(19): siRNA sense strand
ucaacgaguuugcuuucuc

SEQ ID NO: 2010507 - RNA, 19 nt, Homo sapiens
  misc_RNA (1)...(19): siRNA sense strand
uguuagagccgcugauaug

SEQ ID NO: 2010508 - RNA, 19 nt, Homo sapiens
  misc_RNA (1)...(19): siRNA sense strand
gcaagagcagugacaaacu

SEQ ID NO: 2010509 - RNA, 19 nt, Homo sapiens
  misc_RNA (1)...(19): siRNA sense strand
uuguagcguuugacccuua

SEQ ID NO: 2010510 - RNA, 19 nt, Homo sapiens
  misc_RNA (1)...(19): siRNA sense strand
gagcccggauggcaaguac

SEQ ID NO: 2010511 - RNA, 19 nt, Homo sapiens
  misc_RNA (1)...(19): siRNA sense strand
uagaagaaggugacccuau

SEQ ID NO: 2010512 - RNA, 19 nt, Homo sapiens
  misc_RNA (1)...(19): siRNA sense strand
ggagaugaacgagauuaag

SEQ ID NO: 2010513 - RNA, 19 nt, Homo sapiens
  misc_RNA (1)...(19): siRNA sense strand
uugcaacacuuucacuaca

SEQ ID NO: 2010514 - RNA, 19 nt, Homo sapiens
  misc_RNA (1)...(19): siRNA sense strand
ucaguguuguagcguuuga

SEQ ID NO: 2010515 - RNA, 19 nt, Homo sapiens
  misc_RNA (1)...(19): siRNA sense strand
ggagcuguacuucuauauc

SEQ ID NO: 2010516 - RNA, 19 nt, Homo sapiens
  misc_RNA (1)...(19): siRNA sense strand
aaagaucacaagcgaaauc

SEQ ID NO: 2010517 - RNA, 19 nt, Homo sapiens
  misc_RNA (1)...(19): siRNA sense strand
ccaaccgggugcccuucaa

SEQ ID NO: 2010518 - RNA, 19 nt, Homo sapiens
  misc_RNA (1)...(19): siRNA sense strand
ccagauggcaaguucuuag

SEQ ID NO: 2010519 - RNA, 19 nt, Homo sapiens
  misc_RNA (1)...(19): siRNA sense strand
uagcaagagcagugacaaa

SEQ ID NO: 2010520 - RNA, 19 nt, Homo sapiens
  misc_RNA (1)...(19): siRNA sense strand
ugggacacauuucuagcaa

SEQ ID NO: 2010521 - RNA, 19 nt, Homo sapiens
  misc_RNA (1)...(19): siRNA sense strand
cgagugggaacauguacuu

SEQ ID NO: 2010522 - RNA, 19 nt, Homo sapiens
  misc_RNA (1)...(19): siRNA sense strand
uggcagcgaugaggacuuc

SEQ ID NO: 2010523 - RNA, 19 nt, Homo sapiens
  misc_RNA (1)...(19): siRNA sense strand
uaccacuaguguagaagaa

SEQ ID NO: 2010524 - RNA, 19 nt, Homo sapiens
  misc_RNA (1)...(19): siRNA sense strand
guagacugccgaguaauag

SEQ ID NO: 2010525 - RNA, 19 nt, Homo sapiens
  misc_RNA (1)...(19): siRNA sense strand
gagugggaacauguacuua

SEQ ID NO: 2010526 - RNA, 19 nt, Homo sapiens
  misc_RNA (1)...(19): siRNA sense strand
ccuguguccucgaauggaa

SEQ ID NO: 2010527 - RNA, 19 nt, Homo sapiens
  misc_RNA (1)...(19): siRNA sense strand
ggaccuuacagaagauauc

SEQ ID NO: 2010528 - RNA, 19 nt, Homo sapiens
  misc_RNA (1)...(19): siRNA sense strand
aaggugacccuauggaguu

SEQ ID NO: 2010529 - RNA, 19 nt, Homo sapiens
  misc_RNA (1)...(19): siRNA sense strand
caacacccgggaacucugu

SEQ ID NO: 2010530 - RNA, 19 nt, Homo sapiens
  misc_RNA (1)...(19): siRNA sense strand
ugagagacugacuguacua

SEQ ID NO: 2010531 - RNA, 19 nt, Homo sapiens
  misc_RNA (1)...(19): siRNA sense strand
gaaagaucacaagcgaaau

SEQ ID NO: 2010532 - RNA, 19 nt, Homo sapiens
  misc_RNA (1)...(19): siRNA sense strand
caacacuuucacuacauga

SEQ ID NO: 2010533 - RNA, 19 nt, Homo sapiens
  misc_RNA (1)...(19): siRNA sense strand
cugcggguguucaacuuug

SEQ ID NO: 2010534 - RNA, 19 nt, Homo sapiens
  misc_RNA (1)...(19): siRNA sense strand
aaucauagcaugggacaca

SEQ ID NO: 2010535 - RNA, 19 nt, Homo sapiens
  misc_RNA (1)...(19): siRNA sense strand
ggcagagaucgagcaaaua

SEQ ID NO: 2010536 - RNA, 19 nt, Homo sapiens
  misc_RNA (1)...(19): siRNA sense strand
ggugacagucugguccuuu

SEQ ID NO: 2010537 - RNA, 19 nt, Homo sapiens
  misc_RNA (1)...(19): siRNA sense strand
gcugcacgguacgaugaaa

SEQ ID NO: 2010538 - RNA, 19 nt, Homo sapiens
  misc_RNA (1)...(19): siRNA sense strand
gucaggagggauuuauuug

SEQ ID NO: 2010539 - RNA, 19 nt, Homo sapiens
  misc_RNA (1)...(19): siRNA sense strand
caaaacggacccugcuaaa

SEQ ID NO: 2010540 - RNA, 19 nt, Homo sapiens
  misc_RNA (1)...(19): siRNA sense strand
gagacugacuguacuaaua

SEQ ID NO: 2010541 - RNA, 19 nt, Homo sapiens
  misc_RNA (1)...(19): siRNA sense strand
gggaacauguacuuauaua

SEQ ID NO: 2010542 - RNA, 19 nt, Homo sapiens
  misc_RNA (1)...(19): siRNA sense strand
ggacacauuucuagcaaga

SEQ ID NO: 2010543 - RNA, 19 nt, Homo sapiens
  misc_RNA (1)...(19): siRNA sense strand
gaucacaagcgaaaucaua

SEQ ID NO: 2010544 - RNA, 19 nt, Homo sapiens
  misc_RNA (1)...(19): siRNA sense strand
aaacggaacucuacagaca

SEQ ID NO: 2010545 - RNA, 19 nt, Homo sapiens
  misc_RNA (1)...(19): siRNA sense strand
gugggaacauguacuuaua

SEQ ID NO: 2010546 - RNA, 19 nt, Homo sapiens
  misc_RNA (1)...(19): siRNA sense strand
gggaaggccugguaaagug

SEQ ID NO: 2010547 - RNA, 19 nt, Homo sapiens
  misc_RNA (1)...(19): siRNA sense strand
uagagccgcugauauguaa

SEQ ID NO: 2010548 - RNA, 19 nt, Homo sapiens
  misc_RNA (1)...(19): siRNA sense strand
auagacaagucacgaguua

SEQ ID NO: 2010549 - RNA, 19 nt, Homo sapiens
  misc_RNA (1)...(19): siRNA sense strand
gccgggagcuguacuucua

SEQ ID NO: 2010550 - RNA, 19 nt, Homo sapiens
  misc_RNA (1)...(19): siRNA sense strand
caacagccuuccacauuca

SEQ ID NO: 2010551 - RNA, 19 nt, Homo sapiens
  misc_RNA (1)...(19): siRNA sense strand
aaagauagcacaugagaga

SEQ ID NO: 2010552 - RNA, 19 nt, Homo sapiens
  misc_RNA (1)...(19): siRNA sense strand
gagcuguacuucuauaucu

SEQ ID NO: 2010553 - RNA, 19 nt, Homo sapiens
  misc_RNA (1)...(19): siRNA sense strand
ggaacccucuccuuaagug

SEQ ID NO: 2010554 - RNA, 19 nt, Homo sapiens
  misc_RNA (1)...(19): siRNA sense strand
gcagagaucgagcaaauag

SEQ ID NO: 2010555 - RNA, 19 nt, Homo sapiens
  misc_RNA (1)...(19): siRNA sense strand
gcaaggacacacacaaaug

SEQ ID NO: 2010556 - RNA, 19 nt, Homo sapiens
  misc_RNA (1)...(19): siRNA sense strand
acacaaaugucaugaaugc

SEQ ID NO: 2010557 - RNA, 19 nt, Homo sapiens
  misc_RNA (1)...(19): siRNA sense strand
ggucaguguuguagcguuu

SEQ ID NO: 2010558 - RNA, 19 nt, Homo sapiens
  misc_RNA (1)...(19): siRNA sense strand
acacacaaaugucaugaau

SEQ ID NO: 2010559 - RNA, 19 nt, Homo sapiens
  misc_RNA (1)...(19): siRNA sense strand
gagcaaggacacacacaaa

SEQ ID NO: 2010560 - RNA, 19 nt, Homo sapiens
  misc_RNA (1)...(19): siRNA sense strand
uaugggaccuuacagaaga

SEQ ID NO: 2010561 - RNA, 19 nt, Homo sapiens
  misc_RNA (1)...(19): siRNA sense strand
agaagaaggugacccuaug

SEQ ID NO: 2010562 - RNA, 19 nt, Homo sapiens
  misc_RNA (1)...(19): siRNA sense strand
gcaacacuuucacuacaug

SEQ ID NO: 2010563 - RNA, 19 nt, Homo sapiens
  misc_RNA (1)...(19): siRNA sense strand
uggcagagaucgagcaaau

SEQ ID NO: 2010564 - RNA, 19 nt, Homo sapiens
  misc_RNA (1)...(19): siRNA sense strand
ccaacagccuuccacauuc

SEQ ID NO: 2010565 - RNA, 19 nt, Homo sapiens
  misc_RNA (1)...(19): siRNA sense strand
cgaguuaccugugucaaau

SEQ ID NO: 2010566 - RNA, 19 nt, Homo sapiens
  misc_RNA (1)...(19): siRNA sense strand
ggagaggcaccacgagaaa

SEQ ID NO: 2010567 - RNA, 19 nt, Homo sapiens
  misc_RNA (1)...(19): siRNA sense strand
agaaagaucacaagcgaaa

SEQ ID NO: 2010568 - RNA, 19 nt, Homo sapiens
  misc_RNA (1)...(19): siRNA sense strand
guacuucuauaucuacaag

SEQ ID NO: 2010569 - RNA, 19 nt, Homo sapiens
  misc_RNA (1)...(19): siRNA sense strand
agagaucgagcaaauagua

SEQ ID NO: 2010570 - RNA, 19 nt, Homo sapiens
  misc_RNA (1)...(19): siRNA sense strand
gagcugcacgguacgauga

SEQ ID NO: 2010571 - RNA, 19 nt, Homo sapiens
  misc_RNA (1)...(19): siRNA sense strand
caaggacacacacaaaugu

SEQ ID NO: 2010572 - RNA, 19 nt, Homo sapiens
  misc_RNA (1)...(19): siRNA sense strand
gaagauguucccuuguuag

SEQ ID NO: 2010573 - RNA, 19 nt, Homo sapiens
  misc_RNA (1)...(19): siRNA sense strand
caggagggauuuauuugca

SEQ ID NO: 2010574 - RNA, 19 nt, Homo sapiens
  misc_RNA (1)...(19): siRNA sense strand
gcgaugaggacuuccaaga

SEQ ID NO: 2010575 - RNA, 19 nt, Homo sapiens
  misc_RNA (1)...(19): siRNA sense strand
gugacaaacugaaucuagu

SEQ ID NO: 2010576 - RNA, 19 nt, Homo sapiens
  misc_RNA (1)...(19): siRNA sense strand
gcacaaguccugggucagu

SEQ ID NO: 2010577 - RNA, 19 nt, Homo sapiens
  misc_RNA (1)...(19): siRNA sense strand
caaauuugcaacacuuuca

SEQ ID NO: 2010578 - RNA, 19 nt, Homo sapiens
  misc_RNA (1)...(19): siRNA sense strand
gaagcaaugggaacagugu

SEQ ID NO: 2010579 - RNA, 19 nt, Homo sapiens
  misc_RNA (1)...(19): siRNA sense strand
gugacagucugguccuuug

SEQ ID NO: 2010580 - RNA, 19 nt, Homo sapiens
  misc_RNA (1)...(19): siRNA sense strand
uuuguagacugccgaguaa

SEQ ID NO: 2010581 - RNA, 19 nt, Homo sapiens
  misc_RNA (1)...(19): siRNA sense strand
uguagacugccgaguaaua

SEQ ID NO: 2010582 - RNA, 19 nt, Homo sapiens
  misc_RNA (1)...(19): siRNA sense strand
cgggagcuguacuucuaua

SEQ ID NO: 2010583 - RNA, 19 nt, Homo sapiens
  misc_RNA (1)...(19): siRNA sense strand
gacugacuguacuaauauu

SEQ ID NO: 2010584 - RNA, 19 nt, Homo sapiens
  misc_RNA (1)...(19): siRNA sense strand
ugucaggagggauuuauuu

SEQ ID NO: 2010585 - RNA, 19 nt, Homo sapiens
  misc_RNA (1)...(19): siRNA sense strand
gaagaaggugacccuaugg

SEQ ID NO: 2010586 - RNA, 19 nt, Homo sapiens
  misc_RNA (1)...(19): siRNA sense strand
gagagacugacuguacuaa

SEQ ID NO: 2010587 - RNA, 19 nt, Homo sapiens
  misc_RNA (1)...(19): siRNA sense strand
caugagagacugacuguac

SEQ ID NO: 2010588 - RNA, 19 nt, Homo sapiens
  misc_RNA (1)...(19): siRNA sense strand
uccaacagccuuccacauu

SEQ ID NO: 2010589 - RNA, 19 nt, Homo sapiens
  misc_RNA (1)...(19): siRNA sense strand
ccaaacggaacucuacaga

SEQ ID NO: 2010590 - RNA, 19 nt, Homo sapiens
  misc_RNA (1)...(19): siRNA sense strand
gcuuugccgugcacacuug

SEQ ID NO: 2010591 - RNA, 19 nt, Homo sapiens
  misc_RNA (1)...(19): siRNA sense strand
uuauaccacuaguguagaa

SEQ ID NO: 2010592 - RNA, 19 nt, Homo sapiens
  misc_RNA (1)...(19): siRNA sense strand
agacugacuguacuaauau

SEQ ID NO: 2010593 - RNA, 19 nt, Homo sapiens
  misc_RNA (1)...(19): siRNA sense strand
cauagcaugggacacauuu

SEQ ID NO: 2010594 - RNA, 19 nt, Homo sapiens
  misc_RNA (1)...(19): siRNA sense strand
gacagucugguccuuugua

SEQ ID NO: 2010595 - RNA, 19 nt, Homo sapiens
  misc_RNA (1)...(19): siRNA sense strand
gcaugggacacauuucuag

SEQ ID NO: 2010596 - RNA, 19 nt, Homo sapiens
  misc_RNA (1)...(19): siRNA sense strand
uuagagccgcugauaugua

SEQ ID NO: 2010597 - RNA, 19 nt, Homo sapiens
  misc_RNA (1)...(19): siRNA sense strand
gagcccggauggcaaguac

SEQ ID NO: 2010598 - RNA, 19 nt, Homo sapiens
  misc_RNA (1)...(19): siRNA sense strand
ucaacgaguuugcuuucuc

SEQ ID NO: 2010599 - RNA, 19 nt, Homo sapiens
  misc_RNA (1)...(19): siRNA sense strand
uguuagagccgcugauaug

SEQ ID NO: 2010600 - RNA, 19 nt, Homo sapiens
  misc_RNA (1)...(19): siRNA sense strand
gcaagagcagugacaaacu

SEQ ID NO: 2010601 - RNA, 19 nt, Homo sapiens
  misc_RNA (1)...(19): siRNA sense strand
uuguagcguuugacccuua

SEQ ID NO: 2010602 - RNA, 19 nt, Homo sapiens
  misc_RNA (1)...(19): siRNA sense strand
uagaagaaggugacccuau

SEQ ID NO: 2010603 - RNA, 19 nt, Homo sapiens
  misc_RNA (1)...(19): siRNA sense strand
uugcaacacuuucacuaca

SEQ ID NO: 2010604 - RNA, 19 nt, Homo sapiens
  misc_RNA (1)...(19): siRNA sense strand
ucaguguuguagcguuuga

SEQ ID NO: 2010605 - RNA, 19 nt, Homo sapiens
  misc_RNA (1)...(19): siRNA sense strand
aaagaucacaagcgaaauc

SEQ ID NO: 2010606 - RNA, 19 nt, Homo sapiens
  misc_RNA (1)...(19): siRNA sense strand
ggagcuguacuucuauauc

SEQ ID NO: 2010607 - RNA, 19 nt, Homo sapiens
  misc_RNA (1)...(19): siRNA sense strand
guagacugccgaguaauag

SEQ ID NO: 2010608 - RNA, 19 nt, Homo sapiens
  misc_RNA (1)...(19): siRNA sense strand
uagcaagagcagugacaaa

SEQ ID NO: 2010609 - RNA, 19 nt, Homo sapiens
  misc_RNA (1)...(19): siRNA sense strand
ugggacacauuucuagcaa

SEQ ID NO: 2010610 - RNA, 19 nt, Homo sapiens
  misc_RNA (1)...(19): siRNA sense strand
cgagugggaacauguacuu

SEQ ID NO: 2010611 - RNA, 19 nt, Homo sapiens
  misc_RNA (1)...(19): siRNA sense strand
uggcagcgaugaggacuuc

SEQ ID NO: 2010612 - RNA, 19 nt, Homo sapiens
  misc_RNA (1)...(19): siRNA sense strand
uaccacuaguguagaagaa

SEQ ID NO: 2010613 - RNA, 19 nt, Homo sapiens
  misc_RNA (1)...(19): siRNA sense strand
ccagauggcaaguucuuag

SEQ ID NO: 2010614 - RNA, 19 nt, Homo sapiens
  misc_RNA (1)...(19): siRNA sense strand
aaggugacccuauggaguu

SEQ ID NO: 2010615 - RNA, 19 nt, Homo sapiens
  misc_RNA (1)...(19): siRNA sense strand
ccuguguccucgaauggaa

SEQ ID NO: 2010616 - RNA, 19 nt, Homo sapiens
  misc_RNA (1)...(19): siRNA sense strand
ggaccuuacagaagauauc

SEQ ID NO: 2010617 - RNA, 19 nt, Homo sapiens
  misc_RNA (1)...(19): siRNA sense strand
gagugggaacauguacuua

SEQ ID NO: 2010618 - RNA, 19 nt, Homo sapiens
  misc_RNA (1)...(19): siRNA sense strand
caacacccgggaacucugu

SEQ ID NO: 2010619 - RNA, 19 nt, Homo sapiens
  misc_RNA (1)...(19): siRNA sense strand
ugagagacugacuguacua

SEQ ID NO: 2010620 - RNA, 19 nt, Homo sapiens
  misc_RNA (1)...(19): siRNA sense strand
gaaagaucacaagcgaaau

SEQ ID NO: 2010621 - RNA, 19 nt, Homo sapiens
  misc_RNA (1)...(19): siRNA sense strand
caacacuuucacuacauga

SEQ ID NO: 2010622 - RNA, 19 nt, Homo sapiens
  misc_RNA (1)...(19): siRNA sense strand
ggugacagucugguccuuu

SEQ ID NO: 2010623 - RNA, 19 nt, Homo sapiens
  misc_RNA (1)...(19): siRNA sense strand
cugcggguguucaacuuug

SEQ ID NO: 2010624 - RNA, 19 nt, Homo sapiens
  misc_RNA (1)...(19): siRNA sense strand
aaucauagcaugggacaca

SEQ ID NO: 2010625 - RNA, 19 nt, Homo sapiens
  misc_RNA (1)...(19): siRNA sense strand
ggcagagaucgagcaaaua

SEQ ID NO: 2010626 - RNA, 19 nt, Homo sapiens
  misc_RNA (1)...(19): siRNA sense strand
gcugcacgguacgaugaaa

SEQ ID NO: 2010627 - RNA, 19 nt, Homo sapiens
  misc_RNA (1)...(19): siRNA sense strand
gucaggagggauuuauuug

SEQ ID NO: 2010628 - RNA, 19 nt, Homo sapiens
  misc_RNA (1)...(19): siRNA sense strand
agaggcaccacgagaaaga

SEQ ID NO: 2010629 - RNA, 19 nt, Homo sapiens
  misc_RNA (1)...(19): siRNA sense strand
caaaacggacccugcuaaa

SEQ ID NO: 2010630 - RNA, 19 nt, Homo sapiens
  misc_RNA (1)...(19): siRNA sense strand
ccucaacgaguuugcuuuc

SEQ ID NO: 2010631 - RNA, 19 nt, Homo sapiens
  misc_RNA (1)...(19): siRNA sense strand
guauagucacugcuuguca

SEQ ID NO: 2010632 - RNA, 19 nt, Homo sapiens
  misc_RNA (1)...(19): siRNA sense strand
ccuuauaccacuaguguag

SEQ ID NO: 2010633 - RNA, 19 nt, Homo sapiens
  misc_RNA (1)...(19): siRNA sense strand
cuuuguagacugccgagua

SEQ ID NO: 2010634 - RNA, 19 nt, Homo sapiens
  misc_RNA (1)...(19): siRNA sense strand
ccaaaacggacccugcuaa

SEQ ID NO: 2010635 - RNA, 19 nt, Homo sapiens
  misc_RNA (1)...(19): siRNA sense strand
agucacgaguuaccugugu

SEQ ID NO: 2010636 - RNA, 19 nt, Homo sapiens
  misc_RNA (1)...(19): siRNA sense strand
gagacugacuguacuaaua

SEQ ID NO: 2010637 - RNA, 19 nt, Homo sapiens
  misc_RNA (1)...(19): siRNA sense strand
ggaaggagaugaacgagau

SEQ ID NO: 2010638 - RNA, 19 nt, Homo sapiens
  misc_RNA (1)...(19): siRNA sense strand
gggaacauguacuuauaua

SEQ ID NO: 2010639 - RNA, 19 nt, Homo sapiens
  misc_RNA (1)...(19): siRNA sense strand
ggacacauuucuagcaaga

SEQ ID NO: 2010640 - RNA, 19 nt, Homo sapiens
  misc_RNA (1)...(19): siRNA sense strand
gaucacaagcgaaaucaua

SEQ ID NO: 2010641 - RNA, 19 nt, Homo sapiens
  misc_RNA (1)...(19): siRNA sense strand
aaacggaacucuacagaca

SEQ ID NO: 2010642 - RNA, 19 nt, Homo sapiens
  misc_RNA (1)...(19): siRNA sense strand
gugggaacauguacuuaua

SEQ ID NO: 2010643 - RNA, 19 nt, Homo sapiens
  misc_RNA (1)...(19): siRNA sense strand
gggaaggccugguaaagug

SEQ ID NO: 2010644 - RNA, 19 nt, Homo sapiens
  misc_RNA (1)...(19): siRNA sense strand
uagagccgcugauauguaa

SEQ ID NO: 2010645 - RNA, 19 nt, Homo sapiens
  misc_RNA (1)...(19): siRNA sense strand
gccgggagcuguacuucua

SEQ ID NO: 2010646 - RNA, 19 nt, Homo sapiens
  misc_RNA (1)...(19): siRNA sense strand
auagacaagucacgaguua

SEQ ID NO: 2010647 - RNA, 19 nt, Homo sapiens
  misc_RNA (1)...(19): siRNA sense strand
caacagccuuccacauuca

SEQ ID NO: 2010648 - RNA, 19 nt, Homo sapiens
  misc_RNA (1)...(19): siRNA sense strand
gagcuguacuucuauaucu

SEQ ID NO: 2010649 - RNA, 19 nt, Homo sapiens
  misc_RNA (1)...(19): siRNA sense strand
aaagauagcacaugagaga

SEQ ID NO: 2010650 - RNA, 19 nt, Homo sapiens
  misc_RNA (1)...(19): siRNA sense strand
ggaacccucuccuuaagug

SEQ ID NO: 2010651 - RNA, 19 nt, Homo sapiens
  misc_RNA (1)...(19): siRNA sense strand
gcagagaucgagcaaauag

SEQ ID NO: 2010652 - RNA, 19 nt, Homo sapiens
  misc_RNA (1)...(19): siRNA sense strand
gagaugaacgagauuaaga

SEQ ID NO: 2010653 - RNA, 19 nt, Homo sapiens
  misc_RNA (1)...(19): siRNA sense strand
gcaaggacacacacaaaug

SEQ ID NO: 2010654 - RNA, 19 nt, Homo sapiens
  misc_RNA (1)...(19): siRNA sense strand
acacaaaugucaugaaugc

SEQ ID NO: 2010655 - RNA, 19 nt, Homo sapiens
  misc_RNA (1)...(19): siRNA sense strand
ggucaguguuguagcguuu

SEQ ID NO: 2010656 - RNA, 19 nt, Homo sapiens
  misc_RNA (1)...(19): siRNA sense strand
acacacaaaugucaugaau

SEQ ID NO: 2010657 - RNA, 19 nt, Homo sapiens
  misc_RNA (1)...(19): siRNA sense strand
gagcaaggacacacacaaa

SEQ ID NO: 2010658 - RNA, 19 nt, Homo sapiens
  misc_RNA (1)...(19): siRNA sense strand
uaugggaccuuacagaaga

SEQ ID NO: 2010659 - RNA, 19 nt, Homo sapiens
  misc_RNA (1)...(19): siRNA sense strand
agaagaaggugacccuaug

SEQ ID NO: 2010660 - RNA, 19 nt, Homo sapiens
  misc_RNA (1)...(19): siRNA sense strand
gcaacacuuucacuacaug

SEQ ID NO: 2010661 - RNA, 19 nt, Homo sapiens
  misc_RNA (1)...(19): siRNA sense strand
cgaguuaccugugucaaau

SEQ ID NO: 2010662 - RNA, 19 nt, Homo sapiens
  misc_RNA (1)...(19): siRNA sense strand
ccaacagccuuccacauuc

SEQ ID NO: 2010663 - RNA, 19 nt, Homo sapiens
  misc_RNA (1)...(19): siRNA sense strand
uggcagagaucgagcaaau

SEQ ID NO: 2010664 - RNA, 19 nt, Homo sapiens
  misc_RNA (1)...(19): siRNA sense strand
ggagaggcaccacgagaaa

SEQ ID NO: 2010665 - RNA, 19 nt, Homo sapiens
  misc_RNA (1)...(19): siRNA sense strand
agaaagaucacaagcgaaa

SEQ ID NO: 2010666 - RNA, 19 nt, Homo sapiens
  misc_RNA (1)...(19): siRNA sense strand
gggaaggucuguacaagcu

SEQ ID NO: 2010667 - RNA, 19 nt, Homo sapiens
  misc_RNA (1)...(19): siRNA sense strand
guacuucuauaucuacaag

SEQ ID NO: 2010668 - RNA, 19 nt, Homo sapiens
  misc_RNA (1)...(19): siRNA sense strand
agagaucgagcaaauagua

SEQ ID NO: 2010669 - RNA, 19 nt, Homo sapiens
  misc_RNA (1)...(19): siRNA sense strand
gagcugcacgguacgauga

SEQ ID NO: 2010670 - RNA, 19 nt, Homo sapiens
  misc_RNA (1)...(19): siRNA sense strand
gagauuaagacccaauuca

SEQ ID NO: 2010671 - RNA, 19 nt, Homo sapiens
  misc_RNA (1)...(19): siRNA sense strand
gaccgccucugcuucaaug

SEQ ID NO: 2010672 - RNA, 19 nt, Homo sapiens
  misc_RNA (1)...(19): siRNA sense strand
caaggacacacacaaaugu

SEQ ID NO: 2010673 - RNA, 19 nt, Homo sapiens
  misc_RNA (1)...(19): siRNA sense strand
gaagauguucccuuguuag

SEQ ID NO: 2010674 - RNA, 19 nt, Homo sapiens
  misc_RNA (1)...(19): siRNA sense strand
caggagggauuuauuugca

SEQ ID NO: 2010675 - RNA, 19 nt, Homo sapiens
  misc_RNA (1)...(19): siRNA sense strand
gcgaugaggacuuccaaga

SEQ ID NO: 2010676 - RNA, 19 nt, Homo sapiens
  misc_RNA (1)...(19): siRNA sense strand
gugacaaacugaaucuagu

SEQ ID NO: 2010677 - RNA, 19 nt, Homo sapiens
  misc_RNA (1)...(19): siRNA sense strand
gcacaaguccugggucagu

SEQ ID NO: 2010678 - RNA, 19 nt, Homo sapiens
  misc_RNA (1)...(19): siRNA sense strand
caaauuugcaacacuuuca

SEQ ID NO: 2010679 - RNA, 19 nt, Homo sapiens
  misc_RNA (1)...(19): siRNA sense strand
gaagcaaugggaacagugu

SEQ ID NO: 2010680 - RNA, 19 nt, Homo sapiens
  misc_RNA (1)...(19): siRNA sense strand
gugacagucugguccuuug

SEQ ID NO: 2010681 - RNA, 19 nt, Homo sapiens
  misc_RNA (1)...(19): siRNA sense strand
uuuguagacugccgaguaa

SEQ ID NO: 2010682 - RNA, 19 nt, Homo sapiens
  misc_RNA (1)...(19): siRNA sense strand
gaggagggaaggagaugaa

SEQ ID NO: 2010683 - RNA, 19 nt, Homo sapiens
  misc_RNA (1)...(19): siRNA sense strand
cgggagcuguacuucuaua

SEQ ID NO: 2010684 - RNA, 19 nt, Homo sapiens
  misc_RNA (1)...(19): siRNA sense strand
uguagacugccgaguaaua

SEQ ID NO: 2010685 - RNA, 19 nt, Homo sapiens
  misc_RNA (1)...(19): siRNA sense strand
gacugacuguacuaauauu

SEQ ID NO: 2010686 - RNA, 19 nt, Homo sapiens
  misc_RNA (1)...(19): siRNA sense strand
ugucaggagggauuuauuu

SEQ ID NO: 2010687 - RNA, 19 nt, Homo sapiens
  misc_RNA (1)...(19): siRNA sense strand
gcuuugccgugcacacuug

SEQ ID NO: 2010688 - RNA, 19 nt, Homo sapiens
  misc_RNA (1)...(19): siRNA sense strand
gagagacugacuguacuaa

SEQ ID NO: 2010689 - RNA, 19 nt, Homo sapiens
  misc_RNA (1)...(19): siRNA sense strand
caugagagacugacuguac

SEQ ID NO: 2010690 - RNA, 19 nt, Homo sapiens
  misc_RNA (1)...(19): siRNA sense strand
uccaacagccuuccacauu

SEQ ID NO: 2010691 - RNA, 19 nt, Homo sapiens
  misc_RNA (1)...(19): siRNA sense strand
ccaaacggaacucuacaga

SEQ ID NO: 2010692 - RNA, 19 nt, Homo sapiens
  misc_RNA (1)...(19): siRNA sense strand
gaagaaggugacccuaugg

SEQ ID NO: 2010693 - RNA, 19 nt, Homo sapiens
  misc_RNA (1)...(19): siRNA sense strand
guccgcgucuccuucguaa

SEQ ID NO: 2010694 - RNA, 19 nt, Homo sapiens
  misc_RNA (1)...(19): siRNA sense strand
agacugacuguacuaauau

SEQ ID NO: 2010695 - RNA, 19 nt, Homo sapiens
  misc_RNA (1)...(19): siRNA sense strand
cauagcaugggacacauuu

SEQ ID NO: 2010696 - RNA, 19 nt, Homo sapiens
  misc_RNA (1)...(19): siRNA sense strand
gagggaaggagaugaacga

SEQ ID NO: 2010697 - RNA, 19 nt, Homo sapiens
  misc_RNA (1)...(19): siRNA sense strand
uuauaccacuaguguagaa

SEQ ID NO: 2010698 - RNA, 19 nt, Homo sapiens
  misc_RNA (1)...(19): siRNA sense strand
gacagucugguccuuugua

SEQ ID NO: 2010699 - RNA, 19 nt, Homo sapiens
  misc_RNA (1)...(19): siRNA sense strand
gaaggagaugaacgagauu

SEQ ID NO: 2010700 - RNA, 19 nt, Homo sapiens
  misc_RNA (1)...(19): siRNA sense strand
gcaugggacacauuucuag

SEQ ID NO: 2010701 - RNA, 19 nt, Homo sapiens
  misc_RNA (1)...(19): siRNA sense strand
uuagagccgcugauaugua

SEQ ID NO: 2010702 - RNA, 19 nt, Homo sapiens
  misc_RNA (1)...(19): siRNA sense strand
ucaacgaguuugcuuucuc

SEQ ID NO: 2010703 - RNA, 19 nt, Homo sapiens
  misc_RNA (1)...(19): siRNA sense strand
uguuagagccgcugauaug

SEQ ID NO: 2010704 - RNA, 19 nt, Homo sapiens
  misc_RNA (1)...(19): siRNA sense strand
gcaagagcagugacaaacu

SEQ ID NO: 2010705 - RNA, 19 nt, Homo sapiens
  misc_RNA (1)...(19): siRNA sense strand
uuguagcguuugacccuua

SEQ ID NO: 2010706 - RNA, 19 nt, Homo sapiens
  misc_RNA (1)...(19): siRNA sense strand
gagcccggauggcaaguac

SEQ ID NO: 2010707 - RNA, 19 nt, Homo sapiens
  misc_RNA (1)...(19): siRNA sense strand
uagaagaaggugacccuau

SEQ ID NO: 2010708 - RNA, 19 nt, Homo sapiens
  misc_RNA (1)...(19): siRNA sense strand
ggagaugaacgagauuaag

SEQ ID NO: 2010709 - RNA, 19 nt, Homo sapiens
  misc_RNA (1)...(19): siRNA sense strand
uugcaacacuuucacuaca

SEQ ID NO: 2010710 - RNA, 19 nt, Homo sapiens
  misc_RNA (1)...(19): siRNA sense strand
ucaguguuguagcguuuga

SEQ ID NO: 2010711 - RNA, 19 nt, Homo sapiens
  misc_RNA (1)...(19): siRNA sense strand
ggagcuguacuucuauauc

SEQ ID NO: 2010712 - RNA, 19 nt, Homo sapiens
  misc_RNA (1)...(19): siRNA sense strand
aaagaucacaagcgaaauc

SEQ ID NO: 2010713 - RNA, 19 nt, Homo sapiens
  misc_RNA (1)...(19): siRNA sense strand
ccaaccgggugcccuucaa

SEQ ID NO: 2010714 - RNA, 19 nt, Homo sapiens
  misc_RNA (1)...(19): siRNA sense strand
ccagauggcaaguucuuag

SEQ ID NO: 2010715 - RNA, 19 nt, Homo sapiens
  misc_RNA (1)...(19): siRNA sense strand
uagcaagagcagugacaaa

SEQ ID NO: 2010716 - RNA, 19 nt, Homo sapiens
  misc_RNA (1)...(19): siRNA sense strand
ugggacacauuucuagcaa

SEQ ID NO: 2010717 - RNA, 19 nt, Homo sapiens
  misc_RNA (1)...(19): siRNA sense strand
cgagugggaacauguacuu

SEQ ID NO: 2010718 - RNA, 19 nt, Homo sapiens
  misc_RNA (1)...(19): siRNA sense strand
uggcagcgaugaggacuuc

SEQ ID NO: 2010719 - RNA, 19 nt, Homo sapiens
  misc_RNA (1)...(19): siRNA sense strand
uaccacuaguguagaagaa

SEQ ID NO: 2010720 - RNA, 19 nt, Homo sapiens
  misc_RNA (1)...(19): siRNA sense strand
guagacugccgaguaauag

SEQ ID NO: 2010721 - RNA, 19 nt, Homo sapiens
  misc_RNA (1)...(19): siRNA sense strand
gagugggaacauguacuua

SEQ ID NO: 2010722 - RNA, 19 nt, Homo sapiens
  misc_RNA (1)...(19): siRNA sense strand
ccuguguccucgaauggaa

SEQ ID NO: 2010723 - RNA, 19 nt, Homo sapiens
  misc_RNA (1)...(19): siRNA sense strand
ggaccuuacagaagauauc

SEQ ID NO: 2010724 - RNA, 19 nt, Homo sapiens
  misc_RNA (1)...(19): siRNA sense strand
aaggugacccuauggaguu

SEQ ID NO: 2010725 - RNA, 19 nt, Homo sapiens
  misc_RNA (1)...(19): siRNA sense strand
caacacccgggaacucugu

SEQ ID NO: 2010726 - RNA, 19 nt, Homo sapiens
  misc_RNA (1)...(19): siRNA sense strand
ugagagacugacuguacua

SEQ ID NO: 2010727 - RNA, 19 nt, Homo sapiens
  misc_RNA (1)...(19): siRNA sense strand
gaaagaucacaagcgaaau

SEQ ID NO: 2010728 - RNA, 19 nt, Homo sapiens
  misc_RNA (1)...(19): siRNA sense strand
caacacuuucacuacauga

SEQ ID NO: 2010729 - RNA, 19 nt, Homo sapiens
  misc_RNA (1)...(19): siRNA sense strand
cugcggguguucaacuuug

SEQ ID NO: 2010730 - RNA, 19 nt, Homo sapiens
  misc_RNA (1)...(19): siRNA sense strand
aaucauagcaugggacaca

SEQ ID NO: 2010731 - RNA, 19 nt, Homo sapiens
  misc_RNA (1)...(19): siRNA sense strand
ggcagagaucgagcaaaua

SEQ ID NO: 2010732 - RNA, 19 nt, Homo sapiens
  misc_RNA (1)...(19): siRNA sense strand
ggugacagucugguccuuu

SEQ ID NO: 2010733 - RNA, 19 nt, Homo sapiens
  misc_RNA (1)...(19): siRNA sense strand
gcugcacgguacgaugaaa

SEQ ID NO: 2010734 - RNA, 19 nt, Homo sapiens
  misc_RNA (1)...(19): siRNA sense strand
gucaggagggauuuauuug

SEQ ID NO: 2010735 - RNA, 19 nt, Homo sapiens
  misc_RNA (1)...(19): siRNA sense strand
caaaacggacccugcuaaa

SEQ ID NO: 2010736 - RNA, 19 nt, Homo sapiens
  misc_RNA (1)...(19): siRNA sense strand
gaaagacccuauaaaugua

SEQ ID NO: 2010737 - RNA, 19 nt, Homo sapiens
  misc_RNA (1)...(19): siRNA sense strand
agacaaagcucaucacgua

SEQ ID NO: 2010738 - RNA, 19 nt, Homo sapiens
  misc_RNA (1)...(19): siRNA sense strand
guacaucccuuuauaaaca

SEQ ID NO: 2010739 - RNA, 19 nt, Homo sapiens
  misc_RNA (1)...(19): siRNA sense strand
gaaacagccucaaacagaa

SEQ ID NO: 2010740 - RNA, 19 nt, Homo sapiens
  misc_RNA (1)...(19): siRNA sense strand
ggaaacagccucaaacaga

SEQ ID NO: 2010741 - RNA, 19 nt, Homo sapiens
  misc_RNA (1)...(19): siRNA sense strand
gagagaaacuauuuaagug

SEQ ID NO: 2010742 - RNA, 19 nt, Homo sapiens
  misc_RNA (1)...(19): siRNA sense strand
ggucaucccuuacuaauca

SEQ ID NO: 2010743 - RNA, 19 nt, Homo sapiens
  misc_RNA (1)...(19): siRNA sense strand
ggagaaagacccuauaaau

SEQ ID NO: 2010744 - RNA, 19 nt, Homo sapiens
  misc_RNA (1)...(19): siRNA sense strand
gaauguaccuugggauuug

SEQ ID NO: 2010745 - RNA, 19 nt, Homo sapiens
  misc_RNA (1)...(19): siRNA sense strand
gcacaucagagaauucaua

SEQ ID NO: 2010746 - RNA, 19 nt, Homo sapiens
  misc_RNA (1)...(19): siRNA sense strand
gcagauaaacgcuauaaau

SEQ ID NO: 2010747 - RNA, 19 nt, Homo sapiens
  misc_RNA (1)...(19): siRNA sense strand
gagaaagacccuauaaaug

SEQ ID NO: 2010748 - RNA, 19 nt, Homo sapiens
  misc_RNA (1)...(19): siRNA sense strand
ggagaaauccuacagaugu

SEQ ID NO: 2010749 - RNA, 19 nt, Homo sapiens
  misc_RNA (1)...(19): siRNA sense strand
gagaaacccuaugaaugua

SEQ ID NO: 2010750 - RNA, 19 nt, Homo sapiens
  misc_RNA (1)...(19): siRNA sense strand
ggccaaaguucagcucuua

SEQ ID NO: 2010751 - RNA, 19 nt, Homo sapiens
  misc_RNA (1)...(19): siRNA sense strand
aaccauaggucaucccuua

SEQ ID NO: 2010752 - RNA, 19 nt, Homo sapiens
  misc_RNA (1)...(19): siRNA sense strand
ggauguggcugugcuguuu

SEQ ID NO: 2010753 - RNA, 19 nt, Homo sapiens
  misc_RNA (1)...(19): siRNA sense strand
ggagagaaacccuacauau

SEQ ID NO: 2010754 - RNA, 19 nt, Homo sapiens
  misc_RNA (1)...(19): siRNA sense strand
ggagagaaacuauuuaagu

SEQ ID NO: 2010755 - RNA, 19 nt, Homo sapiens
  misc_RNA (1)...(19): siRNA sense strand
caaagucagugcuuauuag

SEQ ID NO: 2010756 - RNA, 19 nt, Homo sapiens
  misc_RNA (1)...(19): siRNA sense strand
gagagaaacccuaugaaug

SEQ ID NO: 2010757 - RNA, 19 nt, Homo sapiens
  misc_RNA (1)...(19): siRNA sense strand
gagagaaacccuacauaug

SEQ ID NO: 2010758 - RNA, 19 nt, Homo sapiens
  misc_RNA (1)...(19): siRNA sense strand
agaaagacccuauaaaugu

SEQ ID NO: 2010759 - RNA, 19 nt, Homo sapiens
  misc_RNA (1)...(19): siRNA sense strand
caacaucaaauaacgcaua

SEQ ID NO: 2010760 - RNA, 19 nt, Homo sapiens
  misc_RNA (1)...(19): siRNA sense strand
gaauguggcaacaccuuua

SEQ ID NO: 2010761 - RNA, 19 nt, Homo sapiens
  misc_RNA (1)...(19): siRNA sense strand
gagaaugcauacuggagaa

SEQ ID NO: 2010762 - RNA, 19 nt, Homo sapiens
  misc_RNA (1)...(19): siRNA sense strand
gcucaucccuucguuauca

SEQ ID NO: 2010763 - RNA, 19 nt, Homo sapiens
  misc_RNA (1)...(19): siRNA sense strand
ggcaacaccuuuaagucua

SEQ ID NO: 2010764 - RNA, 19 nt, Homo sapiens
  misc_RNA (1)...(19): siRNA sense strand
ccaaagucagugcuuauua

SEQ ID NO: 2010765 - RNA, 19 nt, Homo sapiens
  misc_RNA (1)...(19): siRNA sense strand
ggagagaaacccuaugaau

SEQ ID NO: 2010766 - RNA, 19 nt, Homo sapiens
  misc_RNA (1)...(19): siRNA sense strand
caacaucagagaaugcaua

SEQ ID NO: 2010767 - RNA, 19 nt, Homo sapiens
  misc_RNA (1)...(19): siRNA sense strand
ggaaaagccuucagacaga

SEQ ID NO: 2010768 - RNA, 19 nt, Homo sapiens
  misc_RNA (1)...(19): siRNA sense strand
ugaaugugguaaagccuua

SEQ ID NO: 2010769 - RNA, 19 nt, Homo sapiens
  misc_RNA (1)...(19): siRNA sense strand
guucagcucuuauucaaca

SEQ ID NO: 2010770 - RNA, 19 nt, Homo sapiens
  misc_RNA (1)...(19): siRNA sense strand
gaguucagcucucauucaa

SEQ ID NO: 2010771 - RNA, 19 nt, Homo sapiens
  misc_RNA (1)...(19): siRNA sense strand
agguguaacucaucacuua

SEQ ID NO: 2010772 - RNA, 19 nt, Homo sapiens
  misc_RNA (1)...(19): siRNA sense strand
caaagcucaucacguauug

SEQ ID NO: 2010773 - RNA, 19 nt, Homo sapiens
  misc_RNA (1)...(19): siRNA sense strand
uaaagaaugugguaaaucc

SEQ ID NO: 2010774 - RNA, 19 nt, Homo sapiens
  misc_RNA (1)...(19): siRNA sense strand
gaaacccuaugaauguaau

SEQ ID NO: 2010775 - RNA, 19 nt, Homo sapiens
  misc_RNA (1)...(19): siRNA sense strand
gaaaacccuuguaaguaua

SEQ ID NO: 2010776 - RNA, 19 nt, Homo sapiens
  misc_RNA (1)...(19): siRNA sense strand
gaucgaagagcagucauaa

SEQ ID NO: 2010777 - RNA, 19 nt, Homo sapiens
  misc_RNA (1)...(19): siRNA sense strand
guucagcucucauucaaca

SEQ ID NO: 2010778 - RNA, 19 nt, Homo sapiens
  misc_RNA (1)...(19): siRNA sense strand
cagauaaacgcuauaaaug

SEQ ID NO: 2010779 - RNA, 19 nt, Homo sapiens
  misc_RNA (1)...(19): siRNA sense strand
cagcaucgaaggauucaua

SEQ ID NO: 2010780 - RNA, 19 nt, Homo sapiens
  misc_RNA (1)...(19): siRNA sense strand
gagaaaccauaucgaugug

SEQ ID NO: 2010781 - RNA, 19 nt, Homo sapiens
  misc_RNA (1)...(19): siRNA sense strand
ggagagaaaccauaucgau

SEQ ID NO: 2010782 - RNA, 19 nt, Homo sapiens
  misc_RNA (1)...(19): siRNA sense strand
agagaaacccuacauaugu

SEQ ID NO: 2010783 - RNA, 19 nt, Homo sapiens
  misc_RNA (1)...(19): siRNA sense strand
agagaaacccuaugaaugu

SEQ ID NO: 2010784 - RNA, 19 nt, Homo sapiens
  misc_RNA (1)...(19): siRNA sense strand
gagagaagccuuuuaaaug

SEQ ID NO: 2010785 - RNA, 19 nt, Homo sapiens
  misc_RNA (1)...(19): siRNA sense strand
ggaauguaccuugggauuu

SEQ ID NO: 2010786 - RNA, 19 nt, Homo sapiens
  misc_RNA (1)...(19): siRNA sense strand
ccacucaacacuuauuauu

SEQ ID NO: 2010787 - RNA, 19 nt, Homo sapiens
  misc_RNA (1)...(19): siRNA sense strand
uaauagacaccgaaucauu

SEQ ID NO: 2010788 - RNA, 19 nt, Homo sapiens
  misc_RNA (1)...(19): siRNA sense strand
gagaaaagcccuauagaug

SEQ ID NO: 2010789 - RNA, 19 nt, Homo sapiens
  misc_RNA (1)...(19): siRNA sense strand
gaagaaaacccuuguaagu

SEQ ID NO: 2010790 - RNA, 19 nt, Homo sapiens
  misc_RNA (1)...(19): siRNA sense strand
gcaacaccuuuaagucuag

SEQ ID NO: 2010791 - RNA, 19 nt, Homo sapiens
  misc_RNA (1)...(19): siRNA sense strand
aaacaucuaagaacccaua

SEQ ID NO: 2010792 - RNA, 19 nt, Homo sapiens
  misc_RNA (1)...(19): siRNA sense strand
gaacccauacuguggagaa

SEQ ID NO: 2010793 - RNA, 19 nt, Homo sapiens
  misc_RNA (1)...(19): siRNA sense strand
ccugggagguggagaaaga

SEQ ID NO: 2010794 - RNA, 19 nt, Homo sapiens
  misc_RNA (1)...(19): siRNA sense strand
gaaggcagauuagagaaaa

SEQ ID NO: 2010795 - RNA, 19 nt, Homo sapiens
  misc_RNA (1)...(19): siRNA sense strand
gagaagccuuuuaaaugua

SEQ ID NO: 2010796 - RNA, 19 nt, Homo sapiens
  misc_RNA (1)...(19): siRNA sense strand
guaggaaggcaucuaguug

SEQ ID NO: 2010797 - RNA, 19 nt, Homo sapiens
  misc_RNA (1)...(19): siRNA sense strand
cucaguacaucccuuuaua

SEQ ID NO: 2010798 - RNA, 19 nt, Homo sapiens
  misc_RNA (1)...(19): siRNA sense strand
aaagggaaguuuucagaua

SEQ ID NO: 2010799 - RNA, 19 nt, Homo sapiens
  misc_RNA (1)...(19): siRNA sense strand
cauauaugaaggcagauua

SEQ ID NO: 2010800 - RNA, 19 nt, Homo sapiens
  misc_RNA (1)...(19): siRNA sense strand
gggaaaacauucaggugua

SEQ ID NO: 2010801 - RNA, 19 nt, Homo sapiens
  misc_RNA (1)...(19): siRNA sense strand
gggaugugaugcuggagaa

SEQ ID NO: 2010802 - RNA, 19 nt, Homo sapiens
  misc_RNA (1)...(19): siRNA sense strand
acagauacuucccagagaa

SEQ ID NO: 2010803 - RNA, 19 nt, Homo sapiens
  misc_RNA (1)...(19): siRNA sense strand
cauaggucaucccuuacua

SEQ ID NO: 2010804 - RNA, 19 nt, Homo sapiens
  misc_RNA (1)...(19): siRNA sense strand
gaaaagccuuacauauaug

SEQ ID NO: 2010805 - RNA, 19 nt, Homo sapiens
  misc_RNA (1)...(19): siRNA sense strand
caucacguauugcacauca

SEQ ID NO: 2010806 - RNA, 19 nt, Homo sapiens
  misc_RNA (1)...(19): siRNA sense strand
ccaaaguucagcucuuauu

SEQ ID NO: 2010807 - RNA, 19 nt, Homo sapiens
  misc_RNA (1)...(19): siRNA sense strand
ggaaaacauucagguguaa

SEQ ID NO: 2010808 - RNA, 19 nt, Homo sapiens
  misc_RNA (1)...(19): siRNA sense strand
gaaaagcccuauagaugca

SEQ ID NO: 2010809 - RNA, 19 nt, Homo sapiens
  misc_RNA (1)...(19): siRNA sense strand
ccaaaguucagcucuuauu

SEQ ID NO: 2010810 - RNA, 19 nt, Homo sapiens
  misc_RNA (1)...(19): siRNA sense strand
agccaaaguucagcucuua

SEQ ID NO: 2010811 - RNA, 19 nt, Homo sapiens
  misc_RNA (1)...(19): siRNA sense strand
gaaaagauccaacaggaau

SEQ ID NO: 2010812 - RNA, 19 nt, Homo sapiens
  misc_RNA (1)...(19): siRNA sense strand
guggagaaauccuacagau

SEQ ID NO: 2010813 - RNA, 19 nt, Homo sapiens
  misc_RNA (1)...(19): siRNA sense strand
guggagagaaacuauuuaa

SEQ ID NO: 2010814 - RNA, 19 nt, Homo sapiens
  misc_RNA (1)...(19): siRNA sense strand
agaaaacccuuguaaguau

SEQ ID NO: 2010815 - RNA, 19 nt, Homo sapiens
  misc_RNA (1)...(19): siRNA sense strand
caucagagaauucauacug

SEQ ID NO: 2010816 - RNA, 19 nt, Homo sapiens
  misc_RNA (1)...(19): siRNA sense strand
acucaucacuuaguaauca

SEQ ID NO: 2010817 - RNA, 19 nt, Homo sapiens
  misc_RNA (1)...(19): siRNA sense strand
caguacaucccuuuauaaa

SEQ ID NO: 2010818 - RNA, 19 nt, Homo sapiens
  misc_RNA (1)...(19): siRNA sense strand
uguaacucaucacuuagua

SEQ ID NO: 2010819 - RNA, 19 nt, Homo sapiens
  misc_RNA (1)...(19): siRNA sense strand
gcgaauucauacuggagaa

SEQ ID NO: 2010820 - RNA, 19 nt, Homo sapiens
  misc_RNA (1)...(19): siRNA sense strand
ggaucgaagagcagucaua

SEQ ID NO: 2010821 - RNA, 19 nt, Homo sapiens
  misc_RNA (1)...(19): siRNA sense strand
gguaggaaggcaucuaguu

SEQ ID NO: 2010822 - RNA, 19 nt, Homo sapiens
  misc_RNA (1)...(19): siRNA sense strand
ucaguacaucccuuuauaa

SEQ ID NO: 2010823 - RNA, 19 nt, Homo sapiens
  misc_RNA (1)...(19): siRNA sense strand
aaaccauaguggagagaaa

SEQ ID NO: 2010824 - RNA, 19 nt, Homo sapiens
  misc_RNA (1)...(19): siRNA sense strand
cuauaaauguagucugugu

SEQ ID NO: 2010825 - RNA, 19 nt, Homo sapiens
  misc_RNA (1)...(19): siRNA sense strand
uaauacaugugggaaacuu

SEQ ID NO: 2010826 - RNA, 19 nt, Homo sapiens
  misc_RNA (1)...(19): siRNA sense strand
cuauaaauguaacgagugu

SEQ ID NO: 2010827 - RNA, 19 nt, Homo sapiens
  misc_RNA (1)...(19): siRNA sense strand
caucagagaaugcauacug

SEQ ID NO: 2010828 - RNA, 19 nt, Homo sapiens
  misc_RNA (1)...(19): siRNA sense strand
gcucuuauucaacaucaaa

SEQ ID NO: 2010829 - RNA, 19 nt, Homo sapiens
  misc_RNA (1)...(19): siRNA sense strand
aaauguagucugugugaaa

SEQ ID NO: 2010830 - RNA, 19 nt, Homo sapiens
  misc_RNA (1)...(19): siRNA sense strand
gagugccucucuuauucaa

SEQ ID NO: 2010831 - RNA, 19 nt, Homo sapiens
  misc_RNA (1)...(19): siRNA sense strand
ggagagaagccuuuuaaau

SEQ ID NO: 2010832 - RNA, 19 nt, Homo sapiens
  misc_RNA (1)...(19): siRNA sense strand
ggaugucaaagaauucauu

SEQ ID NO: 2010833 - RNA, 19 nt, Homo sapiens
  misc_RNA (1)...(19): siRNA sense strand
caaagucaacgcaaacaca

SEQ ID NO: 2010834 - RNA, 19 nt, Homo sapiens
  misc_RNA (1)...(19): siRNA sense strand
agagaaaccauaucgaugu

SEQ ID NO: 2010835 - RNA, 19 nt, Homo sapiens
  misc_RNA (1)...(19): siRNA sense strand
acaaagcucaucacguauu

SEQ ID NO: 2010836 - RNA, 19 nt, Homo sapiens
  misc_RNA (1)...(19): siRNA sense strand
gagacugacuguacuaaua

SEQ ID NO: 2010837 - RNA, 19 nt, Homo sapiens
  misc_RNA (1)...(19): siRNA sense strand
ggaaggagaugaacgagau

SEQ ID NO: 2010838 - RNA, 19 nt, Homo sapiens
  misc_RNA (1)...(19): siRNA sense strand
gggaacauguacuuauaua

SEQ ID NO: 2010839 - RNA, 19 nt, Homo sapiens
  misc_RNA (1)...(19): siRNA sense strand
ggacacauuucuagcaaga

SEQ ID NO: 2010840 - RNA, 19 nt, Homo sapiens
  misc_RNA (1)...(19): siRNA sense strand
gaucacaagcgaaaucaua

SEQ ID NO: 2010841 - RNA, 19 nt, Homo sapiens
  misc_RNA (1)...(19): siRNA sense strand
aaacggaacucuacagaca

SEQ ID NO: 2010842 - RNA, 19 nt, Homo sapiens
  misc_RNA (1)...(19): siRNA sense strand
gugggaacauguacuuaua

SEQ ID NO: 2010843 - RNA, 19 nt, Homo sapiens
  misc_RNA (1)...(19): siRNA sense strand
gggaaggccugguaaagug

SEQ ID NO: 2010844 - RNA, 19 nt, Homo sapiens
  misc_RNA (1)...(19): siRNA sense strand
uagagccgcugauauguaa

SEQ ID NO: 2010845 - RNA, 19 nt, Homo sapiens
  misc_RNA (1)...(19): siRNA sense strand
gccgggagcuguacuucua

SEQ ID NO: 2010846 - RNA, 19 nt, Homo sapiens
  misc_RNA (1)...(19): siRNA sense strand
auagacaagucacgaguua

SEQ ID NO: 2010847 - RNA, 19 nt, Homo sapiens
  misc_RNA (1)...(19): siRNA sense strand
caacagccuuccacauuca

SEQ ID NO: 2010848 - RNA, 19 nt, Homo sapiens
  misc_RNA (1)...(19): siRNA sense strand
gagcuguacuucuauaucu

SEQ ID NO: 2010849 - RNA, 19 nt, Homo sapiens
  misc_RNA (1)...(19): siRNA sense strand
aaagauagcacaugagaga

SEQ ID NO: 2010850 - RNA, 19 nt, Homo sapiens
  misc_RNA (1)...(19): siRNA sense strand
ggaacccucuccuuaagug

SEQ ID NO: 2010851 - RNA, 19 nt, Homo sapiens
  misc_RNA (1)...(19): siRNA sense strand
gcagagaucgagcaaauag

SEQ ID NO: 2010852 - RNA, 19 nt, Homo sapiens
  misc_RNA (1)...(19): siRNA sense strand
gagaugaacgagauuaaga

SEQ ID NO: 2010853 - RNA, 19 nt, Homo sapiens
  misc_RNA (1)...(19): siRNA sense strand
gcaaggacacacacaaaug

SEQ ID NO: 2010854 - RNA, 19 nt, Homo sapiens
  misc_RNA (1)...(19): siRNA sense strand
acacaaaugucaugaaugc

SEQ ID NO: 2010855 - RNA, 19 nt, Homo sapiens
  misc_RNA (1)...(19): siRNA sense strand
ggucaguguuguagcguuu

SEQ ID NO: 2010856 - RNA, 19 nt, Homo sapiens
  misc_RNA (1)...(19): siRNA sense strand
acacacaaaugucaugaau

SEQ ID NO: 2010857 - RNA, 19 nt, Homo sapiens
  misc_RNA (1)...(19): siRNA sense strand
gagcaaggacacacacaaa

SEQ ID NO: 2010858 - RNA, 19 nt, Homo sapiens
  misc_RNA (1)...(19): siRNA sense strand
uaugggaccuuacagaaga

SEQ ID NO: 2010859 - RNA, 19 nt, Homo sapiens
  misc_RNA (1)...(19): siRNA sense strand
agaagaaggugacccuaug

SEQ ID NO: 2010860 - RNA, 19 nt, Homo sapiens
  misc_RNA (1)...(19): siRNA sense strand
gcaacacuuucacuacaug

SEQ ID NO: 2010861 - RNA, 19 nt, Homo sapiens
  misc_RNA (1)...(19): siRNA sense strand
cgaguuaccugugucaaau

SEQ ID NO: 2010862 - RNA, 19 nt, Homo sapiens
  misc_RNA (1)...(19): siRNA sense strand
ccaacagccuuccacauuc

SEQ ID NO: 2010863 - RNA, 19 nt, Homo sapiens
  misc_RNA (1)...(19): siRNA sense strand
uggcagagaucgagcaaau

SEQ ID NO: 2010864 - RNA, 19 nt, Homo sapiens
  misc_RNA (1)...(19): siRNA sense strand
ggagaggcaccacgagaaa

SEQ ID NO: 2010865 - RNA, 19 nt, Homo sapiens
  misc_RNA (1)...(19): siRNA sense strand
agaaagaucacaagcgaaa

SEQ ID NO: 2010866 - RNA, 19 nt, Homo sapiens
  misc_RNA (1)...(19): siRNA sense strand
gggaaggucuguacaagcu

SEQ ID NO: 2010867 - RNA, 19 nt, Homo sapiens
  misc_RNA (1)...(19): siRNA sense strand
guacuucuauaucuacaag

SEQ ID NO: 2010868 - RNA, 19 nt, Homo sapiens
  misc_RNA (1)...(19): siRNA sense strand
agagaucgagcaaauagua

SEQ ID NO: 2010869 - RNA, 19 nt, Homo sapiens
  misc_RNA (1)...(19): siRNA sense strand
gagcugcacgguacgauga

SEQ ID NO: 2010870 - RNA, 19 nt, Homo sapiens
  misc_RNA (1)...(19): siRNA sense strand
gagauuaagacccaauuca

SEQ ID NO: 2010871 - RNA, 19 nt, Homo sapiens
  misc_RNA (1)...(19): siRNA sense strand
gaccgccucugcuucaaug

SEQ ID NO: 2010872 - RNA, 19 nt, Homo sapiens
  misc_RNA (1)...(19): siRNA sense strand
caaggacacacacaaaugu

SEQ ID NO: 2010873 - RNA, 19 nt, Homo sapiens
  misc_RNA (1)...(19): siRNA sense strand
gaagauguucccuuguuag

SEQ ID NO: 2010874 - RNA, 19 nt, Homo sapiens
  misc_RNA (1)...(19): siRNA sense strand
caggagggauuuauuugca

SEQ ID NO: 2010875 - RNA, 19 nt, Homo sapiens
  misc_RNA (1)...(19): siRNA sense strand
gcgaugaggacuuccaaga

SEQ ID NO: 2010876 - RNA, 19 nt, Homo sapiens
  misc_RNA (1)...(19): siRNA sense strand
gugacaaacugaaucuagu

SEQ ID NO: 2010877 - RNA, 19 nt, Homo sapiens
  misc_RNA (1)...(19): siRNA sense strand
gcacaaguccugggucagu

SEQ ID NO: 2010878 - RNA, 19 nt, Homo sapiens
  misc_RNA (1)...(19): siRNA sense strand
caaauuugcaacacuuuca

SEQ ID NO: 2010879 - RNA, 19 nt, Homo sapiens
  misc_RNA (1)...(19): siRNA sense strand
gaagcaaugggaacagugu

SEQ ID NO: 2010880 - RNA, 19 nt, Homo sapiens
  misc_RNA (1)...(19): siRNA sense strand
gugacagucugguccuuug

SEQ ID NO: 2010881 - RNA, 19 nt, Homo sapiens
  misc_RNA (1)...(19): siRNA sense strand
uuuguagacugccgaguaa

SEQ ID NO: 2010882 - RNA, 19 nt, Homo sapiens
  misc_RNA (1)...(19): siRNA sense strand
gaggagggaaggagaugaa

SEQ ID NO: 2010883 - RNA, 19 nt, Homo sapiens
  misc_RNA (1)...(19): siRNA sense strand
cgggagcuguacuucuaua

SEQ ID NO: 2010884 - RNA, 19 nt, Homo sapiens
  misc_RNA (1)...(19): siRNA sense strand
uguagacugccgaguaaua

SEQ ID NO: 2010885 - RNA, 19 nt, Homo sapiens
  misc_RNA (1)...(19): siRNA sense strand
gacugacuguacuaauauu

SEQ ID NO: 2010886 - RNA, 19 nt, Homo sapiens
  misc_RNA (1)...(19): siRNA sense strand
ugucaggagggauuuauuu

SEQ ID NO: 2010887 - RNA, 19 nt, Homo sapiens
  misc_RNA (1)...(19): siRNA sense strand
gcuuugccgugcacacuug

SEQ ID NO: 2010888 - RNA, 19 nt, Homo sapiens
  misc_RNA (1)...(19): siRNA sense strand
gagagacugacuguacuaa

SEQ ID NO: 2010889 - RNA, 19 nt, Homo sapiens
  misc_RNA (1)...(19): siRNA sense strand
caugagagacugacuguac

SEQ ID NO: 2010890 - RNA, 19 nt, Homo sapiens
  misc_RNA (1)...(19): siRNA sense strand
uccaacagccuuccacauu

SEQ ID NO: 2010891 - RNA, 19 nt, Homo sapiens
  misc_RNA (1)...(19): siRNA sense strand
ccaaacggaacucuacaga

SEQ ID NO: 2010892 - RNA, 19 nt, Homo sapiens
  misc_RNA (1)...(19): siRNA sense strand
gaagaaggugacccuaugg

SEQ ID NO: 2010893 - RNA, 19 nt, Homo sapiens
  misc_RNA (1)...(19): siRNA sense strand
guccgcgucuccuucguaa

SEQ ID NO: 2010894 - RNA, 19 nt, Homo sapiens
  misc_RNA (1)...(19): siRNA sense strand
agacugacuguacuaauau

SEQ ID NO: 2010895 - RNA, 19 nt, Homo sapiens
  misc_RNA (1)...(19): siRNA sense strand
cauagcaugggacacauuu

SEQ ID NO: 2010896 - RNA, 19 nt, Homo sapiens
  misc_RNA (1)...(19): siRNA sense strand
gagggaaggagaugaacga

SEQ ID NO: 2010897 - RNA, 19 nt, Homo sapiens
  misc_RNA (1)...(19): siRNA sense strand
uuauaccacuaguguagaa

SEQ ID NO: 2010898 - RNA, 19 nt, Homo sapiens
  misc_RNA (1)...(19): siRNA sense strand
gacagucugguccuuugua

SEQ ID NO: 2010899 - RNA, 19 nt, Homo sapiens
  misc_RNA (1)...(19): siRNA sense strand
gaaggagaugaacgagauu

SEQ ID NO: 2010900 - RNA, 19 nt, Homo sapiens
  misc_RNA (1)...(19): siRNA sense strand
gcaugggacacauuucuag

SEQ ID NO: 2010901 - RNA, 19 nt, Homo sapiens
  misc_RNA (1)...(19): siRNA sense strand
uuagagccgcugauaugua

SEQ ID NO: 2010902 - RNA, 19 nt, Homo sapiens
  misc_RNA (1)...(19): siRNA sense strand
ucaacgaguuugcuuucuc

SEQ ID NO: 2010903 - RNA, 19 nt, Homo sapiens
  misc_RNA (1)...(19): siRNA sense strand
uguuagagccgcugauaug

SEQ ID NO: 2010904 - RNA, 19 nt, Homo sapiens
  misc_RNA (1)...(19): siRNA sense strand
gcaagagcagugacaaacu

SEQ ID NO: 2010905 - RNA, 19 nt, Homo sapiens
  misc_RNA (1)...(19): siRNA sense strand
uuguagcguuugacccuua

SEQ ID NO: 2010906 - RNA, 19 nt, Homo sapiens
  misc_RNA (1)...(19): siRNA sense strand
gagcccggauggcaaguac

SEQ ID NO: 2010907 - RNA, 19 nt, Homo sapiens
  misc_RNA (1)...(19): siRNA sense strand
uagaagaaggugacccuau

SEQ ID NO: 2010908 - RNA, 19 nt, Homo sapiens
  misc_RNA (1)...(19): siRNA sense strand
ggagaugaacgagauuaag

SEQ ID NO: 2010909 - RNA, 19 nt, Homo sapiens
  misc_RNA (1)...(19): siRNA sense strand
uugcaacacuuucacuaca

SEQ ID NO: 2010910 - RNA, 19 nt, Homo sapiens
  misc_RNA (1)...(19): siRNA sense strand
ucaguguuguagcguuuga

SEQ ID NO: 2010911 - RNA, 19 nt, Homo sapiens
  misc_RNA (1)...(19): siRNA sense strand
ggagcuguacuucuauauc

SEQ ID NO: 2010912 - RNA, 19 nt, Homo sapiens
  misc_RNA (1)...(19): siRNA sense strand
aaagaucacaagcgaaauc

SEQ ID NO: 2010913 - RNA, 19 nt, Homo sapiens
  misc_RNA (1)...(19): siRNA sense strand
ccaaccgggugcccuucaa

SEQ ID NO: 2010914 - RNA, 19 nt, Homo sapiens
  misc_RNA (1)...(19): siRNA sense strand
ccagauggcaaguucuuag

SEQ ID NO: 2010915 - RNA, 19 nt, Homo sapiens
  misc_RNA (1)...(19): siRNA sense strand
uagcaagagcagugacaaa

SEQ ID NO: 2010916 - RNA, 19 nt, Homo sapiens
  misc_RNA (1)...(19): siRNA sense strand
ugggacacauuucuagcaa

SEQ ID NO: 2010917 - RNA, 19 nt, Homo sapiens
  misc_RNA (1)...(19): siRNA sense strand
cgagugggaacauguacuu

SEQ ID NO: 2010918 - RNA, 19 nt, Homo sapiens
  misc_RNA (1)...(19): siRNA sense strand
uggcagcgaugaggacuuc

SEQ ID NO: 2010919 - RNA, 19 nt, Homo sapiens
  misc_RNA (1)...(19): siRNA sense strand
uaccacuaguguagaagaa

SEQ ID NO: 2010920 - RNA, 19 nt, Homo sapiens
  misc_RNA (1)...(19): siRNA sense strand
guagacugccgaguaauag

SEQ ID NO: 2010921 - RNA, 19 nt, Homo sapiens
  misc_RNA (1)...(19): siRNA sense strand
gagugggaacauguacuua

SEQ ID NO: 2010922 - RNA, 19 nt, Homo sapiens
  misc_RNA (1)...(19): siRNA sense strand
ccuguguccucgaauggaa

SEQ ID NO: 2010923 - RNA, 19 nt, Homo sapiens
  misc_RNA (1)...(19): siRNA sense strand
ggaccuuacagaagauauc

SEQ ID NO: 2010924 - RNA, 19 nt, Homo sapiens
  misc_RNA (1)...(19): siRNA sense strand
aaggugacccuauggaguu

SEQ ID NO: 2010925 - RNA, 19 nt, Homo sapiens
  misc_RNA (1)...(19): siRNA sense strand
caacacccgggaacucugu

SEQ ID NO: 2010926 - RNA, 19 nt, Homo sapiens
  misc_RNA (1)...(19): siRNA sense strand
ugagagacugacuguacua

SEQ ID NO: 2010927 - RNA, 19 nt, Homo sapiens
  misc_RNA (1)...(19): siRNA sense strand
gaaagaucacaagcgaaau

SEQ ID NO: 2010928 - RNA, 19 nt, Homo sapiens
  misc_RNA (1)...(19): siRNA sense strand
caacacuuucacuacauga

SEQ ID NO: 2010929 - RNA, 19 nt, Homo sapiens
  misc_RNA (1)...(19): siRNA sense strand
cugcggguguucaacuuug

SEQ ID NO: 2010930 - RNA, 19 nt, Homo sapiens
  misc_RNA (1)...(19): siRNA sense strand
aaucauagcaugggacaca

SEQ ID NO: 2010931 - RNA, 19 nt, Homo sapiens
  misc_RNA (1)...(19): siRNA sense strand
ggcagagaucgagcaaaua

SEQ ID NO: 2010932 - RNA, 19 nt, Homo sapiens
  misc_RNA (1)...(19): siRNA sense strand
ggugacagucugguccuuu

SEQ ID NO: 2010933 - RNA, 19 nt, Homo sapiens
  misc_RNA (1)...(19): siRNA sense strand
gcugcacgguacgaugaaa

SEQ ID NO: 2010934 - RNA, 19 nt, Homo sapiens
  misc_RNA (1)...(19): siRNA sense strand
gucaggagggauuuauuug

SEQ ID NO: 2010935 - RNA, 19 nt, Homo sapiens
  misc_RNA (1)...(19): siRNA sense strand
caaaacggacccugcuaaa

SEQ ID NO: 2010936 - RNA, 19 nt, Homo sapiens
  misc_RNA (1)...(19): siRNA sense strand
gagacugacuguacuaaua

SEQ ID NO: 2010937 - RNA, 19 nt, Homo sapiens
  misc_RNA (1)...(19): siRNA sense strand
ggaaggagaugaacgagau

SEQ ID NO: 2010938 - RNA, 19 nt, Homo sapiens
  misc_RNA (1)...(19): siRNA sense strand
gggaacauguacuuauaua

SEQ ID NO: 2010939 - RNA, 19 nt, Homo sapiens
  misc_RNA (1)...(19): siRNA sense strand
ggacacauuucuagcaaga

SEQ ID NO: 2010940 - RNA, 19 nt, Homo sapiens
  misc_RNA (1)...(19): siRNA sense strand
gaucacaagcgaaaucaua

SEQ ID NO: 2010941 - RNA, 19 nt, Homo sapiens
  misc_RNA (1)...(19): siRNA sense strand
aaacggaacucuacagaca

SEQ ID NO: 2010942 - RNA, 19 nt, Homo sapiens
  misc_RNA (1)...(19): siRNA sense strand
gugggaacauguacuuaua

SEQ ID NO: 2010943 - RNA, 19 nt, Homo sapiens
  misc_RNA (1)...(19): siRNA sense strand
gggaaggccugguaaagug

SEQ ID NO: 2010944 - RNA, 19 nt, Homo sapiens
  misc_RNA (1)...(19): siRNA sense strand
uagagccgcugauauguaa

SEQ ID NO: 2010945 - RNA, 19 nt, Homo sapiens
  misc_RNA (1)...(19): siRNA sense strand
gccgggagcuguacuucua

SEQ ID NO: 2010946 - RNA, 19 nt, Homo sapiens
  misc_RNA (1)...(19): siRNA sense strand
auagacaagucacgaguua

SEQ ID NO: 2010947 - RNA, 19 nt, Homo sapiens
  misc_RNA (1)...(19): siRNA sense strand
caacagccuuccacauuca

SEQ ID NO: 2010948 - RNA, 19 nt, Homo sapiens
  misc_RNA (1)...(19): siRNA sense strand
gagcuguacuucuauaucu

SEQ ID NO: 2010949 - RNA, 19 nt, Homo sapiens
  misc_RNA (1)...(19): siRNA sense strand
aaagauagcacaugagaga

SEQ ID NO: 2010950 - RNA, 19 nt, Homo sapiens
  misc_RNA (1)...(19): siRNA sense strand
ggaacccucuccuuaagug

SEQ ID NO: 2010951 - RNA, 19 nt, Homo sapiens
  misc_RNA (1)...(19): siRNA sense strand
gcagagaucgagcaaauag

SEQ ID NO: 2010952 - RNA, 19 nt, Homo sapiens
  misc_RNA (1)...(19): siRNA sense strand
gagaugaacgagauuaaga

SEQ ID NO: 2010953 - RNA, 19 nt, Homo sapiens
  misc_RNA (1)...(19): siRNA sense strand
gcaaggacacacacaaaug

SEQ ID NO: 2010954 - RNA, 19 nt, Homo sapiens
  misc_RNA (1)...(19): siRNA sense strand
acacaaaugucaugaaugc

SEQ ID NO: 2010955 - RNA, 19 nt, Homo sapiens
  misc_RNA (1)...(19): siRNA sense strand
ggucaguguuguagcguuu

SEQ ID NO: 2010956 - RNA, 19 nt, Homo sapiens
  misc_RNA (1)...(19): siRNA sense strand
acacacaaaugucaugaau

SEQ ID NO: 2010957 - RNA, 19 nt, Homo sapiens
  misc_RNA (1)...(19): siRNA sense strand
gagcaaggacacacacaaa

SEQ ID NO: 2010958 - RNA, 19 nt, Homo sapiens
  misc_RNA (1)...(19): siRNA sense strand
uaugggaccuuacagaaga

SEQ ID NO: 2010959 - RNA, 19 nt, Homo sapiens
  misc_RNA (1)...(19): siRNA sense strand
agaagaaggugacccuaug

SEQ ID NO: 2010960 - RNA, 19 nt, Homo sapiens
  misc_RNA (1)...(19): siRNA sense strand
gcaacacuuucacuacaug

SEQ ID NO: 2010961 - RNA, 19 nt, Homo sapiens
  misc_RNA (1)...(19): siRNA sense strand
cgaguuaccugugucaaau

SEQ ID NO: 2010962 - RNA, 19 nt, Homo sapiens
  misc_RNA (1)...(19): siRNA sense strand
ccaacagccuuccacauuc

SEQ ID NO: 2010963 - RNA, 19 nt, Homo sapiens
  misc_RNA (1)...(19): siRNA sense strand
uggcagagaucgagcaaau

SEQ ID NO: 2010964 - RNA, 19 nt, Homo sapiens
  misc_RNA (1)...(19): siRNA sense strand
ggagaggcaccacgagaaa

SEQ ID NO: 2010965 - RNA, 19 nt, Homo sapiens
  misc_RNA (1)...(19): siRNA sense strand
agaaagaucacaagcgaaa

SEQ ID NO: 2010966 - RNA, 19 nt, Homo sapiens
  misc_RNA (1)...(19): siRNA sense strand
gggaaggucuguacaagcu

SEQ ID NO: 2010967 - RNA, 19 nt, Homo sapiens
  misc_RNA (1)...(19): siRNA sense strand
guacuucuauaucuacaag

SEQ ID NO: 2010968 - RNA, 19 nt, Homo sapiens
  misc_RNA (1)...(19): siRNA sense strand
agagaucgagcaaauagua

SEQ ID NO: 2010969 - RNA, 19 nt, Homo sapiens
  misc_RNA (1)...(19): siRNA sense strand
gagcugcacgguacgauga

SEQ ID NO: 2010970 - RNA, 19 nt, Homo sapiens
  misc_RNA (1)...(19): siRNA sense strand
gagauuaagacccaauuca

SEQ ID NO: 2010971 - RNA, 19 nt, Homo sapiens
  misc_RNA (1)...(19): siRNA sense strand
gaccgccucugcuucaaug

SEQ ID NO: 2010972 - RNA, 19 nt, Homo sapiens
  misc_RNA (1)...(19): siRNA sense strand
caaggacacacacaaaugu

SEQ ID NO: 2010973 - RNA, 19 nt, Homo sapiens
  misc_RNA (1)...(19): siRNA sense strand
gaagauguucccuuguuag

SEQ ID NO: 2010974 - RNA, 19 nt, Homo sapiens
  misc_RNA (1)...(19): siRNA sense strand
caggagggauuuauuugca

SEQ ID NO: 2010975 - RNA, 19 nt, Homo sapiens
  misc_RNA (1)...(19): siRNA sense strand
gcgaugaggacuuccaaga

SEQ ID NO: 2010976 - RNA, 19 nt, Homo sapiens
  misc_RNA (1)...(19): siRNA sense strand
gugacaaacugaaucuagu

SEQ ID NO: 2010977 - RNA, 19 nt, Homo sapiens
  misc_RNA (1)...(19): siRNA sense strand
gcacaaguccugggucagu

SEQ ID NO: 2010978 - RNA, 19 nt, Homo sapiens
  misc_RNA (1)...(19): siRNA sense strand
caaauuugcaacacuuuca

SEQ ID NO: 2010979 - RNA, 19 nt, Homo sapiens
  misc_RNA (1)...(19): siRNA sense strand
gaagcaaugggaacagugu

SEQ ID NO: 2010980 - RNA, 19 nt, Homo sapiens
  misc_RNA (1)...(19): siRNA sense strand
gugacagucugguccuuug

SEQ ID NO: 2010981 - RNA, 19 nt, Homo sapiens
  misc_RNA (1)...(19): siRNA sense strand
uuuguagacugccgaguaa

SEQ ID NO: 2010982 - RNA, 19 nt, Homo sapiens
  misc_RNA (1)...(19): siRNA sense strand
gaggagggaaggagaugaa

SEQ ID NO: 2010983 - RNA, 19 nt, Homo sapiens
  misc_RNA (1)...(19): siRNA sense strand
cgggagcuguacuucuaua

SEQ ID NO: 2010984 - RNA, 19 nt, Homo sapiens
  misc_RNA (1)...(19): siRNA sense strand
uguagacugccgaguaaua

SEQ ID NO: 2010985 - RNA, 19 nt, Homo sapiens
  misc_RNA (1)...(19): siRNA sense strand
gacugacuguacuaauauu

SEQ ID NO: 2010986 - RNA, 19 nt, Homo sapiens
  misc_RNA (1)...(19): siRNA sense strand
ugucaggagggauuuauuu

SEQ ID NO: 2010987 - RNA, 19 nt, Homo sapiens
  misc_RNA (1)...(19): siRNA sense strand
gcuuugccgugcacacuug

SEQ ID NO: 2010988 - RNA, 19 nt, Homo sapiens
  misc_RNA (1)...(19): siRNA sense strand
gagagacugacuguacuaa

SEQ ID NO: 2010989 - RNA, 19 nt, Homo sapiens
  misc_RNA (1)...(19): siRNA sense strand
caugagagacugacuguac

SEQ ID NO: 2010990 - RNA, 19 nt, Homo sapiens
  misc_RNA (1)...(19): siRNA sense strand
uccaacagccuuccacauu

SEQ ID NO: 2010991 - RNA, 19 nt, Homo sapiens
  misc_RNA (1)...(19): siRNA sense strand
ccaaacggaacucuacaga

SEQ ID NO: 2010992 - RNA, 19 nt, Homo sapiens
  misc_RNA (1)...(19): siRNA sense strand
gaagaaggugacccuaugg

SEQ ID NO: 2010993 - RNA, 19 nt, Homo sapiens
  misc_RNA (1)...(19): siRNA sense strand
guccgcgucuccuucguaa

SEQ ID NO: 2010994 - RNA, 19 nt, Homo sapiens
  misc_RNA (1)...(19): siRNA sense strand
agacugacuguacuaauau

SEQ ID NO: 2010995 - RNA, 19 nt, Homo sapiens
  misc_RNA (1)...(19): siRNA sense strand
cauagcaugggacacauuu

SEQ ID NO: 2010996 - RNA, 19 nt, Homo sapiens
  misc_RNA (1)...(19): siRNA sense strand
gagggaaggagaugaacga

SEQ ID NO: 2010997 - RNA, 19 nt, Homo sapiens
  misc_RNA (1)...(19): siRNA sense strand
uuauaccacuaguguagaa

SEQ ID NO: 2010998 - RNA, 19 nt, Homo sapiens
  misc_RNA (1)...(19): siRNA sense strand
gacagucugguccuuugua

SEQ ID NO: 2010999 - RNA, 19 nt, Homo sapiens
  misc_RNA (1)...(19): siRNA sense strand
gaaggagaugaacgagauu

SEQ ID NO: 2011000 - RNA, 19 nt, Homo sapiens
  misc_RNA (1)...(19): siRNA sense strand
gcaugggacacauuucuag

SEQ ID NO: 2011001 - RNA, 19 nt, Homo sapiens
  misc_RNA (1)...(19): siRNA sense strand
uuagagccgcugauaugua

SEQ ID NO: 2011002 - RNA, 19 nt, Homo sapiens
  misc_RNA (1)...(19): siRNA sense strand
ucaacgaguuugcuuucuc

SEQ ID NO: 2011003 - RNA, 19 nt, Homo sapiens
  misc_RNA (1)...(19): siRNA sense strand
uguuagagccgcugauaug

SEQ ID NO: 2011004 - RNA, 19 nt, Homo sapiens
  misc_RNA (1)...(19): siRNA sense strand
gcaagagcagugacaaacu

SEQ ID NO: 2011005 - RNA, 19 nt, Homo sapiens
  misc_RNA (1)...(19): siRNA sense strand
uuguagcguuugacccuua

SEQ ID NO: 2011006 - RNA, 19 nt, Homo sapiens
  misc_RNA (1)...(19): siRNA sense strand
gagcccggauggcaaguac

SEQ ID NO: 2011007 - RNA, 19 nt, Homo sapiens
  misc_RNA (1)...(19): siRNA sense strand
uagaagaaggugacccuau

SEQ ID NO: 2011008 - RNA, 19 nt, Homo sapiens
  misc_RNA (1)...(19): siRNA sense strand
ggagaugaacgagauuaag

SEQ ID NO: 2011009 - RNA, 19 nt, Homo sapiens
  misc_RNA (1)...(19): siRNA sense strand
uugcaacacuuucacuaca

SEQ ID NO: 2011010 - RNA, 19 nt, Homo sapiens
  misc_RNA (1)...(19): siRNA sense strand
ucaguguuguagcguuuga

SEQ ID NO: 2011011 - RNA, 19 nt, Homo sapiens
  misc_RNA (1)...(19): siRNA sense strand
ggagcuguacuucuauauc

SEQ ID NO: 2011012 - RNA, 19 nt, Homo sapiens
  misc_RNA (1)...(19): siRNA sense strand
aaagaucacaagcgaaauc

SEQ ID NO: 2011013 - RNA, 19 nt, Homo sapiens
  misc_RNA (1)...(19): siRNA sense strand
ccaaccgggugcccuucaa

SEQ ID NO: 2011014 - RNA, 19 nt, Homo sapiens
  misc_RNA (1)...(19): siRNA sense strand
ccagauggcaaguucuuag

SEQ ID NO: 2011015 - RNA, 19 nt, Homo sapiens
  misc_RNA (1)...(19): siRNA sense strand
uagcaagagcagugacaaa

SEQ ID NO: 2011016 - RNA, 19 nt, Homo sapiens
  misc_RNA (1)...(19): siRNA sense strand
ugggacacauuucuagcaa

SEQ ID NO: 2011017 - RNA, 19 nt, Homo sapiens
  misc_RNA (1)...(19): siRNA sense strand
cgagugggaacauguacuu

SEQ ID NO: 2011018 - RNA, 19 nt, Homo sapiens
  misc_RNA (1)...(19): siRNA sense strand
uggcagcgaugaggacuuc

SEQ ID NO: 2011019 - RNA, 19 nt, Homo sapiens
  misc_RNA (1)...(19): siRNA sense strand
uaccacuaguguagaagaa

SEQ ID NO: 2011020 - RNA, 19 nt, Homo sapiens
  misc_RNA (1)...(19): siRNA sense strand
guagacugccgaguaauag

SEQ ID NO: 2011021 - RNA, 19 nt, Homo sapiens
  misc_RNA (1)...(19): siRNA sense strand
gagugggaacauguacuua

SEQ ID NO: 2011022 - RNA, 19 nt, Homo sapiens
  misc_RNA (1)...(19): siRNA sense strand
ccuguguccucgaauggaa

SEQ ID NO: 2011023 - RNA, 19 nt, Homo sapiens
  misc_RNA (1)...(19): siRNA sense strand
ggaccuuacagaagauauc

SEQ ID NO: 2011024 - RNA, 19 nt, Homo sapiens
  misc_RNA (1)...(19): siRNA sense strand
aaggugacccuauggaguu

SEQ ID NO: 2011025 - RNA, 19 nt, Homo sapiens
  misc_RNA (1)...(19): siRNA sense strand
caacacccgggaacucugu

SEQ ID NO: 2011026 - RNA, 19 nt, Homo sapiens
  misc_RNA (1)...(19): siRNA sense strand
ugagagacugacuguacua

SEQ ID NO: 2011027 - RNA, 19 nt, Homo sapiens
  misc_RNA (1)...(19): siRNA sense strand
gaaagaucacaagcgaaau

SEQ ID NO: 2011028 - RNA, 19 nt, Homo sapiens
  misc_RNA (1)...(19): siRNA sense strand
caacacuuucacuacauga

SEQ ID NO: 2011029 - RNA, 19 nt, Homo sapiens
  misc_RNA (1)...(19): siRNA sense strand
cugcggguguucaacuuug

SEQ ID NO: 2011030 - RNA, 19 nt, Homo sapiens
  misc_RNA (1)...(19): siRNA sense strand
aaucauagcaugggacaca

SEQ ID NO: 2011031 - RNA, 19 nt, Homo sapiens
  misc_RNA (1)...(19): siRNA sense strand
ggcagagaucgagcaaaua

SEQ ID NO: 2011032 - RNA, 19 nt, Homo sapiens
  misc_RNA (1)...(19): siRNA sense strand
ggugacagucugguccuuu

SEQ ID NO: 2011033 - RNA, 19 nt, Homo sapiens
  misc_RNA (1)...(19): siRNA sense strand
gcugcacgguacgaugaaa

SEQ ID NO: 2011034 - RNA, 19 nt, Homo sapiens
  misc_RNA (1)...(19): siRNA sense strand
gucaggagggauuuauuug

SEQ ID NO: 2011035 - RNA, 19 nt, Homo sapiens
  misc_RNA (1)...(19): siRNA sense strand
caaaacggacccugcuaaa

SEQ ID NO: 2011036 - RNA, 19 nt, Homo sapiens
  misc_RNA (1)...(19): siRNA sense strand
gagacugacuguacuaaua

SEQ ID NO: 2011037 - RNA, 19 nt, Homo sapiens
  misc_RNA (1)...(19): siRNA sense strand
gggaacauguacuuauaua

SEQ ID NO: 2011038 - RNA, 19 nt, Homo sapiens
  misc_RNA (1)...(19): siRNA sense strand
ggacacauuucuagcaaga

SEQ ID NO: 2011039 - RNA, 19 nt, Homo sapiens
  misc_RNA (1)...(19): siRNA sense strand
gaucacaagcgaaaucaua

SEQ ID NO: 2011040 - RNA, 19 nt, Homo sapiens
  misc_RNA (1)...(19): siRNA sense strand
aaacggaacucuacagaca

SEQ ID NO: 2011041 - RNA, 19 nt, Homo sapiens
  misc_RNA (1)...(19): siRNA sense strand
gugggaacauguacuuaua

SEQ ID NO: 2011042 - RNA, 19 nt, Homo sapiens
  misc_RNA (1)...(19): siRNA sense strand
gggaaggccugguaaagug

SEQ ID NO: 2011043 - RNA, 19 nt, Homo sapiens
  misc_RNA (1)...(19): siRNA sense strand
uagagccgcugauauguaa

SEQ ID NO: 2011044 - RNA, 19 nt, Homo sapiens
  misc_RNA (1)...(19): siRNA sense strand
auagacaagucacgaguua

SEQ ID NO: 2011045 - RNA, 19 nt, Homo sapiens
  misc_RNA (1)...(19): siRNA sense strand
gccgggagcuguacuucua

SEQ ID NO: 2011046 - RNA, 19 nt, Homo sapiens
  misc_RNA (1)...(19): siRNA sense strand
caacagccuuccacauuca

SEQ ID NO: 2011047 - RNA, 19 nt, Homo sapiens
  misc_RNA (1)...(19): siRNA sense strand
aaagauagcacaugagaga

SEQ ID NO: 2011048 - RNA, 19 nt, Homo sapiens
  misc_RNA (1)...(19): siRNA sense strand
gagcuguacuucuauaucu

SEQ ID NO: 2011049 - RNA, 19 nt, Homo sapiens
  misc_RNA (1)...(19): siRNA sense strand
ggaacccucuccuuaagug

SEQ ID NO: 2011050 - RNA, 19 nt, Homo sapiens
  misc_RNA (1)...(19): siRNA sense strand
gcagagaucgagcaaauag

SEQ ID NO: 2011051 - RNA, 19 nt, Homo sapiens
  misc_RNA (1)...(19): siRNA sense strand
gcaaggacacacacaaaug

SEQ ID NO: 2011052 - RNA, 19 nt, Homo sapiens
  misc_RNA (1)...(19): siRNA sense strand
acacaaaugucaugaaugc

SEQ ID NO: 2011053 - RNA, 19 nt, Homo sapiens
  misc_RNA (1)...(19): siRNA sense strand
ggucaguguuguagcguuu

SEQ ID NO: 2011054 - RNA, 19 nt, Homo sapiens
  misc_RNA (1)...(19): siRNA sense strand
acacacaaaugucaugaau

SEQ ID NO: 2011055 - RNA, 19 nt, Homo sapiens
  misc_RNA (1)...(19): siRNA sense strand
gagcaaggacacacacaaa

SEQ ID NO: 2011056 - RNA, 19 nt, Homo sapiens
  misc_RNA (1)...(19): siRNA sense strand
uaugggaccuuacagaaga

SEQ ID NO: 2011057 - RNA, 19 nt, Homo sapiens
  misc_RNA (1)...(19): siRNA sense strand
agaagaaggugacccuaug

SEQ ID NO: 2011058 - RNA, 19 nt, Homo sapiens
  misc_RNA (1)...(19): siRNA sense strand
gcaacacuuucacuacaug

SEQ ID NO: 2011059 - RNA, 19 nt, Homo sapiens
  misc_RNA (1)...(19): siRNA sense strand
uggcagagaucgagcaaau

SEQ ID NO: 2011060 - RNA, 19 nt, Homo sapiens
  misc_RNA (1)...(19): siRNA sense strand
ccaacagccuuccacauuc

SEQ ID NO: 2011061 - RNA, 19 nt, Homo sapiens
  misc_RNA (1)...(19): siRNA sense strand
cgaguuaccugugucaaau

SEQ ID NO: 2011062 - RNA, 19 nt, Homo sapiens
  misc_RNA (1)...(19): siRNA sense strand
ggagaggcaccacgagaaa

SEQ ID NO: 2011063 - RNA, 19 nt, Homo sapiens
  misc_RNA (1)...(19): siRNA sense strand
agaaagaucacaagcgaaa

SEQ ID NO: 2011064 - RNA, 19 nt, Homo sapiens
  misc_RNA (1)...(19): siRNA sense strand
guacuucuauaucuacaag

SEQ ID NO: 2011065 - RNA, 19 nt, Homo sapiens
  misc_RNA (1)...(19): siRNA sense strand
agagaucgagcaaauagua

SEQ ID NO: 2011066 - RNA, 19 nt, Homo sapiens
  misc_RNA (1)...(19): siRNA sense strand
gagcugcacgguacgauga

SEQ ID NO: 2011067 - RNA, 19 nt, Homo sapiens
  misc_RNA (1)...(19): siRNA sense strand
caaggacacacacaaaugu

SEQ ID NO: 2011068 - RNA, 19 nt, Homo sapiens
  misc_RNA (1)...(19): siRNA sense strand
gaagauguucccuuguuag

SEQ ID NO: 2011069 - RNA, 19 nt, Homo sapiens
  misc_RNA (1)...(19): siRNA sense strand
caggagggauuuauuugca

SEQ ID NO: 2011070 - RNA, 19 nt, Homo sapiens
  misc_RNA (1)...(19): siRNA sense strand
gcgaugaggacuuccaaga

SEQ ID NO: 2011071 - RNA, 19 nt, Homo sapiens
  misc_RNA (1)...(19): siRNA sense strand
gugacaaacugaaucuagu

SEQ ID NO: 2011072 - RNA, 19 nt, Homo sapiens
  misc_RNA (1)...(19): siRNA sense strand
gcacaaguccugggucagu

SEQ ID NO: 2011073 - RNA, 19 nt, Homo sapiens
  misc_RNA (1)...(19): siRNA sense strand
caaauuugcaacacuuuca

SEQ ID NO: 2011074 - RNA, 19 nt, Homo sapiens
  misc_RNA (1)...(19): siRNA sense strand
gaagcaaugggaacagugu

SEQ ID NO: 2011075 - RNA, 19 nt, Homo sapiens
  misc_RNA (1)...(19): siRNA sense strand
gugacagucugguccuuug

SEQ ID NO: 2011076 - RNA, 19 nt, Homo sapiens
  misc_RNA (1)...(19): siRNA sense strand
uuuguagacugccgaguaa

SEQ ID NO: 2011077 - RNA, 19 nt, Homo sapiens
  misc_RNA (1)...(19): siRNA sense strand
uguagacugccgaguaaua

SEQ ID NO: 2011078 - RNA, 19 nt, Homo sapiens
  misc_RNA (1)...(19): siRNA sense strand
cgggagcuguacuucuaua

SEQ ID NO: 2011079 - RNA, 19 nt, Homo sapiens
  misc_RNA (1)...(19): siRNA sense strand
gacugacuguacuaauauu

SEQ ID NO: 2011080 - RNA, 19 nt, Homo sapiens
  misc_RNA (1)...(19): siRNA sense strand
ugucaggagggauuuauuu

SEQ ID NO: 2011081 - RNA, 19 nt, Homo sapiens
  misc_RNA (1)...(19): siRNA sense strand
gaagaaggugacccuaugg

SEQ ID NO: 2011082 - RNA, 19 nt, Homo sapiens
  misc_RNA (1)...(19): siRNA sense strand
gagagacugacuguacuaa

SEQ ID NO: 2011083 - RNA, 19 nt, Homo sapiens
  misc_RNA (1)...(19): siRNA sense strand
caugagagacugacuguac

SEQ ID NO: 2011084 - RNA, 19 nt, Homo sapiens
  misc_RNA (1)...(19): siRNA sense strand
uccaacagccuuccacauu

SEQ ID NO: 2011085 - RNA, 19 nt, Homo sapiens
  misc_RNA (1)...(19): siRNA sense strand
ccaaacggaacucuacaga

SEQ ID NO: 2011086 - RNA, 19 nt, Homo sapiens
  misc_RNA (1)...(19): siRNA sense strand
gcuuugccgugcacacuug

SEQ ID NO: 2011087 - RNA, 19 nt, Homo sapiens
  misc_RNA (1)...(19): siRNA sense strand
uuauaccacuaguguagaa

SEQ ID NO: 2011088 - RNA, 19 nt, Homo sapiens
  misc_RNA (1)...(19): siRNA sense strand
agacugacuguacuaauau

SEQ ID NO: 2011089 - RNA, 19 nt, Homo sapiens
  misc_RNA (1)...(19): siRNA sense strand
cauagcaugggacacauuu

SEQ ID NO: 2011090 - RNA, 19 nt, Homo sapiens
  misc_RNA (1)...(19): siRNA sense strand
gacagucugguccuuugua

SEQ ID NO: 2011091 - RNA, 19 nt, Homo sapiens
  misc_RNA (1)...(19): siRNA sense strand
gcaugggacacauuucuag

SEQ ID NO: 2011092 - RNA, 19 nt, Homo sapiens
  misc_RNA (1)...(19): siRNA sense strand
uuagagccgcugauaugua

SEQ ID NO: 2011093 - RNA, 19 nt, Homo sapiens
  misc_RNA (1)...(19): siRNA sense strand
gagcccggauggcaaguac

SEQ ID NO: 2011094 - RNA, 19 nt, Homo sapiens
  misc_RNA (1)...(19): siRNA sense strand
ucaacgaguuugcuuucuc

SEQ ID NO: 2011095 - RNA, 19 nt, Homo sapiens
  misc_RNA (1)...(19): siRNA sense strand
uguuagagccgcugauaug

SEQ ID NO: 2011096 - RNA, 19 nt, Homo sapiens
  misc_RNA (1)...(19): siRNA sense strand
gcaagagcagugacaaacu

SEQ ID NO: 2011097 - RNA, 19 nt, Homo sapiens
  misc_RNA (1)...(19): siRNA sense strand
uuguagcguuugacccuua

SEQ ID NO: 2011098 - RNA, 19 nt, Homo sapiens
  misc_RNA (1)...(19): siRNA sense strand
uagaagaaggugacccuau

SEQ ID NO: 2011099 - RNA, 19 nt, Homo sapiens
  misc_RNA (1)...(19): siRNA sense strand
uugcaacacuuucacuaca

SEQ ID NO: 2011100 - RNA, 19 nt, Homo sapiens
  misc_RNA (1)...(19): siRNA sense strand
ucaguguuguagcguuuga

SEQ ID NO: 2011101 - RNA, 19 nt, Homo sapiens
  misc_RNA (1)...(19): siRNA sense strand
aaagaucacaagcgaaauc

SEQ ID NO: 2011102 - RNA, 19 nt, Homo sapiens
  misc_RNA (1)...(19): siRNA sense strand
ggagcuguacuucuauauc

SEQ ID NO: 2011103 - RNA, 19 nt, Homo sapiens
  misc_RNA (1)...(19): siRNA sense strand
guagacugccgaguaauag

SEQ ID NO: 2011104 - RNA, 19 nt, Homo sapiens
  misc_RNA (1)...(19): siRNA sense strand
uagcaagagcagugacaaa

SEQ ID NO: 2011105 - RNA, 19 nt, Homo sapiens
  misc_RNA (1)...(19): siRNA sense strand
ugggacacauuucuagcaa

SEQ ID NO: 2011106 - RNA, 19 nt, Homo sapiens
  misc_RNA (1)...(19): siRNA sense strand
cgagugggaacauguacuu

SEQ ID NO: 2011107 - RNA, 19 nt, Homo sapiens
  misc_RNA (1)...(19): siRNA sense strand
uggcagcgaugaggacuuc

SEQ ID NO: 2011108 - RNA, 19 nt, Homo sapiens
  misc_RNA (1)...(19): siRNA sense strand
uaccacuaguguagaagaa

SEQ ID NO: 2011109 - RNA, 19 nt, Homo sapiens
  misc_RNA (1)...(19): siRNA sense strand
ccagauggcaaguucuuag

SEQ ID NO: 2011110 - RNA, 19 nt, Homo sapiens
  misc_RNA (1)...(19): siRNA sense strand
aaggugacccuauggaguu

SEQ ID NO: 2011111 - RNA, 19 nt, Homo sapiens
  misc_RNA (1)...(19): siRNA sense strand
ccuguguccucgaauggaa

SEQ ID NO: 2011112 - RNA, 19 nt, Homo sapiens
  misc_RNA (1)...(19): siRNA sense strand
ggaccuuacagaagauauc

SEQ ID NO: 2011113 - RNA, 19 nt, Homo sapiens
  misc_RNA (1)...(19): siRNA sense strand
gagugggaacauguacuua

SEQ ID NO: 2011114 - RNA, 19 nt, Homo sapiens
  misc_RNA (1)...(19): siRNA sense strand
caacacccgggaacucugu

SEQ ID NO: 2011115 - RNA, 19 nt, Homo sapiens
  misc_RNA (1)...(19): siRNA sense strand
ugagagacugacuguacua

SEQ ID NO: 2011116 - RNA, 19 nt, Homo sapiens
  misc_RNA (1)...(19): siRNA sense strand
gaaagaucacaagcgaaau

SEQ ID NO: 2011117 - RNA, 19 nt, Homo sapiens
  misc_RNA (1)...(19): siRNA sense strand
caacacuuucacuacauga

SEQ ID NO: 2011118 - RNA, 19 nt, Homo sapiens
  misc_RNA (1)...(19): siRNA sense strand
ggugacagucugguccuuu

SEQ ID NO: 2011119 - RNA, 19 nt, Homo sapiens
  misc_RNA (1)...(19): siRNA sense strand
cugcggguguucaacuuug

SEQ ID NO: 2011120 - RNA, 19 nt, Homo sapiens
  misc_RNA (1)...(19): siRNA sense strand
aaucauagcaugggacaca

SEQ ID NO: 2011121 - RNA, 19 nt, Homo sapiens
  misc_RNA (1)...(19): siRNA sense strand
ggcagagaucgagcaaaua

SEQ ID NO: 2011122 - RNA, 19 nt, Homo sapiens
  misc_RNA (1)...(19): siRNA sense strand
gcugcacgguacgaugaaa

SEQ ID NO: 2011123 - RNA, 19 nt, Homo sapiens
  misc_RNA (1)...(19): siRNA sense strand
gucaggagggauuuauuug

SEQ ID NO: 2011124 - RNA, 19 nt, Homo sapiens
  misc_RNA (1)...(19): siRNA sense strand
agaggcaccacgagaaaga

SEQ ID NO: 2011125 - RNA, 19 nt, Homo sapiens
  misc_RNA (1)...(19): siRNA sense strand
caaaacggacccugcuaaa

SEQ ID NO: 2011126 - RNA, 19 nt, Homo sapiens
  misc_RNA (1)...(19): siRNA sense strand
ccucaacgaguuugcuuuc

SEQ ID NO: 2011127 - RNA, 19 nt, Homo sapiens
  misc_RNA (1)...(19): siRNA sense strand
guauagucacugcuuguca

SEQ ID NO: 2011128 - RNA, 19 nt, Homo sapiens
  misc_RNA (1)...(19): siRNA sense strand
ccuuauaccacuaguguag

SEQ ID NO: 2011129 - RNA, 19 nt, Homo sapiens
  misc_RNA (1)...(19): siRNA sense strand
cuuuguagacugccgagua

SEQ ID NO: 2011130 - RNA, 19 nt, Homo sapiens
  misc_RNA (1)...(19): siRNA sense strand
ccaaaacggacccugcuaa

SEQ ID NO: 2011131 - RNA, 19 nt, Homo sapiens
  misc_RNA (1)...(19): siRNA sense strand
agucacgaguuaccugugu

SEQ ID NO: 2011132 - RNA, 19 nt, Homo sapiens
  misc_RNA (1)...(19): siRNA sense strand
gagacugacuguacuaaua

SEQ ID NO: 2011133 - RNA, 19 nt, Homo sapiens
  misc_RNA (1)...(19): siRNA sense strand
ggaaggagaugaacgagau

SEQ ID NO: 2011134 - RNA, 19 nt, Homo sapiens
  misc_RNA (1)...(19): siRNA sense strand
gggaacauguacuuauaua

SEQ ID NO: 2011135 - RNA, 19 nt, Homo sapiens
  misc_RNA (1)...(19): siRNA sense strand
ggacacauuucuagcaaga

SEQ ID NO: 2011136 - RNA, 19 nt, Homo sapiens
  misc_RNA (1)...(19): siRNA sense strand
gaucacaagcgaaaucaua

SEQ ID NO: 2011137 - RNA, 19 nt, Homo sapiens
  misc_RNA (1)...(19): siRNA sense strand
aaacggaacucuacagaca

SEQ ID NO: 2011138 - RNA, 19 nt, Homo sapiens
  misc_RNA (1)...(19): siRNA sense strand
gugggaacauguacuuaua

SEQ ID NO: 2011139 - RNA, 19 nt, Homo sapiens
  misc_RNA (1)...(19): siRNA sense strand
gggaaggccugguaaagug

SEQ ID NO: 2011140 - RNA, 19 nt, Homo sapiens
  misc_RNA (1)...(19): siRNA sense strand
uagagccgcugauauguaa

SEQ ID NO: 2011141 - RNA, 19 nt, Homo sapiens
  misc_RNA (1)...(19): siRNA sense strand
gccgggagcuguacuucua

SEQ ID NO: 2011142 - RNA, 19 nt, Homo sapiens
  misc_RNA (1)...(19): siRNA sense strand
auagacaagucacgaguua

SEQ ID NO: 2011143 - RNA, 19 nt, Homo sapiens
  misc_RNA (1)...(19): siRNA sense strand
caacagccuuccacauuca

SEQ ID NO: 2011144 - RNA, 19 nt, Homo sapiens
  misc_RNA (1)...(19): siRNA sense strand
gagcuguacuucuauaucu

SEQ ID NO: 2011145 - RNA, 19 nt, Homo sapiens
  misc_RNA (1)...(19): siRNA sense strand
aaagauagcacaugagaga

SEQ ID NO: 2011146 - RNA, 19 nt, Homo sapiens
  misc_RNA (1)...(19): siRNA sense strand
ggaacccucuccuuaagug

SEQ ID NO: 2011147 - RNA, 19 nt, Homo sapiens
  misc_RNA (1)...(19): siRNA sense strand
gcagagaucgagcaaauag

SEQ ID NO: 2011148 - RNA, 19 nt, Homo sapiens
  misc_RNA (1)...(19): siRNA sense strand
gagaugaacgagauuaaga

SEQ ID NO: 2011149 - RNA, 19 nt, Homo sapiens
  misc_RNA (1)...(19): siRNA sense strand
gcaaggacacacacaaaug

SEQ ID NO: 2011150 - RNA, 19 nt, Homo sapiens
  misc_RNA (1)...(19): siRNA sense strand
acacaaaugucaugaaugc

SEQ ID NO: 2011151 - RNA, 19 nt, Homo sapiens
  misc_RNA (1)...(19): siRNA sense strand
ggucaguguuguagcguuu

SEQ ID NO: 2011152 - RNA, 19 nt, Homo sapiens
  misc_RNA (1)...(19): siRNA sense strand
acacacaaaugucaugaau

SEQ ID NO: 2011153 - RNA, 19 nt, Homo sapiens
  misc_RNA (1)...(19): siRNA sense strand
gagcaaggacacacacaaa

SEQ ID NO: 2011154 - RNA, 19 nt, Homo sapiens
  misc_RNA (1)...(19): siRNA sense strand
uaugggaccuuacagaaga

SEQ ID NO: 2011155 - RNA, 19 nt, Homo sapiens
  misc_RNA (1)...(19): siRNA sense strand
agaagaaggugacccuaug

SEQ ID NO: 2011156 - RNA, 19 nt, Homo sapiens
  misc_RNA (1)...(19): siRNA sense strand
gcaacacuuucacuacaug

SEQ ID NO: 2011157 - RNA, 19 nt, Homo sapiens
  misc_RNA (1)...(19): siRNA sense strand
cgaguuaccugugucaaau

SEQ ID NO: 2011158 - RNA, 19 nt, Homo sapiens
  misc_RNA (1)...(19): siRNA sense strand
ccaacagccuuccacauuc

SEQ ID NO: 2011159 - RNA, 19 nt, Homo sapiens
  misc_RNA (1)...(19): siRNA sense strand
uggcagagaucgagcaaau

SEQ ID NO: 2011160 - RNA, 19 nt, Homo sapiens
  misc_RNA (1)...(19): siRNA sense strand
ggagaggcaccacgagaaa

SEQ ID NO: 2011161 - RNA, 19 nt, Homo sapiens
  misc_RNA (1)...(19): siRNA sense strand
agaaagaucacaagcgaaa

SEQ ID NO: 2011162 - RNA, 19 nt, Homo sapiens
  misc_RNA (1)...(19): siRNA sense strand
gggaaggucuguacaagcu

SEQ ID NO: 2011163 - RNA, 19 nt, Homo sapiens
  misc_RNA (1)...(19): siRNA sense strand
guacuucuauaucuacaag

SEQ ID NO: 2011164 - RNA, 19 nt, Homo sapiens
  misc_RNA (1)...(19): siRNA sense strand
agagaucgagcaaauagua

SEQ ID NO: 2011165 - RNA, 19 nt, Homo sapiens
  misc_RNA (1)...(19): siRNA sense strand
gagcugcacgguacgauga

SEQ ID NO: 2011166 - RNA, 19 nt, Homo sapiens
  misc_RNA (1)...(19): siRNA sense strand
gagauuaagacccaauuca

SEQ ID NO: 2011167 - RNA, 19 nt, Homo sapiens
  misc_RNA (1)...(19): siRNA sense strand
gaccgccucugcuucaaug

SEQ ID NO: 2011168 - RNA, 19 nt, Homo sapiens
  misc_RNA (1)...(19): siRNA sense strand
caaggacacacacaaaugu

SEQ ID NO: 2011169 - RNA, 19 nt, Homo sapiens
  misc_RNA (1)...(19): siRNA sense strand
gaagauguucccuuguuag

SEQ ID NO: 2011170 - RNA, 19 nt, Homo sapiens
  misc_RNA (1)...(19): siRNA sense strand
caggagggauuuauuugca

SEQ ID NO: 2011171 - RNA, 19 nt, Homo sapiens
  misc_RNA (1)...(19): siRNA sense strand
gcgaugaggacuuccaaga

SEQ ID NO: 2011172 - RNA, 19 nt, Homo sapiens
  misc_RNA (1)...(19): siRNA sense strand
gugacaaacugaaucuagu

SEQ ID NO: 2011173 - RNA, 19 nt, Homo sapiens
  misc_RNA (1)...(19): siRNA sense strand
gcacaaguccugggucagu

SEQ ID NO: 2011174 - RNA, 19 nt, Homo sapiens
  misc_RNA (1)...(19): siRNA sense strand
caaauuugcaacacuuuca

SEQ ID NO: 2011175 - RNA, 19 nt, Homo sapiens
  misc_RNA (1)...(19): siRNA sense strand
gaagcaaugggaacagugu

SEQ ID NO: 2011176 - RNA, 19 nt, Homo sapiens
  misc_RNA (1)...(19): siRNA sense strand
gugacagucugguccuuug

SEQ ID NO: 2011177 - RNA, 19 nt, Homo sapiens
  misc_RNA (1)...(19): siRNA sense strand
uuuguagacugccgaguaa

SEQ ID NO: 2011178 - RNA, 19 nt, Homo sapiens
  misc_RNA (1)...(19): siRNA sense strand
gaggagggaaggagaugaa

SEQ ID NO: 2011179 - RNA, 19 nt, Homo sapiens
  misc_RNA (1)...(19): siRNA sense strand
cgggagcuguacuucuaua

SEQ ID NO: 2011180 - RNA, 19 nt, Homo sapiens
  misc_RNA (1)...(19): siRNA sense strand
uguagacugccgaguaaua

SEQ ID NO: 2011181 - RNA, 19 nt, Homo sapiens
  misc_RNA (1)...(19): siRNA sense strand
gacugacuguacuaauauu

SEQ ID NO: 2011182 - RNA, 19 nt, Homo sapiens
  misc_RNA (1)...(19): siRNA sense strand
ugucaggagggauuuauuu

SEQ ID NO: 2011183 - RNA, 19 nt, Homo sapiens
  misc_RNA (1)...(19): siRNA sense strand
gcuuugccgugcacacuug

SEQ ID NO: 2011184 - RNA, 19 nt, Homo sapiens
  misc_RNA (1)...(19): siRNA sense strand
gagagacugacuguacuaa

SEQ ID NO: 2011185 - RNA, 19 nt, Homo sapiens
  misc_RNA (1)...(19): siRNA sense strand
caugagagacugacuguac

SEQ ID NO: 2011186 - RNA, 19 nt, Homo sapiens
  misc_RNA (1)...(19): siRNA sense strand
uccaacagccuuccacauu

SEQ ID NO: 2011187 - RNA, 19 nt, Homo sapiens
  misc_RNA (1)...(19): siRNA sense strand
ccaaacggaacucuacaga

SEQ ID NO: 2011188 - RNA, 19 nt, Homo sapiens
  misc_RNA (1)...(19): siRNA sense strand
gaagaaggugacccuaugg

SEQ ID NO: 2011189 - RNA, 19 nt, Homo sapiens
  misc_RNA (1)...(19): siRNA sense strand
guccgcgucuccuucguaa

SEQ ID NO: 2011190 - RNA, 19 nt, Homo sapiens
  misc_RNA (1)...(19): siRNA sense strand
agacugacuguacuaauau

SEQ ID NO: 2011191 - RNA, 19 nt, Homo sapiens
  misc_RNA (1)...(19): siRNA sense strand
cauagcaugggacacauuu

SEQ ID NO: 2011192 - RNA, 19 nt, Homo sapiens
  misc_RNA (1)...(19): siRNA sense strand
gagggaaggagaugaacga

SEQ ID NO: 2011193 - RNA, 19 nt, Homo sapiens
  misc_RNA (1)...(19): siRNA sense strand
uuauaccacuaguguagaa

SEQ ID NO: 2011194 - RNA, 19 nt, Homo sapiens
  misc_RNA (1)...(19): siRNA sense strand
gacagucugguccuuugua

SEQ ID NO: 2011195 - RNA, 19 nt, Homo sapiens
  misc_RNA (1)...(19): siRNA sense strand
gaaggagaugaacgagauu

SEQ ID NO: 2011196 - RNA, 19 nt, Homo sapiens
  misc_RNA (1)...(19): siRNA sense strand
gcaugggacacauuucuag

SEQ ID NO: 2011197 - RNA, 19 nt, Homo sapiens
  misc_RNA (1)...(19): siRNA sense strand
uuagagccgcugauaugua

SEQ ID NO: 2011198 - RNA, 19 nt, Homo sapiens
  misc_RNA (1)...(19): siRNA sense strand
ucaacgaguuugcuuucuc

SEQ ID NO: 2011199 - RNA, 19 nt, Homo sapiens
  misc_RNA (1)...(19): siRNA sense strand
uguuagagccgcugauaug

SEQ ID NO: 2011200 - RNA, 19 nt, Homo sapiens
  misc_RNA (1)...(19): siRNA sense strand
gcaagagcagugacaaacu

SEQ ID NO: 2011201 - RNA, 19 nt, Homo sapiens
  misc_RNA (1)...(19): siRNA sense strand
uuguagcguuugacccuua

SEQ ID NO: 2011202 - RNA, 19 nt, Homo sapiens
  misc_RNA (1)...(19): siRNA sense strand
gagcccggauggcaaguac

SEQ ID NO: 2011203 - RNA, 19 nt, Homo sapiens
  misc_RNA (1)...(19): siRNA sense strand
uagaagaaggugacccuau

SEQ ID NO: 2011204 - RNA, 19 nt, Homo sapiens
  misc_RNA (1)...(19): siRNA sense strand
ggagaugaacgagauuaag

SEQ ID NO: 2011205 - RNA, 19 nt, Homo sapiens
  misc_RNA (1)...(19): siRNA sense strand
uugcaacacuuucacuaca

SEQ ID NO: 2011206 - RNA, 19 nt, Homo sapiens
  misc_RNA (1)...(19): siRNA sense strand
ucaguguuguagcguuuga

SEQ ID NO: 2011207 - RNA, 19 nt, Homo sapiens
  misc_RNA (1)...(19): siRNA sense strand
ggagcuguacuucuauauc

SEQ ID NO: 2011208 - RNA, 19 nt, Homo sapiens
  misc_RNA (1)...(19): siRNA sense strand
aaagaucacaagcgaaauc

SEQ ID NO: 2011209 - RNA, 19 nt, Homo sapiens
  misc_RNA (1)...(19): siRNA sense strand
ccaaccgggugcccuucaa

SEQ ID NO: 2011210 - RNA, 19 nt, Homo sapiens
  misc_RNA (1)...(19): siRNA sense strand
ccagauggcaaguucuuag

SEQ ID NO: 2011211 - RNA, 19 nt, Homo sapiens
  misc_RNA (1)...(19): siRNA sense strand
uagcaagagcagugacaaa

SEQ ID NO: 2011212 - RNA, 19 nt, Homo sapiens
  misc_RNA (1)...(19): siRNA sense strand
ugggacacauuucuagcaa

SEQ ID NO: 2011213 - RNA, 19 nt, Homo sapiens
  misc_RNA (1)...(19): siRNA sense strand
cgagugggaacauguacuu

SEQ ID NO: 2011214 - RNA, 19 nt, Homo sapiens
  misc_RNA (1)...(19): siRNA sense strand
uggcagcgaugaggacuuc

SEQ ID NO: 2011215 - RNA, 19 nt, Homo sapiens
  misc_RNA (1)...(19): siRNA sense strand
uaccacuaguguagaagaa

SEQ ID NO: 2011216 - RNA, 19 nt, Homo sapiens
  misc_RNA (1)...(19): siRNA sense strand
guagacugccgaguaauag

SEQ ID NO: 2011217 - RNA, 19 nt, Homo sapiens
  misc_RNA (1)...(19): siRNA sense strand
gagugggaacauguacuua

SEQ ID NO: 2011218 - RNA, 19 nt, Homo sapiens
  misc_RNA (1)...(19): siRNA sense strand
ccuguguccucgaauggaa

SEQ ID NO: 2011219 - RNA, 19 nt, Homo sapiens
  misc_RNA (1)...(19): siRNA sense strand
ggaccuuacagaagauauc

SEQ ID NO: 2011220 - RNA, 19 nt, Homo sapiens
  misc_RNA (1)...(19): siRNA sense strand
aaggugacccuauggaguu

SEQ ID NO: 2011221 - RNA, 19 nt, Homo sapiens
  misc_RNA (1)...(19): siRNA sense strand
caacacccgggaacucugu

SEQ ID NO: 2011222 - RNA, 19 nt, Homo sapiens
  misc_RNA (1)...(19): siRNA sense strand
ugagagacugacuguacua

SEQ ID NO: 2011223 - RNA, 19 nt, Homo sapiens
  misc_RNA (1)...(19): siRNA sense strand
gaaagaucacaagcgaaau

SEQ ID NO: 2011224 - RNA, 19 nt, Homo sapiens
  misc_RNA (1)...(19): siRNA sense strand
caacacuuucacuacauga

SEQ ID NO: 2011225 - RNA, 19 nt, Homo sapiens
  misc_RNA (1)...(19): siRNA sense strand
cugcggguguucaacuuug

SEQ ID NO: 2011226 - RNA, 19 nt, Homo sapiens
  misc_RNA (1)...(19): siRNA sense strand
aaucauagcaugggacaca

SEQ ID NO: 2011227 - RNA, 19 nt, Homo sapiens
  misc_RNA (1)...(19): siRNA sense strand
ggcagagaucgagcaaaua

SEQ ID NO: 2011228 - RNA, 19 nt, Homo sapiens
  misc_RNA (1)...(19): siRNA sense strand
ggugacagucugguccuuu

SEQ ID NO: 2011229 - RNA, 19 nt, Homo sapiens
  misc_RNA (1)...(19): siRNA sense strand
gcugcacgguacgaugaaa

SEQ ID NO: 2011230 - RNA, 19 nt, Homo sapiens
  misc_RNA (1)...(19): siRNA sense strand
gucaggagggauuuauuug

SEQ ID NO: 2011231 - RNA, 19 nt, Homo sapiens
  misc_RNA (1)...(19): siRNA sense strand
caaaacggacccugcuaaa

SEQ ID NO: 2011232 - RNA, 19 nt, Homo sapiens
  misc_RNA (1)...(19): siRNA sense strand
gagacugacuguacuaaua

SEQ ID NO: 2011233 - RNA, 19 nt, Homo sapiens
  misc_RNA (1)...(19): siRNA sense strand
ggaaggagaugaacgagau

SEQ ID NO: 2011234 - RNA, 19 nt, Homo sapiens
  misc_RNA (1)...(19): siRNA sense strand
gggaacauguacuuauaua

SEQ ID NO: 2011235 - RNA, 19 nt, Homo sapiens
  misc_RNA (1)...(19): siRNA sense strand
ggacacauuucuagcaaga

SEQ ID NO: 2011236 - RNA, 19 nt, Homo sapiens
  misc_RNA (1)...(19): siRNA sense strand
gaucacaagcgaaaucaua

SEQ ID NO: 2011237 - RNA, 19 nt, Homo sapiens
  misc_RNA (1)...(19): siRNA sense strand
aaacggaacucuacagaca

SEQ ID NO: 2011238 - RNA, 19 nt, Homo sapiens
  misc_RNA (1)...(19): siRNA sense strand
gugggaacauguacuuaua

SEQ ID NO: 2011239 - RNA, 19 nt, Homo sapiens
  misc_RNA (1)...(19): siRNA sense strand
gggaaggccugguaaagug

SEQ ID NO: 2011240 - RNA, 19 nt, Homo sapiens
  misc_RNA (1)...(19): siRNA sense strand
uagagccgcugauauguaa

SEQ ID NO: 2011241 - RNA, 19 nt, Homo sapiens
  misc_RNA (1)...(19): siRNA sense strand
gccgggagcuguacuucua

SEQ ID NO: 2011242 - RNA, 19 nt, Homo sapiens
  misc_RNA (1)...(19): siRNA sense strand
auagacaagucacgaguua

SEQ ID NO: 2011243 - RNA, 19 nt, Homo sapiens
  misc_RNA (1)...(19): siRNA sense strand
caacagccuuccacauuca

SEQ ID NO: 2011244 - RNA, 19 nt, Homo sapiens
  misc_RNA (1)...(19): siRNA sense strand
gagcuguacuucuauaucu

SEQ ID NO: 2011245 - RNA, 19 nt, Homo sapiens
  misc_RNA (1)...(19): siRNA sense strand
aaagauagcacaugagaga

SEQ ID NO: 2011246 - RNA, 19 nt, Homo sapiens
  misc_RNA (1)...(19): siRNA sense strand
ggaacccucuccuuaagug

SEQ ID NO: 2011247 - RNA, 19 nt, Homo sapiens
  misc_RNA (1)...(19): siRNA sense strand
gcagagaucgagcaaauag

SEQ ID NO: 2011248 - RNA, 19 nt, Homo sapiens
  misc_RNA (1)...(19): siRNA sense strand
gagaugaacgagauuaaga

SEQ ID NO: 2011249 - RNA, 19 nt, Homo sapiens
  misc_RNA (1)...(19): siRNA sense strand
gcaaggacacacacaaaug

SEQ ID NO: 2011250 - RNA, 19 nt, Homo sapiens
  misc_RNA (1)...(19): siRNA sense strand
acacaaaugucaugaaugc

SEQ ID NO: 2011251 - RNA, 19 nt, Homo sapiens
  misc_RNA (1)...(19): siRNA sense strand
ggucaguguuguagcguuu

SEQ ID NO: 2011252 - RNA, 19 nt, Homo sapiens
  misc_RNA (1)...(19): siRNA sense strand
acacacaaaugucaugaau

SEQ ID NO: 2011253 - RNA, 19 nt, Homo sapiens
  misc_RNA (1)...(19): siRNA sense strand
gagcaaggacacacacaaa

SEQ ID NO: 2011254 - RNA, 19 nt, Homo sapiens
  misc_RNA (1)...(19): siRNA sense strand
uaugggaccuuacagaaga

SEQ ID NO: 2011255 - RNA, 19 nt, Homo sapiens
  misc_RNA (1)...(19): siRNA sense strand
agaagaaggugacccuaug

SEQ ID NO: 2011256 - RNA, 19 nt, Homo sapiens
  misc_RNA (1)...(19): siRNA sense strand
gcaacacuuucacuacaug

SEQ ID NO: 2011257 - RNA, 19 nt, Homo sapiens
  misc_RNA (1)...(19): siRNA sense strand
cgaguuaccugugucaaau

SEQ ID NO: 2011258 - RNA, 19 nt, Homo sapiens
  misc_RNA (1)...(19): siRNA sense strand
ccaacagccuuccacauuc

SEQ ID NO: 2011259 - RNA, 19 nt, Homo sapiens
  misc_RNA (1)...(19): siRNA sense strand
uggcagagaucgagcaaau

SEQ ID NO: 2011260 - RNA, 19 nt, Homo sapiens
  misc_RNA (1)...(19): siRNA sense strand
ggagaggcaccacgagaaa

SEQ ID NO: 2011261 - RNA, 19 nt, Homo sapiens
  misc_RNA (1)...(19): siRNA sense strand
agaaagaucacaagcgaaa

SEQ ID NO: 2011262 - RNA, 19 nt, Homo sapiens
  misc_RNA (1)...(19): siRNA sense strand
gggaaggucuguacaagcu

SEQ ID NO: 2011263 - RNA, 19 nt, Homo sapiens
  misc_RNA (1)...(19): siRNA sense strand
guacuucuauaucuacaag

SEQ ID NO: 2011264 - RNA, 19 nt, Homo sapiens
  misc_RNA (1)...(19): siRNA sense strand
agagaucgagcaaauagua

SEQ ID NO: 2011265 - RNA, 19 nt, Homo sapiens
  misc_RNA (1)...(19): siRNA sense strand
gagcugcacgguacgauga

SEQ ID NO: 2011266 - RNA, 19 nt, Homo sapiens
  misc_RNA (1)...(19): siRNA sense strand
gagauuaagacccaauuca

SEQ ID NO: 2011267 - RNA, 19 nt, Homo sapiens
  misc_RNA (1)...(19): siRNA sense strand
gaccgccucugcuucaaug

SEQ ID NO: 2011268 - RNA, 19 nt, Homo sapiens
  misc_RNA (1)...(19): siRNA sense strand
caaggacacacacaaaugu

SEQ ID NO: 2011269 - RNA, 19 nt, Homo sapiens
  misc_RNA (1)...(19): siRNA sense strand
gaagauguucccuuguuag

SEQ ID NO: 2011270 - RNA, 19 nt, Homo sapiens
  misc_RNA (1)...(19): siRNA sense strand
caggagggauuuauuugca

SEQ ID NO: 2011271 - RNA, 19 nt, Homo sapiens
  misc_RNA (1)...(19): siRNA sense strand
gcgaugaggacuuccaaga

SEQ ID NO: 2011272 - RNA, 19 nt, Homo sapiens
  misc_RNA (1)...(19): siRNA sense strand
gugacaaacugaaucuagu

SEQ ID NO: 2011273 - RNA, 19 nt, Homo sapiens
  misc_RNA (1)...(19): siRNA sense strand
gcacaaguccugggucagu

SEQ ID NO: 2011274 - RNA, 19 nt, Homo sapiens
  misc_RNA (1)...(19): siRNA sense strand
caaauuugcaacacuuuca

SEQ ID NO: 2011275 - RNA, 19 nt, Homo sapiens
  misc_RNA (1)...(19): siRNA sense strand
gaagcaaugggaacagugu

SEQ ID NO: 2011276 - RNA, 19 nt, Homo sapiens
  misc_RNA (1)...(19): siRNA sense strand
gugacagucugguccuuug

SEQ ID NO: 2011277 - RNA, 19 nt, Homo sapiens
  misc_RNA (1)...(19): siRNA sense strand
uuuguagacugccgaguaa

SEQ ID NO: 2011278 - RNA, 19 nt, Homo sapiens
  misc_RNA (1)...(19): siRNA sense strand
gaggagggaaggagaugaa

SEQ ID NO: 2011279 - RNA, 19 nt, Homo sapiens
  misc_RNA (1)...(19): siRNA sense strand
cgggagcuguacuucuaua

SEQ ID NO: 2011280 - RNA, 19 nt, Homo sapiens
  misc_RNA (1)...(19): siRNA sense strand
uguagacugccgaguaaua

SEQ ID NO: 2011281 - RNA, 19 nt, Homo sapiens
  misc_RNA (1)...(19): siRNA sense strand
gacugacuguacuaauauu

SEQ ID NO: 2011282 - RNA, 19 nt, Homo sapiens
  misc_RNA (1)...(19): siRNA sense strand
ugucaggagggauuuauuu

SEQ ID NO: 2011283 - RNA, 19 nt, Homo sapiens
  misc_RNA (1)...(19): siRNA sense strand
gcuuugccgugcacacuug

SEQ ID NO: 2011284 - RNA, 19 nt, Homo sapiens
  misc_RNA (1)...(19): siRNA sense strand
gagagacugacuguacuaa

SEQ ID NO: 2011285 - RNA, 19 nt, Homo sapiens
  misc_RNA (1)...(19): siRNA sense strand
caugagagacugacuguac

SEQ ID NO: 2011286 - RNA, 19 nt, Homo sapiens
  misc_RNA (1)...(19): siRNA sense strand
uccaacagccuuccacauu

SEQ ID NO: 2011287 - RNA, 19 nt, Homo sapiens
  misc_RNA (1)...(19): siRNA sense strand
ccaaacggaacucuacaga

SEQ ID NO: 2011288 - RNA, 19 nt, Homo sapiens
  misc_RNA (1)...(19): siRNA sense strand
gaagaaggugacccuaugg

SEQ ID NO: 2011289 - RNA, 19 nt, Homo sapiens
  misc_RNA (1)...(19): siRNA sense strand
guccgcgucuccuucguaa

SEQ ID NO: 2011290 - RNA, 19 nt, Homo sapiens
  misc_RNA (1)...(19): siRNA sense strand
agacugacuguacuaauau

SEQ ID NO: 2011291 - RNA, 19 nt, Homo sapiens
  misc_RNA (1)...(19): siRNA sense strand
cauagcaugggacacauuu

SEQ ID NO: 2011292 - RNA, 19 nt, Homo sapiens
  misc_RNA (1)...(19): siRNA sense strand
gagggaaggagaugaacga

SEQ ID NO: 2011293 - RNA, 19 nt, Homo sapiens
  misc_RNA (1)...(19): siRNA sense strand
uuauaccacuaguguagaa

SEQ ID NO: 2011294 - RNA, 19 nt, Homo sapiens
  misc_RNA (1)...(19): siRNA sense strand
gacagucugguccuuugua

SEQ ID NO: 2011295 - RNA, 19 nt, Homo sapiens
  misc_RNA (1)...(19): siRNA sense strand
gaaggagaugaacgagauu

SEQ ID NO: 2011296 - RNA, 19 nt, Homo sapiens
  misc_RNA (1)...(19): siRNA sense strand
gcaugggacacauuucuag

SEQ ID NO: 2011297 - RNA, 19 nt, Homo sapiens
  misc_RNA (1)...(19): siRNA sense strand
uuagagccgcugauaugua

SEQ ID NO: 2011298 - RNA, 19 nt, Homo sapiens
  misc_RNA (1)...(19): siRNA sense strand
ucaacgaguuugcuuucuc

SEQ ID NO: 2011299 - RNA, 19 nt, Homo sapiens
  misc_RNA (1)...(19): siRNA sense strand
uguuagagccgcugauaug

SEQ ID NO: 2011300 - RNA, 19 nt, Homo sapiens
  misc_RNA (1)...(19): siRNA sense strand
gcaagagcagugacaaacu

SEQ ID NO: 2011301 - RNA, 19 nt, Homo sapiens
  misc_RNA (1)...(19): siRNA sense strand
uuguagcguuugacccuua

SEQ ID NO: 2011302 - RNA, 19 nt, Homo sapiens
  misc_RNA (1)...(19): siRNA sense strand
gagcccggauggcaaguac

SEQ ID NO: 2011303 - RNA, 19 nt, Homo sapiens
  misc_RNA (1)...(19): siRNA sense strand
uagaagaaggugacccuau

SEQ ID NO: 2011304 - RNA, 19 nt, Homo sapiens
  misc_RNA (1)...(19): siRNA sense strand
ggagaugaacgagauuaag

SEQ ID NO: 2011305 - RNA, 19 nt, Homo sapiens
  misc_RNA (1)...(19): siRNA sense strand
uugcaacacuuucacuaca

SEQ ID NO: 2011306 - RNA, 19 nt, Homo sapiens
  misc_RNA (1)...(19): siRNA sense strand
ucaguguuguagcguuuga

SEQ ID NO: 2011307 - RNA, 19 nt, Homo sapiens
  misc_RNA (1)...(19): siRNA sense strand
ggagcuguacuucuauauc

SEQ ID NO: 2011308 - RNA, 19 nt, Homo sapiens
  misc_RNA (1)...(19): siRNA sense strand
aaagaucacaagcgaaauc

SEQ ID NO: 2011309 - RNA, 19 nt, Homo sapiens
  misc_RNA (1)...(19): siRNA sense strand
ccaaccgggugcccuucaa

SEQ ID NO: 2011310 - RNA, 19 nt, Homo sapiens
  misc_RNA (1)...(19): siRNA sense strand
ccagauggcaaguucuuag

SEQ ID NO: 2011311 - RNA, 19 nt, Homo sapiens
  misc_RNA (1)...(19): siRNA sense strand
uagcaagagcagugacaaa

SEQ ID NO: 2011312 - RNA, 19 nt, Homo sapiens
  misc_RNA (1)...(19): siRNA sense strand
ugggacacauuucuagcaa

SEQ ID NO: 2011313 - RNA, 19 nt, Homo sapiens
  misc_RNA (1)...(19): siRNA sense strand
cgagugggaacauguacuu

SEQ ID NO: 2011314 - RNA, 19 nt, Homo sapiens
  misc_RNA (1)...(19): siRNA sense strand
uggcagcgaugaggacuuc

SEQ ID NO: 2011315 - RNA, 19 nt, Homo sapiens
  misc_RNA (1)...(19): siRNA sense strand
uaccacuaguguagaagaa

SEQ ID NO: 2011316 - RNA, 19 nt, Homo sapiens
  misc_RNA (1)...(19): siRNA sense strand
guagacugccgaguaauag

SEQ ID NO: 2011317 - RNA, 19 nt, Homo sapiens
  misc_RNA (1)...(19): siRNA sense strand
gagugggaacauguacuua

SEQ ID NO: 2011318 - RNA, 19 nt, Homo sapiens
  misc_RNA (1)...(19): siRNA sense strand
ccuguguccucgaauggaa

SEQ ID NO: 2011319 - RNA, 19 nt, Homo sapiens
  misc_RNA (1)...(19): siRNA sense strand
ggaccuuacagaagauauc

SEQ ID NO: 2011320 - RNA, 19 nt, Homo sapiens
  misc_RNA (1)...(19): siRNA sense strand
aaggugacccuauggaguu

SEQ ID NO: 2011321 - RNA, 19 nt, Homo sapiens
  misc_RNA (1)...(19): siRNA sense strand
caacacccgggaacucugu

SEQ ID NO: 2011322 - RNA, 19 nt, Homo sapiens
  misc_RNA (1)...(19): siRNA sense strand
ugagagacugacuguacua

SEQ ID NO: 2011323 - RNA, 19 nt, Homo sapiens
  misc_RNA (1)...(19): siRNA sense strand
gaaagaucacaagcgaaau

SEQ ID NO: 2011324 - RNA, 19 nt, Homo sapiens
  misc_RNA (1)...(19): siRNA sense strand
caacacuuucacuacauga

SEQ ID NO: 2011325 - RNA, 19 nt, Homo sapiens
  misc_RNA (1)...(19): siRNA sense strand
cugcggguguucaacuuug

SEQ ID NO: 2011326 - RNA, 19 nt, Homo sapiens
  misc_RNA (1)...(19): siRNA sense strand
aaucauagcaugggacaca

SEQ ID NO: 2011327 - RNA, 19 nt, Homo sapiens
  misc_RNA (1)...(19): siRNA sense strand
ggcagagaucgagcaaaua

SEQ ID NO: 2011328 - RNA, 19 nt, Homo sapiens
  misc_RNA (1)...(19): siRNA sense strand
ggugacagucugguccuuu

SEQ ID NO: 2011329 - RNA, 19 nt, Homo sapiens
  misc_RNA (1)...(19): siRNA sense strand
gcugcacgguacgaugaaa

SEQ ID NO: 2011330 - RNA, 19 nt, Homo sapiens
  misc_RNA (1)...(19): siRNA sense strand
gucaggagggauuuauuug

SEQ ID NO: 2011331 - RNA, 19 nt, Homo sapiens
  misc_RNA (1)...(19): siRNA sense strand
caaaacggacccugcuaaa

SEQ ID NO: 2011332 - RNA, 19 nt, Homo sapiens
  misc_RNA (1)...(19): siRNA sense strand
gagacugacuguacuaaua

SEQ ID NO: 2011333 - RNA, 19 nt, Homo sapiens
  misc_RNA (1)...(19): siRNA sense strand
ggaaggagaugaacgagau

SEQ ID NO: 2011334 - RNA, 19 nt, Homo sapiens
  misc_RNA (1)...(19): siRNA sense strand
gggaacauguacuuauaua

SEQ ID NO: 2011335 - RNA, 19 nt, Homo sapiens
  misc_RNA (1)...(19): siRNA sense strand
ggacacauuucuagcaaga

SEQ ID NO: 2011336 - RNA, 19 nt, Homo sapiens
  misc_RNA (1)...(19): siRNA sense strand
gaucacaagcgaaaucaua

SEQ ID NO: 2011337 - RNA, 19 nt, Homo sapiens
  misc_RNA (1)...(19): siRNA sense strand
aaacggaacucuacagaca

SEQ ID NO: 2011338 - RNA, 19 nt, Homo sapiens
  misc_RNA (1)...(19): siRNA sense strand
gugggaacauguacuuaua

SEQ ID NO: 2011339 - RNA, 19 nt, Homo sapiens
  misc_RNA (1)...(19): siRNA sense strand
gggaaggccugguaaagug

SEQ ID NO: 2011340 - RNA, 19 nt, Homo sapiens
  misc_RNA (1)...(19): siRNA sense strand
uagagccgcugauauguaa

SEQ ID NO: 2011341 - RNA, 19 nt, Homo sapiens
  misc_RNA (1)...(19): siRNA sense strand
gccgggagcuguacuucua

SEQ ID NO: 2011342 - RNA, 19 nt, Homo sapiens
  misc_RNA (1)...(19): siRNA sense strand
auagacaagucacgaguua

SEQ ID NO: 2011343 - RNA, 19 nt, Homo sapiens
  misc_RNA (1)...(19): siRNA sense strand
caacagccuuccacauuca

SEQ ID NO: 2011344 - RNA, 19 nt, Homo sapiens
  misc_RNA (1)...(19): siRNA sense strand
gagcuguacuucuauaucu

SEQ ID NO: 2011345 - RNA, 19 nt, Homo sapiens
  misc_RNA (1)...(19): siRNA sense strand
aaagauagcacaugagaga

SEQ ID NO: 2011346 - RNA, 19 nt, Homo sapiens
  misc_RNA (1)...(19): siRNA sense strand
ggaacccucuccuuaagug

SEQ ID NO: 2011347 - RNA, 19 nt, Homo sapiens
  misc_RNA (1)...(19): siRNA sense strand
gcagagaucgagcaaauag

SEQ ID NO: 2011348 - RNA, 19 nt, Homo sapiens
  misc_RNA (1)...(19): siRNA sense strand
gagaugaacgagauuaaga

SEQ ID NO: 2011349 - RNA, 19 nt, Homo sapiens
  misc_RNA (1)...(19): siRNA sense strand
gcaaggacacacacaaaug

SEQ ID NO: 2011350 - RNA, 19 nt, Homo sapiens
  misc_RNA (1)...(19): siRNA sense strand
acacaaaugucaugaaugc

SEQ ID NO: 2011351 - RNA, 19 nt, Homo sapiens
  misc_RNA (1)...(19): siRNA sense strand
ggucaguguuguagcguuu

SEQ ID NO: 2011352 - RNA, 19 nt, Homo sapiens
  misc_RNA (1)...(19): siRNA sense strand
acacacaaaugucaugaau

SEQ ID NO: 2011353 - RNA, 19 nt, Homo sapiens
  misc_RNA (1)...(19): siRNA sense strand
gagcaaggacacacacaaa

SEQ ID NO: 2011354 - RNA, 19 nt, Homo sapiens
  misc_RNA (1)...(19): siRNA sense strand
uaugggaccuuacagaaga

SEQ ID NO: 2011355 - RNA, 19 nt, Homo sapiens
  misc_RNA (1)...(19): siRNA sense strand
agaagaaggugacccuaug

SEQ ID NO: 2011356 - RNA, 19 nt, Homo sapiens
  misc_RNA (1)...(19): siRNA sense strand
gcaacacuuucacuacaug

SEQ ID NO: 2011357 - RNA, 19 nt, Homo sapiens
  misc_RNA (1)...(19): siRNA sense strand
cgaguuaccugugucaaau

SEQ ID NO: 2011358 - RNA, 19 nt, Homo sapiens
  misc_RNA (1)...(19): siRNA sense strand
ccaacagccuuccacauuc

SEQ ID NO: 2011359 - RNA, 19 nt, Homo sapiens
  misc_RNA (1)...(19): siRNA sense strand
uggcagagaucgagcaaau

SEQ ID NO: 2011360 - RNA, 19 nt, Homo sapiens
  misc_RNA (1)...(19): siRNA sense strand
ggagaggcaccacgagaaa

SEQ ID NO: 2011361 - RNA, 19 nt, Homo sapiens
  misc_RNA (1)...(19): siRNA sense strand
agaaagaucacaagcgaaa

SEQ ID NO: 2011362 - RNA, 19 nt, Homo sapiens
  misc_RNA (1)...(19): siRNA sense strand
gggaaggucuguacaagcu

SEQ ID NO: 2011363 - RNA, 19 nt, Homo sapiens
  misc_RNA (1)...(19): siRNA sense strand
guacuucuauaucuacaag

SEQ ID NO: 2011364 - RNA, 19 nt, Homo sapiens
  misc_RNA (1)...(19): siRNA sense strand
agagaucgagcaaauagua

SEQ ID NO: 2011365 - RNA, 19 nt, Homo sapiens
  misc_RNA (1)...(19): siRNA sense strand
gagcugcacgguacgauga

SEQ ID NO: 2011366 - RNA, 19 nt, Homo sapiens
  misc_RNA (1)...(19): siRNA sense strand
gagauuaagacccaauuca

SEQ ID NO: 2011367 - RNA, 19 nt, Homo sapiens
  misc_RNA (1)...(19): siRNA sense strand
gaccgccucugcuucaaug

SEQ ID NO: 2011368 - RNA, 19 nt, Homo sapiens
  misc_RNA (1)...(19): siRNA sense strand
caaggacacacacaaaugu

SEQ ID NO: 2011369 - RNA, 19 nt, Homo sapiens
  misc_RNA (1)...(19): siRNA sense strand
gaagauguucccuuguuag

SEQ ID NO: 2011370 - RNA, 19 nt, Homo sapiens
  misc_RNA (1)...(19): siRNA sense strand
caggagggauuuauuugca

SEQ ID NO: 2011371 - RNA, 19 nt, Homo sapiens
  misc_RNA (1)...(19): siRNA sense strand
gcgaugaggacuuccaaga

SEQ ID NO: 2011372 - RNA, 19 nt, Homo sapiens
  misc_RNA (1)...(19): siRNA sense strand
gugacaaacugaaucuagu

SEQ ID NO: 2011373 - RNA, 19 nt, Homo sapiens
  misc_RNA (1)...(19): siRNA sense strand
gcacaaguccugggucagu

SEQ ID NO: 2011374 - RNA, 19 nt, Homo sapiens
  misc_RNA (1)...(19): siRNA sense strand
caaauuugcaacacuuuca

SEQ ID NO: 2011375 - RNA, 19 nt, Homo sapiens
  misc_RNA (1)...(19): siRNA sense strand
gaagcaaugggaacagugu

SEQ ID NO: 2011376 - RNA, 19 nt, Homo sapiens
  misc_RNA (1)...(19): siRNA sense strand
gugacagucugguccuuug

SEQ ID NO: 2011377 - RNA, 19 nt, Homo sapiens
  misc_RNA (1)...(19): siRNA sense strand
uuuguagacugccgaguaa

SEQ ID NO: 2011378 - RNA, 19 nt, Homo sapiens
  misc_RNA (1)...(19): siRNA sense strand
gaggagggaaggagaugaa

SEQ ID NO: 2011379 - RNA, 19 nt, Homo sapiens
  misc_RNA (1)...(19): siRNA sense strand
cgggagcuguacuucuaua

SEQ ID NO: 2011380 - RNA, 19 nt, Homo sapiens
  misc_RNA (1)...(19): siRNA sense strand
uguagacugccgaguaaua

SEQ ID NO: 2011381 - RNA, 19 nt, Homo sapiens
  misc_RNA (1)...(19): siRNA sense strand
gacugacuguacuaauauu

SEQ ID NO: 2011382 - RNA, 19 nt, Homo sapiens
  misc_RNA (1)...(19): siRNA sense strand
ugucaggagggauuuauuu

SEQ ID NO: 2011383 - RNA, 19 nt, Homo sapiens
  misc_RNA (1)...(19): siRNA sense strand
gcuuugccgugcacacuug

SEQ ID NO: 2011384 - RNA, 19 nt, Homo sapiens
  misc_RNA (1)...(19): siRNA sense strand
gagagacugacuguacuaa

SEQ ID NO: 2011385 - RNA, 19 nt, Homo sapiens
  misc_RNA (1)...(19): siRNA sense strand
caugagagacugacuguac

SEQ ID NO: 2011386 - RNA, 19 nt, Homo sapiens
  misc_RNA (1)...(19): siRNA sense strand
uccaacagccuuccacauu

SEQ ID NO: 2011387 - RNA, 19 nt, Homo sapiens
  misc_RNA (1)...(19): siRNA sense strand
ccaaacggaacucuacaga

SEQ ID NO: 2011388 - RNA, 19 nt, Homo sapiens
  misc_RNA (1)...(19): siRNA sense strand
gaagaaggugacccuaugg

SEQ ID NO: 2011389 - RNA, 19 nt, Homo sapiens
  misc_RNA (1)...(19): siRNA sense strand
guccgcgucuccuucguaa

SEQ ID NO: 2011390 - RNA, 19 nt, Homo sapiens
  misc_RNA (1)...(19): siRNA sense strand
agacugacuguacuaauau

SEQ ID NO: 2011391 - RNA, 19 nt, Homo sapiens
  misc_RNA (1)...(19): siRNA sense strand
cauagcaugggacacauuu

SEQ ID NO: 2011392 - RNA, 19 nt, Homo sapiens
  misc_RNA (1)...(19): siRNA sense strand
gagggaaggagaugaacga

SEQ ID NO: 2011393 - RNA, 19 nt, Homo sapiens
  misc_RNA (1)...(19): siRNA sense strand
uuauaccacuaguguagaa

SEQ ID NO: 2011394 - RNA, 19 nt, Homo sapiens
  misc_RNA (1)...(19): siRNA sense strand
gacagucugguccuuugua

SEQ ID NO: 2011395 - RNA, 19 nt, Homo sapiens
  misc_RNA (1)...(19): siRNA sense strand
gaaggagaugaacgagauu

SEQ ID NO: 2011396 - RNA, 19 nt, Homo sapiens
  misc_RNA (1)...(19): siRNA sense strand
gcaugggacacauuucuag

SEQ ID NO: 2011397 - RNA, 19 nt, Homo sapiens
  misc_RNA (1)...(19): siRNA sense strand
uuagagccgcugauaugua

SEQ ID NO: 2011398 - RNA, 19 nt, Homo sapiens
  misc_RNA (1)...(19): siRNA sense strand
ucaacgaguuugcuuucuc

SEQ ID NO: 2011399 - RNA, 19 nt, Homo sapiens
  misc_RNA (1)...(19): siRNA sense strand
uguuagagccgcugauaug

SEQ ID NO: 2011400 - RNA, 19 nt, Homo sapiens
  misc_RNA (1)...(19): siRNA sense strand
gcaagagcagugacaaacu

SEQ ID NO: 2011401 - RNA, 19 nt, Homo sapiens
  misc_RNA (1)...(19): siRNA sense strand
uuguagcguuugacccuua

SEQ ID NO: 2011402 - RNA, 19 nt, Homo sapiens
  misc_RNA (1)...(19): siRNA sense strand
gagcccggauggcaaguac

SEQ ID NO: 2011403 - RNA, 19 nt, Homo sapiens
  misc_RNA (1)...(19): siRNA sense strand
uagaagaaggugacccuau

SEQ ID NO: 2011404 - RNA, 19 nt, Homo sapiens
  misc_RNA (1)...(19): siRNA sense strand
ggagaugaacgagauuaag

SEQ ID NO: 2011405 - RNA, 19 nt, Homo sapiens
  misc_RNA (1)...(19): siRNA sense strand
uugcaacacuuucacuaca

SEQ ID NO: 2011406 - RNA, 19 nt, Homo sapiens
  misc_RNA (1)...(19): siRNA sense strand
ucaguguuguagcguuuga

SEQ ID NO: 2011407 - RNA, 19 nt, Homo sapiens
  misc_RNA (1)...(19): siRNA sense strand
ggagcuguacuucuauauc

SEQ ID NO: 2011408 - RNA, 19 nt, Homo sapiens
  misc_RNA (1)...(19): siRNA sense strand
aaagaucacaagcgaaauc

SEQ ID NO: 2011409 - RNA, 19 nt, Homo sapiens
  misc_RNA (1)...(19): siRNA sense strand
ccaaccgggugcccuucaa

SEQ ID NO: 2011410 - RNA, 19 nt, Homo sapiens
  misc_RNA (1)...(19): siRNA sense strand
ccagauggcaaguucuuag

SEQ ID NO: 2011411 - RNA, 19 nt, Homo sapiens
  misc_RNA (1)...(19): siRNA sense strand
uagcaagagcagugacaaa

SEQ ID NO: 2011412 - RNA, 19 nt, Homo sapiens
  misc_RNA (1)...(19): siRNA sense strand
ugggacacauuucuagcaa

SEQ ID NO: 2011413 - RNA, 19 nt, Homo sapiens
  misc_RNA (1)...(19): siRNA sense strand
cgagugggaacauguacuu

SEQ ID NO: 2011414 - RNA, 19 nt, Homo sapiens
  misc_RNA (1)...(19): siRNA sense strand
uggcagcgaugaggacuuc

SEQ ID NO: 2011415 - RNA, 19 nt, Homo sapiens
  misc_RNA (1)...(19): siRNA sense strand
uaccacuaguguagaagaa

SEQ ID NO: 2011416 - RNA, 19 nt, Homo sapiens
  misc_RNA (1)...(19): siRNA sense strand
guagacugccgaguaauag

SEQ ID NO: 2011417 - RNA, 19 nt, Homo sapiens
  misc_RNA (1)...(19): siRNA sense strand
gagugggaacauguacuua

SEQ ID NO: 2011418 - RNA, 19 nt, Homo sapiens
  misc_RNA (1)...(19): siRNA sense strand
ccuguguccucgaauggaa

SEQ ID NO: 2011419 - RNA, 19 nt, Homo sapiens
  misc_RNA (1)...(19): siRNA sense strand
ggaccuuacagaagauauc

SEQ ID NO: 2011420 - RNA, 19 nt, Homo sapiens
  misc_RNA (1)...(19): siRNA sense strand
aaggugacccuauggaguu

SEQ ID NO: 2011421 - RNA, 19 nt, Homo sapiens
  misc_RNA (1)...(19): siRNA sense strand
caacacccgggaacucugu

SEQ ID NO: 2011422 - RNA, 19 nt, Homo sapiens
  misc_RNA (1)...(19): siRNA sense strand
ugagagacugacuguacua

SEQ ID NO: 2011423 - RNA, 19 nt, Homo sapiens
  misc_RNA (1)...(19): siRNA sense strand
gaaagaucacaagcgaaau

SEQ ID NO: 2011424 - RNA, 19 nt, Homo sapiens
  misc_RNA (1)...(19): siRNA sense strand
caacacuuucacuacauga

SEQ ID NO: 2011425 - RNA, 19 nt, Homo sapiens
  misc_RNA (1)...(19): siRNA sense strand
cugcggguguucaacuuug

SEQ ID NO: 2011426 - RNA, 19 nt, Homo sapiens
  misc_RNA (1)...(19): siRNA sense strand
aaucauagcaugggacaca

SEQ ID NO: 2011427 - RNA, 19 nt, Homo sapiens
  misc_RNA (1)...(19): siRNA sense strand
ggcagagaucgagcaaaua

SEQ ID NO: 2011428 - RNA, 19 nt, Homo sapiens
  misc_RNA (1)...(19): siRNA sense strand
ggugacagucugguccuuu

SEQ ID NO: 2011429 - RNA, 19 nt, Homo sapiens
  misc_RNA (1)...(19): siRNA sense strand
gcugcacgguacgaugaaa

SEQ ID NO: 2011430 - RNA, 19 nt, Homo sapiens
  misc_RNA (1)...(19): siRNA sense strand
gucaggagggauuuauuug

SEQ ID NO: 2011431 - RNA, 19 nt, Homo sapiens
  misc_RNA (1)...(19): siRNA sense strand
caaaacggacccugcuaaa

SEQ ID NO: 2011432 - RNA, 19 nt, Homo sapiens
  misc_RNA (1)...(19): siRNA sense strand
gagacugacuguacuaaua

SEQ ID NO: 2011433 - RNA, 19 nt, Homo sapiens
  misc_RNA (1)...(19): siRNA sense strand
gggaacauguacuuauaua

SEQ ID NO: 2011434 - RNA, 19 nt, Homo sapiens
  misc_RNA (1)...(19): siRNA sense strand
ggacacauuucuagcaaga

SEQ ID NO: 2011435 - RNA, 19 nt, Homo sapiens
  misc_RNA (1)...(19): siRNA sense strand
gaucacaagcgaaaucaua

SEQ ID NO: 2011436 - RNA, 19 nt, Homo sapiens
  misc_RNA (1)...(19): siRNA sense strand
aaacggaacucuacagaca

SEQ ID NO: 2011437 - RNA, 19 nt, Homo sapiens
  misc_RNA (1)...(19): siRNA sense strand
gugggaacauguacuuaua

SEQ ID NO: 2011438 - RNA, 19 nt, Homo sapiens
  misc_RNA (1)...(19): siRNA sense strand
gggaaggccugguaaagug

SEQ ID NO: 2011439 - RNA, 19 nt, Homo sapiens
  misc_RNA (1)...(19): siRNA sense strand
uagagccgcugauauguaa

SEQ ID NO: 2011440 - RNA, 19 nt, Homo sapiens
  misc_RNA (1)...(19): siRNA sense strand
auagacaagucacgaguua

SEQ ID NO: 2011441 - RNA, 19 nt, Homo sapiens
  misc_RNA (1)...(19): siRNA sense strand
gccgggagcuguacuucua

SEQ ID NO: 2011442 - RNA, 19 nt, Homo sapiens
  misc_RNA (1)...(19): siRNA sense strand
caacagccuuccacauuca

SEQ ID NO: 2011443 - RNA, 19 nt, Homo sapiens
  misc_RNA (1)...(19): siRNA sense strand
aaagauagcacaugagaga

SEQ ID NO: 2011444 - RNA, 19 nt, Homo sapiens
  misc_RNA (1)...(19): siRNA sense strand
gagcuguacuucuauaucu

SEQ ID NO: 2011445 - RNA, 19 nt, Homo sapiens
  misc_RNA (1)...(19): siRNA sense strand
ggaacccucuccuuaagug

SEQ ID NO: 2011446 - RNA, 19 nt, Homo sapiens
  misc_RNA (1)...(19): siRNA sense strand
gcagagaucgagcaaauag

SEQ ID NO: 2011447 - RNA, 19 nt, Homo sapiens
  misc_RNA (1)...(19): siRNA sense strand
gcaaggacacacacaaaug

SEQ ID NO: 2011448 - RNA, 19 nt, Homo sapiens
  misc_RNA (1)...(19): siRNA sense strand
acacaaaugucaugaaugc

SEQ ID NO: 2011449 - RNA, 19 nt, Homo sapiens
  misc_RNA (1)...(19): siRNA sense strand
ggucaguguuguagcguuu

SEQ ID NO: 2011450 - RNA, 19 nt, Homo sapiens
  misc_RNA (1)...(19): siRNA sense strand
acacacaaaugucaugaau

SEQ ID NO: 2011451 - RNA, 19 nt, Homo sapiens
  misc_RNA (1)...(19): siRNA sense strand
gagcaaggacacacacaaa

SEQ ID NO: 2011452 - RNA, 19 nt, Homo sapiens
  misc_RNA (1)...(19): siRNA sense strand
uaugggaccuuacagaaga

SEQ ID NO: 2011453 - RNA, 19 nt, Homo sapiens
  misc_RNA (1)...(19): siRNA sense strand
agaagaaggugacccuaug

SEQ ID NO: 2011454 - RNA, 19 nt, Homo sapiens
  misc_RNA (1)...(19): siRNA sense strand
gcaacacuuucacuacaug

SEQ ID NO: 2011455 - RNA, 19 nt, Homo sapiens
  misc_RNA (1)...(19): siRNA sense strand
uggcagagaucgagcaaau

SEQ ID NO: 2011456 - RNA, 19 nt, Homo sapiens
  misc_RNA (1)...(19): siRNA sense strand
ccaacagccuuccacauuc

SEQ ID NO: 2011457 - RNA, 19 nt, Homo sapiens
  misc_RNA (1)...(19): siRNA sense strand
cgaguuaccugugucaaau

SEQ ID NO: 2011458 - RNA, 19 nt, Homo sapiens
  misc_RNA (1)...(19): siRNA sense strand
ggagaggcaccacgagaaa

SEQ ID NO: 2011459 - RNA, 19 nt, Homo sapiens
  misc_RNA (1)...(19): siRNA sense strand
agaaagaucacaagcgaaa

SEQ ID NO: 2011460 - RNA, 19 nt, Homo sapiens
  misc_RNA (1)...(19): siRNA sense strand
guacuucuauaucuacaag

SEQ ID NO: 2011461 - RNA, 19 nt, Homo sapiens
  misc_RNA (1)...(19): siRNA sense strand
agagaucgagcaaauagua

SEQ ID NO: 2011462 - RNA, 19 nt, Homo sapiens
  misc_RNA (1)...(19): siRNA sense strand
gagcugcacgguacgauga

SEQ ID NO: 2011463 - RNA, 19 nt, Homo sapiens
  misc_RNA (1)...(19): siRNA sense strand
caaggacacacacaaaugu

SEQ ID NO: 2011464 - RNA, 19 nt, Homo sapiens
  misc_RNA (1)...(19): siRNA sense strand
gaagauguucccuuguuag

SEQ ID NO: 2011465 - RNA, 19 nt, Homo sapiens
  misc_RNA (1)...(19): siRNA sense strand
caggagggauuuauuugca

SEQ ID NO: 2011466 - RNA, 19 nt, Homo sapiens
  misc_RNA (1)...(19): siRNA sense strand
gcgaugaggacuuccaaga

SEQ ID NO: 2011467 - RNA, 19 nt, Homo sapiens
  misc_RNA (1)...(19): siRNA sense strand
gugacaaacugaaucuagu

SEQ ID NO: 2011468 - RNA, 19 nt, Homo sapiens
  misc_RNA (1)...(19): siRNA sense strand
gcacaaguccugggucagu

SEQ ID NO: 2011469 - RNA, 19 nt, Homo sapiens
  misc_RNA (1)...(19): siRNA sense strand
caaauuugcaacacuuuca

SEQ ID NO: 2011470 - RNA, 19 nt, Homo sapiens
  misc_RNA (1)...(19): siRNA sense strand
gaagcaaugggaacagugu

SEQ ID NO: 2011471 - RNA, 19 nt, Homo sapiens
  misc_RNA (1)...(19): siRNA sense strand
gugacagucugguccuuug

SEQ ID NO: 2011472 - RNA, 19 nt, Homo sapiens
  misc_RNA (1)...(19): siRNA sense strand
uuuguagacugccgaguaa

SEQ ID NO: 2011473 - RNA, 19 nt, Homo sapiens
  misc_RNA (1)...(19): siRNA sense strand
uguagacugccgaguaaua

SEQ ID NO: 2011474 - RNA, 19 nt, Homo sapiens
  misc_RNA (1)...(19): siRNA sense strand
cgggagcuguacuucuaua

SEQ ID NO: 2011475 - RNA, 19 nt, Homo sapiens
  misc_RNA (1)...(19): siRNA sense strand
gacugacuguacuaauauu

SEQ ID NO: 2011476 - RNA, 19 nt, Homo sapiens
  misc_RNA (1)...(19): siRNA sense strand
ugucaggagggauuuauuu

SEQ ID NO: 2011477 - RNA, 19 nt, Homo sapiens
  misc_RNA (1)...(19): siRNA sense strand
gaagaaggugacccuaugg

SEQ ID NO: 2011478 - RNA, 19 nt, Homo sapiens
  misc_RNA (1)...(19): siRNA sense strand
gagagacugacuguacuaa

SEQ ID NO: 2011479 - RNA, 19 nt, Homo sapiens
  misc_RNA (1)...(19): siRNA sense strand
caugagagacugacuguac

SEQ ID NO: 2011480 - RNA, 19 nt, Homo sapiens
  misc_RNA (1)...(19): siRNA sense strand
uccaacagccuuccacauu

SEQ ID NO: 2011481 - RNA, 19 nt, Homo sapiens
  misc_RNA (1)...(19): siRNA sense strand
ccaaacggaacucuacaga

SEQ ID NO: 2011482 - RNA, 19 nt, Homo sapiens
  misc_RNA (1)...(19): siRNA sense strand
gcuuugccgugcacacuug

SEQ ID NO: 2011483 - RNA, 19 nt, Homo sapiens
  misc_RNA (1)...(19): siRNA sense strand
uuauaccacuaguguagaa

SEQ ID NO: 2011484 - RNA, 19 nt, Homo sapiens
  misc_RNA (1)...(19): siRNA sense strand
agacugacuguacuaauau

SEQ ID NO: 2011485 - RNA, 19 nt, Homo sapiens
  misc_RNA (1)...(19): siRNA sense strand
cauagcaugggacacauuu

SEQ ID NO: 2011486 - RNA, 19 nt, Homo sapiens
  misc_RNA (1)...(19): siRNA sense strand
gacagucugguccuuugua

SEQ ID NO: 2011487 - RNA, 19 nt, Homo sapiens
  misc_RNA (1)...(19): siRNA sense strand
gcaugggacacauuucuag

SEQ ID NO: 2011488 - RNA, 19 nt, Homo sapiens
  misc_RNA (1)...(19): siRNA sense strand
uuagagccgcugauaugua

SEQ ID NO: 2011489 - RNA, 19 nt, Homo sapiens
  misc_RNA (1)...(19): siRNA sense strand
gagcccggauggcaaguac

SEQ ID NO: 2011490 - RNA, 19 nt, Homo sapiens
  misc_RNA (1)...(19): siRNA sense strand
ucaacgaguuugcuuucuc

SEQ ID NO: 2011491 - RNA, 19 nt, Homo sapiens
  misc_RNA (1)...(19): siRNA sense strand
uguuagagccgcugauaug

SEQ ID NO: 2011492 - RNA, 19 nt, Homo sapiens
  misc_RNA (1)...(19): siRNA sense strand
gcaagagcagugacaaacu

SEQ ID NO: 2011493 - RNA, 19 nt, Homo sapiens
  misc_RNA (1)...(19): siRNA sense strand
uuguagcguuugacccuua

SEQ ID NO: 2011494 - RNA, 19 nt, Homo sapiens
  misc_RNA (1)...(19): siRNA sense strand
uagaagaaggugacccuau

SEQ ID NO: 2011495 - RNA, 19 nt, Homo sapiens
  misc_RNA (1)...(19): siRNA sense strand
uugcaacacuuucacuaca

SEQ ID NO: 2011496 - RNA, 19 nt, Homo sapiens
  misc_RNA (1)...(19): siRNA sense strand
ucaguguuguagcguuuga

SEQ ID NO: 2011497 - RNA, 19 nt, Homo sapiens
  misc_RNA (1)...(19): siRNA sense strand
aaagaucacaagcgaaauc

SEQ ID NO: 2011498 - RNA, 19 nt, Homo sapiens
  misc_RNA (1)...(19): siRNA sense strand
ggagcuguacuucuauauc

SEQ ID NO: 2011499 - RNA, 19 nt, Homo sapiens
  misc_RNA (1)...(19): siRNA sense strand
guagacugccgaguaauag

SEQ ID NO: 2011500 - RNA, 19 nt, Homo sapiens
  misc_RNA (1)...(19): siRNA sense strand
uagcaagagcagugacaaa

SEQ ID NO: 2011501 - RNA, 19 nt, Homo sapiens
  misc_RNA (1)...(19): siRNA sense strand
ugggacacauuucuagcaa

SEQ ID NO: 2011502 - RNA, 19 nt, Homo sapiens
  misc_RNA (1)...(19): siRNA sense strand
cgagugggaacauguacuu

SEQ ID NO: 2011503 - RNA, 19 nt, Homo sapiens
  misc_RNA (1)...(19): siRNA sense strand
uggcagcgaugaggacuuc

SEQ ID NO: 2011504 - RNA, 19 nt, Homo sapiens
  misc_RNA (1)...(19): siRNA sense strand
uaccacuaguguagaagaa

SEQ ID NO: 2011505 - RNA, 19 nt, Homo sapiens
  misc_RNA (1)...(19): siRNA sense strand
ccagauggcaaguucuuag

SEQ ID NO: 2011506 - RNA, 19 nt, Homo sapiens
  misc_RNA (1)...(19): siRNA sense strand
aaggugacccuauggaguu

SEQ ID NO: 2011507 - RNA, 19 nt, Homo sapiens
  misc_RNA (1)...(19): siRNA sense strand
ccuguguccucgaauggaa

SEQ ID NO: 2011508 - RNA, 19 nt, Homo sapiens
  misc_RNA (1)...(19): siRNA sense strand
ggaccuuacagaagauauc

SEQ ID NO: 2011509 - RNA, 19 nt, Homo sapiens
  misc_RNA (1)...(19): siRNA sense strand
gagugggaacauguacuua

SEQ ID NO: 2011510 - RNA, 19 nt, Homo sapiens
  misc_RNA (1)...(19): siRNA sense strand
caacacccgggaacucugu

SEQ ID NO: 2011511 - RNA, 19 nt, Homo sapiens
  misc_RNA (1)...(19): siRNA sense strand
ugagagacugacuguacua

SEQ ID NO: 2011512 - RNA, 19 nt, Homo sapiens
  misc_RNA (1)...(19): siRNA sense strand
gaaagaucacaagcgaaau

SEQ ID NO: 2011513 - RNA, 19 nt, Homo sapiens
  misc_RNA (1)...(19): siRNA sense strand
caacacuuucacuacauga

SEQ ID NO: 2011514 - RNA, 19 nt, Homo sapiens
  misc_RNA (1)...(19): siRNA sense strand
ggugacagucugguccuuu

SEQ ID NO: 2011515 - RNA, 19 nt, Homo sapiens
  misc_RNA (1)...(19): siRNA sense strand
cugcggguguucaacuuug

SEQ ID NO: 2011516 - RNA, 19 nt, Homo sapiens
  misc_RNA (1)...(19): siRNA sense strand
aaucauagcaugggacaca

SEQ ID NO: 2011517 - RNA, 19 nt, Homo sapiens
  misc_RNA (1)...(19): siRNA sense strand
ggcagagaucgagcaaaua

SEQ ID NO: 2011518 - RNA, 19 nt, Homo sapiens
  misc_RNA (1)...(19): siRNA sense strand
gcugcacgguacgaugaaa

SEQ ID NO: 2011519 - RNA, 19 nt, Homo sapiens
  misc_RNA (1)...(19): siRNA sense strand
gucaggagggauuuauuug

SEQ ID NO: 2011520 - RNA, 19 nt, Homo sapiens
  misc_RNA (1)...(19): siRNA sense strand
agaggcaccacgagaaaga

SEQ ID NO: 2011521 - RNA, 19 nt, Homo sapiens
  misc_RNA (1)...(19): siRNA sense strand
caaaacggacccugcuaaa

SEQ ID NO: 2011522 - RNA, 19 nt, Homo sapiens
  misc_RNA (1)...(19): siRNA sense strand
ccucaacgaguuugcuuuc

SEQ ID NO: 2011523 - RNA, 19 nt, Homo sapiens
  misc_RNA (1)...(19): siRNA sense strand
guauagucacugcuuguca

SEQ ID NO: 2011524 - RNA, 19 nt, Homo sapiens
  misc_RNA (1)...(19): siRNA sense strand
ccuuauaccacuaguguag

SEQ ID NO: 2011525 - RNA, 19 nt, Homo sapiens
  misc_RNA (1)...(19): siRNA sense strand
cuuuguagacugccgagua

SEQ ID NO: 2011526 - RNA, 19 nt, Homo sapiens
  misc_RNA (1)...(19): siRNA sense strand
ccaaaacggacccugcuaa

SEQ ID NO: 2011527 - RNA, 19 nt, Homo sapiens
  misc_RNA (1)...(19): siRNA sense strand
agucacgaguuaccugugu

SEQ ID NO: 2011528 - RNA, 19 nt, Homo sapiens
  misc_RNA (1)...(19): siRNA sense strand
gagacugacuguacuaaua

SEQ ID NO: 2011529 - RNA, 19 nt, Homo sapiens
  misc_RNA (1)...(19): siRNA sense strand
ggaaggagaugaacgagau

SEQ ID NO: 2011530 - RNA, 19 nt, Homo sapiens
  misc_RNA (1)...(19): siRNA sense strand
gggaacauguacuuauaua

SEQ ID NO: 2011531 - RNA, 19 nt, Homo sapiens
  misc_RNA (1)...(19): siRNA sense strand
ggacacauuucuagcaaga

SEQ ID NO: 2011532 - RNA, 19 nt, Homo sapiens
  misc_RNA (1)...(19): siRNA sense strand
gaucacaagcgaaaucaua

SEQ ID NO: 2011533 - RNA, 19 nt, Homo sapiens
  misc_RNA (1)...(19): siRNA sense strand
aaacggaacucuacagaca

SEQ ID NO: 2011534 - RNA, 19 nt, Homo sapiens
  misc_RNA (1)...(19): siRNA sense strand
gugggaacauguacuuaua

SEQ ID NO: 2011535 - RNA, 19 nt, Homo sapiens
  misc_RNA (1)...(19): siRNA sense strand
gggaaggccugguaaagug

SEQ ID NO: 2011536 - RNA, 19 nt, Homo sapiens
  misc_RNA (1)...(19): siRNA sense strand
uagagccgcugauauguaa

SEQ ID NO: 2011537 - RNA, 19 nt, Homo sapiens
  misc_RNA (1)...(19): siRNA sense strand
gccgggagcuguacuucua

SEQ ID NO: 2011538 - RNA, 19 nt, Homo sapiens
  misc_RNA (1)...(19): siRNA sense strand
auagacaagucacgaguua

SEQ ID NO: 2011539 - RNA, 19 nt, Homo sapiens
  misc_RNA (1)...(19): siRNA sense strand
caacagccuuccacauuca

SEQ ID NO: 2011540 - RNA, 19 nt, Homo sapiens
  misc_RNA (1)...(19): siRNA sense strand
gagcuguacuucuauaucu

SEQ ID NO: 2011541 - RNA, 19 nt, Homo sapiens
  misc_RNA (1)...(19): siRNA sense strand
aaagauagcacaugagaga

SEQ ID NO: 2011542 - RNA, 19 nt, Homo sapiens
  misc_RNA (1)...(19): siRNA sense strand
ggaacccucuccuuaagug

SEQ ID NO: 2011543 - RNA, 19 nt, Homo sapiens
  misc_RNA (1)...(19): siRNA sense strand
gcagagaucgagcaaauag

SEQ ID NO: 2011544 - RNA, 19 nt, Homo sapiens
  misc_RNA (1)...(19): siRNA sense strand
gagaugaacgagauuaaga

SEQ ID NO: 2011545 - RNA, 19 nt, Homo sapiens
  misc_RNA (1)...(19): siRNA sense strand
gcaaggacacacacaaaug

SEQ ID NO: 2011546 - RNA, 19 nt, Homo sapiens
  misc_RNA (1)...(19): siRNA sense strand
acacaaaugucaugaaugc

SEQ ID NO: 2011547 - RNA, 19 nt, Homo sapiens
  misc_RNA (1)...(19): siRNA sense strand
ggucaguguuguagcguuu

SEQ ID NO: 2011548 - RNA, 19 nt, Homo sapiens
  misc_RNA (1)...(19): siRNA sense strand
acacacaaaugucaugaau

SEQ ID NO: 2011549 - RNA, 19 nt, Homo sapiens
  misc_RNA (1)...(19): siRNA sense strand
gagcaaggacacacacaaa

SEQ ID NO: 2011550 - RNA, 19 nt, Homo sapiens
  misc_RNA (1)...(19): siRNA sense strand
uaugggaccuuacagaaga

SEQ ID NO: 2011551 - RNA, 19 nt, Homo sapiens
  misc_RNA (1)...(19): siRNA sense strand
agaagaaggugacccuaug

SEQ ID NO: 2011552 - RNA, 19 nt, Homo sapiens
  misc_RNA (1)...(19): siRNA sense strand
gcaacacuuucacuacaug

SEQ ID NO: 2011553 - RNA, 19 nt, Homo sapiens
  misc_RNA (1)...(19): siRNA sense strand
cgaguuaccugugucaaau

SEQ ID NO: 2011554 - RNA, 19 nt, Homo sapiens
  misc_RNA (1)...(19): siRNA sense strand
ccaacagccuuccacauuc

SEQ ID NO: 2011555 - RNA, 19 nt, Homo sapiens
  misc_RNA (1)...(19): siRNA sense strand
uggcagagaucgagcaaau

SEQ ID NO: 2011556 - RNA, 19 nt, Homo sapiens
  misc_RNA (1)...(19): siRNA sense strand
ggagaggcaccacgagaaa

SEQ ID NO: 2011557 - RNA, 19 nt, Homo sapiens
  misc_RNA (1)...(19): siRNA sense strand
agaaagaucacaagcgaaa

SEQ ID NO: 2011558 - RNA, 19 nt, Homo sapiens
  misc_RNA (1)...(19): siRNA sense strand
gggaaggucuguacaagcu

SEQ ID NO: 2011559 - RNA, 19 nt, Homo sapiens
  misc_RNA (1)...(19): siRNA sense strand
guacuucuauaucuacaag

SEQ ID NO: 2011560 - RNA, 19 nt, Homo sapiens
  misc_RNA (1)...(19): siRNA sense strand
agagaucgagcaaauagua

SEQ ID NO: 2011561 - RNA, 19 nt, Homo sapiens
  misc_RNA (1)...(19): siRNA sense strand
gagcugcacgguacgauga

SEQ ID NO: 2011562 - RNA, 19 nt, Homo sapiens
  misc_RNA (1)...(19): siRNA sense strand
gagauuaagacccaauuca

SEQ ID NO: 2011563 - RNA, 19 nt, Homo sapiens
  misc_RNA (1)...(19): siRNA sense strand
gaccgccucugcuucaaug

SEQ ID NO: 2011564 - RNA, 19 nt, Homo sapiens
  misc_RNA (1)...(19): siRNA sense strand
caaggacacacacaaaugu

SEQ ID NO: 2011565 - RNA, 19 nt, Homo sapiens
  misc_RNA (1)...(19): siRNA sense strand
gaagauguucccuuguuag

SEQ ID NO: 2011566 - RNA, 19 nt, Homo sapiens
  misc_RNA (1)...(19): siRNA sense strand
caggagggauuuauuugca

SEQ ID NO: 2011567 - RNA, 19 nt, Homo sapiens
  misc_RNA (1)...(19): siRNA sense strand
gcgaugaggacuuccaaga

SEQ ID NO: 2011568 - RNA, 19 nt, Homo sapiens
  misc_RNA (1)...(19): siRNA sense strand
gugacaaacugaaucuagu

SEQ ID NO: 2011569 - RNA, 19 nt, Homo sapiens
  misc_RNA (1)...(19): siRNA sense strand
gcacaaguccugggucagu

SEQ ID NO: 2011570 - RNA, 19 nt, Homo sapiens
  misc_RNA (1)...(19): siRNA sense strand
caaauuugcaacacuuuca

SEQ ID NO: 2011571 - RNA, 19 nt, Homo sapiens
  misc_RNA (1)...(19): siRNA sense strand
gaagcaaugggaacagugu

SEQ ID NO: 2011572 - RNA, 19 nt, Homo sapiens
  misc_RNA (1)...(19): siRNA sense strand
gugacagucugguccuuug

SEQ ID NO: 2011573 - RNA, 19 nt, Homo sapiens
  misc_RNA (1)...(19): siRNA sense strand
uuuguagacugccgaguaa

SEQ ID NO: 2011574 - RNA, 19 nt, Homo sapiens
  misc_RNA (1)...(19): siRNA sense strand
gaggagggaaggagaugaa

SEQ ID NO: 2011575 - RNA, 19 nt, Homo sapiens
  misc_RNA (1)...(19): siRNA sense strand
cgggagcuguacuucuaua

SEQ ID NO: 2011576 - RNA, 19 nt, Homo sapiens
  misc_RNA (1)...(19): siRNA sense strand
uguagacugccgaguaaua

SEQ ID NO: 2011577 - RNA, 19 nt, Homo sapiens
  misc_RNA (1)...(19): siRNA sense strand
gacugacuguacuaauauu

SEQ ID NO: 2011578 - RNA, 19 nt, Homo sapiens
  misc_RNA (1)...(19): siRNA sense strand
ugucaggagggauuuauuu

SEQ ID NO: 2011579 - RNA, 19 nt, Homo sapiens
  misc_RNA (1)...(19): siRNA sense strand
gcuuugccgugcacacuug

SEQ ID NO: 2011580 - RNA, 19 nt, Homo sapiens
  misc_RNA (1)...(19): siRNA sense strand
gagagacugacuguacuaa

SEQ ID NO: 2011581 - RNA, 19 nt, Homo sapiens
  misc_RNA (1)...(19): siRNA sense strand
caugagagacugacuguac

SEQ ID NO: 2011582 - RNA, 19 nt, Homo sapiens
  misc_RNA (1)...(19): siRNA sense strand
uccaacagccuuccacauu

SEQ ID NO: 2011583 - RNA, 19 nt, Homo sapiens
  misc_RNA (1)...(19): siRNA sense strand
ccaaacggaacucuacaga

SEQ ID NO: 2011584 - RNA, 19 nt, Homo sapiens
  misc_RNA (1)...(19): siRNA sense strand
gaagaaggugacccuaugg

SEQ ID NO: 2011585 - RNA, 19 nt, Homo sapiens
  misc_RNA (1)...(19): siRNA sense strand
guccgcgucuccuucguaa

SEQ ID NO: 2011586 - RNA, 19 nt, Homo sapiens
  misc_RNA (1)...(19): siRNA sense strand
agacugacuguacuaauau

SEQ ID NO: 2011587 - RNA, 19 nt, Homo sapiens
  misc_RNA (1)...(19): siRNA sense strand
cauagcaugggacacauuu

SEQ ID NO: 2011588 - RNA, 19 nt, Homo sapiens
  misc_RNA (1)...(19): siRNA sense strand
gagggaaggagaugaacga

SEQ ID NO: 2011589 - RNA, 19 nt, Homo sapiens
  misc_RNA (1)...(19): siRNA sense strand
uuauaccacuaguguagaa

SEQ ID NO: 2011590 - RNA, 19 nt, Homo sapiens
  misc_RNA (1)...(19): siRNA sense strand
gacagucugguccuuugua

SEQ ID NO: 2011591 - RNA, 19 nt, Homo sapiens
  misc_RNA (1)...(19): siRNA sense strand
gaaggagaugaacgagauu

SEQ ID NO: 2011592 - RNA, 19 nt, Homo sapiens
  misc_RNA (1)...(19): siRNA sense strand
gcaugggacacauuucuag

SEQ ID NO: 2011593 - RNA, 19 nt, Homo sapiens
  misc_RNA (1)...(19): siRNA sense strand
uuagagccgcugauaugua

SEQ ID NO: 2011594 - RNA, 19 nt, Homo sapiens
  misc_RNA (1)...(19): siRNA sense strand
ucaacgaguuugcuuucuc

SEQ ID NO: 2011595 - RNA, 19 nt, Homo sapiens
  misc_RNA (1)...(19): siRNA sense strand
uguuagagccgcugauaug

SEQ ID NO: 2011596 - RNA, 19 nt, Homo sapiens
  misc_RNA (1)...(19): siRNA sense strand
gcaagagcagugacaaacu

SEQ ID NO: 2011597 - RNA, 19 nt, Homo sapiens
  misc_RNA (1)...(19): siRNA sense strand
uuguagcguuugacccuua

SEQ ID NO: 2011598 - RNA, 19 nt, Homo sapiens
  misc_RNA (1)...(19): siRNA sense strand
gagcccggauggcaaguac

SEQ ID NO: 2011599 - RNA, 19 nt, Homo sapiens
  misc_RNA (1)...(19): siRNA sense strand
uagaagaaggugacccuau

SEQ ID NO: 2011600 - RNA, 19 nt, Homo sapiens
  misc_RNA (1)...(19): siRNA sense strand
ggagaugaacgagauuaag

SEQ ID NO: 2011601 - RNA, 19 nt, Homo sapiens
  misc_RNA (1)...(19): siRNA sense strand
uugcaacacuuucacuaca

SEQ ID NO: 2011602 - RNA, 19 nt, Homo sapiens
  misc_RNA (1)...(19): siRNA sense strand
ucaguguuguagcguuuga

SEQ ID NO: 2011603 - RNA, 19 nt, Homo sapiens
  misc_RNA (1)...(19): siRNA sense strand
ggagcuguacuucuauauc

SEQ ID NO: 2011604 - RNA, 19 nt, Homo sapiens
  misc_RNA (1)...(19): siRNA sense strand
aaagaucacaagcgaaauc

SEQ ID NO: 2011605 - RNA, 19 nt, Homo sapiens
  misc_RNA (1)...(19): siRNA sense strand
ccaaccgggugcccuucaa

SEQ ID NO: 2011606 - RNA, 19 nt, Homo sapiens
  misc_RNA (1)...(19): siRNA sense strand
ccagauggcaaguucuuag

SEQ ID NO: 2011607 - RNA, 19 nt, Homo sapiens
  misc_RNA (1)...(19): siRNA sense strand
uagcaagagcagugacaaa

SEQ ID NO: 2011608 - RNA, 19 nt, Homo sapiens
  misc_RNA (1)...(19): siRNA sense strand
ugggacacauuucuagcaa

SEQ ID NO: 2011609 - RNA, 19 nt, Homo sapiens
  misc_RNA (1)...(19): siRNA sense strand
cgagugggaacauguacuu

SEQ ID NO: 2011610 - RNA, 19 nt, Homo sapiens
  misc_RNA (1)...(19): siRNA sense strand
uggcagcgaugaggacuuc

SEQ ID NO: 2011611 - RNA, 19 nt, Homo sapiens
  misc_RNA (1)...(19): siRNA sense strand
uaccacuaguguagaagaa

SEQ ID NO: 2011612 - RNA, 19 nt, Homo sapiens
  misc_RNA (1)...(19): siRNA sense strand
guagacugccgaguaauag

SEQ ID NO: 2011613 - RNA, 19 nt, Homo sapiens
  misc_RNA (1)...(19): siRNA sense strand
gagugggaacauguacuua

SEQ ID NO: 2011614 - RNA, 19 nt, Homo sapiens
  misc_RNA (1)...(19): siRNA sense strand
ccuguguccucgaauggaa

SEQ ID NO: 2011615 - RNA, 19 nt, Homo sapiens
  misc_RNA (1)...(19): siRNA sense strand
ggaccuuacagaagauauc

SEQ ID NO: 2011616 - RNA, 19 nt, Homo sapiens
  misc_RNA (1)...(19): siRNA sense strand
aaggugacccuauggaguu

SEQ ID NO: 2011617 - RNA, 19 nt, Homo sapiens
  misc_RNA (1)...(19): siRNA sense strand
caacacccgggaacucugu

SEQ ID NO: 2011618 - RNA, 19 nt, Homo sapiens
  misc_RNA (1)...(19): siRNA sense strand
ugagagacugacuguacua

SEQ ID NO: 2011619 - RNA, 19 nt, Homo sapiens
  misc_RNA (1)...(19): siRNA sense strand
gaaagaucacaagcgaaau

SEQ ID NO: 2011620 - RNA, 19 nt, Homo sapiens
  misc_RNA (1)...(19): siRNA sense strand
caacacuuucacuacauga

SEQ ID NO: 2011621 - RNA, 19 nt, Homo sapiens
  misc_RNA (1)...(19): siRNA sense strand
cugcggguguucaacuuug

SEQ ID NO: 2011622 - RNA, 19 nt, Homo sapiens
  misc_RNA (1)...(19): siRNA sense strand
aaucauagcaugggacaca

SEQ ID NO: 2011623 - RNA, 19 nt, Homo sapiens
  misc_RNA (1)...(19): siRNA sense strand
ggcagagaucgagcaaaua

SEQ ID NO: 2011624 - RNA, 19 nt, Homo sapiens
  misc_RNA (1)...(19): siRNA sense strand
ggugacagucugguccuuu

SEQ ID NO: 2011625 - RNA, 19 nt, Homo sapiens
  misc_RNA (1)...(19): siRNA sense strand
gcugcacgguacgaugaaa

SEQ ID NO: 2011626 - RNA, 19 nt, Homo sapiens
  misc_RNA (1)...(19): siRNA sense strand
gucaggagggauuuauuug

SEQ ID NO: 2011627 - RNA, 19 nt, Homo sapiens
  misc_RNA (1)...(19): siRNA sense strand
caaaacggacccugcuaaa

SEQ ID NO: 2011628 - RNA, 19 nt, Homo sapiens
  misc_RNA (1)...(19): siRNA sense strand
gaugaaccgugccgucuau

SEQ ID NO: 2011629 - RNA, 19 nt, Homo sapiens
  misc_RNA (1)...(19): siRNA sense strand
ugucuucucuuuccucuuu

SEQ ID NO: 2011630 - RNA, 19 nt, Homo sapiens
  misc_RNA (1)...(19): siRNA sense strand
gagcgagaacuaugccuuu

SEQ ID NO: 2011631 - RNA, 19 nt, Homo sapiens
  misc_RNA (1)...(19): siRNA sense strand
ccuggucccucuccaauga

SEQ ID NO: 2011632 - RNA, 19 nt, Homo sapiens
  misc_RNA (1)...(19): siRNA sense strand
cagggaagcugaccaaagc

SEQ ID NO: 2011633 - RNA, 19 nt, Homo sapiens
  misc_RNA (1)...(19): siRNA sense strand
ggccaaggcugcugucaac

SEQ ID NO: 2011634 - RNA, 19 nt, Homo sapiens
  misc_RNA (1)...(19): siRNA sense strand
caucaaugcuugccucaac

SEQ ID NO: 2011635 - RNA, 19 nt, Homo sapiens
  misc_RNA (1)...(19): siRNA sense strand
caccaacguuuccacaguu

SEQ ID NO: 2011636 - RNA, 19 nt, Homo sapiens
  misc_RNA (1)...(19): siRNA sense strand
gcagugcucgugccuauag

SEQ ID NO: 2011637 - RNA, 19 nt, Homo sapiens
  misc_RNA (1)...(19): siRNA sense strand
gcucgugccuauagcaaca

SEQ ID NO: 2011638 - RNA, 19 nt, Homo sapiens
  misc_RNA (1)...(19): siRNA sense strand
ucucuuuccucuuugauau

SEQ ID NO: 2011639 - RNA, 19 nt, Homo sapiens
  misc_RNA (1)...(19): siRNA sense strand
ggaggcgggagcagaagua

SEQ ID NO: 2011640 - RNA, 19 nt, Homo sapiens
  misc_RNA (1)...(19): siRNA sense strand
caaggcugcugucaacaag

SEQ ID NO: 2011641 - RNA, 19 nt, Homo sapiens
  misc_RNA (1)...(19): siRNA sense strand
uggaggacuuugaggauga

SEQ ID NO: 2011642 - RNA, 19 nt, Homo sapiens
  misc_RNA (1)...(19): siRNA sense strand
gguguggcagcaagucuua

SEQ ID NO: 2011643 - RNA, 19 nt, Homo sapiens
  misc_RNA (1)...(19): siRNA sense strand
acacgucacugagcgagaa

SEQ ID NO: 2011644 - RNA, 19 nt, Homo sapiens
  misc_RNA (1)...(19): siRNA sense strand
guaccgcacaccaacguuu

SEQ ID NO: 2011645 - RNA, 19 nt, Homo sapiens
  misc_RNA (1)...(19): siRNA sense strand
ugaccaaagccaagcguuu

SEQ ID NO: 2011646 - RNA, 19 nt, Homo sapiens
  misc_RNA (1)...(19): siRNA sense strand
guggcagugucuucucuuu

SEQ ID NO: 2011647 - RNA, 19 nt, Homo sapiens
  misc_RNA (1)...(19): siRNA sense strand
gaaccgugccgucuaugag

SEQ ID NO: 2011648 - RNA, 19 nt, Homo sapiens
  misc_RNA (1)...(19): siRNA sense strand
ucacugagcgagaacuaug

SEQ ID NO: 2011649 - RNA, 19 nt, Homo sapiens
  misc_RNA (1)...(19): siRNA sense strand
acaaguugcugcucuacag

SEQ ID NO: 2011650 - RNA, 19 nt, Homo sapiens
  misc_RNA (1)...(19): siRNA sense strand
ccaaggcugcugucaacaa

SEQ ID NO: 2011651 - RNA, 19 nt, Homo sapiens
  misc_RNA (1)...(19): siRNA sense strand
acaccaacguuuccacagu

SEQ ID NO: 2011652 - RNA, 19 nt, Homo sapiens
  misc_RNA (1)...(19): siRNA sense strand
ccacagggaagcugaccaa

SEQ ID NO: 2011653 - RNA, 19 nt, Homo sapiens
  misc_RNA (1)...(19): siRNA sense strand
ccucacugcucaucaaugc

SEQ ID NO: 2011654 - RNA, 19 nt, Homo sapiens
  misc_RNA (1)...(19): siRNA sense strand
ccacaggcaagaaagugaa

SEQ ID NO: 2011655 - RNA, 19 nt, Homo sapiens
  misc_RNA (1)...(19): siRNA sense strand
ggaggacuuugaggaugau

SEQ ID NO: 2011656 - RNA, 19 nt, Homo sapiens
  misc_RNA (1)...(19): siRNA sense strand
ucacugcucaucaaugcuu

SEQ ID NO: 2011657 - RNA, 19 nt, Homo sapiens
  misc_RNA (1)...(19): siRNA sense strand
caucuccacaggcaagaaa

SEQ ID NO: 2011658 - RNA, 19 nt, Homo sapiens
  misc_RNA (1)...(19): siRNA sense strand
cacagugcuucgcgugcua

SEQ ID NO: 2011659 - RNA, 19 nt, Homo sapiens
  misc_RNA (1)...(19): siRNA sense strand
ggcagugucuucucuuucc

SEQ ID NO: 2011660 - RNA, 19 nt, Homo sapiens
  misc_RNA (1)...(19): siRNA sense strand
ugcgugcacuucuuugaug

SEQ ID NO: 2011661 - RNA, 19 nt, Homo sapiens
  misc_RNA (1)...(19): siRNA sense strand
gcaguggacgcgagguaca

SEQ ID NO: 2011662 - RNA, 19 nt, Homo sapiens
  misc_RNA (1)...(19): siRNA sense strand
gcgugcacuucuuugaugu

SEQ ID NO: 2011663 - RNA, 19 nt, Homo sapiens
  misc_RNA (1)...(19): siRNA sense strand
gggcaccgucguucuguca

SEQ ID NO: 2011664 - RNA, 19 nt, Homo sapiens
  misc_RNA (1)...(19): siRNA sense strand
uguccuugcucuguccuuu

SEQ ID NO: 2011665 - RNA, 19 nt, Homo sapiens
  misc_RNA (1)...(19): siRNA sense strand
ugaaccgugccgucuauga

SEQ ID NO: 2011666 - RNA, 19 nt, Homo sapiens
  misc_RNA (1)...(19): siRNA sense strand
uagcaguggacgcgaggua

SEQ ID NO: 2011667 - RNA, 19 nt, Homo sapiens
  misc_RNA (1)...(19): siRNA sense strand
uccuugcucuguccuuuga

SEQ ID NO: 2011668 - RNA, 19 nt, Homo sapiens
  misc_RNA (1)...(19): siRNA sense strand
ucaacaacaaccucacugu

SEQ ID NO: 2011669 - RNA, 19 nt, Homo sapiens
  misc_RNA (1)...(19): siRNA sense strand
gggugcgcuucgccaauga

SEQ ID NO: 2011670 - RNA, 19 nt, Homo sapiens
  misc_RNA (1)...(19): siRNA sense strand
accaacguuuccacaguuu

SEQ ID NO: 2011671 - RNA, 19 nt, Homo sapiens
  misc_RNA (1)...(19): siRNA sense strand
gacgggcagugaggacaug

SEQ ID NO: 2011672 - RNA, 19 nt, Homo sapiens
  misc_RNA (1)...(19): siRNA sense strand
gagacugacuguacuaaua

SEQ ID NO: 2011673 - RNA, 19 nt, Homo sapiens
  misc_RNA (1)...(19): siRNA sense strand
ggaaggagaugaacgagau

SEQ ID NO: 2011674 - RNA, 19 nt, Homo sapiens
  misc_RNA (1)...(19): siRNA sense strand
gggaacauguacuuauaua

SEQ ID NO: 2011675 - RNA, 19 nt, Homo sapiens
  misc_RNA (1)...(19): siRNA sense strand
ggacacauuucuagcaaga

SEQ ID NO: 2011676 - RNA, 19 nt, Homo sapiens
  misc_RNA (1)...(19): siRNA sense strand
gaucacaagcgaaaucaua

SEQ ID NO: 2011677 - RNA, 19 nt, Homo sapiens
  misc_RNA (1)...(19): siRNA sense strand
aaacggaacucuacagaca

SEQ ID NO: 2011678 - RNA, 19 nt, Homo sapiens
  misc_RNA (1)...(19): siRNA sense strand
gugggaacauguacuuaua

SEQ ID NO: 2011679 - RNA, 19 nt, Homo sapiens
  misc_RNA (1)...(19): siRNA sense strand
gggaaggccugguaaagug

SEQ ID NO: 2011680 - RNA, 19 nt, Homo sapiens
  misc_RNA (1)...(19): siRNA sense strand
uagagccgcugauauguaa

SEQ ID NO: 2011681 - RNA, 19 nt, Homo sapiens
  misc_RNA (1)...(19): siRNA sense strand
gccgggagcuguacuucua

SEQ ID NO: 2011682 - RNA, 19 nt, Homo sapiens
  misc_RNA (1)...(19): siRNA sense strand
auagacaagucacgaguua

SEQ ID NO: 2011683 - RNA, 19 nt, Homo sapiens
  misc_RNA (1)...(19): siRNA sense strand
caacagccuuccacauuca

SEQ ID NO: 2011684 - RNA, 19 nt, Homo sapiens
  misc_RNA (1)...(19): siRNA sense strand
gagcuguacuucuauaucu

SEQ ID NO: 2011685 - RNA, 19 nt, Homo sapiens
  misc_RNA (1)...(19): siRNA sense strand
aaagauagcacaugagaga

SEQ ID NO: 2011686 - RNA, 19 nt, Homo sapiens
  misc_RNA (1)...(19): siRNA sense strand
ggaacccucuccuuaagug

SEQ ID NO: 2011687 - RNA, 19 nt, Homo sapiens
  misc_RNA (1)...(19): siRNA sense strand
gcagagaucgagcaaauag

SEQ ID NO: 2011688 - RNA, 19 nt, Homo sapiens
  misc_RNA (1)...(19): siRNA sense strand
gagaugaacgagauuaaga

SEQ ID NO: 2011689 - RNA, 19 nt, Homo sapiens
  misc_RNA (1)...(19): siRNA sense strand
gcaaggacacacacaaaug

SEQ ID NO: 2011690 - RNA, 19 nt, Homo sapiens
  misc_RNA (1)...(19): siRNA sense strand
acacaaaugucaugaaugc

SEQ ID NO: 2011691 - RNA, 19 nt, Homo sapiens
  misc_RNA (1)...(19): siRNA sense strand
ggucaguguuguagcguuu

SEQ ID NO: 2011692 - RNA, 19 nt, Homo sapiens
  misc_RNA (1)...(19): siRNA sense strand
acacacaaaugucaugaau

SEQ ID NO: 2011693 - RNA, 19 nt, Homo sapiens
  misc_RNA (1)...(19): siRNA sense strand
gagcaaggacacacacaaa

SEQ ID NO: 2011694 - RNA, 19 nt, Homo sapiens
  misc_RNA (1)...(19): siRNA sense strand
uaugggaccuuacagaaga

SEQ ID NO: 2011695 - RNA, 19 nt, Homo sapiens
  misc_RNA (1)...(19): siRNA sense strand
agaagaaggugacccuaug

SEQ ID NO: 2011696 - RNA, 19 nt, Homo sapiens
  misc_RNA (1)...(19): siRNA sense strand
gcaacacuuucacuacaug

SEQ ID NO: 2011697 - RNA, 19 nt, Homo sapiens
  misc_RNA (1)...(19): siRNA sense strand
cgaguuaccugugucaaau

SEQ ID NO: 2011698 - RNA, 19 nt, Homo sapiens
  misc_RNA (1)...(19): siRNA sense strand
ccaacagccuuccacauuc

SEQ ID NO: 2011699 - RNA, 19 nt, Homo sapiens
  misc_RNA (1)...(19): siRNA sense strand
uggcagagaucgagcaaau

SEQ ID NO: 2011700 - RNA, 19 nt, Homo sapiens
  misc_RNA (1)...(19): siRNA sense strand
ggagaggcaccacgagaaa

SEQ ID NO: 2011701 - RNA, 19 nt, Homo sapiens
  misc_RNA (1)...(19): siRNA sense strand
agaaagaucacaagcgaaa

SEQ ID NO: 2011702 - RNA, 19 nt, Homo sapiens
  misc_RNA (1)...(19): siRNA sense strand
gggaaggucuguacaagcu

SEQ ID NO: 2011703 - RNA, 19 nt, Homo sapiens
  misc_RNA (1)...(19): siRNA sense strand
guacuucuauaucuacaag

SEQ ID NO: 2011704 - RNA, 19 nt, Homo sapiens
  misc_RNA (1)...(19): siRNA sense strand
agagaucgagcaaauagua

SEQ ID NO: 2011705 - RNA, 19 nt, Homo sapiens
  misc_RNA (1)...(19): siRNA sense strand
gagcugcacgguacgauga

SEQ ID NO: 2011706 - RNA, 19 nt, Homo sapiens
  misc_RNA (1)...(19): siRNA sense strand
gagauuaagacccaauuca

SEQ ID NO: 2011707 - RNA, 19 nt, Homo sapiens
  misc_RNA (1)...(19): siRNA sense strand
gaccgccucugcuucaaug

SEQ ID NO: 2011708 - RNA, 19 nt, Homo sapiens
  misc_RNA (1)...(19): siRNA sense strand
caaggacacacacaaaugu

SEQ ID NO: 2011709 - RNA, 19 nt, Homo sapiens
  misc_RNA (1)...(19): siRNA sense strand
gaagauguucccuuguuag

SEQ ID NO: 2011710 - RNA, 19 nt, Homo sapiens
  misc_RNA (1)...(19): siRNA sense strand
caggagggauuuauuugca

SEQ ID NO: 2011711 - RNA, 19 nt, Homo sapiens
  misc_RNA (1)...(19): siRNA sense strand
gcgaugaggacuuccaaga

SEQ ID NO: 2011712 - RNA, 19 nt, Homo sapiens
  misc_RNA (1)...(19): siRNA sense strand
gugacaaacugaaucuagu

SEQ ID NO: 2011713 - RNA, 19 nt, Homo sapiens
  misc_RNA (1)...(19): siRNA sense strand
gcacaaguccugggucagu

SEQ ID NO: 2011714 - RNA, 19 nt, Homo sapiens
  misc_RNA (1)...(19): siRNA sense strand
caaauuugcaacacuuuca

SEQ ID NO: 2011715 - RNA, 19 nt, Homo sapiens
  misc_RNA (1)...(19): siRNA sense strand
gaagcaaugggaacagugu

SEQ ID NO: 2011716 - RNA, 19 nt, Homo sapiens
  misc_RNA (1)...(19): siRNA sense strand
gugacagucugguccuuug

SEQ ID NO: 2011717 - RNA, 19 nt, Homo sapiens
  misc_RNA (1)...(19): siRNA sense strand
uuuguagacugccgaguaa

SEQ ID NO: 2011718 - RNA, 19 nt, Homo sapiens
  misc_RNA (1)...(19): siRNA sense strand
gaggagggaaggagaugaa

SEQ ID NO: 2011719 - RNA, 19 nt, Homo sapiens
  misc_RNA (1)...(19): siRNA sense strand
cgggagcuguacuucuaua

SEQ ID NO: 2011720 - RNA, 19 nt, Homo sapiens
  misc_RNA (1)...(19): siRNA sense strand
uguagacugccgaguaaua

SEQ ID NO: 2011721 - RNA, 19 nt, Homo sapiens
  misc_RNA (1)...(19): siRNA sense strand
gacugacuguacuaauauu

SEQ ID NO: 2011722 - RNA, 19 nt, Homo sapiens
  misc_RNA (1)...(19): siRNA sense strand
ugucaggagggauuuauuu

SEQ ID NO: 2011723 - RNA, 19 nt, Homo sapiens
  misc_RNA (1)...(19): siRNA sense strand
gcuuugccgugcacacuug

SEQ ID NO: 2011724 - RNA, 19 nt, Homo sapiens
  misc_RNA (1)...(19): siRNA sense strand
gagagacugacuguacuaa

SEQ ID NO: 2011725 - RNA, 19 nt, Homo sapiens
  misc_RNA (1)...(19): siRNA sense strand
caugagagacugacuguac

SEQ ID NO: 2011726 - RNA, 19 nt, Homo sapiens
  misc_RNA (1)...(19): siRNA sense strand
uccaacagccuuccacauu

SEQ ID NO: 2011727 - RNA, 19 nt, Homo sapiens
  misc_RNA (1)...(19): siRNA sense strand
ccaaacggaacucuacaga

SEQ ID NO: 2011728 - RNA, 19 nt, Homo sapiens
  misc_RNA (1)...(19): siRNA sense strand
gaagaaggugacccuaugg

SEQ ID NO: 2011729 - RNA, 19 nt, Homo sapiens
  misc_RNA (1)...(19): siRNA sense strand
guccgcgucuccuucguaa

SEQ ID NO: 2011730 - RNA, 19 nt, Homo sapiens
  misc_RNA (1)...(19): siRNA sense strand
agacugacuguacuaauau

SEQ ID NO: 2011731 - RNA, 19 nt, Homo sapiens
  misc_RNA (1)...(19): siRNA sense strand
cauagcaugggacacauuu

SEQ ID NO: 2011732 - RNA, 19 nt, Homo sapiens
  misc_RNA (1)...(19): siRNA sense strand
gagggaaggagaugaacga

SEQ ID NO: 2011733 - RNA, 19 nt, Homo sapiens
  misc_RNA (1)...(19): siRNA sense strand
uuauaccacuaguguagaa

SEQ ID NO: 2011734 - RNA, 19 nt, Homo sapiens
  misc_RNA (1)...(19): siRNA sense strand
gacagucugguccuuugua

SEQ ID NO: 2011735 - RNA, 19 nt, Homo sapiens
  misc_RNA (1)...(19): siRNA sense strand
gaaggagaugaacgagauu

SEQ ID NO: 2011736 - RNA, 19 nt, Homo sapiens
  misc_RNA (1)...(19): siRNA sense strand
gcaugggacacauuucuag

SEQ ID NO: 2011737 - RNA, 19 nt, Homo sapiens
  misc_RNA (1)...(19): siRNA sense strand
uuagagccgcugauaugua

SEQ ID NO: 2011738 - RNA, 19 nt, Homo sapiens
  misc_RNA (1)...(19): siRNA sense strand
ucaacgaguuugcuuucuc

SEQ ID NO: 2011739 - RNA, 19 nt, Homo sapiens
  misc_RNA (1)...(19): siRNA sense strand
uguuagagccgcugauaug

SEQ ID NO: 2011740 - RNA, 19 nt, Homo sapiens
  misc_RNA (1)...(19): siRNA sense strand
gcaagagcagugacaaacu

SEQ ID NO: 2011741 - RNA, 19 nt, Homo sapiens
  misc_RNA (1)...(19): siRNA sense strand
uuguagcguuugacccuua

SEQ ID NO: 2011742 - RNA, 19 nt, Homo sapiens
  misc_RNA (1)...(19): siRNA sense strand
gagcccggauggcaaguac

SEQ ID NO: 2011743 - RNA, 19 nt, Homo sapiens
  misc_RNA (1)...(19): siRNA sense strand
uagaagaaggugacccuau

SEQ ID NO: 2011744 - RNA, 19 nt, Homo sapiens
  misc_RNA (1)...(19): siRNA sense strand
ggagaugaacgagauuaag

SEQ ID NO: 2011745 - RNA, 19 nt, Homo sapiens
  misc_RNA (1)...(19): siRNA sense strand
uugcaacacuuucacuaca

SEQ ID NO: 2011746 - RNA, 19 nt, Homo sapiens
  misc_RNA (1)...(19): siRNA sense strand
ucaguguuguagcguuuga

SEQ ID NO: 2011747 - RNA, 19 nt, Homo sapiens
  misc_RNA (1)...(19): siRNA sense strand
ggagcuguacuucuauauc

SEQ ID NO: 2011748 - RNA, 19 nt, Homo sapiens
  misc_RNA (1)...(19): siRNA sense strand
aaagaucacaagcgaaauc

SEQ ID NO: 2011749 - RNA, 19 nt, Homo sapiens
  misc_RNA (1)...(19): siRNA sense strand
ccaaccgggugcccuucaa

SEQ ID NO: 2011750 - RNA, 19 nt, Homo sapiens
  misc_RNA (1)...(19): siRNA sense strand
ccagauggcaaguucuuag

SEQ ID NO: 2011751 - RNA, 19 nt, Homo sapiens
  misc_RNA (1)...(19): siRNA sense strand
uagcaagagcagugacaaa

SEQ ID NO: 2011752 - RNA, 19 nt, Homo sapiens
  misc_RNA (1)...(19): siRNA sense strand
ugggacacauuucuagcaa

SEQ ID NO: 2011753 - RNA, 19 nt, Homo sapiens
  misc_RNA (1)...(19): siRNA sense strand
cgagugggaacauguacuu

SEQ ID NO: 2011754 - RNA, 19 nt, Homo sapiens
  misc_RNA (1)...(19): siRNA sense strand
uggcagcgaugaggacuuc

SEQ ID NO: 2011755 - RNA, 19 nt, Homo sapiens
  misc_RNA (1)...(19): siRNA sense strand
uaccacuaguguagaagaa

SEQ ID NO: 2011756 - RNA, 19 nt, Homo sapiens
  misc_RNA (1)...(19): siRNA sense strand
guagacugccgaguaauag

SEQ ID NO: 2011757 - RNA, 19 nt, Homo sapiens
  misc_RNA (1)...(19): siRNA sense strand
gagugggaacauguacuua

SEQ ID NO: 2011758 - RNA, 19 nt, Homo sapiens
  misc_RNA (1)...(19): siRNA sense strand
ccuguguccucgaauggaa

SEQ ID NO: 2011759 - RNA, 19 nt, Homo sapiens
  misc_RNA (1)...(19): siRNA sense strand
ggaccuuacagaagauauc

SEQ ID NO: 2011760 - RNA, 19 nt, Homo sapiens
  misc_RNA (1)...(19): siRNA sense strand
aaggugacccuauggaguu

SEQ ID NO: 2011761 - RNA, 19 nt, Homo sapiens
  misc_RNA (1)...(19): siRNA sense strand
caacacccgggaacucugu

SEQ ID NO: 2011762 - RNA, 19 nt, Homo sapiens
  misc_RNA (1)...(19): siRNA sense strand
ugagagacugacuguacua

SEQ ID NO: 2011763 - RNA, 19 nt, Homo sapiens
  misc_RNA (1)...(19): siRNA sense strand
gaaagaucacaagcgaaau

SEQ ID NO: 2011764 - RNA, 19 nt, Homo sapiens
  misc_RNA (1)...(19): siRNA sense strand
caacacuuucacuacauga

SEQ ID NO: 2011765 - RNA, 19 nt, Homo sapiens
  misc_RNA (1)...(19): siRNA sense strand
cugcggguguucaacuuug

SEQ ID NO: 2011766 - RNA, 19 nt, Homo sapiens
  misc_RNA (1)...(19): siRNA sense strand
aaucauagcaugggacaca

SEQ ID NO: 2011767 - RNA, 19 nt, Homo sapiens
  misc_RNA (1)...(19): siRNA sense strand
ggcagagaucgagcaaaua

SEQ ID NO: 2011768 - RNA, 19 nt, Homo sapiens
  misc_RNA (1)...(19): siRNA sense strand
ggugacagucugguccuuu

SEQ ID NO: 2011769 - RNA, 19 nt, Homo sapiens
  misc_RNA (1)...(19): siRNA sense strand
gcugcacgguacgaugaaa

SEQ ID NO: 2011770 - RNA, 19 nt, Homo sapiens
  misc_RNA (1)...(19): siRNA sense strand
gucaggagggauuuauuug

SEQ ID NO: 2011771 - RNA, 19 nt, Homo sapiens
  misc_RNA (1)...(19): siRNA sense strand
caaaacggacccugcuaaa

SEQ ID NO: 2011772 - RNA, 19 nt, Homo sapiens
  misc_RNA (1)...(19): siRNA sense strand
gagacugacuguacuaaua

SEQ ID NO: 2011773 - RNA, 19 nt, Homo sapiens
  misc_RNA (1)...(19): siRNA sense strand
ggaaggagaugaacgagau

SEQ ID NO: 2011774 - RNA, 19 nt, Homo sapiens
  misc_RNA (1)...(19): siRNA sense strand
gggaacauguacuuauaua

SEQ ID NO: 2011775 - RNA, 19 nt, Homo sapiens
  misc_RNA (1)...(19): siRNA sense strand
ggacacauuucuagcaaga

SEQ ID NO: 2011776 - RNA, 19 nt, Homo sapiens
  misc_RNA (1)...(19): siRNA sense strand
gaucacaagcgaaaucaua

SEQ ID NO: 2011777 - RNA, 19 nt, Homo sapiens
  misc_RNA (1)...(19): siRNA sense strand
aaacggaacucuacagaca

SEQ ID NO: 2011778 - RNA, 19 nt, Homo sapiens
  misc_RNA (1)...(19): siRNA sense strand
gugggaacauguacuuaua

SEQ ID NO: 2011779 - RNA, 19 nt, Homo sapiens
  misc_RNA (1)...(19): siRNA sense strand
gggaaggccugguaaagug

SEQ ID NO: 2011780 - RNA, 19 nt, Homo sapiens
  misc_RNA (1)...(19): siRNA sense strand
uagagccgcugauauguaa

SEQ ID NO: 2011781 - RNA, 19 nt, Homo sapiens
  misc_RNA (1)...(19): siRNA sense strand
gccgggagcuguacuucua

SEQ ID NO: 2011782 - RNA, 19 nt, Homo sapiens
  misc_RNA (1)...(19): siRNA sense strand
auagacaagucacgaguua

SEQ ID NO: 2011783 - RNA, 19 nt, Homo sapiens
  misc_RNA (1)...(19): siRNA sense strand
caacagccuuccacauuca

SEQ ID NO: 2011784 - RNA, 19 nt, Homo sapiens
  misc_RNA (1)...(19): siRNA sense strand
gagcuguacuucuauaucu

SEQ ID NO: 2011785 - RNA, 19 nt, Homo sapiens
  misc_RNA (1)...(19): siRNA sense strand
aaagauagcacaugagaga

SEQ ID NO: 2011786 - RNA, 19 nt, Homo sapiens
  misc_RNA (1)...(19): siRNA sense strand
ggaacccucuccuuaagug

SEQ ID NO: 2011787 - RNA, 19 nt, Homo sapiens
  misc_RNA (1)...(19): siRNA sense strand
gcagagaucgagcaaauag

SEQ ID NO: 2011788 - RNA, 19 nt, Homo sapiens
  misc_RNA (1)...(19): siRNA sense strand
gagaugaacgagauuaaga

SEQ ID NO: 2011789 - RNA, 19 nt, Homo sapiens
  misc_RNA (1)...(19): siRNA sense strand
gcaaggacacacacaaaug

SEQ ID NO: 2011790 - RNA, 19 nt, Homo sapiens
  misc_RNA (1)...(19): siRNA sense strand
acacaaaugucaugaaugc

SEQ ID NO: 2011791 - RNA, 19 nt, Homo sapiens
  misc_RNA (1)...(19): siRNA sense strand
ggucaguguuguagcguuu

SEQ ID NO: 2011792 - RNA, 19 nt, Homo sapiens
  misc_RNA (1)...(19): siRNA sense strand
acacacaaaugucaugaau

SEQ ID NO: 2011793 - RNA, 19 nt, Homo sapiens
  misc_RNA (1)...(19): siRNA sense strand
gagcaaggacacacacaaa

SEQ ID NO: 2011794 - RNA, 19 nt, Homo sapiens
  misc_RNA (1)...(19): siRNA sense strand
uaugggaccuuacagaaga

SEQ ID NO: 2011795 - RNA, 19 nt, Homo sapiens
  misc_RNA (1)...(19): siRNA sense strand
agaagaaggugacccuaug

SEQ ID NO: 2011796 - RNA, 19 nt, Homo sapiens
  misc_RNA (1)...(19): siRNA sense strand
gcaacacuuucacuacaug

SEQ ID NO: 2011797 - RNA, 19 nt, Homo sapiens
  misc_RNA (1)...(19): siRNA sense strand
cgaguuaccugugucaaau

SEQ ID NO: 2011798 - RNA, 19 nt, Homo sapiens
  misc_RNA (1)...(19): siRNA sense strand
ccaacagccuuccacauuc

SEQ ID NO: 2011799 - RNA, 19 nt, Homo sapiens
  misc_RNA (1)...(19): siRNA sense strand
uggcagagaucgagcaaau

SEQ ID NO: 2011800 - RNA, 19 nt, Homo sapiens
  misc_RNA (1)...(19): siRNA sense strand
ggagaggcaccacgagaaa

SEQ ID NO: 2011801 - RNA, 19 nt, Homo sapiens
  misc_RNA (1)...(19): siRNA sense strand
agaaagaucacaagcgaaa

SEQ ID NO: 2011802 - RNA, 19 nt, Homo sapiens
  misc_RNA (1)...(19): siRNA sense strand
gggaaggucuguacaagcu

SEQ ID NO: 2011803 - RNA, 19 nt, Homo sapiens
  misc_RNA (1)...(19): siRNA sense strand
guacuucuauaucuacaag

SEQ ID NO: 2011804 - RNA, 19 nt, Homo sapiens
  misc_RNA (1)...(19): siRNA sense strand
agagaucgagcaaauagua

SEQ ID NO: 2011805 - RNA, 19 nt, Homo sapiens
  misc_RNA (1)...(19): siRNA sense strand
gagcugcacgguacgauga

SEQ ID NO: 2011806 - RNA, 19 nt, Homo sapiens
  misc_RNA (1)...(19): siRNA sense strand
gagauuaagacccaauuca

SEQ ID NO: 2011807 - RNA, 19 nt, Homo sapiens
  misc_RNA (1)...(19): siRNA sense strand
gaccgccucugcuucaaug

SEQ ID NO: 2011808 - RNA, 19 nt, Homo sapiens
  misc_RNA (1)...(19): siRNA sense strand
caaggacacacacaaaugu

SEQ ID NO: 2011809 - RNA, 19 nt, Homo sapiens
  misc_RNA (1)...(19): siRNA sense strand
gaagauguucccuuguuag

SEQ ID NO: 2011810 - RNA, 19 nt, Homo sapiens
  misc_RNA (1)...(19): siRNA sense strand
caggagggauuuauuugca

SEQ ID NO: 2011811 - RNA, 19 nt, Homo sapiens
  misc_RNA (1)...(19): siRNA sense strand
gcgaugaggacuuccaaga

SEQ ID NO: 2011812 - RNA, 19 nt, Homo sapiens
  misc_RNA (1)...(19): siRNA sense strand
gugacaaacugaaucuagu

SEQ ID NO: 2011813 - RNA, 19 nt, Homo sapiens
  misc_RNA (1)...(19): siRNA sense strand
gcacaaguccugggucagu

SEQ ID NO: 2011814 - RNA, 19 nt, Homo sapiens
  misc_RNA (1)...(19): siRNA sense strand
caaauuugcaacacuuuca

SEQ ID NO: 2011815 - RNA, 19 nt, Homo sapiens
  misc_RNA (1)...(19): siRNA sense strand
gaagcaaugggaacagugu

SEQ ID NO: 2011816 - RNA, 19 nt, Homo sapiens
  misc_RNA (1)...(19): siRNA sense strand
gugacagucugguccuuug

SEQ ID NO: 2011817 - RNA, 19 nt, Homo sapiens
  misc_RNA (1)...(19): siRNA sense strand
uuuguagacugccgaguaa

SEQ ID NO: 2011818 - RNA, 19 nt, Homo sapiens
  misc_RNA (1)...(19): siRNA sense strand
gaggagggaaggagaugaa

SEQ ID NO: 2011819 - RNA, 19 nt, Homo sapiens
  misc_RNA (1)...(19): siRNA sense strand
cgggagcuguacuucuaua

SEQ ID NO: 2011820 - RNA, 19 nt, Homo sapiens
  misc_RNA (1)...(19): siRNA sense strand
uguagacugccgaguaaua

SEQ ID NO: 2011821 - RNA, 19 nt, Homo sapiens
  misc_RNA (1)...(19): siRNA sense strand
gacugacuguacuaauauu

SEQ ID NO: 2011822 - RNA, 19 nt, Homo sapiens
  misc_RNA (1)...(19): siRNA sense strand
ugucaggagggauuuauuu

SEQ ID NO: 2011823 - RNA, 19 nt, Homo sapiens
  misc_RNA (1)...(19): siRNA sense strand
gcuuugccgugcacacuug

SEQ ID NO: 2011824 - RNA, 19 nt, Homo sapiens
  misc_RNA (1)...(19): siRNA sense strand
gagagacugacuguacuaa

SEQ ID NO: 2011825 - RNA, 19 nt, Homo sapiens
  misc_RNA (1)...(19): siRNA sense strand
caugagagacugacuguac

SEQ ID NO: 2011826 - RNA, 19 nt, Homo sapiens
  misc_RNA (1)...(19): siRNA sense strand
uccaacagccuuccacauu

SEQ ID NO: 2011827 - RNA, 19 nt, Homo sapiens
  misc_RNA (1)...(19): siRNA sense strand
ccaaacggaacucuacaga

SEQ ID NO: 2011828 - RNA, 19 nt, Homo sapiens
  misc_RNA (1)...(19): siRNA sense strand
gaagaaggugacccuaugg

SEQ ID NO: 2011829 - RNA, 19 nt, Homo sapiens
  misc_RNA (1)...(19): siRNA sense strand
guccgcgucuccuucguaa

SEQ ID NO: 2011830 - RNA, 19 nt, Homo sapiens
  misc_RNA (1)...(19): siRNA sense strand
agacugacuguacuaauau

SEQ ID NO: 2011831 - RNA, 19 nt, Homo sapiens
  misc_RNA (1)...(19): siRNA sense strand
cauagcaugggacacauuu

SEQ ID NO: 2011832 - RNA, 19 nt, Homo sapiens
  misc_RNA (1)...(19): siRNA sense strand
gagggaaggagaugaacga

SEQ ID NO: 2011833 - RNA, 19 nt, Homo sapiens
  misc_RNA (1)...(19): siRNA sense strand
uuauaccacuaguguagaa

SEQ ID NO: 2011834 - RNA, 19 nt, Homo sapiens
  misc_RNA (1)...(19): siRNA sense strand
gacagucugguccuuugua

SEQ ID NO: 2011835 - RNA, 19 nt, Homo sapiens
  misc_RNA (1)...(19): siRNA sense strand
gaaggagaugaacgagauu

SEQ ID NO: 2011836 - RNA, 19 nt, Homo sapiens
  misc_RNA (1)...(19): siRNA sense strand
gcaugggacacauuucuag

SEQ ID NO: 2011837 - RNA, 19 nt, Homo sapiens
  misc_RNA (1)...(19): siRNA sense strand
uuagagccgcugauaugua

SEQ ID NO: 2011838 - RNA, 19 nt, Homo sapiens
  misc_RNA (1)...(19): siRNA sense strand
ucaacgaguuugcuuucuc

SEQ ID NO: 2011839 - RNA, 19 nt, Homo sapiens
  misc_RNA (1)...(19): siRNA sense strand
uguuagagccgcugauaug

SEQ ID NO: 2011840 - RNA, 19 nt, Homo sapiens
  misc_RNA (1)...(19): siRNA sense strand
gcaagagcagugacaaacu

SEQ ID NO: 2011841 - RNA, 19 nt, Homo sapiens
  misc_RNA (1)...(19): siRNA sense strand
uuguagcguuugacccuua

SEQ ID NO: 2011842 - RNA, 19 nt, Homo sapiens
  misc_RNA (1)...(19): siRNA sense strand
gagcccggauggcaaguac

SEQ ID NO: 2011843 - RNA, 19 nt, Homo sapiens
  misc_RNA (1)...(19): siRNA sense strand
uagaagaaggugacccuau

SEQ ID NO: 2011844 - RNA, 19 nt, Homo sapiens
  misc_RNA (1)...(19): siRNA sense strand
ggagaugaacgagauuaag

SEQ ID NO: 2011845 - RNA, 19 nt, Homo sapiens
  misc_RNA (1)...(19): siRNA sense strand
uugcaacacuuucacuaca

SEQ ID NO: 2011846 - RNA, 19 nt, Homo sapiens
  misc_RNA (1)...(19): siRNA sense strand
ucaguguuguagcguuuga

SEQ ID NO: 2011847 - RNA, 19 nt, Homo sapiens
  misc_RNA (1)...(19): siRNA sense strand
ggagcuguacuucuauauc

SEQ ID NO: 2011848 - RNA, 19 nt, Homo sapiens
  misc_RNA (1)...(19): siRNA sense strand
aaagaucacaagcgaaauc

SEQ ID NO: 2011849 - RNA, 19 nt, Homo sapiens
  misc_RNA (1)...(19): siRNA sense strand
ccaaccgggugcccuucaa

SEQ ID NO: 2011850 - RNA, 19 nt, Homo sapiens
  misc_RNA (1)...(19): siRNA sense strand
ccagauggcaaguucuuag

SEQ ID NO: 2011851 - RNA, 19 nt, Homo sapiens
  misc_RNA (1)...(19): siRNA sense strand
uagcaagagcagugacaaa

SEQ ID NO: 2011852 - RNA, 19 nt, Homo sapiens
  misc_RNA (1)...(19): siRNA sense strand
ugggacacauuucuagcaa

SEQ ID NO: 2011853 - RNA, 19 nt, Homo sapiens
  misc_RNA (1)...(19): siRNA sense strand
cgagugggaacauguacuu

SEQ ID NO: 2011854 - RNA, 19 nt, Homo sapiens
  misc_RNA (1)...(19): siRNA sense strand
uggcagcgaugaggacuuc

SEQ ID NO: 2011855 - RNA, 19 nt, Homo sapiens
  misc_RNA (1)...(19): siRNA sense strand
uaccacuaguguagaagaa

SEQ ID NO: 2011856 - RNA, 19 nt, Homo sapiens
  misc_RNA (1)...(19): siRNA sense strand
guagacugccgaguaauag

SEQ ID NO: 2011857 - RNA, 19 nt, Homo sapiens
  misc_RNA (1)...(19): siRNA sense strand
gagugggaacauguacuua

SEQ ID NO: 2011858 - RNA, 19 nt, Homo sapiens
  misc_RNA (1)...(19): siRNA sense strand
ccuguguccucgaauggaa

SEQ ID NO: 2011859 - RNA, 19 nt, Homo sapiens
  misc_RNA (1)...(19): siRNA sense strand
ggaccuuacagaagauauc

SEQ ID NO: 2011860 - RNA, 19 nt, Homo sapiens
  misc_RNA (1)...(19): siRNA sense strand
aaggugacccuauggaguu

SEQ ID NO: 2011861 - RNA, 19 nt, Homo sapiens
  misc_RNA (1)...(19): siRNA sense strand
caacacccgggaacucugu

SEQ ID NO: 2011862 - RNA, 19 nt, Homo sapiens
  misc_RNA (1)...(19): siRNA sense strand
ugagagacugacuguacua

SEQ ID NO: 2011863 - RNA, 19 nt, Homo sapiens
  misc_RNA (1)...(19): siRNA sense strand
gaaagaucacaagcgaaau

SEQ ID NO: 2011864 - RNA, 19 nt, Homo sapiens
  misc_RNA (1)...(19): siRNA sense strand
caacacuuucacuacauga

SEQ ID NO: 2011865 - RNA, 19 nt, Homo sapiens
  misc_RNA (1)...(19): siRNA sense strand
cugcggguguucaacuuug

SEQ ID NO: 2011866 - RNA, 19 nt, Homo sapiens
  misc_RNA (1)...(19): siRNA sense strand
aaucauagcaugggacaca

SEQ ID NO: 2011867 - RNA, 19 nt, Homo sapiens
  misc_RNA (1)...(19): siRNA sense strand
ggcagagaucgagcaaaua

SEQ ID NO: 2011868 - RNA, 19 nt, Homo sapiens
  misc_RNA (1)...(19): siRNA sense strand
ggugacagucugguccuuu

SEQ ID NO: 2011869 - RNA, 19 nt, Homo sapiens
  misc_RNA (1)...(19): siRNA sense strand
gcugcacgguacgaugaaa

SEQ ID NO: 2011870 - RNA, 19 nt, Homo sapiens
  misc_RNA (1)...(19): siRNA sense strand
gucaggagggauuuauuug

SEQ ID NO: 2011871 - RNA, 19 nt, Homo sapiens
  misc_RNA (1)...(19): siRNA sense strand
caaaacggacccugcuaaa

SEQ ID NO: 2011872 - RNA, 19 nt, Homo sapiens
  misc_RNA (1)...(19): siRNA sense strand
gagacugacuguacuaaua

SEQ ID NO: 2011873 - RNA, 19 nt, Homo sapiens
  misc_RNA (1)...(19): siRNA sense strand
gggaacauguacuuauaua

SEQ ID NO: 2011874 - RNA, 19 nt, Homo sapiens
  misc_RNA (1)...(19): siRNA sense strand
ggacacauuucuagcaaga

SEQ ID NO: 2011875 - RNA, 19 nt, Homo sapiens
  misc_RNA (1)...(19): siRNA sense strand
gaucacaagcgaaaucaua

SEQ ID NO: 2011876 - RNA, 19 nt, Homo sapiens
  misc_RNA (1)...(19): siRNA sense strand
aaacggaacucuacagaca

SEQ ID NO: 2011877 - RNA, 19 nt, Homo sapiens
  misc_RNA (1)...(19): siRNA sense strand
gugggaacauguacuuaua

SEQ ID NO: 2011878 - RNA, 19 nt, Homo sapiens
  misc_RNA (1)...(19): siRNA sense strand
gggaaggccugguaaagug

SEQ ID NO: 2011879 - RNA, 19 nt, Homo sapiens
  misc_RNA (1)...(19): siRNA sense strand
uagagccgcugauauguaa

SEQ ID NO: 2011880 - RNA, 19 nt, Homo sapiens
  misc_RNA (1)...(19): siRNA sense strand
auagacaagucacgaguua

SEQ ID NO: 2011881 - RNA, 19 nt, Homo sapiens
  misc_RNA (1)...(19): siRNA sense strand
gccgggagcuguacuucua

SEQ ID NO: 2011882 - RNA, 19 nt, Homo sapiens
  misc_RNA (1)...(19): siRNA sense strand
caacagccuuccacauuca

SEQ ID NO: 2011883 - RNA, 19 nt, Homo sapiens
  misc_RNA (1)...(19): siRNA sense strand
aaagauagcacaugagaga

SEQ ID NO: 2011884 - RNA, 19 nt, Homo sapiens
  misc_RNA (1)...(19): siRNA sense strand
gagcuguacuucuauaucu

SEQ ID NO: 2011885 - RNA, 19 nt, Homo sapiens
  misc_RNA (1)...(19): siRNA sense strand
ggaacccucuccuuaagug

SEQ ID NO: 2011886 - RNA, 19 nt, Homo sapiens
  misc_RNA (1)...(19): siRNA sense strand
gcagagaucgagcaaauag

SEQ ID NO: 2011887 - RNA, 19 nt, Homo sapiens
  misc_RNA (1)...(19): siRNA sense strand
gcaaggacacacacaaaug

SEQ ID NO: 2011888 - RNA, 19 nt, Homo sapiens
  misc_RNA (1)...(19): siRNA sense strand
acacaaaugucaugaaugc

SEQ ID NO: 2011889 - RNA, 19 nt, Homo sapiens
  misc_RNA (1)...(19): siRNA sense strand
ggucaguguuguagcguuu

SEQ ID NO: 2011890 - RNA, 19 nt, Homo sapiens
  misc_RNA (1)...(19): siRNA sense strand
acacacaaaugucaugaau

SEQ ID NO: 2011891 - RNA, 19 nt, Homo sapiens
  misc_RNA (1)...(19): siRNA sense strand
gagcaaggacacacacaaa

SEQ ID NO: 2011892 - RNA, 19 nt, Homo sapiens
  misc_RNA (1)...(19): siRNA sense strand
uaugggaccuuacagaaga

SEQ ID NO: 2011893 - RNA, 19 nt, Homo sapiens
  misc_RNA (1)...(19): siRNA sense strand
agaagaaggugacccuaug

SEQ ID NO: 2011894 - RNA, 19 nt, Homo sapiens
  misc_RNA (1)...(19): siRNA sense strand
gcaacacuuucacuacaug

SEQ ID NO: 2011895 - RNA, 19 nt, Homo sapiens
  misc_RNA (1)...(19): siRNA sense strand
uggcagagaucgagcaaau

SEQ ID NO: 2011896 - RNA, 19 nt, Homo sapiens
  misc_RNA (1)...(19): siRNA sense strand
ccaacagccuuccacauuc

SEQ ID NO: 2011897 - RNA, 19 nt, Homo sapiens
  misc_RNA (1)...(19): siRNA sense strand
cgaguuaccugugucaaau

SEQ ID NO: 2011898 - RNA, 19 nt, Homo sapiens
  misc_RNA (1)...(19): siRNA sense strand
ggagaggcaccacgagaaa

SEQ ID NO: 2011899 - RNA, 19 nt, Homo sapiens
  misc_RNA (1)...(19): siRNA sense strand
agaaagaucacaagcgaaa

SEQ ID NO: 2011900 - RNA, 19 nt, Homo sapiens
  misc_RNA (1)...(19): siRNA sense strand
guacuucuauaucuacaag

SEQ ID NO: 2011901 - RNA, 19 nt, Homo sapiens
  misc_RNA (1)...(19): siRNA sense strand
agagaucgagcaaauagua

SEQ ID NO: 2011902 - RNA, 19 nt, Homo sapiens
  misc_RNA (1)...(19): siRNA sense strand
gagcugcacgguacgauga

SEQ ID NO: 2011903 - RNA, 19 nt, Homo sapiens
  misc_RNA (1)...(19): siRNA sense strand
caaggacacacacaaaugu

SEQ ID NO: 2011904 - RNA, 19 nt, Homo sapiens
  misc_RNA (1)...(19): siRNA sense strand
gaagauguucccuuguuag

SEQ ID NO: 2011905 - RNA, 19 nt, Homo sapiens
  misc_RNA (1)...(19): siRNA sense strand
caggagggauuuauuugca

SEQ ID NO: 2011906 - RNA, 19 nt, Homo sapiens
  misc_RNA (1)...(19): siRNA sense strand
gcgaugaggacuuccaaga

SEQ ID NO: 2011907 - RNA, 19 nt, Homo sapiens
  misc_RNA (1)...(19): siRNA sense strand
gugacaaacugaaucuagu

SEQ ID NO: 2011908 - RNA, 19 nt, Homo sapiens
  misc_RNA (1)...(19): siRNA sense strand
gcacaaguccugggucagu

SEQ ID NO: 2011909 - RNA, 19 nt, Homo sapiens
  misc_RNA (1)...(19): siRNA sense strand
caaauuugcaacacuuuca

SEQ ID NO: 2011910 - RNA, 19 nt, Homo sapiens
  misc_RNA (1)...(19): siRNA sense strand
gaagcaaugggaacagugu

SEQ ID NO: 2011911 - RNA, 19 nt, Homo sapiens
  misc_RNA (1)...(19): siRNA sense strand
gugacagucugguccuuug

SEQ ID NO: 2011912 - RNA, 19 nt, Homo sapiens
  misc_RNA (1)...(19): siRNA sense strand
uuuguagacugccgaguaa

SEQ ID NO: 2011913 - RNA, 19 nt, Homo sapiens
  misc_RNA (1)...(19): siRNA sense strand
uguagacugccgaguaaua

SEQ ID NO: 2011914 - RNA, 19 nt, Homo sapiens
  misc_RNA (1)...(19): siRNA sense strand
cgggagcuguacuucuaua

SEQ ID NO: 2011915 - RNA, 19 nt, Homo sapiens
  misc_RNA (1)...(19): siRNA sense strand
gacugacuguacuaauauu

SEQ ID NO: 2011916 - RNA, 19 nt, Homo sapiens
  misc_RNA (1)...(19): siRNA sense strand
ugucaggagggauuuauuu

SEQ ID NO: 2011917 - RNA, 19 nt, Homo sapiens
  misc_RNA (1)...(19): siRNA sense strand
gaagaaggugacccuaugg

SEQ ID NO: 2011918 - RNA, 19 nt, Homo sapiens
  misc_RNA (1)...(19): siRNA sense strand
gagagacugacuguacuaa

SEQ ID NO: 2011919 - RNA, 19 nt, Homo sapiens
  misc_RNA (1)...(19): siRNA sense strand
caugagagacugacuguac

SEQ ID NO: 2011920 - RNA, 19 nt, Homo sapiens
  misc_RNA (1)...(19): siRNA sense strand
uccaacagccuuccacauu

SEQ ID NO: 2011921 - RNA, 19 nt, Homo sapiens
  misc_RNA (1)...(19): siRNA sense strand
ccaaacggaacucuacaga

SEQ ID NO: 2011922 - RNA, 19 nt, Homo sapiens
  misc_RNA (1)...(19): siRNA sense strand
gcuuugccgugcacacuug

SEQ ID NO: 2011923 - RNA, 19 nt, Homo sapiens
  misc_RNA (1)...(19): siRNA sense strand
uuauaccacuaguguagaa

SEQ ID NO: 2011924 - RNA, 19 nt, Homo sapiens
  misc_RNA (1)...(19): siRNA sense strand
agacugacuguacuaauau

SEQ ID NO: 2011925 - RNA, 19 nt, Homo sapiens
  misc_RNA (1)...(19): siRNA sense strand
cauagcaugggacacauuu

SEQ ID NO: 2011926 - RNA, 19 nt, Homo sapiens
  misc_RNA (1)...(19): siRNA sense strand
gacagucugguccuuugua

SEQ ID NO: 2011927 - RNA, 19 nt, Homo sapiens
  misc_RNA (1)...(19): siRNA sense strand
gcaugggacacauuucuag

SEQ ID NO: 2011928 - RNA, 19 nt, Homo sapiens
  misc_RNA (1)...(19): siRNA sense strand
uuagagccgcugauaugua

SEQ ID NO: 2011929 - RNA, 19 nt, Homo sapiens
  misc_RNA (1)...(19): siRNA sense strand
gagcccggauggcaaguac

SEQ ID NO: 2011930 - RNA, 19 nt, Homo sapiens
  misc_RNA (1)...(19): siRNA sense strand
ucaacgaguuugcuuucuc

SEQ ID NO: 2011931 - RNA, 19 nt, Homo sapiens
  misc_RNA (1)...(19): siRNA sense strand
uguuagagccgcugauaug

SEQ ID NO: 2011932 - RNA, 19 nt, Homo sapiens
  misc_RNA (1)...(19): siRNA sense strand
gcaagagcagugacaaacu

SEQ ID NO: 2011933 - RNA, 19 nt, Homo sapiens
  misc_RNA (1)...(19): siRNA sense strand
uuguagcguuugacccuua

SEQ ID NO: 2011934 - RNA, 19 nt, Homo sapiens
  misc_RNA (1)...(19): siRNA sense strand
uagaagaaggugacccuau

SEQ ID NO: 2011935 - RNA, 19 nt, Homo sapiens
  misc_RNA (1)...(19): siRNA sense strand
uugcaacacuuucacuaca

SEQ ID NO: 2011936 - RNA, 19 nt, Homo sapiens
  misc_RNA (1)...(19): siRNA sense strand
ucaguguuguagcguuuga

SEQ ID NO: 2011937 - RNA, 19 nt, Homo sapiens
  misc_RNA (1)...(19): siRNA sense strand
aaagaucacaagcgaaauc

SEQ ID NO: 2011938 - RNA, 19 nt, Homo sapiens
  misc_RNA (1)...(19): siRNA sense strand
ggagcuguacuucuauauc

SEQ ID NO: 2011939 - RNA, 19 nt, Homo sapiens
  misc_RNA (1)...(19): siRNA sense strand
guagacugccgaguaauag

SEQ ID NO: 2011940 - RNA, 19 nt, Homo sapiens
  misc_RNA (1)...(19): siRNA sense strand
uagcaagagcagugacaaa

SEQ ID NO: 2011941 - RNA, 19 nt, Homo sapiens
  misc_RNA (1)...(19): siRNA sense strand
ugggacacauuucuagcaa

SEQ ID NO: 2011942 - RNA, 19 nt, Homo sapiens
  misc_RNA (1)...(19): siRNA sense strand
cgagugggaacauguacuu

SEQ ID NO: 2011943 - RNA, 19 nt, Homo sapiens
  misc_RNA (1)...(19): siRNA sense strand
uggcagcgaugaggacuuc

SEQ ID NO: 2011944 - RNA, 19 nt, Homo sapiens
  misc_RNA (1)...(19): siRNA sense strand
uaccacuaguguagaagaa

SEQ ID NO: 2011945 - RNA, 19 nt, Homo sapiens
  misc_RNA (1)...(19): siRNA sense strand
ccagauggcaaguucuuag

SEQ ID NO: 2011946 - RNA, 19 nt, Homo sapiens
  misc_RNA (1)...(19): siRNA sense strand
aaggugacccuauggaguu

SEQ ID NO: 2011947 - RNA, 19 nt, Homo sapiens
  misc_RNA (1)...(19): siRNA sense strand
ccuguguccucgaauggaa

SEQ ID NO: 2011948 - RNA, 19 nt, Homo sapiens
  misc_RNA (1)...(19): siRNA sense strand
ggaccuuacagaagauauc

SEQ ID NO: 2011949 - RNA, 19 nt, Homo sapiens
  misc_RNA (1)...(19): siRNA sense strand
gagugggaacauguacuua

SEQ ID NO: 2011950 - RNA, 19 nt, Homo sapiens
  misc_RNA (1)...(19): siRNA sense strand
caacacccgggaacucugu

SEQ ID NO: 2011951 - RNA, 19 nt, Homo sapiens
  misc_RNA (1)...(19): siRNA sense strand
ugagagacugacuguacua

SEQ ID NO: 2011952 - RNA, 19 nt, Homo sapiens
  misc_RNA (1)...(19): siRNA sense strand
gaaagaucacaagcgaaau

SEQ ID NO: 2011953 - RNA, 19 nt, Homo sapiens
  misc_RNA (1)...(19): siRNA sense strand
caacacuuucacuacauga

SEQ ID NO: 2011954 - RNA, 19 nt, Homo sapiens
  misc_RNA (1)...(19): siRNA sense strand
ggugacagucugguccuuu

SEQ ID NO: 2011955 - RNA, 19 nt, Homo sapiens
  misc_RNA (1)...(19): siRNA sense strand
cugcggguguucaacuuug

SEQ ID NO: 2011956 - RNA, 19 nt, Homo sapiens
  misc_RNA (1)...(19): siRNA sense strand
aaucauagcaugggacaca

SEQ ID NO: 2011957 - RNA, 19 nt, Homo sapiens
  misc_RNA (1)...(19): siRNA sense strand
ggcagagaucgagcaaaua

SEQ ID NO: 2011958 - RNA, 19 nt, Homo sapiens
  misc_RNA (1)...(19): siRNA sense strand
gcugcacgguacgaugaaa

SEQ ID NO: 2011959 - RNA, 19 nt, Homo sapiens
  misc_RNA (1)...(19): siRNA sense strand
gucaggagggauuuauuug

SEQ ID NO: 2011960 - RNA, 19 nt, Homo sapiens
  misc_RNA (1)...(19): siRNA sense strand
agaggcaccacgagaaaga

SEQ ID NO: 2011961 - RNA, 19 nt, Homo sapiens
  misc_RNA (1)...(19): siRNA sense strand
caaaacggacccugcuaaa

SEQ ID NO: 2011962 - RNA, 19 nt, Homo sapiens
  misc_RNA (1)...(19): siRNA sense strand
ccucaacgaguuugcuuuc

SEQ ID NO: 2011963 - RNA, 19 nt, Homo sapiens
  misc_RNA (1)...(19): siRNA sense strand
guauagucacugcuuguca

SEQ ID NO: 2011964 - RNA, 19 nt, Homo sapiens
  misc_RNA (1)...(19): siRNA sense strand
ccuuauaccacuaguguag

SEQ ID NO: 2011965 - RNA, 19 nt, Homo sapiens
  misc_RNA (1)...(19): siRNA sense strand
cuuuguagacugccgagua

SEQ ID NO: 2011966 - RNA, 19 nt, Homo sapiens
  misc_RNA (1)...(19): siRNA sense strand
ccaaaacggacccugcuaa

SEQ ID NO: 2011967 - RNA, 19 nt, Homo sapiens
  misc_RNA (1)...(19): siRNA sense strand
agucacgaguuaccugugu

SEQ ID NO: 2011968 - RNA, 19 nt, Homo sapiens
  misc_RNA (1)...(19): siRNA sense strand
gagacugacuguacuaaua

SEQ ID NO: 2011969 - RNA, 19 nt, Homo sapiens
  misc_RNA (1)...(19): siRNA sense strand
ggaaggagaugaacgagau

SEQ ID NO: 2011970 - RNA, 19 nt, Homo sapiens
  misc_RNA (1)...(19): siRNA sense strand
gggaacauguacuuauaua

SEQ ID NO: 2011971 - RNA, 19 nt, Homo sapiens
  misc_RNA (1)...(19): siRNA sense strand
ggacacauuucuagcaaga

SEQ ID NO: 2011972 - RNA, 19 nt, Homo sapiens
  misc_RNA (1)...(19): siRNA sense strand
gaucacaagcgaaaucaua

SEQ ID NO: 2011973 - RNA, 19 nt, Homo sapiens
  misc_RNA (1)...(19): siRNA sense strand
aaacggaacucuacagaca

SEQ ID NO: 2011974 - RNA, 19 nt, Homo sapiens
  misc_RNA (1)...(19): siRNA sense strand
gugggaacauguacuuaua

SEQ ID NO: 2011975 - RNA, 19 nt, Homo sapiens
  misc_RNA (1)...(19): siRNA sense strand
gggaaggccugguaaagug

SEQ ID NO: 2011976 - RNA, 19 nt, Homo sapiens
  misc_RNA (1)...(19): siRNA sense strand
uagagccgcugauauguaa

SEQ ID NO: 2011977 - RNA, 19 nt, Homo sapiens
  misc_RNA (1)...(19): siRNA sense strand
gccgggagcuguacuucua

SEQ ID NO: 2011978 - RNA, 19 nt, Homo sapiens
  misc_RNA (1)...(19): siRNA sense strand
auagacaagucacgaguua

SEQ ID NO: 2011979 - RNA, 19 nt, Homo sapiens
  misc_RNA (1)...(19): siRNA sense strand
caacagccuuccacauuca

SEQ ID NO: 2011980 - RNA, 19 nt, Homo sapiens
  misc_RNA (1)...(19): siRNA sense strand
gagcuguacuucuauaucu

SEQ ID NO: 2011981 - RNA, 19 nt, Homo sapiens
  misc_RNA (1)...(19): siRNA sense strand
aaagauagcacaugagaga

SEQ ID NO: 2011982 - RNA, 19 nt, Homo sapiens
  misc_RNA (1)...(19): siRNA sense strand
ggaacccucuccuuaagug

SEQ ID NO: 2011983 - RNA, 19 nt, Homo sapiens
  misc_RNA (1)...(19): siRNA sense strand
gcagagaucgagcaaauag

SEQ ID NO: 2011984 - RNA, 19 nt, Homo sapiens
  misc_RNA (1)...(19): siRNA sense strand
gagaugaacgagauuaaga

SEQ ID NO: 2011985 - RNA, 19 nt, Homo sapiens
  misc_RNA (1)...(19): siRNA sense strand
gcaaggacacacacaaaug

SEQ ID NO: 2011986 - RNA, 19 nt, Homo sapiens
  misc_RNA (1)...(19): siRNA sense strand
acacaaaugucaugaaugc

SEQ ID NO: 2011987 - RNA, 19 nt, Homo sapiens
  misc_RNA (1)...(19): siRNA sense strand
ggucaguguuguagcguuu

SEQ ID NO: 2011988 - RNA, 19 nt, Homo sapiens
  misc_RNA (1)...(19): siRNA sense strand
acacacaaaugucaugaau

SEQ ID NO: 2011989 - RNA, 19 nt, Homo sapiens
  misc_RNA (1)...(19): siRNA sense strand
gagcaaggacacacacaaa

SEQ ID NO: 2011990 - RNA, 19 nt, Homo sapiens
  misc_RNA (1)...(19): siRNA sense strand
uaugggaccuuacagaaga

SEQ ID NO: 2011991 - RNA, 19 nt, Homo sapiens
  misc_RNA (1)...(19): siRNA sense strand
agaagaaggugacccuaug

SEQ ID NO: 2011992 - RNA, 19 nt, Homo sapiens
  misc_RNA (1)...(19): siRNA sense strand
gcaacacuuucacuacaug

SEQ ID NO: 2011993 - RNA, 19 nt, Homo sapiens
  misc_RNA (1)...(19): siRNA sense strand
cgaguuaccugugucaaau

SEQ ID NO: 2011994 - RNA, 19 nt, Homo sapiens
  misc_RNA (1)...(19): siRNA sense strand
ccaacagccuuccacauuc

SEQ ID NO: 2011995 - RNA, 19 nt, Homo sapiens
  misc_RNA (1)...(19): siRNA sense strand
uggcagagaucgagcaaau

SEQ ID NO: 2011996 - RNA, 19 nt, Homo sapiens
  misc_RNA (1)...(19): siRNA sense strand
ggagaggcaccacgagaaa

SEQ ID NO: 2011997 - RNA, 19 nt, Homo sapiens
  misc_RNA (1)...(19): siRNA sense strand
agaaagaucacaagcgaaa

SEQ ID NO: 2011998 - RNA, 19 nt, Homo sapiens
  misc_RNA (1)...(19): siRNA sense strand
gggaaggucuguacaagcu

SEQ ID NO: 2011999 - RNA, 19 nt, Homo sapiens
  misc_RNA (1)...(19): siRNA sense strand
guacuucuauaucuacaag

SEQ ID NO: 2012000 - RNA, 19 nt, Homo sapiens
  misc_RNA (1)...(19): siRNA sense strand
agagaucgagcaaauagua

SEQ ID NO: 2012001 - RNA, 19 nt, Homo sapiens
  misc_RNA (1)...(19): siRNA sense strand
gagcugcacgguacgauga

SEQ ID NO: 2012002 - RNA, 19 nt, Homo sapiens
  misc_RNA (1)...(19): siRNA sense strand
gagauuaagacccaauuca

SEQ ID NO: 2012003 - RNA, 19 nt, Homo sapiens
  misc_RNA (1)...(19): siRNA sense strand
gaccgccucugcuucaaug

SEQ ID NO: 2012004 - RNA, 19 nt, Homo sapiens
  misc_RNA (1)...(19): siRNA sense strand
caaggacacacacaaaugu

SEQ ID NO: 2012005 - RNA, 19 nt, Homo sapiens
  misc_RNA (1)...(19): siRNA sense strand
gaagauguucccuuguuag

SEQ ID NO: 2012006 - RNA, 19 nt, Homo sapiens
  misc_RNA (1)...(19): siRNA sense strand
caggagggauuuauuugca

SEQ ID NO: 2012007 - RNA, 19 nt, Homo sapiens
  misc_RNA (1)...(19): siRNA sense strand
gcgaugaggacuuccaaga

SEQ ID NO: 2012008 - RNA, 19 nt, Homo sapiens
  misc_RNA (1)...(19): siRNA sense strand
gugacaaacugaaucuagu

SEQ ID NO: 2012009 - RNA, 19 nt, Homo sapiens
  misc_RNA (1)...(19): siRNA sense strand
gcacaaguccugggucagu

SEQ ID NO: 2012010 - RNA, 19 nt, Homo sapiens
  misc_RNA (1)...(19): siRNA sense strand
caaauuugcaacacuuuca

SEQ ID NO: 2012011 - RNA, 19 nt, Homo sapiens
  misc_RNA (1)...(19): siRNA sense strand
gaagcaaugggaacagugu

SEQ ID NO: 2012012 - RNA, 19 nt, Homo sapiens
  misc_RNA (1)...(19): siRNA sense strand
gugacagucugguccuuug

SEQ ID NO: 2012013 - RNA, 19 nt, Homo sapiens
  misc_RNA (1)...(19): siRNA sense strand
uuuguagacugccgaguaa

SEQ ID NO: 2012014 - RNA, 19 nt, Homo sapiens
  misc_RNA (1)...(19): siRNA sense strand
gaggagggaaggagaugaa

SEQ ID NO: 2012015 - RNA, 19 nt, Homo sapiens
  misc_RNA (1)...(19): siRNA sense strand
cgggagcuguacuucuaua

SEQ ID NO: 2012016 - RNA, 19 nt, Homo sapiens
  misc_RNA (1)...(19): siRNA sense strand
uguagacugccgaguaaua

SEQ ID NO: 2012017 - RNA, 19 nt, Homo sapiens
  misc_RNA (1)...(19): siRNA sense strand
gacugacuguacuaauauu

SEQ ID NO: 2012018 - RNA, 19 nt, Homo sapiens
  misc_RNA (1)...(19): siRNA sense strand
ugucaggagggauuuauuu

SEQ ID NO: 2012019 - RNA, 19 nt, Homo sapiens
  misc_RNA (1)...(19): siRNA sense strand
gcuuugccgugcacacuug

SEQ ID NO: 2012020 - RNA, 19 nt, Homo sapiens
  misc_RNA (1)...(19): siRNA sense strand
gagagacugacuguacuaa

SEQ ID NO: 2012021 - RNA, 19 nt, Homo sapiens
  misc_RNA (1)...(19): siRNA sense strand
caugagagacugacuguac

SEQ ID NO: 2012022 - RNA, 19 nt, Homo sapiens
  misc_RNA (1)...(19): siRNA sense strand
uccaacagccuuccacauu

SEQ ID NO: 2012023 - RNA, 19 nt, Homo sapiens
  misc_RNA (1)...(19): siRNA sense strand
ccaaacggaacucuacaga

SEQ ID NO: 2012024 - RNA, 19 nt, Homo sapiens
  misc_RNA (1)...(19): siRNA sense strand
gaagaaggugacccuaugg

SEQ ID NO: 2012025 - RNA, 19 nt, Homo sapiens
  misc_RNA (1)...(19): siRNA sense strand
guccgcgucuccuucguaa

SEQ ID NO: 2012026 - RNA, 19 nt, Homo sapiens
  misc_RNA (1)...(19): siRNA sense strand
agacugacuguacuaauau

SEQ ID NO: 2012027 - RNA, 19 nt, Homo sapiens
  misc_RNA (1)...(19): siRNA sense strand
cauagcaugggacacauuu

SEQ ID NO: 2012028 - RNA, 19 nt, Homo sapiens
  misc_RNA (1)...(19): siRNA sense strand
gagggaaggagaugaacga

SEQ ID NO: 2012029 - RNA, 19 nt, Homo sapiens
  misc_RNA (1)...(19): siRNA sense strand
uuauaccacuaguguagaa

SEQ ID NO: 2012030 - RNA, 19 nt, Homo sapiens
  misc_RNA (1)...(19): siRNA sense strand
gacagucugguccuuugua

SEQ ID NO: 2012031 - RNA, 19 nt, Homo sapiens
  misc_RNA (1)...(19): siRNA sense strand
gaaggagaugaacgagauu

SEQ ID NO: 2012032 - RNA, 19 nt, Homo sapiens
  misc_RNA (1)...(19): siRNA sense strand
gcaugggacacauuucuag

SEQ ID NO: 2012033 - RNA, 19 nt, Homo sapiens
  misc_RNA (1)...(19): siRNA sense strand
uuagagccgcugauaugua

SEQ ID NO: 2012034 - RNA, 19 nt, Homo sapiens
  misc_RNA (1)...(19): siRNA sense strand
ucaacgaguuugcuuucuc

SEQ ID NO: 2012035 - RNA, 19 nt, Homo sapiens
  misc_RNA (1)...(19): siRNA sense strand
uguuagagccgcugauaug

SEQ ID NO: 2012036 - RNA, 19 nt, Homo sapiens
  misc_RNA (1)...(19): siRNA sense strand
gcaagagcagugacaaacu

SEQ ID NO: 2012037 - RNA, 19 nt, Homo sapiens
  misc_RNA (1)...(19): siRNA sense strand
uuguagcguuugacccuua

SEQ ID NO: 2012038 - RNA, 19 nt, Homo sapiens
  misc_RNA (1)...(19): siRNA sense strand
gagcccggauggcaaguac

SEQ ID NO: 2012039 - RNA, 19 nt, Homo sapiens
  misc_RNA (1)...(19): siRNA sense strand
uagaagaaggugacccuau

SEQ ID NO: 2012040 - RNA, 19 nt, Homo sapiens
  misc_RNA (1)...(19): siRNA sense strand
ggagaugaacgagauuaag

SEQ ID NO: 2012041 - RNA, 19 nt, Homo sapiens
  misc_RNA (1)...(19): siRNA sense strand
uugcaacacuuucacuaca

SEQ ID NO: 2012042 - RNA, 19 nt, Homo sapiens
  misc_RNA (1)...(19): siRNA sense strand
ucaguguuguagcguuuga

SEQ ID NO: 2012043 - RNA, 19 nt, Homo sapiens
  misc_RNA (1)...(19): siRNA sense strand
ggagcuguacuucuauauc

SEQ ID NO: 2012044 - RNA, 19 nt, Homo sapiens
  misc_RNA (1)...(19): siRNA sense strand
aaagaucacaagcgaaauc

SEQ ID NO: 2012045 - RNA, 19 nt, Homo sapiens
  misc_RNA (1)...(19): siRNA sense strand
ccaaccgggugcccuucaa

SEQ ID NO: 2012046 - RNA, 19 nt, Homo sapiens
  misc_RNA (1)...(19): siRNA sense strand
ccagauggcaaguucuuag

SEQ ID NO: 2012047 - RNA, 19 nt, Homo sapiens
  misc_RNA (1)...(19): siRNA sense strand
uagcaagagcagugacaaa

SEQ ID NO: 2012048 - RNA, 19 nt, Homo sapiens
  misc_RNA (1)...(19): siRNA sense strand
ugggacacauuucuagcaa

SEQ ID NO: 2012049 - RNA, 19 nt, Homo sapiens
  misc_RNA (1)...(19): siRNA sense strand
cgagugggaacauguacuu

SEQ ID NO: 2012050 - RNA, 19 nt, Homo sapiens
  misc_RNA (1)...(19): siRNA sense strand
uggcagcgaugaggacuuc

SEQ ID NO: 2012051 - RNA, 19 nt, Homo sapiens
  misc_RNA (1)...(19): siRNA sense strand
uaccacuaguguagaagaa

SEQ ID NO: 2012052 - RNA, 19 nt, Homo sapiens
  misc_RNA (1)...(19): siRNA sense strand
guagacugccgaguaauag

SEQ ID NO: 2012053 - RNA, 19 nt, Homo sapiens
  misc_RNA (1)...(19): siRNA sense strand
gagugggaacauguacuua

SEQ ID NO: 2012054 - RNA, 19 nt, Homo sapiens
  misc_RNA (1)...(19): siRNA sense strand
ccuguguccucgaauggaa

SEQ ID NO: 2012055 - RNA, 19 nt, Homo sapiens
  misc_RNA (1)...(19): siRNA sense strand
ggaccuuacagaagauauc

SEQ ID NO: 2012056 - RNA, 19 nt, Homo sapiens
  misc_RNA (1)...(19): siRNA sense strand
aaggugacccuauggaguu

SEQ ID NO: 2012057 - RNA, 19 nt, Homo sapiens
  misc_RNA (1)...(19): siRNA sense strand
caacacccgggaacucugu

SEQ ID NO: 2012058 - RNA, 19 nt, Homo sapiens
  misc_RNA (1)...(19): siRNA sense strand
ugagagacugacuguacua

SEQ ID NO: 2012059 - RNA, 19 nt, Homo sapiens
  misc_RNA (1)...(19): siRNA sense strand
gaaagaucacaagcgaaau

SEQ ID NO: 2012060 - RNA, 19 nt, Homo sapiens
  misc_RNA (1)...(19): siRNA sense strand
caacacuuucacuacauga

SEQ ID NO: 2012061 - RNA, 19 nt, Homo sapiens
  misc_RNA (1)...(19): siRNA sense strand
cugcggguguucaacuuug

SEQ ID NO: 2012062 - RNA, 19 nt, Homo sapiens
  misc_RNA (1)...(19): siRNA sense strand
aaucauagcaugggacaca

SEQ ID NO: 2012063 - RNA, 19 nt, Homo sapiens
  misc_RNA (1)...(19): siRNA sense strand
ggcagagaucgagcaaaua

SEQ ID NO: 2012064 - RNA, 19 nt, Homo sapiens
  misc_RNA (1)...(19): siRNA sense strand
ggugacagucugguccuuu

SEQ ID NO: 2012065 - RNA, 19 nt, Homo sapiens
  misc_RNA (1)...(19): siRNA sense strand
gcugcacgguacgaugaaa

SEQ ID NO: 2012066 - RNA, 19 nt, Homo sapiens
  misc_RNA (1)...(19): siRNA sense strand
gucaggagggauuuauuug

SEQ ID NO: 2012067 - RNA, 19 nt, Homo sapiens
  misc_RNA (1)...(19): siRNA sense strand
caaaacggacccugcuaaa

SEQ ID NO: 2012068 - RNA, 19 nt, Homo sapiens
  misc_RNA (1)...(19): siRNA sense strand
ucauaaagcugcuguacua

SEQ ID NO: 2012069 - RNA, 19 nt, Homo sapiens
  misc_RNA (1)...(19): siRNA sense strand
aaacggaccuuaacaagaa

SEQ ID NO: 2012070 - RNA, 19 nt, Homo sapiens
  misc_RNA (1)...(19): siRNA sense strand
gggcauuccuucuaucuca

SEQ ID NO: 2012071 - RNA, 19 nt, Homo sapiens
  misc_RNA (1)...(19): siRNA sense strand
gugcagagcugggccuuga

SEQ ID NO: 2012072 - RNA, 19 nt, Homo sapiens
  misc_RNA (1)...(19): siRNA sense strand
ggccuugacugcccaggua

SEQ ID NO: 2012073 - RNA, 19 nt, Homo sapiens
  misc_RNA (1)...(19): siRNA sense strand
gcuaugccauguauaaagu

SEQ ID NO: 2012074 - RNA, 19 nt, Homo sapiens
  misc_RNA (1)...(19): siRNA sense strand
guuuggagaugugaaguuu

SEQ ID NO: 2012075 - RNA, 19 nt, Homo sapiens
  misc_RNA (1)...(19): siRNA sense strand
uaaagcugcuguacuaugc

SEQ ID NO: 2012076 - RNA, 19 nt, Homo sapiens
  misc_RNA (1)...(19): siRNA sense strand
guaugggcauuccuucuau

SEQ ID NO: 2012077 - RNA, 19 nt, Homo sapiens
  misc_RNA (1)...(19): siRNA sense strand
gguaugggcauuccuucua

SEQ ID NO: 2012078 - RNA, 19 nt, Homo sapiens
  misc_RNA (1)...(19): siRNA sense strand
gggagccaaugcagagaaa

SEQ ID NO: 2012079 - RNA, 19 nt, Homo sapiens
  misc_RNA (1)...(19): siRNA sense strand
gcugaaagucacaaugauu

SEQ ID NO: 2012080 - RNA, 19 nt, Homo sapiens
  misc_RNA (1)...(19): siRNA sense strand
gguagagacuaucccaaca

SEQ ID NO: 2012081 - RNA, 19 nt, Homo sapiens
  misc_RNA (1)...(19): siRNA sense strand
caauuucccagccuuguuu

SEQ ID NO: 2012082 - RNA, 19 nt, Homo sapiens
  misc_RNA (1)...(19): siRNA sense strand
ugagcuacuucaucaagaa

SEQ ID NO: 2012083 - RNA, 19 nt, Homo sapiens
  misc_RNA (1)...(19): siRNA sense strand
cugcagagcugagcgaguu

SEQ ID NO: 2012084 - RNA, 19 nt, Homo sapiens
  misc_RNA (1)...(19): siRNA sense strand
gcaccuuggacuucuauga

SEQ ID NO: 2012085 - RNA, 19 nt, Homo sapiens
  misc_RNA (1)...(19): siRNA sense strand
ugaccgcuaugccauguau

SEQ ID NO: 2012086 - RNA, 19 nt, Homo sapiens
  misc_RNA (1)...(19): siRNA sense strand
ccacuagcagacacaauuu

SEQ ID NO: 2012087 - RNA, 19 nt, Homo sapiens
  misc_RNA (1)...(19): siRNA sense strand
gauggaguccucgguguuu

SEQ ID NO: 2012088 - RNA, 19 nt, Homo sapiens
  misc_RNA (1)...(19): siRNA sense strand
cagagaaagcugaaaguca

SEQ ID NO: 2012089 - RNA, 19 nt, Homo sapiens
  misc_RNA (1)...(19): siRNA sense strand
gagacuaucccaacaucug

SEQ ID NO: 2012090 - RNA, 19 nt, Homo sapiens
  misc_RNA (1)...(19): siRNA sense strand
cuggugagcuacuucauca

SEQ ID NO: 2012091 - RNA, 19 nt, Homo sapiens
  misc_RNA (1)...(19): siRNA sense strand
ggaacaccaugugcaccuu

SEQ ID NO: 2012092 - RNA, 19 nt, Homo sapiens
  misc_RNA (1)...(19): siRNA sense strand
caacaucugugcgggaacu

SEQ ID NO: 2012093 - RNA, 19 nt, Homo sapiens
  misc_RNA (1)...(19): siRNA sense strand
aagcugaaagucacaauga

SEQ ID NO: 2012094 - RNA, 19 nt, Homo sapiens
  misc_RNA (1)...(19): siRNA sense strand
caggagcuguugcuguguu

SEQ ID NO: 2012095 - RNA, 19 nt, Homo sapiens
  misc_RNA (1)...(19): siRNA sense strand
uggcacuucuggugggaua

SEQ ID NO: 2012096 - RNA, 19 nt, Homo sapiens
  misc_RNA (1)...(19): siRNA sense strand
uagagacuaucccaacauc

SEQ ID NO: 2012097 - RNA, 19 nt, Homo sapiens
  misc_RNA (1)...(19): siRNA sense strand
gugagcuacuucaucaaga

SEQ ID NO: 2012098 - RNA, 19 nt, Homo sapiens
  misc_RNA (1)...(19): siRNA sense strand
gcuccaacgucacuaucau

SEQ ID NO: 2012099 - RNA, 19 nt, Homo sapiens
  misc_RNA (1)...(19): siRNA sense strand
ccuucuaucucaaucaugu

SEQ ID NO: 2012100 - RNA, 19 nt, Homo sapiens
  misc_RNA (1)...(19): siRNA sense strand
ggagaugugaaguuugugu

SEQ ID NO: 2012101 - RNA, 19 nt, Homo sapiens
  misc_RNA (1)...(19): siRNA sense strand
ggaaaacggaccuuaacaa

SEQ ID NO: 2012102 - RNA, 19 nt, Homo sapiens
  misc_RNA (1)...(19): siRNA sense strand
aggcagaguuugagcagau

SEQ ID NO: 2012103 - RNA, 19 nt, Homo sapiens
  misc_RNA (1)...(19): siRNA sense strand
gcagagaaagcugaaaguc

SEQ ID NO: 2012104 - RNA, 19 nt, Homo sapiens
  misc_RNA (1)...(19): siRNA sense strand
uuggagaugugaaguuugu

SEQ ID NO: 2012105 - RNA, 19 nt, Homo sapiens
  misc_RNA (1)...(19): siRNA sense strand
ggaccggugcugucuguca

SEQ ID NO: 2012106 - RNA, 19 nt, Homo sapiens
  misc_RNA (1)...(19): siRNA sense strand
gaaaacggaccuuaacaag

SEQ ID NO: 2012107 - RNA, 19 nt, Homo sapiens
  misc_RNA (1)...(19): siRNA sense strand
ucaagaagaaacugagcaa

SEQ ID NO: 2012108 - RNA, 19 nt, Homo sapiens
  misc_RNA (1)...(19): siRNA sense strand
gaaagcugaaagucacaau

SEQ ID NO: 2012109 - RNA, 19 nt, Homo sapiens
  misc_RNA (1)...(19): siRNA sense strand
uaggaccggugcugucugu

SEQ ID NO: 2012110 - RNA, 19 nt, Homo sapiens
  misc_RNA (1)...(19): siRNA sense strand
caccuuggacuucuaugaa

SEQ ID NO: 2012111 - RNA, 19 nt, Homo sapiens
  misc_RNA (1)...(19): siRNA sense strand
gaagcgggucauccggaaa

SEQ ID NO: 2012112 - RNA, 19 nt, Homo sapiens
  misc_RNA (1)...(19): siRNA sense strand
ugccauguauaaaguagga

SEQ ID NO: 2012113 - RNA, 19 nt, Homo sapiens
  misc_RNA (1)...(19): siRNA sense strand
ggcagaguuugagcagauu

SEQ ID NO: 2012114 - RNA, 19 nt, Homo sapiens
  misc_RNA (1)...(19): siRNA sense strand
guagagacuaucccaacau

SEQ ID NO: 2012115 - RNA, 19 nt, Homo sapiens
  misc_RNA (1)...(19): siRNA sense strand
ggcauuccuucuaucucaa

SEQ ID NO: 2012116 - RNA, 19 nt, Homo sapiens
  misc_RNA (1)...(19): siRNA sense strand
ggugagcuacuucaucaag

SEQ ID NO: 2012117 - RNA, 19 nt, Homo sapiens
  misc_RNA (1)...(19): siRNA sense strand
gaaggacaagcaggcguau

SEQ ID NO: 2012118 - RNA, 19 nt, Homo sapiens
  misc_RNA (1)...(19): siRNA sense strand
acacggagaaggacaagca

SEQ ID NO: 2012119 - RNA, 19 nt, Homo sapiens
  misc_RNA (1)...(19): siRNA sense strand
gucacuaucauccgcauug

SEQ ID NO: 2012120 - RNA, 19 nt, Homo sapiens
  misc_RNA (1)...(19): siRNA sense strand
gcucauaaagcugcuguac

SEQ ID NO: 2012121 - RNA, 19 nt, Homo sapiens
  misc_RNA (1)...(19): siRNA sense strand
gcagaguuugagcagauug

SEQ ID NO: 2012122 - RNA, 19 nt, Homo sapiens
  misc_RNA (1)...(19): siRNA sense strand
auaaagcugcuguacuaug

SEQ ID NO: 2012123 - RNA, 19 nt, Homo sapiens
  misc_RNA (1)...(19): siRNA sense strand
ucauaaagcugcuguacua

SEQ ID NO: 2012124 - RNA, 19 nt, Homo sapiens
  misc_RNA (1)...(19): siRNA sense strand
aaacggaccuuaacaagaa

SEQ ID NO: 2012125 - RNA, 19 nt, Homo sapiens
  misc_RNA (1)...(19): siRNA sense strand
gggcauuccuucuaucuca

SEQ ID NO: 2012126 - RNA, 19 nt, Homo sapiens
  misc_RNA (1)...(19): siRNA sense strand
gugcagagcugggccuuga

SEQ ID NO: 2012127 - RNA, 19 nt, Homo sapiens
  misc_RNA (1)...(19): siRNA sense strand
ggccuugacugcccaggua

SEQ ID NO: 2012128 - RNA, 19 nt, Homo sapiens
  misc_RNA (1)...(19): siRNA sense strand
gcuaugccauguauaaagu

SEQ ID NO: 2012129 - RNA, 19 nt, Homo sapiens
  misc_RNA (1)...(19): siRNA sense strand
guuuggagaugugaaguuu

SEQ ID NO: 2012130 - RNA, 19 nt, Homo sapiens
  misc_RNA (1)...(19): siRNA sense strand
uaaagcugcuguacuaugc

SEQ ID NO: 2012131 - RNA, 19 nt, Homo sapiens
  misc_RNA (1)...(19): siRNA sense strand
guaugggcauuccuucuau

SEQ ID NO: 2012132 - RNA, 19 nt, Homo sapiens
  misc_RNA (1)...(19): siRNA sense strand
gguaugggcauuccuucua

SEQ ID NO: 2012133 - RNA, 19 nt, Homo sapiens
  misc_RNA (1)...(19): siRNA sense strand
gggagccaaugcagagaaa

SEQ ID NO: 2012134 - RNA, 19 nt, Homo sapiens
  misc_RNA (1)...(19): siRNA sense strand
gcugaaagucacaaugauu

SEQ ID NO: 2012135 - RNA, 19 nt, Homo sapiens
  misc_RNA (1)...(19): siRNA sense strand
gguagagacuaucccaaca

SEQ ID NO: 2012136 - RNA, 19 nt, Homo sapiens
  misc_RNA (1)...(19): siRNA sense strand
caauuucccagccuuguuu

SEQ ID NO: 2012137 - RNA, 19 nt, Homo sapiens
  misc_RNA (1)...(19): siRNA sense strand
ugagcuacuucaucaagaa

SEQ ID NO: 2012138 - RNA, 19 nt, Homo sapiens
  misc_RNA (1)...(19): siRNA sense strand
cugcagagcugagcgaguu

SEQ ID NO: 2012139 - RNA, 19 nt, Homo sapiens
  misc_RNA (1)...(19): siRNA sense strand
gcaccuuggacuucuauga

SEQ ID NO: 2012140 - RNA, 19 nt, Homo sapiens
  misc_RNA (1)...(19): siRNA sense strand
ugaccgcuaugccauguau

SEQ ID NO: 2012141 - RNA, 19 nt, Homo sapiens
  misc_RNA (1)...(19): siRNA sense strand
ccacuagcagacacaauuu

SEQ ID NO: 2012142 - RNA, 19 nt, Homo sapiens
  misc_RNA (1)...(19): siRNA sense strand
gauggaguccucgguguuu

SEQ ID NO: 2012143 - RNA, 19 nt, Homo sapiens
  misc_RNA (1)...(19): siRNA sense strand
cagagaaagcugaaaguca

SEQ ID NO: 2012144 - RNA, 19 nt, Homo sapiens
  misc_RNA (1)...(19): siRNA sense strand
gagacuaucccaacaucug

SEQ ID NO: 2012145 - RNA, 19 nt, Homo sapiens
  misc_RNA (1)...(19): siRNA sense strand
cuggugagcuacuucauca

SEQ ID NO: 2012146 - RNA, 19 nt, Homo sapiens
  misc_RNA (1)...(19): siRNA sense strand
ggaacaccaugugcaccuu

SEQ ID NO: 2012147 - RNA, 19 nt, Homo sapiens
  misc_RNA (1)...(19): siRNA sense strand
caacaucugugcgggaacu

SEQ ID NO: 2012148 - RNA, 19 nt, Homo sapiens
  misc_RNA (1)...(19): siRNA sense strand
aagcugaaagucacaauga

SEQ ID NO: 2012149 - RNA, 19 nt, Homo sapiens
  misc_RNA (1)...(19): siRNA sense strand
caggagcuguugcuguguu

SEQ ID NO: 2012150 - RNA, 19 nt, Homo sapiens
  misc_RNA (1)...(19): siRNA sense strand
uggcacuucuggugggaua

SEQ ID NO: 2012151 - RNA, 19 nt, Homo sapiens
  misc_RNA (1)...(19): siRNA sense strand
uagagacuaucccaacauc

SEQ ID NO: 2012152 - RNA, 19 nt, Homo sapiens
  misc_RNA (1)...(19): siRNA sense strand
gugagcuacuucaucaaga

SEQ ID NO: 2012153 - RNA, 19 nt, Homo sapiens
  misc_RNA (1)...(19): siRNA sense strand
gcuccaacgucacuaucau

SEQ ID NO: 2012154 - RNA, 19 nt, Homo sapiens
  misc_RNA (1)...(19): siRNA sense strand
ccuucuaucucaaucaugu

SEQ ID NO: 2012155 - RNA, 19 nt, Homo sapiens
  misc_RNA (1)...(19): siRNA sense strand
ggagaugugaaguuugugu

SEQ ID NO: 2012156 - RNA, 19 nt, Homo sapiens
  misc_RNA (1)...(19): siRNA sense strand
ggaaaacggaccuuaacaa

SEQ ID NO: 2012157 - RNA, 19 nt, Homo sapiens
  misc_RNA (1)...(19): siRNA sense strand
aggcagaguuugagcagau

SEQ ID NO: 2012158 - RNA, 19 nt, Homo sapiens
  misc_RNA (1)...(19): siRNA sense strand
gcagagaaagcugaaaguc

SEQ ID NO: 2012159 - RNA, 19 nt, Homo sapiens
  misc_RNA (1)...(19): siRNA sense strand
uuggagaugugaaguuugu

SEQ ID NO: 2012160 - RNA, 19 nt, Homo sapiens
  misc_RNA (1)...(19): siRNA sense strand
ggaccggugcugucuguca

SEQ ID NO: 2012161 - RNA, 19 nt, Homo sapiens
  misc_RNA (1)...(19): siRNA sense strand
gaaaacggaccuuaacaag

SEQ ID NO: 2012162 - RNA, 19 nt, Homo sapiens
  misc_RNA (1)...(19): siRNA sense strand
ucaagaagaaacugagcaa

SEQ ID NO: 2012163 - RNA, 19 nt, Homo sapiens
  misc_RNA (1)...(19): siRNA sense strand
gaaagcugaaagucacaau

SEQ ID NO: 2012164 - RNA, 19 nt, Homo sapiens
  misc_RNA (1)...(19): siRNA sense strand
uaggaccggugcugucugu

SEQ ID NO: 2012165 - RNA, 19 nt, Homo sapiens
  misc_RNA (1)...(19): siRNA sense strand
caccuuggacuucuaugaa

SEQ ID NO: 2012166 - RNA, 19 nt, Homo sapiens
  misc_RNA (1)...(19): siRNA sense strand
gaagcgggucauccggaaa

SEQ ID NO: 2012167 - RNA, 19 nt, Homo sapiens
  misc_RNA (1)...(19): siRNA sense strand
ugccauguauaaaguagga

SEQ ID NO: 2012168 - RNA, 19 nt, Homo sapiens
  misc_RNA (1)...(19): siRNA sense strand
ggcagaguuugagcagauu

SEQ ID NO: 2012169 - RNA, 19 nt, Homo sapiens
  misc_RNA (1)...(19): siRNA sense strand
guagagacuaucccaacau

SEQ ID NO: 2012170 - RNA, 19 nt, Homo sapiens
  misc_RNA (1)...(19): siRNA sense strand
ggcauuccuucuaucucaa

SEQ ID NO: 2012171 - RNA, 19 nt, Homo sapiens
  misc_RNA (1)...(19): siRNA sense strand
ggugagcuacuucaucaag

SEQ ID NO: 2012172 - RNA, 19 nt, Homo sapiens
  misc_RNA (1)...(19): siRNA sense strand
gaaggacaagcaggcguau

SEQ ID NO: 2012173 - RNA, 19 nt, Homo sapiens
  misc_RNA (1)...(19): siRNA sense strand
acacggagaaggacaagca

SEQ ID NO: 2012174 - RNA, 19 nt, Homo sapiens
  misc_RNA (1)...(19): siRNA sense strand
gucacuaucauccgcauug

SEQ ID NO: 2012175 - RNA, 19 nt, Homo sapiens
  misc_RNA (1)...(19): siRNA sense strand
gcucauaaagcugcuguac

SEQ ID NO: 2012176 - RNA, 19 nt, Homo sapiens
  misc_RNA (1)...(19): siRNA sense strand
gcagaguuugagcagauug

SEQ ID NO: 2012177 - RNA, 19 nt, Homo sapiens
  misc_RNA (1)...(19): siRNA sense strand
auaaagcugcuguacuaug

SEQ ID NO: 2012178 - RNA, 19 nt, Homo sapiens
  misc_RNA (1)...(19): siRNA sense strand
gauagucggugcccucagu

SEQ ID NO: 2012179 - RNA, 19 nt, Homo sapiens
  misc_RNA (1)...(19): siRNA sense strand
ggaaggcgacccagguuga

SEQ ID NO: 2012180 - RNA, 19 nt, Homo sapiens
  misc_RNA (1)...(19): siRNA sense strand
cguccaaccuucaauacaa

SEQ ID NO: 2012181 - RNA, 19 nt, Homo sapiens
  misc_RNA (1)...(19): siRNA sense strand
cccaaaagcuccauuucua

SEQ ID NO: 2012182 - RNA, 19 nt, Homo sapiens
  misc_RNA (1)...(19): siRNA sense strand
cgacccagguugaggaagu

SEQ ID NO: 2012183 - RNA, 19 nt, Homo sapiens
  misc_RNA (1)...(19): siRNA sense strand
caggugggcuggugugucu

SEQ ID NO: 2012184 - RNA, 19 nt, Homo sapiens
  misc_RNA (1)...(19): siRNA sense strand
ggacuacgaccaggaugug

SEQ ID NO: 2012185 - RNA, 19 nt, Homo sapiens
  misc_RNA (1)...(19): siRNA sense strand
gaccaacucguccaaccuu

SEQ ID NO: 2012186 - RNA, 19 nt, Homo sapiens
  misc_RNA (1)...(19): siRNA sense strand
caacucguccaaccuucaa

SEQ ID NO: 2012187 - RNA, 19 nt, Homo sapiens
  misc_RNA (1)...(19): siRNA sense strand
ggugguauccggcaucucu

SEQ ID NO: 2012188 - RNA, 19 nt, Homo sapiens
  misc_RNA (1)...(19): siRNA sense strand
guccaaccuucaauacaag

SEQ ID NO: 2012189 - RNA, 19 nt, Homo sapiens
  misc_RNA (1)...(19): siRNA sense strand
caaaagcuccauuucuaug

SEQ ID NO: 2012190 - RNA, 19 nt, Homo sapiens
  misc_RNA (1)...(19): siRNA sense strand
ggcuucaucuccggcauug

SEQ ID NO: 2012191 - RNA, 19 nt, Homo sapiens
  misc_RNA (1)...(19): siRNA sense strand
gaggugguauccggcaucu

SEQ ID NO: 2012192 - RNA, 19 nt, Homo sapiens
  misc_RNA (1)...(19): siRNA sense strand
gacccagguugaggaagug

SEQ ID NO: 2012193 - RNA, 19 nt, Homo sapiens
  misc_RNA (1)...(19): siRNA sense strand
ucauaaagcugcuguacua

SEQ ID NO: 2012194 - RNA, 19 nt, Homo sapiens
  misc_RNA (1)...(19): siRNA sense strand
aaacggaccuuaacaagaa

SEQ ID NO: 2012195 - RNA, 19 nt, Homo sapiens
  misc_RNA (1)...(19): siRNA sense strand
gggcauuccuucuaucuca

SEQ ID NO: 2012196 - RNA, 19 nt, Homo sapiens
  misc_RNA (1)...(19): siRNA sense strand
gugcagagcugggccuuga

SEQ ID NO: 2012197 - RNA, 19 nt, Homo sapiens
  misc_RNA (1)...(19): siRNA sense strand
ggccuugacugcccaggua

SEQ ID NO: 2012198 - RNA, 19 nt, Homo sapiens
  misc_RNA (1)...(19): siRNA sense strand
gcuaugccauguauaaagu

SEQ ID NO: 2012199 - RNA, 19 nt, Homo sapiens
  misc_RNA (1)...(19): siRNA sense strand
guuuggagaugugaaguuu

SEQ ID NO: 2012200 - RNA, 19 nt, Homo sapiens
  misc_RNA (1)...(19): siRNA sense strand
uaaagcugcuguacuaugc

SEQ ID NO: 2012201 - RNA, 19 nt, Homo sapiens
  misc_RNA (1)...(19): siRNA sense strand
guaugggcauuccuucuau

SEQ ID NO: 2012202 - RNA, 19 nt, Homo sapiens
  misc_RNA (1)...(19): siRNA sense strand
gguaugggcauuccuucua

SEQ ID NO: 2012203 - RNA, 19 nt, Homo sapiens
  misc_RNA (1)...(19): siRNA sense strand
gggagccaaugcagagaaa

SEQ ID NO: 2012204 - RNA, 19 nt, Homo sapiens
  misc_RNA (1)...(19): siRNA sense strand
gcugaaagucacaaugauu

SEQ ID NO: 2012205 - RNA, 19 nt, Homo sapiens
  misc_RNA (1)...(19): siRNA sense strand
gguagagacuaucccaaca

SEQ ID NO: 2012206 - RNA, 19 nt, Homo sapiens
  misc_RNA (1)...(19): siRNA sense strand
caauuucccagccuuguuu

SEQ ID NO: 2012207 - RNA, 19 nt, Homo sapiens
  misc_RNA (1)...(19): siRNA sense strand
ugagcuacuucaucaagaa

SEQ ID NO: 2012208 - RNA, 19 nt, Homo sapiens
  misc_RNA (1)...(19): siRNA sense strand
cugcagagcugagcgaguu

SEQ ID NO: 2012209 - RNA, 19 nt, Homo sapiens
  misc_RNA (1)...(19): siRNA sense strand
gcaccuuggacuucuauga

SEQ ID NO: 2012210 - RNA, 19 nt, Homo sapiens
  misc_RNA (1)...(19): siRNA sense strand
ugaccgcuaugccauguau

SEQ ID NO: 2012211 - RNA, 19 nt, Homo sapiens
  misc_RNA (1)...(19): siRNA sense strand
ccacuagcagacacaauuu

SEQ ID NO: 2012212 - RNA, 19 nt, Homo sapiens
  misc_RNA (1)...(19): siRNA sense strand
gauggaguccucgguguuu

SEQ ID NO: 2012213 - RNA, 19 nt, Homo sapiens
  misc_RNA (1)...(19): siRNA sense strand
cagagaaagcugaaaguca

SEQ ID NO: 2012214 - RNA, 19 nt, Homo sapiens
  misc_RNA (1)...(19): siRNA sense strand
gagacuaucccaacaucug

SEQ ID NO: 2012215 - RNA, 19 nt, Homo sapiens
  misc_RNA (1)...(19): siRNA sense strand
cuggugagcuacuucauca

SEQ ID NO: 2012216 - RNA, 19 nt, Homo sapiens
  misc_RNA (1)...(19): siRNA sense strand
ggaacaccaugugcaccuu

SEQ ID NO: 2012217 - RNA, 19 nt, Homo sapiens
  misc_RNA (1)...(19): siRNA sense strand
caacaucugugcgggaacu

SEQ ID NO: 2012218 - RNA, 19 nt, Homo sapiens
  misc_RNA (1)...(19): siRNA sense strand
aagcugaaagucacaauga

SEQ ID NO: 2012219 - RNA, 19 nt, Homo sapiens
  misc_RNA (1)...(19): siRNA sense strand
caggagcuguugcuguguu

SEQ ID NO: 2012220 - RNA, 19 nt, Homo sapiens
  misc_RNA (1)...(19): siRNA sense strand
uggcacuucuggugggaua

SEQ ID NO: 2012221 - RNA, 19 nt, Homo sapiens
  misc_RNA (1)...(19): siRNA sense strand
uagagacuaucccaacauc

SEQ ID NO: 2012222 - RNA, 19 nt, Homo sapiens
  misc_RNA (1)...(19): siRNA sense strand
gugagcuacuucaucaaga

SEQ ID NO: 2012223 - RNA, 19 nt, Homo sapiens
  misc_RNA (1)...(19): siRNA sense strand
gcuccaacgucacuaucau

SEQ ID NO: 2012224 - RNA, 19 nt, Homo sapiens
  misc_RNA (1)...(19): siRNA sense strand
ccuucuaucucaaucaugu

SEQ ID NO: 2012225 - RNA, 19 nt, Homo sapiens
  misc_RNA (1)...(19): siRNA sense strand
ggagaugugaaguuugugu

SEQ ID NO: 2012226 - RNA, 19 nt, Homo sapiens
  misc_RNA (1)...(19): siRNA sense strand
ggaaaacggaccuuaacaa

SEQ ID NO: 2012227 - RNA, 19 nt, Homo sapiens
  misc_RNA (1)...(19): siRNA sense strand
aggcagaguuugagcagau

SEQ ID NO: 2012228 - RNA, 19 nt, Homo sapiens
  misc_RNA (1)...(19): siRNA sense strand
gcagagaaagcugaaaguc

SEQ ID NO: 2012229 - RNA, 19 nt, Homo sapiens
  misc_RNA (1)...(19): siRNA sense strand
uuggagaugugaaguuugu

SEQ ID NO: 2012230 - RNA, 19 nt, Homo sapiens
  misc_RNA (1)...(19): siRNA sense strand
ggaccggugcugucuguca

SEQ ID NO: 2012231 - RNA, 19 nt, Homo sapiens
  misc_RNA (1)...(19): siRNA sense strand
gaaaacggaccuuaacaag

SEQ ID NO: 2012232 - RNA, 19 nt, Homo sapiens
  misc_RNA (1)...(19): siRNA sense strand
ucaagaagaaacugagcaa

SEQ ID NO: 2012233 - RNA, 19 nt, Homo sapiens
  misc_RNA (1)...(19): siRNA sense strand
gaaagcugaaagucacaau

SEQ ID NO: 2012234 - RNA, 19 nt, Homo sapiens
  misc_RNA (1)...(19): siRNA sense strand
uaggaccggugcugucugu

SEQ ID NO: 2012235 - RNA, 19 nt, Homo sapiens
  misc_RNA (1)...(19): siRNA sense strand
caccuuggacuucuaugaa

SEQ ID NO: 2012236 - RNA, 19 nt, Homo sapiens
  misc_RNA (1)...(19): siRNA sense strand
gaagcgggucauccggaaa

SEQ ID NO: 2012237 - RNA, 19 nt, Homo sapiens
  misc_RNA (1)...(19): siRNA sense strand
ugccauguauaaaguagga

SEQ ID NO: 2012238 - RNA, 19 nt, Homo sapiens
  misc_RNA (1)...(19): siRNA sense strand
ggcagaguuugagcagauu

SEQ ID NO: 2012239 - RNA, 19 nt, Homo sapiens
  misc_RNA (1)...(19): siRNA sense strand
guagagacuaucccaacau

SEQ ID NO: 2012240 - RNA, 19 nt, Homo sapiens
  misc_RNA (1)...(19): siRNA sense strand
ggcauuccuucuaucucaa

SEQ ID NO: 2012241 - RNA, 19 nt, Homo sapiens
  misc_RNA (1)...(19): siRNA sense strand
ggugagcuacuucaucaag

SEQ ID NO: 2012242 - RNA, 19 nt, Homo sapiens
  misc_RNA (1)...(19): siRNA sense strand
gaaggacaagcaggcguau

SEQ ID NO: 2012243 - RNA, 19 nt, Homo sapiens
  misc_RNA (1)...(19): siRNA sense strand
acacggagaaggacaagca

SEQ ID NO: 2012244 - RNA, 19 nt, Homo sapiens
  misc_RNA (1)...(19): siRNA sense strand
gucacuaucauccgcauug

SEQ ID NO: 2012245 - RNA, 19 nt, Homo sapiens
  misc_RNA (1)...(19): siRNA sense strand
gcucauaaagcugcuguac

SEQ ID NO: 2012246 - RNA, 19 nt, Homo sapiens
  misc_RNA (1)...(19): siRNA sense strand
gcagaguuugagcagauug

SEQ ID NO: 2012247 - RNA, 19 nt, Homo sapiens
  misc_RNA (1)...(19): siRNA sense strand
auaaagcugcuguacuaug

SEQ ID NO: 2012248 - RNA, 19 nt, Homo sapiens
  misc_RNA (1)...(19): siRNA sense strand
ucauaaagcugcuguacua

SEQ ID NO: 2012249 - RNA, 19 nt, Homo sapiens
  misc_RNA (1)...(19): siRNA sense strand
aaacggaccuuaacaagaa

SEQ ID NO: 2012250 - RNA, 19 nt, Homo sapiens
  misc_RNA (1)...(19): siRNA sense strand
gggcauuccuucuaucuca

SEQ ID NO: 2012251 - RNA, 19 nt, Homo sapiens
  misc_RNA (1)...(19): siRNA sense strand
gugcagagcugggccuuga

SEQ ID NO: 2012252 - RNA, 19 nt, Homo sapiens
  misc_RNA (1)...(19): siRNA sense strand
ggccuugacugcccaggua

SEQ ID NO: 2012253 - RNA, 19 nt, Homo sapiens
  misc_RNA (1)...(19): siRNA sense strand
gcuaugccauguauaaagu

SEQ ID NO: 2012254 - RNA, 19 nt, Homo sapiens
  misc_RNA (1)...(19): siRNA sense strand
guuuggagaugugaaguuu

SEQ ID NO: 2012255 - RNA, 19 nt, Homo sapiens
  misc_RNA (1)...(19): siRNA sense strand
uaaagcugcuguacuaugc

SEQ ID NO: 2012256 - RNA, 19 nt, Homo sapiens
  misc_RNA (1)...(19): siRNA sense strand
guaugggcauuccuucuau

SEQ ID NO: 2012257 - RNA, 19 nt, Homo sapiens
  misc_RNA (1)...(19): siRNA sense strand
gguaugggcauuccuucua

SEQ ID NO: 2012258 - RNA, 19 nt, Homo sapiens
  misc_RNA (1)...(19): siRNA sense strand
gggagccaaugcagagaaa

SEQ ID NO: 2012259 - RNA, 19 nt, Homo sapiens
  misc_RNA (1)...(19): siRNA sense strand
gcugaaagucacaaugauu

SEQ ID NO: 2012260 - RNA, 19 nt, Homo sapiens
  misc_RNA (1)...(19): siRNA sense strand
gguagagacuaucccaaca

SEQ ID NO: 2012261 - RNA, 19 nt, Homo sapiens
  misc_RNA (1)...(19): siRNA sense strand
caauuucccagccuuguuu

SEQ ID NO: 2012262 - RNA, 19 nt, Homo sapiens
  misc_RNA (1)...(19): siRNA sense strand
ugagcuacuucaucaagaa

SEQ ID NO: 2012263 - RNA, 19 nt, Homo sapiens
  misc_RNA (1)...(19): siRNA sense strand
cugcagagcugagcgaguu

SEQ ID NO: 2012264 - RNA, 19 nt, Homo sapiens
  misc_RNA (1)...(19): siRNA sense strand
gcaccuuggacuucuauga

SEQ ID NO: 2012265 - RNA, 19 nt, Homo sapiens
  misc_RNA (1)...(19): siRNA sense strand
ugaccgcuaugccauguau

SEQ ID NO: 2012266 - RNA, 19 nt, Homo sapiens
  misc_RNA (1)...(19): siRNA sense strand
ccacuagcagacacaauuu

SEQ ID NO: 2012267 - RNA, 19 nt, Homo sapiens
  misc_RNA (1)...(19): siRNA sense strand
gauggaguccucgguguuu

SEQ ID NO: 2012268 - RNA, 19 nt, Homo sapiens
  misc_RNA (1)...(19): siRNA sense strand
cagagaaagcugaaaguca

SEQ ID NO: 2012269 - RNA, 19 nt, Homo sapiens
  misc_RNA (1)...(19): siRNA sense strand
gagacuaucccaacaucug

SEQ ID NO: 2012270 - RNA, 19 nt, Homo sapiens
  misc_RNA (1)...(19): siRNA sense strand
cuggugagcuacuucauca

SEQ ID NO: 2012271 - RNA, 19 nt, Homo sapiens
  misc_RNA (1)...(19): siRNA sense strand
ggaacaccaugugcaccuu

SEQ ID NO: 2012272 - RNA, 19 nt, Homo sapiens
  misc_RNA (1)...(19): siRNA sense strand
caacaucugugcgggaacu

SEQ ID NO: 2012273 - RNA, 19 nt, Homo sapiens
  misc_RNA (1)...(19): siRNA sense strand
aagcugaaagucacaauga

SEQ ID NO: 2012274 - RNA, 19 nt, Homo sapiens
  misc_RNA (1)...(19): siRNA sense strand
caggagcuguugcuguguu

SEQ ID NO: 2012275 - RNA, 19 nt, Homo sapiens
  misc_RNA (1)...(19): siRNA sense strand
uggcacuucuggugggaua

SEQ ID NO: 2012276 - RNA, 19 nt, Homo sapiens
  misc_RNA (1)...(19): siRNA sense strand
uagagacuaucccaacauc

SEQ ID NO: 2012277 - RNA, 19 nt, Homo sapiens
  misc_RNA (1)...(19): siRNA sense strand
gugagcuacuucaucaaga

SEQ ID NO: 2012278 - RNA, 19 nt, Homo sapiens
  misc_RNA (1)...(19): siRNA sense strand
gcuccaacgucacuaucau

SEQ ID NO: 2012279 - RNA, 19 nt, Homo sapiens
  misc_RNA (1)...(19): siRNA sense strand
ccuucuaucucaaucaugu

SEQ ID NO: 2012280 - RNA, 19 nt, Homo sapiens
  misc_RNA (1)...(19): siRNA sense strand
ggagaugugaaguuugugu

SEQ ID NO: 2012281 - RNA, 19 nt, Homo sapiens
  misc_RNA (1)...(19): siRNA sense strand
ggaaaacggaccuuaacaa

SEQ ID NO: 2012282 - RNA, 19 nt, Homo sapiens
  misc_RNA (1)...(19): siRNA sense strand
aggcagaguuugagcagau

SEQ ID NO: 2012283 - RNA, 19 nt, Homo sapiens
  misc_RNA (1)...(19): siRNA sense strand
gcagagaaagcugaaaguc

SEQ ID NO: 2012284 - RNA, 19 nt, Homo sapiens
  misc_RNA (1)...(19): siRNA sense strand
uuggagaugugaaguuugu

SEQ ID NO: 2012285 - RNA, 19 nt, Homo sapiens
  misc_RNA (1)...(19): siRNA sense strand
ggaccggugcugucuguca

SEQ ID NO: 2012286 - RNA, 19 nt, Homo sapiens
  misc_RNA (1)...(19): siRNA sense strand
gaaaacggaccuuaacaag

SEQ ID NO: 2012287 - RNA, 19 nt, Homo sapiens
  misc_RNA (1)...(19): siRNA sense strand
ucaagaagaaacugagcaa

SEQ ID NO: 2012288 - RNA, 19 nt, Homo sapiens
  misc_RNA (1)...(19): siRNA sense strand
gaaagcugaaagucacaau

SEQ ID NO: 2012289 - RNA, 19 nt, Homo sapiens
  misc_RNA (1)...(19): siRNA sense strand
uaggaccggugcugucugu

SEQ ID NO: 2012290 - RNA, 19 nt, Homo sapiens
  misc_RNA (1)...(19): siRNA sense strand
caccuuggacuucuaugaa

SEQ ID NO: 2012291 - RNA, 19 nt, Homo sapiens
  misc_RNA (1)...(19): siRNA sense strand
gaagcgggucauccggaaa

SEQ ID NO: 2012292 - RNA, 19 nt, Homo sapiens
  misc_RNA (1)...(19): siRNA sense strand
ugccauguauaaaguagga

SEQ ID NO: 2012293 - RNA, 19 nt, Homo sapiens
  misc_RNA (1)...(19): siRNA sense strand
ggcagaguuugagcagauu

SEQ ID NO: 2012294 - RNA, 19 nt, Homo sapiens
  misc_RNA (1)...(19): siRNA sense strand
guagagacuaucccaacau

SEQ ID NO: 2012295 - RNA, 19 nt, Homo sapiens
  misc_RNA (1)...(19): siRNA sense strand
ggcauuccuucuaucucaa

SEQ ID NO: 2012296 - RNA, 19 nt, Homo sapiens
  misc_RNA (1)...(19): siRNA sense strand
ggugagcuacuucaucaag

SEQ ID NO: 2012297 - RNA, 19 nt, Homo sapiens
  misc_RNA (1)...(19): siRNA sense strand
gaaggacaagcaggcguau

SEQ ID NO: 2012298 - RNA, 19 nt, Homo sapiens
  misc_RNA (1)...(19): siRNA sense strand
acacggagaaggacaagca

SEQ ID NO: 2012299 - RNA, 19 nt, Homo sapiens
  misc_RNA (1)...(19): siRNA sense strand
gucacuaucauccgcauug

SEQ ID NO: 2012300 - RNA, 19 nt, Homo sapiens
  misc_RNA (1)...(19): siRNA sense strand
gcucauaaagcugcuguac

SEQ ID NO: 2012301 - RNA, 19 nt, Homo sapiens
  misc_RNA (1)...(19): siRNA sense strand
gcagaguuugagcagauug

SEQ ID NO: 2012302 - RNA, 19 nt, Homo sapiens
  misc_RNA (1)...(19): siRNA sense strand
auaaagcugcuguacuaug

SEQ ID NO: 2012303 - RNA, 19 nt, Homo sapiens
  misc_RNA (1)...(19): siRNA sense strand
gaaagaauaugccuccaaa

SEQ ID NO: 2012304 - RNA, 19 nt, Homo sapiens
  misc_RNA (1)...(19): siRNA sense strand
ggaaugacaucaaauuuca

SEQ ID NO: 2012305 - RNA, 19 nt, Homo sapiens
  misc_RNA (1)...(19): siRNA sense strand
gaaaagcccuucaacauuu

SEQ ID NO: 2012306 - RNA, 19 nt, Homo sapiens
  misc_RNA (1)...(19): siRNA sense strand
ggacagugcuccauccaaa

SEQ ID NO: 2012307 - RNA, 19 nt, Homo sapiens
  misc_RNA (1)...(19): siRNA sense strand
gaauaugccuccaaagaug

SEQ ID NO: 2012308 - RNA, 19 nt, Homo sapiens
  misc_RNA (1)...(19): siRNA sense strand
ugaaguaccugauauucua

SEQ ID NO: 2012309 - RNA, 19 nt, Homo sapiens
  misc_RNA (1)...(19): siRNA sense strand
cgaaagaccuacgugaaua

SEQ ID NO: 2012310 - RNA, 19 nt, Homo sapiens
  misc_RNA (1)...(19): siRNA sense strand
ucaacaagcuuccuuccua

SEQ ID NO: 2012311 - RNA, 19 nt, Homo sapiens
  misc_RNA (1)...(19): siRNA sense strand
gaagaugacuuuuauguug

SEQ ID NO: 2012312 - RNA, 19 nt, Homo sapiens
  misc_RNA (1)...(19): siRNA sense strand
ggagauaacgugaacauau

SEQ ID NO: 2012313 - RNA, 19 nt, Homo sapiens
  misc_RNA (1)...(19): siRNA sense strand
gcacguugaugugaagaua

SEQ ID NO: 2012314 - RNA, 19 nt, Homo sapiens
  misc_RNA (1)...(19): siRNA sense strand
agaagaagaugcagugauu

SEQ ID NO: 2012315 - RNA, 19 nt, Homo sapiens
  misc_RNA (1)...(19): siRNA sense strand
uggcagaacuuguaaagaa

SEQ ID NO: 2012316 - RNA, 19 nt, Homo sapiens
  misc_RNA (1)...(19): siRNA sense strand
caaaugagauuguuacacu

SEQ ID NO: 2012317 - RNA, 19 nt, Homo sapiens
  misc_RNA (1)...(19): siRNA sense strand
caacccagauccuacaauu

SEQ ID NO: 2012318 - RNA, 19 nt, Homo sapiens
  misc_RNA (1)...(19): siRNA sense strand
gugcagaacucuacgagaa

SEQ ID NO: 2012319 - RNA, 19 nt, Homo sapiens
  misc_RNA (1)...(19): siRNA sense strand
gaucaauggugcuuauuuc

SEQ ID NO: 2012320 - RNA, 19 nt, Homo sapiens
  misc_RNA (1)...(19): siRNA sense strand
ugacuucggugcuacuuaa

SEQ ID NO: 2012321 - RNA, 19 nt, Homo sapiens
  misc_RNA (1)...(19): siRNA sense strand
gagagaaggucugugcaaa

SEQ ID NO: 2012322 - RNA, 19 nt, Homo sapiens
  misc_RNA (1)...(19): siRNA sense strand
ggaaguuacucaagaugug

SEQ ID NO: 2012323 - RNA, 19 nt, Homo sapiens
  misc_RNA (1)...(19): siRNA sense strand
caacuugacuucggugcua

SEQ ID NO: 2012324 - RNA, 19 nt, Homo sapiens
  misc_RNA (1)...(19): siRNA sense strand
ugagaaggcuugugaacug

SEQ ID NO: 2012325 - RNA, 19 nt, Homo sapiens
  misc_RNA (1)...(19): siRNA sense strand
ugacuggaaugacaucaaa

SEQ ID NO: 2012326 - RNA, 19 nt, Homo sapiens
  misc_RNA (1)...(19): siRNA sense strand
ucagaccacucuaaauuug

SEQ ID NO: 2012327 - RNA, 19 nt, Homo sapiens
  misc_RNA (1)...(19): siRNA sense strand
gaaguaaacagugguaaau

SEQ ID NO: 2012328 - RNA, 19 nt, Homo sapiens
  misc_RNA (1)...(19): siRNA sense strand
caucaucaaucucuuagga

SEQ ID NO: 2012329 - RNA, 19 nt, Homo sapiens
  misc_RNA (1)...(19): siRNA sense strand
gaagaugcgucaacaagcu

SEQ ID NO: 2012330 - RNA, 19 nt, Homo sapiens
  misc_RNA (1)...(19): siRNA sense strand
caucaagauuuccaacauu

SEQ ID NO: 2012331 - RNA, 19 nt, Homo sapiens
  misc_RNA (1)...(19): siRNA sense strand
gaaguacaccugccucaug

SEQ ID NO: 2012332 - RNA, 19 nt, Homo sapiens
  misc_RNA (1)...(19): siRNA sense strand
ccagcuacuuuaacuauga

SEQ ID NO: 2012333 - RNA, 19 nt, Homo sapiens
  misc_RNA (1)...(19): siRNA sense strand
gaacaucgaggcuacuugu

SEQ ID NO: 2012334 - RNA, 19 nt, Homo sapiens
  misc_RNA (1)...(19): siRNA sense strand
ggauuugccagaucauaua

SEQ ID NO: 2012335 - RNA, 19 nt, Homo sapiens
  misc_RNA (1)...(19): siRNA sense strand
ggagacggacccagcauuu

SEQ ID NO: 2012336 - RNA, 19 nt, Homo sapiens
  misc_RNA (1)...(19): siRNA sense strand
uuggauggcuauucuauuu

SEQ ID NO: 2012337 - RNA, 19 nt, Homo sapiens
  misc_RNA (1)...(19): siRNA sense strand
caauggugcuuauuucugu

SEQ ID NO: 2012338 - RNA, 19 nt, Homo sapiens
  misc_RNA (1)...(19): siRNA sense strand
gaugagguguaugaucuaa

SEQ ID NO: 2012339 - RNA, 19 nt, Homo sapiens
  misc_RNA (1)...(19): siRNA sense strand
gaaggcauaccgaggauga

SEQ ID NO: 2012340 - RNA, 19 nt, Homo sapiens
  misc_RNA (1)...(19): siRNA sense strand
ggcagaacuuguaaagaaa

SEQ ID NO: 2012341 - RNA, 19 nt, Homo sapiens
  misc_RNA (1)...(19): siRNA sense strand
aaacaucucucaccugcau

SEQ ID NO: 2012342 - RNA, 19 nt, Homo sapiens
  misc_RNA (1)...(19): siRNA sense strand
ggugcuacuuaacaacuua

SEQ ID NO: 2012343 - RNA, 19 nt, Homo sapiens
  misc_RNA (1)...(19): siRNA sense strand
gugaucagcagaauauuaa

SEQ ID NO: 2012344 - RNA, 19 nt, Homo sapiens
  misc_RNA (1)...(19): siRNA sense strand
gccauggacuugaucuuga

SEQ ID NO: 2012345 - RNA, 19 nt, Homo sapiens
  misc_RNA (1)...(19): siRNA sense strand
gaagagggcaaaugugcaa

SEQ ID NO: 2012346 - RNA, 19 nt, Homo sapiens
  misc_RNA (1)...(19): siRNA sense strand
ggaagaugcugcuuauagc

SEQ ID NO: 2012347 - RNA, 19 nt, Homo sapiens
  misc_RNA (1)...(19): siRNA sense strand
gggaagaugcugcuuauag

SEQ ID NO: 2012348 - RNA, 19 nt, Homo sapiens
  misc_RNA (1)...(19): siRNA sense strand
gagcuagagucaacaccaa

SEQ ID NO: 2012349 - RNA, 19 nt, Homo sapiens
  misc_RNA (1)...(19): siRNA sense strand
aagaagaugcagugauuua

SEQ ID NO: 2012350 - RNA, 19 nt, Homo sapiens
  misc_RNA (1)...(19): siRNA sense strand
acccagauccuacaauuua

SEQ ID NO: 2012351 - RNA, 19 nt, Homo sapiens
  misc_RNA (1)...(19): siRNA sense strand
gcaaaugugcaaaggagaa

SEQ ID NO: 2012352 - RNA, 19 nt, Homo sapiens
  misc_RNA (1)...(19): siRNA sense strand
aaagugaucagcagaauau

SEQ ID NO: 2012353 - RNA, 19 nt, Homo sapiens
  misc_RNA (1)...(19): siRNA sense strand
gucuaaaucuccugccuaa

SEQ ID NO: 2012354 - RNA, 19 nt, Homo sapiens
  misc_RNA (1)...(19): siRNA sense strand
uaacuuugcugucaucaac

SEQ ID NO: 2012355 - RNA, 19 nt, Homo sapiens
  misc_RNA (1)...(19): siRNA sense strand
ggaugcaagucuuaugugu

SEQ ID NO: 2012356 - RNA, 19 nt, Homo sapiens
  misc_RNA (1)...(19): siRNA sense strand
ugagguguaugaucuaaug

SEQ ID NO: 2012357 - RNA, 19 nt, Homo sapiens
  misc_RNA (1)...(19): siRNA sense strand
ggagauuguuagcuuagga

SEQ ID NO: 2012358 - RNA, 19 nt, Homo sapiens
  misc_RNA (1)...(19): siRNA sense strand
gucaagagguguacgugaa

SEQ ID NO: 2012359 - RNA, 19 nt, Homo sapiens
  misc_RNA (1)...(19): siRNA sense strand
gcuggccgcuaccuacuaa

SEQ ID NO: 2012360 - RNA, 19 nt, Homo sapiens
  misc_RNA (1)...(19): siRNA sense strand
gggccagauuguaagcuua

SEQ ID NO: 2012361 - RNA, 19 nt, Homo sapiens
  misc_RNA (1)...(19): siRNA sense strand
ccaugaagauacuggagaa

SEQ ID NO: 2012362 - RNA, 19 nt, Homo sapiens
  misc_RNA (1)...(19): siRNA sense strand
gccaucauuugcccagaua

SEQ ID NO: 2012363 - RNA, 19 nt, Homo sapiens
  misc_RNA (1)...(19): siRNA sense strand
caaccaauauuuccaagcu

SEQ ID NO: 2012364 - RNA, 19 nt, Homo sapiens
  misc_RNA (1)...(19): siRNA sense strand
acaaacccguuaaucacua

SEQ ID NO: 2012365 - RNA, 19 nt, Homo sapiens
  misc_RNA (1)...(19): siRNA sense strand
gaaugcaaccaucucugua

SEQ ID NO: 2012366 - RNA, 19 nt, Homo sapiens
  misc_RNA (1)...(19): siRNA sense strand
ugaauaccacgcuuuauga

SEQ ID NO: 2012367 - RNA, 19 nt, Homo sapiens
  misc_RNA (1)...(19): siRNA sense strand
ggacccagcauuugccauu

SEQ ID NO: 2012368 - RNA, 19 nt, Homo sapiens
  misc_RNA (1)...(19): siRNA sense strand
ggaauggagugaagaucuc

SEQ ID NO: 2012369 - RNA, 19 nt, Homo sapiens
  misc_RNA (1)...(19): siRNA sense strand
ggaaaagcccuucaacauu

SEQ ID NO: 2012370 - RNA, 19 nt, Homo sapiens
  misc_RNA (1)...(19): siRNA sense strand
gaagaugcagugauuuaca

SEQ ID NO: 2012371 - RNA, 19 nt, Homo sapiens
  misc_RNA (1)...(19): siRNA sense strand
auaccacgcuuuaugagaa

SEQ ID NO: 2012372 - RNA, 19 nt, Homo sapiens
  misc_RNA (1)...(19): siRNA sense strand
gcgaaagaccuacgugaau

SEQ ID NO: 2012373 - RNA, 19 nt, Homo sapiens
  misc_RNA (1)...(19): siRNA sense strand
ggacuuugaagccuuaaug

SEQ ID NO: 2012374 - RNA, 19 nt, Homo sapiens
  misc_RNA (1)...(19): siRNA sense strand
gguguaugaucuaaugaga

SEQ ID NO: 2012375 - RNA, 19 nt, Homo sapiens
  misc_RNA (1)...(19): siRNA sense strand
uaugggagauuguuagcuu

SEQ ID NO: 2012376 - RNA, 19 nt, Homo sapiens
  misc_RNA (1)...(19): siRNA sense strand
gauaguggauuugccagau

SEQ ID NO: 2012377 - RNA, 19 nt, Homo sapiens
  misc_RNA (1)...(19): siRNA sense strand
ggcaugaaguaccugauau

SEQ ID NO: 2012378 - RNA, 19 nt, Homo sapiens
  misc_RNA (1)...(19): siRNA sense strand
caagggagauaacgugaac

SEQ ID NO: 2012379 - RNA, 19 nt, Homo sapiens
  misc_RNA (1)...(19): siRNA sense strand
ggaccaaucaaauccaaga

SEQ ID NO: 2012380 - RNA, 19 nt, Homo sapiens
  misc_RNA (1)...(19): siRNA sense strand
gaagaagaugcagugauuu

SEQ ID NO: 2012381 - RNA, 19 nt, Homo sapiens
  misc_RNA (1)...(19): siRNA sense strand
ccauacggaucauuucuca

SEQ ID NO: 2012382 - RNA, 19 nt, Homo sapiens
  misc_RNA (1)...(19): siRNA sense strand
cgggaugacuugugcagaa

SEQ ID NO: 2012383 - RNA, 19 nt, Homo sapiens
  misc_RNA (1)...(19): siRNA sense strand
gaaugaagaccagcacguu

SEQ ID NO: 2012384 - RNA, 19 nt, Homo sapiens
  misc_RNA (1)...(19): siRNA sense strand
gcaugaaguaccugauauu

SEQ ID NO: 2012385 - RNA, 19 nt, Homo sapiens
  misc_RNA (1)...(19): siRNA sense strand
ggauggcuauucuauuucu

SEQ ID NO: 2012386 - RNA, 19 nt, Homo sapiens
  misc_RNA (1)...(19): siRNA sense strand
gagaaggcauaccgaggau

SEQ ID NO: 2012387 - RNA, 19 nt, Homo sapiens
  misc_RNA (1)...(19): siRNA sense strand
uauacaaacccguuaauca

SEQ ID NO: 2012388 - RNA, 19 nt, Homo sapiens
  misc_RNA (1)...(19): siRNA sense strand
gugaauaccacgcuuuaug

SEQ ID NO: 2012389 - RNA, 19 nt, Homo sapiens
  misc_RNA (1)...(19): siRNA sense strand
agauauugguguccuuaaa

SEQ ID NO: 2012390 - RNA, 19 nt, Homo sapiens
  misc_RNA (1)...(19): siRNA sense strand
aagaauaugccuccaaaga

SEQ ID NO: 2012391 - RNA, 19 nt, Homo sapiens
  misc_RNA (1)...(19): siRNA sense strand
gugcuugacuggaaugaca

SEQ ID NO: 2012392 - RNA, 19 nt, Homo sapiens
  misc_RNA (1)...(19): siRNA sense strand
caauuuauccagugcuuga

SEQ ID NO: 2012393 - RNA, 19 nt, Homo sapiens
  misc_RNA (1)...(19): siRNA sense strand
ggagagaaggucugugcaa

SEQ ID NO: 2012394 - RNA, 19 nt, Homo sapiens
  misc_RNA (1)...(19): siRNA sense strand
gaccuggcaaccaauauuu

SEQ ID NO: 2012395 - RNA, 19 nt, Homo sapiens
  misc_RNA (1)...(19): siRNA sense strand
gaugugugaucgcuuccaa

SEQ ID NO: 2012396 - RNA, 19 nt, Homo sapiens
  misc_RNA (1)...(19): siRNA sense strand
gaugugaagauaaagaaug

SEQ ID NO: 2012397 - RNA, 19 nt, Homo sapiens
  misc_RNA (1)...(19): siRNA sense strand
agucagaccacucuaaauu

SEQ ID NO: 2012398 - RNA, 19 nt, Homo sapiens
  misc_RNA (1)...(19): siRNA sense strand
gccagaucauauagaagua

SEQ ID NO: 2012399 - RNA, 19 nt, Homo sapiens
  misc_RNA (1)...(19): siRNA sense strand
gcuggaaguuacucaagau

SEQ ID NO: 2012400 - RNA, 19 nt, Homo sapiens
  misc_RNA (1)...(19): siRNA sense strand
cugaucauauugcaauuga

SEQ ID NO: 2012401 - RNA, 19 nt, Homo sapiens
  misc_RNA (1)...(19): siRNA sense strand
uguaugaucuaaugagaca

SEQ ID NO: 2012402 - RNA, 19 nt, Homo sapiens
  misc_RNA (1)...(19): siRNA sense strand
gaaguuacucaagauguga

SEQ ID NO: 2012403 - RNA, 19 nt, Homo sapiens
  misc_RNA (1)...(19): siRNA sense strand
gaacgaaacugauuguaau

SEQ ID NO: 2012404 - RNA, 19 nt, Homo sapiens
  misc_RNA (1)...(19): siRNA sense strand
gcucguagcuggcauuuca

SEQ ID NO: 2012405 - RNA, 19 nt, Homo sapiens
  misc_RNA (1)...(19): siRNA sense strand
gcaccuauaucucccuuau

SEQ ID NO: 2012406 - RNA, 19 nt, Homo sapiens
  misc_RNA (1)...(19): siRNA sense strand
gccgagaacuccacaaaug

SEQ ID NO: 2012407 - RNA, 19 nt, Homo sapiens
  misc_RNA (1)...(19): siRNA sense strand
ggaacuggcaccacuauug

SEQ ID NO: 2012408 - RNA, 19 nt, Homo sapiens
  misc_RNA (1)...(19): siRNA sense strand
ccaccaaaguuaaccagaa

SEQ ID NO: 2012409 - RNA, 19 nt, Homo sapiens
  misc_RNA (1)...(19): siRNA sense strand
ccacaaaugcucccuaugu

SEQ ID NO: 2012410 - RNA, 19 nt, Homo sapiens
  misc_RNA (1)...(19): siRNA sense strand
ccagaaggguuguuaugau

SEQ ID NO: 2012411 - RNA, 19 nt, Homo sapiens
  misc_RNA (1)...(19): siRNA sense strand
gaacuggcaccacuauugu

SEQ ID NO: 2012412 - RNA, 19 nt, Homo sapiens
  misc_RNA (1)...(19): siRNA sense strand
ggacuuacacggacgcuau

SEQ ID NO: 2012413 - RNA, 19 nt, Homo sapiens
  misc_RNA (1)...(19): siRNA sense strand
cauggaugcugaaacugua

SEQ ID NO: 2012414 - RNA, 19 nt, Homo sapiens
  misc_RNA (1)...(19): siRNA sense strand
ugaacgaaacugauuguaa

SEQ ID NO: 2012415 - RNA, 19 nt, Homo sapiens
  misc_RNA (1)...(19): siRNA sense strand
gcuguggugugcagaacua

SEQ ID NO: 2012416 - RNA, 19 nt, Homo sapiens
  misc_RNA (1)...(19): siRNA sense strand
gcaccacuauuguugucuu

SEQ ID NO: 2012417 - RNA, 19 nt, Homo sapiens
  misc_RNA (1)...(19): siRNA sense strand
cagaaggguuguuaugauc

SEQ ID NO: 2012418 - RNA, 19 nt, Homo sapiens
  misc_RNA (1)...(19): siRNA sense strand
ggagaccaaaccugugaua

SEQ ID NO: 2012419 - RNA, 19 nt, Homo sapiens
  misc_RNA (1)...(19): siRNA sense strand
cggacgcuaugcagacuua

SEQ ID NO: 2012420 - RNA, 19 nt, Homo sapiens
  misc_RNA (1)...(19): siRNA sense strand
gaaggguuguuaugaucug

SEQ ID NO: 2012421 - RNA, 19 nt, Homo sapiens
  misc_RNA (1)...(19): siRNA sense strand
ugugauaaccugucucaaa

SEQ ID NO: 2012422 - RNA, 19 nt, Homo sapiens
  misc_RNA (1)...(19): siRNA sense strand
gugauaaccugucucaaaa

SEQ ID NO: 2012423 - RNA, 19 nt, Homo sapiens
  misc_RNA (1)...(19): siRNA sense strand
accuauaucucccuuauug

SEQ ID NO: 2012424 - RNA, 19 nt, Homo sapiens
  misc_RNA (1)...(19): siRNA sense strand
gcccauggaugcugaaacu

SEQ ID NO: 2012425 - RNA, 19 nt, Homo sapiens
  misc_RNA (1)...(19): siRNA sense strand
guuccuggcugagcucgua

SEQ ID NO: 2012426 - RNA, 19 nt, Homo sapiens
  misc_RNA (1)...(19): siRNA sense strand
gugcagaacuacaccaacu

SEQ ID NO: 2012427 - RNA, 19 nt, Homo sapiens
  misc_RNA (1)...(19): siRNA sense strand
gaccaaaccugugauaacc

SEQ ID NO: 2012428 - RNA, 19 nt, Homo sapiens
  misc_RNA (1)...(19): siRNA sense strand
ucugguaacuaguuucaug

SEQ ID NO: 2012429 - RNA, 19 nt, Homo sapiens
  misc_RNA (1)...(19): siRNA sense strand
cgaggagaauggagaccaa

SEQ ID NO: 2012430 - RNA, 19 nt, Homo sapiens
  misc_RNA (1)...(19): siRNA sense strand
caucuacuccuucgucuuc

SEQ ID NO: 2012431 - RNA, 19 nt, Homo sapiens
  misc_RNA (1)...(19): siRNA sense strand
gagacuaacaugggaauca

SEQ ID NO: 2012432 - RNA, 19 nt, Homo sapiens
  misc_RNA (1)...(19): siRNA sense strand
ccacuauuguugucuuugg

SEQ ID NO: 2012433 - RNA, 19 nt, Homo sapiens
  misc_RNA (1)...(19): siRNA sense strand
gaucugguaacuaguuuca

SEQ ID NO: 2012434 - RNA, 19 nt, Homo sapiens
  misc_RNA (1)...(19): siRNA sense strand
ggguuguuaugaucuggua

SEQ ID NO: 2012435 - RNA, 19 nt, Homo sapiens
  misc_RNA (1)...(19): siRNA sense strand
caccaaaguuaaccagaag

SEQ ID NO: 2012436 - RNA, 19 nt, Homo sapiens
  misc_RNA (1)...(19): siRNA sense strand
aaacccuccucaucaucua

SEQ ID NO: 2012437 - RNA, 19 nt, Homo sapiens
  misc_RNA (1)...(19): siRNA sense strand
ggguuuguguuucgucaug

SEQ ID NO: 2012438 - RNA, 19 nt, Homo sapiens
  misc_RNA (1)...(19): siRNA sense strand
gcaugaacgaaacugauug

SEQ ID NO: 2012439 - RNA, 19 nt, Homo sapiens
  misc_RNA (1)...(19): siRNA sense strand
gagaccaaaccugugauaa

SEQ ID NO: 2012440 - RNA, 19 nt, Homo sapiens
  misc_RNA (1)...(19): siRNA sense strand
cccaggaucuacacaaucu

SEQ ID NO: 2012441 - RNA, 19 nt, Homo sapiens
  misc_RNA (1)...(19): siRNA sense strand
caccacuauuguugucuuu

SEQ ID NO: 2012442 - RNA, 19 nt, Homo sapiens
  misc_RNA (1)...(19): siRNA sense strand
aaucgcauucucccaguua

SEQ ID NO: 2012443 - RNA, 19 nt, Homo sapiens
  misc_RNA (1)...(19): siRNA sense strand
agacuuacaauggcaauga

SEQ ID NO: 2012444 - RNA, 19 nt, Homo sapiens
  misc_RNA (1)...(19): siRNA sense strand
ggaguggcguuuggaaucg

SEQ ID NO: 2012445 - RNA, 19 nt, Homo sapiens
  misc_RNA (1)...(19): siRNA sense strand
cauuucaggguuuguguuu

SEQ ID NO: 2012446 - RNA, 19 nt, Homo sapiens
  misc_RNA (1)...(19): siRNA sense strand
gcauucucccaguuaauug

SEQ ID NO: 2012447 - RNA, 19 nt, Homo sapiens
  misc_RNA (1)...(19): siRNA sense strand
gcuaugcagacuuacaaug

SEQ ID NO: 2012448 - RNA, 19 nt, Homo sapiens
  misc_RNA (1)...(19): siRNA sense strand
caggaucuacacaaucuga

SEQ ID NO: 2012449 - RNA, 19 nt, Homo sapiens
  misc_RNA (1)...(19): siRNA sense strand
gacuuacaauggcaaugau

SEQ ID NO: 2012450 - RNA, 19 nt, Homo sapiens
  misc_RNA (1)...(19): siRNA sense strand
uaugaucugguaacuaguu

SEQ ID NO: 2012451 - RNA, 19 nt, Homo sapiens
  misc_RNA (1)...(19): siRNA sense strand
agacuaacaugggaaucau

SEQ ID NO: 2012452 - RNA, 19 nt, Homo sapiens
  misc_RNA (1)...(19): siRNA sense strand
uuugcuacaugucguggua

SEQ ID NO: 2012453 - RNA, 19 nt, Homo sapiens
  misc_RNA (1)...(19): siRNA sense strand
cugcuggccugcugucugu

SEQ ID NO: 2012454 - RNA, 19 nt, Homo sapiens
  misc_RNA (1)...(19): siRNA sense strand
ccauggaugcugaaacugu

SEQ ID NO: 2012455 - RNA, 19 nt, Homo sapiens
  misc_RNA (1)...(19): siRNA sense strand
cuguuuggaugcuuugcua

SEQ ID NO: 2012456 - RNA, 19 nt, Homo sapiens
  misc_RNA (1)...(19): siRNA sense strand
ucaaaacccuccucaucau

SEQ ID NO: 2012457 - RNA, 19 nt, Homo sapiens
  misc_RNA (1)...(19): siRNA sense strand
cuccacaaaugcucccuau

SEQ ID NO: 2012458 - RNA, 19 nt, Homo sapiens
  misc_RNA (1)...(19): siRNA sense strand
gcauuucaggguuuguguu

SEQ ID NO: 2012459 - RNA, 19 nt, Homo sapiens
  misc_RNA (1)...(19): siRNA sense strand
gaggagaauggagaccaaa

SEQ ID NO: 2012460 - RNA, 19 nt, Homo sapiens
  misc_RNA (1)...(19): siRNA sense strand
uggaugcuuugcuacaugu

SEQ ID NO: 2012461 - RNA, 19 nt, Homo sapiens
  misc_RNA (1)...(19): siRNA sense strand
cgcauucucccaguuaauu

SEQ ID NO: 2012462 - RNA, 19 nt, Homo sapiens
  misc_RNA (1)...(19): siRNA sense strand
agaccaaaccugugauaac

SEQ ID NO: 2012463 - RNA, 19 nt, Homo sapiens
  misc_RNA (1)...(19): siRNA sense strand
gguuuguguuucgucauga

SEQ ID NO: 2012464 - RNA, 19 nt, Homo sapiens
  misc_RNA (1)...(19): siRNA sense strand
uguugucuuuggccuguuu

SEQ ID NO: 2012465 - RNA, 19 nt, Homo sapiens
  misc_RNA (1)...(19): siRNA sense strand
ggcaacagcaccaauaaua

SEQ ID NO: 2012466 - RNA, 19 nt, Homo sapiens
  misc_RNA (1)...(19): siRNA sense strand
guaauguucuucuucuuug

SEQ ID NO: 2012467 - RNA, 19 nt, Homo sapiens
  misc_RNA (1)...(19): siRNA sense strand
gagaaagacaguaauaguu

SEQ ID NO: 2012468 - RNA, 19 nt, Homo sapiens
  misc_RNA (1)...(19): siRNA sense strand
gaacaagauuuccuuuggu

SEQ ID NO: 2012469 - RNA, 19 nt, Homo sapiens
  misc_RNA (1)...(19): siRNA sense strand
gcagaaggucuccuacuuu

SEQ ID NO: 2012470 - RNA, 19 nt, Homo sapiens
  misc_RNA (1)...(19): siRNA sense strand
ucucagggcuucucaucua

SEQ ID NO: 2012471 - RNA, 19 nt, Homo sapiens
  misc_RNA (1)...(19): siRNA sense strand
ugacucaguucaaguaguu

SEQ ID NO: 2012472 - RNA, 19 nt, Homo sapiens
  misc_RNA (1)...(19): siRNA sense strand
gaaagacaguaauaguucu

SEQ ID NO: 2012473 - RNA, 19 nt, Homo sapiens
  misc_RNA (1)...(19): siRNA sense strand
cagaaggucuccuacuuuc

SEQ ID NO: 2012474 - RNA, 19 nt, Homo sapiens
  misc_RNA (1)...(19): siRNA sense strand
ccagucaagugucuacauu

SEQ ID NO: 2012475 - RNA, 19 nt, Homo sapiens
  misc_RNA (1)...(19): siRNA sense strand
ggagaaagacaguaauagu

SEQ ID NO: 2012476 - RNA, 19 nt, Homo sapiens
  misc_RNA (1)...(19): siRNA sense strand
cagccuacaucuucaauag

SEQ ID NO: 2012477 - RNA, 19 nt, Homo sapiens
  misc_RNA (1)...(19): siRNA sense strand
ucaggucccuuaauaugga

SEQ ID NO: 2012478 - RNA, 19 nt, Homo sapiens
  misc_RNA (1)...(19): siRNA sense strand
gcaacagcaccaauaauag

SEQ ID NO: 2012479 - RNA, 19 nt, Homo sapiens
  misc_RNA (1)...(19): siRNA sense strand
agaacaagauuuccuuugg

SEQ ID NO: 2012480 - RNA, 19 nt, Homo sapiens
  misc_RNA (1)...(19): siRNA sense strand
gagcaucugucucucuuuu

SEQ ID NO: 2012481 - RNA, 19 nt, Homo sapiens
  misc_RNA (1)...(19): siRNA sense strand
gugucuacauuucugauuu

SEQ ID NO: 2012482 - RNA, 19 nt, Homo sapiens
  misc_RNA (1)...(19): siRNA sense strand
ccuauucccugguggauuc

SEQ ID NO: 2012483 - RNA, 19 nt, Homo sapiens
  misc_RNA (1)...(19): siRNA sense strand
gcucuguuccuuccaauug

SEQ ID NO: 2012484 - RNA, 19 nt, Homo sapiens
  misc_RNA (1)...(19): siRNA sense strand
aguuucaggucccuuaaua

SEQ ID NO: 2012485 - RNA, 19 nt, Homo sapiens
  misc_RNA (1)...(19): siRNA sense strand
cuacauuucugauuuccau

SEQ ID NO: 2012486 - RNA, 19 nt, Homo sapiens
  misc_RNA (1)...(19): siRNA sense strand
agaaagacaguaauaguuc

SEQ ID NO: 2012487 - RNA, 19 nt, Homo sapiens
  misc_RNA (1)...(19): siRNA sense strand
aaacuggucuucccaagcu

SEQ ID NO: 2012488 - RNA, 19 nt, Homo sapiens
  misc_RNA (1)...(19): siRNA sense strand
cugcugaguugcugucauu

SEQ ID NO: 2012489 - RNA, 19 nt, Homo sapiens
  misc_RNA (1)...(19): siRNA sense strand
cagcaguucuugcaacgau

SEQ ID NO: 2012490 - RNA, 19 nt, Homo sapiens
  misc_RNA (1)...(19): siRNA sense strand
gguaguuucaggucccuua

SEQ ID NO: 2012491 - RNA, 19 nt, Homo sapiens
  misc_RNA (1)...(19): siRNA sense strand
ucaagugucuacauuucug

SEQ ID NO: 2012492 - RNA, 19 nt, Homo sapiens
  misc_RNA (1)...(19): siRNA sense strand
aacaagauuuccuuugguu

SEQ ID NO: 2012493 - RNA, 19 nt, Homo sapiens
  misc_RNA (1)...(19): siRNA sense strand
gcagccacuucuccauguu

SEQ ID NO: 2012494 - RNA, 19 nt, Homo sapiens
  misc_RNA (1)...(19): siRNA sense strand
gauguggucugagccuuuc

SEQ ID NO: 2012495 - RNA, 19 nt, Homo sapiens
  misc_RNA (1)...(19): siRNA sense strand
ccucaucggauacuuugua

SEQ ID NO: 2012496 - RNA, 19 nt, Homo sapiens
  misc_RNA (1)...(19): siRNA sense strand
cguuaugccuggucuccua

SEQ ID NO: 2012497 - RNA, 19 nt, Homo sapiens
  misc_RNA (1)...(19): siRNA sense strand
gugccaguauuuaacaaga

SEQ ID NO: 2012498 - RNA, 19 nt, Homo sapiens
  misc_RNA (1)...(19): siRNA sense strand
ucacgauggccuauuuaaa

SEQ ID NO: 2012499 - RNA, 19 nt, Homo sapiens
  misc_RNA (1)...(19): siRNA sense strand
ugcagaaggucuccuacuu

SEQ ID NO: 2012500 - RNA, 19 nt, Homo sapiens
  misc_RNA (1)...(19): siRNA sense strand
gccuacaucuucaauagca

SEQ ID NO: 2012501 - RNA, 19 nt, Homo sapiens
  misc_RNA (1)...(19): siRNA sense strand
aaggagaaagacaguaaua

SEQ ID NO: 2012502 - RNA, 19 nt, Homo sapiens
  misc_RNA (1)...(19): siRNA sense strand
ggauguggucugagccuuu

SEQ ID NO: 2012503 - RNA, 19 nt, Homo sapiens
  misc_RNA (1)...(19): siRNA sense strand
aacgauagcuuuugcuuuu

SEQ ID NO: 2012504 - RNA, 19 nt, Homo sapiens
  misc_RNA (1)...(19): siRNA sense strand
agucaagugucuacauuuc

SEQ ID NO: 2012505 - RNA, 19 nt, Homo sapiens
  misc_RNA (1)...(19): siRNA sense strand
aauagcauccaaacaauug

SEQ ID NO: 2012506 - RNA, 19 nt, Homo sapiens
  misc_RNA (1)...(19): siRNA sense strand
auaaggagaaagacaguaa

SEQ ID NO: 2012507 - RNA, 19 nt, Homo sapiens
  misc_RNA (1)...(19): siRNA sense strand
cacgauggccuauuuaaag

SEQ ID NO: 2012508 - RNA, 19 nt, Homo sapiens
  misc_RNA (1)...(19): siRNA sense strand
gggcaucggagacaucguu

SEQ ID NO: 2012509 - RNA, 19 nt, Homo sapiens
  misc_RNA (1)...(19): siRNA sense strand
gcaacgucauggugaaggu

SEQ ID NO: 2012510 - RNA, 19 nt, Homo sapiens
  misc_RNA (1)...(19): siRNA sense strand
caagauaaggagaaagaca

SEQ ID NO: 2012511 - RNA, 19 nt, Homo sapiens
  misc_RNA (1)...(19): siRNA sense strand
ggugccauuuacuuuauug

SEQ ID NO: 2012512 - RNA, 19 nt, Homo sapiens
  misc_RNA (1)...(19): siRNA sense strand
gcaugcagaaggucuccua

SEQ ID NO: 2012513 - RNA, 19 nt, Homo sapiens
  misc_RNA (1)...(19): siRNA sense strand
caucggagacaucguuaug

SEQ ID NO: 2012514 - RNA, 19 nt, Homo sapiens
  misc_RNA (1)...(19): siRNA sense strand
ggcagccacuucuccaugu

SEQ ID NO: 2012515 - RNA, 19 nt, Homo sapiens
  misc_RNA (1)...(19): siRNA sense strand
caaggucuccugccugcuu

SEQ ID NO: 2012516 - RNA, 19 nt, Homo sapiens
  misc_RNA (1)...(19): siRNA sense strand
gauaaggagaaagacagua

SEQ ID NO: 2012517 - RNA, 19 nt, Homo sapiens
  misc_RNA (1)...(19): siRNA sense strand
gcuuuguccuucgcuauga

SEQ ID NO: 2012518 - RNA, 19 nt, Homo sapiens
  misc_RNA (1)...(19): siRNA sense strand
caacagcaccaauaauagc

SEQ ID NO: 2012519 - RNA, 19 nt, Homo sapiens
  misc_RNA (1)...(19): siRNA sense strand
cccuuaauauggacuuuga

SEQ ID NO: 2012520 - RNA, 19 nt, Homo sapiens
  misc_RNA (1)...(19): siRNA sense strand
ccauucuucuuauagucua

SEQ ID NO: 2012521 - RNA, 19 nt, Homo sapiens
  misc_RNA (1)...(19): siRNA sense strand
uuucacugcugcugaguug

SEQ ID NO: 2012522 - RNA, 19 nt, Homo sapiens
  misc_RNA (1)...(19): siRNA sense strand
ccgaugugccaguauuuaa

SEQ ID NO: 2012523 - RNA, 19 nt, Homo sapiens
  misc_RNA (1)...(19): siRNA sense strand
cagaacaagauuuccuuug

SEQ ID NO: 2012524 - RNA, 19 nt, Homo sapiens
  misc_RNA (1)...(19): siRNA sense strand
gaaggucuccuacuuucac

SEQ ID NO: 2012525 - RNA, 19 nt, Homo sapiens
  misc_RNA (1)...(19): siRNA sense strand
gccugucucugccuggaaa

SEQ ID NO: 2012526 - RNA, 19 nt, Homo sapiens
  misc_RNA (1)...(19): siRNA sense strand
ggauuccagucaagugucu

SEQ ID NO: 2012527 - RNA, 19 nt, Homo sapiens
  misc_RNA (1)...(19): siRNA sense strand
cugauuuccauucuucuua

SEQ ID NO: 2012528 - RNA, 19 nt, Homo sapiens
  misc_RNA (1)...(19): siRNA sense strand
gaugugccaguauuuaaca

SEQ ID NO: 2012529 - RNA, 19 nt, Homo sapiens
  misc_RNA (1)...(19): siRNA sense strand
uuucugauuuccauucuuc

SEQ ID NO: 2012530 - RNA, 19 nt, Homo sapiens
  misc_RNA (1)...(19): siRNA sense strand
ugucuacauuucugauuuc

SEQ ID NO: 2012531 - RNA, 19 nt, Homo sapiens
  misc_RNA (1)...(19): siRNA sense strand
gcucaccucagaacaagau

SEQ ID NO: 2012532 - RNA, 19 nt, Homo sapiens
  misc_RNA (1)...(19): siRNA sense strand
aauggcaacagcaccaaua

SEQ ID NO: 2012533 - RNA, 19 nt, Homo sapiens
  misc_RNA (1)...(19): siRNA sense strand
ucagaacaagauuuccuuu

SEQ ID NO: 2012534 - RNA, 19 nt, Homo sapiens
  misc_RNA (1)...(19): siRNA sense strand
uggagcaucugucucucuu

SEQ ID NO: 2012535 - RNA, 19 nt, Homo sapiens
  misc_RNA (1)...(19): siRNA sense strand
ccaauaauagcauccaaac

SEQ ID NO: 2012536 - RNA, 19 nt, Homo sapiens
  misc_RNA (1)...(19): siRNA sense strand
ccaauuggagcaucugucu

SEQ ID NO: 2012537 - RNA, 19 nt, Homo sapiens
  misc_RNA (1)...(19): siRNA sense strand
acugcacccucaucggaua

SEQ ID NO: 2012538 - RNA, 19 nt, Homo sapiens
  misc_RNA (1)...(19): siRNA sense strand
uaugaugucuuuuggguau

SEQ ID NO: 2012539 - RNA, 19 nt, Homo sapiens
  misc_RNA (1)...(19): siRNA sense strand
agacccugcucaccucaga

SEQ ID NO: 2012540 - RNA, 19 nt, Homo sapiens
  misc_RNA (1)...(19): siRNA sense strand
uccaaacaauugacucuac

SEQ ID NO: 2012541 - RNA, 19 nt, Homo sapiens
  misc_RNA (1)...(19): siRNA sense strand
uuucaggucccuuaauaug

SEQ ID NO: 2012542 - RNA, 19 nt, Homo sapiens
  misc_RNA (1)...(19): siRNA sense strand
uggugaagguggccacuca

SEQ ID NO: 2012543 - RNA, 19 nt, Homo sapiens
  misc_RNA (1)...(19): siRNA sense strand
guccucaucuggguucuca

SEQ ID NO: 2012544 - RNA, 19 nt, Homo sapiens
  misc_RNA (1)...(19): siRNA sense strand
cuucuucuuugacucaguu

SEQ ID NO: 2012545 - RNA, 19 nt, Homo sapiens
  misc_RNA (1)...(19): siRNA sense strand
ggucuccuacuaugcuuug

SEQ ID NO: 2012546 - RNA, 19 nt, Homo sapiens
  misc_RNA (1)...(19): siRNA sense strand
uuucucagccuacaucuuc

SEQ ID NO: 2012547 - RNA, 19 nt, Homo sapiens
  misc_RNA (1)...(19): siRNA sense strand
gcaguucuugcaacgauag

SEQ ID NO: 2012548 - RNA, 19 nt, Homo sapiens
  misc_RNA (1)...(19): siRNA sense strand
gcaucugucucucuuuuag

SEQ ID NO: 2012549 - RNA, 19 nt, Homo sapiens
  misc_RNA (1)...(19): siRNA sense strand
ccucacgauggccuauuua

SEQ ID NO: 2012550 - RNA, 19 nt, Homo sapiens
  misc_RNA (1)...(19): siRNA sense strand
uuggugccauuuacuuuau

SEQ ID NO: 2012551 - RNA, 19 nt, Homo sapiens
  misc_RNA (1)...(19): siRNA sense strand
ucuauuuggugccauuuac

SEQ ID NO: 2012552 - RNA, 19 nt, Homo sapiens
  misc_RNA (1)...(19): siRNA sense strand
guaguuucaggucccuuaa

SEQ ID NO: 2012553 - RNA, 19 nt, Homo sapiens
  misc_RNA (1)...(19): siRNA sense strand
ugccuggucuccuacuaug

SEQ ID NO: 2012554 - RNA, 19 nt, Homo sapiens
  misc_RNA (1)...(19): siRNA sense strand
caccaauaauagcauccaa

SEQ ID NO: 2012555 - RNA, 19 nt, Homo sapiens
  misc_RNA (1)...(19): siRNA sense strand
auagcaacgucauggugaa

SEQ ID NO: 2012556 - RNA, 19 nt, Homo sapiens
  misc_RNA (1)...(19): siRNA sense strand
uccucacgauggccuauuu

SEQ ID NO: 2012557 - RNA, 19 nt, Homo sapiens
  misc_RNA (1)...(19): siRNA sense strand
uuuggugccauuuacuuua

SEQ ID NO: 2012558 - RNA, 19 nt, Homo sapiens
  misc_RNA (1)...(19): siRNA sense strand
guaggccugcucacugcua

SEQ ID NO: 2012559 - RNA, 19 nt, Homo sapiens
  misc_RNA (1)...(19): siRNA sense strand
gcacccucaucggauacuu

SEQ ID NO: 2012560 - RNA, 19 nt, Homo sapiens
  misc_RNA (1)...(19): siRNA sense strand
caagugucuacauuucuga

SEQ ID NO: 2012561 - RNA, 19 nt, Homo sapiens
  misc_RNA (1)...(19): siRNA sense strand
caauaauagcauccaaaca

SEQ ID NO: 2012562 - RNA, 19 nt, Homo sapiens
  misc_RNA (1)...(19): siRNA sense strand
ggcaucggagacaucguua

SEQ ID NO: 2012563 - RNA, 19 nt, Homo sapiens
  misc_RNA (1)...(19): siRNA sense strand
gguucucacuggccauugg

SEQ ID NO: 2012564 - RNA, 19 nt, Homo sapiens
  misc_RNA (1)...(19): siRNA sense strand
ucaccucagaacaagauuu

SEQ ID NO: 2012565 - RNA, 19 nt, Homo sapiens
  misc_RNA (1)...(19): siRNA sense strand
gcaaaguccuccaggugau

SEQ ID NO: 2012566 - RNA, 19 nt, Homo sapiens
  misc_RNA (1)...(19): siRNA sense strand
gcucagagggcaaccuuaa

SEQ ID NO: 2012567 - RNA, 19 nt, Homo sapiens
  misc_RNA (1)...(19): siRNA sense strand
caucaaggccuaccugcua

SEQ ID NO: 2012568 - RNA, 19 nt, Homo sapiens
  misc_RNA (1)...(19): siRNA sense strand
gcaucugcauugccaagaa

SEQ ID NO: 2012569 - RNA, 19 nt, Homo sapiens
  misc_RNA (1)...(19): siRNA sense strand
ggauggagcggaagcaguu

SEQ ID NO: 2012570 - RNA, 19 nt, Homo sapiens
  misc_RNA (1)...(19): siRNA sense strand
ccaagaagaagaccaaagu

SEQ ID NO: 2012571 - RNA, 19 nt, Homo sapiens
  misc_RNA (1)...(19): siRNA sense strand
gugcugcuguuuccugaga

SEQ ID NO: 2012572 - RNA, 19 nt, Homo sapiens
  misc_RNA (1)...(19): siRNA sense strand
gagggcaaccuuaacuaug

SEQ ID NO: 2012573 - RNA, 19 nt, Homo sapiens
  misc_RNA (1)...(19): siRNA sense strand
gggcaaccuuaacuaugga

SEQ ID NO: 2012574 - RNA, 19 nt, Homo sapiens
  misc_RNA (1)...(19): siRNA sense strand
aggccuaccugcuagagaa

SEQ ID NO: 2012575 - RNA, 19 nt, Homo sapiens
  misc_RNA (1)...(19): siRNA sense strand
ggagcggaacggucaguug

SEQ ID NO: 2012576 - RNA, 19 nt, Homo sapiens
  misc_RNA (1)...(19): siRNA sense strand
aguuggagguggacauuau

SEQ ID NO: 2012577 - RNA, 19 nt, Homo sapiens
  misc_RNA (1)...(19): siRNA sense strand
uggaggagcuggacuugac

SEQ ID NO: 2012578 - RNA, 19 nt, Homo sapiens
  misc_RNA (1)...(19): siRNA sense strand
ggacagcaugaacagcuau

SEQ ID NO: 2012579 - RNA, 19 nt, Homo sapiens
  misc_RNA (1)...(19): siRNA sense strand
ucgcuggacccacuguaua

SEQ ID NO: 2012580 - RNA, 19 nt, Homo sapiens
  misc_RNA (1)...(19): siRNA sense strand
cagagggcaaccuuaacua

SEQ ID NO: 2012581 - RNA, 19 nt, Homo sapiens
  misc_RNA (1)...(19): siRNA sense strand
caucugcauugccaagaag

SEQ ID NO: 2012582 - RNA, 19 nt, Homo sapiens
  misc_RNA (1)...(19): siRNA sense strand
cggcaggcaucccaguugu

SEQ ID NO: 2012583 - RNA, 19 nt, Homo sapiens
  misc_RNA (1)...(19): siRNA sense strand
agggcaaccuuaacuaugg

SEQ ID NO: 2012584 - RNA, 19 nt, Homo sapiens
  misc_RNA (1)...(19): siRNA sense strand
auaaccaggugcugcuguu

SEQ ID NO: 2012585 - RNA, 19 nt, Homo sapiens
  misc_RNA (1)...(19): siRNA sense strand
caagaagaagaccaaaguc

SEQ ID NO: 2012586 - RNA, 19 nt, Homo sapiens
  misc_RNA (1)...(19): siRNA sense strand
agagggcaaccuuaacuau

SEQ ID NO: 2012587 - RNA, 19 nt, Homo sapiens
  misc_RNA (1)...(19): siRNA sense strand
gagaggaucugacgaacua

SEQ ID NO: 2012588 - RNA, 19 nt, Homo sapiens
  misc_RNA (1)...(19): siRNA sense strand
gaaagacagcgcucuaaua

SEQ ID NO: 2012589 - RNA, 19 nt, Homo sapiens
  misc_RNA (1)...(19): siRNA sense strand
uaagaaaccuggauccaaa

SEQ ID NO: 2012590 - RNA, 19 nt, Homo sapiens
  misc_RNA (1)...(19): siRNA sense strand
ggaaaccaaucacaacuug

SEQ ID NO: 2012591 - RNA, 19 nt, Homo sapiens
  misc_RNA (1)...(19): siRNA sense strand
ggaagcagcuauuacuaug

SEQ ID NO: 2012592 - RNA, 19 nt, Homo sapiens
  misc_RNA (1)...(19): siRNA sense strand
uaauaucccuccaucagua

SEQ ID NO: 2012593 - RNA, 19 nt, Homo sapiens
  misc_RNA (1)...(19): siRNA sense strand
acaaagaacuaaagacaga

SEQ ID NO: 2012594 - RNA, 19 nt, Homo sapiens
  misc_RNA (1)...(19): siRNA sense strand
gaagagaggaucugacgaa

SEQ ID NO: 2012595 - RNA, 19 nt, Homo sapiens
  misc_RNA (1)...(19): siRNA sense strand
guacuacccuguaacacuu

SEQ ID NO: 2012596 - RNA, 19 nt, Homo sapiens
  misc_RNA (1)...(19): siRNA sense strand
uaaguuuggugcuguauug

SEQ ID NO: 2012597 - RNA, 19 nt, Homo sapiens
  misc_RNA (1)...(19): siRNA sense strand
ggaaguaacagaaacugaa

SEQ ID NO: 2012598 - RNA, 19 nt, Homo sapiens
  misc_RNA (1)...(19): siRNA sense strand
gcaaauacuccucuuagug

SEQ ID NO: 2012599 - RNA, 19 nt, Homo sapiens
  misc_RNA (1)...(19): siRNA sense strand
guacucgaaucacaaagaa

SEQ ID NO: 2012600 - RNA, 19 nt, Homo sapiens
  misc_RNA (1)...(19): siRNA sense strand
caaggagacaucccucuua

SEQ ID NO: 2012601 - RNA, 19 nt, Homo sapiens
  misc_RNA (1)...(19): siRNA sense strand
caacauguacuacccugua

SEQ ID NO: 2012602 - RNA, 19 nt, Homo sapiens
  misc_RNA (1)...(19): siRNA sense strand
caauauauauccaguacuc

SEQ ID NO: 2012603 - RNA, 19 nt, Homo sapiens
  misc_RNA (1)...(19): siRNA sense strand
aaucacaacuugccaugaa

SEQ ID NO: 2012604 - RNA, 19 nt, Homo sapiens
  misc_RNA (1)...(19): siRNA sense strand
aguccgaacucuaauauga

SEQ ID NO: 2012605 - RNA, 19 nt, Homo sapiens
  misc_RNA (1)...(19): siRNA sense strand
ccaguauggugauccagua

SEQ ID NO: 2012606 - RNA, 19 nt, Homo sapiens
  misc_RNA (1)...(19): siRNA sense strand
ggugcuguauugaagauaa

SEQ ID NO: 2012607 - RNA, 19 nt, Homo sapiens
  misc_RNA (1)...(19): siRNA sense strand
agacagcgcucuaauacag

SEQ ID NO: 2012608 - RNA, 19 nt, Homo sapiens
  misc_RNA (1)...(19): siRNA sense strand
caacauccuuaugcugaaa

SEQ ID NO: 2012609 - RNA, 19 nt, Homo sapiens
  misc_RNA (1)...(19): siRNA sense strand
ccaaugguaaugauaguaa

SEQ ID NO: 2012610 - RNA, 19 nt, Homo sapiens
  misc_RNA (1)...(19): siRNA sense strand
ggaacuagcaaccgaggaa

SEQ ID NO: 2012611 - RNA, 19 nt, Homo sapiens
  misc_RNA (1)...(19): siRNA sense strand
aaaauuaccuggggaagua

SEQ ID NO: 2012612 - RNA, 19 nt, Homo sapiens
  misc_RNA (1)...(19): siRNA sense strand
ucaguaguccgaacucuaa

SEQ ID NO: 2012613 - RNA, 19 nt, Homo sapiens
  misc_RNA (1)...(19): siRNA sense strand
gcagcuauuacuaugguua

SEQ ID NO: 2012614 - RNA, 19 nt, Homo sapiens
  misc_RNA (1)...(19): siRNA sense strand
aguuauugcuuuaggcuua

SEQ ID NO: 2012615 - RNA, 19 nt, Homo sapiens
  misc_RNA (1)...(19): siRNA sense strand
guaguuacagccaauggua

SEQ ID NO: 2012616 - RNA, 19 nt, Homo sapiens
  misc_RNA (1)...(19): siRNA sense strand
gcacugugaaagcauuuaa

SEQ ID NO: 2012617 - RNA, 19 nt, Homo sapiens
  misc_RNA (1)...(19): siRNA sense strand
ccuguugguuagcaauuua

SEQ ID NO: 2012618 - RNA, 19 nt, Homo sapiens
  misc_RNA (1)...(19): siRNA sense strand
gcccagaguccaguacuua

SEQ ID NO: 2012619 - RNA, 19 nt, Homo sapiens
  misc_RNA (1)...(19): siRNA sense strand
ucacaaagaacuaaagaca

SEQ ID NO: 2012620 - RNA, 19 nt, Homo sapiens
  misc_RNA (1)...(19): siRNA sense strand
gaggaagcagcuauuacua

SEQ ID NO: 2012621 - RNA, 19 nt, Homo sapiens
  misc_RNA (1)...(19): siRNA sense strand
agaagaggaucuacgaaca

SEQ ID NO: 2012622 - RNA, 19 nt, Homo sapiens
  misc_RNA (1)...(19): siRNA sense strand
uaagaaagacagcgcucua

SEQ ID NO: 2012623 - RNA, 19 nt, Homo sapiens
  misc_RNA (1)...(19): siRNA sense strand
ggguaugccuggagucuca

SEQ ID NO: 2012624 - RNA, 19 nt, Homo sapiens
  misc_RNA (1)...(19): siRNA sense strand
guauggugauccaguaaau

SEQ ID NO: 2012625 - RNA, 19 nt, Homo sapiens
  misc_RNA (1)...(19): siRNA sense strand
acagauggcugauggaaac

SEQ ID NO: 2012626 - RNA, 19 nt, Homo sapiens
  misc_RNA (1)...(19): siRNA sense strand
uaaccaguuucaagcuuug

SEQ ID NO: 2012627 - RNA, 19 nt, Homo sapiens
  misc_RNA (1)...(19): siRNA sense strand
ggagaaaaccaucaucuga

SEQ ID NO: 2012628 - RNA, 19 nt, Homo sapiens
  misc_RNA (1)...(19): siRNA sense strand
ggagaugugcagcguguga

SEQ ID NO: 2012629 - RNA, 19 nt, Homo sapiens
  misc_RNA (1)...(19): siRNA sense strand
cuagauggucagaauauuu

SEQ ID NO: 2012630 - RNA, 19 nt, Homo sapiens
  misc_RNA (1)...(19): siRNA sense strand
aaagacagcgcucuaauac

SEQ ID NO: 2012631 - RNA, 19 nt, Homo sapiens
  misc_RNA (1)...(19): siRNA sense strand
ccaacauccuuaugcugaa

SEQ ID NO: 2012632 - RNA, 19 nt, Homo sapiens
  misc_RNA (1)...(19): siRNA sense strand
ugauguucuucaccaaaua

SEQ ID NO: 2012633 - RNA, 19 nt, Homo sapiens
  misc_RNA (1)...(19): siRNA sense strand
cguaaccaaccaauauaua

SEQ ID NO: 2012634 - RNA, 19 nt, Homo sapiens
  misc_RNA (1)...(19): siRNA sense strand
ugacaccucaucuucguaa

SEQ ID NO: 2012635 - RNA, 19 nt, Homo sapiens
  misc_RNA (1)...(19): siRNA sense strand
caaaauggcucuucuucag

SEQ ID NO: 2012636 - RNA, 19 nt, Homo sapiens
  misc_RNA (1)...(19): siRNA sense strand
gacagaaaauguauggaaa

SEQ ID NO: 2012637 - RNA, 19 nt, Homo sapiens
  misc_RNA (1)...(19): siRNA sense strand
ccucuucgguguuuaugga

SEQ ID NO: 2012638 - RNA, 19 nt, Homo sapiens
  misc_RNA (1)...(19): siRNA sense strand
ggagacaucccucuuagcu

SEQ ID NO: 2012639 - RNA, 19 nt, Homo sapiens
  misc_RNA (1)...(19): siRNA sense strand
gcauuggacccagcuauug

SEQ ID NO: 2012640 - RNA, 19 nt, Homo sapiens
  misc_RNA (1)...(19): siRNA sense strand
gaaguaacagaaacugaag

SEQ ID NO: 2012641 - RNA, 19 nt, Homo sapiens
  misc_RNA (1)...(19): siRNA sense strand
aaauggcucuucuucagau

SEQ ID NO: 2012642 - RNA, 19 nt, Homo sapiens
  misc_RNA (1)...(19): siRNA sense strand
gcuguacccuaaggauuga

SEQ ID NO: 2012643 - RNA, 19 nt, Homo sapiens
  misc_RNA (1)...(19): siRNA sense strand
gaggaucuacgaacacugu

SEQ ID NO: 2012644 - RNA, 19 nt, Homo sapiens
  misc_RNA (1)...(19): siRNA sense strand
ggauggacaaccugcauug

SEQ ID NO: 2012645 - RNA, 19 nt, Homo sapiens
  misc_RNA (1)...(19): siRNA sense strand
cagcaaauacuccucuuag

SEQ ID NO: 2012646 - RNA, 19 nt, Homo sapiens
  misc_RNA (1)...(19): siRNA sense strand
ggacagaaaauguauggaa

SEQ ID NO: 2012647 - RNA, 19 nt, Homo sapiens
  misc_RNA (1)...(19): siRNA sense strand
guaguccgaacucuaauau

SEQ ID NO: 2012648 - RNA, 19 nt, Homo sapiens
  misc_RNA (1)...(19): siRNA sense strand
ggauuauacucgaccugau

SEQ ID NO: 2012649 - RNA, 19 nt, Homo sapiens
  misc_RNA (1)...(19): siRNA sense strand
aagcuuugcuccaguaugg

SEQ ID NO: 2012650 - RNA, 19 nt, Homo sapiens
  misc_RNA (1)...(19): siRNA sense strand
auaaccaguuucaagcuuu

SEQ ID NO: 2012651 - RNA, 19 nt, Homo sapiens
  misc_RNA (1)...(19): siRNA sense strand
uccaguaaaugcucaacaa

SEQ ID NO: 2012652 - RNA, 19 nt, Homo sapiens
  misc_RNA (1)...(19): siRNA sense strand
ggaaucgucacugaaguug

SEQ ID NO: 2012653 - RNA, 19 nt, Homo sapiens
  misc_RNA (1)...(19): siRNA sense strand
gaugaucaagggcuaacaa

SEQ ID NO: 2012654 - RNA, 19 nt, Homo sapiens
  misc_RNA (1)...(19): siRNA sense strand
gugcagcgugugaagauuu

SEQ ID NO: 2012655 - RNA, 19 nt, Homo sapiens
  misc_RNA (1)...(19): siRNA sense strand
acccuucaccuaucuaaua

SEQ ID NO: 2012656 - RNA, 19 nt, Homo sapiens
  misc_RNA (1)...(19): siRNA sense strand
uuacuauucugcugugaca

SEQ ID NO: 2012657 - RNA, 19 nt, Homo sapiens
  misc_RNA (1)...(19): siRNA sense strand
gcagaagaggaucuacgaa

SEQ ID NO: 2012658 - RNA, 19 nt, Homo sapiens
  misc_RNA (1)...(19): siRNA sense strand
uaauaugagcagcauggua

SEQ ID NO: 2012659 - RNA, 19 nt, Homo sapiens
  misc_RNA (1)...(19): siRNA sense strand
gcuuuaggcuuaccuuuug

SEQ ID NO: 2012660 - RNA, 19 nt, Homo sapiens
  misc_RNA (1)...(19): siRNA sense strand
ucuccaagucaacaauuua

SEQ ID NO: 2012661 - RNA, 19 nt, Homo sapiens
  misc_RNA (1)...(19): siRNA sense strand
gauggcugauggaaaccaa

SEQ ID NO: 2012662 - RNA, 19 nt, Homo sapiens
  misc_RNA (1)...(19): siRNA sense strand
ccaacgugcucaggcaguu

SEQ ID NO: 2012663 - RNA, 19 nt, Homo sapiens
  misc_RNA (1)...(19): siRNA sense strand
cuucguaaccaaccaauau

SEQ ID NO: 2012664 - RNA, 19 nt, Homo sapiens
  misc_RNA (1)...(19): siRNA sense strand
gcugugacaccucaucuuc

SEQ ID NO: 2012665 - RNA, 19 nt, Homo sapiens
  misc_RNA (1)...(19): siRNA sense strand
gcuauucaggccuugauug

SEQ ID NO: 2012666 - RNA, 19 nt, Homo sapiens
  misc_RNA (1)...(19): siRNA sense strand
acaucagacuguacagcua

SEQ ID NO: 2012667 - RNA, 19 nt, Homo sapiens
  misc_RNA (1)...(19): siRNA sense strand
aaggagacaucccucuuag

SEQ ID NO: 2012668 - RNA, 19 nt, Homo sapiens
  misc_RNA (1)...(19): siRNA sense strand
aauaaccaguuucaagcuu

SEQ ID NO: 2012669 - RNA, 19 nt, Homo sapiens
  misc_RNA (1)...(19): siRNA sense strand
gauguucuucaccaaauau

SEQ ID NO: 2012670 - RNA, 19 nt, Homo sapiens
  misc_RNA (1)...(19): siRNA sense strand
ccaguacucgaaucacaaa

SEQ ID NO: 2012671 - RNA, 19 nt, Homo sapiens
  misc_RNA (1)...(19): siRNA sense strand
ucagauggcaacaguggaa

SEQ ID NO: 2012672 - RNA, 19 nt, Homo sapiens
  misc_RNA (1)...(19): siRNA sense strand
aaucgucacugaaguugca

SEQ ID NO: 2012673 - RNA, 19 nt, Homo sapiens
  misc_RNA (1)...(19): siRNA sense strand
agucucagcugguggcaau

SEQ ID NO: 2012674 - RNA, 19 nt, Homo sapiens
  misc_RNA (1)...(19): siRNA sense strand
ccuagauggucagaauauu

SEQ ID NO: 2012675 - RNA, 19 nt, Homo sapiens
  misc_RNA (1)...(19): siRNA sense strand
aacauguacuacccuguaa

SEQ ID NO: 2012676 - RNA, 19 nt, Homo sapiens
  misc_RNA (1)...(19): siRNA sense strand
cagcuauuacuaugguuaa

SEQ ID NO: 2012677 - RNA, 19 nt, Homo sapiens
  misc_RNA (1)...(19): siRNA sense strand
caacaguggaagaagcuau

SEQ ID NO: 2012678 - RNA, 19 nt, Homo sapiens
  misc_RNA (1)...(19): siRNA sense strand
guuacucugucuaaacauc

SEQ ID NO: 2012679 - RNA, 19 nt, Homo sapiens
  misc_RNA (1)...(19): siRNA sense strand
gauggaaaccaaucacaac

SEQ ID NO: 2012680 - RNA, 19 nt, Homo sapiens
  misc_RNA (1)...(19): siRNA sense strand
uaaaugaagagaugguuac

SEQ ID NO: 2012681 - RNA, 19 nt, Homo sapiens
  misc_RNA (1)...(19): siRNA sense strand
gggaaguaacagaaacuga

SEQ ID NO: 2012682 - RNA, 19 nt, Homo sapiens
  misc_RNA (1)...(19): siRNA sense strand
caugguaguuacagccaau

SEQ ID NO: 2012683 - RNA, 19 nt, Homo sapiens
  misc_RNA (1)...(19): siRNA sense strand
cgaggaagcagcuauuacu

SEQ ID NO: 2012684 - RNA, 19 nt, Homo sapiens
  misc_RNA (1)...(19): siRNA sense strand
gacagcaaauacuccucuu

SEQ ID NO: 2012685 - RNA, 19 nt, Homo sapiens
  misc_RNA (1)...(19): siRNA sense strand
aagcagcuauuacuauggu

SEQ ID NO: 2012686 - RNA, 19 nt, Homo sapiens
  misc_RNA (1)...(19): siRNA sense strand
auucaggccuugauugauc

SEQ ID NO: 2012687 - RNA, 19 nt, Homo sapiens
  misc_RNA (1)...(19): siRNA sense strand
ggaauuagcuucuguaaau

SEQ ID NO: 2012688 - RNA, 19 nt, Homo sapiens
  misc_RNA (1)...(19): siRNA sense strand
ggaagaagcugaacauuug

SEQ ID NO: 2012689 - RNA, 19 nt, Homo sapiens
  misc_RNA (1)...(19): siRNA sense strand
cagcagagcuuguacuaua

SEQ ID NO: 2012690 - RNA, 19 nt, Homo sapiens
  misc_RNA (1)...(19): siRNA sense strand
gaacagcaggguaauauua

SEQ ID NO: 2012691 - RNA, 19 nt, Homo sapiens
  misc_RNA (1)...(19): siRNA sense strand
caacacagcuguauaguca

SEQ ID NO: 2012692 - RNA, 19 nt, Homo sapiens
  misc_RNA (1)...(19): siRNA sense strand
gaugauugauggugauuua

SEQ ID NO: 2012693 - RNA, 19 nt, Homo sapiens
  misc_RNA (1)...(19): siRNA sense strand
ugaaagaugugucauauca

SEQ ID NO: 2012694 - RNA, 19 nt, Homo sapiens
  misc_RNA (1)...(19): siRNA sense strand
guacaugguucauuaccua

SEQ ID NO: 2012695 - RNA, 19 nt, Homo sapiens
  misc_RNA (1)...(19): siRNA sense strand
gagagaaguuacagcuaua

SEQ ID NO: 2012696 - RNA, 19 nt, Homo sapiens
  misc_RNA (1)...(19): siRNA sense strand
ugacaaagcuguacauggu

SEQ ID NO: 2012697 - RNA, 19 nt, Homo sapiens
  misc_RNA (1)...(19): siRNA sense strand
gaaagcacauacagaagau

SEQ ID NO: 2012698 - RNA, 19 nt, Homo sapiens
  misc_RNA (1)...(19): siRNA sense strand
ggcaauaccucuuaguguu

SEQ ID NO: 2012699 - RNA, 19 nt, Homo sapiens
  misc_RNA (1)...(19): siRNA sense strand
caaagagaacacaaaguua

SEQ ID NO: 2012700 - RNA, 19 nt, Homo sapiens
  misc_RNA (1)...(19): siRNA sense strand
gcaaagcuaauuacagaaa

SEQ ID NO: 2012701 - RNA, 19 nt, Homo sapiens
  misc_RNA (1)...(19): siRNA sense strand
uuaauaagcuucugaaugc

SEQ ID NO: 2012702 - RNA, 19 nt, Homo sapiens
  misc_RNA (1)...(19): siRNA sense strand
caugguucauuaccuauua

SEQ ID NO: 2012703 - RNA, 19 nt, Homo sapiens
  misc_RNA (1)...(19): siRNA sense strand
gauacaacuucaucaucua

SEQ ID NO: 2012704 - RNA, 19 nt, Homo sapiens
  misc_RNA (1)...(19): siRNA sense strand
caaaccaagcuguauauaa

SEQ ID NO: 2012705 - RNA, 19 nt, Homo sapiens
  misc_RNA (1)...(19): siRNA sense strand
aaagaaagcacauacagaa

SEQ ID NO: 2012706 - RNA, 19 nt, Homo sapiens
  misc_RNA (1)...(19): siRNA sense strand
ugagagaaguuacagcuau

SEQ ID NO: 2012707 - RNA, 19 nt, Homo sapiens
  misc_RNA (1)...(19): siRNA sense strand
cugcaaagcuaauuacaga

SEQ ID NO: 2012708 - RNA, 19 nt, Homo sapiens
  misc_RNA (1)...(19): siRNA sense strand
gaaguuacagcuauauaug

SEQ ID NO: 2012709 - RNA, 19 nt, Homo sapiens
  misc_RNA (1)...(19): siRNA sense strand
gaucuaccaucgggaauug

SEQ ID NO: 2012710 - RNA, 19 nt, Homo sapiens
  misc_RNA (1)...(19): siRNA sense strand
aaagaugugucauaucaug

SEQ ID NO: 2012711 - RNA, 19 nt, Homo sapiens
  misc_RNA (1)...(19): siRNA sense strand
ggaaaaggcacaacuaaaa

SEQ ID NO: 2012712 - RNA, 19 nt, Homo sapiens
  misc_RNA (1)...(19): siRNA sense strand
cuauacaucucccaaagaa

SEQ ID NO: 2012713 - RNA, 19 nt, Homo sapiens
  misc_RNA (1)...(19): siRNA sense strand
gcauggaaaucuggaagaa

SEQ ID NO: 2012714 - RNA, 19 nt, Homo sapiens
  misc_RNA (1)...(19): siRNA sense strand
ggauuaaguaugccaagua

SEQ ID NO: 2012715 - RNA, 19 nt, Homo sapiens
  misc_RNA (1)...(19): siRNA sense strand
acaaagagaacacaaaguu

SEQ ID NO: 2012716 - RNA, 19 nt, Homo sapiens
  misc_RNA (1)...(19): siRNA sense strand
ggaaaccugagagaaguua

SEQ ID NO: 2012717 - RNA, 19 nt, Homo sapiens
  misc_RNA (1)...(19): siRNA sense strand
agaauaauuugccuagaga

SEQ ID NO: 2012718 - RNA, 19 nt, Homo sapiens
  misc_RNA (1)...(19): siRNA sense strand
gcaauaccucuuaguguug

SEQ ID NO: 2012719 - RNA, 19 nt, Homo sapiens
  misc_RNA (1)...(19): siRNA sense strand
gaauuagcuucuguaaaug

SEQ ID NO: 2012720 - RNA, 19 nt, Homo sapiens
  misc_RNA (1)...(19): siRNA sense strand
gagaaguuacagcuauaua

SEQ ID NO: 2012721 - RNA, 19 nt, Homo sapiens
  misc_RNA (1)...(19): siRNA sense strand
agacauagaaucauugaga

SEQ ID NO: 2012722 - RNA, 19 nt, Homo sapiens
  misc_RNA (1)...(19): siRNA sense strand
cauaucaugugcccucuau

SEQ ID NO: 2012723 - RNA, 19 nt, Homo sapiens
  misc_RNA (1)...(19): siRNA sense strand
ugagauucaucaagaaaug

SEQ ID NO: 2012724 - RNA, 19 nt, Homo sapiens
  misc_RNA (1)...(19): siRNA sense strand
uauccaaccuccacccaaa

SEQ ID NO: 2012725 - RNA, 19 nt, Homo sapiens
  misc_RNA (1)...(19): siRNA sense strand
cagaauaauuugccuagag

SEQ ID NO: 2012726 - RNA, 19 nt, Homo sapiens
  misc_RNA (1)...(19): siRNA sense strand
gacauagaaucauugagau

SEQ ID NO: 2012727 - RNA, 19 nt, Homo sapiens
  misc_RNA (1)...(19): siRNA sense strand
cagaauccuuggaauuaug

SEQ ID NO: 2012728 - RNA, 19 nt, Homo sapiens
  misc_RNA (1)...(19): siRNA sense strand
gcaaaccaagcuguauaua

SEQ ID NO: 2012729 - RNA, 19 nt, Homo sapiens
  misc_RNA (1)...(19): siRNA sense strand
guuaauaagcuucugaaug

SEQ ID NO: 2012730 - RNA, 19 nt, Homo sapiens
  misc_RNA (1)...(19): siRNA sense strand
gcaggguaauauuaaugaa

SEQ ID NO: 2012731 - RNA, 19 nt, Homo sapiens
  misc_RNA (1)...(19): siRNA sense strand
gaguugugguucucuuuga

SEQ ID NO: 2012732 - RNA, 19 nt, Homo sapiens
  misc_RNA (1)...(19): siRNA sense strand
gauccugcaaagcuaauua

SEQ ID NO: 2012733 - RNA, 19 nt, Homo sapiens
  misc_RNA (1)...(19): siRNA sense strand
uggaagaagcugaacauuu

SEQ ID NO: 2012734 - RNA, 19 nt, Homo sapiens
  misc_RNA (1)...(19): siRNA sense strand
ucugaaugcuuaugaugaa

SEQ ID NO: 2012735 - RNA, 19 nt, Homo sapiens
  misc_RNA (1)...(19): siRNA sense strand
caauaccucuuaguguuga

SEQ ID NO: 2012736 - RNA, 19 nt, Homo sapiens
  misc_RNA (1)...(19): siRNA sense strand
gauuaaguaugccaaguac

SEQ ID NO: 2012737 - RNA, 19 nt, Homo sapiens
  misc_RNA (1)...(19): siRNA sense strand
acacaaaguuauaccucaa

SEQ ID NO: 2012738 - RNA, 19 nt, Homo sapiens
  misc_RNA (1)...(19): siRNA sense strand
agaaacccauggugcauau

SEQ ID NO: 2012739 - RNA, 19 nt, Homo sapiens
  misc_RNA (1)...(19): siRNA sense strand
gauccugagacaaacaaua

SEQ ID NO: 2012740 - RNA, 19 nt, Homo sapiens
  misc_RNA (1)...(19): siRNA sense strand
aaacacuccugaaagaaca

SEQ ID NO: 2012741 - RNA, 19 nt, Homo sapiens
  misc_RNA (1)...(19): siRNA sense strand
gagacaaagagaacacaaa

SEQ ID NO: 2012742 - RNA, 19 nt, Homo sapiens
  misc_RNA (1)...(19): siRNA sense strand
aagaguaaguuuagaacga

SEQ ID NO: 2012743 - RNA, 19 nt, Homo sapiens
  misc_RNA (1)...(19): siRNA sense strand
agaccuuacuuucauguga

SEQ ID NO: 2012744 - RNA, 19 nt, Homo sapiens
  misc_RNA (1)...(19): siRNA sense strand
gaaaacaugagacauagaa

SEQ ID NO: 2012745 - RNA, 19 nt, Homo sapiens
  misc_RNA (1)...(19): siRNA sense strand
ucagaauccuuggaauuau

SEQ ID NO: 2012746 - RNA, 19 nt, Homo sapiens
  misc_RNA (1)...(19): siRNA sense strand
gaccuuuggauacauuaua

SEQ ID NO: 2012747 - RNA, 19 nt, Homo sapiens
  misc_RNA (1)...(19): siRNA sense strand
ggaaaaccauagcauugaa

SEQ ID NO: 2012748 - RNA, 19 nt, Homo sapiens
  misc_RNA (1)...(19): siRNA sense strand
gcacauacagaagauacaa

SEQ ID NO: 2012749 - RNA, 19 nt, Homo sapiens
  misc_RNA (1)...(19): siRNA sense strand
uaucagaauccuuggaauu

SEQ ID NO: 2012750 - RNA, 19 nt, Homo sapiens
  misc_RNA (1)...(19): siRNA sense strand
cauaaccgauccugcaaag

SEQ ID NO: 2012751 - RNA, 19 nt, Homo sapiens
  misc_RNA (1)...(19): siRNA sense strand
uggaagcaaucgaaagaga

SEQ ID NO: 2012752 - RNA, 19 nt, Homo sapiens
  misc_RNA (1)...(19): siRNA sense strand
uaugaggaguuuuggauua

SEQ ID NO: 2012753 - RNA, 19 nt, Homo sapiens
  misc_RNA (1)...(19): siRNA sense strand
aaaguggaauuucuugaag

SEQ ID NO: 2012754 - RNA, 19 nt, Homo sapiens
  misc_RNA (1)...(19): siRNA sense strand
ggaacagcaggguaauauu

SEQ ID NO: 2012755 - RNA, 19 nt, Homo sapiens
  misc_RNA (1)...(19): siRNA sense strand
gaucguauucuugguauuc

SEQ ID NO: 2012756 - RNA, 19 nt, Homo sapiens
  misc_RNA (1)...(19): siRNA sense strand
uauagugcgugguaucaau

SEQ ID NO: 2012757 - RNA, 19 nt, Homo sapiens
  misc_RNA (1)...(19): siRNA sense strand
agaaagcacauacagaaga

SEQ ID NO: 2012758 - RNA, 19 nt, Homo sapiens
  misc_RNA (1)...(19): siRNA sense strand
gaaaauggaucagaagaac

SEQ ID NO: 2012759 - RNA, 19 nt, Homo sapiens
  misc_RNA (1)...(19): siRNA sense strand
gaacgacggcauggaaauc

SEQ ID NO: 2012760 - RNA, 19 nt, Homo sapiens
  misc_RNA (1)...(19): siRNA sense strand
gaggaacagcaggguaaua

SEQ ID NO: 2012761 - RNA, 19 nt, Homo sapiens
  misc_RNA (1)...(19): siRNA sense strand
aaaugggacucaugaacga

SEQ ID NO: 2012762 - RNA, 19 nt, Homo sapiens
  misc_RNA (1)...(19): siRNA sense strand
uaauuugccuagagaucuu

SEQ ID NO: 2012763 - RNA, 19 nt, Homo sapiens
  misc_RNA (1)...(19): siRNA sense strand
gaagcaaucgaaagagaca

SEQ ID NO: 2012764 - RNA, 19 nt, Homo sapiens
  misc_RNA (1)...(19): siRNA sense strand
cgaaagagacaaagagaac

SEQ ID NO: 2012765 - RNA, 19 nt, Homo sapiens
  misc_RNA (1)...(19): siRNA sense strand
guacuauacaucucccaaa

SEQ ID NO: 2012766 - RNA, 19 nt, Homo sapiens
  misc_RNA (1)...(19): siRNA sense strand
caucaaacacuccugaaag

SEQ ID NO: 2012767 - RNA, 19 nt, Homo sapiens
  misc_RNA (1)...(19): siRNA sense strand
acacagcuguauagucauc

SEQ ID NO: 2012768 - RNA, 19 nt, Homo sapiens
  misc_RNA (1)...(19): siRNA sense strand
gaaugcuuaugaugaacau

SEQ ID NO: 2012769 - RNA, 19 nt, Homo sapiens
  misc_RNA (1)...(19): siRNA sense strand
agcuguacaugguucauua

SEQ ID NO: 2012770 - RNA, 19 nt, Homo sapiens
  misc_RNA (1)...(19): siRNA sense strand
uaaugagcaugaaguuagu

SEQ ID NO: 2012771 - RNA, 19 nt, Homo sapiens
  misc_RNA (1)...(19): siRNA sense strand
gggaauuagcuucuguaaa

SEQ ID NO: 2012772 - RNA, 19 nt, Homo sapiens
  misc_RNA (1)...(19): siRNA sense strand
aucaaacacuccugaaaga

SEQ ID NO: 2012773 - RNA, 19 nt, Homo sapiens
  misc_RNA (1)...(19): siRNA sense strand
gaaagagacaaagagaaca

SEQ ID NO: 2012774 - RNA, 19 nt, Homo sapiens
  misc_RNA (1)...(19): siRNA sense strand
gaagccaggaauaucuuga

SEQ ID NO: 2012775 - RNA, 19 nt, Homo sapiens
  misc_RNA (1)...(19): siRNA sense strand
ggacugcugcgcuuugaag

SEQ ID NO: 2012776 - RNA, 19 nt, Homo sapiens
  misc_RNA (1)...(19): siRNA sense strand
caugugaaaccuuuggaaa

SEQ ID NO: 2012777 - RNA, 19 nt, Homo sapiens
  misc_RNA (1)...(19): siRNA sense strand
guugaccuuuggauacauu

SEQ ID NO: 2012778 - RNA, 19 nt, Homo sapiens
  misc_RNA (1)...(19): siRNA sense strand
auaauuauagugcguggua

SEQ ID NO: 2012779 - RNA, 19 nt, Homo sapiens
  misc_RNA (1)...(19): siRNA sense strand
ggcaaaccaagcuguauau

SEQ ID NO: 2012780 - RNA, 19 nt, Homo sapiens
  misc_RNA (1)...(19): siRNA sense strand
guggugaccucaaacaaaa

SEQ ID NO: 2012781 - RNA, 19 nt, Homo sapiens
  misc_RNA (1)...(19): siRNA sense strand
cuucaggcaauaccucuua

SEQ ID NO: 2012782 - RNA, 19 nt, Homo sapiens
  misc_RNA (1)...(19): siRNA sense strand
cuggaaagaauacuuagaa

SEQ ID NO: 2012783 - RNA, 19 nt, Homo sapiens
  misc_RNA (1)...(19): siRNA sense strand
aguaaaagguggacauuug

SEQ ID NO: 2012784 - RNA, 19 nt, Homo sapiens
  misc_RNA (1)...(19): siRNA sense strand
gagcaugaaguuaguaaaa

SEQ ID NO: 2012785 - RNA, 19 nt, Homo sapiens
  misc_RNA (1)...(19): siRNA sense strand
ccacccaaaugguuuaucg

SEQ ID NO: 2012786 - RNA, 19 nt, Homo sapiens
  misc_RNA (1)...(19): siRNA sense strand
gauguuaauaagcuucuga

SEQ ID NO: 2012787 - RNA, 19 nt, Homo sapiens
  misc_RNA (1)...(19): siRNA sense strand
gaaucucucuuccuaauau

SEQ ID NO: 2012788 - RNA, 19 nt, Homo sapiens
  misc_RNA (1)...(19): siRNA sense strand
ggaaaccagucccaaggua

SEQ ID NO: 2012789 - RNA, 19 nt, Homo sapiens
  misc_RNA (1)...(19): siRNA sense strand
ggaaacaagucccgaagug

SEQ ID NO: 2012790 - RNA, 19 nt, Homo sapiens
  misc_RNA (1)...(19): siRNA sense strand
cagcugagaguucaaguga

SEQ ID NO: 2012791 - RNA, 19 nt, Homo sapiens
  misc_RNA (1)...(19): siRNA sense strand
gaaggacgacgcccacaag

SEQ ID NO: 2012792 - RNA, 19 nt, Homo sapiens
  misc_RNA (1)...(19): siRNA sense strand
gacaacagccuccccagua

SEQ ID NO: 2012793 - RNA, 19 nt, Homo sapiens
  misc_RNA (1)...(19): siRNA sense strand
ccacaggaaggaaacaagu

SEQ ID NO: 2012794 - RNA, 19 nt, Homo sapiens
  misc_RNA (1)...(19): siRNA sense strand
ccaacaagaaggcaacaag

SEQ ID NO: 2012795 - RNA, 19 nt, Homo sapiens
  misc_RNA (1)...(19): siRNA sense strand
gaugucagccaggaagaau

SEQ ID NO: 2012796 - RNA, 19 nt, Homo sapiens
  misc_RNA (1)...(19): siRNA sense strand
agaaucucucuuccuaaua

SEQ ID NO: 2012797 - RNA, 19 nt, Homo sapiens
  misc_RNA (1)...(19): siRNA sense strand
acaacagccuccccaguaa

SEQ ID NO: 2012798 - RNA, 19 nt, Homo sapiens
  misc_RNA (1)...(19): siRNA sense strand
ggaagaaacagaucauuua

SEQ ID NO: 2012799 - RNA, 19 nt, Homo sapiens
  misc_RNA (1)...(19): siRNA sense strand
ggaaugcgcuucaaacauc

SEQ ID NO: 2012800 - RNA, 19 nt, Homo sapiens
  misc_RNA (1)...(19): siRNA sense strand
caauagagauuacagaaug

SEQ ID NO: 2012801 - RNA, 19 nt, Homo sapiens
  misc_RNA (1)...(19): siRNA sense strand
gcaaagaccuucgaguguu

SEQ ID NO: 2012802 - RNA, 19 nt, Homo sapiens
  misc_RNA (1)...(19): siRNA sense strand
gugaacagcugcuuuguga

SEQ ID NO: 2012803 - RNA, 19 nt, Homo sapiens
  misc_RNA (1)...(19): siRNA sense strand
ggacaaaggccaacggaaa

SEQ ID NO: 2012804 - RNA, 19 nt, Homo sapiens
  misc_RNA (1)...(19): siRNA sense strand
caacuuucuuugccacuua

SEQ ID NO: 2012805 - RNA, 19 nt, Homo sapiens
  misc_RNA (1)...(19): siRNA sense strand
gaaauucacacaaacgaaa

SEQ ID NO: 2012806 - RNA, 19 nt, Homo sapiens
  misc_RNA (1)...(19): siRNA sense strand
gaaccauaccguaauguuu

SEQ ID NO: 2012807 - RNA, 19 nt, Homo sapiens
  misc_RNA (1)...(19): siRNA sense strand
caagacaacuuucgagagu

SEQ ID NO: 2012808 - RNA, 19 nt, Homo sapiens
  misc_RNA (1)...(19): siRNA sense strand
gcagcuggcuugacauaau

SEQ ID NO: 2012809 - RNA, 19 nt, Homo sapiens
  misc_RNA (1)...(19): siRNA sense strand
ggucauggcauaccaauau

SEQ ID NO: 2012810 - RNA, 19 nt, Homo sapiens
  misc_RNA (1)...(19): siRNA sense strand
ggaaagcuuugggagauga

SEQ ID NO: 2012811 - RNA, 19 nt, Homo sapiens
  misc_RNA (1)...(19): siRNA sense strand
ugaaguauguccaggaaga

SEQ ID NO: 2012812 - RNA, 19 nt, Homo sapiens
  misc_RNA (1)...(19): siRNA sense strand
caagagaauuagcaaacuu

SEQ ID NO: 2012813 - RNA, 19 nt, Homo sapiens
  misc_RNA (1)...(19): siRNA sense strand
gaaaggaaugcgcuucaaa

SEQ ID NO: 2012814 - RNA, 19 nt, Homo sapiens
  misc_RNA (1)...(19): siRNA sense strand
caagaaccauaccguaaug

SEQ ID NO: 2012815 - RNA, 19 nt, Homo sapiens
  misc_RNA (1)...(19): siRNA sense strand
gaagaaauacccugagaag

SEQ ID NO: 2012816 - RNA, 19 nt, Homo sapiens
  misc_RNA (1)...(19): siRNA sense strand
uuggacaacugaagaaaua

SEQ ID NO: 2012817 - RNA, 19 nt, Homo sapiens
  misc_RNA (1)...(19): siRNA sense strand
gcacagacuucaagauugc

SEQ ID NO: 2012818 - RNA, 19 nt, Homo sapiens
  misc_RNA (1)...(19): siRNA sense strand
gaccucugcugucucauuu

SEQ ID NO: 2012819 - RNA, 19 nt, Homo sapiens
  misc_RNA (1)...(19): siRNA sense strand
aaacaucaacgacaacuuu

SEQ ID NO: 2012820 - RNA, 19 nt, Homo sapiens
  misc_RNA (1)...(19): siRNA sense strand
ucagauagccuguauauac

SEQ ID NO: 2012821 - RNA, 19 nt, Homo sapiens
  misc_RNA (1)...(19): siRNA sense strand
gauugucaguggcauaauu

SEQ ID NO: 2012822 - RNA, 19 nt, Homo sapiens
  misc_RNA (1)...(19): siRNA sense strand
gggaagaaacagaucauuu

SEQ ID NO: 2012823 - RNA, 19 nt, Homo sapiens
  misc_RNA (1)...(19): siRNA sense strand
cuaaacugcuuaaacgauu

SEQ ID NO: 2012824 - RNA, 19 nt, Homo sapiens
  misc_RNA (1)...(19): siRNA sense strand
gcauuugaauucacagaga

SEQ ID NO: 2012825 - RNA, 19 nt, Homo sapiens
  misc_RNA (1)...(19): siRNA sense strand
gagauugccagcauacuuu

SEQ ID NO: 2012826 - RNA, 19 nt, Homo sapiens
  misc_RNA (1)...(19): siRNA sense strand
caacgaaggcuauaaaguc

SEQ ID NO: 2012827 - RNA, 19 nt, Homo sapiens
  misc_RNA (1)...(19): siRNA sense strand
ucagauuuauggaguguuu

SEQ ID NO: 2012828 - RNA, 19 nt, Homo sapiens
  misc_RNA (1)...(19): siRNA sense strand
ugacuaccaugguuuguug

SEQ ID NO: 2012829 - RNA, 19 nt, Homo sapiens
  misc_RNA (1)...(19): siRNA sense strand
gaacagcugcuuugugaag

SEQ ID NO: 2012830 - RNA, 19 nt, Homo sapiens
  misc_RNA (1)...(19): siRNA sense strand
ggaaaggaaugcgcuucaa

SEQ ID NO: 2012831 - RNA, 19 nt, Homo sapiens
  misc_RNA (1)...(19): siRNA sense strand
ggucauggguggccacugu

SEQ ID NO: 2012832 - RNA, 19 nt, Homo sapiens
  misc_RNA (1)...(19): siRNA sense strand
cggaagaccugucaagcaa

SEQ ID NO: 2012833 - RNA, 19 nt, Homo sapiens
  misc_RNA (1)...(19): siRNA sense strand
ggaggaaguccagaguuua

SEQ ID NO: 2012834 - RNA, 19 nt, Homo sapiens
  misc_RNA (1)...(19): siRNA sense strand
ccaaaggcaacaugaagua

SEQ ID NO: 2012835 - RNA, 19 nt, Homo sapiens
  misc_RNA (1)...(19): siRNA sense strand
uaaagucugugagagauug

SEQ ID NO: 2012836 - RNA, 19 nt, Homo sapiens
  misc_RNA (1)...(19): siRNA sense strand
caaagaccuucgaguguuc

SEQ ID NO: 2012837 - RNA, 19 nt, Homo sapiens
  misc_RNA (1)...(19): siRNA sense strand
ggauaaugaugaaacucaa

SEQ ID NO: 2012838 - RNA, 19 nt, Homo sapiens
  misc_RNA (1)...(19): siRNA sense strand
guccagaguuuacaagaga

SEQ ID NO: 2012839 - RNA, 19 nt, Homo sapiens
  misc_RNA (1)...(19): siRNA sense strand
ggaaguaacagagaaggaa

SEQ ID NO: 2012840 - RNA, 19 nt, Homo sapiens
  misc_RNA (1)...(19): siRNA sense strand
ugagcaaacucuuggaaau

SEQ ID NO: 2012841 - RNA, 19 nt, Homo sapiens
  misc_RNA (1)...(19): siRNA sense strand
ugucagcacugcccaaaga

SEQ ID NO: 2012842 - RNA, 19 nt, Homo sapiens
  misc_RNA (1)...(19): siRNA sense strand
ccacuguguugaucagauu

SEQ ID NO: 2012843 - RNA, 19 nt, Homo sapiens
  misc_RNA (1)...(19): siRNA sense strand
gcaaccaucuccgccagaa

SEQ ID NO: 2012844 - RNA, 19 nt, Homo sapiens
  misc_RNA (1)...(19): siRNA sense strand
gcccagcgcuaccuacguu

SEQ ID NO: 2012845 - RNA, 19 nt, Homo sapiens
  misc_RNA (1)...(19): siRNA sense strand
ggacacagauauaaaaugg

SEQ ID NO: 2012846 - RNA, 19 nt, Homo sapiens
  misc_RNA (1)...(19): siRNA sense strand
cugaugagcuccaagacaa

SEQ ID NO: 2012847 - RNA, 19 nt, Homo sapiens
  misc_RNA (1)...(19): siRNA sense strand
gauagccuguauauaccua

SEQ ID NO: 2012848 - RNA, 19 nt, Homo sapiens
  misc_RNA (1)...(19): siRNA sense strand
gaagaccugucaagcaacu

SEQ ID NO: 2012849 - RNA, 19 nt, Homo sapiens
  misc_RNA (1)...(19): siRNA sense strand
gcaagagaauuagcaaacu

SEQ ID NO: 2012850 - RNA, 19 nt, Homo sapiens
  misc_RNA (1)...(19): siRNA sense strand
cugaggaaauucacacaaa

SEQ ID NO: 2012851 - RNA, 19 nt, Homo sapiens
  misc_RNA (1)...(19): siRNA sense strand
gaucagauuuauggagugu

SEQ ID NO: 2012852 - RNA, 19 nt, Homo sapiens
  misc_RNA (1)...(19): siRNA sense strand
gcaccuucuucuucaauuc

SEQ ID NO: 2012853 - RNA, 19 nt, Homo sapiens
  misc_RNA (1)...(19): siRNA sense strand
ugaugaaucugcauuggau

SEQ ID NO: 2012854 - RNA, 19 nt, Homo sapiens
  misc_RNA (1)...(19): siRNA sense strand
caaacgagaagaugaguuc

SEQ ID NO: 2012855 - RNA, 19 nt, Homo sapiens
  misc_RNA (1)...(19): siRNA sense strand
cuaccaugguuuguuguua

SEQ ID NO: 2012856 - RNA, 19 nt, Homo sapiens
  misc_RNA (1)...(19): siRNA sense strand
gcaauagagauuacagaau

SEQ ID NO: 2012857 - RNA, 19 nt, Homo sapiens
  misc_RNA (1)...(19): siRNA sense strand
aaaggaagaggaagucaaa

SEQ ID NO: 2012858 - RNA, 19 nt, Homo sapiens
  misc_RNA (1)...(19): siRNA sense strand
gaacuggaacggaccaaag

SEQ ID NO: 2012859 - RNA, 19 nt, Homo sapiens
  misc_RNA (1)...(19): siRNA sense strand
gagacuuaccugacuguuu

SEQ ID NO: 2012860 - RNA, 19 nt, Homo sapiens
  misc_RNA (1)...(19): siRNA sense strand
cgaaggcuauaaagucugu

SEQ ID NO: 2012861 - RNA, 19 nt, Homo sapiens
  misc_RNA (1)...(19): siRNA sense strand
gagcaaacucuuggaaaug

SEQ ID NO: 2012862 - RNA, 19 nt, Homo sapiens
  misc_RNA (1)...(19): siRNA sense strand
agacuuaccugacuguuuu

SEQ ID NO: 2012863 - RNA, 19 nt, Homo sapiens
  misc_RNA (1)...(19): siRNA sense strand
guacguacgcccugaggaa

SEQ ID NO: 2012864 - RNA, 19 nt, Homo sapiens
  misc_RNA (1)...(19): siRNA sense strand
ggaaauucacacaaacgaa

SEQ ID NO: 2012865 - RNA, 19 nt, Homo sapiens
  misc_RNA (1)...(19): siRNA sense strand
cuucaaacaucaacgacaa

SEQ ID NO: 2012866 - RNA, 19 nt, Homo sapiens
  misc_RNA (1)...(19): siRNA sense strand
guacacaaaggaagaggaa

SEQ ID NO: 2012867 - RNA, 19 nt, Homo sapiens
  misc_RNA (1)...(19): siRNA sense strand
gaagccagcacaguacuga

SEQ ID NO: 2012868 - RNA, 19 nt, Homo sapiens
  misc_RNA (1)...(19): siRNA sense strand
gaaugcgcuucaaacauca

SEQ ID NO: 2012869 - RNA, 19 nt, Homo sapiens
  misc_RNA (1)...(19): siRNA sense strand
cuucuuagauggaauuuac

SEQ ID NO: 2012870 - RNA, 19 nt, Homo sapiens
  misc_RNA (1)...(19): siRNA sense strand
gugagagauugccagcaua

SEQ ID NO: 2012871 - RNA, 19 nt, Homo sapiens
  misc_RNA (1)...(19): siRNA sense strand
ggaccaaaggcaacaugaa

SEQ ID NO: 2012872 - RNA, 19 nt, Homo sapiens
  misc_RNA (1)...(19): siRNA sense strand
ggacugguguugggaacug

SEQ ID NO: 2012873 - RNA, 19 nt, Homo sapiens
  misc_RNA (1)...(19): siRNA sense strand
caacaugaaguacaaagca

SEQ ID NO: 2012874 - RNA, 19 nt, Homo sapiens
  misc_RNA (1)...(19): siRNA sense strand
gcaaacucuuggaaaugau

SEQ ID NO: 2012875 - RNA, 19 nt, Homo sapiens
  misc_RNA (1)...(19): siRNA sense strand
uaagucaucucccaaaaga

SEQ ID NO: 2012876 - RNA, 19 nt, Homo sapiens
  misc_RNA (1)...(19): siRNA sense strand
uauaaagucugugagagau

SEQ ID NO: 2012877 - RNA, 19 nt, Homo sapiens
  misc_RNA (1)...(19): siRNA sense strand
agaacaggaugacggcauu

SEQ ID NO: 2012878 - RNA, 19 nt, Homo sapiens
  misc_RNA (1)...(19): siRNA sense strand
gacugcauacucuaaauuu

SEQ ID NO: 2012879 - RNA, 19 nt, Homo sapiens
  misc_RNA (1)...(19): siRNA sense strand
ccaagaaccauaccguaau

SEQ ID NO: 2012880 - RNA, 19 nt, Homo sapiens
  misc_RNA (1)...(19): siRNA sense strand
gagaaggccaggauacaca

SEQ ID NO: 2012881 - RNA, 19 nt, Homo sapiens
  misc_RNA (1)...(19): siRNA sense strand
ccacaggccacccuaugaa

SEQ ID NO: 2012882 - RNA, 19 nt, Homo sapiens
  misc_RNA (1)...(19): siRNA sense strand
gaugaugaaucugcauugg

SEQ ID NO: 2012883 - RNA, 19 nt, Homo sapiens
  misc_RNA (1)...(19): siRNA sense strand
agcaaacucuuggaaauga

SEQ ID NO: 2012884 - RNA, 19 nt, Homo sapiens
  misc_RNA (1)...(19): siRNA sense strand
gaacaggaugacggcauuu

SEQ ID NO: 2012885 - RNA, 19 nt, Homo sapiens
  misc_RNA (1)...(19): siRNA sense strand
cugaagaaauacccugaga

SEQ ID NO: 2012886 - RNA, 19 nt, Homo sapiens
  misc_RNA (1)...(19): siRNA sense strand
guuccuguguuccugcuuu

SEQ ID NO: 2012887 - RNA, 19 nt, Homo sapiens
  misc_RNA (1)...(19): siRNA sense strand
cuucuugggugaugaugaa

SEQ ID NO: 2012888 - RNA, 19 nt, Homo sapiens
  misc_RNA (1)...(19): siRNA sense strand
gaccaaaggcaacaugaag

SEQ ID NO: 2012889 - RNA, 19 nt, Homo sapiens
  misc_RNA (1)...(19): siRNA sense strand
gcccagacauugcucaaaa

SEQ ID NO: 2012890 - RNA, 19 nt, Homo sapiens
  misc_RNA (1)...(19): siRNA sense strand
uaacagagaaggaaguaac

SEQ ID NO: 2012891 - RNA, 19 nt, Homo sapiens
  misc_RNA (1)...(19): siRNA sense strand
uagcagcuggcuugacaua

SEQ ID NO: 2012892 - RNA, 19 nt, Homo sapiens
  misc_RNA (1)...(19): siRNA sense strand
ggaaguccagaguuuacaa

SEQ ID NO: 2012893 - RNA, 19 nt, Homo sapiens
  misc_RNA (1)...(19): siRNA sense strand
gguuuguuguuaccgcaua

SEQ ID NO: 2012894 - RNA, 19 nt, Homo sapiens
  misc_RNA (1)...(19): siRNA sense strand
gaaaaggaaguaacagaga

SEQ ID NO: 2012895 - RNA, 19 nt, Homo sapiens
  misc_RNA (1)...(19): siRNA sense strand
gacaaaggccaacggaaag

SEQ ID NO: 2012896 - RNA, 19 nt, Homo sapiens
  misc_RNA (1)...(19): siRNA sense strand
ugucagauagccuguauau

SEQ ID NO: 2012897 - RNA, 19 nt, Homo sapiens
  misc_RNA (1)...(19): siRNA sense strand
gaacgacaaagaggagguu

SEQ ID NO: 2012898 - RNA, 19 nt, Homo sapiens
  misc_RNA (1)...(19): siRNA sense strand
acacauggaugguggagua

SEQ ID NO: 2012899 - RNA, 19 nt, Homo sapiens
  misc_RNA (1)...(19): siRNA sense strand
ggcuugagcucaccaccua

SEQ ID NO: 2012900 - RNA, 19 nt, Homo sapiens
  misc_RNA (1)...(19): siRNA sense strand
gcucaccaccuaccucuuu

SEQ ID NO: 2012901 - RNA, 19 nt, Homo sapiens
  misc_RNA (1)...(19): siRNA sense strand
ggccuucucucgucugauc

SEQ ID NO: 2012902 - RNA, 19 nt, Homo sapiens
  misc_RNA (1)...(19): siRNA sense strand
ucuauacucuucgcuccua

SEQ ID NO: 2012903 - RNA, 19 nt, Homo sapiens
  misc_RNA (1)...(19): siRNA sense strand
gcaguggguguucgugaau

SEQ ID NO: 2012904 - RNA, 19 nt, Homo sapiens
  misc_RNA (1)...(19): siRNA sense strand
ggacuuccucacccucuuc

SEQ ID NO: 2012905 - RNA, 19 nt, Homo sapiens
  misc_RNA (1)...(19): siRNA sense strand
ugcaguggguguucgugaa

SEQ ID NO: 2012906 - RNA, 19 nt, Homo sapiens
  misc_RNA (1)...(19): siRNA sense strand
acacauggaugguggagua

SEQ ID NO: 2012907 - RNA, 19 nt, Homo sapiens
  misc_RNA (1)...(19): siRNA sense strand
ggcuugagcucaccaccua

SEQ ID NO: 2012908 - RNA, 19 nt, Homo sapiens
  misc_RNA (1)...(19): siRNA sense strand
gcucaccaccuaccucuuu

SEQ ID NO: 2012909 - RNA, 19 nt, Homo sapiens
  misc_RNA (1)...(19): siRNA sense strand
ggccuucucucgucugauc

SEQ ID NO: 2012910 - RNA, 19 nt, Homo sapiens
  misc_RNA (1)...(19): siRNA sense strand
ucuauacucuucgcuccua

SEQ ID NO: 2012911 - RNA, 19 nt, Homo sapiens
  misc_RNA (1)...(19): siRNA sense strand
gcaguggguguucgugaau

SEQ ID NO: 2012912 - RNA, 19 nt, Homo sapiens
  misc_RNA (1)...(19): siRNA sense strand
ggacuuccucacccucuuc

SEQ ID NO: 2012913 - RNA, 19 nt, Homo sapiens
  misc_RNA (1)...(19): siRNA sense strand
ugcaguggguguucgugaa

SEQ ID NO: 2012914 - RNA, 19 nt, Homo sapiens
  misc_RNA (1)...(19): siRNA sense strand
acacauggaugguggagua

SEQ ID NO: 2012915 - RNA, 19 nt, Homo sapiens
  misc_RNA (1)...(19): siRNA sense strand
ggcuugagcucaccaccua

SEQ ID NO: 2012916 - RNA, 19 nt, Homo sapiens
  misc_RNA (1)...(19): siRNA sense strand
gcucaccaccuaccucuuu

SEQ ID NO: 2012917 - RNA, 19 nt, Homo sapiens
  misc_RNA (1)...(19): siRNA sense strand
ggccuucucucgucugauc

SEQ ID NO: 2012918 - RNA, 19 nt, Homo sapiens
  misc_RNA (1)...(19): siRNA sense strand
ucuauacucuucgcuccua

SEQ ID NO: 2012919 - RNA, 19 nt, Homo sapiens
  misc_RNA (1)...(19): siRNA sense strand
gcaguggguguucgugaau

SEQ ID NO: 2012920 - RNA, 19 nt, Homo sapiens
  misc_RNA (1)...(19): siRNA sense strand
ggacuuccucacccucuuc

SEQ ID NO: 2012921 - RNA, 19 nt, Homo sapiens
  misc_RNA (1)...(19): siRNA sense strand
ugcaguggguguucgugaa

SEQ ID NO: 2012922 - RNA, 19 nt, Homo sapiens
  misc_RNA (1)...(19): siRNA sense strand
ggccuucucucgucugauc

SEQ ID NO: 2012923 - RNA, 19 nt, Homo sapiens
  misc_RNA (1)...(19): siRNA sense strand
gcaguggguguucgugaau

SEQ ID NO: 2012924 - RNA, 19 nt, Homo sapiens
  misc_RNA (1)...(19): siRNA sense strand
ugcaguggguguucgugaa

SEQ ID NO: 2012925 - RNA, 19 nt, Homo sapiens
  misc_RNA (1)...(19): siRNA sense strand
ggaagcaacccaagacguu

SEQ ID NO: 2012926 - RNA, 19 nt, Homo sapiens
  misc_RNA (1)...(19): siRNA sense strand
agaagcagauuuuagauga

SEQ ID NO: 2012927 - RNA, 19 nt, Homo sapiens
  misc_RNA (1)...(19): siRNA sense strand
gaagcagauuuuagaugaa

SEQ ID NO: 2012928 - RNA, 19 nt, Homo sapiens
  misc_RNA (1)...(19): siRNA sense strand
caccauggacgccgagaug

SEQ ID NO: 2012929 - RNA, 19 nt, Homo sapiens
  misc_RNA (1)...(19): siRNA sense strand
acgccgagauggaguucaa

SEQ ID NO: 2012930 - RNA, 19 nt, Homo sapiens
  misc_RNA (1)...(19): siRNA sense strand
gccaucgcuucccgcauga

SEQ ID NO: 2012931 - RNA, 19 nt, Homo sapiens
  misc_RNA (1)...(19): siRNA sense strand
gccgagauggaguucaauu

SEQ ID NO: 2012932 - RNA, 19 nt, Homo sapiens
  misc_RNA (1)...(19): siRNA sense strand
cgagauggaguucaauugc

SEQ ID NO: 2012933 - RNA, 19 nt, Homo sapiens
  misc_RNA (1)...(19): siRNA sense strand
ugaggaucgucaccaugga

SEQ ID NO: 2012934 - RNA, 19 nt, Homo sapiens
  misc_RNA (1)...(19): siRNA sense strand
ccgagauggaguucaauug

SEQ ID NO: 2012935 - RNA, 19 nt, Homo sapiens
  misc_RNA (1)...(19): siRNA sense strand
ggaagcaacccaagacguu

SEQ ID NO: 2012936 - RNA, 19 nt, Homo sapiens
  misc_RNA (1)...(19): siRNA sense strand
agaagcagauuuuagauga

SEQ ID NO: 2012937 - RNA, 19 nt, Homo sapiens
  misc_RNA (1)...(19): siRNA sense strand
gaagcagauuuuagaugaa

SEQ ID NO: 2012938 - RNA, 19 nt, Homo sapiens
  misc_RNA (1)...(19): siRNA sense strand
caccauggacgccgagaug

SEQ ID NO: 2012939 - RNA, 19 nt, Homo sapiens
  misc_RNA (1)...(19): siRNA sense strand
acgccgagauggaguucaa

SEQ ID NO: 2012940 - RNA, 19 nt, Homo sapiens
  misc_RNA (1)...(19): siRNA sense strand
gccaucgcuucccgcauga

SEQ ID NO: 2012941 - RNA, 19 nt, Homo sapiens
  misc_RNA (1)...(19): siRNA sense strand
gccgagauggaguucaauu

SEQ ID NO: 2012942 - RNA, 19 nt, Homo sapiens
  misc_RNA (1)...(19): siRNA sense strand
cgagauggaguucaauugc

SEQ ID NO: 2012943 - RNA, 19 nt, Homo sapiens
  misc_RNA (1)...(19): siRNA sense strand
ugaggaucgucaccaugga

SEQ ID NO: 2012944 - RNA, 19 nt, Homo sapiens
  misc_RNA (1)...(19): siRNA sense strand
ccgagauggaguucaauug

SEQ ID NO: 2012945 - RNA, 19 nt, Homo sapiens
  misc_RNA (1)...(19): siRNA sense strand
ggaagcaacccaagacguu

SEQ ID NO: 2012946 - RNA, 19 nt, Homo sapiens
  misc_RNA (1)...(19): siRNA sense strand
agaagcagauuuuagauga

SEQ ID NO: 2012947 - RNA, 19 nt, Homo sapiens
  misc_RNA (1)...(19): siRNA sense strand
gaagcagauuuuagaugaa

SEQ ID NO: 2012948 - RNA, 19 nt, Homo sapiens
  misc_RNA (1)...(19): siRNA sense strand
caccauggacgccgagaug

SEQ ID NO: 2012949 - RNA, 19 nt, Homo sapiens
  misc_RNA (1)...(19): siRNA sense strand
acgccgagauggaguucaa

SEQ ID NO: 2012950 - RNA, 19 nt, Homo sapiens
  misc_RNA (1)...(19): siRNA sense strand
gccaucgcuucccgcauga

SEQ ID NO: 2012951 - RNA, 19 nt, Homo sapiens
  misc_RNA (1)...(19): siRNA sense strand
gccgagauggaguucaauu

SEQ ID NO: 2012952 - RNA, 19 nt, Homo sapiens
  misc_RNA (1)...(19): siRNA sense strand
cgagauggaguucaauugc

SEQ ID NO: 2012953 - RNA, 19 nt, Homo sapiens
  misc_RNA (1)...(19): siRNA sense strand
ugaggaucgucaccaugga

SEQ ID NO: 2012954 - RNA, 19 nt, Homo sapiens
  misc_RNA (1)...(19): siRNA sense strand
ccgagauggaguucaauug

SEQ ID NO: 2012955 - RNA, 19 nt, Homo sapiens
  misc_RNA (1)...(19): siRNA sense strand
ggaagcaacccaagacguu

SEQ ID NO: 2012956 - RNA, 19 nt, Homo sapiens
  misc_RNA (1)...(19): siRNA sense strand
caccauggacgccgagaug

SEQ ID NO: 2012957 - RNA, 19 nt, Homo sapiens
  misc_RNA (1)...(19): siRNA sense strand
acgccgagauggaguucaa

SEQ ID NO: 2012958 - RNA, 19 nt, Homo sapiens
  misc_RNA (1)...(19): siRNA sense strand
gccaucgcuucccgcauga

SEQ ID NO: 2012959 - RNA, 19 nt, Homo sapiens
  misc_RNA (1)...(19): siRNA sense strand
gccgagauggaguucaauu

SEQ ID NO: 2012960 - RNA, 19 nt, Homo sapiens
  misc_RNA (1)...(19): siRNA sense strand
cgagauggaguucaauugc

SEQ ID NO: 2012961 - RNA, 19 nt, Homo sapiens
  misc_RNA (1)...(19): siRNA sense strand
ugaggaucgucaccaugga

SEQ ID NO: 2012962 - RNA, 19 nt, Homo sapiens
  misc_RNA (1)...(19): siRNA sense strand
ccgagauggaguucaauug

SEQ ID NO: 2012963 - RNA, 19 nt, Homo sapiens
  misc_RNA (1)...(19): siRNA sense strand
ggaagcaacccaagacguu

SEQ ID NO: 2012964 - RNA, 19 nt, Homo sapiens
  misc_RNA (1)...(19): siRNA sense strand
caccauggacgccgagaug

SEQ ID NO: 2012965 - RNA, 19 nt, Homo sapiens
  misc_RNA (1)...(19): siRNA sense strand
acgccgagauggaguucaa

SEQ ID NO: 2012966 - RNA, 19 nt, Homo sapiens
  misc_RNA (1)...(19): siRNA sense strand
gccaucgcuucccgcauga

SEQ ID NO: 2012967 - RNA, 19 nt, Homo sapiens
  misc_RNA (1)...(19): siRNA sense strand
gccgagauggaguucaauu

SEQ ID NO: 2012968 - RNA, 19 nt, Homo sapiens
  misc_RNA (1)...(19): siRNA sense strand
cgagauggaguucaauugc

SEQ ID NO: 2012969 - RNA, 19 nt, Homo sapiens
  misc_RNA (1)...(19): siRNA sense strand
ugaggaucgucaccaugga

SEQ ID NO: 2012970 - RNA, 19 nt, Homo sapiens
  misc_RNA (1)...(19): siRNA sense strand
ccgagauggaguucaauug

SEQ ID NO: 2012971 - RNA, 19 nt, Homo sapiens
  misc_RNA (1)...(19): siRNA sense strand
ggaagcaacccaagacguu

SEQ ID NO: 2012972 - RNA, 19 nt, Homo sapiens
  misc_RNA (1)...(19): siRNA sense strand
agaagcagauuuuagauga

SEQ ID NO: 2012973 - RNA, 19 nt, Homo sapiens
  misc_RNA (1)...(19): siRNA sense strand
gaagcagauuuuagaugaa

SEQ ID NO: 2012974 - RNA, 19 nt, Homo sapiens
  misc_RNA (1)...(19): siRNA sense strand
caccauggacgccgagaug

SEQ ID NO: 2012975 - RNA, 19 nt, Homo sapiens
  misc_RNA (1)...(19): siRNA sense strand
acgccgagauggaguucaa

SEQ ID NO: 2012976 - RNA, 19 nt, Homo sapiens
  misc_RNA (1)...(19): siRNA sense strand
gccaucgcuucccgcauga

SEQ ID NO: 2012977 - RNA, 19 nt, Homo sapiens
  misc_RNA (1)...(19): siRNA sense strand
gccgagauggaguucaauu

SEQ ID NO: 2012978 - RNA, 19 nt, Homo sapiens
  misc_RNA (1)...(19): siRNA sense strand
cgagauggaguucaauugc

SEQ ID NO: 2012979 - RNA, 19 nt, Homo sapiens
  misc_RNA (1)...(19): siRNA sense strand
ugaggaucgucaccaugga

SEQ ID NO: 2012980 - RNA, 19 nt, Homo sapiens
  misc_RNA (1)...(19): siRNA sense strand
ccgagauggaguucaauug

SEQ ID NO: 2012981 - RNA, 19 nt, Homo sapiens
  misc_RNA (1)...(19): siRNA sense strand
ggaagcaacccaagacguu

SEQ ID NO: 2012982 - RNA, 19 nt, Homo sapiens
  misc_RNA (1)...(19): siRNA sense strand
agaagcagauuuuagauga

SEQ ID NO: 2012983 - RNA, 19 nt, Homo sapiens
  misc_RNA (1)...(19): siRNA sense strand
gaagcagauuuuagaugaa

SEQ ID NO: 2012984 - RNA, 19 nt, Homo sapiens
  misc_RNA (1)...(19): siRNA sense strand
caccauggacgccgagaug

SEQ ID NO: 2012985 - RNA, 19 nt, Homo sapiens
  misc_RNA (1)...(19): siRNA sense strand
acgccgagauggaguucaa

SEQ ID NO: 2012986 - RNA, 19 nt, Homo sapiens
  misc_RNA (1)...(19): siRNA sense strand
gccaucgcuucccgcauga

SEQ ID NO: 2012987 - RNA, 19 nt, Homo sapiens
  misc_RNA (1)...(19): siRNA sense strand
gccgagauggaguucaauu

SEQ ID NO: 2012988 - RNA, 19 nt, Homo sapiens
  misc_RNA (1)...(19): siRNA sense strand
cgagauggaguucaauugc

SEQ ID NO: 2012989 - RNA, 19 nt, Homo sapiens
  misc_RNA (1)...(19): siRNA sense strand
ugaggaucgucaccaugga

SEQ ID NO: 2012990 - RNA, 19 nt, Homo sapiens
  misc_RNA (1)...(19): siRNA sense strand
ccgagauggaguucaauug

SEQ ID NO: 2012991 - RNA, 19 nt, Homo sapiens
  misc_RNA (1)...(19): siRNA sense strand
ggaagcaacccaagacguu

SEQ ID NO: 2012992 - RNA, 19 nt, Homo sapiens
  misc_RNA (1)...(19): siRNA sense strand
agaagcagauuuuagauga

SEQ ID NO: 2012993 - RNA, 19 nt, Homo sapiens
  misc_RNA (1)...(19): siRNA sense strand
gaagcagauuuuagaugaa

SEQ ID NO: 2012994 - RNA, 19 nt, Homo sapiens
  misc_RNA (1)...(19): siRNA sense strand
caccauggacgccgagaug

SEQ ID NO: 2012995 - RNA, 19 nt, Homo sapiens
  misc_RNA (1)...(19): siRNA sense strand
acgccgagauggaguucaa

SEQ ID NO: 2012996 - RNA, 19 nt, Homo sapiens
  misc_RNA (1)...(19): siRNA sense strand
gccaucgcuucccgcauga

SEQ ID NO: 2012997 - RNA, 19 nt, Homo sapiens
  misc_RNA (1)...(19): siRNA sense strand
gccgagauggaguucaauu

SEQ ID NO: 2012998 - RNA, 19 nt, Homo sapiens
  misc_RNA (1)...(19): siRNA sense strand
cgagauggaguucaauugc

SEQ ID NO: 2012999 - RNA, 19 nt, Homo sapiens
  misc_RNA (1)...(19): siRNA sense strand
ugaggaucgucaccaugga

SEQ ID NO: 2013000 - RNA, 19 nt, Homo sapiens
  misc_RNA (1)...(19): siRNA sense strand
ccgagauggaguucaauug

SEQ ID NO: 2013001 - RNA, 19 nt, Homo sapiens
  misc_RNA (1)...(19): siRNA sense strand
ggaagcaacccaagacguu

SEQ ID NO: 2013002 - RNA, 19 nt, Homo sapiens
  misc_RNA (1)...(19): siRNA sense strand
agaagcagauuuuagauga

SEQ ID NO: 2013003 - RNA, 19 nt, Homo sapiens
  misc_RNA (1)...(19): siRNA sense strand
gaagcagauuuuagaugaa

SEQ ID NO: 2013004 - RNA, 19 nt, Homo sapiens
  misc_RNA (1)...(19): siRNA sense strand
caccauggacgccgagaug

SEQ ID NO: 2013005 - RNA, 19 nt, Homo sapiens
  misc_RNA (1)...(19): siRNA sense strand
acgccgagauggaguucaa

SEQ ID NO: 2013006 - RNA, 19 nt, Homo sapiens
  misc_RNA (1)...(19): siRNA sense strand
gccaucgcuucccgcauga

SEQ ID NO: 2013007 - RNA, 19 nt, Homo sapiens
  misc_RNA (1)...(19): siRNA sense strand
gccgagauggaguucaauu

SEQ ID NO: 2013008 - RNA, 19 nt, Homo sapiens
  misc_RNA (1)...(19): siRNA sense strand
cgagauggaguucaauugc

SEQ ID NO: 2013009 - RNA, 19 nt, Homo sapiens
  misc_RNA (1)...(19): siRNA sense strand
ugaggaucgucaccaugga

SEQ ID NO: 2013010 - RNA, 19 nt, Homo sapiens
  misc_RNA (1)...(19): siRNA sense strand
ccgagauggaguucaauug

SEQ ID NO: 2013011 - RNA, 19 nt, Homo sapiens
  misc_RNA (1)...(19): siRNA sense strand
ggaagcaacccaagacguu

SEQ ID NO: 2013012 - RNA, 19 nt, Homo sapiens
  misc_RNA (1)...(19): siRNA sense strand
agaagcagauuuuagauga

SEQ ID NO: 2013013 - RNA, 19 nt, Homo sapiens
  misc_RNA (1)...(19): siRNA sense strand
gaagcagauuuuagaugaa

SEQ ID NO: 2013014 - RNA, 19 nt, Homo sapiens
  misc_RNA (1)...(19): siRNA sense strand
caccauggacgccgagaug

SEQ ID NO: 2013015 - RNA, 19 nt, Homo sapiens
  misc_RNA (1)...(19): siRNA sense strand
acgccgagauggaguucaa

SEQ ID NO: 2013016 - RNA, 19 nt, Homo sapiens
  misc_RNA (1)...(19): siRNA sense strand
gccaucgcuucccgcauga

SEQ ID NO: 2013017 - RNA, 19 nt, Homo sapiens
  misc_RNA (1)...(19): siRNA sense strand
gccgagauggaguucaauu

SEQ ID NO: 2013018 - RNA, 19 nt, Homo sapiens
  misc_RNA (1)...(19): siRNA sense strand
cgagauggaguucaauugc

SEQ ID NO: 2013019 - RNA, 19 nt, Homo sapiens
  misc_RNA (1)...(19): siRNA sense strand
ugaggaucgucaccaugga

SEQ ID NO: 2013020 - RNA, 19 nt, Homo sapiens
  misc_RNA (1)...(19): siRNA sense strand
ccgagauggaguucaauug

SEQ ID NO: 2013021 - RNA, 19 nt, Homo sapiens
  misc_RNA (1)...(19): siRNA sense strand
ggaagcaacccaagacguu

SEQ ID NO: 2013022 - RNA, 19 nt, Homo sapiens
  misc_RNA (1)...(19): siRNA sense strand
agaagcagauuuuagauga

SEQ ID NO: 2013023 - RNA, 19 nt, Homo sapiens
  misc_RNA (1)...(19): siRNA sense strand
gaagcagauuuuagaugaa

SEQ ID NO: 2013024 - RNA, 19 nt, Homo sapiens
  misc_RNA (1)...(19): siRNA sense strand
caccauggacgccgagaug

SEQ ID NO: 2013025 - RNA, 19 nt, Homo sapiens
  misc_RNA (1)...(19): siRNA sense strand
acgccgagauggaguucaa

SEQ ID NO: 2013026 - RNA, 19 nt, Homo sapiens
  misc_RNA (1)...(19): siRNA sense strand
gccaucgcuucccgcauga

SEQ ID NO: 2013027 - RNA, 19 nt, Homo sapiens
  misc_RNA (1)...(19): siRNA sense strand
gccgagauggaguucaauu

SEQ ID NO: 2013028 - RNA, 19 nt, Homo sapiens
  misc_RNA (1)...(19): siRNA sense strand
cgagauggaguucaauugc

SEQ ID NO: 2013029 - RNA, 19 nt, Homo sapiens
  misc_RNA (1)...(19): siRNA sense strand
ugaggaucgucaccaugga

SEQ ID NO: 2013030 - RNA, 19 nt, Homo sapiens
  misc_RNA (1)...(19): siRNA sense strand
ccgagauggaguucaauug

SEQ ID NO: 2013031 - RNA, 19 nt, Homo sapiens
  misc_RNA (1)...(19): siRNA sense strand
ggaagcaacccaagacguu

SEQ ID NO: 2013032 - RNA, 19 nt, Homo sapiens
  misc_RNA (1)...(19): siRNA sense strand
agaagcagauuuuagauga

SEQ ID NO: 2013033 - RNA, 19 nt, Homo sapiens
  misc_RNA (1)...(19): siRNA sense strand
gaagcagauuuuagaugaa

SEQ ID NO: 2013034 - RNA, 19 nt, Homo sapiens
  misc_RNA (1)...(19): siRNA sense strand
caccauggacgccgagaug

SEQ ID NO: 2013035 - RNA, 19 nt, Homo sapiens
  misc_RNA (1)...(19): siRNA sense strand
acgccgagauggaguucaa

SEQ ID NO: 2013036 - RNA, 19 nt, Homo sapiens
  misc_RNA (1)...(19): siRNA sense strand
gccaucgcuucccgcauga

SEQ ID NO: 2013037 - RNA, 19 nt, Homo sapiens
  misc_RNA (1)...(19): siRNA sense strand
gccgagauggaguucaauu

SEQ ID NO: 2013038 - RNA, 19 nt, Homo sapiens
  misc_RNA (1)...(19): siRNA sense strand
cgagauggaguucaauugc

SEQ ID NO: 2013039 - RNA, 19 nt, Homo sapiens
  misc_RNA (1)...(19): siRNA sense strand
ugaggaucgucaccaugga

SEQ ID NO: 2013040 - RNA, 19 nt, Homo sapiens
  misc_RNA (1)...(19): siRNA sense strand
ccgagauggaguucaauug

SEQ ID NO: 2013041 - RNA, 19 nt, Homo sapiens
  misc_RNA (1)...(19): siRNA sense strand
ggaagcaacccaagacguu

SEQ ID NO: 2013042 - RNA, 19 nt, Homo sapiens
  misc_RNA (1)...(19): siRNA sense strand
agaagcagauuuuagauga

SEQ ID NO: 2013043 - RNA, 19 nt, Homo sapiens
  misc_RNA (1)...(19): siRNA sense strand
gaagcagauuuuagaugaa

SEQ ID NO: 2013044 - RNA, 19 nt, Homo sapiens
  misc_RNA (1)...(19): siRNA sense strand
caccauggacgccgagaug

SEQ ID NO: 2013045 - RNA, 19 nt, Homo sapiens
  misc_RNA (1)...(19): siRNA sense strand
acgccgagauggaguucaa

SEQ ID NO: 2013046 - RNA, 19 nt, Homo sapiens
  misc_RNA (1)...(19): siRNA sense strand
gccaucgcuucccgcauga

SEQ ID NO: 2013047 - RNA, 19 nt, Homo sapiens
  misc_RNA (1)...(19): siRNA sense strand
gccgagauggaguucaauu

SEQ ID NO: 2013048 - RNA, 19 nt, Homo sapiens
  misc_RNA (1)...(19): siRNA sense strand
cgagauggaguucaauugc

SEQ ID NO: 2013049 - RNA, 19 nt, Homo sapiens
  misc_RNA (1)...(19): siRNA sense strand
ugaggaucgucaccaugga

SEQ ID NO: 2013050 - RNA, 19 nt, Homo sapiens
  misc_RNA (1)...(19): siRNA sense strand
ccgagauggaguucaauug

SEQ ID NO: 2013051 - RNA, 19 nt, Homo sapiens
  misc_RNA (1)...(19): siRNA sense strand
gaacauguaccaucaauuu

SEQ ID NO: 2013052 - RNA, 19 nt, Homo sapiens
  misc_RNA (1)...(19): siRNA sense strand
gaaagagauugccaugaua

SEQ ID NO: 2013053 - RNA, 19 nt, Homo sapiens
  misc_RNA (1)...(19): siRNA sense strand
gagauugccaugauauuua

SEQ ID NO: 2013054 - RNA, 19 nt, Homo sapiens
  misc_RNA (1)...(19): siRNA sense strand
uaucaaagcuguuauggau

SEQ ID NO: 2013055 - RNA, 19 nt, Homo sapiens
  misc_RNA (1)...(19): siRNA sense strand
ggaagucaauggcacuaaa

SEQ ID NO: 2013056 - RNA, 19 nt, Homo sapiens
  misc_RNA (1)...(19): siRNA sense strand
ggaggaacauguaccauca

SEQ ID NO: 2013057 - RNA, 19 nt, Homo sapiens
  misc_RNA (1)...(19): siRNA sense strand
aaagaaaccuggauauuac

SEQ ID NO: 2013058 - RNA, 19 nt, Homo sapiens
  misc_RNA (1)...(19): siRNA sense strand
ucucacagauuuacaguuu

SEQ ID NO: 2013059 - RNA, 19 nt, Homo sapiens
  misc_RNA (1)...(19): siRNA sense strand
ggauaggacuucccagguu

SEQ ID NO: 2013060 - RNA, 19 nt, Homo sapiens
  misc_RNA (1)...(19): siRNA sense strand
ggacauaaauuuucagaga

SEQ ID NO: 2013061 - RNA, 19 nt, Homo sapiens
  misc_RNA (1)...(19): siRNA sense strand
gauaggacuucccagguuu

SEQ ID NO: 2013062 - RNA, 19 nt, Homo sapiens
  misc_RNA (1)...(19): siRNA sense strand
ggaagucucaccaguguuu

SEQ ID NO: 2013063 - RNA, 19 nt, Homo sapiens
  misc_RNA (1)...(19): siRNA sense strand
gguccagccuucagaaauu

SEQ ID NO: 2013064 - RNA, 19 nt, Homo sapiens
  misc_RNA (1)...(19): siRNA sense strand
guacuuaaauccucucuac

SEQ ID NO: 2013065 - RNA, 19 nt, Homo sapiens
  misc_RNA (1)...(19): siRNA sense strand
agaaagagauugccaugau

SEQ ID NO: 2013066 - RNA, 19 nt, Homo sapiens
  misc_RNA (1)...(19): siRNA sense strand
uaaggaggcugccauuugu

SEQ ID NO: 2013067 - RNA, 19 nt, Homo sapiens
  misc_RNA (1)...(19): siRNA sense strand
uaaauccucucuacaguuc

SEQ ID NO: 2013068 - RNA, 19 nt, Homo sapiens
  misc_RNA (1)...(19): siRNA sense strand
ugaaucaccuaaccucaaa

SEQ ID NO: 2013069 - RNA, 19 nt, Homo sapiens
  misc_RNA (1)...(19): siRNA sense strand
ccacaagccuuugaauuca

SEQ ID NO: 2013070 - RNA, 19 nt, Homo sapiens
  misc_RNA (1)...(19): siRNA sense strand
ggcuacacaucuauuauuu

SEQ ID NO: 2013071 - RNA, 19 nt, Homo sapiens
  misc_RNA (1)...(19): siRNA sense strand
gcauuugaccgaacaguuu

SEQ ID NO: 2013072 - RNA, 19 nt, Homo sapiens
  misc_RNA (1)...(19): siRNA sense strand
ccaaagcaauaacaguuga

SEQ ID NO: 2013073 - RNA, 19 nt, Homo sapiens
  misc_RNA (1)...(19): siRNA sense strand
gaacugugcauuucauugu

SEQ ID NO: 2013074 - RNA, 19 nt, Homo sapiens
  misc_RNA (1)...(19): siRNA sense strand
gcaagaacuucagaacugu

SEQ ID NO: 2013075 - RNA, 19 nt, Homo sapiens
  misc_RNA (1)...(19): siRNA sense strand
gaaauugucagaaggaaag

SEQ ID NO: 2013076 - RNA, 19 nt, Homo sapiens
  misc_RNA (1)...(19): siRNA sense strand
gaagaucucuaugcauuuu

SEQ ID NO: 2013077 - RNA, 19 nt, Homo sapiens
  misc_RNA (1)...(19): siRNA sense strand
gcaaguguguuggugcauu

SEQ ID NO: 2013078 - RNA, 19 nt, Homo sapiens
  misc_RNA (1)...(19): siRNA sense strand
gaucgaacacugcauccua

SEQ ID NO: 2013079 - RNA, 19 nt, Homo sapiens
  misc_RNA (1)...(19): siRNA sense strand
gauagcaagcaaaccaaua

SEQ ID NO: 2013080 - RNA, 19 nt, Homo sapiens
  misc_RNA (1)...(19): siRNA sense strand
uuacaacucuuugcuacaa

SEQ ID NO: 2013081 - RNA, 19 nt, Homo sapiens
  misc_RNA (1)...(19): siRNA sense strand
ugaaggagaagacuuauuc

SEQ ID NO: 2013082 - RNA, 19 nt, Homo sapiens
  misc_RNA (1)...(19): siRNA sense strand
augaagaucucuaugcauu

SEQ ID NO: 2013083 - RNA, 19 nt, Homo sapiens
  misc_RNA (1)...(19): siRNA sense strand
caacagagcagcuggaaaa

SEQ ID NO: 2013084 - RNA, 19 nt, Homo sapiens
  misc_RNA (1)...(19): siRNA sense strand
ugaauaugcagaagaguuu

SEQ ID NO: 2013085 - RNA, 19 nt, Homo sapiens
  misc_RNA (1)...(19): siRNA sense strand
ggacuucccagguuuguuc

SEQ ID NO: 2013086 - RNA, 19 nt, Homo sapiens
  misc_RNA (1)...(19): siRNA sense strand
caaguguguuggugcauug

SEQ ID NO: 2013087 - RNA, 19 nt, Homo sapiens
  misc_RNA (1)...(19): siRNA sense strand
guagagaaacuugcuuuga

SEQ ID NO: 2013088 - RNA, 19 nt, Homo sapiens
  misc_RNA (1)...(19): siRNA sense strand
ccuaggcagucuguauuua

SEQ ID NO: 2013089 - RNA, 19 nt, Homo sapiens
  misc_RNA (1)...(19): siRNA sense strand
guccagccuucagaaauua

SEQ ID NO: 2013090 - RNA, 19 nt, Homo sapiens
  misc_RNA (1)...(19): siRNA sense strand
caaccgggacuacaagauu

SEQ ID NO: 2013091 - RNA, 19 nt, Homo sapiens
  misc_RNA (1)...(19): siRNA sense strand
aaacuugcuuugacuacuu

SEQ ID NO: 2013092 - RNA, 19 nt, Homo sapiens
  misc_RNA (1)...(19): siRNA sense strand
uaaagccaauccagucaau

SEQ ID NO: 2013093 - RNA, 19 nt, Homo sapiens
  misc_RNA (1)...(19): siRNA sense strand
cauauugccucaguagaga

SEQ ID NO: 2013094 - RNA, 19 nt, Homo sapiens
  misc_RNA (1)...(19): siRNA sense strand
ugcaagaacuucagaacug

SEQ ID NO: 2013095 - RNA, 19 nt, Homo sapiens
  misc_RNA (1)...(19): siRNA sense strand
ggaaagagaagagcucaag

SEQ ID NO: 2013096 - RNA, 19 nt, Homo sapiens
  misc_RNA (1)...(19): siRNA sense strand
ucagauccaugagcauauu

SEQ ID NO: 2013097 - RNA, 19 nt, Homo sapiens
  misc_RNA (1)...(19): siRNA sense strand
ggccaaagcaauaacaguu

SEQ ID NO: 2013098 - RNA, 19 nt, Homo sapiens
  misc_RNA (1)...(19): siRNA sense strand
gccaugauauuuacaacuc

SEQ ID NO: 2013099 - RNA, 19 nt, Homo sapiens
  misc_RNA (1)...(19): siRNA sense strand
aaagagaagagcucaaguu

SEQ ID NO: 2013100 - RNA, 19 nt, Homo sapiens
  misc_RNA (1)...(19): siRNA sense strand
ggaaauugucagaaggaaa

SEQ ID NO: 2013101 - RNA, 19 nt, Homo sapiens
  misc_RNA (1)...(19): siRNA sense strand
ccuggaggaugaacauuug

SEQ ID NO: 2013102 - RNA, 19 nt, Homo sapiens
  misc_RNA (1)...(19): siRNA sense strand
cuucagaacugugcauuuc

SEQ ID NO: 2013103 - RNA, 19 nt, Homo sapiens
  misc_RNA (1)...(19): siRNA sense strand
ggucgaacaaguaaaauua

SEQ ID NO: 2013104 - RNA, 19 nt, Homo sapiens
  misc_RNA (1)...(19): siRNA sense strand
uuacucaguucuuggaaug

SEQ ID NO: 2013105 - RNA, 19 nt, Homo sapiens
  misc_RNA (1)...(19): siRNA sense strand
agagagguguggccaguug

SEQ ID NO: 2013106 - RNA, 19 nt, Homo sapiens
  misc_RNA (1)...(19): siRNA sense strand
ggcuuucugucaaugauuu

SEQ ID NO: 2013107 - RNA, 19 nt, Homo sapiens
  misc_RNA (1)...(19): siRNA sense strand
caagauuugugaaacuuac

SEQ ID NO: 2013108 - RNA, 19 nt, Homo sapiens
  misc_RNA (1)...(19): siRNA sense strand
gagaaacuugcuuugacua

SEQ ID NO: 2013109 - RNA, 19 nt, Homo sapiens
  misc_RNA (1)...(19): siRNA sense strand
caggaacacuguaucuuac

SEQ ID NO: 2013110 - RNA, 19 nt, Homo sapiens
  misc_RNA (1)...(19): siRNA sense strand
gaaacuugcuuugacuacu

SEQ ID NO: 2013111 - RNA, 19 nt, Homo sapiens
  misc_RNA (1)...(19): siRNA sense strand
uagagaaacuugcuuugac

SEQ ID NO: 2013112 - RNA, 19 nt, Homo sapiens
  misc_RNA (1)...(19): siRNA sense strand
gauuucaguuuguuggaau

SEQ ID NO: 2013113 - RNA, 19 nt, Homo sapiens
  misc_RNA (1)...(19): siRNA sense strand
ucccaguucuuuccuacua

SEQ ID NO: 2013114 - RNA, 19 nt, Homo sapiens
  misc_RNA (1)...(19): siRNA sense strand
aaggaagucucaccagugu

SEQ ID NO: 2013115 - RNA, 19 nt, Homo sapiens
  misc_RNA (1)...(19): siRNA sense strand
gauaaggaggcugccauuu

SEQ ID NO: 2013116 - RNA, 19 nt, Homo sapiens
  misc_RNA (1)...(19): siRNA sense strand
aaccgggacuacaagauuu

SEQ ID NO: 2013117 - RNA, 19 nt, Homo sapiens
  misc_RNA (1)...(19): siRNA sense strand
gaaaaggauuggaucucuu

SEQ ID NO: 2013118 - RNA, 19 nt, Homo sapiens
  misc_RNA (1)...(19): siRNA sense strand
ggaaaagguuaugaaaaug

SEQ ID NO: 2013119 - RNA, 19 nt, Homo sapiens
  misc_RNA (1)...(19): siRNA sense strand
ugaucucgcugaggaauau

SEQ ID NO: 2013120 - RNA, 19 nt, Homo sapiens
  misc_RNA (1)...(19): siRNA sense strand
guaaaugaugcucuucgaa

SEQ ID NO: 2013121 - RNA, 19 nt, Homo sapiens
  misc_RNA (1)...(19): siRNA sense strand
aagcauuucuucuucagau

SEQ ID NO: 2013122 - RNA, 19 nt, Homo sapiens
  misc_RNA (1)...(19): siRNA sense strand
uauggaugcugcagucuuc

SEQ ID NO: 2013123 - RNA, 19 nt, Homo sapiens
  misc_RNA (1)...(19): siRNA sense strand
gagaaagagauugccauga

SEQ ID NO: 2013124 - RNA, 19 nt, Homo sapiens
  misc_RNA (1)...(19): siRNA sense strand
accaaggaauuguuacauu

SEQ ID NO: 2013125 - RNA, 19 nt, Homo sapiens
  misc_RNA (1)...(19): siRNA sense strand
cuucuuggccaaagcaaua

SEQ ID NO: 2013126 - RNA, 19 nt, Homo sapiens
  misc_RNA (1)...(19): siRNA sense strand
ucaguuuguuggaauugaa

SEQ ID NO: 2013127 - RNA, 19 nt, Homo sapiens
  misc_RNA (1)...(19): siRNA sense strand
auaaggaggcugccauuug

SEQ ID NO: 2013128 - RNA, 19 nt, Homo sapiens
  misc_RNA (1)...(19): siRNA sense strand
uuuaucgacucucaucaaa

SEQ ID NO: 2013129 - RNA, 19 nt, Homo sapiens
  misc_RNA (1)...(19): siRNA sense strand
gugaauaugcagaagaguu

SEQ ID NO: 2013130 - RNA, 19 nt, Homo sapiens
  misc_RNA (1)...(19): siRNA sense strand
cuaggcagucuguauuuaa

SEQ ID NO: 2013131 - RNA, 19 nt, Homo sapiens
  misc_RNA (1)...(19): siRNA sense strand
aucaaaggauucaugguuu

SEQ ID NO: 2013132 - RNA, 19 nt, Homo sapiens
  misc_RNA (1)...(19): siRNA sense strand
aaagagauugccaugauau

SEQ ID NO: 2013133 - RNA, 19 nt, Homo sapiens
  misc_RNA (1)...(19): siRNA sense strand
ucagaacugugcauuucau

SEQ ID NO: 2013134 - RNA, 19 nt, Homo sapiens
  misc_RNA (1)...(19): siRNA sense strand
agagauugccaugauauuu

SEQ ID NO: 2013135 - RNA, 19 nt, Homo sapiens
  misc_RNA (1)...(19): siRNA sense strand
ccucaccaaggaauuguua

SEQ ID NO: 2013136 - RNA, 19 nt, Homo sapiens
  misc_RNA (1)...(19): siRNA sense strand
uaggcagucuguauuuaau

SEQ ID NO: 2013137 - RNA, 19 nt, Homo sapiens
  misc_RNA (1)...(19): siRNA sense strand
gaagucucaccaguguuua

SEQ ID NO: 2013138 - RNA, 19 nt, Homo sapiens
  misc_RNA (1)...(19): siRNA sense strand
cagaaauuauuggaaguca

SEQ ID NO: 2013139 - RNA, 19 nt, Homo sapiens
  misc_RNA (1)...(19): siRNA sense strand
gcugccauuugucgaugua

SEQ ID NO: 2013140 - RNA, 19 nt, Homo sapiens
  misc_RNA (1)...(19): siRNA sense strand
ccaccauauugccucagua

SEQ ID NO: 2013141 - RNA, 19 nt, Homo sapiens
  misc_RNA (1)...(19): siRNA sense strand
auagcaagcaaaccaauaa

SEQ ID NO: 2013142 - RNA, 19 nt, Homo sapiens
  misc_RNA (1)...(19): siRNA sense strand
aagagaagagcucaaguug

SEQ ID NO: 2013143 - RNA, 19 nt, Homo sapiens
  misc_RNA (1)...(19): siRNA sense strand
gaaagagaagagcucaagu

SEQ ID NO: 2013144 - RNA, 19 nt, Homo sapiens
  misc_RNA (1)...(19): siRNA sense strand
caccaguguuuacucaguu

SEQ ID NO: 2013145 - RNA, 19 nt, Homo sapiens
  misc_RNA (1)...(19): siRNA sense strand
ggccaaaacugaaugcaau

SEQ ID NO: 2013146 - RNA, 19 nt, Homo sapiens
  misc_RNA (1)...(19): siRNA sense strand
gaagucaauggcacuaaag

SEQ ID NO: 2013147 - RNA, 19 nt, Homo sapiens
  misc_RNA (1)...(19): siRNA sense strand
ccucaaaacuucccugugu

SEQ ID NO: 2013148 - RNA, 19 nt, Homo sapiens
  misc_RNA (1)...(19): siRNA sense strand
ggaacauguaccaucaauu

SEQ ID NO: 2013149 - RNA, 19 nt, Homo sapiens
  misc_RNA (1)...(19): siRNA sense strand
guggucagcuuagaguaug

SEQ ID NO: 2013150 - RNA, 19 nt, Homo sapiens
  misc_RNA (1)...(19): siRNA sense strand
cguaaaugaugcucuucga

SEQ ID NO: 2013151 - RNA, 19 nt, Homo sapiens
  misc_RNA (1)...(19): siRNA sense strand
agacagauguggccaauua

SEQ ID NO: 2013152 - RNA, 19 nt, Homo sapiens
  misc_RNA (1)...(19): siRNA sense strand
gaaaugagaacaagcagua

SEQ ID NO: 2013153 - RNA, 19 nt, Homo sapiens
  misc_RNA (1)...(19): siRNA sense strand
gaaaguaucugugagaaca

SEQ ID NO: 2013154 - RNA, 19 nt, Homo sapiens
  misc_RNA (1)...(19): siRNA sense strand
uaaugucacuucucaguua

SEQ ID NO: 2013155 - RNA, 19 nt, Homo sapiens
  misc_RNA (1)...(19): siRNA sense strand
gcaugacgcuaaagaaauu

SEQ ID NO: 2013156 - RNA, 19 nt, Homo sapiens
  misc_RNA (1)...(19): siRNA sense strand
acaaauugcuugaugcaua

SEQ ID NO: 2013157 - RNA, 19 nt, Homo sapiens
  misc_RNA (1)...(19): siRNA sense strand
ggucaacacuguagaugaa

SEQ ID NO: 2013158 - RNA, 19 nt, Homo sapiens
  misc_RNA (1)...(19): siRNA sense strand
gagaacaaauugcuugaug

SEQ ID NO: 2013159 - RNA, 19 nt, Homo sapiens
  misc_RNA (1)...(19): siRNA sense strand
uagcagaucuucgagcuua

SEQ ID NO: 2013160 - RNA, 19 nt, Homo sapiens
  misc_RNA (1)...(19): siRNA sense strand
gaacaggauugacuuacug

SEQ ID NO: 2013161 - RNA, 19 nt, Homo sapiens
  misc_RNA (1)...(19): siRNA sense strand
gagaguaaaggaugcauua

SEQ ID NO: 2013162 - RNA, 19 nt, Homo sapiens
  misc_RNA (1)...(19): siRNA sense strand
ggaacgaauugaagaaaug

SEQ ID NO: 2013163 - RNA, 19 nt, Homo sapiens
  misc_RNA (1)...(19): siRNA sense strand
gaaaugagcaaaguaagaa

SEQ ID NO: 2013164 - RNA, 19 nt, Homo sapiens
  misc_RNA (1)...(19): siRNA sense strand
gcagaguauuccaucuuua

SEQ ID NO: 2013165 - RNA, 19 nt, Homo sapiens
  misc_RNA (1)...(19): siRNA sense strand
gauccuacguuacacauga

SEQ ID NO: 2013166 - RNA, 19 nt, Homo sapiens
  misc_RNA (1)...(19): siRNA sense strand
gacccuagcugaaacagaa

SEQ ID NO: 2013167 - RNA, 19 nt, Homo sapiens
  misc_RNA (1)...(19): siRNA sense strand
ggaagauccugugauauug

SEQ ID NO: 2013168 - RNA, 19 nt, Homo sapiens
  misc_RNA (1)...(19): siRNA sense strand
aaaggaagauguauccauu

SEQ ID NO: 2013169 - RNA, 19 nt, Homo sapiens
  misc_RNA (1)...(19): siRNA sense strand
ccaauuagauagugcuuug

SEQ ID NO: 2013170 - RNA, 19 nt, Homo sapiens
  misc_RNA (1)...(19): siRNA sense strand
aaagaaaucucuggaguug

SEQ ID NO: 2013171 - RNA, 19 nt, Homo sapiens
  misc_RNA (1)...(19): siRNA sense strand
ccaaaccagucuaauacua

SEQ ID NO: 2013172 - RNA, 19 nt, Homo sapiens
  misc_RNA (1)...(19): siRNA sense strand
ggagaagaauaaaucaguu

SEQ ID NO: 2013173 - RNA, 19 nt, Homo sapiens
  misc_RNA (1)...(19): siRNA sense strand
guggauaguugcucaguaa

SEQ ID NO: 2013174 - RNA, 19 nt, Homo sapiens
  misc_RNA (1)...(19): siRNA sense strand
gaagaucguuuggaaagga

SEQ ID NO: 2013175 - RNA, 19 nt, Homo sapiens
  misc_RNA (1)...(19): siRNA sense strand
agaaaucucuggaguugaa

SEQ ID NO: 2013176 - RNA, 19 nt, Homo sapiens
  misc_RNA (1)...(19): siRNA sense strand
ggacgaaucacuuuacaga

SEQ ID NO: 2013177 - RNA, 19 nt, Homo sapiens
  misc_RNA (1)...(19): siRNA sense strand
gaagaaaguaucugugaga

SEQ ID NO: 2013178 - RNA, 19 nt, Homo sapiens
  misc_RNA (1)...(19): siRNA sense strand
gagaagacguucauaucau

SEQ ID NO: 2013179 - RNA, 19 nt, Homo sapiens
  misc_RNA (1)...(19): siRNA sense strand
ggaaaggauuaaucgagaa

SEQ ID NO: 2013180 - RNA, 19 nt, Homo sapiens
  misc_RNA (1)...(19): siRNA sense strand
caaauugcuugaugcauau

SEQ ID NO: 2013181 - RNA, 19 nt, Homo sapiens
  misc_RNA (1)...(19): siRNA sense strand
aaagagagcacauguagaa

SEQ ID NO: 2013182 - RNA, 19 nt, Homo sapiens
  misc_RNA (1)...(19): siRNA sense strand
caaauggagugaagaaagu

SEQ ID NO: 2013183 - RNA, 19 nt, Homo sapiens
  misc_RNA (1)...(19): siRNA sense strand
ggacacagacagagaaaga

SEQ ID NO: 2013184 - RNA, 19 nt, Homo sapiens
  misc_RNA (1)...(19): siRNA sense strand
gaagacaccaauugagaaa

SEQ ID NO: 2013185 - RNA, 19 nt, Homo sapiens
  misc_RNA (1)...(19): siRNA sense strand
gauaaagaagcucaacuaa

SEQ ID NO: 2013186 - RNA, 19 nt, Homo sapiens
  misc_RNA (1)...(19): siRNA sense strand
gaagauguauccauuucuc

SEQ ID NO: 2013187 - RNA, 19 nt, Homo sapiens
  misc_RNA (1)...(19): siRNA sense strand
ggaaaugagcaaaguaaga

SEQ ID NO: 2013188 - RNA, 19 nt, Homo sapiens
  misc_RNA (1)...(19): siRNA sense strand
guaaugauaucucggucaa

SEQ ID NO: 2013189 - RNA, 19 nt, Homo sapiens
  misc_RNA (1)...(19): siRNA sense strand
gacucuagauccuacguua

SEQ ID NO: 2013190 - RNA, 19 nt, Homo sapiens
  misc_RNA (1)...(19): siRNA sense strand
guaagaagacaccaauuga

SEQ ID NO: 2013191 - RNA, 19 nt, Homo sapiens
  misc_RNA (1)...(19): siRNA sense strand
aaagcaugcucgacacaua

SEQ ID NO: 2013192 - RNA, 19 nt, Homo sapiens
  misc_RNA (1)...(19): siRNA sense strand
ugagagaaaugaaucuguu

SEQ ID NO: 2013193 - RNA, 19 nt, Homo sapiens
  misc_RNA (1)...(19): siRNA sense strand
gagagcacauguagaagau

SEQ ID NO: 2013194 - RNA, 19 nt, Homo sapiens
  misc_RNA (1)...(19): siRNA sense strand
ccacagaaccugaaauaca

SEQ ID NO: 2013195 - RNA, 19 nt, Homo sapiens
  misc_RNA (1)...(19): siRNA sense strand
uacaaacucucagaugaua

SEQ ID NO: 2013196 - RNA, 19 nt, Homo sapiens
  misc_RNA (1)...(19): siRNA sense strand
gcaguuaccugagaggaau

SEQ ID NO: 2013197 - RNA, 19 nt, Homo sapiens
  misc_RNA (1)...(19): siRNA sense strand
ucaccaaaccagucuaaua

SEQ ID NO: 2013198 - RNA, 19 nt, Homo sapiens
  misc_RNA (1)...(19): siRNA sense strand
gaagauggagguucaagau

SEQ ID NO: 2013199 - RNA, 19 nt, Homo sapiens
  misc_RNA (1)...(19): siRNA sense strand
guaaugcuauaacaucaug

SEQ ID NO: 2013200 - RNA, 19 nt, Homo sapiens
  misc_RNA (1)...(19): siRNA sense strand
gaagaaaugagaacaagca

SEQ ID NO: 2013201 - RNA, 19 nt, Homo sapiens
  misc_RNA (1)...(19): siRNA sense strand
ugaagugaaugauuugaga

SEQ ID NO: 2013202 - RNA, 19 nt, Homo sapiens
  misc_RNA (1)...(19): siRNA sense strand
ccaaucaaauucuuguaga

SEQ ID NO: 2013203 - RNA, 19 nt, Homo sapiens
  misc_RNA (1)...(19): siRNA sense strand
gauggagguucaagaucua

SEQ ID NO: 2013204 - RNA, 19 nt, Homo sapiens
  misc_RNA (1)...(19): siRNA sense strand
cuaaagacccuaaggaguu

SEQ ID NO: 2013205 - RNA, 19 nt, Homo sapiens
  misc_RNA (1)...(19): siRNA sense strand
ggauuuagucaucugcuua

SEQ ID NO: 2013206 - RNA, 19 nt, Homo sapiens
  misc_RNA (1)...(19): siRNA sense strand
gagagaaaugaaucuguua

SEQ ID NO: 2013207 - RNA, 19 nt, Homo sapiens
  misc_RNA (1)...(19): siRNA sense strand
cuuggaagauccugugaua

SEQ ID NO: 2013208 - RNA, 19 nt, Homo sapiens
  misc_RNA (1)...(19): siRNA sense strand
agaagacguucauaucauu

SEQ ID NO: 2013209 - RNA, 19 nt, Homo sapiens
  misc_RNA (1)...(19): siRNA sense strand
gaguaaaggaugcauuaaa

SEQ ID NO: 2013210 - RNA, 19 nt, Homo sapiens
  misc_RNA (1)...(19): siRNA sense strand
uaaaucaguuagcuacgaa

SEQ ID NO: 2013211 - RNA, 19 nt, Homo sapiens
  misc_RNA (1)...(19): siRNA sense strand
caacguaccaauccaagaa

SEQ ID NO: 2013212 - RNA, 19 nt, Homo sapiens
  misc_RNA (1)...(19): siRNA sense strand
guugaagauuggaagauaa

SEQ ID NO: 2013213 - RNA, 19 nt, Homo sapiens
  misc_RNA (1)...(19): siRNA sense strand
ccaauucgauuugauauac

SEQ ID NO: 2013214 - RNA, 19 nt, Homo sapiens
  misc_RNA (1)...(19): siRNA sense strand
ugaaauacagcaagaaaug

SEQ ID NO: 2013215 - RNA, 19 nt, Homo sapiens
  misc_RNA (1)...(19): siRNA sense strand
gaacagccugggagaagaa

SEQ ID NO: 2013216 - RNA, 19 nt, Homo sapiens
  misc_RNA (1)...(19): siRNA sense strand
aaagagagauuaugcuaac

SEQ ID NO: 2013217 - RNA, 19 nt, Homo sapiens
  misc_RNA (1)...(19): siRNA sense strand
aacagaagcuggaggcaaa

SEQ ID NO: 2013218 - RNA, 19 nt, Homo sapiens
  misc_RNA (1)...(19): siRNA sense strand
aaagaacacaggagaguaa

SEQ ID NO: 2013219 - RNA, 19 nt, Homo sapiens
  misc_RNA (1)...(19): siRNA sense strand
uaagguuucugaaguauac

SEQ ID NO: 2013220 - RNA, 19 nt, Homo sapiens
  misc_RNA (1)...(19): siRNA sense strand
ggacaccucaaauauaaau

SEQ ID NO: 2013221 - RNA, 19 nt, Homo sapiens
  misc_RNA (1)...(19): siRNA sense strand
ucaagcaaguagaacauga

SEQ ID NO: 2013222 - RNA, 19 nt, Homo sapiens
  misc_RNA (1)...(19): siRNA sense strand
gagaacaagcaguaaagaa

SEQ ID NO: 2013223 - RNA, 19 nt, Homo sapiens
  misc_RNA (1)...(19): siRNA sense strand
ccugugauauugucuaaga

SEQ ID NO: 2013224 - RNA, 19 nt, Homo sapiens
  misc_RNA (1)...(19): siRNA sense strand
ggaacaggauugacuuacu

SEQ ID NO: 2013225 - RNA, 19 nt, Homo sapiens
  misc_RNA (1)...(19): siRNA sense strand
gaucuaaacaaggaaauga

SEQ ID NO: 2013226 - RNA, 19 nt, Homo sapiens
  misc_RNA (1)...(19): siRNA sense strand
ccaaagagagcacauguag

SEQ ID NO: 2013227 - RNA, 19 nt, Homo sapiens
  misc_RNA (1)...(19): siRNA sense strand
ucaugugucuuuaaaggaa

SEQ ID NO: 2013228 - RNA, 19 nt, Homo sapiens
  misc_RNA (1)...(19): siRNA sense strand
cuagaugacucggaagaaa

SEQ ID NO: 2013229 - RNA, 19 nt, Homo sapiens
  misc_RNA (1)...(19): siRNA sense strand
gaacaaauugcuugaugca

SEQ ID NO: 2013230 - RNA, 19 nt, Homo sapiens
  misc_RNA (1)...(19): siRNA sense strand
gaguaugagucccuuggaa

SEQ ID NO: 2013231 - RNA, 19 nt, Homo sapiens
  misc_RNA (1)...(19): siRNA sense strand
caaacucucagaugauaaa

SEQ ID NO: 2013232 - RNA, 19 nt, Homo sapiens
  misc_RNA (1)...(19): siRNA sense strand
cuuacaaacucucagauga

SEQ ID NO: 2013233 - RNA, 19 nt, Homo sapiens
  misc_RNA (1)...(19): siRNA sense strand
gaacgaauugaagaaauga

SEQ ID NO: 2013234 - RNA, 19 nt, Homo sapiens
  misc_RNA (1)...(19): siRNA sense strand
uggaagauccugugauauu

SEQ ID NO: 2013235 - RNA, 19 nt, Homo sapiens
  misc_RNA (1)...(19): siRNA sense strand
aaauaucccucacacacaa

SEQ ID NO: 2013236 - RNA, 19 nt, Homo sapiens
  misc_RNA (1)...(19): siRNA sense strand
agaacaagcaguaaagaaa

SEQ ID NO: 2013237 - RNA, 19 nt, Homo sapiens
  misc_RNA (1)...(19): siRNA sense strand
gcgcaccucugcaaaucuu

SEQ ID NO: 2013238 - RNA, 19 nt, Homo sapiens
  misc_RNA (1)...(19): siRNA sense strand
agaagaagcauuugagaau

SEQ ID NO: 2013239 - RNA, 19 nt, Homo sapiens
  misc_RNA (1)...(19): siRNA sense strand
acucucagaugauaaagaa

SEQ ID NO: 2013240 - RNA, 19 nt, Homo sapiens
  misc_RNA (1)...(19): siRNA sense strand
gcaccacucuuugccugaa

SEQ ID NO: 2013241 - RNA, 19 nt, Homo sapiens
  misc_RNA (1)...(19): siRNA sense strand
gcaguccaauucgauuuga

SEQ ID NO: 2013242 - RNA, 19 nt, Homo sapiens
  misc_RNA (1)...(19): siRNA sense strand
ugauaaagaagcucaacua

SEQ ID NO: 2013243 - RNA, 19 nt, Homo sapiens
  misc_RNA (1)...(19): siRNA sense strand
ugagaaugcuuacaaacuc

SEQ ID NO: 2013244 - RNA, 19 nt, Homo sapiens
  misc_RNA (1)...(19): siRNA sense strand
gaaauacagcaagaaaugu

SEQ ID NO: 2013245 - RNA, 19 nt, Homo sapiens
  misc_RNA (1)...(19): siRNA sense strand
uaaaucaaguacuccaaca

SEQ ID NO: 2013246 - RNA, 19 nt, Homo sapiens
  misc_RNA (1)...(19): siRNA sense strand
gaucuucgagcuuauuaug

SEQ ID NO: 2013247 - RNA, 19 nt, Homo sapiens
  misc_RNA (1)...(19): siRNA sense strand
gaaaguaggaccaguucca

SEQ ID NO: 2013248 - RNA, 19 nt, Homo sapiens
  misc_RNA (1)...(19): siRNA sense strand
gaaaugaaucuguuaucca

SEQ ID NO: 2013249 - RNA, 19 nt, Homo sapiens
  misc_RNA (1)...(19): siRNA sense strand
gugaagaaaguaucuguga

SEQ ID NO: 2013250 - RNA, 19 nt, Homo sapiens
  misc_RNA (1)...(19): siRNA sense strand
cgaaucacuuuacagacaa

SEQ ID NO: 2013251 - RNA, 19 nt, Homo sapiens
  misc_RNA (1)...(19): siRNA sense strand
gcagaaaccugguagcaau

SEQ ID NO: 2013252 - RNA, 19 nt, Homo sapiens
  misc_RNA (1)...(19): siRNA sense strand
ccaauuggauucucagauu

SEQ ID NO: 2013253 - RNA, 19 nt, Homo sapiens
  misc_RNA (1)...(19): siRNA sense strand
agaagaaacugaaacguau

SEQ ID NO: 2013254 - RNA, 19 nt, Homo sapiens
  misc_RNA (1)...(19): siRNA sense strand
gaccuagaaugcagagaaa

SEQ ID NO: 2013255 - RNA, 19 nt, Homo sapiens
  misc_RNA (1)...(19): siRNA sense strand
gcaggagacagccuuauug

SEQ ID NO: 2013256 - RNA, 19 nt, Homo sapiens
  misc_RNA (1)...(19): siRNA sense strand
gaaacugaaacguaugauu

SEQ ID NO: 2013257 - RNA, 19 nt, Homo sapiens
  misc_RNA (1)...(19): siRNA sense strand
cagagaagguggcuguaga

SEQ ID NO: 2013258 - RNA, 19 nt, Homo sapiens
  misc_RNA (1)...(19): siRNA sense strand
caaggaagcagcaagaugu

SEQ ID NO: 2013259 - RNA, 19 nt, Homo sapiens
  misc_RNA (1)...(19): siRNA sense strand
gaagguggcuguagauccu

SEQ ID NO: 2013260 - RNA, 19 nt, Homo sapiens
  misc_RNA (1)...(19): siRNA sense strand
cagcaaagauaggaugaug

SEQ ID NO: 2013261 - RNA, 19 nt, Homo sapiens
  misc_RNA (1)...(19): siRNA sense strand
aagaagaaacugaaacgua

SEQ ID NO: 2013262 - RNA, 19 nt, Homo sapiens
  misc_RNA (1)...(19): siRNA sense strand
gcaaagauaggaugaugca

SEQ ID NO: 2013263 - RNA, 19 nt, Homo sapiens
  misc_RNA (1)...(19): siRNA sense strand
gaagcagcaagauguauga

SEQ ID NO: 2013264 - RNA, 19 nt, Homo sapiens
  misc_RNA (1)...(19): siRNA sense strand
aagauaggaugaugcagaa

SEQ ID NO: 2013265 - RNA, 19 nt, Homo sapiens
  misc_RNA (1)...(19): siRNA sense strand
gacgagacuuuguuaagca

SEQ ID NO: 2013266 - RNA, 19 nt, Homo sapiens
  misc_RNA (1)...(19): siRNA sense strand
guaaauuagugaaggaacu

SEQ ID NO: 2013267 - RNA, 19 nt, Homo sapiens
  misc_RNA (1)...(19): siRNA sense strand
ggaagcagcaagauguaug

SEQ ID NO: 2013268 - RNA, 19 nt, Homo sapiens
  misc_RNA (1)...(19): siRNA sense strand
gacaguccuucguaucaga

SEQ ID NO: 2013269 - RNA, 19 nt, Homo sapiens
  misc_RNA (1)...(19): siRNA sense strand
gagacgagacuuuguuaag

SEQ ID NO: 2013270 - RNA, 19 nt, Homo sapiens
  misc_RNA (1)...(19): siRNA sense strand
gaagaaacugaaacguaug

SEQ ID NO: 2013271 - RNA, 19 nt, Homo sapiens
  misc_RNA (1)...(19): siRNA sense strand
gacaggacaugcuauucca

SEQ ID NO: 2013272 - RNA, 19 nt, Homo sapiens
  misc_RNA (1)...(19): siRNA sense strand
ggagcaggagacagccuua

SEQ ID NO: 2013273 - RNA, 19 nt, Homo sapiens
  misc_RNA (1)...(19): siRNA sense strand
ggcagaggauggcccuguu

SEQ ID NO: 2013274 - RNA, 19 nt, Homo sapiens
  misc_RNA (1)...(19): siRNA sense strand
caucaaggaagcagcaaga

SEQ ID NO: 2013275 - RNA, 19 nt, Homo sapiens
  misc_RNA (1)...(19): siRNA sense strand
ucacugguuucagcaaaga

SEQ ID NO: 2013276 - RNA, 19 nt, Homo sapiens
  misc_RNA (1)...(19): siRNA sense strand
caaaagccaacaagaaauu

SEQ ID NO: 2013277 - RNA, 19 nt, Homo sapiens
  misc_RNA (1)...(19): siRNA sense strand
ccacccagccaauuggauu

SEQ ID NO: 2013278 - RNA, 19 nt, Homo sapiens
  misc_RNA (1)...(19): siRNA sense strand
ugaccuagaaugcagagaa

SEQ ID NO: 2013279 - RNA, 19 nt, Homo sapiens
  misc_RNA (1)...(19): siRNA sense strand
ggagaugaccuagaaugca

SEQ ID NO: 2013280 - RNA, 19 nt, Homo sapiens
  misc_RNA (1)...(19): siRNA sense strand
uugaugacuucacugguuu

SEQ ID NO: 2013281 - RNA, 19 nt, Homo sapiens
  misc_RNA (1)...(19): siRNA sense strand
ucagauugaugacuucacu

SEQ ID NO: 2013282 - RNA, 19 nt, Homo sapiens
  misc_RNA (1)...(19): siRNA sense strand
gcagaggauggcccuguug

SEQ ID NO: 2013283 - RNA, 19 nt, Homo sapiens
  misc_RNA (1)...(19): siRNA sense strand
ggaaacguuaccagcaguu

SEQ ID NO: 2013284 - RNA, 19 nt, Homo sapiens
  misc_RNA (1)...(19): siRNA sense strand
auugaugacuucacugguu

SEQ ID NO: 2013285 - RNA, 19 nt, Homo sapiens
  misc_RNA (1)...(19): siRNA sense strand
ggcuguagauccugaaacu

SEQ ID NO: 2013286 - RNA, 19 nt, Homo sapiens
  misc_RNA (1)...(19): siRNA sense strand
gaaaccugguagcaaugca

SEQ ID NO: 2013287 - RNA, 19 nt, Homo sapiens
  misc_RNA (1)...(19): siRNA sense strand
gcucugccauguccaaagc

SEQ ID NO: 2013288 - RNA, 19 nt, Homo sapiens
  misc_RNA (1)...(19): siRNA sense strand
ucaaggaagcagcaagaug

SEQ ID NO: 2013289 - RNA, 19 nt, Homo sapiens
  misc_RNA (1)...(19): siRNA sense strand
gauaggaugaugcagaaac

SEQ ID NO: 2013290 - RNA, 19 nt, Homo sapiens
  misc_RNA (1)...(19): siRNA sense strand
gugacaguccuucguauca

SEQ ID NO: 2013291 - RNA, 19 nt, Homo sapiens
  misc_RNA (1)...(19): siRNA sense strand
gaaggagugcaaggaccua

SEQ ID NO: 2013292 - RNA, 19 nt, Homo sapiens
  misc_RNA (1)...(19): siRNA sense strand
ccagccaauuggauucuca

SEQ ID NO: 2013293 - RNA, 19 nt, Homo sapiens
  misc_RNA (1)...(19): siRNA sense strand
uggauucucagauugauga

SEQ ID NO: 2013294 - RNA, 19 nt, Homo sapiens
  misc_RNA (1)...(19): siRNA sense strand
ccugugggaggaaacguua

SEQ ID NO: 2013295 - RNA, 19 nt, Homo sapiens
  misc_RNA (1)...(19): siRNA sense strand
acugaaacguaugauuuga

SEQ ID NO: 2013296 - RNA, 19 nt, Homo sapiens
  misc_RNA (1)...(19): siRNA sense strand
cuucacugguuucagcaaa

SEQ ID NO: 2013297 - RNA, 19 nt, Homo sapiens
  misc_RNA (1)...(19): siRNA sense strand
aagaaacugaaacguauga

SEQ ID NO: 2013298 - RNA, 19 nt, Homo sapiens
  misc_RNA (1)...(19): siRNA sense strand
agacgagacuuuguuaagc

SEQ ID NO: 2013299 - RNA, 19 nt, Homo sapiens
  misc_RNA (1)...(19): siRNA sense strand
uaugagacgagacuuuguu

SEQ ID NO: 2013300 - RNA, 19 nt, Homo sapiens
  misc_RNA (1)...(19): siRNA sense strand
uaugacaggacaugcuauu

SEQ ID NO: 2013301 - RNA, 19 nt, Homo sapiens
  misc_RNA (1)...(19): siRNA sense strand
cucuggagaugaccuagaa

SEQ ID NO: 2013302 - RNA, 19 nt, Homo sapiens
  misc_RNA (1)...(19): siRNA sense strand
auucucagauugaugacuu

SEQ ID NO: 2013303 - RNA, 19 nt, Homo sapiens
  misc_RNA (1)...(19): siRNA sense strand
ugagacgagacuuuguuaa

SEQ ID NO: 2013304 - RNA, 19 nt, Homo sapiens
  misc_RNA (1)...(19): siRNA sense strand
ggagugcaaggaccuacug

SEQ ID NO: 2013305 - RNA, 19 nt, Homo sapiens
  misc_RNA (1)...(19): siRNA sense strand
aaugugacaguccuucgua

SEQ ID NO: 2013306 - RNA, 19 nt, Homo sapiens
  misc_RNA (1)...(19): siRNA sense strand
caccuuaagaagaaacuga

SEQ ID NO: 2013307 - RNA, 19 nt, Homo sapiens
  misc_RNA (1)...(19): siRNA sense strand
gcuauuccacccagccaau

SEQ ID NO: 2013308 - RNA, 19 nt, Homo sapiens
  misc_RNA (1)...(19): siRNA sense strand
ggaacuccgaugcguugga

SEQ ID NO: 2013309 - RNA, 19 nt, Homo sapiens
  misc_RNA (1)...(19): siRNA sense strand
ccuagaaugcagagaaaca

SEQ ID NO: 2013310 - RNA, 19 nt, Homo sapiens
  misc_RNA (1)...(19): siRNA sense strand
uguaugagacgagacuuug

SEQ ID NO: 2013311 - RNA, 19 nt, Homo sapiens
  misc_RNA (1)...(19): siRNA sense strand
gaaugugacaguccuucgu

SEQ ID NO: 2013312 - RNA, 19 nt, Homo sapiens
  misc_RNA (1)...(19): siRNA sense strand
gagcaggagacagccuuau

SEQ ID NO: 2013313 - RNA, 19 nt, Homo sapiens
  misc_RNA (1)...(19): siRNA sense strand
gaccuacugcagucaggaa

SEQ ID NO: 2013314 - RNA, 19 nt, Homo sapiens
  misc_RNA (1)...(19): siRNA sense strand
gcaagaagaagaagaagaa

SEQ ID NO: 2013315 - RNA, 19 nt, Homo sapiens
  misc_RNA (1)...(19): siRNA sense strand
agaagaagaagaagaagua

SEQ ID NO: 2013316 - RNA, 19 nt, Homo sapiens
  misc_RNA (1)...(19): siRNA sense strand
ggaguugcaugcuaagauc

SEQ ID NO: 2013317 - RNA, 19 nt, Homo sapiens
  misc_RNA (1)...(19): siRNA sense strand
gggcagugcugaucccaau

SEQ ID NO: 2013318 - RNA, 19 nt, Homo sapiens
  misc_RNA (1)...(19): siRNA sense strand
gaagaagaagaagaaguaa

SEQ ID NO: 2013319 - RNA, 19 nt, Homo sapiens
  misc_RNA (1)...(19): siRNA sense strand
gagccggcaugguccaaga

SEQ ID NO: 2013320 - RNA, 19 nt, Homo sapiens
  misc_RNA (1)...(19): siRNA sense strand
gggaagcguuggagucucu

SEQ ID NO: 2013321 - RNA, 19 nt, Homo sapiens
  misc_RNA (1)...(19): siRNA sense strand
gaucccaauucgagagguu

SEQ ID NO: 2013322 - RNA, 19 nt, Homo sapiens
  misc_RNA (1)...(19): siRNA sense strand
gaaucggacaucuccauug

SEQ ID NO: 2013323 - RNA, 19 nt, Homo sapiens
  misc_RNA (1)...(19): siRNA sense strand
agaagaagaagaaguaaag

SEQ ID NO: 2013324 - RNA, 19 nt, Homo sapiens
  misc_RNA (1)...(19): siRNA sense strand
gcagugcugaucccaauuc

SEQ ID NO: 2013325 - RNA, 19 nt, Homo sapiens
  misc_RNA (1)...(19): siRNA sense strand
gccuugaccucacuacauc

SEQ ID NO: 2013326 - RNA, 19 nt, Homo sapiens
  misc_RNA (1)...(19): siRNA sense strand
ucccaaagccucagagauc

SEQ ID NO: 2013327 - RNA, 19 nt, Homo sapiens
  misc_RNA (1)...(19): siRNA sense strand
gguccuccaugagaugcua

SEQ ID NO: 2013328 - RNA, 19 nt, Homo sapiens
  misc_RNA (1)...(19): siRNA sense strand
uggagucucugucccaaag

SEQ ID NO: 2013329 - RNA, 19 nt, Homo sapiens
  misc_RNA (1)...(19): siRNA sense strand
cccaaagccucagagauca

SEQ ID NO: 2013330 - RNA, 19 nt, Homo sapiens
  misc_RNA (1)...(19): siRNA sense strand
caucuccauugcacacguu

SEQ ID NO: 2013331 - RNA, 19 nt, Homo sapiens
  misc_RNA (1)...(19): siRNA sense strand
aaucggacaucuccauugc

SEQ ID NO: 2013332 - RNA, 19 nt, Homo sapiens
  misc_RNA (1)...(19): siRNA sense strand
gaagaagaagaaguaaagg

SEQ ID NO: 2013333 - RNA, 19 nt, Homo sapiens
  misc_RNA (1)...(19): siRNA sense strand
ccaauucgagagguucuga

SEQ ID NO: 2013334 - RNA, 19 nt, Homo sapiens
  misc_RNA (1)...(19): siRNA sense strand
gcgcggaggaggacuuucu

SEQ ID NO: 2013335 - RNA, 19 nt, Homo sapiens
  misc_RNA (1)...(19): siRNA sense strand
ggaauuaucugucuuaucu

SEQ ID NO: 2013336 - RNA, 19 nt, Homo sapiens
  misc_RNA (1)...(19): siRNA sense strand
guguggaucuucaauaaua

SEQ ID NO: 2013337 - RNA, 19 nt, Homo sapiens
  misc_RNA (1)...(19): siRNA sense strand
gaaauaaccuaugcggaau

SEQ ID NO: 2013338 - RNA, 19 nt, Homo sapiens
  misc_RNA (1)...(19): siRNA sense strand
ggauugguguguuucguaa

SEQ ID NO: 2013339 - RNA, 19 nt, Homo sapiens
  misc_RNA (1)...(19): siRNA sense strand
caguguggaucuucaauaa

SEQ ID NO: 2013340 - RNA, 19 nt, Homo sapiens
  misc_RNA (1)...(19): siRNA sense strand
cugcaaagauuuaccauca

SEQ ID NO: 2013341 - RNA, 19 nt, Homo sapiens
  misc_RNA (1)...(19): siRNA sense strand
gaacaggaaauaaccuaug

SEQ ID NO: 2013342 - RNA, 19 nt, Homo sapiens
  misc_RNA (1)...(19): siRNA sense strand
caaagaggcagcaacgaaa

SEQ ID NO: 2013343 - RNA, 19 nt, Homo sapiens
  misc_RNA (1)...(19): siRNA sense strand
aauaaccuaugcggaauua

SEQ ID NO: 2013344 - RNA, 19 nt, Homo sapiens
  misc_RNA (1)...(19): siRNA sense strand
ccagagaagcucauuguug

SEQ ID NO: 2013345 - RNA, 19 nt, Homo sapiens
  misc_RNA (1)...(19): siRNA sense strand
gaagaacuccagucugcuu

SEQ ID NO: 2013346 - RNA, 19 nt, Homo sapiens
  misc_RNA (1)...(19): siRNA sense strand
uaaccuaugcggaauuaaa

SEQ ID NO: 2013347 - RNA, 19 nt, Homo sapiens
  misc_RNA (1)...(19): siRNA sense strand
cagauaaugcugaacuuaa

SEQ ID NO: 2013348 - RNA, 19 nt, Homo sapiens
  misc_RNA (1)...(19): siRNA sense strand
ccaaagaggcagcaacgaa

SEQ ID NO: 2013349 - RNA, 19 nt, Homo sapiens
  misc_RNA (1)...(19): siRNA sense strand
guugggauccugggaauua

SEQ ID NO: 2013350 - RNA, 19 nt, Homo sapiens
  misc_RNA (1)...(19): siRNA sense strand
gugcagugcuacaaguaaa

SEQ ID NO: 2013351 - RNA, 19 nt, Homo sapiens
  misc_RNA (1)...(19): siRNA sense strand
gauuacauauuccaacagu

SEQ ID NO: 2013352 - RNA, 19 nt, Homo sapiens
  misc_RNA (1)...(19): siRNA sense strand
ccagucugcuuucuauaga

SEQ ID NO: 2013353 - RNA, 19 nt, Homo sapiens
  misc_RNA (1)...(19): siRNA sense strand
cuuaauggccucuguggua

SEQ ID NO: 2013354 - RNA, 19 nt, Homo sapiens
  misc_RNA (1)...(19): siRNA sense strand
uuaauggccucugugguaa

SEQ ID NO: 2013355 - RNA, 19 nt, Homo sapiens
  misc_RNA (1)...(19): siRNA sense strand
uaacagcagucaucaucca

SEQ ID NO: 2013356 - RNA, 19 nt, Homo sapiens
  misc_RNA (1)...(19): siRNA sense strand
aggaguggauuacauauuc

SEQ ID NO: 2013357 - RNA, 19 nt, Homo sapiens
  misc_RNA (1)...(19): siRNA sense strand
caacugaacaggaaauaac

SEQ ID NO: 2013358 - RNA, 19 nt, Homo sapiens
  misc_RNA (1)...(19): siRNA sense strand
gggugacaaugaaugguuu

SEQ ID NO: 2013359 - RNA, 19 nt, Homo sapiens
  misc_RNA (1)...(19): siRNA sense strand
gcaacugaacaggaaauaa

SEQ ID NO: 2013360 - RNA, 19 nt, Homo sapiens
  misc_RNA (1)...(19): siRNA sense strand
guaaaucgacuuaaaucag

SEQ ID NO: 2013361 - RNA, 19 nt, Homo sapiens
  misc_RNA (1)...(19): siRNA sense strand
gaacuccagucugcuuucu

SEQ ID NO: 2013362 - RNA, 19 nt, Homo sapiens
  misc_RNA (1)...(19): siRNA sense strand
caaugaaugguuuggcuuu

SEQ ID NO: 2013363 - RNA, 19 nt, Homo sapiens
  misc_RNA (1)...(19): siRNA sense strand
agucugcuuucuauagaua

SEQ ID NO: 2013364 - RNA, 19 nt, Homo sapiens
  misc_RNA (1)...(19): siRNA sense strand
gaggaguggauuacauauu

SEQ ID NO: 2013365 - RNA, 19 nt, Homo sapiens
  misc_RNA (1)...(19): siRNA sense strand
aagaagaacuugggaagag

SEQ ID NO: 2013366 - RNA, 19 nt, Homo sapiens
  misc_RNA (1)...(19): siRNA sense strand
caaaaccuaucacugcaaa

SEQ ID NO: 2013367 - RNA, 19 nt, Homo sapiens
  misc_RNA (1)...(19): siRNA sense strand
cuacauugguaaggaaaga

SEQ ID NO: 2013368 - RNA, 19 nt, Homo sapiens
  misc_RNA (1)...(19): siRNA sense strand
uuuagcaacugaacaggaa

SEQ ID NO: 2013369 - RNA, 19 nt, Homo sapiens
  misc_RNA (1)...(19): siRNA sense strand
gguaaggaaagaagaacuu

SEQ ID NO: 2013370 - RNA, 19 nt, Homo sapiens
  misc_RNA (1)...(19): siRNA sense strand
ccaguguggaucuucaaua

SEQ ID NO: 2013371 - RNA, 19 nt, Homo sapiens
  misc_RNA (1)...(19): siRNA sense strand
ggauaaccaaggaguaauc

SEQ ID NO: 2013372 - RNA, 19 nt, Homo sapiens
  misc_RNA (1)...(19): siRNA sense strand
agaagaacuugggaagaga

SEQ ID NO: 2013373 - RNA, 19 nt, Homo sapiens
  misc_RNA (1)...(19): siRNA sense strand
caucauccaugggugacaa

SEQ ID NO: 2013374 - RNA, 19 nt, Homo sapiens
  misc_RNA (1)...(19): siRNA sense strand
uaaccaaggaguaaucuac

SEQ ID NO: 2013375 - RNA, 19 nt, Homo sapiens
  misc_RNA (1)...(19): siRNA sense strand
ccucauggauugguguguu

SEQ ID NO: 2013376 - RNA, 19 nt, Homo sapiens
  misc_RNA (1)...(19): siRNA sense strand
aaaccuaucacugcaaaga

SEQ ID NO: 2013377 - RNA, 19 nt, Homo sapiens
  misc_RNA (1)...(19): siRNA sense strand
guaaggaaagaagaacuug

SEQ ID NO: 2013378 - RNA, 19 nt, Homo sapiens
  misc_RNA (1)...(19): siRNA sense strand
agauaaugcugaacuuaac

SEQ ID NO: 2013379 - RNA, 19 nt, Homo sapiens
  misc_RNA (1)...(19): siRNA sense strand
acuccagucugcuuucuau

SEQ ID NO: 2013380 - RNA, 19 nt, Homo sapiens
  misc_RNA (1)...(19): siRNA sense strand
cguaacagcagucaucauc

SEQ ID NO: 2013381 - RNA, 19 nt, Homo sapiens
  misc_RNA (1)...(19): siRNA sense strand
cugaggaguggauuacaua

SEQ ID NO: 2013382 - RNA, 19 nt, Homo sapiens
  misc_RNA (1)...(19): siRNA sense strand
gagauaaaagacucagaua

SEQ ID NO: 2013383 - RNA, 19 nt, Homo sapiens
  misc_RNA (1)...(19): siRNA sense strand
agaguuugcuggccuguac

SEQ ID NO: 2013384 - RNA, 19 nt, Homo sapiens
  misc_RNA (1)...(19): siRNA sense strand
accuaucacugcaaagauu

SEQ ID NO: 2013385 - RNA, 19 nt, Homo sapiens
  misc_RNA (1)...(19): siRNA sense strand
ccugaggaguggauuacau

SEQ ID NO: 2013386 - RNA, 19 nt, Homo sapiens
  misc_RNA (1)...(19): siRNA sense strand
aaagaagaacuugggaaga

SEQ ID NO: 2013387 - RNA, 19 nt, Homo sapiens
  misc_RNA (1)...(19): siRNA sense strand
ggaaugacaaaaccuauca

SEQ ID NO: 2013388 - RNA, 19 nt, Homo sapiens
  misc_RNA (1)...(19): siRNA sense strand
auccaugggugacaaugaa

SEQ ID NO: 2013389 - RNA, 19 nt, Homo sapiens
  misc_RNA (1)...(19): siRNA sense strand
gaaaaccuaaaggcaauaa

SEQ ID NO: 2013390 - RNA, 19 nt, Homo sapiens
  misc_RNA (1)...(19): siRNA sense strand
cucauggauugguguguuu

SEQ ID NO: 2013391 - RNA, 19 nt, Homo sapiens
  misc_RNA (1)...(19): siRNA sense strand
accaucagcuccagagaag

SEQ ID NO: 2013392 - RNA, 19 nt, Homo sapiens
  misc_RNA (1)...(19): siRNA sense strand
ggcaauaaaagcuccauuu

SEQ ID NO: 2013393 - RNA, 19 nt, Homo sapiens
  misc_RNA (1)...(19): siRNA sense strand
gcagugcuacaaguaaauc

SEQ ID NO: 2013394 - RNA, 19 nt, Homo sapiens
  misc_RNA (1)...(19): siRNA sense strand
cugggaauuaucugucuua

SEQ ID NO: 2013395 - RNA, 19 nt, Homo sapiens
  misc_RNA (1)...(19): siRNA sense strand
gauccugggaauuaucugu

SEQ ID NO: 2013396 - RNA, 19 nt, Homo sapiens
  misc_RNA (1)...(19): siRNA sense strand
ccuaucacugcaaagauuu

SEQ ID NO: 2013397 - RNA, 19 nt, Homo sapiens
  misc_RNA (1)...(19): siRNA sense strand
ggaguggauuacauauucc

SEQ ID NO: 2013398 - RNA, 19 nt, Homo sapiens
  misc_RNA (1)...(19): siRNA sense strand
cuaucacugcaaagauuua

SEQ ID NO: 2013399 - RNA, 19 nt, Homo sapiens
  misc_RNA (1)...(19): siRNA sense strand
ggcuuucaaacaugagaua

SEQ ID NO: 2013400 - RNA, 19 nt, Homo sapiens
  misc_RNA (1)...(19): siRNA sense strand
cauccaugggugacaauga

SEQ ID NO: 2013401 - RNA, 19 nt, Homo sapiens
  misc_RNA (1)...(19): siRNA sense strand
ggaauuaucugucuuaucu

SEQ ID NO: 2013402 - RNA, 19 nt, Homo sapiens
  misc_RNA (1)...(19): siRNA sense strand
guguggaucuucaauaaua

SEQ ID NO: 2013403 - RNA, 19 nt, Homo sapiens
  misc_RNA (1)...(19): siRNA sense strand
gaaauaaccuaugcggaau

SEQ ID NO: 2013404 - RNA, 19 nt, Homo sapiens
  misc_RNA (1)...(19): siRNA sense strand
ggauugguguguuucguaa

SEQ ID NO: 2013405 - RNA, 19 nt, Homo sapiens
  misc_RNA (1)...(19): siRNA sense strand
caguguggaucuucaauaa

SEQ ID NO: 2013406 - RNA, 19 nt, Homo sapiens
  misc_RNA (1)...(19): siRNA sense strand
cugcaaagauuuaccauca

SEQ ID NO: 2013407 - RNA, 19 nt, Homo sapiens
  misc_RNA (1)...(19): siRNA sense strand
gaacaggaaauaaccuaug

SEQ ID NO: 2013408 - RNA, 19 nt, Homo sapiens
  misc_RNA (1)...(19): siRNA sense strand
caaagaggcagcaacgaaa

SEQ ID NO: 2013409 - RNA, 19 nt, Homo sapiens
  misc_RNA (1)...(19): siRNA sense strand
aauaaccuaugcggaauua

SEQ ID NO: 2013410 - RNA, 19 nt, Homo sapiens
  misc_RNA (1)...(19): siRNA sense strand
ccagagaagcucauuguug

SEQ ID NO: 2013411 - RNA, 19 nt, Homo sapiens
  misc_RNA (1)...(19): siRNA sense strand
gaagaacuccagucugcuu

SEQ ID NO: 2013412 - RNA, 19 nt, Homo sapiens
  misc_RNA (1)...(19): siRNA sense strand
uaaccuaugcggaauuaaa

SEQ ID NO: 2013413 - RNA, 19 nt, Homo sapiens
  misc_RNA (1)...(19): siRNA sense strand
cagauaaugcugaacuuaa

SEQ ID NO: 2013414 - RNA, 19 nt, Homo sapiens
  misc_RNA (1)...(19): siRNA sense strand
ccaaagaggcagcaacgaa

SEQ ID NO: 2013415 - RNA, 19 nt, Homo sapiens
  misc_RNA (1)...(19): siRNA sense strand
guugggauccugggaauua

SEQ ID NO: 2013416 - RNA, 19 nt, Homo sapiens
  misc_RNA (1)...(19): siRNA sense strand
gugcagugcuacaaguaaa

SEQ ID NO: 2013417 - RNA, 19 nt, Homo sapiens
  misc_RNA (1)...(19): siRNA sense strand
gauuacauauuccaacagu

SEQ ID NO: 2013418 - RNA, 19 nt, Homo sapiens
  misc_RNA (1)...(19): siRNA sense strand
ccagucugcuuucuauaga

SEQ ID NO: 2013419 - RNA, 19 nt, Homo sapiens
  misc_RNA (1)...(19): siRNA sense strand
cuuaauggccucuguggua

SEQ ID NO: 2013420 - RNA, 19 nt, Homo sapiens
  misc_RNA (1)...(19): siRNA sense strand
uuaauggccucugugguaa

SEQ ID NO: 2013421 - RNA, 19 nt, Homo sapiens
  misc_RNA (1)...(19): siRNA sense strand
uaacagcagucaucaucca

SEQ ID NO: 2013422 - RNA, 19 nt, Homo sapiens
  misc_RNA (1)...(19): siRNA sense strand
aggaguggauuacauauuc

SEQ ID NO: 2013423 - RNA, 19 nt, Homo sapiens
  misc_RNA (1)...(19): siRNA sense strand
caacugaacaggaaauaac

SEQ ID NO: 2013424 - RNA, 19 nt, Homo sapiens
  misc_RNA (1)...(19): siRNA sense strand
gggugacaaugaaugguuu

SEQ ID NO: 2013425 - RNA, 19 nt, Homo sapiens
  misc_RNA (1)...(19): siRNA sense strand
gcaacugaacaggaaauaa

SEQ ID NO: 2013426 - RNA, 19 nt, Homo sapiens
  misc_RNA (1)...(19): siRNA sense strand
guaaaucgacuuaaaucag

SEQ ID NO: 2013427 - RNA, 19 nt, Homo sapiens
  misc_RNA (1)...(19): siRNA sense strand
gaacuccagucugcuuucu

SEQ ID NO: 2013428 - RNA, 19 nt, Homo sapiens
  misc_RNA (1)...(19): siRNA sense strand
caaugaaugguuuggcuuu

SEQ ID NO: 2013429 - RNA, 19 nt, Homo sapiens
  misc_RNA (1)...(19): siRNA sense strand
agucugcuuucuauagaua

SEQ ID NO: 2013430 - RNA, 19 nt, Homo sapiens
  misc_RNA (1)...(19): siRNA sense strand
gaggaguggauuacauauu

SEQ ID NO: 2013431 - RNA, 19 nt, Homo sapiens
  misc_RNA (1)...(19): siRNA sense strand
aagaagaacuugggaagag

SEQ ID NO: 2013432 - RNA, 19 nt, Homo sapiens
  misc_RNA (1)...(19): siRNA sense strand
caaaaccuaucacugcaaa

SEQ ID NO: 2013433 - RNA, 19 nt, Homo sapiens
  misc_RNA (1)...(19): siRNA sense strand
cuacauugguaaggaaaga

SEQ ID NO: 2013434 - RNA, 19 nt, Homo sapiens
  misc_RNA (1)...(19): siRNA sense strand
uuuagcaacugaacaggaa

SEQ ID NO: 2013435 - RNA, 19 nt, Homo sapiens
  misc_RNA (1)...(19): siRNA sense strand
gguaaggaaagaagaacuu

SEQ ID NO: 2013436 - RNA, 19 nt, Homo sapiens
  misc_RNA (1)...(19): siRNA sense strand
ccaguguggaucuucaaua

SEQ ID NO: 2013437 - RNA, 19 nt, Homo sapiens
  misc_RNA (1)...(19): siRNA sense strand
ggauaaccaaggaguaauc

SEQ ID NO: 2013438 - RNA, 19 nt, Homo sapiens
  misc_RNA (1)...(19): siRNA sense strand
agaagaacuugggaagaga

SEQ ID NO: 2013439 - RNA, 19 nt, Homo sapiens
  misc_RNA (1)...(19): siRNA sense strand
caucauccaugggugacaa

SEQ ID NO: 2013440 - RNA, 19 nt, Homo sapiens
  misc_RNA (1)...(19): siRNA sense strand
uaaccaaggaguaaucuac

SEQ ID NO: 2013441 - RNA, 19 nt, Homo sapiens
  misc_RNA (1)...(19): siRNA sense strand
ccucauggauugguguguu

SEQ ID NO: 2013442 - RNA, 19 nt, Homo sapiens
  misc_RNA (1)...(19): siRNA sense strand
aaaccuaucacugcaaaga

SEQ ID NO: 2013443 - RNA, 19 nt, Homo sapiens
  misc_RNA (1)...(19): siRNA sense strand
guaaggaaagaagaacuug

SEQ ID NO: 2013444 - RNA, 19 nt, Homo sapiens
  misc_RNA (1)...(19): siRNA sense strand
agauaaugcugaacuuaac

SEQ ID NO: 2013445 - RNA, 19 nt, Homo sapiens
  misc_RNA (1)...(19): siRNA sense strand
acuccagucugcuuucuau

SEQ ID NO: 2013446 - RNA, 19 nt, Homo sapiens
  misc_RNA (1)...(19): siRNA sense strand
cguaacagcagucaucauc

SEQ ID NO: 2013447 - RNA, 19 nt, Homo sapiens
  misc_RNA (1)...(19): siRNA sense strand
cugaggaguggauuacaua

SEQ ID NO: 2013448 - RNA, 19 nt, Homo sapiens
  misc_RNA (1)...(19): siRNA sense strand
gagauaaaagacucagaua

SEQ ID NO: 2013449 - RNA, 19 nt, Homo sapiens
  misc_RNA (1)...(19): siRNA sense strand
agaguuugcuggccuguac

SEQ ID NO: 2013450 - RNA, 19 nt, Homo sapiens
  misc_RNA (1)...(19): siRNA sense strand
accuaucacugcaaagauu

SEQ ID NO: 2013451 - RNA, 19 nt, Homo sapiens
  misc_RNA (1)...(19): siRNA sense strand
ccugaggaguggauuacau

SEQ ID NO: 2013452 - RNA, 19 nt, Homo sapiens
  misc_RNA (1)...(19): siRNA sense strand
aaagaagaacuugggaaga

SEQ ID NO: 2013453 - RNA, 19 nt, Homo sapiens
  misc_RNA (1)...(19): siRNA sense strand
ggaaugacaaaaccuauca

SEQ ID NO: 2013454 - RNA, 19 nt, Homo sapiens
  misc_RNA (1)...(19): siRNA sense strand
auccaugggugacaaugaa

SEQ ID NO: 2013455 - RNA, 19 nt, Homo sapiens
  misc_RNA (1)...(19): siRNA sense strand
gaaaaccuaaaggcaauaa

SEQ ID NO: 2013456 - RNA, 19 nt, Homo sapiens
  misc_RNA (1)...(19): siRNA sense strand
cucauggauugguguguuu

SEQ ID NO: 2013457 - RNA, 19 nt, Homo sapiens
  misc_RNA (1)...(19): siRNA sense strand
accaucagcuccagagaag

SEQ ID NO: 2013458 - RNA, 19 nt, Homo sapiens
  misc_RNA (1)...(19): siRNA sense strand
ggcaauaaaagcuccauuu

SEQ ID NO: 2013459 - RNA, 19 nt, Homo sapiens
  misc_RNA (1)...(19): siRNA sense strand
gcagugcuacaaguaaauc

SEQ ID NO: 2013460 - RNA, 19 nt, Homo sapiens
  misc_RNA (1)...(19): siRNA sense strand
cugggaauuaucugucuua

SEQ ID NO: 2013461 - RNA, 19 nt, Homo sapiens
  misc_RNA (1)...(19): siRNA sense strand
gauccugggaauuaucugu

SEQ ID NO: 2013462 - RNA, 19 nt, Homo sapiens
  misc_RNA (1)...(19): siRNA sense strand
ccuaucacugcaaagauuu

SEQ ID NO: 2013463 - RNA, 19 nt, Homo sapiens
  misc_RNA (1)...(19): siRNA sense strand
ggaguggauuacauauucc

SEQ ID NO: 2013464 - RNA, 19 nt, Homo sapiens
  misc_RNA (1)...(19): siRNA sense strand
cuaucacugcaaagauuua

SEQ ID NO: 2013465 - RNA, 19 nt, Homo sapiens
  misc_RNA (1)...(19): siRNA sense strand
ggcuuucaaacaugagaua

SEQ ID NO: 2013466 - RNA, 19 nt, Homo sapiens
  misc_RNA (1)...(19): siRNA sense strand
cauccaugggugacaauga

SEQ ID NO: 2013467 - RNA, 19 nt, Homo sapiens
  misc_RNA (1)...(19): siRNA sense strand
gaagauaggcagucaaaug

SEQ ID NO: 2013468 - RNA, 19 nt, Homo sapiens
  misc_RNA (1)...(19): siRNA sense strand
ggacggcaguguuugauga

SEQ ID NO: 2013469 - RNA, 19 nt, Homo sapiens
  misc_RNA (1)...(19): siRNA sense strand
gagaguugcucaaagaaug

SEQ ID NO: 2013470 - RNA, 19 nt, Homo sapiens
  misc_RNA (1)...(19): siRNA sense strand
ucagagaguugcucaaaga

SEQ ID NO: 2013471 - RNA, 19 nt, Homo sapiens
  misc_RNA (1)...(19): siRNA sense strand
ccugugagcuucugacuug

SEQ ID NO: 2013472 - RNA, 19 nt, Homo sapiens
  misc_RNA (1)...(19): siRNA sense strand
gaacaugggccaccucaca

SEQ ID NO: 2013473 - RNA, 19 nt, Homo sapiens
  misc_RNA (1)...(19): siRNA sense strand
ucacugacuuccaaccuuu

SEQ ID NO: 2013474 - RNA, 19 nt, Homo sapiens
  misc_RNA (1)...(19): siRNA sense strand
gagaaaggcugggccaagu

SEQ ID NO: 2013475 - RNA, 19 nt, Homo sapiens
  misc_RNA (1)...(19): siRNA sense strand
cugcuggacuuguucuuua

SEQ ID NO: 2013476 - RNA, 19 nt, Homo sapiens
  misc_RNA (1)...(19): siRNA sense strand
gauaggcagucaaaugcuu

SEQ ID NO: 2013477 - RNA, 19 nt, Homo sapiens
  misc_RNA (1)...(19): siRNA sense strand
ccgaacaggugauuacguu

SEQ ID NO: 2013478 - RNA, 19 nt, Homo sapiens
  misc_RNA (1)...(19): siRNA sense strand
gaagaagaaggacaaguuc

SEQ ID NO: 2013479 - RNA, 19 nt, Homo sapiens
  misc_RNA (1)...(19): siRNA sense strand
ucgcagagaucaacuucaa

SEQ ID NO: 2013480 - RNA, 19 nt, Homo sapiens
  misc_RNA (1)...(19): siRNA sense strand
uuacucaccuugcuggaaa

SEQ ID NO: 2013481 - RNA, 19 nt, Homo sapiens
  misc_RNA (1)...(19): siRNA sense strand
ugaagaagaaggacaaguu

SEQ ID NO: 2013482 - RNA, 19 nt, Homo sapiens
  misc_RNA (1)...(19): siRNA sense strand
gagccaaggcccugagaaa

SEQ ID NO: 2013483 - RNA, 19 nt, Homo sapiens
  misc_RNA (1)...(19): siRNA sense strand
ccaaguggaacuaugcaua

SEQ ID NO: 2013484 - RNA, 19 nt, Homo sapiens
  misc_RNA (1)...(19): siRNA sense strand
caguuuggcuucaaugaug

SEQ ID NO: 2013485 - RNA, 19 nt, Homo sapiens
  misc_RNA (1)...(19): siRNA sense strand
gcagaugacagccaacuuc

SEQ ID NO: 2013486 - RNA, 19 nt, Homo sapiens
  misc_RNA (1)...(19): siRNA sense strand
caacaucaaugccccguuu

SEQ ID NO: 2013487 - RNA, 19 nt, Homo sapiens
  misc_RNA (1)...(19): siRNA sense strand
gcagagaucaacuucaaca

SEQ ID NO: 2013488 - RNA, 19 nt, Homo sapiens
  misc_RNA (1)...(19): siRNA sense strand
ugacccaccuguuccagaa

SEQ ID NO: 2013489 - RNA, 19 nt, Homo sapiens
  misc_RNA (1)...(19): siRNA sense strand
ggaugaagauaggcaguca

SEQ ID NO: 2013490 - RNA, 19 nt, Homo sapiens
  misc_RNA (1)...(19): siRNA sense strand
ccaacgcgguggugcagaa

SEQ ID NO: 2013491 - RNA, 19 nt, Homo sapiens
  misc_RNA (1)...(19): siRNA sense strand
cuucaaauauccaaacaca

SEQ ID NO: 2013492 - RNA, 19 nt, Homo sapiens
  misc_RNA (1)...(19): siRNA sense strand
gaaaggcugggccaaguuc

SEQ ID NO: 2013493 - RNA, 19 nt, Homo sapiens
  misc_RNA (1)...(19): siRNA sense strand
cagugggacucagguguua

SEQ ID NO: 2013494 - RNA, 19 nt, Homo sapiens
  misc_RNA (1)...(19): siRNA sense strand
gcucaacacgauggacuua

SEQ ID NO: 2013495 - RNA, 19 nt, Homo sapiens
  misc_RNA (1)...(19): siRNA sense strand
caaaggacgggaagacaga

SEQ ID NO: 2013496 - RNA, 19 nt, Homo sapiens
  misc_RNA (1)...(19): siRNA sense strand
guaaggcucagaaccagaa

SEQ ID NO: 2013497 - RNA, 19 nt, Homo sapiens
  misc_RNA (1)...(19): siRNA sense strand
gcucuccgguggacacaga

SEQ ID NO: 2013498 - RNA, 19 nt, Homo sapiens
  misc_RNA (1)...(19): siRNA sense strand
uuaaguacaccuggaauaa

SEQ ID NO: 2013499 - RNA, 19 nt, Homo sapiens
  misc_RNA (1)...(19): siRNA sense strand
gaagaacauguuugaugga

SEQ ID NO: 2013500 - RNA, 19 nt, Homo sapiens
  misc_RNA (1)...(19): siRNA sense strand
gaaaggucauacgcuguca

SEQ ID NO: 2013501 - RNA, 19 nt, Homo sapiens
  misc_RNA (1)...(19): siRNA sense strand
gaacaggugauuacguuuu

SEQ ID NO: 2013502 - RNA, 19 nt, Homo sapiens
  misc_RNA (1)...(19): siRNA sense strand
guuaauggaugaagaugac

SEQ ID NO: 2013503 - RNA, 19 nt, Homo sapiens
  misc_RNA (1)...(19): siRNA sense strand
gaagaaggacaaguucauc

SEQ ID NO: 2013504 - RNA, 19 nt, Homo sapiens
  misc_RNA (1)...(19): siRNA sense strand
gagccaggaugaagauagg

SEQ ID NO: 2013505 - RNA, 19 nt, Homo sapiens
  misc_RNA (1)...(19): siRNA sense strand
guacaccuggaauaacuuu

SEQ ID NO: 2013506 - RNA, 19 nt, Homo sapiens
  misc_RNA (1)...(19): siRNA sense strand
gcagagaccagggcaguca

SEQ ID NO: 2013507 - RNA, 19 nt, Homo sapiens
  misc_RNA (1)...(19): siRNA sense strand
gugagcuucugacuuguga

SEQ ID NO: 2013508 - RNA, 19 nt, Homo sapiens
  misc_RNA (1)...(19): siRNA sense strand
ggaguuaauggaugaagau

SEQ ID NO: 2013509 - RNA, 19 nt, Homo sapiens
  misc_RNA (1)...(19): siRNA sense strand
gagacgaaccgcaggaaca

SEQ ID NO: 2013510 - RNA, 19 nt, Homo sapiens
  misc_RNA (1)...(19): siRNA sense strand
acaagcugcuggacaagga

SEQ ID NO: 2013511 - RNA, 19 nt, Homo sapiens
  misc_RNA (1)...(19): siRNA sense strand
guccugcacuggcugaaug

SEQ ID NO: 2013512 - RNA, 19 nt, Homo sapiens
  misc_RNA (1)...(19): siRNA sense strand
cuucaaugaugaggaguuu

SEQ ID NO: 2013513 - RNA, 19 nt, Homo sapiens
  misc_RNA (1)...(19): siRNA sense strand
uaccagauccagcagauga

SEQ ID NO: 2013514 - RNA, 19 nt, Homo sapiens
  misc_RNA (1)...(19): siRNA sense strand
gaccuggccuucucugacu

SEQ ID NO: 2013515 - RNA, 19 nt, Homo sapiens
  misc_RNA (1)...(19): siRNA sense strand
gcacugcugcacacaaaca

SEQ ID NO: 2013516 - RNA, 19 nt, Homo sapiens
  misc_RNA (1)...(19): siRNA sense strand
ggacuuacugcuggacuug

SEQ ID NO: 2013517 - RNA, 19 nt, Homo sapiens
  misc_RNA (1)...(19): siRNA sense strand
ccagaggcuuguggaguug

SEQ ID NO: 2013518 - RNA, 19 nt, Homo sapiens
  misc_RNA (1)...(19): siRNA sense strand
uugacaagcugcuggacaa

SEQ ID NO: 2013519 - RNA, 19 nt, Homo sapiens
  misc_RNA (1)...(19): siRNA sense strand
gacguggguuccagugugu

SEQ ID NO: 2013520 - RNA, 19 nt, Homo sapiens
  misc_RNA (1)...(19): siRNA sense strand
cugaagaacauguuugaug

SEQ ID NO: 2013521 - RNA, 19 nt, Homo sapiens
  misc_RNA (1)...(19): siRNA sense strand
gagcuucugacuugugaug

SEQ ID NO: 2013522 - RNA, 19 nt, Homo sapiens
  misc_RNA (1)...(19): siRNA sense strand
ggaucaguuuggcuucaau

SEQ ID NO: 2013523 - RNA, 19 nt, Homo sapiens
  misc_RNA (1)...(19): siRNA sense strand
cagccaacuucguggauca

SEQ ID NO: 2013524 - RNA, 19 nt, Homo sapiens
  misc_RNA (1)...(19): siRNA sense strand
gcacaucagcgaggucauc

SEQ ID NO: 2013525 - RNA, 19 nt, Homo sapiens
  misc_RNA (1)...(19): siRNA sense strand
cagccucccugacaacaca

SEQ ID NO: 2013526 - RNA, 19 nt, Homo sapiens
  misc_RNA (1)...(19): siRNA sense strand
ggagagcugccucgucagu

SEQ ID NO: 2013527 - RNA, 19 nt, Homo sapiens
  misc_RNA (1)...(19): siRNA sense strand
ucaucagccugguguugaa

SEQ ID NO: 2013528 - RNA, 19 nt, Homo sapiens
  misc_RNA (1)...(19): siRNA sense strand
cauguggacggcaguguuu

SEQ ID NO: 2013529 - RNA, 19 nt, Homo sapiens
  misc_RNA (1)...(19): siRNA sense strand
ugcaggaguuaauggauga

SEQ ID NO: 2013530 - RNA, 19 nt, Homo sapiens
  misc_RNA (1)...(19): siRNA sense strand
gacucucugugacauaguu

SEQ ID NO: 2013531 - RNA, 19 nt, Homo sapiens
  misc_RNA (1)...(19): siRNA sense strand
gucaaaugcuucucagacu

SEQ ID NO: 2013532 - RNA, 19 nt, Homo sapiens
  misc_RNA (1)...(19): siRNA sense strand
ugcacuggcugaaugaaga

SEQ ID NO: 2013533 - RNA, 19 nt, Homo sapiens
  misc_RNA (1)...(19): siRNA sense strand
acaaacacacccagcauca

SEQ ID NO: 2013534 - RNA, 19 nt, Homo sapiens
  misc_RNA (1)...(19): siRNA sense strand
ucaacacgauggacuuacu

SEQ ID NO: 2013535 - RNA, 19 nt, Homo sapiens
  misc_RNA (1)...(19): siRNA sense strand
gcaccucagcgcuuaugga

SEQ ID NO: 2013536 - RNA, 19 nt, Homo sapiens
  misc_RNA (1)...(19): siRNA sense strand
uguggagggugacucagaa

SEQ ID NO: 2013537 - RNA, 19 nt, Homo sapiens
  misc_RNA (1)...(19): siRNA sense strand
aagguccgcuucaaauauc

SEQ ID NO: 2013538 - RNA, 19 nt, Homo sapiens
  misc_RNA (1)...(19): siRNA sense strand
ccacgucccauguugacaa

SEQ ID NO: 2013539 - RNA, 19 nt, Homo sapiens
  misc_RNA (1)...(19): siRNA sense strand
gcuucugacuugugaugug

SEQ ID NO: 2013540 - RNA, 19 nt, Homo sapiens
  misc_RNA (1)...(19): siRNA sense strand
cugcuggccucugacagua

SEQ ID NO: 2013541 - RNA, 19 nt, Homo sapiens
  misc_RNA (1)...(19): siRNA sense strand
cagcgcagcucuguuugag

SEQ ID NO: 2013542 - RNA, 19 nt, Homo sapiens
  misc_RNA (1)...(19): siRNA sense strand
gaccaggacgacaacauca

SEQ ID NO: 2013543 - RNA, 19 nt, Homo sapiens
  misc_RNA (1)...(19): siRNA sense strand
ucccagcgcagcucuguuu

SEQ ID NO: 2013544 - RNA, 19 nt, Homo sapiens
  misc_RNA (1)...(19): siRNA sense strand
gcgaggauggcgaccagaa

SEQ ID NO: 2013545 - RNA, 19 nt, Homo sapiens
  misc_RNA (1)...(19): siRNA sense strand
caaaugcuucucagacucu

SEQ ID NO: 2013546 - RNA, 19 nt, Homo sapiens
  misc_RNA (1)...(19): siRNA sense strand
aaguacaccuggaauaacu

SEQ ID NO: 2013547 - RNA, 19 nt, Homo sapiens
  misc_RNA (1)...(19): siRNA sense strand
gggcuugguggacuccuuu

SEQ ID NO: 2013548 - RNA, 19 nt, Homo sapiens
  misc_RNA (1)...(19): siRNA sense strand
aaaccgaacaggugauuac

SEQ ID NO: 2013549 - RNA, 19 nt, Homo sapiens
  misc_RNA (1)...(19): siRNA sense strand
gcaggcagcagugcaugga

SEQ ID NO: 2013550 - RNA, 19 nt, Homo sapiens
  misc_RNA (1)...(19): siRNA sense strand
uaguuaggcugggcagaga

SEQ ID NO: 2013551 - RNA, 19 nt, Homo sapiens
  misc_RNA (1)...(19): siRNA sense strand
uuuaaguacaccuggaaua

SEQ ID NO: 2013552 - RNA, 19 nt, Homo sapiens
  misc_RNA (1)...(19): siRNA sense strand
caaacacacccagcaucaa

SEQ ID NO: 2013553 - RNA, 19 nt, Homo sapiens
  misc_RNA (1)...(19): siRNA sense strand
aaacacacccagcaucaac

SEQ ID NO: 2013554 - RNA, 19 nt, Homo sapiens
  misc_RNA (1)...(19): siRNA sense strand
gacaaaggacgggaagaca

SEQ ID NO: 2013555 - RNA, 19 nt, Homo sapiens
  misc_RNA (1)...(19): siRNA sense strand
ggaagcacacagagaugca

SEQ ID NO: 2013556 - RNA, 19 nt, Homo sapiens
  misc_RNA (1)...(19): siRNA sense strand
gaccgcauccagcccuuug

SEQ ID NO: 2013557 - RNA, 19 nt, Homo sapiens
  misc_RNA (1)...(19): siRNA sense strand
ccaggacgacaacaucaau

SEQ ID NO: 2013558 - RNA, 19 nt, Homo sapiens
  misc_RNA (1)...(19): siRNA sense strand
gaucaguuuggcuucaaug

SEQ ID NO: 2013559 - RNA, 19 nt, Homo sapiens
  misc_RNA (1)...(19): siRNA sense strand
ugcuggacuuguucuuuaa

SEQ ID NO: 2013560 - RNA, 19 nt, Homo sapiens
  misc_RNA (1)...(19): siRNA sense strand
cuucagagaguugcucaaa

SEQ ID NO: 2013561 - RNA, 19 nt, Homo sapiens
  misc_RNA (1)...(19): siRNA sense strand
gcccuuugaugaugaugag

SEQ ID NO: 2013562 - RNA, 19 nt, Homo sapiens
  misc_RNA (1)...(19): siRNA sense strand
agagaucaacuucaacauc

SEQ ID NO: 2013563 - RNA, 19 nt, Homo sapiens
  misc_RNA (1)...(19): siRNA sense strand
cgaccaggacgacaacauc

SEQ ID NO: 2013564 - RNA, 19 nt, Homo sapiens
  misc_RNA (1)...(19): siRNA sense strand
agaagaaggacaaguucau

SEQ ID NO: 2013565 - RNA, 19 nt, Homo sapiens
  misc_RNA (1)...(19): siRNA sense strand
ggacaucugggaggacagu

SEQ ID NO: 2013566 - RNA, 19 nt, Homo sapiens
  misc_RNA (1)...(19): siRNA sense strand
cuuaaauggcccaguguga

SEQ ID NO: 2013567 - RNA, 19 nt, Homo sapiens
  misc_RNA (1)...(19): siRNA sense strand
ggaauuaucugucuuaucu

SEQ ID NO: 2013568 - RNA, 19 nt, Homo sapiens
  misc_RNA (1)...(19): siRNA sense strand
guguggaucuucaauaaua

SEQ ID NO: 2013569 - RNA, 19 nt, Homo sapiens
  misc_RNA (1)...(19): siRNA sense strand
gaaauaaccuaugcggaau

SEQ ID NO: 2013570 - RNA, 19 nt, Homo sapiens
  misc_RNA (1)...(19): siRNA sense strand
ggauugguguguuucguaa

SEQ ID NO: 2013571 - RNA, 19 nt, Homo sapiens
  misc_RNA (1)...(19): siRNA sense strand
caguguggaucuucaauaa

SEQ ID NO: 2013572 - RNA, 19 nt, Homo sapiens
  misc_RNA (1)...(19): siRNA sense strand
cugcaaagauuuaccauca

SEQ ID NO: 2013573 - RNA, 19 nt, Homo sapiens
  misc_RNA (1)...(19): siRNA sense strand
gaacaggaaauaaccuaug

SEQ ID NO: 2013574 - RNA, 19 nt, Homo sapiens
  misc_RNA (1)...(19): siRNA sense strand
caaagaggcagcaacgaaa

SEQ ID NO: 2013575 - RNA, 19 nt, Homo sapiens
  misc_RNA (1)...(19): siRNA sense strand
aauaaccuaugcggaauua

SEQ ID NO: 2013576 - RNA, 19 nt, Homo sapiens
  misc_RNA (1)...(19): siRNA sense strand
ccagagaagcucauuguug

SEQ ID NO: 2013577 - RNA, 19 nt, Homo sapiens
  misc_RNA (1)...(19): siRNA sense strand
gaagaacuccagucugcuu

SEQ ID NO: 2013578 - RNA, 19 nt, Homo sapiens
  misc_RNA (1)...(19): siRNA sense strand
uaaccuaugcggaauuaaa

SEQ ID NO: 2013579 - RNA, 19 nt, Homo sapiens
  misc_RNA (1)...(19): siRNA sense strand
cagauaaugcugaacuuaa

SEQ ID NO: 2013580 - RNA, 19 nt, Homo sapiens
  misc_RNA (1)...(19): siRNA sense strand
ccaaagaggcagcaacgaa

SEQ ID NO: 2013581 - RNA, 19 nt, Homo sapiens
  misc_RNA (1)...(19): siRNA sense strand
guugggauccugggaauua

SEQ ID NO: 2013582 - RNA, 19 nt, Homo sapiens
  misc_RNA (1)...(19): siRNA sense strand
gugcagugcuacaaguaaa

SEQ ID NO: 2013583 - RNA, 19 nt, Homo sapiens
  misc_RNA (1)...(19): siRNA sense strand
gauuacauauuccaacagu

SEQ ID NO: 2013584 - RNA, 19 nt, Homo sapiens
  misc_RNA (1)...(19): siRNA sense strand
ccagucugcuuucuauaga

SEQ ID NO: 2013585 - RNA, 19 nt, Homo sapiens
  misc_RNA (1)...(19): siRNA sense strand
cuuaauggccucuguggua

SEQ ID NO: 2013586 - RNA, 19 nt, Homo sapiens
  misc_RNA (1)...(19): siRNA sense strand
uuaauggccucugugguaa

SEQ ID NO: 2013587 - RNA, 19 nt, Homo sapiens
  misc_RNA (1)...(19): siRNA sense strand
uaacagcagucaucaucca

SEQ ID NO: 2013588 - RNA, 19 nt, Homo sapiens
  misc_RNA (1)...(19): siRNA sense strand
aggaguggauuacauauuc

SEQ ID NO: 2013589 - RNA, 19 nt, Homo sapiens
  misc_RNA (1)...(19): siRNA sense strand
caacugaacaggaaauaac

SEQ ID NO: 2013590 - RNA, 19 nt, Homo sapiens
  misc_RNA (1)...(19): siRNA sense strand
gggugacaaugaaugguuu

SEQ ID NO: 2013591 - RNA, 19 nt, Homo sapiens
  misc_RNA (1)...(19): siRNA sense strand
gcaacugaacaggaaauaa

SEQ ID NO: 2013592 - RNA, 19 nt, Homo sapiens
  misc_RNA (1)...(19): siRNA sense strand
guaaaucgacuuaaaucag

SEQ ID NO: 2013593 - RNA, 19 nt, Homo sapiens
  misc_RNA (1)...(19): siRNA sense strand
gaacuccagucugcuuucu

SEQ ID NO: 2013594 - RNA, 19 nt, Homo sapiens
  misc_RNA (1)...(19): siRNA sense strand
caaugaaugguuuggcuuu

SEQ ID NO: 2013595 - RNA, 19 nt, Homo sapiens
  misc_RNA (1)...(19): siRNA sense strand
agucugcuuucuauagaua

SEQ ID NO: 2013596 - RNA, 19 nt, Homo sapiens
  misc_RNA (1)...(19): siRNA sense strand
gaggaguggauuacauauu

SEQ ID NO: 2013597 - RNA, 19 nt, Homo sapiens
  misc_RNA (1)...(19): siRNA sense strand
aagaagaacuugggaagag

SEQ ID NO: 2013598 - RNA, 19 nt, Homo sapiens
  misc_RNA (1)...(19): siRNA sense strand
caaaaccuaucacugcaaa

SEQ ID NO: 2013599 - RNA, 19 nt, Homo sapiens
  misc_RNA (1)...(19): siRNA sense strand
cuacauugguaaggaaaga

SEQ ID NO: 2013600 - RNA, 19 nt, Homo sapiens
  misc_RNA (1)...(19): siRNA sense strand
uuuagcaacugaacaggaa

SEQ ID NO: 2013601 - RNA, 19 nt, Homo sapiens
  misc_RNA (1)...(19): siRNA sense strand
gguaaggaaagaagaacuu

SEQ ID NO: 2013602 - RNA, 19 nt, Homo sapiens
  misc_RNA (1)...(19): siRNA sense strand
ccaguguggaucuucaaua

SEQ ID NO: 2013603 - RNA, 19 nt, Homo sapiens
  misc_RNA (1)...(19): siRNA sense strand
ggauaaccaaggaguaauc

SEQ ID NO: 2013604 - RNA, 19 nt, Homo sapiens
  misc_RNA (1)...(19): siRNA sense strand
agaagaacuugggaagaga

SEQ ID NO: 2013605 - RNA, 19 nt, Homo sapiens
  misc_RNA (1)...(19): siRNA sense strand
caucauccaugggugacaa

SEQ ID NO: 2013606 - RNA, 19 nt, Homo sapiens
  misc_RNA (1)...(19): siRNA sense strand
uaaccaaggaguaaucuac

SEQ ID NO: 2013607 - RNA, 19 nt, Homo sapiens
  misc_RNA (1)...(19): siRNA sense strand
ccucauggauugguguguu

SEQ ID NO: 2013608 - RNA, 19 nt, Homo sapiens
  misc_RNA (1)...(19): siRNA sense strand
aaaccuaucacugcaaaga

SEQ ID NO: 2013609 - RNA, 19 nt, Homo sapiens
  misc_RNA (1)...(19): siRNA sense strand
guaaggaaagaagaacuug

SEQ ID NO: 2013610 - RNA, 19 nt, Homo sapiens
  misc_RNA (1)...(19): siRNA sense strand
agauaaugcugaacuuaac

SEQ ID NO: 2013611 - RNA, 19 nt, Homo sapiens
  misc_RNA (1)...(19): siRNA sense strand
acuccagucugcuuucuau

SEQ ID NO: 2013612 - RNA, 19 nt, Homo sapiens
  misc_RNA (1)...(19): siRNA sense strand
cguaacagcagucaucauc

SEQ ID NO: 2013613 - RNA, 19 nt, Homo sapiens
  misc_RNA (1)...(19): siRNA sense strand
cugaggaguggauuacaua

SEQ ID NO: 2013614 - RNA, 19 nt, Homo sapiens
  misc_RNA (1)...(19): siRNA sense strand
gagauaaaagacucagaua

SEQ ID NO: 2013615 - RNA, 19 nt, Homo sapiens
  misc_RNA (1)...(19): siRNA sense strand
agaguuugcuggccuguac

SEQ ID NO: 2013616 - RNA, 19 nt, Homo sapiens
  misc_RNA (1)...(19): siRNA sense strand
accuaucacugcaaagauu

SEQ ID NO: 2013617 - RNA, 19 nt, Homo sapiens
  misc_RNA (1)...(19): siRNA sense strand
ccugaggaguggauuacau

SEQ ID NO: 2013618 - RNA, 19 nt, Homo sapiens
  misc_RNA (1)...(19): siRNA sense strand
aaagaagaacuugggaaga

SEQ ID NO: 2013619 - RNA, 19 nt, Homo sapiens
  misc_RNA (1)...(19): siRNA sense strand
ggaaugacaaaaccuauca

SEQ ID NO: 2013620 - RNA, 19 nt, Homo sapiens
  misc_RNA (1)...(19): siRNA sense strand
auccaugggugacaaugaa

SEQ ID NO: 2013621 - RNA, 19 nt, Homo sapiens
  misc_RNA (1)...(19): siRNA sense strand
gaaaaccuaaaggcaauaa

SEQ ID NO: 2013622 - RNA, 19 nt, Homo sapiens
  misc_RNA (1)...(19): siRNA sense strand
cucauggauugguguguuu

SEQ ID NO: 2013623 - RNA, 19 nt, Homo sapiens
  misc_RNA (1)...(19): siRNA sense strand
accaucagcuccagagaag

SEQ ID NO: 2013624 - RNA, 19 nt, Homo sapiens
  misc_RNA (1)...(19): siRNA sense strand
ggcaauaaaagcuccauuu

SEQ ID NO: 2013625 - RNA, 19 nt, Homo sapiens
  misc_RNA (1)...(19): siRNA sense strand
gcagugcuacaaguaaauc

SEQ ID NO: 2013626 - RNA, 19 nt, Homo sapiens
  misc_RNA (1)...(19): siRNA sense strand
cugggaauuaucugucuua

SEQ ID NO: 2013627 - RNA, 19 nt, Homo sapiens
  misc_RNA (1)...(19): siRNA sense strand
gauccugggaauuaucugu

SEQ ID NO: 2013628 - RNA, 19 nt, Homo sapiens
  misc_RNA (1)...(19): siRNA sense strand
ccuaucacugcaaagauuu

SEQ ID NO: 2013629 - RNA, 19 nt, Homo sapiens
  misc_RNA (1)...(19): siRNA sense strand
ggaguggauuacauauucc

SEQ ID NO: 2013630 - RNA, 19 nt, Homo sapiens
  misc_RNA (1)...(19): siRNA sense strand
cuaucacugcaaagauuua

SEQ ID NO: 2013631 - RNA, 19 nt, Homo sapiens
  misc_RNA (1)...(19): siRNA sense strand
ggcuuucaaacaugagaua

SEQ ID NO: 2013632 - RNA, 19 nt, Homo sapiens
  misc_RNA (1)...(19): siRNA sense strand
cauccaugggugacaauga

SEQ ID NO: 2013633 - RNA, 19 nt, Homo sapiens
  misc_RNA (1)...(19): siRNA sense strand
ggaauuaucugucuuaucu

SEQ ID NO: 2013634 - RNA, 19 nt, Homo sapiens
  misc_RNA (1)...(19): siRNA sense strand
guguggaucuucaauaaua

SEQ ID NO: 2013635 - RNA, 19 nt, Homo sapiens
  misc_RNA (1)...(19): siRNA sense strand
gaaauaaccuaugcggaau

SEQ ID NO: 2013636 - RNA, 19 nt, Homo sapiens
  misc_RNA (1)...(19): siRNA sense strand
ggauugguguguuucguaa

SEQ ID NO: 2013637 - RNA, 19 nt, Homo sapiens
  misc_RNA (1)...(19): siRNA sense strand
caguguggaucuucaauaa

SEQ ID NO: 2013638 - RNA, 19 nt, Homo sapiens
  misc_RNA (1)...(19): siRNA sense strand
cugcaaagauuuaccauca

SEQ ID NO: 2013639 - RNA, 19 nt, Homo sapiens
  misc_RNA (1)...(19): siRNA sense strand
gaacaggaaauaaccuaug

SEQ ID NO: 2013640 - RNA, 19 nt, Homo sapiens
  misc_RNA (1)...(19): siRNA sense strand
caaagaggcagcaacgaaa

SEQ ID NO: 2013641 - RNA, 19 nt, Homo sapiens
  misc_RNA (1)...(19): siRNA sense strand
aauaaccuaugcggaauua

SEQ ID NO: 2013642 - RNA, 19 nt, Homo sapiens
  misc_RNA (1)...(19): siRNA sense strand
ccagagaagcucauuguug

SEQ ID NO: 2013643 - RNA, 19 nt, Homo sapiens
  misc_RNA (1)...(19): siRNA sense strand
gaagaacuccagucugcuu

SEQ ID NO: 2013644 - RNA, 19 nt, Homo sapiens
  misc_RNA (1)...(19): siRNA sense strand
uaaccuaugcggaauuaaa

SEQ ID NO: 2013645 - RNA, 19 nt, Homo sapiens
  misc_RNA (1)...(19): siRNA sense strand
cagauaaugcugaacuuaa

SEQ ID NO: 2013646 - RNA, 19 nt, Homo sapiens
  misc_RNA (1)...(19): siRNA sense strand
ccaaagaggcagcaacgaa

SEQ ID NO: 2013647 - RNA, 19 nt, Homo sapiens
  misc_RNA (1)...(19): siRNA sense strand
guugggauccugggaauua

SEQ ID NO: 2013648 - RNA, 19 nt, Homo sapiens
  misc_RNA (1)...(19): siRNA sense strand
gugcagugcuacaaguaaa

SEQ ID NO: 2013649 - RNA, 19 nt, Homo sapiens
  misc_RNA (1)...(19): siRNA sense strand
gauuacauauuccaacagu

SEQ ID NO: 2013650 - RNA, 19 nt, Homo sapiens
  misc_RNA (1)...(19): siRNA sense strand
ccagucugcuuucuauaga

SEQ ID NO: 2013651 - RNA, 19 nt, Homo sapiens
  misc_RNA (1)...(19): siRNA sense strand
cuuaauggccucuguggua

SEQ ID NO: 2013652 - RNA, 19 nt, Homo sapiens
  misc_RNA (1)...(19): siRNA sense strand
uuaauggccucugugguaa

SEQ ID NO: 2013653 - RNA, 19 nt, Homo sapiens
  misc_RNA (1)...(19): siRNA sense strand
uaacagcagucaucaucca

SEQ ID NO: 2013654 - RNA, 19 nt, Homo sapiens
  misc_RNA (1)...(19): siRNA sense strand
aggaguggauuacauauuc

SEQ ID NO: 2013655 - RNA, 19 nt, Homo sapiens
  misc_RNA (1)...(19): siRNA sense strand
caacugaacaggaaauaac

SEQ ID NO: 2013656 - RNA, 19 nt, Homo sapiens
  misc_RNA (1)...(19): siRNA sense strand
gggugacaaugaaugguuu

SEQ ID NO: 2013657 - RNA, 19 nt, Homo sapiens
  misc_RNA (1)...(19): siRNA sense strand
gcaacugaacaggaaauaa

SEQ ID NO: 2013658 - RNA, 19 nt, Homo sapiens
  misc_RNA (1)...(19): siRNA sense strand
guaaaucgacuuaaaucag

SEQ ID NO: 2013659 - RNA, 19 nt, Homo sapiens
  misc_RNA (1)...(19): siRNA sense strand
gaacuccagucugcuuucu

SEQ ID NO: 2013660 - RNA, 19 nt, Homo sapiens
  misc_RNA (1)...(19): siRNA sense strand
caaugaaugguuuggcuuu

SEQ ID NO: 2013661 - RNA, 19 nt, Homo sapiens
  misc_RNA (1)...(19): siRNA sense strand
agucugcuuucuauagaua

SEQ ID NO: 2013662 - RNA, 19 nt, Homo sapiens
  misc_RNA (1)...(19): siRNA sense strand
gaggaguggauuacauauu

SEQ ID NO: 2013663 - RNA, 19 nt, Homo sapiens
  misc_RNA (1)...(19): siRNA sense strand
aagaagaacuugggaagag

SEQ ID NO: 2013664 - RNA, 19 nt, Homo sapiens
  misc_RNA (1)...(19): siRNA sense strand
caaaaccuaucacugcaaa

SEQ ID NO: 2013665 - RNA, 19 nt, Homo sapiens
  misc_RNA (1)...(19): siRNA sense strand
cuacauugguaaggaaaga

SEQ ID NO: 2013666 - RNA, 19 nt, Homo sapiens
  misc_RNA (1)...(19): siRNA sense strand
uuuagcaacugaacaggaa

SEQ ID NO: 2013667 - RNA, 19 nt, Homo sapiens
  misc_RNA (1)...(19): siRNA sense strand
gguaaggaaagaagaacuu

SEQ ID NO: 2013668 - RNA, 19 nt, Homo sapiens
  misc_RNA (1)...(19): siRNA sense strand
ccaguguggaucuucaaua

SEQ ID NO: 2013669 - RNA, 19 nt, Homo sapiens
  misc_RNA (1)...(19): siRNA sense strand
ggauaaccaaggaguaauc

SEQ ID NO: 2013670 - RNA, 19 nt, Homo sapiens
  misc_RNA (1)...(19): siRNA sense strand
agaagaacuugggaagaga

SEQ ID NO: 2013671 - RNA, 19 nt, Homo sapiens
  misc_RNA (1)...(19): siRNA sense strand
caucauccaugggugacaa

SEQ ID NO: 2013672 - RNA, 19 nt, Homo sapiens
  misc_RNA (1)...(19): siRNA sense strand
uaaccaaggaguaaucuac

SEQ ID NO: 2013673 - RNA, 19 nt, Homo sapiens
  misc_RNA (1)...(19): siRNA sense strand
ccucauggauugguguguu

SEQ ID NO: 2013674 - RNA, 19 nt, Homo sapiens
  misc_RNA (1)...(19): siRNA sense strand
aaaccuaucacugcaaaga

SEQ ID NO: 2013675 - RNA, 19 nt, Homo sapiens
  misc_RNA (1)...(19): siRNA sense strand
guaaggaaagaagaacuug

SEQ ID NO: 2013676 - RNA, 19 nt, Homo sapiens
  misc_RNA (1)...(19): siRNA sense strand
agauaaugcugaacuuaac

SEQ ID NO: 2013677 - RNA, 19 nt, Homo sapiens
  misc_RNA (1)...(19): siRNA sense strand
acuccagucugcuuucuau

SEQ ID NO: 2013678 - RNA, 19 nt, Homo sapiens
  misc_RNA (1)...(19): siRNA sense strand
cguaacagcagucaucauc

SEQ ID NO: 2013679 - RNA, 19 nt, Homo sapiens
  misc_RNA (1)...(19): siRNA sense strand
cugaggaguggauuacaua

SEQ ID NO: 2013680 - RNA, 19 nt, Homo sapiens
  misc_RNA (1)...(19): siRNA sense strand
gagauaaaagacucagaua

SEQ ID NO: 2013681 - RNA, 19 nt, Homo sapiens
  misc_RNA (1)...(19): siRNA sense strand
agaguuugcuggccuguac

SEQ ID NO: 2013682 - RNA, 19 nt, Homo sapiens
  misc_RNA (1)...(19): siRNA sense strand
accuaucacugcaaagauu

SEQ ID NO: 2013683 - RNA, 19 nt, Homo sapiens
  misc_RNA (1)...(19): siRNA sense strand
ccugaggaguggauuacau

SEQ ID NO: 2013684 - RNA, 19 nt, Homo sapiens
  misc_RNA (1)...(19): siRNA sense strand
aaagaagaacuugggaaga

SEQ ID NO: 2013685 - RNA, 19 nt, Homo sapiens
  misc_RNA (1)...(19): siRNA sense strand
ggaaugacaaaaccuauca

SEQ ID NO: 2013686 - RNA, 19 nt, Homo sapiens
  misc_RNA (1)...(19): siRNA sense strand
auccaugggugacaaugaa

SEQ ID NO: 2013687 - RNA, 19 nt, Homo sapiens
  misc_RNA (1)...(19): siRNA sense strand
gaaaaccuaaaggcaauaa

SEQ ID NO: 2013688 - RNA, 19 nt, Homo sapiens
  misc_RNA (1)...(19): siRNA sense strand
cucauggauugguguguuu

SEQ ID NO: 2013689 - RNA, 19 nt, Homo sapiens
  misc_RNA (1)...(19): siRNA sense strand
accaucagcuccagagaag

SEQ ID NO: 2013690 - RNA, 19 nt, Homo sapiens
  misc_RNA (1)...(19): siRNA sense strand
ggcaauaaaagcuccauuu

SEQ ID NO: 2013691 - RNA, 19 nt, Homo sapiens
  misc_RNA (1)...(19): siRNA sense strand
gcagugcuacaaguaaauc

SEQ ID NO: 2013692 - RNA, 19 nt, Homo sapiens
  misc_RNA (1)...(19): siRNA sense strand
cugggaauuaucugucuua

SEQ ID NO: 2013693 - RNA, 19 nt, Homo sapiens
  misc_RNA (1)...(19): siRNA sense strand
gauccugggaauuaucugu

SEQ ID NO: 2013694 - RNA, 19 nt, Homo sapiens
  misc_RNA (1)...(19): siRNA sense strand
ccuaucacugcaaagauuu

SEQ ID NO: 2013695 - RNA, 19 nt, Homo sapiens
  misc_RNA (1)...(19): siRNA sense strand
ggaguggauuacauauucc

SEQ ID NO: 2013696 - RNA, 19 nt, Homo sapiens
  misc_RNA (1)...(19): siRNA sense strand
cuaucacugcaaagauuua

SEQ ID NO: 2013697 - RNA, 19 nt, Homo sapiens
  misc_RNA (1)...(19): siRNA sense strand
ggcuuucaaacaugagaua

SEQ ID NO: 2013698 - RNA, 19 nt, Homo sapiens
  misc_RNA (1)...(19): siRNA sense strand
cauccaugggugacaauga

SEQ ID NO: 2013699 - RNA, 19 nt, Homo sapiens
  misc_RNA (1)...(19): siRNA sense strand
gaacaagccuccaggauuc

SEQ ID NO: 2013700 - RNA, 19 nt, Homo sapiens
  misc_RNA (1)...(19): siRNA sense strand
ggacuugugugcccuuaua

SEQ ID NO: 2013701 - RNA, 19 nt, Homo sapiens
  misc_RNA (1)...(19): siRNA sense strand
gaacacaaaggcacuauaa

SEQ ID NO: 2013702 - RNA, 19 nt, Homo sapiens
  misc_RNA (1)...(19): siRNA sense strand
caauugaucuguaauguca

SEQ ID NO: 2013703 - RNA, 19 nt, Homo sapiens
  misc_RNA (1)...(19): siRNA sense strand
guucgucccuguccucuua

SEQ ID NO: 2013704 - RNA, 19 nt, Homo sapiens
  misc_RNA (1)...(19): siRNA sense strand
ggauauaagcuguucauuu

SEQ ID NO: 2013705 - RNA, 19 nt, Homo sapiens
  misc_RNA (1)...(19): siRNA sense strand
gcaaaccucuacuucuuga

SEQ ID NO: 2013706 - RNA, 19 nt, Homo sapiens
  misc_RNA (1)...(19): siRNA sense strand
uuucauagcucuacugauu

SEQ ID NO: 2013707 - RNA, 19 nt, Homo sapiens
  misc_RNA (1)...(19): siRNA sense strand
gaaugagccuaacuuaugu

SEQ ID NO: 2013708 - RNA, 19 nt, Homo sapiens
  misc_RNA (1)...(19): siRNA sense strand
gcaaauagccauguauaau

SEQ ID NO: 2013709 - RNA, 19 nt, Homo sapiens
  misc_RNA (1)...(19): siRNA sense strand
gaacuauacuugucaugca

SEQ ID NO: 2013710 - RNA, 19 nt, Homo sapiens
  misc_RNA (1)...(19): siRNA sense strand
ggagaaugagccuaacuua

SEQ ID NO: 2013711 - RNA, 19 nt, Homo sapiens
  misc_RNA (1)...(19): siRNA sense strand
gagcaaauagccauguaua

SEQ ID NO: 2013712 - RNA, 19 nt, Homo sapiens
  misc_RNA (1)...(19): siRNA sense strand
cagcauauauccaguuaau

SEQ ID NO: 2013713 - RNA, 19 nt, Homo sapiens
  misc_RNA (1)...(19): siRNA sense strand
gaaguggaaugggucagua

SEQ ID NO: 2013714 - RNA, 19 nt, Homo sapiens
  misc_RNA (1)...(19): siRNA sense strand
ucacagugcuuaauauauc

SEQ ID NO: 2013715 - RNA, 19 nt, Homo sapiens
  misc_RNA (1)...(19): siRNA sense strand
uaacccaaaugaacacaaa

SEQ ID NO: 2013716 - RNA, 19 nt, Homo sapiens
  misc_RNA (1)...(19): siRNA sense strand
caaauagccauguauaaug

SEQ ID NO: 2013717 - RNA, 19 nt, Homo sapiens
  misc_RNA (1)...(19): siRNA sense strand
ggaaaauccugcaaacaaa

SEQ ID NO: 2013718 - RNA, 19 nt, Homo sapiens
  misc_RNA (1)...(19): siRNA sense strand
ggaguacccucaucacagu

SEQ ID NO: 2013719 - RNA, 19 nt, Homo sapiens
  misc_RNA (1)...(19): siRNA sense strand
agaaugagccuaacuuaug

SEQ ID NO: 2013720 - RNA, 19 nt, Homo sapiens
  misc_RNA (1)...(19): siRNA sense strand
ggucaguaauugaugaaga

SEQ ID NO: 2013721 - RNA, 19 nt, Homo sapiens
  misc_RNA (1)...(19): siRNA sense strand
uaucggaaauugaaaguag

SEQ ID NO: 2013722 - RNA, 19 nt, Homo sapiens
  misc_RNA (1)...(19): siRNA sense strand
gcaagacaccuguaucuac

SEQ ID NO: 2013723 - RNA, 19 nt, Homo sapiens
  misc_RNA (1)...(19): siRNA sense strand
gagaaugagccuaacuuau

SEQ ID NO: 2013724 - RNA, 19 nt, Homo sapiens
  misc_RNA (1)...(19): siRNA sense strand
ggaagaaugucagguacca

SEQ ID NO: 2013725 - RNA, 19 nt, Homo sapiens
  misc_RNA (1)...(19): siRNA sense strand
caucacagugcuuaauaua

SEQ ID NO: 2013726 - RNA, 19 nt, Homo sapiens
  misc_RNA (1)...(19): siRNA sense strand
ggaaugggucaguaauuga

SEQ ID NO: 2013727 - RNA, 19 nt, Homo sapiens
  misc_RNA (1)...(19): siRNA sense strand
cagaagcacaugauuggua

SEQ ID NO: 2013728 - RNA, 19 nt, Homo sapiens
  misc_RNA (1)...(19): siRNA sense strand
ggaccacagucugcaaaga

SEQ ID NO: 2013729 - RNA, 19 nt, Homo sapiens
  misc_RNA (1)...(19): siRNA sense strand
gagcccagcuaaugagaca

SEQ ID NO: 2013730 - RNA, 19 nt, Homo sapiens
  misc_RNA (1)...(19): siRNA sense strand
aggagaaacugcaaagaga

SEQ ID NO: 2013731 - RNA, 19 nt, Homo sapiens
  misc_RNA (1)...(19): siRNA sense strand
guuaauauauccagucacu

SEQ ID NO: 2013732 - RNA, 19 nt, Homo sapiens
  misc_RNA (1)...(19): siRNA sense strand
uggaaugggucaguaauug

SEQ ID NO: 2013733 - RNA, 19 nt, Homo sapiens
  misc_RNA (1)...(19): siRNA sense strand
gacggucaccuucaucuaa

SEQ ID NO: 2013734 - RNA, 19 nt, Homo sapiens
  misc_RNA (1)...(19): siRNA sense strand
ucacuaauuuccagaagca

SEQ ID NO: 2013735 - RNA, 19 nt, Homo sapiens
  misc_RNA (1)...(19): siRNA sense strand
uggaagggaugacuacguu

SEQ ID NO: 2013736 - RNA, 19 nt, Homo sapiens
  misc_RNA (1)...(19): siRNA sense strand
caggauucaucaacacaaa

SEQ ID NO: 2013737 - RNA, 19 nt, Homo sapiens
  misc_RNA (1)...(19): siRNA sense strand
ugagugacauugcuuacug

SEQ ID NO: 2013738 - RNA, 19 nt, Homo sapiens
  misc_RNA (1)...(19): siRNA sense strand
uugcaaaccucuacuucuu

SEQ ID NO: 2013739 - RNA, 19 nt, Homo sapiens
  misc_RNA (1)...(19): siRNA sense strand
gcaaaugaaauugauguuc

SEQ ID NO: 2013740 - RNA, 19 nt, Homo sapiens
  misc_RNA (1)...(19): siRNA sense strand
aagacaagguucuggaaga

SEQ ID NO: 2013741 - RNA, 19 nt, Homo sapiens
  misc_RNA (1)...(19): siRNA sense strand
gaaaaugccagaaucgauu

SEQ ID NO: 2013742 - RNA, 19 nt, Homo sapiens
  misc_RNA (1)...(19): siRNA sense strand
agaagcacaugauugguau

SEQ ID NO: 2013743 - RNA, 19 nt, Homo sapiens
  misc_RNA (1)...(19): siRNA sense strand
acaaaggcacuauaacuug

SEQ ID NO: 2013744 - RNA, 19 nt, Homo sapiens
  misc_RNA (1)...(19): siRNA sense strand
gaucccagauacaauugau

SEQ ID NO: 2013745 - RNA, 19 nt, Homo sapiens
  misc_RNA (1)...(19): siRNA sense strand
gcaaggaacgugaagaaaa

SEQ ID NO: 2013746 - RNA, 19 nt, Homo sapiens
  misc_RNA (1)...(19): siRNA sense strand
ucauagcucuacugauuuc

SEQ ID NO: 2013747 - RNA, 19 nt, Homo sapiens
  misc_RNA (1)...(19): siRNA sense strand
agaacaagccuccaggauu

SEQ ID NO: 2013748 - RNA, 19 nt, Homo sapiens
  misc_RNA (1)...(19): siRNA sense strand
gggaagggucuaccucuga

SEQ ID NO: 2013749 - RNA, 19 nt, Homo sapiens
  misc_RNA (1)...(19): siRNA sense strand
aauaaaagcuucagaugga

SEQ ID NO: 2013750 - RNA, 19 nt, Homo sapiens
  misc_RNA (1)...(19): siRNA sense strand
ugaguuaccuaaauuacag

SEQ ID NO: 2013751 - RNA, 19 nt, Homo sapiens
  misc_RNA (1)...(19): siRNA sense strand
cugcuaagguggaggauuc

SEQ ID NO: 2013752 - RNA, 19 nt, Homo sapiens
  misc_RNA (1)...(19): siRNA sense strand
ggauucaggacauuacuau

SEQ ID NO: 2013753 - RNA, 19 nt, Homo sapiens
  misc_RNA (1)...(19): siRNA sense strand
acauuacuauugcguggua

SEQ ID NO: 2013754 - RNA, 19 nt, Homo sapiens
  misc_RNA (1)...(19): siRNA sense strand
uuacagugguauaaggauu

SEQ ID NO: 2013755 - RNA, 19 nt, Homo sapiens
  misc_RNA (1)...(19): siRNA sense strand
cacaaaggcacuauaacuu

SEQ ID NO: 2013756 - RNA, 19 nt, Homo sapiens
  misc_RNA (1)...(19): siRNA sense strand
caaagacaagguucuggaa

SEQ ID NO: 2013757 - RNA, 19 nt, Homo sapiens
  misc_RNA (1)...(19): siRNA sense strand
uuaaaguuguccugcuuga

SEQ ID NO: 2013758 - RNA, 19 nt, Homo sapiens
  misc_RNA (1)...(19): siRNA sense strand
agauugacauugugcuuug

SEQ ID NO: 2013759 - RNA, 19 nt, Homo sapiens
  misc_RNA (1)...(19): siRNA sense strand
ugcagcauauauccaguua

SEQ ID NO: 2013760 - RNA, 19 nt, Homo sapiens
  misc_RNA (1)...(19): siRNA sense strand
gaggacuugugugcccuua

SEQ ID NO: 2013761 - RNA, 19 nt, Homo sapiens
  misc_RNA (1)...(19): siRNA sense strand
caggauggaauuaaaguug

SEQ ID NO: 2013762 - RNA, 19 nt, Homo sapiens
  misc_RNA (1)...(19): siRNA sense strand
guauaaugcucuuguucag

SEQ ID NO: 2013763 - RNA, 19 nt, Homo sapiens
  misc_RNA (1)...(19): siRNA sense strand
aaauagccauguauaaugc

SEQ ID NO: 2013764 - RNA, 19 nt, Homo sapiens
  misc_RNA (1)...(19): siRNA sense strand
ggauucaucaacacaaaga

SEQ ID NO: 2013765 - RNA, 19 nt, Homo sapiens
  misc_RNA (1)...(19): siRNA sense strand
aauccaagacuaugagaaa

SEQ ID NO: 2013766 - RNA, 19 nt, Homo sapiens
  misc_RNA (1)...(19): siRNA sense strand
aagagcaaauagccaugua

SEQ ID NO: 2013767 - RNA, 19 nt, Homo sapiens
  misc_RNA (1)...(19): siRNA sense strand
ucaucacagugcuuaauau

SEQ ID NO: 2013768 - RNA, 19 nt, Homo sapiens
  misc_RNA (1)...(19): siRNA sense strand
gaaugggucaguaauugau

SEQ ID NO: 2013769 - RNA, 19 nt, Homo sapiens
  misc_RNA (1)...(19): siRNA sense strand
aagauaggcucaucgugau

SEQ ID NO: 2013770 - RNA, 19 nt, Homo sapiens
  misc_RNA (1)...(19): siRNA sense strand
guauaaggauugcaaaccu

SEQ ID NO: 2013771 - RNA, 19 nt, Homo sapiens
  misc_RNA (1)...(19): siRNA sense strand
acuauugcgugguaagaaa

SEQ ID NO: 2013772 - RNA, 19 nt, Homo sapiens
  misc_RNA (1)...(19): siRNA sense strand
gccaagaauacacauggua

SEQ ID NO: 2013773 - RNA, 19 nt, Homo sapiens
  misc_RNA (1)...(19): siRNA sense strand
gcaaacaaaagaaggagua

SEQ ID NO: 2013774 - RNA, 19 nt, Homo sapiens
  misc_RNA (1)...(19): siRNA sense strand
gucaguaauugaugaagau

SEQ ID NO: 2013775 - RNA, 19 nt, Homo sapiens
  misc_RNA (1)...(19): siRNA sense strand
gaauguggcugaaaagcau

SEQ ID NO: 2013776 - RNA, 19 nt, Homo sapiens
  misc_RNA (1)...(19): siRNA sense strand
gaagagcaaauagccaugu

SEQ ID NO: 2013777 - RNA, 19 nt, Homo sapiens
  misc_RNA (1)...(19): siRNA sense strand
agacauuguugaggucauu

SEQ ID NO: 2013778 - RNA, 19 nt, Homo sapiens
  misc_RNA (1)...(19): siRNA sense strand
gaaaauccugcaaacaaaa

SEQ ID NO: 2013779 - RNA, 19 nt, Homo sapiens
  misc_RNA (1)...(19): siRNA sense strand
ucuuacugccucagaauua

SEQ ID NO: 2013780 - RNA, 19 nt, Homo sapiens
  misc_RNA (1)...(19): siRNA sense strand
ggauggaauuaaaguuguc

SEQ ID NO: 2013781 - RNA, 19 nt, Homo sapiens
  misc_RNA (1)...(19): siRNA sense strand
caguuaauauauccaguca

SEQ ID NO: 2013782 - RNA, 19 nt, Homo sapiens
  misc_RNA (1)...(19): siRNA sense strand
guguuacucagacuuauuu

SEQ ID NO: 2013783 - RNA, 19 nt, Homo sapiens
  misc_RNA (1)...(19): siRNA sense strand
aauuaaaguuguccugcuu

SEQ ID NO: 2013784 - RNA, 19 nt, Homo sapiens
  misc_RNA (1)...(19): siRNA sense strand
aaaagcagaagacugauua

SEQ ID NO: 2013785 - RNA, 19 nt, Homo sapiens
  misc_RNA (1)...(19): siRNA sense strand
cagauggaaagaccuauga

SEQ ID NO: 2013786 - RNA, 19 nt, Homo sapiens
  misc_RNA (1)...(19): siRNA sense strand
gguauaaagaugacagcaa

SEQ ID NO: 2013787 - RNA, 19 nt, Homo sapiens
  misc_RNA (1)...(19): siRNA sense strand
uaaugucaccggccaguug

SEQ ID NO: 2013788 - RNA, 19 nt, Homo sapiens
  misc_RNA (1)...(19): siRNA sense strand
agagggaacuauacuuguc

SEQ ID NO: 2013789 - RNA, 19 nt, Homo sapiens
  misc_RNA (1)...(19): siRNA sense strand
gguggaggauucaggacau

SEQ ID NO: 2013790 - RNA, 19 nt, Homo sapiens
  misc_RNA (1)...(19): siRNA sense strand
cauguauaaugcucuuguu

SEQ ID NO: 2013791 - RNA, 19 nt, Homo sapiens
  misc_RNA (1)...(19): siRNA sense strand
uagcucuacugauuucuuc

SEQ ID NO: 2013792 - RNA, 19 nt, Homo sapiens
  misc_RNA (1)...(19): siRNA sense strand
agagaaacaucaggcuuca

SEQ ID NO: 2013793 - RNA, 19 nt, Homo sapiens
  misc_RNA (1)...(19): siRNA sense strand
gggaagacuauuacagugu

SEQ ID NO: 2013794 - RNA, 19 nt, Homo sapiens
  misc_RNA (1)...(19): siRNA sense strand
acacaaaggcacuauaacu

SEQ ID NO: 2013795 - RNA, 19 nt, Homo sapiens
  misc_RNA (1)...(19): siRNA sense strand
ggagacggaggacuugugu

SEQ ID NO: 2013796 - RNA, 19 nt, Homo sapiens
  misc_RNA (1)...(19): siRNA sense strand
caucugcaaaugaaauuga

SEQ ID NO: 2013797 - RNA, 19 nt, Homo sapiens
  misc_RNA (1)...(19): siRNA sense strand
agggauuccugcuaugauu

SEQ ID NO: 2013798 - RNA, 19 nt, Homo sapiens
  misc_RNA (1)...(19): siRNA sense strand
gggauuccugcuaugauuu

SEQ ID NO: 2013799 - RNA, 19 nt, Homo sapiens
  misc_RNA (1)...(19): siRNA sense strand
gaaagaagcuacccagugu

SEQ ID NO: 2013800 - RNA, 19 nt, Homo sapiens
  misc_RNA (1)...(19): siRNA sense strand
gaaaguaccugcuaugaag

SEQ ID NO: 2013801 - RNA, 19 nt, Homo sapiens
  misc_RNA (1)...(19): siRNA sense strand
gaaacaggauccucuagaa

SEQ ID NO: 2013802 - RNA, 19 nt, Homo sapiens
  misc_RNA (1)...(19): siRNA sense strand
ggagaugccugguugauga

SEQ ID NO: 2013803 - RNA, 19 nt, Homo sapiens
  misc_RNA (1)...(19): siRNA sense strand
ggacacccaucccaaauca

SEQ ID NO: 2013804 - RNA, 19 nt, Homo sapiens
  misc_RNA (1)...(19): siRNA sense strand
gaagagaaggcaaccaaga

SEQ ID NO: 2013805 - RNA, 19 nt, Homo sapiens
  misc_RNA (1)...(19): siRNA sense strand
gccagacccuguccuauga

SEQ ID NO: 2013806 - RNA, 19 nt, Homo sapiens
  misc_RNA (1)...(19): siRNA sense strand
gaagugacucugacaguug

SEQ ID NO: 2013807 - RNA, 19 nt, Homo sapiens
  misc_RNA (1)...(19): siRNA sense strand
gaggaagaaucgcccuuga

SEQ ID NO: 2013808 - RNA, 19 nt, Homo sapiens
  misc_RNA (1)...(19): siRNA sense strand
gcagugaccugggaauauc

SEQ ID NO: 2013809 - RNA, 19 nt, Homo sapiens
  misc_RNA (1)...(19): siRNA sense strand
gaaucgcccuugacagaug

SEQ ID NO: 2013810 - RNA, 19 nt, Homo sapiens
  misc_RNA (1)...(19): siRNA sense strand
gaccagaugugcugaagag

SEQ ID NO: 2013811 - RNA, 19 nt, Homo sapiens
  misc_RNA (1)...(19): siRNA sense strand
ggaagaaucgcccuugaca

SEQ ID NO: 2013812 - RNA, 19 nt, Homo sapiens
  misc_RNA (1)...(19): siRNA sense strand
ggaauagaguccuggaacu

SEQ ID NO: 2013813 - RNA, 19 nt, Homo sapiens
  misc_RNA (1)...(19): siRNA sense strand
ugacaguggcauugacuua

SEQ ID NO: 2013814 - RNA, 19 nt, Homo sapiens
  misc_RNA (1)...(19): siRNA sense strand
ggaacuccaucuccaacug

SEQ ID NO: 2013815 - RNA, 19 nt, Homo sapiens
  misc_RNA (1)...(19): siRNA sense strand
gaaccuagagauccacaau

SEQ ID NO: 2013816 - RNA, 19 nt, Homo sapiens
  misc_RNA (1)...(19): siRNA sense strand
ugaagugacucugacaguu

SEQ ID NO: 2013817 - RNA, 19 nt, Homo sapiens
  misc_RNA (1)...(19): siRNA sense strand
ggccaagggcuauuugaaa

SEQ ID NO: 2013818 - RNA, 19 nt, Homo sapiens
  misc_RNA (1)...(19): siRNA sense strand
gaaccagcccacugaggaa

SEQ ID NO: 2013819 - RNA, 19 nt, Homo sapiens
  misc_RNA (1)...(19): siRNA sense strand
ccgcaaaugacacauauga

SEQ ID NO: 2013820 - RNA, 19 nt, Homo sapiens
  misc_RNA (1)...(19): siRNA sense strand
caacgucaucaucuucuuu

SEQ ID NO: 2013821 - RNA, 19 nt, Homo sapiens
  misc_RNA (1)...(19): siRNA sense strand
gauccacaauggcuucauc

SEQ ID NO: 2013822 - RNA, 19 nt, Homo sapiens
  misc_RNA (1)...(19): siRNA sense strand
aaacaggauccucuagaaa

SEQ ID NO: 2013823 - RNA, 19 nt, Homo sapiens
  misc_RNA (1)...(19): siRNA sense strand
gccaagggcuauuugaaac

SEQ ID NO: 2013824 - RNA, 19 nt, Homo sapiens
  misc_RNA (1)...(19): siRNA sense strand
cagaugugcugaagagaag

SEQ ID NO: 2013825 - RNA, 19 nt, Homo sapiens
  misc_RNA (1)...(19): siRNA sense strand
ccuaaccucuggagaagug

SEQ ID NO: 2013826 - RNA, 19 nt, Homo sapiens
  misc_RNA (1)...(19): siRNA sense strand
ugaaaguaccugcuaugaa

SEQ ID NO: 2013827 - RNA, 19 nt, Homo sapiens
  misc_RNA (1)...(19): siRNA sense strand
acaggauccucuagaaaug

SEQ ID NO: 2013828 - RNA, 19 nt, Homo sapiens
  misc_RNA (1)...(19): siRNA sense strand
aagaaucgcccuugacaga

SEQ ID NO: 2013829 - RNA, 19 nt, Homo sapiens
  misc_RNA (1)...(19): siRNA sense strand
gagcuuugcccaugaccuu

SEQ ID NO: 2013830 - RNA, 19 nt, Homo sapiens
  misc_RNA (1)...(19): siRNA sense strand
caucaucuucuuugccuuu

SEQ ID NO: 2013831 - RNA, 19 nt, Homo sapiens
  misc_RNA (1)...(19): siRNA sense strand
gaacuccaucuccaacugu

SEQ ID NO: 2013832 - RNA, 19 nt, Homo sapiens
  misc_RNA (1)...(19): siRNA sense strand
ccagaugugcugaagagaa

SEQ ID NO: 2013833 - RNA, 19 nt, Homo sapiens
  misc_RNA (1)...(19): siRNA sense strand
cagcacagacaguggcuuu

SEQ ID NO: 2013834 - RNA, 19 nt, Homo sapiens
  misc_RNA (1)...(19): siRNA sense strand
ucacacacaagaaaguaaa

SEQ ID NO: 2013835 - RNA, 19 nt, Homo sapiens
  misc_RNA (1)...(19): siRNA sense strand
ccaguguccugcucuucaa

SEQ ID NO: 2013836 - RNA, 19 nt, Homo sapiens
  misc_RNA (1)...(19): siRNA sense strand
agccaucccugcagacuga

SEQ ID NO: 2013837 - RNA, 19 nt, Homo sapiens
  misc_RNA (1)...(19): siRNA sense strand
ugaaacaggauccucuaga

SEQ ID NO: 2013838 - RNA, 19 nt, Homo sapiens
  misc_RNA (1)...(19): siRNA sense strand
ggggacagcugcaguagug

SEQ ID NO: 2013839 - RNA, 19 nt, Homo sapiens
  misc_RNA (1)...(19): siRNA sense strand
aguaguggcagcagcaaua

SEQ ID NO: 2013840 - RNA, 19 nt, Homo sapiens
  misc_RNA (1)...(19): siRNA sense strand
gaaacuucacguucacaca

SEQ ID NO: 2013841 - RNA, 19 nt, Homo sapiens
  misc_RNA (1)...(19): siRNA sense strand
ccgcuucucuguggaugaa

SEQ ID NO: 2013842 - RNA, 19 nt, Homo sapiens
  misc_RNA (1)...(19): siRNA sense strand
gcacagacaguggcuuugg

SEQ ID NO: 2013843 - RNA, 19 nt, Homo sapiens
  misc_RNA (1)...(19): siRNA sense strand
ccccagagcugaagaacuu

SEQ ID NO: 2013844 - RNA, 19 nt, Homo sapiens
  misc_RNA (1)...(19): siRNA sense strand
guucacacacaagaaagua

SEQ ID NO: 2013845 - RNA, 19 nt, Homo sapiens
  misc_RNA (1)...(19): siRNA sense strand
guagccagacccuguccua

SEQ ID NO: 2013846 - RNA, 19 nt, Homo sapiens
  misc_RNA (1)...(19): siRNA sense strand
gaccaacgucaucaucuuc

SEQ ID NO: 2013847 - RNA, 19 nt, Homo sapiens
  misc_RNA (1)...(19): siRNA sense strand
ucagucacuuccgagagua

SEQ ID NO: 2013848 - RNA, 19 nt, Homo sapiens
  misc_RNA (1)...(19): siRNA sense strand
ucucuagccugcagucaag

SEQ ID NO: 2013849 - RNA, 19 nt, Homo sapiens
  misc_RNA (1)...(19): siRNA sense strand
ccaacgucaucaucuucuu

SEQ ID NO: 2013850 - RNA, 19 nt, Homo sapiens
  misc_RNA (1)...(19): siRNA sense strand
gaaaacuucagccuccuaa

SEQ ID NO: 2013851 - RNA, 19 nt, Homo sapiens
  misc_RNA (1)...(19): siRNA sense strand
gugguuugaagcagaauuu

SEQ ID NO: 2013852 - RNA, 19 nt, Homo sapiens
  misc_RNA (1)...(19): siRNA sense strand
caagggcuauuugaaacag

SEQ ID NO: 2013853 - RNA, 19 nt, Homo sapiens
  misc_RNA (1)...(19): siRNA sense strand
caguggcauugacuuaguu

SEQ ID NO: 2013854 - RNA, 19 nt, Homo sapiens
  misc_RNA (1)...(19): siRNA sense strand
ccugagguauggaauagag

SEQ ID NO: 2013855 - RNA, 19 nt, Homo sapiens
  misc_RNA (1)...(19): siRNA sense strand
aguaugagauugccauucg

SEQ ID NO: 2013856 - RNA, 19 nt, Homo sapiens
  misc_RNA (1)...(19): siRNA sense strand
acaguggcauugacuuagu

SEQ ID NO: 2013857 - RNA, 19 nt, Homo sapiens
  misc_RNA (1)...(19): siRNA sense strand
ggucuccugggcagcuuua

SEQ ID NO: 2013858 - RNA, 19 nt, Homo sapiens
  misc_RNA (1)...(19): siRNA sense strand
aacaggauccucuagaaau

SEQ ID NO: 2013859 - RNA, 19 nt, Homo sapiens
  misc_RNA (1)...(19): siRNA sense strand
caucuucuuugccuuuguc

SEQ ID NO: 2013860 - RNA, 19 nt, Homo sapiens
  misc_RNA (1)...(19): siRNA sense strand
ggaugacaguggcauugac

SEQ ID NO: 2013861 - RNA, 19 nt, Homo sapiens
  misc_RNA (1)...(19): siRNA sense strand
gcagaccagaugugcugaa

SEQ ID NO: 2013862 - RNA, 19 nt, Homo sapiens
  misc_RNA (1)...(19): siRNA sense strand
ggucacuccuggccuugag

SEQ ID NO: 2013863 - RNA, 19 nt, Homo sapiens
  misc_RNA (1)...(19): siRNA sense strand
ccaacuggaccgucaccaa

SEQ ID NO: 2013864 - RNA, 19 nt, Homo sapiens
  misc_RNA (1)...(19): siRNA sense strand
guggaugaagugacucuga

SEQ ID NO: 2013865 - RNA, 19 nt, Homo sapiens
  misc_RNA (1)...(19): siRNA sense strand
gacccuguccuaugaccuu

SEQ ID NO: 2013866 - RNA, 19 nt, Homo sapiens
  misc_RNA (1)...(19): siRNA sense strand
gaauaucugacuggagcuu

SEQ ID NO: 2013867 - RNA, 19 nt, Homo sapiens
  misc_RNA (1)...(19): siRNA sense strand
gcacggcagcacagacagu

SEQ ID NO: 2013868 - RNA, 19 nt, Homo sapiens
  misc_RNA (1)...(19): siRNA sense strand
gcagugugaaccuagagau

SEQ ID NO: 2013869 - RNA, 19 nt, Homo sapiens
  misc_RNA (1)...(19): siRNA sense strand
gggagaugccugguugaug

SEQ ID NO: 2013870 - RNA, 19 nt, Homo sapiens
  misc_RNA (1)...(19): siRNA sense strand
acaaggggauguggucuaa

SEQ ID NO: 2013871 - RNA, 19 nt, Homo sapiens
  misc_RNA (1)...(19): siRNA sense strand
accuagagauccacaaugg

SEQ ID NO: 2013872 - RNA, 19 nt, Homo sapiens
  misc_RNA (1)...(19): siRNA sense strand
caggauccucuagaaauga

SEQ ID NO: 2013873 - RNA, 19 nt, Homo sapiens
  misc_RNA (1)...(19): siRNA sense strand
ccaacacccgcuucucugu

SEQ ID NO: 2013874 - RNA, 19 nt, Homo sapiens
  misc_RNA (1)...(19): siRNA sense strand
cacguucacacacaagaaa

SEQ ID NO: 2013875 - RNA, 19 nt, Homo sapiens
  misc_RNA (1)...(19): siRNA sense strand
cagcuacccaggcccaaga

SEQ ID NO: 2013876 - RNA, 19 nt, Homo sapiens
  misc_RNA (1)...(19): siRNA sense strand
cagugaccuuggaccugua

SEQ ID NO: 2013877 - RNA, 19 nt, Homo sapiens
  misc_RNA (1)...(19): siRNA sense strand
ccaagggcuauuugaaaca

SEQ ID NO: 2013878 - RNA, 19 nt, Homo sapiens
  misc_RNA (1)...(19): siRNA sense strand
cugaagagaaggcaaccaa

SEQ ID NO: 2013879 - RNA, 19 nt, Homo sapiens
  misc_RNA (1)...(19): siRNA sense strand
cuggagaagugggagaguu

SEQ ID NO: 2013880 - RNA, 19 nt, Homo sapiens
  misc_RNA (1)...(19): siRNA sense strand
caucaucuuuggagaauuu

SEQ ID NO: 2013881 - RNA, 19 nt, Homo sapiens
  misc_RNA (1)...(19): siRNA sense strand
gaacuggaccugcuugaau

SEQ ID NO: 2013882 - RNA, 19 nt, Homo sapiens
  misc_RNA (1)...(19): siRNA sense strand
caaaaugacuggugaaaga

SEQ ID NO: 2013883 - RNA, 19 nt, Homo sapiens
  misc_RNA (1)...(19): siRNA sense strand
ggagagcaauacaucauca

SEQ ID NO: 2013884 - RNA, 19 nt, Homo sapiens
  misc_RNA (1)...(19): siRNA sense strand
ccaagaauauuugucaaug

SEQ ID NO: 2013885 - RNA, 19 nt, Homo sapiens
  misc_RNA (1)...(19): siRNA sense strand
gcaauacaucaucaucuuu

SEQ ID NO: 2013886 - RNA, 19 nt, Homo sapiens
  misc_RNA (1)...(19): siRNA sense strand
gaaaauugcucccacuagu

SEQ ID NO: 2013887 - RNA, 19 nt, Homo sapiens
  misc_RNA (1)...(19): siRNA sense strand
caagaauauuugucaaugg

SEQ ID NO: 2013888 - RNA, 19 nt, Homo sapiens
  misc_RNA (1)...(19): siRNA sense strand
cucauaggcuucacaaaga

SEQ ID NO: 2013889 - RNA, 19 nt, Homo sapiens
  misc_RNA (1)...(19): siRNA sense strand
aacuggaccugcuugaaua

SEQ ID NO: 2013890 - RNA, 19 nt, Homo sapiens
  misc_RNA (1)...(19): siRNA sense strand
caauacaucaucaucuuug

SEQ ID NO: 2013891 - RNA, 19 nt, Homo sapiens
  misc_RNA (1)...(19): siRNA sense strand
ggaccugcuugaauaugga

SEQ ID NO: 2013892 - RNA, 19 nt, Homo sapiens
  misc_RNA (1)...(19): siRNA sense strand
ucauaggcuucacaaagaa

SEQ ID NO: 2013893 - RNA, 19 nt, Homo sapiens
  misc_RNA (1)...(19): siRNA sense strand
gaaccagauccaagaaaca

SEQ ID NO: 2013894 - RNA, 19 nt, Homo sapiens
  misc_RNA (1)...(19): siRNA sense strand
ccagauccaagaaacaauu

SEQ ID NO: 2013895 - RNA, 19 nt, Homo sapiens
  misc_RNA (1)...(19): siRNA sense strand
ucacaaagaaggaaaauug

SEQ ID NO: 2013896 - RNA, 19 nt, Homo sapiens
  misc_RNA (1)...(19): siRNA sense strand
gauaauuguguggugauuu

SEQ ID NO: 2013897 - RNA, 19 nt, Homo sapiens
  misc_RNA (1)...(19): siRNA sense strand
ugaaccagauccaagaaac

SEQ ID NO: 2013898 - RNA, 19 nt, Homo sapiens
  misc_RNA (1)...(19): siRNA sense strand
agcaauacaucaucaucuu

SEQ ID NO: 2013899 - RNA, 19 nt, Homo sapiens
  misc_RNA (1)...(19): siRNA sense strand
gagcaauacaucaucaucu

SEQ ID NO: 2013900 - RNA, 19 nt, Homo sapiens
  misc_RNA (1)...(19): siRNA sense strand
ggaacuggaccugcuugaa

SEQ ID NO: 2013901 - RNA, 19 nt, Homo sapiens
  misc_RNA (1)...(19): siRNA sense strand
caucaucaucuuuggagaa

SEQ ID NO: 2013902 - RNA, 19 nt, Homo sapiens
  misc_RNA (1)...(19): siRNA sense strand
guuccaagaauauuuguca

SEQ ID NO: 2013903 - RNA, 19 nt, Homo sapiens
  misc_RNA (1)...(19): siRNA sense strand
gaggugcaacugacacuca

SEQ ID NO: 2013904 - RNA, 19 nt, Homo sapiens
  misc_RNA (1)...(19): siRNA sense strand
ugauaauuguguggugauu

SEQ ID NO: 2013905 - RNA, 19 nt, Homo sapiens
  misc_RNA (1)...(19): siRNA sense strand
aaauugcucccacuaguuc

SEQ ID NO: 2013906 - RNA, 19 nt, Homo sapiens
  misc_RNA (1)...(19): siRNA sense strand
cagauccaagaaacaauuu

SEQ ID NO: 2013907 - RNA, 19 nt, Homo sapiens
  misc_RNA (1)...(19): siRNA sense strand
acucauaggcuucacaaag

SEQ ID NO: 2013908 - RNA, 19 nt, Homo sapiens
  misc_RNA (1)...(19): siRNA sense strand
acuauaaagugguggaacu

SEQ ID NO: 2013909 - RNA, 19 nt, Homo sapiens
  misc_RNA (1)...(19): siRNA sense strand
gugaaccagauccaagaaa

SEQ ID NO: 2013910 - RNA, 19 nt, Homo sapiens
  misc_RNA (1)...(19): siRNA sense strand
caucaucuuuggagaauuu

SEQ ID NO: 2013911 - RNA, 19 nt, Homo sapiens
  misc_RNA (1)...(19): siRNA sense strand
gaacuggaccugcuugaau

SEQ ID NO: 2013912 - RNA, 19 nt, Homo sapiens
  misc_RNA (1)...(19): siRNA sense strand
caaaaugacuggugaaaga

SEQ ID NO: 2013913 - RNA, 19 nt, Homo sapiens
  misc_RNA (1)...(19): siRNA sense strand
ggagagcaauacaucauca

SEQ ID NO: 2013914 - RNA, 19 nt, Homo sapiens
  misc_RNA (1)...(19): siRNA sense strand
ccaagaauauuugucaaug

SEQ ID NO: 2013915 - RNA, 19 nt, Homo sapiens
  misc_RNA (1)...(19): siRNA sense strand
gcaauacaucaucaucuuu

SEQ ID NO: 2013916 - RNA, 19 nt, Homo sapiens
  misc_RNA (1)...(19): siRNA sense strand
gaaaauugcucccacuagu

SEQ ID NO: 2013917 - RNA, 19 nt, Homo sapiens
  misc_RNA (1)...(19): siRNA sense strand
caagaauauuugucaaugg

SEQ ID NO: 2013918 - RNA, 19 nt, Homo sapiens
  misc_RNA (1)...(19): siRNA sense strand
cucauaggcuucacaaaga

SEQ ID NO: 2013919 - RNA, 19 nt, Homo sapiens
  misc_RNA (1)...(19): siRNA sense strand
aacuggaccugcuugaaua

SEQ ID NO: 2013920 - RNA, 19 nt, Homo sapiens
  misc_RNA (1)...(19): siRNA sense strand
caauacaucaucaucuuug

SEQ ID NO: 2013921 - RNA, 19 nt, Homo sapiens
  misc_RNA (1)...(19): siRNA sense strand
ggaccugcuugaauaugga

SEQ ID NO: 2013922 - RNA, 19 nt, Homo sapiens
  misc_RNA (1)...(19): siRNA sense strand
ucauaggcuucacaaagaa

SEQ ID NO: 2013923 - RNA, 19 nt, Homo sapiens
  misc_RNA (1)...(19): siRNA sense strand
gaaccagauccaagaaaca

SEQ ID NO: 2013924 - RNA, 19 nt, Homo sapiens
  misc_RNA (1)...(19): siRNA sense strand
ccagauccaagaaacaauu

SEQ ID NO: 2013925 - RNA, 19 nt, Homo sapiens
  misc_RNA (1)...(19): siRNA sense strand
ucacaaagaaggaaaauug

SEQ ID NO: 2013926 - RNA, 19 nt, Homo sapiens
  misc_RNA (1)...(19): siRNA sense strand
gauaauuguguggugauuu

SEQ ID NO: 2013927 - RNA, 19 nt, Homo sapiens
  misc_RNA (1)...(19): siRNA sense strand
ugaaccagauccaagaaac

SEQ ID NO: 2013928 - RNA, 19 nt, Homo sapiens
  misc_RNA (1)...(19): siRNA sense strand
agcaauacaucaucaucuu

SEQ ID NO: 2013929 - RNA, 19 nt, Homo sapiens
  misc_RNA (1)...(19): siRNA sense strand
gagcaauacaucaucaucu

SEQ ID NO: 2013930 - RNA, 19 nt, Homo sapiens
  misc_RNA (1)...(19): siRNA sense strand
ggaacuggaccugcuugaa

SEQ ID NO: 2013931 - RNA, 19 nt, Homo sapiens
  misc_RNA (1)...(19): siRNA sense strand
caucaucaucuuuggagaa

SEQ ID NO: 2013932 - RNA, 19 nt, Homo sapiens
  misc_RNA (1)...(19): siRNA sense strand
guuccaagaauauuuguca

SEQ ID NO: 2013933 - RNA, 19 nt, Homo sapiens
  misc_RNA (1)...(19): siRNA sense strand
gaggugcaacugacacuca

SEQ ID NO: 2013934 - RNA, 19 nt, Homo sapiens
  misc_RNA (1)...(19): siRNA sense strand
ugauaauuguguggugauu

SEQ ID NO: 2013935 - RNA, 19 nt, Homo sapiens
  misc_RNA (1)...(19): siRNA sense strand
aaauugcucccacuaguuc

SEQ ID NO: 2013936 - RNA, 19 nt, Homo sapiens
  misc_RNA (1)...(19): siRNA sense strand
cagauccaagaaacaauuu

SEQ ID NO: 2013937 - RNA, 19 nt, Homo sapiens
  misc_RNA (1)...(19): siRNA sense strand
acucauaggcuucacaaag

SEQ ID NO: 2013938 - RNA, 19 nt, Homo sapiens
  misc_RNA (1)...(19): siRNA sense strand
acuauaaagugguggaacu

SEQ ID NO: 2013939 - RNA, 19 nt, Homo sapiens
  misc_RNA (1)...(19): siRNA sense strand
gugaaccagauccaagaaa

SEQ ID NO: 2013940 - RNA, 19 nt, Homo sapiens
  misc_RNA (1)...(19): siRNA sense strand
caucaucuuuggagaauuu

SEQ ID NO: 2013941 - RNA, 19 nt, Homo sapiens
  misc_RNA (1)...(19): siRNA sense strand
gaacuggaccugcuugaau

SEQ ID NO: 2013942 - RNA, 19 nt, Homo sapiens
  misc_RNA (1)...(19): siRNA sense strand
caaaaugacuggugaaaga

SEQ ID NO: 2013943 - RNA, 19 nt, Homo sapiens
  misc_RNA (1)...(19): siRNA sense strand
ggagagcaauacaucauca

SEQ ID NO: 2013944 - RNA, 19 nt, Homo sapiens
  misc_RNA (1)...(19): siRNA sense strand
ccaagaauauuugucaaug

SEQ ID NO: 2013945 - RNA, 19 nt, Homo sapiens
  misc_RNA (1)...(19): siRNA sense strand
gcaauacaucaucaucuuu

SEQ ID NO: 2013946 - RNA, 19 nt, Homo sapiens
  misc_RNA (1)...(19): siRNA sense strand
gaaaauugcucccacuagu

SEQ ID NO: 2013947 - RNA, 19 nt, Homo sapiens
  misc_RNA (1)...(19): siRNA sense strand
caagaauauuugucaaugg

SEQ ID NO: 2013948 - RNA, 19 nt, Homo sapiens
  misc_RNA (1)...(19): siRNA sense strand
cucauaggcuucacaaaga

SEQ ID NO: 2013949 - RNA, 19 nt, Homo sapiens
  misc_RNA (1)...(19): siRNA sense strand
aacuggaccugcuugaaua

SEQ ID NO: 2013950 - RNA, 19 nt, Homo sapiens
  misc_RNA (1)...(19): siRNA sense strand
caauacaucaucaucuuug

SEQ ID NO: 2013951 - RNA, 19 nt, Homo sapiens
  misc_RNA (1)...(19): siRNA sense strand
ggaccugcuugaauaugga

SEQ ID NO: 2013952 - RNA, 19 nt, Homo sapiens
  misc_RNA (1)...(19): siRNA sense strand
ucauaggcuucacaaagaa

SEQ ID NO: 2013953 - RNA, 19 nt, Homo sapiens
  misc_RNA (1)...(19): siRNA sense strand
gaaccagauccaagaaaca

SEQ ID NO: 2013954 - RNA, 19 nt, Homo sapiens
  misc_RNA (1)...(19): siRNA sense strand
ccagauccaagaaacaauu

SEQ ID NO: 2013955 - RNA, 19 nt, Homo sapiens
  misc_RNA (1)...(19): siRNA sense strand
ucacaaagaaggaaaauug

SEQ ID NO: 2013956 - RNA, 19 nt, Homo sapiens
  misc_RNA (1)...(19): siRNA sense strand
gauaauuguguggugauuu

SEQ ID NO: 2013957 - RNA, 19 nt, Homo sapiens
  misc_RNA (1)...(19): siRNA sense strand
ugaaccagauccaagaaac

SEQ ID NO: 2013958 - RNA, 19 nt, Homo sapiens
  misc_RNA (1)...(19): siRNA sense strand
agcaauacaucaucaucuu

SEQ ID NO: 2013959 - RNA, 19 nt, Homo sapiens
  misc_RNA (1)...(19): siRNA sense strand
gagcaauacaucaucaucu

SEQ ID NO: 2013960 - RNA, 19 nt, Homo sapiens
  misc_RNA (1)...(19): siRNA sense strand
ggaacuggaccugcuugaa

SEQ ID NO: 2013961 - RNA, 19 nt, Homo sapiens
  misc_RNA (1)...(19): siRNA sense strand
caucaucaucuuuggagaa

SEQ ID NO: 2013962 - RNA, 19 nt, Homo sapiens
  misc_RNA (1)...(19): siRNA sense strand
guuccaagaauauuuguca

SEQ ID NO: 2013963 - RNA, 19 nt, Homo sapiens
  misc_RNA (1)...(19): siRNA sense strand
gaggugcaacugacacuca

SEQ ID NO: 2013964 - RNA, 19 nt, Homo sapiens
  misc_RNA (1)...(19): siRNA sense strand
ugauaauuguguggugauu

SEQ ID NO: 2013965 - RNA, 19 nt, Homo sapiens
  misc_RNA (1)...(19): siRNA sense strand
aaauugcucccacuaguuc

SEQ ID NO: 2013966 - RNA, 19 nt, Homo sapiens
  misc_RNA (1)...(19): siRNA sense strand
cagauccaagaaacaauuu

SEQ ID NO: 2013967 - RNA, 19 nt, Homo sapiens
  misc_RNA (1)...(19): siRNA sense strand
acucauaggcuucacaaag

SEQ ID NO: 2013968 - RNA, 19 nt, Homo sapiens
  misc_RNA (1)...(19): siRNA sense strand
acuauaaagugguggaacu

SEQ ID NO: 2013969 - RNA, 19 nt, Homo sapiens
  misc_RNA (1)...(19): siRNA sense strand
gugaaccagauccaagaaa

SEQ ID NO: 2013970 - RNA, 19 nt, Homo sapiens
  misc_RNA (1)...(19): siRNA sense strand
caucaucuuuggagaauuu

SEQ ID NO: 2013971 - RNA, 19 nt, Homo sapiens
  misc_RNA (1)...(19): siRNA sense strand
gaacuggaccugcuugaau

SEQ ID NO: 2013972 - RNA, 19 nt, Homo sapiens
  misc_RNA (1)...(19): siRNA sense strand
caaaaugacuggugaaaga

SEQ ID NO: 2013973 - RNA, 19 nt, Homo sapiens
  misc_RNA (1)...(19): siRNA sense strand
ggagagcaauacaucauca

SEQ ID NO: 2013974 - RNA, 19 nt, Homo sapiens
  misc_RNA (1)...(19): siRNA sense strand
ccaagaauauuugucaaug

SEQ ID NO: 2013975 - RNA, 19 nt, Homo sapiens
  misc_RNA (1)...(19): siRNA sense strand
gcaauacaucaucaucuuu

SEQ ID NO: 2013976 - RNA, 19 nt, Homo sapiens
  misc_RNA (1)...(19): siRNA sense strand
gaaaauugcucccacuagu

SEQ ID NO: 2013977 - RNA, 19 nt, Homo sapiens
  misc_RNA (1)...(19): siRNA sense strand
caagaauauuugucaaugg

SEQ ID NO: 2013978 - RNA, 19 nt, Homo sapiens
  misc_RNA (1)...(19): siRNA sense strand
cucauaggcuucacaaaga

SEQ ID NO: 2013979 - RNA, 19 nt, Homo sapiens
  misc_RNA (1)...(19): siRNA sense strand
aacuggaccugcuugaaua

SEQ ID NO: 2013980 - RNA, 19 nt, Homo sapiens
  misc_RNA (1)...(19): siRNA sense strand
caauacaucaucaucuuug

SEQ ID NO: 2013981 - RNA, 19 nt, Homo sapiens
  misc_RNA (1)...(19): siRNA sense strand
ggaccugcuugaauaugga

SEQ ID NO: 2013982 - RNA, 19 nt, Homo sapiens
  misc_RNA (1)...(19): siRNA sense strand
ucauaggcuucacaaagaa

SEQ ID NO: 2013983 - RNA, 19 nt, Homo sapiens
  misc_RNA (1)...(19): siRNA sense strand
gaaccagauccaagaaaca

SEQ ID NO: 2013984 - RNA, 19 nt, Homo sapiens
  misc_RNA (1)...(19): siRNA sense strand
ccagauccaagaaacaauu

SEQ ID NO: 2013985 - RNA, 19 nt, Homo sapiens
  misc_RNA (1)...(19): siRNA sense strand
ucacaaagaaggaaaauug

SEQ ID NO: 2013986 - RNA, 19 nt, Homo sapiens
  misc_RNA (1)...(19): siRNA sense strand
gauaauuguguggugauuu

SEQ ID NO: 2013987 - RNA, 19 nt, Homo sapiens
  misc_RNA (1)...(19): siRNA sense strand
ugaaccagauccaagaaac

SEQ ID NO: 2013988 - RNA, 19 nt, Homo sapiens
  misc_RNA (1)...(19): siRNA sense strand
agcaauacaucaucaucuu

SEQ ID NO: 2013989 - RNA, 19 nt, Homo sapiens
  misc_RNA (1)...(19): siRNA sense strand
gagcaauacaucaucaucu

SEQ ID NO: 2013990 - RNA, 19 nt, Homo sapiens
  misc_RNA (1)...(19): siRNA sense strand
ggaacuggaccugcuugaa

SEQ ID NO: 2013991 - RNA, 19 nt, Homo sapiens
  misc_RNA (1)...(19): siRNA sense strand
caucaucaucuuuggagaa

SEQ ID NO: 2013992 - RNA, 19 nt, Homo sapiens
  misc_RNA (1)...(19): siRNA sense strand
guuccaagaauauuuguca

SEQ ID NO: 2013993 - RNA, 19 nt, Homo sapiens
  misc_RNA (1)...(19): siRNA sense strand
gaggugcaacugacacuca

SEQ ID NO: 2013994 - RNA, 19 nt, Homo sapiens
  misc_RNA (1)...(19): siRNA sense strand
ugauaauuguguggugauu

SEQ ID NO: 2013995 - RNA, 19 nt, Homo sapiens
  misc_RNA (1)...(19): siRNA sense strand
aaauugcucccacuaguuc

SEQ ID NO: 2013996 - RNA, 19 nt, Homo sapiens
  misc_RNA (1)...(19): siRNA sense strand
cagauccaagaaacaauuu

SEQ ID NO: 2013997 - RNA, 19 nt, Homo sapiens
  misc_RNA (1)...(19): siRNA sense strand
acucauaggcuucacaaag

SEQ ID NO: 2013998 - RNA, 19 nt, Homo sapiens
  misc_RNA (1)...(19): siRNA sense strand
acuauaaagugguggaacu

SEQ ID NO: 2013999 - RNA, 19 nt, Homo sapiens
  misc_RNA (1)...(19): siRNA sense strand
gugaaccagauccaagaaa

SEQ ID NO: 2014000 - RNA, 19 nt, Homo sapiens
  misc_RNA (1)...(19): siRNA sense strand
gcgggauccuguucaauaa

SEQ ID NO: 2014001 - RNA, 19 nt, Homo sapiens
  misc_RNA (1)...(19): siRNA sense strand
cguagaggcuuuccgguuu

SEQ ID NO: 2014002 - RNA, 19 nt, Homo sapiens
  misc_RNA (1)...(19): siRNA sense strand
caacaugaccuccgaguuc

SEQ ID NO: 2014003 - RNA, 19 nt, Homo sapiens
  misc_RNA (1)...(19): siRNA sense strand
caaggaaccugacaaccau

SEQ ID NO: 2014004 - RNA, 19 nt, Homo sapiens
  misc_RNA (1)...(19): siRNA sense strand
cugaggaccugaacaacua

SEQ ID NO: 2014005 - RNA, 19 nt, Homo sapiens
  misc_RNA (1)...(19): siRNA sense strand
gagguguucugccgggaua

SEQ ID NO: 2014006 - RNA, 19 nt, Homo sapiens
  misc_RNA (1)...(19): siRNA sense strand
ucacgacaguggagagaaa

SEQ ID NO: 2014007 - RNA, 19 nt, Homo sapiens
  misc_RNA (1)...(19): siRNA sense strand
gcagcagccugucuugugu

SEQ ID NO: 2014008 - RNA, 19 nt, Homo sapiens
  misc_RNA (1)...(19): siRNA sense strand
gggauccuguucaauaaug

SEQ ID NO: 2014009 - RNA, 19 nt, Homo sapiens
  misc_RNA (1)...(19): siRNA sense strand
guagaggcuuuccgguuug

SEQ ID NO: 2014010 - RNA, 19 nt, Homo sapiens
  misc_RNA (1)...(19): siRNA sense strand
gaggugguccgcaacauga

SEQ ID NO: 2014011 - RNA, 19 nt, Homo sapiens
  misc_RNA (1)...(19): siRNA sense strand
ccacucacccgaucuccua

SEQ ID NO: 2014012 - RNA, 19 nt, Homo sapiens
  misc_RNA (1)...(19): siRNA sense strand
gcacugcucaccugucugu

SEQ ID NO: 2014013 - RNA, 19 nt, Homo sapiens
  misc_RNA (1)...(19): siRNA sense strand
gagacgcggugcuguacau

SEQ ID NO: 2014014 - RNA, 19 nt, Homo sapiens
  misc_RNA (1)...(19): siRNA sense strand
ccacugcacuggccaucau

SEQ ID NO: 2014015 - RNA, 19 nt, Homo sapiens
  misc_RNA (1)...(19): siRNA sense strand
caccaucaaccucuacuuu

SEQ ID NO: 2014016 - RNA, 19 nt, Homo sapiens
  misc_RNA (1)...(19): siRNA sense strand
ggauccuguucaauaauga

SEQ ID NO: 2014017 - RNA, 19 nt, Homo sapiens
  misc_RNA (1)...(19): siRNA sense strand
ccaaggaaccugacaacca

SEQ ID NO: 2014018 - RNA, 19 nt, Homo sapiens
  misc_RNA (1)...(19): siRNA sense strand
gaaccugacaaccaugugu

SEQ ID NO: 2014019 - RNA, 19 nt, Homo sapiens
  misc_RNA (1)...(19): siRNA sense strand
ccaucaaccucuacuuugg

SEQ ID NO: 2014020 - RNA, 19 nt, Homo sapiens
  misc_RNA (1)...(19): siRNA sense strand
ccucaaaggguacaacuuc

SEQ ID NO: 2014021 - RNA, 19 nt, Homo sapiens
  misc_RNA (1)...(19): siRNA sense strand
gggcacugcucaccugucu

SEQ ID NO: 2014022 - RNA, 19 nt, Homo sapiens
  misc_RNA (1)...(19): siRNA sense strand
gcccucagccuccaaggaa

SEQ ID NO: 2014023 - RNA, 19 nt, Homo sapiens
  misc_RNA (1)...(19): siRNA sense strand
gcacuggccaucaucuaca

SEQ ID NO: 2014024 - RNA, 19 nt, Homo sapiens
  misc_RNA (1)...(19): siRNA sense strand
gcaacaugaccuccgaguu

SEQ ID NO: 2014025 - RNA, 19 nt, Homo sapiens
  misc_RNA (1)...(19): siRNA sense strand
cagccgcucucguccaugu

SEQ ID NO: 2014026 - RNA, 19 nt, Homo sapiens
  misc_RNA (1)...(19): siRNA sense strand
cagcugaggaccugaacaa

SEQ ID NO: 2014027 - RNA, 19 nt, Homo sapiens
  misc_RNA (1)...(19): siRNA sense strand
uugcagcccuguugugugu

SEQ ID NO: 2014028 - RNA, 19 nt, Homo sapiens
  misc_RNA (1)...(19): siRNA sense strand
agaagggccugacguacca

SEQ ID NO: 2014029 - RNA, 19 nt, Homo sapiens
  misc_RNA (1)...(19): siRNA sense strand
gagcacccgcugaacauca

SEQ ID NO: 2014030 - RNA, 19 nt, Homo sapiens
  misc_RNA (1)...(19): siRNA sense strand
cggcccagauugugaagga

SEQ ID NO: 2014031 - RNA, 19 nt, Homo sapiens
  misc_RNA (1)...(19): siRNA sense strand
gacaguggagagaaacauu

SEQ ID NO: 2014032 - RNA, 19 nt, Homo sapiens
  misc_RNA (1)...(19): siRNA sense strand
ccagcaccaucaaccucua

SEQ ID NO: 2014033 - RNA, 19 nt, Homo sapiens
  misc_RNA (1)...(19): siRNA sense strand
caacagcaccacacgaaaa

SEQ ID NO: 2014034 - RNA, 19 nt, Homo sapiens
  misc_RNA (1)...(19): siRNA sense strand
uacaacagcaccacacgaa

SEQ ID NO: 2014035 - RNA, 19 nt, Homo sapiens
  misc_RNA (1)...(19): siRNA sense strand
ucagcgggauccuguucaa

SEQ ID NO: 2014036 - RNA, 19 nt, Homo sapiens
  misc_RNA (1)...(19): siRNA sense strand
gacguaccaccgcaucgua

SEQ ID NO: 2014037 - RNA, 19 nt, Homo sapiens
  misc_RNA (1)...(19): siRNA sense strand
guucggcuaugacgugaag

SEQ ID NO: 2014038 - RNA, 19 nt, Homo sapiens
  misc_RNA (1)...(19): siRNA sense strand
acuacaagcccgaguucua

SEQ ID NO: 2014039 - RNA, 19 nt, Homo sapiens
  misc_RNA (1)...(19): siRNA sense strand
cacccgaucuccuacuaca

SEQ ID NO: 2014040 - RNA, 19 nt, Homo sapiens
  misc_RNA (1)...(19): siRNA sense strand
agcgggauccuguucaaua

SEQ ID NO: 2014041 - RNA, 19 nt, Homo sapiens
  misc_RNA (1)...(19): siRNA sense strand
gaaaagcugaggucaucaa

SEQ ID NO: 2014042 - RNA, 19 nt, Homo sapiens
  misc_RNA (1)...(19): siRNA sense strand
ggucagcgggauccuguuc

SEQ ID NO: 2014043 - RNA, 19 nt, Homo sapiens
  misc_RNA (1)...(19): siRNA sense strand
acgagacgcuggccaucga

SEQ ID NO: 2014044 - RNA, 19 nt, Homo sapiens
  misc_RNA (1)...(19): siRNA sense strand
gcugaggaccugaacaacu

SEQ ID NO: 2014045 - RNA, 19 nt, Homo sapiens
  misc_RNA (1)...(19): siRNA sense strand
cggcagcccuggaaaacaa

SEQ ID NO: 2014046 - RNA, 19 nt, Homo sapiens
  misc_RNA (1)...(19): siRNA sense strand
ggucauugucggccucugu

SEQ ID NO: 2014047 - RNA, 19 nt, Homo sapiens
  misc_RNA (1)...(19): siRNA sense strand
ggagauccgaggcuaugag

SEQ ID NO: 2014048 - RNA, 19 nt, Homo sapiens
  misc_RNA (1)...(19): siRNA sense strand
caguggagagaaacauuga

SEQ ID NO: 2014049 - RNA, 19 nt, Homo sapiens
  misc_RNA (1)...(19): siRNA sense strand
gcaccaucaaccucuacuu

SEQ ID NO: 2014050 - RNA, 19 nt, Homo sapiens
  misc_RNA (1)...(19): siRNA sense strand
ugacagcugaggaccugaa

SEQ ID NO: 2014051 - RNA, 19 nt, Homo sapiens
  misc_RNA (1)...(19): siRNA sense strand
gagcagcagccugucuugu

SEQ ID NO: 2014052 - RNA, 19 nt, Homo sapiens
  misc_RNA (1)...(19): siRNA sense strand
gcgggauccuguucaauaa

SEQ ID NO: 2014053 - RNA, 19 nt, Homo sapiens
  misc_RNA (1)...(19): siRNA sense strand
cguagaggcuuuccgguuu

SEQ ID NO: 2014054 - RNA, 19 nt, Homo sapiens
  misc_RNA (1)...(19): siRNA sense strand
caacaugaccuccgaguuc

SEQ ID NO: 2014055 - RNA, 19 nt, Homo sapiens
  misc_RNA (1)...(19): siRNA sense strand
caaggaaccugacaaccau

SEQ ID NO: 2014056 - RNA, 19 nt, Homo sapiens
  misc_RNA (1)...(19): siRNA sense strand
cugaggaccugaacaacua

SEQ ID NO: 2014057 - RNA, 19 nt, Homo sapiens
  misc_RNA (1)...(19): siRNA sense strand
gagguguucugccgggaua

SEQ ID NO: 2014058 - RNA, 19 nt, Homo sapiens
  misc_RNA (1)...(19): siRNA sense strand
ucacgacaguggagagaaa

SEQ ID NO: 2014059 - RNA, 19 nt, Homo sapiens
  misc_RNA (1)...(19): siRNA sense strand
gcagcagccugucuugugu

SEQ ID NO: 2014060 - RNA, 19 nt, Homo sapiens
  misc_RNA (1)...(19): siRNA sense strand
gggauccuguucaauaaug

SEQ ID NO: 2014061 - RNA, 19 nt, Homo sapiens
  misc_RNA (1)...(19): siRNA sense strand
guagaggcuuuccgguuug

SEQ ID NO: 2014062 - RNA, 19 nt, Homo sapiens
  misc_RNA (1)...(19): siRNA sense strand
gaggugguccgcaacauga

SEQ ID NO: 2014063 - RNA, 19 nt, Homo sapiens
  misc_RNA (1)...(19): siRNA sense strand
ccacucacccgaucuccua

SEQ ID NO: 2014064 - RNA, 19 nt, Homo sapiens
  misc_RNA (1)...(19): siRNA sense strand
gcacugcucaccugucugu

SEQ ID NO: 2014065 - RNA, 19 nt, Homo sapiens
  misc_RNA (1)...(19): siRNA sense strand
gagacgcggugcuguacau

SEQ ID NO: 2014066 - RNA, 19 nt, Homo sapiens
  misc_RNA (1)...(19): siRNA sense strand
ccacugcacuggccaucau

SEQ ID NO: 2014067 - RNA, 19 nt, Homo sapiens
  misc_RNA (1)...(19): siRNA sense strand
caccaucaaccucuacuuu

SEQ ID NO: 2014068 - RNA, 19 nt, Homo sapiens
  misc_RNA (1)...(19): siRNA sense strand
ggauccuguucaauaauga

SEQ ID NO: 2014069 - RNA, 19 nt, Homo sapiens
  misc_RNA (1)...(19): siRNA sense strand
ccaaggaaccugacaacca

SEQ ID NO: 2014070 - RNA, 19 nt, Homo sapiens
  misc_RNA (1)...(19): siRNA sense strand
gaaccugacaaccaugugu

SEQ ID NO: 2014071 - RNA, 19 nt, Homo sapiens
  misc_RNA (1)...(19): siRNA sense strand
ccaucaaccucuacuuugg

SEQ ID NO: 2014072 - RNA, 19 nt, Homo sapiens
  misc_RNA (1)...(19): siRNA sense strand
ccucaaaggguacaacuuc

SEQ ID NO: 2014073 - RNA, 19 nt, Homo sapiens
  misc_RNA (1)...(19): siRNA sense strand
gggcacugcucaccugucu

SEQ ID NO: 2014074 - RNA, 19 nt, Homo sapiens
  misc_RNA (1)...(19): siRNA sense strand
gcccucagccuccaaggaa

SEQ ID NO: 2014075 - RNA, 19 nt, Homo sapiens
  misc_RNA (1)...(19): siRNA sense strand
gcacuggccaucaucuaca

SEQ ID NO: 2014076 - RNA, 19 nt, Homo sapiens
  misc_RNA (1)...(19): siRNA sense strand
gcaacaugaccuccgaguu

SEQ ID NO: 2014077 - RNA, 19 nt, Homo sapiens
  misc_RNA (1)...(19): siRNA sense strand
cagccgcucucguccaugu

SEQ ID NO: 2014078 - RNA, 19 nt, Homo sapiens
  misc_RNA (1)...(19): siRNA sense strand
cagcugaggaccugaacaa

SEQ ID NO: 2014079 - RNA, 19 nt, Homo sapiens
  misc_RNA (1)...(19): siRNA sense strand
uugcagcccuguugugugu

SEQ ID NO: 2014080 - RNA, 19 nt, Homo sapiens
  misc_RNA (1)...(19): siRNA sense strand
agaagggccugacguacca

SEQ ID NO: 2014081 - RNA, 19 nt, Homo sapiens
  misc_RNA (1)...(19): siRNA sense strand
gagcacccgcugaacauca

SEQ ID NO: 2014082 - RNA, 19 nt, Homo sapiens
  misc_RNA (1)...(19): siRNA sense strand
cggcccagauugugaagga

SEQ ID NO: 2014083 - RNA, 19 nt, Homo sapiens
  misc_RNA (1)...(19): siRNA sense strand
gacaguggagagaaacauu

SEQ ID NO: 2014084 - RNA, 19 nt, Homo sapiens
  misc_RNA (1)...(19): siRNA sense strand
ccagcaccaucaaccucua

SEQ ID NO: 2014085 - RNA, 19 nt, Homo sapiens
  misc_RNA (1)...(19): siRNA sense strand
caacagcaccacacgaaaa

SEQ ID NO: 2014086 - RNA, 19 nt, Homo sapiens
  misc_RNA (1)...(19): siRNA sense strand
uacaacagcaccacacgaa

SEQ ID NO: 2014087 - RNA, 19 nt, Homo sapiens
  misc_RNA (1)...(19): siRNA sense strand
ucagcgggauccuguucaa

SEQ ID NO: 2014088 - RNA, 19 nt, Homo sapiens
  misc_RNA (1)...(19): siRNA sense strand
gacguaccaccgcaucgua

SEQ ID NO: 2014089 - RNA, 19 nt, Homo sapiens
  misc_RNA (1)...(19): siRNA sense strand
guucggcuaugacgugaag

SEQ ID NO: 2014090 - RNA, 19 nt, Homo sapiens
  misc_RNA (1)...(19): siRNA sense strand
acuacaagcccgaguucua

SEQ ID NO: 2014091 - RNA, 19 nt, Homo sapiens
  misc_RNA (1)...(19): siRNA sense strand
cacccgaucuccuacuaca

SEQ ID NO: 2014092 - RNA, 19 nt, Homo sapiens
  misc_RNA (1)...(19): siRNA sense strand
agcgggauccuguucaaua

SEQ ID NO: 2014093 - RNA, 19 nt, Homo sapiens
  misc_RNA (1)...(19): siRNA sense strand
gaaaagcugaggucaucaa

SEQ ID NO: 2014094 - RNA, 19 nt, Homo sapiens
  misc_RNA (1)...(19): siRNA sense strand
ggucagcgggauccuguuc

SEQ ID NO: 2014095 - RNA, 19 nt, Homo sapiens
  misc_RNA (1)...(19): siRNA sense strand
acgagacgcuggccaucga

SEQ ID NO: 2014096 - RNA, 19 nt, Homo sapiens
  misc_RNA (1)...(19): siRNA sense strand
gcugaggaccugaacaacu

SEQ ID NO: 2014097 - RNA, 19 nt, Homo sapiens
  misc_RNA (1)...(19): siRNA sense strand
cggcagcccuggaaaacaa

SEQ ID NO: 2014098 - RNA, 19 nt, Homo sapiens
  misc_RNA (1)...(19): siRNA sense strand
ggucauugucggccucugu

SEQ ID NO: 2014099 - RNA, 19 nt, Homo sapiens
  misc_RNA (1)...(19): siRNA sense strand
ggagauccgaggcuaugag

SEQ ID NO: 2014100 - RNA, 19 nt, Homo sapiens
  misc_RNA (1)...(19): siRNA sense strand
caguggagagaaacauuga

SEQ ID NO: 2014101 - RNA, 19 nt, Homo sapiens
  misc_RNA (1)...(19): siRNA sense strand
gcaccaucaaccucuacuu

SEQ ID NO: 2014102 - RNA, 19 nt, Homo sapiens
  misc_RNA (1)...(19): siRNA sense strand
ugacagcugaggaccugaa

SEQ ID NO: 2014103 - RNA, 19 nt, Homo sapiens
  misc_RNA (1)...(19): siRNA sense strand
gagcagcagccugucuugu

SEQ ID NO: 2014104 - RNA, 19 nt, Homo sapiens
  misc_RNA (1)...(19): siRNA sense strand
gcgggauccuguucaauaa

SEQ ID NO: 2014105 - RNA, 19 nt, Homo sapiens
  misc_RNA (1)...(19): siRNA sense strand
cguagaggcuuuccgguuu

SEQ ID NO: 2014106 - RNA, 19 nt, Homo sapiens
  misc_RNA (1)...(19): siRNA sense strand
caacaugaccuccgaguuc

SEQ ID NO: 2014107 - RNA, 19 nt, Homo sapiens
  misc_RNA (1)...(19): siRNA sense strand
caaggaaccugacaaccau

SEQ ID NO: 2014108 - RNA, 19 nt, Homo sapiens
  misc_RNA (1)...(19): siRNA sense strand
cugaggaccugaacaacua

SEQ ID NO: 2014109 - RNA, 19 nt, Homo sapiens
  misc_RNA (1)...(19): siRNA sense strand
gagguguucugccgggaua

SEQ ID NO: 2014110 - RNA, 19 nt, Homo sapiens
  misc_RNA (1)...(19): siRNA sense strand
ucacgacaguggagagaaa

SEQ ID NO: 2014111 - RNA, 19 nt, Homo sapiens
  misc_RNA (1)...(19): siRNA sense strand
gcagcagccugucuugugu

SEQ ID NO: 2014112 - RNA, 19 nt, Homo sapiens
  misc_RNA (1)...(19): siRNA sense strand
gggauccuguucaauaaug

SEQ ID NO: 2014113 - RNA, 19 nt, Homo sapiens
  misc_RNA (1)...(19): siRNA sense strand
guagaggcuuuccgguuug

SEQ ID NO: 2014114 - RNA, 19 nt, Homo sapiens
  misc_RNA (1)...(19): siRNA sense strand
gaggugguccgcaacauga

SEQ ID NO: 2014115 - RNA, 19 nt, Homo sapiens
  misc_RNA (1)...(19): siRNA sense strand
ccacucacccgaucuccua

SEQ ID NO: 2014116 - RNA, 19 nt, Homo sapiens
  misc_RNA (1)...(19): siRNA sense strand
gcacugcucaccugucugu

SEQ ID NO: 2014117 - RNA, 19 nt, Homo sapiens
  misc_RNA (1)...(19): siRNA sense strand
gagacgcggugcuguacau

SEQ ID NO: 2014118 - RNA, 19 nt, Homo sapiens
  misc_RNA (1)...(19): siRNA sense strand
ccacugcacuggccaucau

SEQ ID NO: 2014119 - RNA, 19 nt, Homo sapiens
  misc_RNA (1)...(19): siRNA sense strand
caccaucaaccucuacuuu

SEQ ID NO: 2014120 - RNA, 19 nt, Homo sapiens
  misc_RNA (1)...(19): siRNA sense strand
ggauccuguucaauaauga

SEQ ID NO: 2014121 - RNA, 19 nt, Homo sapiens
  misc_RNA (1)...(19): siRNA sense strand
ccaaggaaccugacaacca

SEQ ID NO: 2014122 - RNA, 19 nt, Homo sapiens
  misc_RNA (1)...(19): siRNA sense strand
gaaccugacaaccaugugu

SEQ ID NO: 2014123 - RNA, 19 nt, Homo sapiens
  misc_RNA (1)...(19): siRNA sense strand
ccaucaaccucuacuuugg

SEQ ID NO: 2014124 - RNA, 19 nt, Homo sapiens
  misc_RNA (1)...(19): siRNA sense strand
ccucaaaggguacaacuuc

SEQ ID NO: 2014125 - RNA, 19 nt, Homo sapiens
  misc_RNA (1)...(19): siRNA sense strand
gggcacugcucaccugucu

SEQ ID NO: 2014126 - RNA, 19 nt, Homo sapiens
  misc_RNA (1)...(19): siRNA sense strand
gcccucagccuccaaggaa

SEQ ID NO: 2014127 - RNA, 19 nt, Homo sapiens
  misc_RNA (1)...(19): siRNA sense strand
gcacuggccaucaucuaca

SEQ ID NO: 2014128 - RNA, 19 nt, Homo sapiens
  misc_RNA (1)...(19): siRNA sense strand
gcaacaugaccuccgaguu

SEQ ID NO: 2014129 - RNA, 19 nt, Homo sapiens
  misc_RNA (1)...(19): siRNA sense strand
cagccgcucucguccaugu

SEQ ID NO: 2014130 - RNA, 19 nt, Homo sapiens
  misc_RNA (1)...(19): siRNA sense strand
cagcugaggaccugaacaa

SEQ ID NO: 2014131 - RNA, 19 nt, Homo sapiens
  misc_RNA (1)...(19): siRNA sense strand
uugcagcccuguugugugu

SEQ ID NO: 2014132 - RNA, 19 nt, Homo sapiens
  misc_RNA (1)...(19): siRNA sense strand
agaagggccugacguacca

SEQ ID NO: 2014133 - RNA, 19 nt, Homo sapiens
  misc_RNA (1)...(19): siRNA sense strand
gagcacccgcugaacauca

SEQ ID NO: 2014134 - RNA, 19 nt, Homo sapiens
  misc_RNA (1)...(19): siRNA sense strand
cggcccagauugugaagga

SEQ ID NO: 2014135 - RNA, 19 nt, Homo sapiens
  misc_RNA (1)...(19): siRNA sense strand
gacaguggagagaaacauu

SEQ ID NO: 2014136 - RNA, 19 nt, Homo sapiens
  misc_RNA (1)...(19): siRNA sense strand
ccagcaccaucaaccucua

SEQ ID NO: 2014137 - RNA, 19 nt, Homo sapiens
  misc_RNA (1)...(19): siRNA sense strand
caacagcaccacacgaaaa

SEQ ID NO: 2014138 - RNA, 19 nt, Homo sapiens
  misc_RNA (1)...(19): siRNA sense strand
uacaacagcaccacacgaa

SEQ ID NO: 2014139 - RNA, 19 nt, Homo sapiens
  misc_RNA (1)...(19): siRNA sense strand
ucagcgggauccuguucaa

SEQ ID NO: 2014140 - RNA, 19 nt, Homo sapiens
  misc_RNA (1)...(19): siRNA sense strand
gacguaccaccgcaucgua

SEQ ID NO: 2014141 - RNA, 19 nt, Homo sapiens
  misc_RNA (1)...(19): siRNA sense strand
guucggcuaugacgugaag

SEQ ID NO: 2014142 - RNA, 19 nt, Homo sapiens
  misc_RNA (1)...(19): siRNA sense strand
acuacaagcccgaguucua

SEQ ID NO: 2014143 - RNA, 19 nt, Homo sapiens
  misc_RNA (1)...(19): siRNA sense strand
cacccgaucuccuacuaca

SEQ ID NO: 2014144 - RNA, 19 nt, Homo sapiens
  misc_RNA (1)...(19): siRNA sense strand
agcgggauccuguucaaua

SEQ ID NO: 2014145 - RNA, 19 nt, Homo sapiens
  misc_RNA (1)...(19): siRNA sense strand
gaaaagcugaggucaucaa

SEQ ID NO: 2014146 - RNA, 19 nt, Homo sapiens
  misc_RNA (1)...(19): siRNA sense strand
ggucagcgggauccuguuc

SEQ ID NO: 2014147 - RNA, 19 nt, Homo sapiens
  misc_RNA (1)...(19): siRNA sense strand
acgagacgcuggccaucga

SEQ ID NO: 2014148 - RNA, 19 nt, Homo sapiens
  misc_RNA (1)...(19): siRNA sense strand
gcugaggaccugaacaacu

SEQ ID NO: 2014149 - RNA, 19 nt, Homo sapiens
  misc_RNA (1)...(19): siRNA sense strand
cggcagcccuggaaaacaa

SEQ ID NO: 2014150 - RNA, 19 nt, Homo sapiens
  misc_RNA (1)...(19): siRNA sense strand
ggucauugucggccucugu

SEQ ID NO: 2014151 - RNA, 19 nt, Homo sapiens
  misc_RNA (1)...(19): siRNA sense strand
ggagauccgaggcuaugag

SEQ ID NO: 2014152 - RNA, 19 nt, Homo sapiens
  misc_RNA (1)...(19): siRNA sense strand
caguggagagaaacauuga

SEQ ID NO: 2014153 - RNA, 19 nt, Homo sapiens
  misc_RNA (1)...(19): siRNA sense strand
gcaccaucaaccucuacuu

SEQ ID NO: 2014154 - RNA, 19 nt, Homo sapiens
  misc_RNA (1)...(19): siRNA sense strand
ugacagcugaggaccugaa

SEQ ID NO: 2014155 - RNA, 19 nt, Homo sapiens
  misc_RNA (1)...(19): siRNA sense strand
gagcagcagccugucuugu

SEQ ID NO: 2014156 - RNA, 19 nt, Homo sapiens
  misc_RNA (1)...(19): siRNA sense strand
gcgggauccuguucaauaa

SEQ ID NO: 2014157 - RNA, 19 nt, Homo sapiens
  misc_RNA (1)...(19): siRNA sense strand
cguagaggcuuuccgguuu

SEQ ID NO: 2014158 - RNA, 19 nt, Homo sapiens
  misc_RNA (1)...(19): siRNA sense strand
caacaugaccuccgaguuc

SEQ ID NO: 2014159 - RNA, 19 nt, Homo sapiens
  misc_RNA (1)...(19): siRNA sense strand
caaggaaccugacaaccau

SEQ ID NO: 2014160 - RNA, 19 nt, Homo sapiens
  misc_RNA (1)...(19): siRNA sense strand
cugaggaccugaacaacua

SEQ ID NO: 2014161 - RNA, 19 nt, Homo sapiens
  misc_RNA (1)...(19): siRNA sense strand
gagguguucugccgggaua

SEQ ID NO: 2014162 - RNA, 19 nt, Homo sapiens
  misc_RNA (1)...(19): siRNA sense strand
ucacgacaguggagagaaa

SEQ ID NO: 2014163 - RNA, 19 nt, Homo sapiens
  misc_RNA (1)...(19): siRNA sense strand
gcagcagccugucuugugu

SEQ ID NO: 2014164 - RNA, 19 nt, Homo sapiens
  misc_RNA (1)...(19): siRNA sense strand
gggauccuguucaauaaug

SEQ ID NO: 2014165 - RNA, 19 nt, Homo sapiens
  misc_RNA (1)...(19): siRNA sense strand
guagaggcuuuccgguuug

SEQ ID NO: 2014166 - RNA, 19 nt, Homo sapiens
  misc_RNA (1)...(19): siRNA sense strand
gaggugguccgcaacauga

SEQ ID NO: 2014167 - RNA, 19 nt, Homo sapiens
  misc_RNA (1)...(19): siRNA sense strand
ccacucacccgaucuccua

SEQ ID NO: 2014168 - RNA, 19 nt, Homo sapiens
  misc_RNA (1)...(19): siRNA sense strand
gcacugcucaccugucugu

SEQ ID NO: 2014169 - RNA, 19 nt, Homo sapiens
  misc_RNA (1)...(19): siRNA sense strand
gagacgcggugcuguacau

SEQ ID NO: 2014170 - RNA, 19 nt, Homo sapiens
  misc_RNA (1)...(19): siRNA sense strand
ccacugcacuggccaucau

SEQ ID NO: 2014171 - RNA, 19 nt, Homo sapiens
  misc_RNA (1)...(19): siRNA sense strand
caccaucaaccucuacuuu

SEQ ID NO: 2014172 - RNA, 19 nt, Homo sapiens
  misc_RNA (1)...(19): siRNA sense strand
ggauccuguucaauaauga

SEQ ID NO: 2014173 - RNA, 19 nt, Homo sapiens
  misc_RNA (1)...(19): siRNA sense strand
ccaaggaaccugacaacca

SEQ ID NO: 2014174 - RNA, 19 nt, Homo sapiens
  misc_RNA (1)...(19): siRNA sense strand
gaaccugacaaccaugugu

SEQ ID NO: 2014175 - RNA, 19 nt, Homo sapiens
  misc_RNA (1)...(19): siRNA sense strand
ccaucaaccucuacuuugg

SEQ ID NO: 2014176 - RNA, 19 nt, Homo sapiens
  misc_RNA (1)...(19): siRNA sense strand
ccucaaaggguacaacuuc

SEQ ID NO: 2014177 - RNA, 19 nt, Homo sapiens
  misc_RNA (1)...(19): siRNA sense strand
gggcacugcucaccugucu

SEQ ID NO: 2014178 - RNA, 19 nt, Homo sapiens
  misc_RNA (1)...(19): siRNA sense strand
gcccucagccuccaaggaa

SEQ ID NO: 2014179 - RNA, 19 nt, Homo sapiens
  misc_RNA (1)...(19): siRNA sense strand
gcacuggccaucaucuaca

SEQ ID NO: 2014180 - RNA, 19 nt, Homo sapiens
  misc_RNA (1)...(19): siRNA sense strand
gcaacaugaccuccgaguu

SEQ ID NO: 2014181 - RNA, 19 nt, Homo sapiens
  misc_RNA (1)...(19): siRNA sense strand
cagccgcucucguccaugu

SEQ ID NO: 2014182 - RNA, 19 nt, Homo sapiens
  misc_RNA (1)...(19): siRNA sense strand
cagcugaggaccugaacaa

SEQ ID NO: 2014183 - RNA, 19 nt, Homo sapiens
  misc_RNA (1)...(19): siRNA sense strand
uugcagcccuguugugugu

SEQ ID NO: 2014184 - RNA, 19 nt, Homo sapiens
  misc_RNA (1)...(19): siRNA sense strand
agaagggccugacguacca

SEQ ID NO: 2014185 - RNA, 19 nt, Homo sapiens
  misc_RNA (1)...(19): siRNA sense strand
gagcacccgcugaacauca

SEQ ID NO: 2014186 - RNA, 19 nt, Homo sapiens
  misc_RNA (1)...(19): siRNA sense strand
cggcccagauugugaagga

SEQ ID NO: 2014187 - RNA, 19 nt, Homo sapiens
  misc_RNA (1)...(19): siRNA sense strand
gacaguggagagaaacauu

SEQ ID NO: 2014188 - RNA, 19 nt, Homo sapiens
  misc_RNA (1)...(19): siRNA sense strand
ccagcaccaucaaccucua

SEQ ID NO: 2014189 - RNA, 19 nt, Homo sapiens
  misc_RNA (1)...(19): siRNA sense strand
caacagcaccacacgaaaa

SEQ ID NO: 2014190 - RNA, 19 nt, Homo sapiens
  misc_RNA (1)...(19): siRNA sense strand
uacaacagcaccacacgaa

SEQ ID NO: 2014191 - RNA, 19 nt, Homo sapiens
  misc_RNA (1)...(19): siRNA sense strand
ucagcgggauccuguucaa

SEQ ID NO: 2014192 - RNA, 19 nt, Homo sapiens
  misc_RNA (1)...(19): siRNA sense strand
gacguaccaccgcaucgua

SEQ ID NO: 2014193 - RNA, 19 nt, Homo sapiens
  misc_RNA (1)...(19): siRNA sense strand
guucggcuaugacgugaag

SEQ ID NO: 2014194 - RNA, 19 nt, Homo sapiens
  misc_RNA (1)...(19): siRNA sense strand
acuacaagcccgaguucua

SEQ ID NO: 2014195 - RNA, 19 nt, Homo sapiens
  misc_RNA (1)...(19): siRNA sense strand
cacccgaucuccuacuaca

SEQ ID NO: 2014196 - RNA, 19 nt, Homo sapiens
  misc_RNA (1)...(19): siRNA sense strand
agcgggauccuguucaaua

SEQ ID NO: 2014197 - RNA, 19 nt, Homo sapiens
  misc_RNA (1)...(19): siRNA sense strand
gaaaagcugaggucaucaa

SEQ ID NO: 2014198 - RNA, 19 nt, Homo sapiens
  misc_RNA (1)...(19): siRNA sense strand
ggucagcgggauccuguuc

SEQ ID NO: 2014199 - RNA, 19 nt, Homo sapiens
  misc_RNA (1)...(19): siRNA sense strand
acgagacgcuggccaucga

SEQ ID NO: 2014200 - RNA, 19 nt, Homo sapiens
  misc_RNA (1)...(19): siRNA sense strand
gcugaggaccugaacaacu

SEQ ID NO: 2014201 - RNA, 19 nt, Homo sapiens
  misc_RNA (1)...(19): siRNA sense strand
cggcagcccuggaaaacaa

SEQ ID NO: 2014202 - RNA, 19 nt, Homo sapiens
  misc_RNA (1)...(19): siRNA sense strand
ggucauugucggccucugu

SEQ ID NO: 2014203 - RNA, 19 nt, Homo sapiens
  misc_RNA (1)...(19): siRNA sense strand
ggagauccgaggcuaugag

SEQ ID NO: 2014204 - RNA, 19 nt, Homo sapiens
  misc_RNA (1)...(19): siRNA sense strand
caguggagagaaacauuga

SEQ ID NO: 2014205 - RNA, 19 nt, Homo sapiens
  misc_RNA (1)...(19): siRNA sense strand
gcaccaucaaccucuacuu

SEQ ID NO: 2014206 - RNA, 19 nt, Homo sapiens
  misc_RNA (1)...(19): siRNA sense strand
ugacagcugaggaccugaa

SEQ ID NO: 2014207 - RNA, 19 nt, Homo sapiens
  misc_RNA (1)...(19): siRNA sense strand
gagcagcagccugucuugu

SEQ ID NO: 2014208 - RNA, 19 nt, Homo sapiens
  misc_RNA (1)...(19): siRNA sense strand
gcgggauccuguucaauaa

SEQ ID NO: 2014209 - RNA, 19 nt, Homo sapiens
  misc_RNA (1)...(19): siRNA sense strand
cguagaggcuuuccgguuu

SEQ ID NO: 2014210 - RNA, 19 nt, Homo sapiens
  misc_RNA (1)...(19): siRNA sense strand
caacaugaccuccgaguuc

SEQ ID NO: 2014211 - RNA, 19 nt, Homo sapiens
  misc_RNA (1)...(19): siRNA sense strand
caaggaaccugacaaccau

SEQ ID NO: 2014212 - RNA, 19 nt, Homo sapiens
  misc_RNA (1)...(19): siRNA sense strand
cugaggaccugaacaacua

SEQ ID NO: 2014213 - RNA, 19 nt, Homo sapiens
  misc_RNA (1)...(19): siRNA sense strand
gagguguucugccgggaua

SEQ ID NO: 2014214 - RNA, 19 nt, Homo sapiens
  misc_RNA (1)...(19): siRNA sense strand
ucacgacaguggagagaaa

SEQ ID NO: 2014215 - RNA, 19 nt, Homo sapiens
  misc_RNA (1)...(19): siRNA sense strand
gcagcagccugucuugugu

SEQ ID NO: 2014216 - RNA, 19 nt, Homo sapiens
  misc_RNA (1)...(19): siRNA sense strand
gggauccuguucaauaaug

SEQ ID NO: 2014217 - RNA, 19 nt, Homo sapiens
  misc_RNA (1)...(19): siRNA sense strand
guagaggcuuuccgguuug

SEQ ID NO: 2014218 - RNA, 19 nt, Homo sapiens
  misc_RNA (1)...(19): siRNA sense strand
gaggugguccgcaacauga

SEQ ID NO: 2014219 - RNA, 19 nt, Homo sapiens
  misc_RNA (1)...(19): siRNA sense strand
ccacucacccgaucuccua

SEQ ID NO: 2014220 - RNA, 19 nt, Homo sapiens
  misc_RNA (1)...(19): siRNA sense strand
gcacugcucaccugucugu

SEQ ID NO: 2014221 - RNA, 19 nt, Homo sapiens
  misc_RNA (1)...(19): siRNA sense strand
gagacgcggugcuguacau

SEQ ID NO: 2014222 - RNA, 19 nt, Homo sapiens
  misc_RNA (1)...(19): siRNA sense strand
ccacugcacuggccaucau

SEQ ID NO: 2014223 - RNA, 19 nt, Homo sapiens
  misc_RNA (1)...(19): siRNA sense strand
caccaucaaccucuacuuu

SEQ ID NO: 2014224 - RNA, 19 nt, Homo sapiens
  misc_RNA (1)...(19): siRNA sense strand
ggauccuguucaauaauga

SEQ ID NO: 2014225 - RNA, 19 nt, Homo sapiens
  misc_RNA (1)...(19): siRNA sense strand
ccaaggaaccugacaacca

SEQ ID NO: 2014226 - RNA, 19 nt, Homo sapiens
  misc_RNA (1)...(19): siRNA sense strand
gaaccugacaaccaugugu

SEQ ID NO: 2014227 - RNA, 19 nt, Homo sapiens
  misc_RNA (1)...(19): siRNA sense strand
ccaucaaccucuacuuugg

SEQ ID NO: 2014228 - RNA, 19 nt, Homo sapiens
  misc_RNA (1)...(19): siRNA sense strand
ccucaaaggguacaacuuc

SEQ ID NO: 2014229 - RNA, 19 nt, Homo sapiens
  misc_RNA (1)...(19): siRNA sense strand
gggcacugcucaccugucu

SEQ ID NO: 2014230 - RNA, 19 nt, Homo sapiens
  misc_RNA (1)...(19): siRNA sense strand
gcccucagccuccaaggaa

SEQ ID NO: 2014231 - RNA, 19 nt, Homo sapiens
  misc_RNA (1)...(19): siRNA sense strand
gcacuggccaucaucuaca

SEQ ID NO: 2014232 - RNA, 19 nt, Homo sapiens
  misc_RNA (1)...(19): siRNA sense strand
gcaacaugaccuccgaguu

SEQ ID NO: 2014233 - RNA, 19 nt, Homo sapiens
  misc_RNA (1)...(19): siRNA sense strand
cagccgcucucguccaugu

SEQ ID NO: 2014234 - RNA, 19 nt, Homo sapiens
  misc_RNA (1)...(19): siRNA sense strand
cagcugaggaccugaacaa

SEQ ID NO: 2014235 - RNA, 19 nt, Homo sapiens
  misc_RNA (1)...(19): siRNA sense strand
uugcagcccuguugugugu

SEQ ID NO: 2014236 - RNA, 19 nt, Homo sapiens
  misc_RNA (1)...(19): siRNA sense strand
agaagggccugacguacca

SEQ ID NO: 2014237 - RNA, 19 nt, Homo sapiens
  misc_RNA (1)...(19): siRNA sense strand
gagcacccgcugaacauca

SEQ ID NO: 2014238 - RNA, 19 nt, Homo sapiens
  misc_RNA (1)...(19): siRNA sense strand
cggcccagauugugaagga

SEQ ID NO: 2014239 - RNA, 19 nt, Homo sapiens
  misc_RNA (1)...(19): siRNA sense strand
gacaguggagagaaacauu

SEQ ID NO: 2014240 - RNA, 19 nt, Homo sapiens
  misc_RNA (1)...(19): siRNA sense strand
ccagcaccaucaaccucua

SEQ ID NO: 2014241 - RNA, 19 nt, Homo sapiens
  misc_RNA (1)...(19): siRNA sense strand
caacagcaccacacgaaaa

SEQ ID NO: 2014242 - RNA, 19 nt, Homo sapiens
  misc_RNA (1)...(19): siRNA sense strand
uacaacagcaccacacgaa

SEQ ID NO: 2014243 - RNA, 19 nt, Homo sapiens
  misc_RNA (1)...(19): siRNA sense strand
ucagcgggauccuguucaa

SEQ ID NO: 2014244 - RNA, 19 nt, Homo sapiens
  misc_RNA (1)...(19): siRNA sense strand
gacguaccaccgcaucgua

SEQ ID NO: 2014245 - RNA, 19 nt, Homo sapiens
  misc_RNA (1)...(19): siRNA sense strand
guucggcuaugacgugaag

SEQ ID NO: 2014246 - RNA, 19 nt, Homo sapiens
  misc_RNA (1)...(19): siRNA sense strand
acuacaagcccgaguucua

SEQ ID NO: 2014247 - RNA, 19 nt, Homo sapiens
  misc_RNA (1)...(19): siRNA sense strand
cacccgaucuccuacuaca

SEQ ID NO: 2014248 - RNA, 19 nt, Homo sapiens
  misc_RNA (1)...(19): siRNA sense strand
agcgggauccuguucaaua

SEQ ID NO: 2014249 - RNA, 19 nt, Homo sapiens
  misc_RNA (1)...(19): siRNA sense strand
gaaaagcugaggucaucaa

SEQ ID NO: 2014250 - RNA, 19 nt, Homo sapiens
  misc_RNA (1)...(19): siRNA sense strand
ggucagcgggauccuguuc

SEQ ID NO: 2014251 - RNA, 19 nt, Homo sapiens
  misc_RNA (1)...(19): siRNA sense strand
acgagacgcuggccaucga

SEQ ID NO: 2014252 - RNA, 19 nt, Homo sapiens
  misc_RNA (1)...(19): siRNA sense strand
gcugaggaccugaacaacu

SEQ ID NO: 2014253 - RNA, 19 nt, Homo sapiens
  misc_RNA (1)...(19): siRNA sense strand
cggcagcccuggaaaacaa

SEQ ID NO: 2014254 - RNA, 19 nt, Homo sapiens
  misc_RNA (1)...(19): siRNA sense strand
ggucauugucggccucugu

SEQ ID NO: 2014255 - RNA, 19 nt, Homo sapiens
  misc_RNA (1)...(19): siRNA sense strand
ggagauccgaggcuaugag

SEQ ID NO: 2014256 - RNA, 19 nt, Homo sapiens
  misc_RNA (1)...(19): siRNA sense strand
caguggagagaaacauuga

SEQ ID NO: 2014257 - RNA, 19 nt, Homo sapiens
  misc_RNA (1)...(19): siRNA sense strand
gcaccaucaaccucuacuu

SEQ ID NO: 2014258 - RNA, 19 nt, Homo sapiens
  misc_RNA (1)...(19): siRNA sense strand
ugacagcugaggaccugaa

SEQ ID NO: 2014259 - RNA, 19 nt, Homo sapiens
  misc_RNA (1)...(19): siRNA sense strand
gagcagcagccugucuugu

SEQ ID NO: 2014260 - RNA, 19 nt, Homo sapiens
  misc_RNA (1)...(19): siRNA sense strand
gcgggauccuguucaauaa

SEQ ID NO: 2014261 - RNA, 19 nt, Homo sapiens
  misc_RNA (1)...(19): siRNA sense strand
cguagaggcuuuccgguuu

SEQ ID NO: 2014262 - RNA, 19 nt, Homo sapiens
  misc_RNA (1)...(19): siRNA sense strand
caacaugaccuccgaguuc

SEQ ID NO: 2014263 - RNA, 19 nt, Homo sapiens
  misc_RNA (1)...(19): siRNA sense strand
caaggaaccugacaaccau

SEQ ID NO: 2014264 - RNA, 19 nt, Homo sapiens
  misc_RNA (1)...(19): siRNA sense strand
cugaggaccugaacaacua

SEQ ID NO: 2014265 - RNA, 19 nt, Homo sapiens
  misc_RNA (1)...(19): siRNA sense strand
gagguguucugccgggaua

SEQ ID NO: 2014266 - RNA, 19 nt, Homo sapiens
  misc_RNA (1)...(19): siRNA sense strand
ucacgacaguggagagaaa

SEQ ID NO: 2014267 - RNA, 19 nt, Homo sapiens
  misc_RNA (1)...(19): siRNA sense strand
gcagcagccugucuugugu

SEQ ID NO: 2014268 - RNA, 19 nt, Homo sapiens
  misc_RNA (1)...(19): siRNA sense strand
gggauccuguucaauaaug

SEQ ID NO: 2014269 - RNA, 19 nt, Homo sapiens
  misc_RNA (1)...(19): siRNA sense strand
guagaggcuuuccgguuug

SEQ ID NO: 2014270 - RNA, 19 nt, Homo sapiens
  misc_RNA (1)...(19): siRNA sense strand
gaggugguccgcaacauga

SEQ ID NO: 2014271 - RNA, 19 nt, Homo sapiens
  misc_RNA (1)...(19): siRNA sense strand
ccacucacccgaucuccua

SEQ ID NO: 2014272 - RNA, 19 nt, Homo sapiens
  misc_RNA (1)...(19): siRNA sense strand
gcacugcucaccugucugu

SEQ ID NO: 2014273 - RNA, 19 nt, Homo sapiens
  misc_RNA (1)...(19): siRNA sense strand
gagacgcggugcuguacau

SEQ ID NO: 2014274 - RNA, 19 nt, Homo sapiens
  misc_RNA (1)...(19): siRNA sense strand
ccacugcacuggccaucau

SEQ ID NO: 2014275 - RNA, 19 nt, Homo sapiens
  misc_RNA (1)...(19): siRNA sense strand
caccaucaaccucuacuuu

SEQ ID NO: 2014276 - RNA, 19 nt, Homo sapiens
  misc_RNA (1)...(19): siRNA sense strand
ggauccuguucaauaauga

SEQ ID NO: 2014277 - RNA, 19 nt, Homo sapiens
  misc_RNA (1)...(19): siRNA sense strand
ccaaggaaccugacaacca

SEQ ID NO: 2014278 - RNA, 19 nt, Homo sapiens
  misc_RNA (1)...(19): siRNA sense strand
gaaccugacaaccaugugu

SEQ ID NO: 2014279 - RNA, 19 nt, Homo sapiens
  misc_RNA (1)...(19): siRNA sense strand
ccaucaaccucuacuuugg

SEQ ID NO: 2014280 - RNA, 19 nt, Homo sapiens
  misc_RNA (1)...(19): siRNA sense strand
ccucaaaggguacaacuuc

SEQ ID NO: 2014281 - RNA, 19 nt, Homo sapiens
  misc_RNA (1)...(19): siRNA sense strand
gggcacugcucaccugucu

SEQ ID NO: 2014282 - RNA, 19 nt, Homo sapiens
  misc_RNA (1)...(19): siRNA sense strand
gcccucagccuccaaggaa

SEQ ID NO: 2014283 - RNA, 19 nt, Homo sapiens
  misc_RNA (1)...(19): siRNA sense strand
gcacuggccaucaucuaca

SEQ ID NO: 2014284 - RNA, 19 nt, Homo sapiens
  misc_RNA (1)...(19): siRNA sense strand
gcaacaugaccuccgaguu

SEQ ID NO: 2014285 - RNA, 19 nt, Homo sapiens
  misc_RNA (1)...(19): siRNA sense strand
cagccgcucucguccaugu

SEQ ID NO: 2014286 - RNA, 19 nt, Homo sapiens
  misc_RNA (1)...(19): siRNA sense strand
cagcugaggaccugaacaa

SEQ ID NO: 2014287 - RNA, 19 nt, Homo sapiens
  misc_RNA (1)...(19): siRNA sense strand
uugcagcccuguugugugu

SEQ ID NO: 2014288 - RNA, 19 nt, Homo sapiens
  misc_RNA (1)...(19): siRNA sense strand
agaagggccugacguacca

SEQ ID NO: 2014289 - RNA, 19 nt, Homo sapiens
  misc_RNA (1)...(19): siRNA sense strand
gagcacccgcugaacauca

SEQ ID NO: 2014290 - RNA, 19 nt, Homo sapiens
  misc_RNA (1)...(19): siRNA sense strand
cggcccagauugugaagga

SEQ ID NO: 2014291 - RNA, 19 nt, Homo sapiens
  misc_RNA (1)...(19): siRNA sense strand
gacaguggagagaaacauu

SEQ ID NO: 2014292 - RNA, 19 nt, Homo sapiens
  misc_RNA (1)...(19): siRNA sense strand
ccagcaccaucaaccucua

SEQ ID NO: 2014293 - RNA, 19 nt, Homo sapiens
  misc_RNA (1)...(19): siRNA sense strand
caacagcaccacacgaaaa

SEQ ID NO: 2014294 - RNA, 19 nt, Homo sapiens
  misc_RNA (1)...(19): siRNA sense strand
uacaacagcaccacacgaa

SEQ ID NO: 2014295 - RNA, 19 nt, Homo sapiens
  misc_RNA (1)...(19): siRNA sense strand
ucagcgggauccuguucaa

SEQ ID NO: 2014296 - RNA, 19 nt, Homo sapiens
  misc_RNA (1)...(19): siRNA sense strand
gacguaccaccgcaucgua

SEQ ID NO: 2014297 - RNA, 19 nt, Homo sapiens
  misc_RNA (1)...(19): siRNA sense strand
guucggcuaugacgugaag

SEQ ID NO: 2014298 - RNA, 19 nt, Homo sapiens
  misc_RNA (1)...(19): siRNA sense strand
acuacaagcccgaguucua

SEQ ID NO: 2014299 - RNA, 19 nt, Homo sapiens
  misc_RNA (1)...(19): siRNA sense strand
cacccgaucuccuacuaca

SEQ ID NO: 2014300 - RNA, 19 nt, Homo sapiens
  misc_RNA (1)...(19): siRNA sense strand
agcgggauccuguucaaua

SEQ ID NO: 2014301 - RNA, 19 nt, Homo sapiens
  misc_RNA (1)...(19): siRNA sense strand
gaaaagcugaggucaucaa

SEQ ID NO: 2014302 - RNA, 19 nt, Homo sapiens
  misc_RNA (1)...(19): siRNA sense strand
ggucagcgggauccuguuc

SEQ ID NO: 2014303 - RNA, 19 nt, Homo sapiens
  misc_RNA (1)...(19): siRNA sense strand
acgagacgcuggccaucga

SEQ ID NO: 2014304 - RNA, 19 nt, Homo sapiens
  misc_RNA (1)...(19): siRNA sense strand
gcugaggaccugaacaacu

SEQ ID NO: 2014305 - RNA, 19 nt, Homo sapiens
  misc_RNA (1)...(19): siRNA sense strand
cggcagcccuggaaaacaa

SEQ ID NO: 2014306 - RNA, 19 nt, Homo sapiens
  misc_RNA (1)...(19): siRNA sense strand
ggucauugucggccucugu

SEQ ID NO: 2014307 - RNA, 19 nt, Homo sapiens
  misc_RNA (1)...(19): siRNA sense strand
ggagauccgaggcuaugag

SEQ ID NO: 2014308 - RNA, 19 nt, Homo sapiens
  misc_RNA (1)...(19): siRNA sense strand
caguggagagaaacauuga

SEQ ID NO: 2014309 - RNA, 19 nt, Homo sapiens
  misc_RNA (1)...(19): siRNA sense strand
gcaccaucaaccucuacuu

SEQ ID NO: 2014310 - RNA, 19 nt, Homo sapiens
  misc_RNA (1)...(19): siRNA sense strand
ugacagcugaggaccugaa

SEQ ID NO: 2014311 - RNA, 19 nt, Homo sapiens
  misc_RNA (1)...(19): siRNA sense strand
gagcagcagccugucuugu

SEQ ID NO: 2014312 - RNA, 19 nt, Homo sapiens
  misc_RNA (1)...(19): siRNA sense strand
gcgggauccuguucaauaa

SEQ ID NO: 2014313 - RNA, 19 nt, Homo sapiens
  misc_RNA (1)...(19): siRNA sense strand
cguagaggcuuuccgguuu

SEQ ID NO: 2014314 - RNA, 19 nt, Homo sapiens
  misc_RNA (1)...(19): siRNA sense strand
caacaugaccuccgaguuc

SEQ ID NO: 2014315 - RNA, 19 nt, Homo sapiens
  misc_RNA (1)...(19): siRNA sense strand
caaggaaccugacaaccau

SEQ ID NO: 2014316 - RNA, 19 nt, Homo sapiens
  misc_RNA (1)...(19): siRNA sense strand
cugaggaccugaacaacua

SEQ ID NO: 2014317 - RNA, 19 nt, Homo sapiens
  misc_RNA (1)...(19): siRNA sense strand
gagguguucugccgggaua

SEQ ID NO: 2014318 - RNA, 19 nt, Homo sapiens
  misc_RNA (1)...(19): siRNA sense strand
ucacgacaguggagagaaa

SEQ ID NO: 2014319 - RNA, 19 nt, Homo sapiens
  misc_RNA (1)...(19): siRNA sense strand
gcagcagccugucuugugu

SEQ ID NO: 2014320 - RNA, 19 nt, Homo sapiens
  misc_RNA (1)...(19): siRNA sense strand
gggauccuguucaauaaug

SEQ ID NO: 2014321 - RNA, 19 nt, Homo sapiens
  misc_RNA (1)...(19): siRNA sense strand
guagaggcuuuccgguuug

SEQ ID NO: 2014322 - RNA, 19 nt, Homo sapiens
  misc_RNA (1)...(19): siRNA sense strand
gaggugguccgcaacauga

SEQ ID NO: 2014323 - RNA, 19 nt, Homo sapiens
  misc_RNA (1)...(19): siRNA sense strand
ccacucacccgaucuccua

SEQ ID NO: 2014324 - RNA, 19 nt, Homo sapiens
  misc_RNA (1)...(19): siRNA sense strand
gcacugcucaccugucugu

SEQ ID NO: 2014325 - RNA, 19 nt, Homo sapiens
  misc_RNA (1)...(19): siRNA sense strand
gagacgcggugcuguacau

SEQ ID NO: 2014326 - RNA, 19 nt, Homo sapiens
  misc_RNA (1)...(19): siRNA sense strand
ccacugcacuggccaucau

SEQ ID NO: 2014327 - RNA, 19 nt, Homo sapiens
  misc_RNA (1)...(19): siRNA sense strand
caccaucaaccucuacuuu

SEQ ID NO: 2014328 - RNA, 19 nt, Homo sapiens
  misc_RNA (1)...(19): siRNA sense strand
ggauccuguucaauaauga

SEQ ID NO: 2014329 - RNA, 19 nt, Homo sapiens
  misc_RNA (1)...(19): siRNA sense strand
ccaaggaaccugacaacca

SEQ ID NO: 2014330 - RNA, 19 nt, Homo sapiens
  misc_RNA (1)...(19): siRNA sense strand
gaaccugacaaccaugugu

SEQ ID NO: 2014331 - RNA, 19 nt, Homo sapiens
  misc_RNA (1)...(19): siRNA sense strand
ccaucaaccucuacuuugg

SEQ ID NO: 2014332 - RNA, 19 nt, Homo sapiens
  misc_RNA (1)...(19): siRNA sense strand
ccucaaaggguacaacuuc

SEQ ID NO: 2014333 - RNA, 19 nt, Homo sapiens
  misc_RNA (1)...(19): siRNA sense strand
gggcacugcucaccugucu

SEQ ID NO: 2014334 - RNA, 19 nt, Homo sapiens
  misc_RNA (1)...(19): siRNA sense strand
gcccucagccuccaaggaa

SEQ ID NO: 2014335 - RNA, 19 nt, Homo sapiens
  misc_RNA (1)...(19): siRNA sense strand
gcacuggccaucaucuaca

SEQ ID NO: 2014336 - RNA, 19 nt, Homo sapiens
  misc_RNA (1)...(19): siRNA sense strand
gcaacaugaccuccgaguu

SEQ ID NO: 2014337 - RNA, 19 nt, Homo sapiens
  misc_RNA (1)...(19): siRNA sense strand
cagccgcucucguccaugu

SEQ ID NO: 2014338 - RNA, 19 nt, Homo sapiens
  misc_RNA (1)...(19): siRNA sense strand
cagcugaggaccugaacaa

SEQ ID NO: 2014339 - RNA, 19 nt, Homo sapiens
  misc_RNA (1)...(19): siRNA sense strand
uugcagcccuguugugugu

SEQ ID NO: 2014340 - RNA, 19 nt, Homo sapiens
  misc_RNA (1)...(19): siRNA sense strand
agaagggccugacguacca

SEQ ID NO: 2014341 - RNA, 19 nt, Homo sapiens
  misc_RNA (1)...(19): siRNA sense strand
gagcacccgcugaacauca

SEQ ID NO: 2014342 - RNA, 19 nt, Homo sapiens
  misc_RNA (1)...(19): siRNA sense strand
cggcccagauugugaagga

SEQ ID NO: 2014343 - RNA, 19 nt, Homo sapiens
  misc_RNA (1)...(19): siRNA sense strand
gacaguggagagaaacauu

SEQ ID NO: 2014344 - RNA, 19 nt, Homo sapiens
  misc_RNA (1)...(19): siRNA sense strand
ccagcaccaucaaccucua

SEQ ID NO: 2014345 - RNA, 19 nt, Homo sapiens
  misc_RNA (1)...(19): siRNA sense strand
caacagcaccacacgaaaa

SEQ ID NO: 2014346 - RNA, 19 nt, Homo sapiens
  misc_RNA (1)...(19): siRNA sense strand
uacaacagcaccacacgaa

SEQ ID NO: 2014347 - RNA, 19 nt, Homo sapiens
  misc_RNA (1)...(19): siRNA sense strand
ucagcgggauccuguucaa

SEQ ID NO: 2014348 - RNA, 19 nt, Homo sapiens
  misc_RNA (1)...(19): siRNA sense strand
gacguaccaccgcaucgua

SEQ ID NO: 2014349 - RNA, 19 nt, Homo sapiens
  misc_RNA (1)...(19): siRNA sense strand
guucggcuaugacgugaag

SEQ ID NO: 2014350 - RNA, 19 nt, Homo sapiens
  misc_RNA (1)...(19): siRNA sense strand
acuacaagcccgaguucua

SEQ ID NO: 2014351 - RNA, 19 nt, Homo sapiens
  misc_RNA (1)...(19): siRNA sense strand
cacccgaucuccuacuaca

SEQ ID NO: 2014352 - RNA, 19 nt, Homo sapiens
  misc_RNA (1)...(19): siRNA sense strand
agcgggauccuguucaaua

SEQ ID NO: 2014353 - RNA, 19 nt, Homo sapiens
  misc_RNA (1)...(19): siRNA sense strand
gaaaagcugaggucaucaa

SEQ ID NO: 2014354 - RNA, 19 nt, Homo sapiens
  misc_RNA (1)...(19): siRNA sense strand
ggucagcgggauccuguuc

SEQ ID NO: 2014355 - RNA, 19 nt, Homo sapiens
  misc_RNA (1)...(19): siRNA sense strand
acgagacgcuggccaucga

SEQ ID NO: 2014356 - RNA, 19 nt, Homo sapiens
  misc_RNA (1)...(19): siRNA sense strand
gcugaggaccugaacaacu

SEQ ID NO: 2014357 - RNA, 19 nt, Homo sapiens
  misc_RNA (1)...(19): siRNA sense strand
cggcagcccuggaaaacaa

SEQ ID NO: 2014358 - RNA, 19 nt, Homo sapiens
  misc_RNA (1)...(19): siRNA sense strand
ggucauugucggccucugu

SEQ ID NO: 2014359 - RNA, 19 nt, Homo sapiens
  misc_RNA (1)...(19): siRNA sense strand
ggagauccgaggcuaugag

SEQ ID NO: 2014360 - RNA, 19 nt, Homo sapiens
  misc_RNA (1)...(19): siRNA sense strand
caguggagagaaacauuga

SEQ ID NO: 2014361 - RNA, 19 nt, Homo sapiens
  misc_RNA (1)...(19): siRNA sense strand
gcaccaucaaccucuacuu

SEQ ID NO: 2014362 - RNA, 19 nt, Homo sapiens
  misc_RNA (1)...(19): siRNA sense strand
ugacagcugaggaccugaa

SEQ ID NO: 2014363 - RNA, 19 nt, Homo sapiens
  misc_RNA (1)...(19): siRNA sense strand
gagcagcagccugucuugu

SEQ ID NO: 2014364 - RNA, 19 nt, Homo sapiens
  misc_RNA (1)...(19): siRNA sense strand
gcgggauccuguucaauaa

SEQ ID NO: 2014365 - RNA, 19 nt, Homo sapiens
  misc_RNA (1)...(19): siRNA sense strand
cguagaggcuuuccgguuu

SEQ ID NO: 2014366 - RNA, 19 nt, Homo sapiens
  misc_RNA (1)...(19): siRNA sense strand
caacaugaccuccgaguuc

SEQ ID NO: 2014367 - RNA, 19 nt, Homo sapiens
  misc_RNA (1)...(19): siRNA sense strand
caaggaaccugacaaccau

SEQ ID NO: 2014368 - RNA, 19 nt, Homo sapiens
  misc_RNA (1)...(19): siRNA sense strand
cugaggaccugaacaacua

SEQ ID NO: 2014369 - RNA, 19 nt, Homo sapiens
  misc_RNA (1)...(19): siRNA sense strand
gagguguucugccgggaua

SEQ ID NO: 2014370 - RNA, 19 nt, Homo sapiens
  misc_RNA (1)...(19): siRNA sense strand
ucacgacaguggagagaaa

SEQ ID NO: 2014371 - RNA, 19 nt, Homo sapiens
  misc_RNA (1)...(19): siRNA sense strand
gcagcagccugucuugugu

SEQ ID NO: 2014372 - RNA, 19 nt, Homo sapiens
  misc_RNA (1)...(19): siRNA sense strand
gggauccuguucaauaaug

SEQ ID NO: 2014373 - RNA, 19 nt, Homo sapiens
  misc_RNA (1)...(19): siRNA sense strand
guagaggcuuuccgguuug

SEQ ID NO: 2014374 - RNA, 19 nt, Homo sapiens
  misc_RNA (1)...(19): siRNA sense strand
gaggugguccgcaacauga

SEQ ID NO: 2014375 - RNA, 19 nt, Homo sapiens
  misc_RNA (1)...(19): siRNA sense strand
ccacucacccgaucuccua

SEQ ID NO: 2014376 - RNA, 19 nt, Homo sapiens
  misc_RNA (1)...(19): siRNA sense strand
gcacugcucaccugucugu

SEQ ID NO: 2014377 - RNA, 19 nt, Homo sapiens
  misc_RNA (1)...(19): siRNA sense strand
gagacgcggugcuguacau

SEQ ID NO: 2014378 - RNA, 19 nt, Homo sapiens
  misc_RNA (1)...(19): siRNA sense strand
ccacugcacuggccaucau

SEQ ID NO: 2014379 - RNA, 19 nt, Homo sapiens
  misc_RNA (1)...(19): siRNA sense strand
caccaucaaccucuacuuu

SEQ ID NO: 2014380 - RNA, 19 nt, Homo sapiens
  misc_RNA (1)...(19): siRNA sense strand
ggauccuguucaauaauga

SEQ ID NO: 2014381 - RNA, 19 nt, Homo sapiens
  misc_RNA (1)...(19): siRNA sense strand
ccaaggaaccugacaacca

SEQ ID NO: 2014382 - RNA, 19 nt, Homo sapiens
  misc_RNA (1)...(19): siRNA sense strand
gaaccugacaaccaugugu

SEQ ID NO: 2014383 - RNA, 19 nt, Homo sapiens
  misc_RNA (1)...(19): siRNA sense strand
ccaucaaccucuacuuugg

SEQ ID NO: 2014384 - RNA, 19 nt, Homo sapiens
  misc_RNA (1)...(19): siRNA sense strand
ccucaaaggguacaacuuc

SEQ ID NO: 2014385 - RNA, 19 nt, Homo sapiens
  misc_RNA (1)...(19): siRNA sense strand
gggcacugcucaccugucu

SEQ ID NO: 2014386 - RNA, 19 nt, Homo sapiens
  misc_RNA (1)...(19): siRNA sense strand
gcccucagccuccaaggaa

SEQ ID NO: 2014387 - RNA, 19 nt, Homo sapiens
  misc_RNA (1)...(19): siRNA sense strand
gcacuggccaucaucuaca

SEQ ID NO: 2014388 - RNA, 19 nt, Homo sapiens
  misc_RNA (1)...(19): siRNA sense strand
gcaacaugaccuccgaguu

SEQ ID NO: 2014389 - RNA, 19 nt, Homo sapiens
  misc_RNA (1)...(19): siRNA sense strand
cagccgcucucguccaugu

SEQ ID NO: 2014390 - RNA, 19 nt, Homo sapiens
  misc_RNA (1)...(19): siRNA sense strand
cagcugaggaccugaacaa

SEQ ID NO: 2014391 - RNA, 19 nt, Homo sapiens
  misc_RNA (1)...(19): siRNA sense strand
uugcagcccuguugugugu

SEQ ID NO: 2014392 - RNA, 19 nt, Homo sapiens
  misc_RNA (1)...(19): siRNA sense strand
agaagggccugacguacca

SEQ ID NO: 2014393 - RNA, 19 nt, Homo sapiens
  misc_RNA (1)...(19): siRNA sense strand
gagcacccgcugaacauca

SEQ ID NO: 2014394 - RNA, 19 nt, Homo sapiens
  misc_RNA (1)...(19): siRNA sense strand
cggcccagauugugaagga

SEQ ID NO: 2014395 - RNA, 19 nt, Homo sapiens
  misc_RNA (1)...(19): siRNA sense strand
gacaguggagagaaacauu

SEQ ID NO: 2014396 - RNA, 19 nt, Homo sapiens
  misc_RNA (1)...(19): siRNA sense strand
ccagcaccaucaaccucua

SEQ ID NO: 2014397 - RNA, 19 nt, Homo sapiens
  misc_RNA (1)...(19): siRNA sense strand
caacagcaccacacgaaaa

SEQ ID NO: 2014398 - RNA, 19 nt, Homo sapiens
  misc_RNA (1)...(19): siRNA sense strand
uacaacagcaccacacgaa

SEQ ID NO: 2014399 - RNA, 19 nt, Homo sapiens
  misc_RNA (1)...(19): siRNA sense strand
ucagcgggauccuguucaa

SEQ ID NO: 2014400 - RNA, 19 nt, Homo sapiens
  misc_RNA (1)...(19): siRNA sense strand
gacguaccaccgcaucgua

SEQ ID NO: 2014401 - RNA, 19 nt, Homo sapiens
  misc_RNA (1)...(19): siRNA sense strand
guucggcuaugacgugaag

SEQ ID NO: 2014402 - RNA, 19 nt, Homo sapiens
  misc_RNA (1)...(19): siRNA sense strand
acuacaagcccgaguucua

SEQ ID NO: 2014403 - RNA, 19 nt, Homo sapiens
  misc_RNA (1)...(19): siRNA sense strand
cacccgaucuccuacuaca

SEQ ID NO: 2014404 - RNA, 19 nt, Homo sapiens
  misc_RNA (1)...(19): siRNA sense strand
agcgggauccuguucaaua

SEQ ID NO: 2014405 - RNA, 19 nt, Homo sapiens
  misc_RNA (1)...(19): siRNA sense strand
gaaaagcugaggucaucaa

SEQ ID NO: 2014406 - RNA, 19 nt, Homo sapiens
  misc_RNA (1)...(19): siRNA sense strand
ggucagcgggauccuguuc

SEQ ID NO: 2014407 - RNA, 19 nt, Homo sapiens
  misc_RNA (1)...(19): siRNA sense strand
acgagacgcuggccaucga

SEQ ID NO: 2014408 - RNA, 19 nt, Homo sapiens
  misc_RNA (1)...(19): siRNA sense strand
gcugaggaccugaacaacu

SEQ ID NO: 2014409 - RNA, 19 nt, Homo sapiens
  misc_RNA (1)...(19): siRNA sense strand
cggcagcccuggaaaacaa

SEQ ID NO: 2014410 - RNA, 19 nt, Homo sapiens
  misc_RNA (1)...(19): siRNA sense strand
ggucauugucggccucugu

SEQ ID NO: 2014411 - RNA, 19 nt, Homo sapiens
  misc_RNA (1)...(19): siRNA sense strand
ggagauccgaggcuaugag

SEQ ID NO: 2014412 - RNA, 19 nt, Homo sapiens
  misc_RNA (1)...(19): siRNA sense strand
caguggagagaaacauuga

SEQ ID NO: 2014413 - RNA, 19 nt, Homo sapiens
  misc_RNA (1)...(19): siRNA sense strand
gcaccaucaaccucuacuu

SEQ ID NO: 2014414 - RNA, 19 nt, Homo sapiens
  misc_RNA (1)...(19): siRNA sense strand
ugacagcugaggaccugaa

SEQ ID NO: 2014415 - RNA, 19 nt, Homo sapiens
  misc_RNA (1)...(19): siRNA sense strand
gagcagcagccugucuugu

SEQ ID NO: 2014416 - RNA, 19 nt, Homo sapiens
  misc_RNA (1)...(19): siRNA sense strand
gcgggauccuguucaauaa

SEQ ID NO: 2014417 - RNA, 19 nt, Homo sapiens
  misc_RNA (1)...(19): siRNA sense strand
cguagaggcuuuccgguuu

SEQ ID NO: 2014418 - RNA, 19 nt, Homo sapiens
  misc_RNA (1)...(19): siRNA sense strand
caacaugaccuccgaguuc

SEQ ID NO: 2014419 - RNA, 19 nt, Homo sapiens
  misc_RNA (1)...(19): siRNA sense strand
caaggaaccugacaaccau

SEQ ID NO: 2014420 - RNA, 19 nt, Homo sapiens
  misc_RNA (1)...(19): siRNA sense strand
cugaggaccugaacaacua

SEQ ID NO: 2014421 - RNA, 19 nt, Homo sapiens
  misc_RNA (1)...(19): siRNA sense strand
gagguguucugccgggaua

SEQ ID NO: 2014422 - RNA, 19 nt, Homo sapiens
  misc_RNA (1)...(19): siRNA sense strand
ucacgacaguggagagaaa

SEQ ID NO: 2014423 - RNA, 19 nt, Homo sapiens
  misc_RNA (1)...(19): siRNA sense strand
gcagcagccugucuugugu

SEQ ID NO: 2014424 - RNA, 19 nt, Homo sapiens
  misc_RNA (1)...(19): siRNA sense strand
gggauccuguucaauaaug

SEQ ID NO: 2014425 - RNA, 19 nt, Homo sapiens
  misc_RNA (1)...(19): siRNA sense strand
guagaggcuuuccgguuug

SEQ ID NO: 2014426 - RNA, 19 nt, Homo sapiens
  misc_RNA (1)...(19): siRNA sense strand
gaggugguccgcaacauga

SEQ ID NO: 2014427 - RNA, 19 nt, Homo sapiens
  misc_RNA (1)...(19): siRNA sense strand
ccacucacccgaucuccua

SEQ ID NO: 2014428 - RNA, 19 nt, Homo sapiens
  misc_RNA (1)...(19): siRNA sense strand
gcacugcucaccugucugu

SEQ ID NO: 2014429 - RNA, 19 nt, Homo sapiens
  misc_RNA (1)...(19): siRNA sense strand
gagacgcggugcuguacau

SEQ ID NO: 2014430 - RNA, 19 nt, Homo sapiens
  misc_RNA (1)...(19): siRNA sense strand
ccacugcacuggccaucau

SEQ ID NO: 2014431 - RNA, 19 nt, Homo sapiens
  misc_RNA (1)...(19): siRNA sense strand
caccaucaaccucuacuuu

SEQ ID NO: 2014432 - RNA, 19 nt, Homo sapiens
  misc_RNA (1)...(19): siRNA sense strand
ggauccuguucaauaauga

SEQ ID NO: 2014433 - RNA, 19 nt, Homo sapiens
  misc_RNA (1)...(19): siRNA sense strand
ccaaggaaccugacaacca

SEQ ID NO: 2014434 - RNA, 19 nt, Homo sapiens
  misc_RNA (1)...(19): siRNA sense strand
gaaccugacaaccaugugu

SEQ ID NO: 2014435 - RNA, 19 nt, Homo sapiens
  misc_RNA (1)...(19): siRNA sense strand
ccaucaaccucuacuuugg

SEQ ID NO: 2014436 - RNA, 19 nt, Homo sapiens
  misc_RNA (1)...(19): siRNA sense strand
ccucaaaggguacaacuuc

SEQ ID NO: 2014437 - RNA, 19 nt, Homo sapiens
  misc_RNA (1)...(19): siRNA sense strand
gggcacugcucaccugucu

SEQ ID NO: 2014438 - RNA, 19 nt, Homo sapiens
  misc_RNA (1)...(19): siRNA sense strand
gcccucagccuccaaggaa

SEQ ID NO: 2014439 - RNA, 19 nt, Homo sapiens
  misc_RNA (1)...(19): siRNA sense strand
gcacuggccaucaucuaca

SEQ ID NO: 2014440 - RNA, 19 nt, Homo sapiens
  misc_RNA (1)...(19): siRNA sense strand
gcaacaugaccuccgaguu

SEQ ID NO: 2014441 - RNA, 19 nt, Homo sapiens
  misc_RNA (1)...(19): siRNA sense strand
cagccgcucucguccaugu

SEQ ID NO: 2014442 - RNA, 19 nt, Homo sapiens
  misc_RNA (1)...(19): siRNA sense strand
cagcugaggaccugaacaa

SEQ ID NO: 2014443 - RNA, 19 nt, Homo sapiens
  misc_RNA (1)...(19): siRNA sense strand
uugcagcccuguugugugu

SEQ ID NO: 2014444 - RNA, 19 nt, Homo sapiens
  misc_RNA (1)...(19): siRNA sense strand
agaagggccugacguacca

SEQ ID NO: 2014445 - RNA, 19 nt, Homo sapiens
  misc_RNA (1)...(19): siRNA sense strand
gagcacccgcugaacauca

SEQ ID NO: 2014446 - RNA, 19 nt, Homo sapiens
  misc_RNA (1)...(19): siRNA sense strand
cggcccagauugugaagga

SEQ ID NO: 2014447 - RNA, 19 nt, Homo sapiens
  misc_RNA (1)...(19): siRNA sense strand
gacaguggagagaaacauu

SEQ ID NO: 2014448 - RNA, 19 nt, Homo sapiens
  misc_RNA (1)...(19): siRNA sense strand
ccagcaccaucaaccucua

SEQ ID NO: 2014449 - RNA, 19 nt, Homo sapiens
  misc_RNA (1)...(19): siRNA sense strand
caacagcaccacacgaaaa

SEQ ID NO: 2014450 - RNA, 19 nt, Homo sapiens
  misc_RNA (1)...(19): siRNA sense strand
uacaacagcaccacacgaa

SEQ ID NO: 2014451 - RNA, 19 nt, Homo sapiens
  misc_RNA (1)...(19): siRNA sense strand
ucagcgggauccuguucaa

SEQ ID NO: 2014452 - RNA, 19 nt, Homo sapiens
  misc_RNA (1)...(19): siRNA sense strand
gacguaccaccgcaucgua

SEQ ID NO: 2014453 - RNA, 19 nt, Homo sapiens
  misc_RNA (1)...(19): siRNA sense strand
guucggcuaugacgugaag

SEQ ID NO: 2014454 - RNA, 19 nt, Homo sapiens
  misc_RNA (1)...(19): siRNA sense strand
acuacaagcccgaguucua

SEQ ID NO: 2014455 - RNA, 19 nt, Homo sapiens
  misc_RNA (1)...(19): siRNA sense strand
cacccgaucuccuacuaca

SEQ ID NO: 2014456 - RNA, 19 nt, Homo sapiens
  misc_RNA (1)...(19): siRNA sense strand
agcgggauccuguucaaua

SEQ ID NO: 2014457 - RNA, 19 nt, Homo sapiens
  misc_RNA (1)...(19): siRNA sense strand
gaaaagcugaggucaucaa

SEQ ID NO: 2014458 - RNA, 19 nt, Homo sapiens
  misc_RNA (1)...(19): siRNA sense strand
ggucagcgggauccuguuc

SEQ ID NO: 2014459 - RNA, 19 nt, Homo sapiens
  misc_RNA (1)...(19): siRNA sense strand
acgagacgcuggccaucga

SEQ ID NO: 2014460 - RNA, 19 nt, Homo sapiens
  misc_RNA (1)...(19): siRNA sense strand
gcugaggaccugaacaacu

SEQ ID NO: 2014461 - RNA, 19 nt, Homo sapiens
  misc_RNA (1)...(19): siRNA sense strand
cggcagcccuggaaaacaa

SEQ ID NO: 2014462 - RNA, 19 nt, Homo sapiens
  misc_RNA (1)...(19): siRNA sense strand
ggucauugucggccucugu

SEQ ID NO: 2014463 - RNA, 19 nt, Homo sapiens
  misc_RNA (1)...(19): siRNA sense strand
ggagauccgaggcuaugag

SEQ ID NO: 2014464 - RNA, 19 nt, Homo sapiens
  misc_RNA (1)...(19): siRNA sense strand
caguggagagaaacauuga

SEQ ID NO: 2014465 - RNA, 19 nt, Homo sapiens
  misc_RNA (1)...(19): siRNA sense strand
gcaccaucaaccucuacuu

SEQ ID NO: 2014466 - RNA, 19 nt, Homo sapiens
  misc_RNA (1)...(19): siRNA sense strand
ugacagcugaggaccugaa

SEQ ID NO: 2014467 - RNA, 19 nt, Homo sapiens
  misc_RNA (1)...(19): siRNA sense strand
gagcagcagccugucuugu

SEQ ID NO: 2014468 - RNA, 19 nt, Homo sapiens
  misc_RNA (1)...(19): siRNA sense strand
ccgaggacguggacgaguu

SEQ ID NO: 2014469 - RNA, 19 nt, Homo sapiens
  misc_RNA (1)...(19): siRNA sense strand
ccaagacggcggugcagau

SEQ ID NO: 2014470 - RNA, 19 nt, Homo sapiens
  misc_RNA (1)...(19): siRNA sense strand
ccgaggacguggacgaguu

SEQ ID NO: 2014471 - RNA, 19 nt, Homo sapiens
  misc_RNA (1)...(19): siRNA sense strand
ccaagacggcggugcagau

SEQ ID NO: 2014472 - RNA, 19 nt, Homo sapiens
  misc_RNA (1)...(19): siRNA sense strand
gaaaucaggugccauuguu

SEQ ID NO: 2014473 - RNA, 19 nt, Homo sapiens
  misc_RNA (1)...(19): siRNA sense strand
cgucaaagauauacagaaa

SEQ ID NO: 2014474 - RNA, 19 nt, Homo sapiens
  misc_RNA (1)...(19): siRNA sense strand
ggaaguugcugcaccugaa

SEQ ID NO: 2014475 - RNA, 19 nt, Homo sapiens
  misc_RNA (1)...(19): siRNA sense strand
gagguaacguuuccgauug

SEQ ID NO: 2014476 - RNA, 19 nt, Homo sapiens
  misc_RNA (1)...(19): siRNA sense strand
guagagcacgucaaagaua

SEQ ID NO: 2014477 - RNA, 19 nt, Homo sapiens
  misc_RNA (1)...(19): siRNA sense strand
gaacucagucgauaucaga

SEQ ID NO: 2014478 - RNA, 19 nt, Homo sapiens
  misc_RNA (1)...(19): siRNA sense strand
gaacuaaacacaaugaaac

SEQ ID NO: 2014479 - RNA, 19 nt, Homo sapiens
  misc_RNA (1)...(19): siRNA sense strand
ggacgaagaggacauugaa

SEQ ID NO: 2014480 - RNA, 19 nt, Homo sapiens
  misc_RNA (1)...(19): siRNA sense strand
gaaacaagcaaugaaagaa

SEQ ID NO: 2014481 - RNA, 19 nt, Homo sapiens
  misc_RNA (1)...(19): siRNA sense strand
uacaugaggugaacaguga

SEQ ID NO: 2014482 - RNA, 19 nt, Homo sapiens
  misc_RNA (1)...(19): siRNA sense strand
gcaccugaauuacuuuauc

SEQ ID NO: 2014483 - RNA, 19 nt, Homo sapiens
  misc_RNA (1)...(19): siRNA sense strand
gaacagugaagacgaugaa

SEQ ID NO: 2014484 - RNA, 19 nt, Homo sapiens
  misc_RNA (1)...(19): siRNA sense strand
caaggaagagguaacguuu

SEQ ID NO: 2014485 - RNA, 19 nt, Homo sapiens
  misc_RNA (1)...(19): siRNA sense strand
gagaaaaguuugaggcauu

SEQ ID NO: 2014486 - RNA, 19 nt, Homo sapiens
  misc_RNA (1)...(19): siRNA sense strand
gaagagaaagcucaaagag

SEQ ID NO: 2014487 - RNA, 19 nt, Homo sapiens
  misc_RNA (1)...(19): siRNA sense strand
cucaagaacugguggauga

SEQ ID NO: 2014488 - RNA, 19 nt, Homo sapiens
  misc_RNA (1)...(19): siRNA sense strand
ccgcaggagucauuucaaa

SEQ ID NO: 2014489 - RNA, 19 nt, Homo sapiens
  misc_RNA (1)...(19): siRNA sense strand
ggacagaggaggccacagu

SEQ ID NO: 2014490 - RNA, 19 nt, Homo sapiens
  misc_RNA (1)...(19): siRNA sense strand
caucauccauggccuuuua

SEQ ID NO: 2014491 - RNA, 19 nt, Homo sapiens
  misc_RNA (1)...(19): siRNA sense strand
auacagaaauaaccagaga

SEQ ID NO: 2014492 - RNA, 19 nt, Homo sapiens
  misc_RNA (1)...(19): siRNA sense strand
ccacagcggacacaacaaa

SEQ ID NO: 2014493 - RNA, 19 nt, Homo sapiens
  misc_RNA (1)...(19): siRNA sense strand
gaucuucuuugccauccuu

SEQ ID NO: 2014494 - RNA, 19 nt, Homo sapiens
  misc_RNA (1)...(19): siRNA sense strand
uagagcacgucaaagauau

SEQ ID NO: 2014495 - RNA, 19 nt, Homo sapiens
  misc_RNA (1)...(19): siRNA sense strand
aaaccuccauuaugugaga

SEQ ID NO: 2014496 - RNA, 19 nt, Homo sapiens
  misc_RNA (1)...(19): siRNA sense strand
aagaggacauugaaacuca

SEQ ID NO: 2014497 - RNA, 19 nt, Homo sapiens
  misc_RNA (1)...(19): siRNA sense strand
gcaggagucauuucaaaca

SEQ ID NO: 2014498 - RNA, 19 nt, Homo sapiens
  misc_RNA (1)...(19): siRNA sense strand
gaaaaugacuguccaucgu

SEQ ID NO: 2014499 - RNA, 19 nt, Homo sapiens
  misc_RNA (1)...(19): siRNA sense strand
ggaccuaaacaauaugaau

SEQ ID NO: 2014500 - RNA, 19 nt, Homo sapiens
  misc_RNA (1)...(19): siRNA sense strand
ggaugaaaaugauggauug

SEQ ID NO: 2014501 - RNA, 19 nt, Homo sapiens
  misc_RNA (1)...(19): siRNA sense strand
aaaugacuguccaucguuu

SEQ ID NO: 2014502 - RNA, 19 nt, Homo sapiens
  misc_RNA (1)...(19): siRNA sense strand
ugaaacaagcaaugaaaga

SEQ ID NO: 2014503 - RNA, 19 nt, Homo sapiens
  misc_RNA (1)...(19): siRNA sense strand
aaacuuaagggaauggaaa

SEQ ID NO: 2014504 - RNA, 19 nt, Homo sapiens
  misc_RNA (1)...(19): siRNA sense strand
ggagucauuucaaacacau

SEQ ID NO: 2014505 - RNA, 19 nt, Homo sapiens
  misc_RNA (1)...(19): siRNA sense strand
gagaagagaaagcucaaag

SEQ ID NO: 2014506 - RNA, 19 nt, Homo sapiens
  misc_RNA (1)...(19): siRNA sense strand
ggugaacagugaagacgau

SEQ ID NO: 2014507 - RNA, 19 nt, Homo sapiens
  misc_RNA (1)...(19): siRNA sense strand
acagaaauaaccagagaaa

SEQ ID NO: 2014508 - RNA, 19 nt, Homo sapiens
  misc_RNA (1)...(19): siRNA sense strand
gcaaugaaagaacuacagu

SEQ ID NO: 2014509 - RNA, 19 nt, Homo sapiens
  misc_RNA (1)...(19): siRNA sense strand
guccaucguuugaauguag

SEQ ID NO: 2014510 - RNA, 19 nt, Homo sapiens
  misc_RNA (1)...(19): siRNA sense strand
aaaacaagcucaagaacug

SEQ ID NO: 2014511 - RNA, 19 nt, Homo sapiens
  misc_RNA (1)...(19): siRNA sense strand
gaaggcgucgucacaggaa

SEQ ID NO: 2014512 - RNA, 19 nt, Homo sapiens
  misc_RNA (1)...(19): siRNA sense strand
uugaaacacuggacuaugg

SEQ ID NO: 2014513 - RNA, 19 nt, Homo sapiens
  misc_RNA (1)...(19): siRNA sense strand
gccuuacccuugaacuaaa

SEQ ID NO: 2014514 - RNA, 19 nt, Homo sapiens
  misc_RNA (1)...(19): siRNA sense strand
acagaaaucaggugccauu

SEQ ID NO: 2014515 - RNA, 19 nt, Homo sapiens
  misc_RNA (1)...(19): siRNA sense strand
caggugccauuguuacaug

SEQ ID NO: 2014516 - RNA, 19 nt, Homo sapiens
  misc_RNA (1)...(19): siRNA sense strand
ccaaggaagagguaacguu

SEQ ID NO: 2014517 - RNA, 19 nt, Homo sapiens
  misc_RNA (1)...(19): siRNA sense strand
guagaacucagucgauauc

SEQ ID NO: 2014518 - RNA, 19 nt, Homo sapiens
  misc_RNA (1)...(19): siRNA sense strand
caaugaaacaagcaaugaa

SEQ ID NO: 2014519 - RNA, 19 nt, Homo sapiens
  misc_RNA (1)...(19): siRNA sense strand
gaagaggacauugaaacuc

SEQ ID NO: 2014520 - RNA, 19 nt, Homo sapiens
  misc_RNA (1)...(19): siRNA sense strand
uaacguuuccgauugugaa

SEQ ID NO: 2014521 - RNA, 19 nt, Homo sapiens
  misc_RNA (1)...(19): siRNA sense strand
gaaaauauggaccuaaaca

SEQ ID NO: 2014522 - RNA, 19 nt, Homo sapiens
  misc_RNA (1)...(19): siRNA sense strand
cauugaaacucagcuguca

SEQ ID NO: 2014523 - RNA, 19 nt, Homo sapiens
  misc_RNA (1)...(19): siRNA sense strand
gaccuaaacaauaugaauc

SEQ ID NO: 2014524 - RNA, 19 nt, Homo sapiens
  misc_RNA (1)...(19): siRNA sense strand
caaauuggcagagugagau

SEQ ID NO: 2014525 - RNA, 19 nt, Homo sapiens
  misc_RNA (1)...(19): siRNA sense strand
gaaauaaccagagaaaagu

SEQ ID NO: 2014526 - RNA, 19 nt, Homo sapiens
  misc_RNA (1)...(19): siRNA sense strand
ucaggcauuuguccaagga

SEQ ID NO: 2014527 - RNA, 19 nt, Homo sapiens
  misc_RNA (1)...(19): siRNA sense strand
caagaacugguggaugaaa

SEQ ID NO: 2014528 - RNA, 19 nt, Homo sapiens
  misc_RNA (1)...(19): siRNA sense strand
acaaugaaacaagcaauga

SEQ ID NO: 2014529 - RNA, 19 nt, Homo sapiens
  misc_RNA (1)...(19): siRNA sense strand
gaggaggccacagugauga

SEQ ID NO: 2014530 - RNA, 19 nt, Homo sapiens
  misc_RNA (1)...(19): siRNA sense strand
agagguaacguuuccgauu

SEQ ID NO: 2014531 - RNA, 19 nt, Homo sapiens
  misc_RNA (1)...(19): siRNA sense strand
gacuguccaucguuugaau

SEQ ID NO: 2014532 - RNA, 19 nt, Homo sapiens
  misc_RNA (1)...(19): siRNA sense strand
agaaaaguuugaggcauua

SEQ ID NO: 2014533 - RNA, 19 nt, Homo sapiens
  misc_RNA (1)...(19): siRNA sense strand
gaaguugcugcaccugaau

SEQ ID NO: 2014534 - RNA, 19 nt, Homo sapiens
  misc_RNA (1)...(19): siRNA sense strand
ugguagagcacgucaaaga

SEQ ID NO: 2014535 - RNA, 19 nt, Homo sapiens
  misc_RNA (1)...(19): siRNA sense strand
caccugaauuacuuuaucu

SEQ ID NO: 2014536 - RNA, 19 nt, Homo sapiens
  misc_RNA (1)...(19): siRNA sense strand
agagugagaugggaagaag

SEQ ID NO: 2014537 - RNA, 19 nt, Homo sapiens
  misc_RNA (1)...(19): siRNA sense strand
gguagagcacgucaaagau

SEQ ID NO: 2014538 - RNA, 19 nt, Homo sapiens
  misc_RNA (1)...(19): siRNA sense strand
gggacgaagaggacauuga

SEQ ID NO: 2014539 - RNA, 19 nt, Homo sapiens
  misc_RNA (1)...(19): siRNA sense strand
gcacgucaaagauauacag

SEQ ID NO: 2014540 - RNA, 19 nt, Homo sapiens
  misc_RNA (1)...(19): siRNA sense strand
acccuguucugaauuuaaa

SEQ ID NO: 2014541 - RNA, 19 nt, Homo sapiens
  misc_RNA (1)...(19): siRNA sense strand
gaaacucagcugucaucca

SEQ ID NO: 2014542 - RNA, 19 nt, Homo sapiens
  misc_RNA (1)...(19): siRNA sense strand
auguagaacucagucgaua

SEQ ID NO: 2014543 - RNA, 19 nt, Homo sapiens
  misc_RNA (1)...(19): siRNA sense strand
agaagagaaagcucaaaga

SEQ ID NO: 2014544 - RNA, 19 nt, Homo sapiens
  misc_RNA (1)...(19): siRNA sense strand
agagugaugugagcagugu

SEQ ID NO: 2014545 - RNA, 19 nt, Homo sapiens
  misc_RNA (1)...(19): siRNA sense strand
cgaagaggacauugaaacu

SEQ ID NO: 2014546 - RNA, 19 nt, Homo sapiens
  misc_RNA (1)...(19): siRNA sense strand
ucuuugccauccuuugaaa

SEQ ID NO: 2014547 - RNA, 19 nt, Homo sapiens
  misc_RNA (1)...(19): siRNA sense strand
acacccuguucugaauuua

SEQ ID NO: 2014548 - RNA, 19 nt, Homo sapiens
  misc_RNA (1)...(19): siRNA sense strand
aaaucaggugccauuguua

SEQ ID NO: 2014549 - RNA, 19 nt, Homo sapiens
  misc_RNA (1)...(19): siRNA sense strand
gaagaaaauauggaccuaa

SEQ ID NO: 2014550 - RNA, 19 nt, Homo sapiens
  misc_RNA (1)...(19): siRNA sense strand
gaaaacaagcucaagaacu

SEQ ID NO: 2014551 - RNA, 19 nt, Homo sapiens
  misc_RNA (1)...(19): siRNA sense strand
gacgaagaggacauugaaa

SEQ ID NO: 2014552 - RNA, 19 nt, Homo sapiens
  misc_RNA (1)...(19): siRNA sense strand
cuaaacacaaugaaacaag

SEQ ID NO: 2014553 - RNA, 19 nt, Homo sapiens
  misc_RNA (1)...(19): siRNA sense strand
gaugugagcaguguugaac

SEQ ID NO: 2014554 - RNA, 19 nt, Homo sapiens
  misc_RNA (1)...(19): siRNA sense strand
cagaggaggccacagugau

SEQ ID NO: 2014555 - RNA, 19 nt, Homo sapiens
  misc_RNA (1)...(19): siRNA sense strand
gcgaaaacaagcucaagaa

SEQ ID NO: 2014556 - RNA, 19 nt, Homo sapiens
  misc_RNA (1)...(19): siRNA sense strand
aaacaagcaaugaaagaac

SEQ ID NO: 2014557 - RNA, 19 nt, Homo sapiens
  misc_RNA (1)...(19): siRNA sense strand
cccuugaacuaaacacaau

SEQ ID NO: 2014558 - RNA, 19 nt, Homo sapiens
  misc_RNA (1)...(19): siRNA sense strand
caccacagcggacacaaca

SEQ ID NO: 2014559 - RNA, 19 nt, Homo sapiens
  misc_RNA (1)...(19): siRNA sense strand
agaaaucaggugccauugu

SEQ ID NO: 2014560 - RNA, 19 nt, Homo sapiens
  misc_RNA (1)...(19): siRNA sense strand
cacaaugaaacaagcaaug

SEQ ID NO: 2014561 - RNA, 19 nt, Homo sapiens
  misc_RNA (1)...(19): siRNA sense strand
cagacaaaauucaggcauu

SEQ ID NO: 2014562 - RNA, 19 nt, Homo sapiens
  misc_RNA (1)...(19): siRNA sense strand
aacaagcaaugaaagaacu

SEQ ID NO: 2014563 - RNA, 19 nt, Homo sapiens
  misc_RNA (1)...(19): siRNA sense strand
guaacguuuccgauuguga

SEQ ID NO: 2014564 - RNA, 19 nt, Homo sapiens
  misc_RNA (1)...(19): siRNA sense strand
gguaacguuuccgauugug

SEQ ID NO: 2014565 - RNA, 19 nt, Homo sapiens
  misc_RNA (1)...(19): siRNA sense strand
agaggaggccacagugaug

SEQ ID NO: 2014566 - RNA, 19 nt, Homo sapiens
  misc_RNA (1)...(19): siRNA sense strand
agccuuacccuugaacuaa

SEQ ID NO: 2014567 - RNA, 19 nt, Homo sapiens
  misc_RNA (1)...(19): siRNA sense strand
gugaagacgaugaaaauau

SEQ ID NO: 2014568 - RNA, 19 nt, Homo sapiens
  misc_RNA (1)...(19): siRNA sense strand
ccgaggacguggacgaguu

SEQ ID NO: 2014569 - RNA, 19 nt, Homo sapiens
  misc_RNA (1)...(19): siRNA sense strand
ccaagacggcggugcagau

SEQ ID NO: 2014570 - RNA, 19 nt, Homo sapiens
  misc_RNA (1)...(19): siRNA sense strand
ccgaggacguggacgaguu

SEQ ID NO: 2014571 - RNA, 19 nt, Homo sapiens
  misc_RNA (1)...(19): siRNA sense strand
ccaagacggcggugcagau

SEQ ID NO: 2014572 - RNA, 19 nt, Homo sapiens
  misc_RNA (1)...(19): siRNA sense strand
gaagauccauguaaacuua

SEQ ID NO: 2014573 - RNA, 19 nt, Homo sapiens
  misc_RNA (1)...(19): siRNA sense strand
ccaaaucccuggagaugua

SEQ ID NO: 2014574 - RNA, 19 nt, Homo sapiens
  misc_RNA (1)...(19): siRNA sense strand
uaacgaaaccucauucuuu

SEQ ID NO: 2014575 - RNA, 19 nt, Homo sapiens
  misc_RNA (1)...(19): siRNA sense strand
ccaauucacugucaagaaa

SEQ ID NO: 2014576 - RNA, 19 nt, Homo sapiens
  misc_RNA (1)...(19): siRNA sense strand
caaaugagccgagaucuuu

SEQ ID NO: 2014577 - RNA, 19 nt, Homo sapiens
  misc_RNA (1)...(19): siRNA sense strand
gaauccaaguuaacccuua

SEQ ID NO: 2014578 - RNA, 19 nt, Homo sapiens
  misc_RNA (1)...(19): siRNA sense strand
gaaggaagaacuugaagaa

SEQ ID NO: 2014579 - RNA, 19 nt, Homo sapiens
  misc_RNA (1)...(19): siRNA sense strand
gagccgagaucuuucuauu

SEQ ID NO: 2014580 - RNA, 19 nt, Homo sapiens
  misc_RNA (1)...(19): siRNA sense strand
gaagcaagacuuacccuaa

SEQ ID NO: 2014581 - RNA, 19 nt, Homo sapiens
  misc_RNA (1)...(19): siRNA sense strand
gaaauaaccagauaucagu

SEQ ID NO: 2014582 - RNA, 19 nt, Homo sapiens
  misc_RNA (1)...(19): siRNA sense strand
gcacuaagucgccaaaguu

SEQ ID NO: 2014583 - RNA, 19 nt, Homo sapiens
  misc_RNA (1)...(19): siRNA sense strand
uuacaaagguucacuucaa

SEQ ID NO: 2014584 - RNA, 19 nt, Homo sapiens
  misc_RNA (1)...(19): siRNA sense strand
uaggauaacugcaaacaug

SEQ ID NO: 2014585 - RNA, 19 nt, Homo sapiens
  misc_RNA (1)...(19): siRNA sense strand
gcaggagaaugauaugguu

SEQ ID NO: 2014586 - RNA, 19 nt, Homo sapiens
  misc_RNA (1)...(19): siRNA sense strand
agucggagcuuggagauua

SEQ ID NO: 2014587 - RNA, 19 nt, Homo sapiens
  misc_RNA (1)...(19): siRNA sense strand
gaauacggcaggagaauga

SEQ ID NO: 2014588 - RNA, 19 nt, Homo sapiens
  misc_RNA (1)...(19): siRNA sense strand
gccgagaucuuucuauuca

SEQ ID NO: 2014589 - RNA, 19 nt, Homo sapiens
  misc_RNA (1)...(19): siRNA sense strand
aaacaagucugaguauuuc

SEQ ID NO: 2014590 - RNA, 19 nt, Homo sapiens
  misc_RNA (1)...(19): siRNA sense strand
gaagaaauaaccagauauc

SEQ ID NO: 2014591 - RNA, 19 nt, Homo sapiens
  misc_RNA (1)...(19): siRNA sense strand
gaggaaagcccauaacagu

SEQ ID NO: 2014592 - RNA, 19 nt, Homo sapiens
  misc_RNA (1)...(19): siRNA sense strand
caaagaagcaaaucucaug

SEQ ID NO: 2014593 - RNA, 19 nt, Homo sapiens
  misc_RNA (1)...(19): siRNA sense strand
gcaagcaccucuggaagug

SEQ ID NO: 2014594 - RNA, 19 nt, Homo sapiens
  misc_RNA (1)...(19): siRNA sense strand
gaaucaaacaccaucagua

SEQ ID NO: 2014595 - RNA, 19 nt, Homo sapiens
  misc_RNA (1)...(19): siRNA sense strand
cagcaaguuuggauccaua

SEQ ID NO: 2014596 - RNA, 19 nt, Homo sapiens
  misc_RNA (1)...(19): siRNA sense strand
uaaacauacugcaggauau

SEQ ID NO: 2014597 - RNA, 19 nt, Homo sapiens
  misc_RNA (1)...(19): siRNA sense strand
caggacagcuuugcaaaug

SEQ ID NO: 2014598 - RNA, 19 nt, Homo sapiens
  misc_RNA (1)...(19): siRNA sense strand
gaagccaucagacguauug

SEQ ID NO: 2014599 - RNA, 19 nt, Homo sapiens
  misc_RNA (1)...(19): siRNA sense strand
gggaaaagauuguaacgaa

SEQ ID NO: 2014600 - RNA, 19 nt, Homo sapiens
  misc_RNA (1)...(19): siRNA sense strand
aggcugagcugaauuacuu

SEQ ID NO: 2014601 - RNA, 19 nt, Homo sapiens
  misc_RNA (1)...(19): siRNA sense strand
gaucagaaugugacaagaa

SEQ ID NO: 2014602 - RNA, 19 nt, Homo sapiens
  misc_RNA (1)...(19): siRNA sense strand
gaagugacaaugauucugu

SEQ ID NO: 2014603 - RNA, 19 nt, Homo sapiens
  misc_RNA (1)...(19): siRNA sense strand
gaacacaaagaacugauca

SEQ ID NO: 2014604 - RNA, 19 nt, Homo sapiens
  misc_RNA (1)...(19): siRNA sense strand
ucagugggaagcuguauua

SEQ ID NO: 2014605 - RNA, 19 nt, Homo sapiens
  misc_RNA (1)...(19): siRNA sense strand
uguggaacaucauacauuu

SEQ ID NO: 2014606 - RNA, 19 nt, Homo sapiens
  misc_RNA (1)...(19): siRNA sense strand
acaaagaacugaucaacac

SEQ ID NO: 2014607 - RNA, 19 nt, Homo sapiens
  misc_RNA (1)...(19): siRNA sense strand
gugggaagcuguauuaagg

SEQ ID NO: 2014608 - RNA, 19 nt, Homo sapiens
  misc_RNA (1)...(19): siRNA sense strand
ggacagcuuugcaaaugag

SEQ ID NO: 2014609 - RNA, 19 nt, Homo sapiens
  misc_RNA (1)...(19): siRNA sense strand
gaagaagccauagaaagga

SEQ ID NO: 2014610 - RNA, 19 nt, Homo sapiens
  misc_RNA (1)...(19): siRNA sense strand
caaaggaggaggucacguu

SEQ ID NO: 2014611 - RNA, 19 nt, Homo sapiens
  misc_RNA (1)...(19): siRNA sense strand
gcaaaugagccgagaucuu

SEQ ID NO: 2014612 - RNA, 19 nt, Homo sapiens
  misc_RNA (1)...(19): siRNA sense strand
ccauagaaaggauucauaa

SEQ ID NO: 2014613 - RNA, 19 nt, Homo sapiens
  misc_RNA (1)...(19): siRNA sense strand
gaaaacaagucugaguauu

SEQ ID NO: 2014614 - RNA, 19 nt, Homo sapiens
  misc_RNA (1)...(19): siRNA sense strand
ggaccuccauauacuuugu

SEQ ID NO: 2014615 - RNA, 19 nt, Homo sapiens
  misc_RNA (1)...(19): siRNA sense strand
ggaaaagauuguaacgaaa

SEQ ID NO: 2014616 - RNA, 19 nt, Homo sapiens
  misc_RNA (1)...(19): siRNA sense strand
caagucugaguauuucuua

SEQ ID NO: 2014617 - RNA, 19 nt, Homo sapiens
  misc_RNA (1)...(19): siRNA sense strand
agacacagaucucguucga

SEQ ID NO: 2014618 - RNA, 19 nt, Homo sapiens
  misc_RNA (1)...(19): siRNA sense strand
gaagugcaguguggaacau

SEQ ID NO: 2014619 - RNA, 19 nt, Homo sapiens
  misc_RNA (1)...(19): siRNA sense strand
aaagagauuccauacacua

SEQ ID NO: 2014620 - RNA, 19 nt, Homo sapiens
  misc_RNA (1)...(19): siRNA sense strand
cagcagugguagugaauca

SEQ ID NO: 2014621 - RNA, 19 nt, Homo sapiens
  misc_RNA (1)...(19): siRNA sense strand
uauugcaccuucaccagua

SEQ ID NO: 2014622 - RNA, 19 nt, Homo sapiens
  misc_RNA (1)...(19): siRNA sense strand
ggaggaggaaagcccauaa

SEQ ID NO: 2014623 - RNA, 19 nt, Homo sapiens
  misc_RNA (1)...(19): siRNA sense strand
uaauagagaacaccggaaa

SEQ ID NO: 2014624 - RNA, 19 nt, Homo sapiens
  misc_RNA (1)...(19): siRNA sense strand
ccauaacaguggugaagau

SEQ ID NO: 2014625 - RNA, 19 nt, Homo sapiens
  misc_RNA (1)...(19): siRNA sense strand
ggagauguauggcguugac

SEQ ID NO: 2014626 - RNA, 19 nt, Homo sapiens
  misc_RNA (1)...(19): siRNA sense strand
ucaaacaccaucaguagga

SEQ ID NO: 2014627 - RNA, 19 nt, Homo sapiens
  misc_RNA (1)...(19): siRNA sense strand
cguaaaccuuguggagaua

SEQ ID NO: 2014628 - RNA, 19 nt, Homo sapiens
  misc_RNA (1)...(19): siRNA sense strand
gagauuccauacacuaaaa

SEQ ID NO: 2014629 - RNA, 19 nt, Homo sapiens
  misc_RNA (1)...(19): siRNA sense strand
ugacaaugauucuguacag

SEQ ID NO: 2014630 - RNA, 19 nt, Homo sapiens
  misc_RNA (1)...(19): siRNA sense strand
ugaagaagccauagaaagg

SEQ ID NO: 2014631 - RNA, 19 nt, Homo sapiens
  misc_RNA (1)...(19): siRNA sense strand
auucagaucuuaagcaaag

SEQ ID NO: 2014632 - RNA, 19 nt, Homo sapiens
  misc_RNA (1)...(19): siRNA sense strand
auaaacauacugcaggaua

SEQ ID NO: 2014633 - RNA, 19 nt, Homo sapiens
  misc_RNA (1)...(19): siRNA sense strand
gcaggacagcuuugcaaau

SEQ ID NO: 2014634 - RNA, 19 nt, Homo sapiens
  misc_RNA (1)...(19): siRNA sense strand
ugaccuccaucccgucuau

SEQ ID NO: 2014635 - RNA, 19 nt, Homo sapiens
  misc_RNA (1)...(19): siRNA sense strand
uaaaagagauuccauacac

SEQ ID NO: 2014636 - RNA, 19 nt, Homo sapiens
  misc_RNA (1)...(19): siRNA sense strand
ggagaaugauaugguugau

SEQ ID NO: 2014637 - RNA, 19 nt, Homo sapiens
  misc_RNA (1)...(19): siRNA sense strand
guaacgaaaccucauucuu

SEQ ID NO: 2014638 - RNA, 19 nt, Homo sapiens
  misc_RNA (1)...(19): siRNA sense strand
caaagguucacuucaagga

SEQ ID NO: 2014639 - RNA, 19 nt, Homo sapiens
  misc_RNA (1)...(19): siRNA sense strand
gaucagaaggaagaacuug

SEQ ID NO: 2014640 - RNA, 19 nt, Homo sapiens
  misc_RNA (1)...(19): siRNA sense strand
gaauuuuacugcgaaguuu

SEQ ID NO: 2014641 - RNA, 19 nt, Homo sapiens
  misc_RNA (1)...(19): siRNA sense strand
cuacaauucucccagugau

SEQ ID NO: 2014642 - RNA, 19 nt, Homo sapiens
  misc_RNA (1)...(19): siRNA sense strand
acaagaagucgaagcaaga

SEQ ID NO: 2014643 - RNA, 19 nt, Homo sapiens
  misc_RNA (1)...(19): siRNA sense strand
gagaaaacaagucugagua

SEQ ID NO: 2014644 - RNA, 19 nt, Homo sapiens
  misc_RNA (1)...(19): siRNA sense strand
gcaucaagaagucaacgaa

SEQ ID NO: 2014645 - RNA, 19 nt, Homo sapiens
  misc_RNA (1)...(19): siRNA sense strand
gccauagaaaggauucaua

SEQ ID NO: 2014646 - RNA, 19 nt, Homo sapiens
  misc_RNA (1)...(19): siRNA sense strand
acagaagccaucagacgua

SEQ ID NO: 2014647 - RNA, 19 nt, Homo sapiens
  misc_RNA (1)...(19): siRNA sense strand
gcagugguagugaaucaga

SEQ ID NO: 2014648 - RNA, 19 nt, Homo sapiens
  misc_RNA (1)...(19): siRNA sense strand
cugaguauuucuuaggauu

SEQ ID NO: 2014649 - RNA, 19 nt, Homo sapiens
  misc_RNA (1)...(19): siRNA sense strand
cagaagccaucagacguau

SEQ ID NO: 2014650 - RNA, 19 nt, Homo sapiens
  misc_RNA (1)...(19): siRNA sense strand
ucagaaggaagaacuugaa

SEQ ID NO: 2014651 - RNA, 19 nt, Homo sapiens
  misc_RNA (1)...(19): siRNA sense strand
gauaacugcaaacauggaa

SEQ ID NO: 2014652 - RNA, 19 nt, Homo sapiens
  misc_RNA (1)...(19): siRNA sense strand
gcgcuguuccggaagaauu

SEQ ID NO: 2014653 - RNA, 19 nt, Homo sapiens
  misc_RNA (1)...(19): siRNA sense strand
aaucaaacaccaucaguag

SEQ ID NO: 2014654 - RNA, 19 nt, Homo sapiens
  misc_RNA (1)...(19): siRNA sense strand
caucaagaagucaacgaaa

SEQ ID NO: 2014655 - RNA, 19 nt, Homo sapiens
  misc_RNA (1)...(19): siRNA sense strand
caaaagaagaguuauggaa

SEQ ID NO: 2014656 - RNA, 19 nt, Homo sapiens
  misc_RNA (1)...(19): siRNA sense strand
ggaggaaagcccauaacag

SEQ ID NO: 2014657 - RNA, 19 nt, Homo sapiens
  misc_RNA (1)...(19): siRNA sense strand
cagcagggcaucaagaagu

SEQ ID NO: 2014658 - RNA, 19 nt, Homo sapiens
  misc_RNA (1)...(19): siRNA sense strand
gagaaugauaugguugauu

SEQ ID NO: 2014659 - RNA, 19 nt, Homo sapiens
  misc_RNA (1)...(19): siRNA sense strand
caaacaccaucaguaggau

SEQ ID NO: 2014660 - RNA, 19 nt, Homo sapiens
  misc_RNA (1)...(19): siRNA sense strand
ggaagugcaguguggaaca

SEQ ID NO: 2014661 - RNA, 19 nt, Homo sapiens
  misc_RNA (1)...(19): siRNA sense strand
uacaaagguucacuucaag

SEQ ID NO: 2014662 - RNA, 19 nt, Homo sapiens
  misc_RNA (1)...(19): siRNA sense strand
gggcuacguuacugugaca

SEQ ID NO: 2014663 - RNA, 19 nt, Homo sapiens
  misc_RNA (1)...(19): siRNA sense strand
cuucaaggagacucaauuu

SEQ ID NO: 2014664 - RNA, 19 nt, Homo sapiens
  misc_RNA (1)...(19): siRNA sense strand
uaacuccgguugguguugu

SEQ ID NO: 2014665 - RNA, 19 nt, Homo sapiens
  misc_RNA (1)...(19): siRNA sense strand
aacccuugcugaacacaaa

SEQ ID NO: 2014666 - RNA, 19 nt, Homo sapiens
  misc_RNA (1)...(19): siRNA sense strand
uaaaccuuguggagauaga

SEQ ID NO: 2014667 - RNA, 19 nt, Homo sapiens
  misc_RNA (1)...(19): siRNA sense strand
gauuacaaagguucacuuc

SEQ ID NO: 2014668 - RNA, 19 nt, Homo sapiens
  misc_RNA (1)...(19): siRNA sense strand
cguauuccaucacguaaac

SEQ ID NO: 2014669 - RNA, 19 nt, Homo sapiens
  misc_RNA (1)...(19): siRNA sense strand
gguagugaaucagaaaauu

SEQ ID NO: 2014670 - RNA, 19 nt, Homo sapiens
  misc_RNA (1)...(19): siRNA sense strand
cgaaaccccuccuguggaa

SEQ ID NO: 2014671 - RNA, 19 nt, Homo sapiens
  misc_RNA (1)...(19): siRNA sense strand
aaguuuggauccauacguu

SEQ ID NO: 2014672 - RNA, 19 nt, Homo sapiens
  misc_RNA (1)...(19): siRNA sense strand
ccaaagaacuugccaaaga

SEQ ID NO: 2014673 - RNA, 19 nt, Homo sapiens
  misc_RNA (1)...(19): siRNA sense strand
caacguaucccaccaaaua

SEQ ID NO: 2014674 - RNA, 19 nt, Homo sapiens
  misc_RNA (1)...(19): siRNA sense strand
gaaagaagaggguguuauu

SEQ ID NO: 2014675 - RNA, 19 nt, Homo sapiens
  misc_RNA (1)...(19): siRNA sense strand
agaaauaugucuccaaaga

SEQ ID NO: 2014676 - RNA, 19 nt, Homo sapiens
  misc_RNA (1)...(19): siRNA sense strand
gcagaaagacuggauguaa

SEQ ID NO: 2014677 - RNA, 19 nt, Homo sapiens
  misc_RNA (1)...(19): siRNA sense strand
cgaauaagcugcaagacau

SEQ ID NO: 2014678 - RNA, 19 nt, Homo sapiens
  misc_RNA (1)...(19): siRNA sense strand
cagaaagacuggauguaaa

SEQ ID NO: 2014679 - RNA, 19 nt, Homo sapiens
  misc_RNA (1)...(19): siRNA sense strand
gaaaaggccucuaagaaau

SEQ ID NO: 2014680 - RNA, 19 nt, Homo sapiens
  misc_RNA (1)...(19): siRNA sense strand
caaagcagaaccauuuaua

SEQ ID NO: 2014681 - RNA, 19 nt, Homo sapiens
  misc_RNA (1)...(19): siRNA sense strand
cauaaacucugcacauuca

SEQ ID NO: 2014682 - RNA, 19 nt, Homo sapiens
  misc_RNA (1)...(19): siRNA sense strand
gcacagacccaguuugaug

SEQ ID NO: 2014683 - RNA, 19 nt, Homo sapiens
  misc_RNA (1)...(19): siRNA sense strand
caaagagauucgugucaaa

SEQ ID NO: 2014684 - RNA, 19 nt, Homo sapiens
  misc_RNA (1)...(19): siRNA sense strand
gaaacagauuugcauguca

SEQ ID NO: 2014685 - RNA, 19 nt, Homo sapiens
  misc_RNA (1)...(19): siRNA sense strand
cgauauugaugccauuuaa

SEQ ID NO: 2014686 - RNA, 19 nt, Homo sapiens
  misc_RNA (1)...(19): siRNA sense strand
gcaauggaaucaagacagu

SEQ ID NO: 2014687 - RNA, 19 nt, Homo sapiens
  misc_RNA (1)...(19): siRNA sense strand
gaaauaugucuccaaagaa

SEQ ID NO: 2014688 - RNA, 19 nt, Homo sapiens
  misc_RNA (1)...(19): siRNA sense strand
gaagaggguguuauugauu

SEQ ID NO: 2014689 - RNA, 19 nt, Homo sapiens
  misc_RNA (1)...(19): siRNA sense strand
gagcacagacccaguuuga

SEQ ID NO: 2014690 - RNA, 19 nt, Homo sapiens
  misc_RNA (1)...(19): siRNA sense strand
ggaaaaggccucuaagaaa

SEQ ID NO: 2014691 - RNA, 19 nt, Homo sapiens
  misc_RNA (1)...(19): siRNA sense strand
ugucaaagcagaaccauuu

SEQ ID NO: 2014692 - RNA, 19 nt, Homo sapiens
  misc_RNA (1)...(19): siRNA sense strand
cauguuggauggauucauu

SEQ ID NO: 2014693 - RNA, 19 nt, Homo sapiens
  misc_RNA (1)...(19): siRNA sense strand
ccaaagagauucgugucaa

SEQ ID NO: 2014694 - RNA, 19 nt, Homo sapiens
  misc_RNA (1)...(19): siRNA sense strand
ugauucaucugacaaagaa

SEQ ID NO: 2014695 - RNA, 19 nt, Homo sapiens
  misc_RNA (1)...(19): siRNA sense strand
caaagaacuugccaaagag

SEQ ID NO: 2014696 - RNA, 19 nt, Homo sapiens
  misc_RNA (1)...(19): siRNA sense strand
caaaggcaauggaaucaag

SEQ ID NO: 2014697 - RNA, 19 nt, Homo sapiens
  misc_RNA (1)...(19): siRNA sense strand
gaucucaugaggcgaauaa

SEQ ID NO: 2014698 - RNA, 19 nt, Homo sapiens
  misc_RNA (1)...(19): siRNA sense strand
gagaauagugacaguggua

SEQ ID NO: 2014699 - RNA, 19 nt, Homo sapiens
  misc_RNA (1)...(19): siRNA sense strand
aaacagauuugcaugucaa

SEQ ID NO: 2014700 - RNA, 19 nt, Homo sapiens
  misc_RNA (1)...(19): siRNA sense strand
gauguacgaugcagaccuu

SEQ ID NO: 2014701 - RNA, 19 nt, Homo sapiens
  misc_RNA (1)...(19): siRNA sense strand
ccaaagaagcaaacaauag

SEQ ID NO: 2014702 - RNA, 19 nt, Homo sapiens
  misc_RNA (1)...(19): siRNA sense strand
gaagaagaggucaucauca

SEQ ID NO: 2014703 - RNA, 19 nt, Homo sapiens
  misc_RNA (1)...(19): siRNA sense strand
gaagauuagagaacagauu

SEQ ID NO: 2014704 - RNA, 19 nt, Homo sapiens
  misc_RNA (1)...(19): siRNA sense strand
gaaggaggcagaggaagaa

SEQ ID NO: 2014705 - RNA, 19 nt, Homo sapiens
  misc_RNA (1)...(19): siRNA sense strand
acauugaggugguguauuc

SEQ ID NO: 2014706 - RNA, 19 nt, Homo sapiens
  misc_RNA (1)...(19): siRNA sense strand
gcucaaaggcgucgaaugg

SEQ ID NO: 2014707 - RNA, 19 nt, Homo sapiens
  misc_RNA (1)...(19): siRNA sense strand
agaagaagaugaagaugag

SEQ ID NO: 2014708 - RNA, 19 nt, Homo sapiens
  misc_RNA (1)...(19): siRNA sense strand
ccaguuugauguuaagaau

SEQ ID NO: 2014709 - RNA, 19 nt, Homo sapiens
  misc_RNA (1)...(19): siRNA sense strand
ugacacacaucauaaacuc

SEQ ID NO: 2014710 - RNA, 19 nt, Homo sapiens
  misc_RNA (1)...(19): siRNA sense strand
gaacauugaggugguguau

SEQ ID NO: 2014711 - RNA, 19 nt, Homo sapiens
  misc_RNA (1)...(19): siRNA sense strand
cgaagaagaagaugaagau

SEQ ID NO: 2014712 - RNA, 19 nt, Homo sapiens
  misc_RNA (1)...(19): siRNA sense strand
ucuccaagauuccacauau

SEQ ID NO: 2014713 - RNA, 19 nt, Homo sapiens
  misc_RNA (1)...(19): siRNA sense strand
caugggcccucuuguucua

SEQ ID NO: 2014714 - RNA, 19 nt, Homo sapiens
  misc_RNA (1)...(19): siRNA sense strand
gugagaauccugaaacaga

SEQ ID NO: 2014715 - RNA, 19 nt, Homo sapiens
  misc_RNA (1)...(19): siRNA sense strand
ucaaaggcgucgaauggau

SEQ ID NO: 2014716 - RNA, 19 nt, Homo sapiens
  misc_RNA (1)...(19): siRNA sense strand
agaagaggguguuauugau

SEQ ID NO: 2014717 - RNA, 19 nt, Homo sapiens
  misc_RNA (1)...(19): siRNA sense strand
gaauggaugaaaucaguga

SEQ ID NO: 2014718 - RNA, 19 nt, Homo sapiens
  misc_RNA (1)...(19): siRNA sense strand
agacccaguuugauguuaa

SEQ ID NO: 2014719 - RNA, 19 nt, Homo sapiens
  misc_RNA (1)...(19): siRNA sense strand
caaagaaaucguugcugaa

SEQ ID NO: 2014720 - RNA, 19 nt, Homo sapiens
  misc_RNA (1)...(19): siRNA sense strand
aagaagaggguguuauuga

SEQ ID NO: 2014721 - RNA, 19 nt, Homo sapiens
  misc_RNA (1)...(19): siRNA sense strand
gcaugucaauccaaagaag

SEQ ID NO: 2014722 - RNA, 19 nt, Homo sapiens
  misc_RNA (1)...(19): siRNA sense strand
ucaagacaguuauagucaa

SEQ ID NO: 2014723 - RNA, 19 nt, Homo sapiens
  misc_RNA (1)...(19): siRNA sense strand
agaugaagaugagaacauu

SEQ ID NO: 2014724 - RNA, 19 nt, Homo sapiens
  misc_RNA (1)...(19): siRNA sense strand
ugaaaucagugaccaugca

SEQ ID NO: 2014725 - RNA, 19 nt, Homo sapiens
  misc_RNA (1)...(19): siRNA sense strand
caaagaagcaaacaauagg

SEQ ID NO: 2014726 - RNA, 19 nt, Homo sapiens
  misc_RNA (1)...(19): siRNA sense strand
gcgaauaagcugcaagaca

SEQ ID NO: 2014727 - RNA, 19 nt, Homo sapiens
  misc_RNA (1)...(19): siRNA sense strand
aaauaugucuccaaagaac

SEQ ID NO: 2014728 - RNA, 19 nt, Homo sapiens
  misc_RNA (1)...(19): siRNA sense strand
caacgguaccuucuucaug

SEQ ID NO: 2014729 - RNA, 19 nt, Homo sapiens
  misc_RNA (1)...(19): siRNA sense strand
gcccaacgguaccuucuuc

SEQ ID NO: 2014730 - RNA, 19 nt, Homo sapiens
  misc_RNA (1)...(19): siRNA sense strand
ucgaauggaugaaaucagu

SEQ ID NO: 2014731 - RNA, 19 nt, Homo sapiens
  misc_RNA (1)...(19): siRNA sense strand
ugaaacagauuugcauguc

SEQ ID NO: 2014732 - RNA, 19 nt, Homo sapiens
  misc_RNA (1)...(19): siRNA sense strand
ugagaauccugaaacagau

SEQ ID NO: 2014733 - RNA, 19 nt, Homo sapiens
  misc_RNA (1)...(19): siRNA sense strand
caagacaguuauagucaac

SEQ ID NO: 2014734 - RNA, 19 nt, Homo sapiens
  misc_RNA (1)...(19): siRNA sense strand
aagaagaggaggaugauga

SEQ ID NO: 2014735 - RNA, 19 nt, Homo sapiens
  misc_RNA (1)...(19): siRNA sense strand
cacauacaauggaagaaga

SEQ ID NO: 2014736 - RNA, 19 nt, Homo sapiens
  misc_RNA (1)...(19): siRNA sense strand
caagacauguuggauggau

SEQ ID NO: 2014737 - RNA, 19 nt, Homo sapiens
  misc_RNA (1)...(19): siRNA sense strand
gaagcaaacaauagguaau

SEQ ID NO: 2014738 - RNA, 19 nt, Homo sapiens
  misc_RNA (1)...(19): siRNA sense strand
gguaccuucuucaugguuu

SEQ ID NO: 2014739 - RNA, 19 nt, Homo sapiens
  misc_RNA (1)...(19): siRNA sense strand
gaaagggcaaagacaagga

SEQ ID NO: 2014740 - RNA, 19 nt, Homo sapiens
  misc_RNA (1)...(19): siRNA sense strand
aauggaaucaagacaguua

SEQ ID NO: 2014741 - RNA, 19 nt, Homo sapiens
  misc_RNA (1)...(19): siRNA sense strand
gaaaguugagacuguaaag

SEQ ID NO: 2014742 - RNA, 19 nt, Homo sapiens
  misc_RNA (1)...(19): siRNA sense strand
gggcaaaggcaauggaauc

SEQ ID NO: 2014743 - RNA, 19 nt, Homo sapiens
  misc_RNA (1)...(19): siRNA sense strand
gaacuugccaaagagauuc

SEQ ID NO: 2014744 - RNA, 19 nt, Homo sapiens
  misc_RNA (1)...(19): siRNA sense strand
gaaaauggcuccguaucca

SEQ ID NO: 2014745 - RNA, 19 nt, Homo sapiens
  misc_RNA (1)...(19): siRNA sense strand
gaggcaugcuugacacaca

SEQ ID NO: 2014746 - RNA, 19 nt, Homo sapiens
  misc_RNA (1)...(19): siRNA sense strand
aagaagaagaugaagauga

SEQ ID NO: 2014747 - RNA, 19 nt, Homo sapiens
  misc_RNA (1)...(19): siRNA sense strand
uuaaucggccuccaacgua

SEQ ID NO: 2014748 - RNA, 19 nt, Homo sapiens
  misc_RNA (1)...(19): siRNA sense strand
cagacccaguuugauguua

SEQ ID NO: 2014749 - RNA, 19 nt, Homo sapiens
  misc_RNA (1)...(19): siRNA sense strand
uaccgaaaguugagacugu

SEQ ID NO: 2014750 - RNA, 19 nt, Homo sapiens
  misc_RNA (1)...(19): siRNA sense strand
aagaagaggucaucaucag

SEQ ID NO: 2014751 - RNA, 19 nt, Homo sapiens
  misc_RNA (1)...(19): siRNA sense strand
aagaggguguuauugauuc

SEQ ID NO: 2014752 - RNA, 19 nt, Homo sapiens
  misc_RNA (1)...(19): siRNA sense strand
gaaaucagugaccaugcaa

SEQ ID NO: 2014753 - RNA, 19 nt, Homo sapiens
  misc_RNA (1)...(19): siRNA sense strand
gaaucaagacaguuauagu

SEQ ID NO: 2014754 - RNA, 19 nt, Homo sapiens
  misc_RNA (1)...(19): siRNA sense strand
gcaaacaauagguaauucu

SEQ ID NO: 2014755 - RNA, 19 nt, Homo sapiens
  misc_RNA (1)...(19): siRNA sense strand
aaaggccucuaagaaauau

SEQ ID NO: 2014756 - RNA, 19 nt, Homo sapiens
  misc_RNA (1)...(19): siRNA sense strand
ccaguucuaucgcuacaag

SEQ ID NO: 2014757 - RNA, 19 nt, Homo sapiens
  misc_RNA (1)...(19): siRNA sense strand
ggaaucaagacaguuauag

SEQ ID NO: 2014758 - RNA, 19 nt, Homo sapiens
  misc_RNA (1)...(19): siRNA sense strand
ggaagaagaggaggaugau

SEQ ID NO: 2014759 - RNA, 19 nt, Homo sapiens
  misc_RNA (1)...(19): siRNA sense strand
uaaucggccuccaacguau

SEQ ID NO: 2014760 - RNA, 19 nt, Homo sapiens
  misc_RNA (1)...(19): siRNA sense strand
gcgaagaagaagaugaaga

SEQ ID NO: 2014761 - RNA, 19 nt, Homo sapiens
  misc_RNA (1)...(19): siRNA sense strand
ugaaggaggcagaggaaga

SEQ ID NO: 2014762 - RNA, 19 nt, Homo sapiens
  misc_RNA (1)...(19): siRNA sense strand
gauuuggaaagaacaauug

SEQ ID NO: 2014763 - RNA, 19 nt, Homo sapiens
  misc_RNA (1)...(19): siRNA sense strand
acucagugaugauuuggaa

SEQ ID NO: 2014764 - RNA, 19 nt, Homo sapiens
  misc_RNA (1)...(19): siRNA sense strand
gaauaagcugcaagacaug

SEQ ID NO: 2014765 - RNA, 19 nt, Homo sapiens
  misc_RNA (1)...(19): siRNA sense strand
uaaagucagacaacaagga

SEQ ID NO: 2014766 - RNA, 19 nt, Homo sapiens
  misc_RNA (1)...(19): siRNA sense strand
ggaggcagaggaagaaucu

SEQ ID NO: 2014767 - RNA, 19 nt, Homo sapiens
  misc_RNA (1)...(19): siRNA sense strand
guacgaugcagaccuuuua

SEQ ID NO: 2014768 - RNA, 19 nt, Homo sapiens
  misc_RNA (1)...(19): siRNA sense strand
gaaugugagaauccugaaa

SEQ ID NO: 2014769 - RNA, 19 nt, Homo sapiens
  misc_RNA (1)...(19): siRNA sense strand
gccaugggcccucuuguuc

SEQ ID NO: 2014770 - RNA, 19 nt, Homo sapiens
  misc_RNA (1)...(19): siRNA sense strand
gagaagauuagagaacaga

SEQ ID NO: 2014771 - RNA, 19 nt, Homo sapiens
  misc_RNA (1)...(19): siRNA sense strand
cguaucccaccaaauauuu

SEQ ID NO: 2014772 - RNA, 19 nt, Homo sapiens
  misc_RNA (1)...(19): siRNA sense strand
ccaaagaacuugccaaaga

SEQ ID NO: 2014773 - RNA, 19 nt, Homo sapiens
  misc_RNA (1)...(19): siRNA sense strand
caacguaucccaccaaaua

SEQ ID NO: 2014774 - RNA, 19 nt, Homo sapiens
  misc_RNA (1)...(19): siRNA sense strand
gaaagaagaggguguuauu

SEQ ID NO: 2014775 - RNA, 19 nt, Homo sapiens
  misc_RNA (1)...(19): siRNA sense strand
agaaauaugucuccaaaga

SEQ ID NO: 2014776 - RNA, 19 nt, Homo sapiens
  misc_RNA (1)...(19): siRNA sense strand
gcagaaagacuggauguaa

SEQ ID NO: 2014777 - RNA, 19 nt, Homo sapiens
  misc_RNA (1)...(19): siRNA sense strand
cgaauaagcugcaagacau

SEQ ID NO: 2014778 - RNA, 19 nt, Homo sapiens
  misc_RNA (1)...(19): siRNA sense strand
cagaaagacuggauguaaa

SEQ ID NO: 2014779 - RNA, 19 nt, Homo sapiens
  misc_RNA (1)...(19): siRNA sense strand
gaaaaggccucuaagaaau

SEQ ID NO: 2014780 - RNA, 19 nt, Homo sapiens
  misc_RNA (1)...(19): siRNA sense strand
caaagcagaaccauuuaua

SEQ ID NO: 2014781 - RNA, 19 nt, Homo sapiens
  misc_RNA (1)...(19): siRNA sense strand
cauaaacucugcacauuca

SEQ ID NO: 2014782 - RNA, 19 nt, Homo sapiens
  misc_RNA (1)...(19): siRNA sense strand
gcacagacccaguuugaug

SEQ ID NO: 2014783 - RNA, 19 nt, Homo sapiens
  misc_RNA (1)...(19): siRNA sense strand
caaagagauucgugucaaa

SEQ ID NO: 2014784 - RNA, 19 nt, Homo sapiens
  misc_RNA (1)...(19): siRNA sense strand
gaaacagauuugcauguca

SEQ ID NO: 2014785 - RNA, 19 nt, Homo sapiens
  misc_RNA (1)...(19): siRNA sense strand
cgauauugaugccauuuaa

SEQ ID NO: 2014786 - RNA, 19 nt, Homo sapiens
  misc_RNA (1)...(19): siRNA sense strand
gcaauggaaucaagacagu

SEQ ID NO: 2014787 - RNA, 19 nt, Homo sapiens
  misc_RNA (1)...(19): siRNA sense strand
gaaauaugucuccaaagaa

SEQ ID NO: 2014788 - RNA, 19 nt, Homo sapiens
  misc_RNA (1)...(19): siRNA sense strand
gaagaggguguuauugauu

SEQ ID NO: 2014789 - RNA, 19 nt, Homo sapiens
  misc_RNA (1)...(19): siRNA sense strand
gagcacagacccaguuuga

SEQ ID NO: 2014790 - RNA, 19 nt, Homo sapiens
  misc_RNA (1)...(19): siRNA sense strand
ggaaaaggccucuaagaaa

SEQ ID NO: 2014791 - RNA, 19 nt, Homo sapiens
  misc_RNA (1)...(19): siRNA sense strand
ugucaaagcagaaccauuu

SEQ ID NO: 2014792 - RNA, 19 nt, Homo sapiens
  misc_RNA (1)...(19): siRNA sense strand
cauguuggauggauucauu

SEQ ID NO: 2014793 - RNA, 19 nt, Homo sapiens
  misc_RNA (1)...(19): siRNA sense strand
ccaaagagauucgugucaa

SEQ ID NO: 2014794 - RNA, 19 nt, Homo sapiens
  misc_RNA (1)...(19): siRNA sense strand
ugauucaucugacaaagaa

SEQ ID NO: 2014795 - RNA, 19 nt, Homo sapiens
  misc_RNA (1)...(19): siRNA sense strand
caaagaacuugccaaagag

SEQ ID NO: 2014796 - RNA, 19 nt, Homo sapiens
  misc_RNA (1)...(19): siRNA sense strand
caaaggcaauggaaucaag

SEQ ID NO: 2014797 - RNA, 19 nt, Homo sapiens
  misc_RNA (1)...(19): siRNA sense strand
gaucucaugaggcgaauaa

SEQ ID NO: 2014798 - RNA, 19 nt, Homo sapiens
  misc_RNA (1)...(19): siRNA sense strand
gagaauagugacaguggua

SEQ ID NO: 2014799 - RNA, 19 nt, Homo sapiens
  misc_RNA (1)...(19): siRNA sense strand
aaacagauuugcaugucaa

SEQ ID NO: 2014800 - RNA, 19 nt, Homo sapiens
  misc_RNA (1)...(19): siRNA sense strand
gauguacgaugcagaccuu

SEQ ID NO: 2014801 - RNA, 19 nt, Homo sapiens
  misc_RNA (1)...(19): siRNA sense strand
ccaaagaagcaaacaauag

SEQ ID NO: 2014802 - RNA, 19 nt, Homo sapiens
  misc_RNA (1)...(19): siRNA sense strand
gaagaagaggucaucauca

SEQ ID NO: 2014803 - RNA, 19 nt, Homo sapiens
  misc_RNA (1)...(19): siRNA sense strand
gaagauuagagaacagauu

SEQ ID NO: 2014804 - RNA, 19 nt, Homo sapiens
  misc_RNA (1)...(19): siRNA sense strand
gaaggaggcagaggaagaa

SEQ ID NO: 2014805 - RNA, 19 nt, Homo sapiens
  misc_RNA (1)...(19): siRNA sense strand
acauugaggugguguauuc

SEQ ID NO: 2014806 - RNA, 19 nt, Homo sapiens
  misc_RNA (1)...(19): siRNA sense strand
gcucaaaggcgucgaaugg

SEQ ID NO: 2014807 - RNA, 19 nt, Homo sapiens
  misc_RNA (1)...(19): siRNA sense strand
agaagaagaugaagaugag

SEQ ID NO: 2014808 - RNA, 19 nt, Homo sapiens
  misc_RNA (1)...(19): siRNA sense strand
ccaguuugauguuaagaau

SEQ ID NO: 2014809 - RNA, 19 nt, Homo sapiens
  misc_RNA (1)...(19): siRNA sense strand
ugacacacaucauaaacuc

SEQ ID NO: 2014810 - RNA, 19 nt, Homo sapiens
  misc_RNA (1)...(19): siRNA sense strand
gaacauugaggugguguau

SEQ ID NO: 2014811 - RNA, 19 nt, Homo sapiens
  misc_RNA (1)...(19): siRNA sense strand
cgaagaagaagaugaagau

SEQ ID NO: 2014812 - RNA, 19 nt, Homo sapiens
  misc_RNA (1)...(19): siRNA sense strand
ucuccaagauuccacauau

SEQ ID NO: 2014813 - RNA, 19 nt, Homo sapiens
  misc_RNA (1)...(19): siRNA sense strand
caugggcccucuuguucua

SEQ ID NO: 2014814 - RNA, 19 nt, Homo sapiens
  misc_RNA (1)...(19): siRNA sense strand
gugagaauccugaaacaga

SEQ ID NO: 2014815 - RNA, 19 nt, Homo sapiens
  misc_RNA (1)...(19): siRNA sense strand
ucaaaggcgucgaauggau

SEQ ID NO: 2014816 - RNA, 19 nt, Homo sapiens
  misc_RNA (1)...(19): siRNA sense strand
agaagaggguguuauugau

SEQ ID NO: 2014817 - RNA, 19 nt, Homo sapiens
  misc_RNA (1)...(19): siRNA sense strand
gaauggaugaaaucaguga

SEQ ID NO: 2014818 - RNA, 19 nt, Homo sapiens
  misc_RNA (1)...(19): siRNA sense strand
agacccaguuugauguuaa

SEQ ID NO: 2014819 - RNA, 19 nt, Homo sapiens
  misc_RNA (1)...(19): siRNA sense strand
caaagaaaucguugcugaa

SEQ ID NO: 2014820 - RNA, 19 nt, Homo sapiens
  misc_RNA (1)...(19): siRNA sense strand
aagaagaggguguuauuga

SEQ ID NO: 2014821 - RNA, 19 nt, Homo sapiens
  misc_RNA (1)...(19): siRNA sense strand
gcaugucaauccaaagaag

SEQ ID NO: 2014822 - RNA, 19 nt, Homo sapiens
  misc_RNA (1)...(19): siRNA sense strand
ucaagacaguuauagucaa

SEQ ID NO: 2014823 - RNA, 19 nt, Homo sapiens
  misc_RNA (1)...(19): siRNA sense strand
agaugaagaugagaacauu

SEQ ID NO: 2014824 - RNA, 19 nt, Homo sapiens
  misc_RNA (1)...(19): siRNA sense strand
ugaaaucagugaccaugca

SEQ ID NO: 2014825 - RNA, 19 nt, Homo sapiens
  misc_RNA (1)...(19): siRNA sense strand
caaagaagcaaacaauagg

SEQ ID NO: 2014826 - RNA, 19 nt, Homo sapiens
  misc_RNA (1)...(19): siRNA sense strand
gcgaauaagcugcaagaca

SEQ ID NO: 2014827 - RNA, 19 nt, Homo sapiens
  misc_RNA (1)...(19): siRNA sense strand
aaauaugucuccaaagaac

SEQ ID NO: 2014828 - RNA, 19 nt, Homo sapiens
  misc_RNA (1)...(19): siRNA sense strand
caacgguaccuucuucaug

SEQ ID NO: 2014829 - RNA, 19 nt, Homo sapiens
  misc_RNA (1)...(19): siRNA sense strand
gcccaacgguaccuucuuc

SEQ ID NO: 2014830 - RNA, 19 nt, Homo sapiens
  misc_RNA (1)...(19): siRNA sense strand
ucgaauggaugaaaucagu

SEQ ID NO: 2014831 - RNA, 19 nt, Homo sapiens
  misc_RNA (1)...(19): siRNA sense strand
ugaaacagauuugcauguc

SEQ ID NO: 2014832 - RNA, 19 nt, Homo sapiens
  misc_RNA (1)...(19): siRNA sense strand
ugagaauccugaaacagau

SEQ ID NO: 2014833 - RNA, 19 nt, Homo sapiens
  misc_RNA (1)...(19): siRNA sense strand
caagacaguuauagucaac

SEQ ID NO: 2014834 - RNA, 19 nt, Homo sapiens
  misc_RNA (1)...(19): siRNA sense strand
aagaagaggaggaugauga

SEQ ID NO: 2014835 - RNA, 19 nt, Homo sapiens
  misc_RNA (1)...(19): siRNA sense strand
cacauacaauggaagaaga

SEQ ID NO: 2014836 - RNA, 19 nt, Homo sapiens
  misc_RNA (1)...(19): siRNA sense strand
caagacauguuggauggau

SEQ ID NO: 2014837 - RNA, 19 nt, Homo sapiens
  misc_RNA (1)...(19): siRNA sense strand
gaagcaaacaauagguaau

SEQ ID NO: 2014838 - RNA, 19 nt, Homo sapiens
  misc_RNA (1)...(19): siRNA sense strand
gguaccuucuucaugguuu

SEQ ID NO: 2014839 - RNA, 19 nt, Homo sapiens
  misc_RNA (1)...(19): siRNA sense strand
gaaagggcaaagacaagga

SEQ ID NO: 2014840 - RNA, 19 nt, Homo sapiens
  misc_RNA (1)...(19): siRNA sense strand
aauggaaucaagacaguua

SEQ ID NO: 2014841 - RNA, 19 nt, Homo sapiens
  misc_RNA (1)...(19): siRNA sense strand
gaaaguugagacuguaaag

SEQ ID NO: 2014842 - RNA, 19 nt, Homo sapiens
  misc_RNA (1)...(19): siRNA sense strand
gggcaaaggcaauggaauc

SEQ ID NO: 2014843 - RNA, 19 nt, Homo sapiens
  misc_RNA (1)...(19): siRNA sense strand
gaacuugccaaagagauuc

SEQ ID NO: 2014844 - RNA, 19 nt, Homo sapiens
  misc_RNA (1)...(19): siRNA sense strand
gaaaauggcuccguaucca

SEQ ID NO: 2014845 - RNA, 19 nt, Homo sapiens
  misc_RNA (1)...(19): siRNA sense strand
gaggcaugcuugacacaca

SEQ ID NO: 2014846 - RNA, 19 nt, Homo sapiens
  misc_RNA (1)...(19): siRNA sense strand
aagaagaagaugaagauga

SEQ ID NO: 2014847 - RNA, 19 nt, Homo sapiens
  misc_RNA (1)...(19): siRNA sense strand
uuaaucggccuccaacgua

SEQ ID NO: 2014848 - RNA, 19 nt, Homo sapiens
  misc_RNA (1)...(19): siRNA sense strand
cagacccaguuugauguua

SEQ ID NO: 2014849 - RNA, 19 nt, Homo sapiens
  misc_RNA (1)...(19): siRNA sense strand
uaccgaaaguugagacugu

SEQ ID NO: 2014850 - RNA, 19 nt, Homo sapiens
  misc_RNA (1)...(19): siRNA sense strand
aagaagaggucaucaucag

SEQ ID NO: 2014851 - RNA, 19 nt, Homo sapiens
  misc_RNA (1)...(19): siRNA sense strand
aagaggguguuauugauuc

SEQ ID NO: 2014852 - RNA, 19 nt, Homo sapiens
  misc_RNA (1)...(19): siRNA sense strand
gaaaucagugaccaugcaa

SEQ ID NO: 2014853 - RNA, 19 nt, Homo sapiens
  misc_RNA (1)...(19): siRNA sense strand
gaaucaagacaguuauagu

SEQ ID NO: 2014854 - RNA, 19 nt, Homo sapiens
  misc_RNA (1)...(19): siRNA sense strand
gcaaacaauagguaauucu

SEQ ID NO: 2014855 - RNA, 19 nt, Homo sapiens
  misc_RNA (1)...(19): siRNA sense strand
aaaggccucuaagaaauau

SEQ ID NO: 2014856 - RNA, 19 nt, Homo sapiens
  misc_RNA (1)...(19): siRNA sense strand
ccaguucuaucgcuacaag

SEQ ID NO: 2014857 - RNA, 19 nt, Homo sapiens
  misc_RNA (1)...(19): siRNA sense strand
ggaaucaagacaguuauag

SEQ ID NO: 2014858 - RNA, 19 nt, Homo sapiens
  misc_RNA (1)...(19): siRNA sense strand
ggaagaagaggaggaugau

SEQ ID NO: 2014859 - RNA, 19 nt, Homo sapiens
  misc_RNA (1)...(19): siRNA sense strand
uaaucggccuccaacguau

SEQ ID NO: 2014860 - RNA, 19 nt, Homo sapiens
  misc_RNA (1)...(19): siRNA sense strand
gcgaagaagaagaugaaga

SEQ ID NO: 2014861 - RNA, 19 nt, Homo sapiens
  misc_RNA (1)...(19): siRNA sense strand
ugaaggaggcagaggaaga

SEQ ID NO: 2014862 - RNA, 19 nt, Homo sapiens
  misc_RNA (1)...(19): siRNA sense strand
gauuuggaaagaacaauug

SEQ ID NO: 2014863 - RNA, 19 nt, Homo sapiens
  misc_RNA (1)...(19): siRNA sense strand
acucagugaugauuuggaa

SEQ ID NO: 2014864 - RNA, 19 nt, Homo sapiens
  misc_RNA (1)...(19): siRNA sense strand
gaauaagcugcaagacaug

SEQ ID NO: 2014865 - RNA, 19 nt, Homo sapiens
  misc_RNA (1)...(19): siRNA sense strand
uaaagucagacaacaagga

SEQ ID NO: 2014866 - RNA, 19 nt, Homo sapiens
  misc_RNA (1)...(19): siRNA sense strand
ggaggcagaggaagaaucu

SEQ ID NO: 2014867 - RNA, 19 nt, Homo sapiens
  misc_RNA (1)...(19): siRNA sense strand
guacgaugcagaccuuuua

SEQ ID NO: 2014868 - RNA, 19 nt, Homo sapiens
  misc_RNA (1)...(19): siRNA sense strand
gaaugugagaauccugaaa

SEQ ID NO: 2014869 - RNA, 19 nt, Homo sapiens
  misc_RNA (1)...(19): siRNA sense strand
gccaugggcccucuuguuc

SEQ ID NO: 2014870 - RNA, 19 nt, Homo sapiens
  misc_RNA (1)...(19): siRNA sense strand
gagaagauuagagaacaga

SEQ ID NO: 2014871 - RNA, 19 nt, Homo sapiens
  misc_RNA (1)...(19): siRNA sense strand
cguaucccaccaaauauuu

SEQ ID NO: 2014872 - RNA, 19 nt, Homo sapiens
  misc_RNA (1)...(19): siRNA sense strand
ccaaagaacuugccaaaga

SEQ ID NO: 2014873 - RNA, 19 nt, Homo sapiens
  misc_RNA (1)...(19): siRNA sense strand
caacguaucccaccaaaua

SEQ ID NO: 2014874 - RNA, 19 nt, Homo sapiens
  misc_RNA (1)...(19): siRNA sense strand
gaaagaagaggguguuauu

SEQ ID NO: 2014875 - RNA, 19 nt, Homo sapiens
  misc_RNA (1)...(19): siRNA sense strand
agaaauaugucuccaaaga

SEQ ID NO: 2014876 - RNA, 19 nt, Homo sapiens
  misc_RNA (1)...(19): siRNA sense strand
gcagaaagacuggauguaa

SEQ ID NO: 2014877 - RNA, 19 nt, Homo sapiens
  misc_RNA (1)...(19): siRNA sense strand
cgaauaagcugcaagacau

SEQ ID NO: 2014878 - RNA, 19 nt, Homo sapiens
  misc_RNA (1)...(19): siRNA sense strand
cagaaagacuggauguaaa

SEQ ID NO: 2014879 - RNA, 19 nt, Homo sapiens
  misc_RNA (1)...(19): siRNA sense strand
gaaaaggccucuaagaaau

SEQ ID NO: 2014880 - RNA, 19 nt, Homo sapiens
  misc_RNA (1)...(19): siRNA sense strand
caaagcagaaccauuuaua

SEQ ID NO: 2014881 - RNA, 19 nt, Homo sapiens
  misc_RNA (1)...(19): siRNA sense strand
cauaaacucugcacauuca

SEQ ID NO: 2014882 - RNA, 19 nt, Homo sapiens
  misc_RNA (1)...(19): siRNA sense strand
gcacagacccaguuugaug

SEQ ID NO: 2014883 - RNA, 19 nt, Homo sapiens
  misc_RNA (1)...(19): siRNA sense strand
caaagagauucgugucaaa

SEQ ID NO: 2014884 - RNA, 19 nt, Homo sapiens
  misc_RNA (1)...(19): siRNA sense strand
gaaacagauuugcauguca

SEQ ID NO: 2014885 - RNA, 19 nt, Homo sapiens
  misc_RNA (1)...(19): siRNA sense strand
cgauauugaugccauuuaa

SEQ ID NO: 2014886 - RNA, 19 nt, Homo sapiens
  misc_RNA (1)...(19): siRNA sense strand
gcaauggaaucaagacagu

SEQ ID NO: 2014887 - RNA, 19 nt, Homo sapiens
  misc_RNA (1)...(19): siRNA sense strand
gaaauaugucuccaaagaa

SEQ ID NO: 2014888 - RNA, 19 nt, Homo sapiens
  misc_RNA (1)...(19): siRNA sense strand
gaagaggguguuauugauu

SEQ ID NO: 2014889 - RNA, 19 nt, Homo sapiens
  misc_RNA (1)...(19): siRNA sense strand
gagcacagacccaguuuga

SEQ ID NO: 2014890 - RNA, 19 nt, Homo sapiens
  misc_RNA (1)...(19): siRNA sense strand
ggaaaaggccucuaagaaa

SEQ ID NO: 2014891 - RNA, 19 nt, Homo sapiens
  misc_RNA (1)...(19): siRNA sense strand
ugucaaagcagaaccauuu

SEQ ID NO: 2014892 - RNA, 19 nt, Homo sapiens
  misc_RNA (1)...(19): siRNA sense strand
cauguuggauggauucauu

SEQ ID NO: 2014893 - RNA, 19 nt, Homo sapiens
  misc_RNA (1)...(19): siRNA sense strand
ccaaagagauucgugucaa

SEQ ID NO: 2014894 - RNA, 19 nt, Homo sapiens
  misc_RNA (1)...(19): siRNA sense strand
ugauucaucugacaaagaa

SEQ ID NO: 2014895 - RNA, 19 nt, Homo sapiens
  misc_RNA (1)...(19): siRNA sense strand
caaagaacuugccaaagag

SEQ ID NO: 2014896 - RNA, 19 nt, Homo sapiens
  misc_RNA (1)...(19): siRNA sense strand
caaaggcaauggaaucaag

SEQ ID NO: 2014897 - RNA, 19 nt, Homo sapiens
  misc_RNA (1)...(19): siRNA sense strand
gaucucaugaggcgaauaa

SEQ ID NO: 2014898 - RNA, 19 nt, Homo sapiens
  misc_RNA (1)...(19): siRNA sense strand
gagaauagugacaguggua

SEQ ID NO: 2014899 - RNA, 19 nt, Homo sapiens
  misc_RNA (1)...(19): siRNA sense strand
aaacagauuugcaugucaa

SEQ ID NO: 2014900 - RNA, 19 nt, Homo sapiens
  misc_RNA (1)...(19): siRNA sense strand
gauguacgaugcagaccuu

SEQ ID NO: 2014901 - RNA, 19 nt, Homo sapiens
  misc_RNA (1)...(19): siRNA sense strand
ccaaagaagcaaacaauag

SEQ ID NO: 2014902 - RNA, 19 nt, Homo sapiens
  misc_RNA (1)...(19): siRNA sense strand
gaagaagaggucaucauca

SEQ ID NO: 2014903 - RNA, 19 nt, Homo sapiens
  misc_RNA (1)...(19): siRNA sense strand
gaagauuagagaacagauu

SEQ ID NO: 2014904 - RNA, 19 nt, Homo sapiens
  misc_RNA (1)...(19): siRNA sense strand
gaaggaggcagaggaagaa

SEQ ID NO: 2014905 - RNA, 19 nt, Homo sapiens
  misc_RNA (1)...(19): siRNA sense strand
acauugaggugguguauuc

SEQ ID NO: 2014906 - RNA, 19 nt, Homo sapiens
  misc_RNA (1)...(19): siRNA sense strand
gcucaaaggcgucgaaugg

SEQ ID NO: 2014907 - RNA, 19 nt, Homo sapiens
  misc_RNA (1)...(19): siRNA sense strand
agaagaagaugaagaugag

SEQ ID NO: 2014908 - RNA, 19 nt, Homo sapiens
  misc_RNA (1)...(19): siRNA sense strand
ccaguuugauguuaagaau

SEQ ID NO: 2014909 - RNA, 19 nt, Homo sapiens
  misc_RNA (1)...(19): siRNA sense strand
ugacacacaucauaaacuc

SEQ ID NO: 2014910 - RNA, 19 nt, Homo sapiens
  misc_RNA (1)...(19): siRNA sense strand
gaacauugaggugguguau

SEQ ID NO: 2014911 - RNA, 19 nt, Homo sapiens
  misc_RNA (1)...(19): siRNA sense strand
cgaagaagaagaugaagau

SEQ ID NO: 2014912 - RNA, 19 nt, Homo sapiens
  misc_RNA (1)...(19): siRNA sense strand
ucuccaagauuccacauau

SEQ ID NO: 2014913 - RNA, 19 nt, Homo sapiens
  misc_RNA (1)...(19): siRNA sense strand
caugggcccucuuguucua

SEQ ID NO: 2014914 - RNA, 19 nt, Homo sapiens
  misc_RNA (1)...(19): siRNA sense strand
gugagaauccugaaacaga

SEQ ID NO: 2014915 - RNA, 19 nt, Homo sapiens
  misc_RNA (1)...(19): siRNA sense strand
ucaaaggcgucgaauggau

SEQ ID NO: 2014916 - RNA, 19 nt, Homo sapiens
  misc_RNA (1)...(19): siRNA sense strand
agaagaggguguuauugau

SEQ ID NO: 2014917 - RNA, 19 nt, Homo sapiens
  misc_RNA (1)...(19): siRNA sense strand
gaauggaugaaaucaguga

SEQ ID NO: 2014918 - RNA, 19 nt, Homo sapiens
  misc_RNA (1)...(19): siRNA sense strand
agacccaguuugauguuaa

SEQ ID NO: 2014919 - RNA, 19 nt, Homo sapiens
  misc_RNA (1)...(19): siRNA sense strand
caaagaaaucguugcugaa

SEQ ID NO: 2014920 - RNA, 19 nt, Homo sapiens
  misc_RNA (1)...(19): siRNA sense strand
aagaagaggguguuauuga

SEQ ID NO: 2014921 - RNA, 19 nt, Homo sapiens
  misc_RNA (1)...(19): siRNA sense strand
gcaugucaauccaaagaag

SEQ ID NO: 2014922 - RNA, 19 nt, Homo sapiens
  misc_RNA (1)...(19): siRNA sense strand
ucaagacaguuauagucaa

SEQ ID NO: 2014923 - RNA, 19 nt, Homo sapiens
  misc_RNA (1)...(19): siRNA sense strand
agaugaagaugagaacauu

SEQ ID NO: 2014924 - RNA, 19 nt, Homo sapiens
  misc_RNA (1)...(19): siRNA sense strand
ugaaaucagugaccaugca

SEQ ID NO: 2014925 - RNA, 19 nt, Homo sapiens
  misc_RNA (1)...(19): siRNA sense strand
caaagaagcaaacaauagg

SEQ ID NO: 2014926 - RNA, 19 nt, Homo sapiens
  misc_RNA (1)...(19): siRNA sense strand
gcgaauaagcugcaagaca

SEQ ID NO: 2014927 - RNA, 19 nt, Homo sapiens
  misc_RNA (1)...(19): siRNA sense strand
aaauaugucuccaaagaac

SEQ ID NO: 2014928 - RNA, 19 nt, Homo sapiens
  misc_RNA (1)...(19): siRNA sense strand
caacgguaccuucuucaug

SEQ ID NO: 2014929 - RNA, 19 nt, Homo sapiens
  misc_RNA (1)...(19): siRNA sense strand
gcccaacgguaccuucuuc

SEQ ID NO: 2014930 - RNA, 19 nt, Homo sapiens
  misc_RNA (1)...(19): siRNA sense strand
ucgaauggaugaaaucagu

SEQ ID NO: 2014931 - RNA, 19 nt, Homo sapiens
  misc_RNA (1)...(19): siRNA sense strand
ugaaacagauuugcauguc

SEQ ID NO: 2014932 - RNA, 19 nt, Homo sapiens
  misc_RNA (1)...(19): siRNA sense strand
ugagaauccugaaacagau

SEQ ID NO: 2014933 - RNA, 19 nt, Homo sapiens
  misc_RNA (1)...(19): siRNA sense strand
caagacaguuauagucaac

SEQ ID NO: 2014934 - RNA, 19 nt, Homo sapiens
  misc_RNA (1)...(19): siRNA sense strand
aagaagaggaggaugauga

SEQ ID NO: 2014935 - RNA, 19 nt, Homo sapiens
  misc_RNA (1)...(19): siRNA sense strand
cacauacaauggaagaaga

SEQ ID NO: 2014936 - RNA, 19 nt, Homo sapiens
  misc_RNA (1)...(19): siRNA sense strand
caagacauguuggauggau

SEQ ID NO: 2014937 - RNA, 19 nt, Homo sapiens
  misc_RNA (1)...(19): siRNA sense strand
gaagcaaacaauagguaau

SEQ ID NO: 2014938 - RNA, 19 nt, Homo sapiens
  misc_RNA (1)...(19): siRNA sense strand
gguaccuucuucaugguuu

SEQ ID NO: 2014939 - RNA, 19 nt, Homo sapiens
  misc_RNA (1)...(19): siRNA sense strand
gaaagggcaaagacaagga

SEQ ID NO: 2014940 - RNA, 19 nt, Homo sapiens
  misc_RNA (1)...(19): siRNA sense strand
aauggaaucaagacaguua

SEQ ID NO: 2014941 - RNA, 19 nt, Homo sapiens
  misc_RNA (1)...(19): siRNA sense strand
gaaaguugagacuguaaag

SEQ ID NO: 2014942 - RNA, 19 nt, Homo sapiens
  misc_RNA (1)...(19): siRNA sense strand
gggcaaaggcaauggaauc

SEQ ID NO: 2014943 - RNA, 19 nt, Homo sapiens
  misc_RNA (1)...(19): siRNA sense strand
gaacuugccaaagagauuc

SEQ ID NO: 2014944 - RNA, 19 nt, Homo sapiens
  misc_RNA (1)...(19): siRNA sense strand
gaaaauggcuccguaucca

SEQ ID NO: 2014945 - RNA, 19 nt, Homo sapiens
  misc_RNA (1)...(19): siRNA sense strand
gaggcaugcuugacacaca

SEQ ID NO: 2014946 - RNA, 19 nt, Homo sapiens
  misc_RNA (1)...(19): siRNA sense strand
aagaagaagaugaagauga

SEQ ID NO: 2014947 - RNA, 19 nt, Homo sapiens
  misc_RNA (1)...(19): siRNA sense strand
uuaaucggccuccaacgua

SEQ ID NO: 2014948 - RNA, 19 nt, Homo sapiens
  misc_RNA (1)...(19): siRNA sense strand
cagacccaguuugauguua

SEQ ID NO: 2014949 - RNA, 19 nt, Homo sapiens
  misc_RNA (1)...(19): siRNA sense strand
uaccgaaaguugagacugu

SEQ ID NO: 2014950 - RNA, 19 nt, Homo sapiens
  misc_RNA (1)...(19): siRNA sense strand
aagaagaggucaucaucag

SEQ ID NO: 2014951 - RNA, 19 nt, Homo sapiens
  misc_RNA (1)...(19): siRNA sense strand
aagaggguguuauugauuc

SEQ ID NO: 2014952 - RNA, 19 nt, Homo sapiens
  misc_RNA (1)...(19): siRNA sense strand
gaaaucagugaccaugcaa

SEQ ID NO: 2014953 - RNA, 19 nt, Homo sapiens
  misc_RNA (1)...(19): siRNA sense strand
gaaucaagacaguuauagu

SEQ ID NO: 2014954 - RNA, 19 nt, Homo sapiens
  misc_RNA (1)...(19): siRNA sense strand
gcaaacaauagguaauucu

SEQ ID NO: 2014955 - RNA, 19 nt, Homo sapiens
  misc_RNA (1)...(19): siRNA sense strand
aaaggccucuaagaaauau

SEQ ID NO: 2014956 - RNA, 19 nt, Homo sapiens
  misc_RNA (1)...(19): siRNA sense strand
ccaguucuaucgcuacaag

SEQ ID NO: 2014957 - RNA, 19 nt, Homo sapiens
  misc_RNA (1)...(19): siRNA sense strand
ggaaucaagacaguuauag

SEQ ID NO: 2014958 - RNA, 19 nt, Homo sapiens
  misc_RNA (1)...(19): siRNA sense strand
ggaagaagaggaggaugau

SEQ ID NO: 2014959 - RNA, 19 nt, Homo sapiens
  misc_RNA (1)...(19): siRNA sense strand
uaaucggccuccaacguau

SEQ ID NO: 2014960 - RNA, 19 nt, Homo sapiens
  misc_RNA (1)...(19): siRNA sense strand
gcgaagaagaagaugaaga

SEQ ID NO: 2014961 - RNA, 19 nt, Homo sapiens
  misc_RNA (1)...(19): siRNA sense strand
ugaaggaggcagaggaaga

SEQ ID NO: 2014962 - RNA, 19 nt, Homo sapiens
  misc_RNA (1)...(19): siRNA sense strand
gauuuggaaagaacaauug

SEQ ID NO: 2014963 - RNA, 19 nt, Homo sapiens
  misc_RNA (1)...(19): siRNA sense strand
acucagugaugauuuggaa

SEQ ID NO: 2014964 - RNA, 19 nt, Homo sapiens
  misc_RNA (1)...(19): siRNA sense strand
gaauaagcugcaagacaug

SEQ ID NO: 2014965 - RNA, 19 nt, Homo sapiens
  misc_RNA (1)...(19): siRNA sense strand
uaaagucagacaacaagga

SEQ ID NO: 2014966 - RNA, 19 nt, Homo sapiens
  misc_RNA (1)...(19): siRNA sense strand
ggaggcagaggaagaaucu

SEQ ID NO: 2014967 - RNA, 19 nt, Homo sapiens
  misc_RNA (1)...(19): siRNA sense strand
guacgaugcagaccuuuua

SEQ ID NO: 2014968 - RNA, 19 nt, Homo sapiens
  misc_RNA (1)...(19): siRNA sense strand
gaaugugagaauccugaaa

SEQ ID NO: 2014969 - RNA, 19 nt, Homo sapiens
  misc_RNA (1)...(19): siRNA sense strand
gccaugggcccucuuguuc

SEQ ID NO: 2014970 - RNA, 19 nt, Homo sapiens
  misc_RNA (1)...(19): siRNA sense strand
gagaagauuagagaacaga

SEQ ID NO: 2014971 - RNA, 19 nt, Homo sapiens
  misc_RNA (1)...(19): siRNA sense strand
cguaucccaccaaauauuu

SEQ ID NO: 2014972 - RNA, 19 nt, Homo sapiens
  misc_RNA (1)...(19): siRNA sense strand
ccaaagaacuugccaaaga

SEQ ID NO: 2014973 - RNA, 19 nt, Homo sapiens
  misc_RNA (1)...(19): siRNA sense strand
caacguaucccaccaaaua

SEQ ID NO: 2014974 - RNA, 19 nt, Homo sapiens
  misc_RNA (1)...(19): siRNA sense strand
gaaagaagaggguguuauu

SEQ ID NO: 2014975 - RNA, 19 nt, Homo sapiens
  misc_RNA (1)...(19): siRNA sense strand
agaaauaugucuccaaaga

SEQ ID NO: 2014976 - RNA, 19 nt, Homo sapiens
  misc_RNA (1)...(19): siRNA sense strand
gcagaaagacuggauguaa

SEQ ID NO: 2014977 - RNA, 19 nt, Homo sapiens
  misc_RNA (1)...(19): siRNA sense strand
cgaauaagcugcaagacau

SEQ ID NO: 2014978 - RNA, 19 nt, Homo sapiens
  misc_RNA (1)...(19): siRNA sense strand
cagaaagacuggauguaaa

SEQ ID NO: 2014979 - RNA, 19 nt, Homo sapiens
  misc_RNA (1)...(19): siRNA sense strand
gaaaaggccucuaagaaau

SEQ ID NO: 2014980 - RNA, 19 nt, Homo sapiens
  misc_RNA (1)...(19): siRNA sense strand
caaagcagaaccauuuaua

SEQ ID NO: 2014981 - RNA, 19 nt, Homo sapiens
  misc_RNA (1)...(19): siRNA sense strand
cauaaacucugcacauuca

SEQ ID NO: 2014982 - RNA, 19 nt, Homo sapiens
  misc_RNA (1)...(19): siRNA sense strand
gcacagacccaguuugaug

SEQ ID NO: 2014983 - RNA, 19 nt, Homo sapiens
  misc_RNA (1)...(19): siRNA sense strand
caaagagauucgugucaaa

SEQ ID NO: 2014984 - RNA, 19 nt, Homo sapiens
  misc_RNA (1)...(19): siRNA sense strand
gaaacagauuugcauguca

SEQ ID NO: 2014985 - RNA, 19 nt, Homo sapiens
  misc_RNA (1)...(19): siRNA sense strand
cgauauugaugccauuuaa

SEQ ID NO: 2014986 - RNA, 19 nt, Homo sapiens
  misc_RNA (1)...(19): siRNA sense strand
gcaauggaaucaagacagu

SEQ ID NO: 2014987 - RNA, 19 nt, Homo sapiens
  misc_RNA (1)...(19): siRNA sense strand
gaaauaugucuccaaagaa

SEQ ID NO: 2014988 - RNA, 19 nt, Homo sapiens
  misc_RNA (1)...(19): siRNA sense strand
gaagaggguguuauugauu

SEQ ID NO: 2014989 - RNA, 19 nt, Homo sapiens
  misc_RNA (1)...(19): siRNA sense strand
gagcacagacccaguuuga

SEQ ID NO: 2014990 - RNA, 19 nt, Homo sapiens
  misc_RNA (1)...(19): siRNA sense strand
ggaaaaggccucuaagaaa

SEQ ID NO: 2014991 - RNA, 19 nt, Homo sapiens
  misc_RNA (1)...(19): siRNA sense strand
ugucaaagcagaaccauuu

SEQ ID NO: 2014992 - RNA, 19 nt, Homo sapiens
  misc_RNA (1)...(19): siRNA sense strand
cauguuggauggauucauu

SEQ ID NO: 2014993 - RNA, 19 nt, Homo sapiens
  misc_RNA (1)...(19): siRNA sense strand
ccaaagagauucgugucaa

SEQ ID NO: 2014994 - RNA, 19 nt, Homo sapiens
  misc_RNA (1)...(19): siRNA sense strand
ugauucaucugacaaagaa

SEQ ID NO: 2014995 - RNA, 19 nt, Homo sapiens
  misc_RNA (1)...(19): siRNA sense strand
caaagaacuugccaaagag

SEQ ID NO: 2014996 - RNA, 19 nt, Homo sapiens
  misc_RNA (1)...(19): siRNA sense strand
caaaggcaauggaaucaag

SEQ ID NO: 2014997 - RNA, 19 nt, Homo sapiens
  misc_RNA (1)...(19): siRNA sense strand
gaucucaugaggcgaauaa

SEQ ID NO: 2014998 - RNA, 19 nt, Homo sapiens
  misc_RNA (1)...(19): siRNA sense strand
gagaauagugacaguggua

SEQ ID NO: 2014999 - RNA, 19 nt, Homo sapiens
  misc_RNA (1)...(19): siRNA sense strand
aaacagauuugcaugucaa

SEQ ID NO: 2015000 - RNA, 19 nt, Homo sapiens
  misc_RNA (1)...(19): siRNA sense strand
gauguacgaugcagaccuu

SEQ ID NO: 2015001 - RNA, 19 nt, Homo sapiens
  misc_RNA (1)...(19): siRNA sense strand
ccaaagaagcaaacaauag

SEQ ID NO: 2015002 - RNA, 19 nt, Homo sapiens
  misc_RNA (1)...(19): siRNA sense strand
gaagaagaggucaucauca

SEQ ID NO: 2015003 - RNA, 19 nt, Homo sapiens
  misc_RNA (1)...(19): siRNA sense strand
gaagauuagagaacagauu

SEQ ID NO: 2015004 - RNA, 19 nt, Homo sapiens
  misc_RNA (1)...(19): siRNA sense strand
gaaggaggcagaggaagaa

SEQ ID NO: 2015005 - RNA, 19 nt, Homo sapiens
  misc_RNA (1)...(19): siRNA sense strand
acauugaggugguguauuc

SEQ ID NO: 2015006 - RNA, 19 nt, Homo sapiens
  misc_RNA (1)...(19): siRNA sense strand
gcucaaaggcgucgaaugg

SEQ ID NO: 2015007 - RNA, 19 nt, Homo sapiens
  misc_RNA (1)...(19): siRNA sense strand
agaagaagaugaagaugag

SEQ ID NO: 2015008 - RNA, 19 nt, Homo sapiens
  misc_RNA (1)...(19): siRNA sense strand
ccaguuugauguuaagaau

SEQ ID NO: 2015009 - RNA, 19 nt, Homo sapiens
  misc_RNA (1)...(19): siRNA sense strand
ugacacacaucauaaacuc

SEQ ID NO: 2015010 - RNA, 19 nt, Homo sapiens
  misc_RNA (1)...(19): siRNA sense strand
gaacauugaggugguguau

SEQ ID NO: 2015011 - RNA, 19 nt, Homo sapiens
  misc_RNA (1)...(19): siRNA sense strand
cgaagaagaagaugaagau

SEQ ID NO: 2015012 - RNA, 19 nt, Homo sapiens
  misc_RNA (1)...(19): siRNA sense strand
ucuccaagauuccacauau

SEQ ID NO: 2015013 - RNA, 19 nt, Homo sapiens
  misc_RNA (1)...(19): siRNA sense strand
caugggcccucuuguucua

SEQ ID NO: 2015014 - RNA, 19 nt, Homo sapiens
  misc_RNA (1)...(19): siRNA sense strand
gugagaauccugaaacaga

SEQ ID NO: 2015015 - RNA, 19 nt, Homo sapiens
  misc_RNA (1)...(19): siRNA sense strand
ucaaaggcgucgaauggau

SEQ ID NO: 2015016 - RNA, 19 nt, Homo sapiens
  misc_RNA (1)...(19): siRNA sense strand
agaagaggguguuauugau

SEQ ID NO: 2015017 - RNA, 19 nt, Homo sapiens
  misc_RNA (1)...(19): siRNA sense strand
gaauggaugaaaucaguga

SEQ ID NO: 2015018 - RNA, 19 nt, Homo sapiens
  misc_RNA (1)...(19): siRNA sense strand
agacccaguuugauguuaa

SEQ ID NO: 2015019 - RNA, 19 nt, Homo sapiens
  misc_RNA (1)...(19): siRNA sense strand
caaagaaaucguugcugaa

SEQ ID NO: 2015020 - RNA, 19 nt, Homo sapiens
  misc_RNA (1)...(19): siRNA sense strand
aagaagaggguguuauuga

SEQ ID NO: 2015021 - RNA, 19 nt, Homo sapiens
  misc_RNA (1)...(19): siRNA sense strand
gcaugucaauccaaagaag

SEQ ID NO: 2015022 - RNA, 19 nt, Homo sapiens
  misc_RNA (1)...(19): siRNA sense strand
ucaagacaguuauagucaa

SEQ ID NO: 2015023 - RNA, 19 nt, Homo sapiens
  misc_RNA (1)...(19): siRNA sense strand
agaugaagaugagaacauu

SEQ ID NO: 2015024 - RNA, 19 nt, Homo sapiens
  misc_RNA (1)...(19): siRNA sense strand
ugaaaucagugaccaugca

SEQ ID NO: 2015025 - RNA, 19 nt, Homo sapiens
  misc_RNA (1)...(19): siRNA sense strand
caaagaagcaaacaauagg

SEQ ID NO: 2015026 - RNA, 19 nt, Homo sapiens
  misc_RNA (1)...(19): siRNA sense strand
gcgaauaagcugcaagaca

SEQ ID NO: 2015027 - RNA, 19 nt, Homo sapiens
  misc_RNA (1)...(19): siRNA sense strand
aaauaugucuccaaagaac

SEQ ID NO: 2015028 - RNA, 19 nt, Homo sapiens
  misc_RNA (1)...(19): siRNA sense strand
caacgguaccuucuucaug

SEQ ID NO: 2015029 - RNA, 19 nt, Homo sapiens
  misc_RNA (1)...(19): siRNA sense strand
gcccaacgguaccuucuuc

SEQ ID NO: 2015030 - RNA, 19 nt, Homo sapiens
  misc_RNA (1)...(19): siRNA sense strand
ucgaauggaugaaaucagu

SEQ ID NO: 2015031 - RNA, 19 nt, Homo sapiens
  misc_RNA (1)...(19): siRNA sense strand
ugaaacagauuugcauguc

SEQ ID NO: 2015032 - RNA, 19 nt, Homo sapiens
  misc_RNA (1)...(19): siRNA sense strand
ugagaauccugaaacagau

SEQ ID NO: 2015033 - RNA, 19 nt, Homo sapiens
  misc_RNA (1)...(19): siRNA sense strand
caagacaguuauagucaac

SEQ ID NO: 2015034 - RNA, 19 nt, Homo sapiens
  misc_RNA (1)...(19): siRNA sense strand
aagaagaggaggaugauga

SEQ ID NO: 2015035 - RNA, 19 nt, Homo sapiens
  misc_RNA (1)...(19): siRNA sense strand
cacauacaauggaagaaga

SEQ ID NO: 2015036 - RNA, 19 nt, Homo sapiens
  misc_RNA (1)...(19): siRNA sense strand
caagacauguuggauggau

SEQ ID NO: 2015037 - RNA, 19 nt, Homo sapiens
  misc_RNA (1)...(19): siRNA sense strand
gaagcaaacaauagguaau

SEQ ID NO: 2015038 - RNA, 19 nt, Homo sapiens
  misc_RNA (1)...(19): siRNA sense strand
gguaccuucuucaugguuu

SEQ ID NO: 2015039 - RNA, 19 nt, Homo sapiens
  misc_RNA (1)...(19): siRNA sense strand
gaaagggcaaagacaagga

SEQ ID NO: 2015040 - RNA, 19 nt, Homo sapiens
  misc_RNA (1)...(19): siRNA sense strand
aauggaaucaagacaguua

SEQ ID NO: 2015041 - RNA, 19 nt, Homo sapiens
  misc_RNA (1)...(19): siRNA sense strand
gaaaguugagacuguaaag

SEQ ID NO: 2015042 - RNA, 19 nt, Homo sapiens
  misc_RNA (1)...(19): siRNA sense strand
gggcaaaggcaauggaauc

SEQ ID NO: 2015043 - RNA, 19 nt, Homo sapiens
  misc_RNA (1)...(19): siRNA sense strand
gaacuugccaaagagauuc

SEQ ID NO: 2015044 - RNA, 19 nt, Homo sapiens
  misc_RNA (1)...(19): siRNA sense strand
gaaaauggcuccguaucca

SEQ ID NO: 2015045 - RNA, 19 nt, Homo sapiens
  misc_RNA (1)...(19): siRNA sense strand
gaggcaugcuugacacaca

SEQ ID NO: 2015046 - RNA, 19 nt, Homo sapiens
  misc_RNA (1)...(19): siRNA sense strand
aagaagaagaugaagauga

SEQ ID NO: 2015047 - RNA, 19 nt, Homo sapiens
  misc_RNA (1)...(19): siRNA sense strand
uuaaucggccuccaacgua

SEQ ID NO: 2015048 - RNA, 19 nt, Homo sapiens
  misc_RNA (1)...(19): siRNA sense strand
cagacccaguuugauguua

SEQ ID NO: 2015049 - RNA, 19 nt, Homo sapiens
  misc_RNA (1)...(19): siRNA sense strand
uaccgaaaguugagacugu

SEQ ID NO: 2015050 - RNA, 19 nt, Homo sapiens
  misc_RNA (1)...(19): siRNA sense strand
aagaagaggucaucaucag

SEQ ID NO: 2015051 - RNA, 19 nt, Homo sapiens
  misc_RNA (1)...(19): siRNA sense strand
aagaggguguuauugauuc

SEQ ID NO: 2015052 - RNA, 19 nt, Homo sapiens
  misc_RNA (1)...(19): siRNA sense strand
gaaaucagugaccaugcaa

SEQ ID NO: 2015053 - RNA, 19 nt, Homo sapiens
  misc_RNA (1)...(19): siRNA sense strand
gaaucaagacaguuauagu

SEQ ID NO: 2015054 - RNA, 19 nt, Homo sapiens
  misc_RNA (1)...(19): siRNA sense strand
gcaaacaauagguaauucu

SEQ ID NO: 2015055 - RNA, 19 nt, Homo sapiens
  misc_RNA (1)...(19): siRNA sense strand
aaaggccucuaagaaauau

SEQ ID NO: 2015056 - RNA, 19 nt, Homo sapiens
  misc_RNA (1)...(19): siRNA sense strand
ccaguucuaucgcuacaag

SEQ ID NO: 2015057 - RNA, 19 nt, Homo sapiens
  misc_RNA (1)...(19): siRNA sense strand
ggaaucaagacaguuauag

SEQ ID NO: 2015058 - RNA, 19 nt, Homo sapiens
  misc_RNA (1)...(19): siRNA sense strand
ggaagaagaggaggaugau

SEQ ID NO: 2015059 - RNA, 19 nt, Homo sapiens
  misc_RNA (1)...(19): siRNA sense strand
uaaucggccuccaacguau

SEQ ID NO: 2015060 - RNA, 19 nt, Homo sapiens
  misc_RNA (1)...(19): siRNA sense strand
gcgaagaagaagaugaaga

SEQ ID NO: 2015061 - RNA, 19 nt, Homo sapiens
  misc_RNA (1)...(19): siRNA sense strand
ugaaggaggcagaggaaga

SEQ ID NO: 2015062 - RNA, 19 nt, Homo sapiens
  misc_RNA (1)...(19): siRNA sense strand
gauuuggaaagaacaauug

SEQ ID NO: 2015063 - RNA, 19 nt, Homo sapiens
  misc_RNA (1)...(19): siRNA sense strand
acucagugaugauuuggaa

SEQ ID NO: 2015064 - RNA, 19 nt, Homo sapiens
  misc_RNA (1)...(19): siRNA sense strand
gaauaagcugcaagacaug

SEQ ID NO: 2015065 - RNA, 19 nt, Homo sapiens
  misc_RNA (1)...(19): siRNA sense strand
uaaagucagacaacaagga

SEQ ID NO: 2015066 - RNA, 19 nt, Homo sapiens
  misc_RNA (1)...(19): siRNA sense strand
ggaggcagaggaagaaucu

SEQ ID NO: 2015067 - RNA, 19 nt, Homo sapiens
  misc_RNA (1)...(19): siRNA sense strand
guacgaugcagaccuuuua

SEQ ID NO: 2015068 - RNA, 19 nt, Homo sapiens
  misc_RNA (1)...(19): siRNA sense strand
gaaugugagaauccugaaa

SEQ ID NO: 2015069 - RNA, 19 nt, Homo sapiens
  misc_RNA (1)...(19): siRNA sense strand
gccaugggcccucuuguuc

SEQ ID NO: 2015070 - RNA, 19 nt, Homo sapiens
  misc_RNA (1)...(19): siRNA sense strand
gagaagauuagagaacaga

SEQ ID NO: 2015071 - RNA, 19 nt, Homo sapiens
  misc_RNA (1)...(19): siRNA sense strand
cguaucccaccaaauauuu

SEQ ID NO: 2015072 - RNA, 19 nt, Homo sapiens
  misc_RNA (1)...(19): siRNA sense strand
acaagaagaugcagaagaa

SEQ ID NO: 2015073 - RNA, 19 nt, Homo sapiens
  misc_RNA (1)...(19): siRNA sense strand
gaccagcagugauaguaga

SEQ ID NO: 2015074 - RNA, 19 nt, Homo sapiens
  misc_RNA (1)...(19): siRNA sense strand
gcccacccaccaccuauua

SEQ ID NO: 2015075 - RNA, 19 nt, Homo sapiens
  misc_RNA (1)...(19): siRNA sense strand
uggaaucccuccugugaau

SEQ ID NO: 2015076 - RNA, 19 nt, Homo sapiens
  misc_RNA (1)...(19): siRNA sense strand
gacaagaagaugcagaaga

SEQ ID NO: 2015077 - RNA, 19 nt, Homo sapiens
  misc_RNA (1)...(19): siRNA sense strand
gauaguagacaagaagaug

SEQ ID NO: 2015078 - RNA, 19 nt, Homo sapiens
  misc_RNA (1)...(19): siRNA sense strand
gguuggaccagcagugaua

SEQ ID NO: 2015079 - RNA, 19 nt, Homo sapiens
  misc_RNA (1)...(19): siRNA sense strand
cagcagugauaguagacaa

SEQ ID NO: 2015080 - RNA, 19 nt, Homo sapiens
  misc_RNA (1)...(19): siRNA sense strand
gcagugauaguagacaaga

SEQ ID NO: 2015081 - RNA, 19 nt, Homo sapiens
  misc_RNA (1)...(19): siRNA sense strand
ccuggaaucccuccuguga

SEQ ID NO: 2015082 - RNA, 19 nt, Homo sapiens
  misc_RNA (1)...(19): siRNA sense strand
gucccuacccuccuccaua

SEQ ID NO: 2015083 - RNA, 19 nt, Homo sapiens
  misc_RNA (1)...(19): siRNA sense strand
ccauggcaauccagcuuuc

SEQ ID NO: 2015084 - RNA, 19 nt, Homo sapiens
  misc_RNA (1)...(19): siRNA sense strand
ccacaaguaccacaagcau

SEQ ID NO: 2015085 - RNA, 19 nt, Homo sapiens
  misc_RNA (1)...(19): siRNA sense strand
ggaccagcagugauaguag

SEQ ID NO: 2015086 - RNA, 19 nt, Homo sapiens
  misc_RNA (1)...(19): siRNA sense strand
uagacaagaagaugcagaa

SEQ ID NO: 2015087 - RNA, 19 nt, Homo sapiens
  misc_RNA (1)...(19): siRNA sense strand
caagaagaugcagaagaaa

SEQ ID NO: 2015088 - RNA, 19 nt, Homo sapiens
  misc_RNA (1)...(19): siRNA sense strand
ccacccaccaccuauuaau

SEQ ID NO: 2015089 - RNA, 19 nt, Homo sapiens
  misc_RNA (1)...(19): siRNA sense strand
agccagggccaaauccaua

SEQ ID NO: 2015090 - RNA, 19 nt, Homo sapiens
  misc_RNA (1)...(19): siRNA sense strand
gcaccacaaguaccacaag

SEQ ID NO: 2015091 - RNA, 19 nt, Homo sapiens
  misc_RNA (1)...(19): siRNA sense strand
gggauggacuccugucuua

SEQ ID NO: 2015092 - RNA, 19 nt, Homo sapiens
  misc_RNA (1)...(19): siRNA sense strand
ggagauggaguuugaguuu

SEQ ID NO: 2015093 - RNA, 19 nt, Homo sapiens
  misc_RNA (1)...(19): siRNA sense strand
cagaggcccugucaucuuu

SEQ ID NO: 2015094 - RNA, 19 nt, Homo sapiens
  misc_RNA (1)...(19): siRNA sense strand
gcugguagcugucaagauc

SEQ ID NO: 2015095 - RNA, 19 nt, Homo sapiens
  misc_RNA (1)...(19): siRNA sense strand
ugaaagaggugaagaucau

SEQ ID NO: 2015096 - RNA, 19 nt, Homo sapiens
  misc_RNA (1)...(19): siRNA sense strand
gcagguggaucuacaacga

SEQ ID NO: 2015097 - RNA, 19 nt, Homo sapiens
  misc_RNA (1)...(19): siRNA sense strand
gaggugaucucaggcaaug

SEQ ID NO: 2015098 - RNA, 19 nt, Homo sapiens
  misc_RNA (1)...(19): siRNA sense strand
ggagcuaccggcugcguua

SEQ ID NO: 2015099 - RNA, 19 nt, Homo sapiens
  misc_RNA (1)...(19): siRNA sense strand
cgacagcccucaagaucug

SEQ ID NO: 2015100 - RNA, 19 nt, Homo sapiens
  misc_RNA (1)...(19): siRNA sense strand
aagaggagcugacgguuca

SEQ ID NO: 2015101 - RNA, 19 nt, Homo sapiens
  misc_RNA (1)...(19): siRNA sense strand
gggcagacaauguauuuau

SEQ ID NO: 2015102 - RNA, 19 nt, Homo sapiens
  misc_RNA (1)...(19): siRNA sense strand
gcagugccgcuuccucuuu

SEQ ID NO: 2015103 - RNA, 19 nt, Homo sapiens
  misc_RNA (1)...(19): siRNA sense strand
gagauggaguuugaguuug

SEQ ID NO: 2015104 - RNA, 19 nt, Homo sapiens
  misc_RNA (1)...(19): siRNA sense strand
cuaugcagguccacuguaa

SEQ ID NO: 2015105 - RNA, 19 nt, Homo sapiens
  misc_RNA (1)...(19): siRNA sense strand
gcucaucauugcccucaug

SEQ ID NO: 2015106 - RNA, 19 nt, Homo sapiens
  misc_RNA (1)...(19): siRNA sense strand
agauggaguuugaguuuga

SEQ ID NO: 2015107 - RNA, 19 nt, Homo sapiens
  misc_RNA (1)...(19): siRNA sense strand
acacuauccucaucaacaa

SEQ ID NO: 2015108 - RNA, 19 nt, Homo sapiens
  misc_RNA (1)...(19): siRNA sense strand
cgaaaucuccuucaucucu

SEQ ID NO: 2015109 - RNA, 19 nt, Homo sapiens
  misc_RNA (1)...(19): siRNA sense strand
gggacacccuuugcuggua

SEQ ID NO: 2015110 - RNA, 19 nt, Homo sapiens
  misc_RNA (1)...(19): siRNA sense strand
ucucugauguggugaacaa

SEQ ID NO: 2015111 - RNA, 19 nt, Homo sapiens
  misc_RNA (1)...(19): siRNA sense strand
ccaaggaggaggaguacuu

SEQ ID NO: 2015112 - RNA, 19 nt, Homo sapiens
  misc_RNA (1)...(19): siRNA sense strand
ggccagaugccaccaagaa

SEQ ID NO: 2015113 - RNA, 19 nt, Homo sapiens
  misc_RNA (1)...(19): siRNA sense strand
gaccagaggcccugucauc

SEQ ID NO: 2015114 - RNA, 19 nt, Homo sapiens
  misc_RNA (1)...(19): siRNA sense strand
cuggaugacuuuaggaaga

SEQ ID NO: 2015115 - RNA, 19 nt, Homo sapiens
  misc_RNA (1)...(19): siRNA sense strand
ggcagacaauguauuuauc

SEQ ID NO: 2015116 - RNA, 19 nt, Homo sapiens
  misc_RNA (1)...(19): siRNA sense strand
gcucaaggacccaaacauc

SEQ ID NO: 2015117 - RNA, 19 nt, Homo sapiens
  misc_RNA (1)...(19): siRNA sense strand
acacucaacuuuguacauc

SEQ ID NO: 2015118 - RNA, 19 nt, Homo sapiens
  misc_RNA (1)...(19): siRNA sense strand
gcagacaauguauuuaucu

SEQ ID NO: 2015119 - RNA, 19 nt, Homo sapiens
  misc_RNA (1)...(19): siRNA sense strand
caaggacccaaacaucauu

SEQ ID NO: 2015120 - RNA, 19 nt, Homo sapiens
  misc_RNA (1)...(19): siRNA sense strand
gaucucgacuccgcuucaa

SEQ ID NO: 2015121 - RNA, 19 nt, Homo sapiens
  misc_RNA (1)...(19): siRNA sense strand
gacacuauccucaucaaca

SEQ ID NO: 2015122 - RNA, 19 nt, Homo sapiens
  misc_RNA (1)...(19): siRNA sense strand
ugccgaggcugacauuguu

SEQ ID NO: 2015123 - RNA, 19 nt, Homo sapiens
  misc_RNA (1)...(19): siRNA sense strand
cucaagaucugguuagucu

SEQ ID NO: 2015124 - RNA, 19 nt, Homo sapiens
  misc_RNA (1)...(19): siRNA sense strand
ggucgguguuucccaagga

SEQ ID NO: 2015125 - RNA, 19 nt, Homo sapiens
  misc_RNA (1)...(19): siRNA sense strand
gggccuauaugagcugaug

SEQ ID NO: 2015126 - RNA, 19 nt, Homo sapiens
  misc_RNA (1)...(19): siRNA sense strand
ccagaugccaccaagaaug

SEQ ID NO: 2015127 - RNA, 19 nt, Homo sapiens
  misc_RNA (1)...(19): siRNA sense strand
gaucugguuagucuugauu

SEQ ID NO: 2015128 - RNA, 19 nt, Homo sapiens
  misc_RNA (1)...(19): siRNA sense strand
gggacacuauccucaucaa

SEQ ID NO: 2015129 - RNA, 19 nt, Homo sapiens
  misc_RNA (1)...(19): siRNA sense strand
gauggacuccugucuuaca

SEQ ID NO: 2015130 - RNA, 19 nt, Homo sapiens
  misc_RNA (1)...(19): siRNA sense strand
ucaacgacuccaccuauga

SEQ ID NO: 2015131 - RNA, 19 nt, Homo sapiens
  misc_RNA (1)...(19): siRNA sense strand
ggagaacggcgaccucaac

SEQ ID NO: 2015132 - RNA, 19 nt, Homo sapiens
  misc_RNA (1)...(19): siRNA sense strand
aaguggagaugcugacaug

SEQ ID NO: 2015133 - RNA, 19 nt, Homo sapiens
  misc_RNA (1)...(19): siRNA sense strand
ccagaggcccugucaucuu

SEQ ID NO: 2015134 - RNA, 19 nt, Homo sapiens
  misc_RNA (1)...(19): siRNA sense strand
ggaccaucccagacaguga

SEQ ID NO: 2015135 - RNA, 19 nt, Homo sapiens
  misc_RNA (1)...(19): siRNA sense strand
guggagaugcugacaugaa

SEQ ID NO: 2015136 - RNA, 19 nt, Homo sapiens
  misc_RNA (1)...(19): siRNA sense strand
cugauguggugaacaauuc

SEQ ID NO: 2015137 - RNA, 19 nt, Homo sapiens
  misc_RNA (1)...(19): siRNA sense strand
gguccacuguaacaacaug

SEQ ID NO: 2015138 - RNA, 19 nt, Homo sapiens
  misc_RNA (1)...(19): siRNA sense strand
gccaggcuaugacuaugug

SEQ ID NO: 2015139 - RNA, 19 nt, Homo sapiens
  misc_RNA (1)...(19): siRNA sense strand
cagugccgcuuccucuuug

SEQ ID NO: 2015140 - RNA, 19 nt, Homo sapiens
  misc_RNA (1)...(19): siRNA sense strand
acgagcaggucaucgagaa

SEQ ID NO: 2015141 - RNA, 19 nt, Homo sapiens
  misc_RNA (1)...(19): siRNA sense strand
cagguccacuguaacaaca

SEQ ID NO: 2015142 - RNA, 19 nt, Homo sapiens
  misc_RNA (1)...(19): siRNA sense strand
gaaagaggugaagaucaug

SEQ ID NO: 2015143 - RNA, 19 nt, Homo sapiens
  misc_RNA (1)...(19): siRNA sense strand
ccucaacgacuccaccuau

SEQ ID NO: 2015144 - RNA, 19 nt, Homo sapiens
  misc_RNA (1)...(19): siRNA sense strand
uggagaugcugacaugaag

SEQ ID NO: 2015145 - RNA, 19 nt, Homo sapiens
  misc_RNA (1)...(19): siRNA sense strand
ggcagaggaugcacucaac

SEQ ID NO: 2015146 - RNA, 19 nt, Homo sapiens
  misc_RNA (1)...(19): siRNA sense strand
gagcagcgaccacccuuuu

SEQ ID NO: 2015147 - RNA, 19 nt, Homo sapiens
  misc_RNA (1)...(19): siRNA sense strand
gcauguggcagcccagauc

SEQ ID NO: 2015148 - RNA, 19 nt, Homo sapiens
  misc_RNA (1)...(19): siRNA sense strand
ugguuacucuucagcgaaa

SEQ ID NO: 2015149 - RNA, 19 nt, Homo sapiens
  misc_RNA (1)...(19): siRNA sense strand
gcaugagccggaaccucua

SEQ ID NO: 2015150 - RNA, 19 nt, Homo sapiens
  misc_RNA (1)...(19): siRNA sense strand
uggccacacucaacuuugu

SEQ ID NO: 2015151 - RNA, 19 nt, Homo sapiens
  misc_RNA (1)...(19): siRNA sense strand
aaaucuccuucaucucuga

SEQ ID NO: 2015152 - RNA, 19 nt, Homo sapiens
  misc_RNA (1)...(19): siRNA sense strand
gcuaugcagguccacugua

SEQ ID NO: 2015153 - RNA, 19 nt, Homo sapiens
  misc_RNA (1)...(19): siRNA sense strand
gaccggaccaucccagaca

SEQ ID NO: 2015154 - RNA, 19 nt, Homo sapiens
  misc_RNA (1)...(19): siRNA sense strand
gacagugacaucucugcuu

SEQ ID NO: 2015155 - RNA, 19 nt, Homo sapiens
  misc_RNA (1)...(19): siRNA sense strand
agcgaaaucuccuucaucu

SEQ ID NO: 2015156 - RNA, 19 nt, Homo sapiens
  misc_RNA (1)...(19): siRNA sense strand
gcccaugcgccacaaccua

SEQ ID NO: 2015157 - RNA, 19 nt, Homo sapiens
  misc_RNA (1)...(19): siRNA sense strand
ucagcgaaaucuccuucau

SEQ ID NO: 2015158 - RNA, 19 nt, Homo sapiens
  misc_RNA (1)...(19): siRNA sense strand
gaggugcugaugcucugua

SEQ ID NO: 2015159 - RNA, 19 nt, Homo sapiens
  misc_RNA (1)...(19): siRNA sense strand
ucaaggacccaaacaucau

SEQ ID NO: 2015160 - RNA, 19 nt, Homo sapiens
  misc_RNA (1)...(19): siRNA sense strand
guggcuauguggagaugga

SEQ ID NO: 2015161 - RNA, 19 nt, Homo sapiens
  misc_RNA (1)...(19): siRNA sense strand
caucaaaaucgcagacuuu

SEQ ID NO: 2015162 - RNA, 19 nt, Homo sapiens
  misc_RNA (1)...(19): siRNA sense strand
gcugacgguucaccucucu

SEQ ID NO: 2015163 - RNA, 19 nt, Homo sapiens
  misc_RNA (1)...(19): siRNA sense strand
auguggagauggaguuuga

SEQ ID NO: 2015164 - RNA, 19 nt, Homo sapiens
  misc_RNA (1)...(19): siRNA sense strand
gcagguccacuguaacaac

SEQ ID NO: 2015165 - RNA, 19 nt, Homo sapiens
  misc_RNA (1)...(19): siRNA sense strand
gcagaggaugcacucaaca

SEQ ID NO: 2015166 - RNA, 19 nt, Homo sapiens
  misc_RNA (1)...(19): siRNA sense strand
ggucgacagcccucaagau

SEQ ID NO: 2015167 - RNA, 19 nt, Homo sapiens
  misc_RNA (1)...(19): siRNA sense strand
gcccaccucccaccaacuu

SEQ ID NO: 2015168 - RNA, 19 nt, Homo sapiens
  misc_RNA (1)...(19): siRNA sense strand
gugugggccuuugguguga

SEQ ID NO: 2015169 - RNA, 19 nt, Homo sapiens
  misc_RNA (1)...(19): siRNA sense strand
ggccacacucaacuuugua

SEQ ID NO: 2015170 - RNA, 19 nt, Homo sapiens
  misc_RNA (1)...(19): siRNA sense strand
cccaccagcuggaggacaa

SEQ ID NO: 2015171 - RNA, 19 nt, Homo sapiens
  misc_RNA (1)...(19): siRNA sense strand
ccaccaacuucagcagcuu

SEQ ID NO: 2015172 - RNA, 19 nt, Homo sapiens
  misc_RNA (1)...(19): siRNA sense strand
cagcuucuccaguggcuau

SEQ ID NO: 2015173 - RNA, 19 nt, Homo sapiens
  misc_RNA (1)...(19): siRNA sense strand
ggaggugaucucaggcaau

SEQ ID NO: 2015174 - RNA, 19 nt, Homo sapiens
  misc_RNA (1)...(19): siRNA sense strand
guacuugcagguggaucua

SEQ ID NO: 2015175 - RNA, 19 nt, Homo sapiens
  misc_RNA (1)...(19): siRNA sense strand
caccaucagcuacccaaug

SEQ ID NO: 2015176 - RNA, 19 nt, Homo sapiens
  misc_RNA (1)...(19): siRNA sense strand
acggcgaccucaaccaguu

SEQ ID NO: 2015177 - RNA, 19 nt, Homo sapiens
  misc_RNA (1)...(19): siRNA sense strand
caaccgcccagguccuaga

SEQ ID NO: 2015178 - RNA, 19 nt, Homo sapiens
  misc_RNA (1)...(19): siRNA sense strand
aacggaggguguuggaaga

SEQ ID NO: 2015179 - RNA, 19 nt, Homo sapiens
  misc_RNA (1)...(19): siRNA sense strand
gcuauguggagauggaguu

SEQ ID NO: 2015180 - RNA, 19 nt, Homo sapiens
  misc_RNA (1)...(19): siRNA sense strand
cagcgaaaucuccuucauc

SEQ ID NO: 2015181 - RNA, 19 nt, Homo sapiens
  misc_RNA (1)...(19): siRNA sense strand
caugguugcccgacugguu

SEQ ID NO: 2015182 - RNA, 19 nt, Homo sapiens
  misc_RNA (1)...(19): siRNA sense strand
gaagggacauuuugauccu

SEQ ID NO: 2015183 - RNA, 19 nt, Homo sapiens
  misc_RNA (1)...(19): siRNA sense strand
gucgacagcccucaagauc

SEQ ID NO: 2015184 - RNA, 19 nt, Homo sapiens
  misc_RNA (1)...(19): siRNA sense strand
gcagguuggagagcaguga

SEQ ID NO: 2015185 - RNA, 19 nt, Homo sapiens
  misc_RNA (1)...(19): siRNA sense strand
ucugcaugauuacugacua

SEQ ID NO: 2015186 - RNA, 19 nt, Homo sapiens
  misc_RNA (1)...(19): siRNA sense strand
gggauggacuccugucuua

SEQ ID NO: 2015187 - RNA, 19 nt, Homo sapiens
  misc_RNA (1)...(19): siRNA sense strand
ggagauggaguuugaguuu

SEQ ID NO: 2015188 - RNA, 19 nt, Homo sapiens
  misc_RNA (1)...(19): siRNA sense strand
cagaggcccugucaucuuu

SEQ ID NO: 2015189 - RNA, 19 nt, Homo sapiens
  misc_RNA (1)...(19): siRNA sense strand
gcugguagcugucaagauc

SEQ ID NO: 2015190 - RNA, 19 nt, Homo sapiens
  misc_RNA (1)...(19): siRNA sense strand
ugaaagaggugaagaucau

SEQ ID NO: 2015191 - RNA, 19 nt, Homo sapiens
  misc_RNA (1)...(19): siRNA sense strand
gcagguggaucuacaacga

SEQ ID NO: 2015192 - RNA, 19 nt, Homo sapiens
  misc_RNA (1)...(19): siRNA sense strand
gaggugaucucaggcaaug

SEQ ID NO: 2015193 - RNA, 19 nt, Homo sapiens
  misc_RNA (1)...(19): siRNA sense strand
ggagcuaccggcugcguua

SEQ ID NO: 2015194 - RNA, 19 nt, Homo sapiens
  misc_RNA (1)...(19): siRNA sense strand
cgacagcccucaagaucug

SEQ ID NO: 2015195 - RNA, 19 nt, Homo sapiens
  misc_RNA (1)...(19): siRNA sense strand
aagaggagcugacgguuca

SEQ ID NO: 2015196 - RNA, 19 nt, Homo sapiens
  misc_RNA (1)...(19): siRNA sense strand
gggcagacaauguauuuau

SEQ ID NO: 2015197 - RNA, 19 nt, Homo sapiens
  misc_RNA (1)...(19): siRNA sense strand
gcagugccgcuuccucuuu

SEQ ID NO: 2015198 - RNA, 19 nt, Homo sapiens
  misc_RNA (1)...(19): siRNA sense strand
gagauggaguuugaguuug

SEQ ID NO: 2015199 - RNA, 19 nt, Homo sapiens
  misc_RNA (1)...(19): siRNA sense strand
cuaugcagguccacuguaa

SEQ ID NO: 2015200 - RNA, 19 nt, Homo sapiens
  misc_RNA (1)...(19): siRNA sense strand
gcucaucauugcccucaug

SEQ ID NO: 2015201 - RNA, 19 nt, Homo sapiens
  misc_RNA (1)...(19): siRNA sense strand
agauggaguuugaguuuga

SEQ ID NO: 2015202 - RNA, 19 nt, Homo sapiens
  misc_RNA (1)...(19): siRNA sense strand
acacuauccucaucaacaa

SEQ ID NO: 2015203 - RNA, 19 nt, Homo sapiens
  misc_RNA (1)...(19): siRNA sense strand
cgaaaucuccuucaucucu

SEQ ID NO: 2015204 - RNA, 19 nt, Homo sapiens
  misc_RNA (1)...(19): siRNA sense strand
gggacacccuuugcuggua

SEQ ID NO: 2015205 - RNA, 19 nt, Homo sapiens
  misc_RNA (1)...(19): siRNA sense strand
ucucugauguggugaacaa

SEQ ID NO: 2015206 - RNA, 19 nt, Homo sapiens
  misc_RNA (1)...(19): siRNA sense strand
ccaaggaggaggaguacuu

SEQ ID NO: 2015207 - RNA, 19 nt, Homo sapiens
  misc_RNA (1)...(19): siRNA sense strand
ggccagaugccaccaagaa

SEQ ID NO: 2015208 - RNA, 19 nt, Homo sapiens
  misc_RNA (1)...(19): siRNA sense strand
gaccagaggcccugucauc

SEQ ID NO: 2015209 - RNA, 19 nt, Homo sapiens
  misc_RNA (1)...(19): siRNA sense strand
cuggaugacuuuaggaaga

SEQ ID NO: 2015210 - RNA, 19 nt, Homo sapiens
  misc_RNA (1)...(19): siRNA sense strand
ggcagacaauguauuuauc

SEQ ID NO: 2015211 - RNA, 19 nt, Homo sapiens
  misc_RNA (1)...(19): siRNA sense strand
acacucaacuuuguacauc

SEQ ID NO: 2015212 - RNA, 19 nt, Homo sapiens
  misc_RNA (1)...(19): siRNA sense strand
gcagacaauguauuuaucu

SEQ ID NO: 2015213 - RNA, 19 nt, Homo sapiens
  misc_RNA (1)...(19): siRNA sense strand
gaucucgacuccgcuucaa

SEQ ID NO: 2015214 - RNA, 19 nt, Homo sapiens
  misc_RNA (1)...(19): siRNA sense strand
gacacuauccucaucaaca

SEQ ID NO: 2015215 - RNA, 19 nt, Homo sapiens
  misc_RNA (1)...(19): siRNA sense strand
ugccgaggcugacauuguu

SEQ ID NO: 2015216 - RNA, 19 nt, Homo sapiens
  misc_RNA (1)...(19): siRNA sense strand
cucaagaucugguuagucu

SEQ ID NO: 2015217 - RNA, 19 nt, Homo sapiens
  misc_RNA (1)...(19): siRNA sense strand
ggucgguguuucccaagga

SEQ ID NO: 2015218 - RNA, 19 nt, Homo sapiens
  misc_RNA (1)...(19): siRNA sense strand
gggccuauaugagcugaug

SEQ ID NO: 2015219 - RNA, 19 nt, Homo sapiens
  misc_RNA (1)...(19): siRNA sense strand
ccagaugccaccaagaaug

SEQ ID NO: 2015220 - RNA, 19 nt, Homo sapiens
  misc_RNA (1)...(19): siRNA sense strand
gaucugguuagucuugauu

SEQ ID NO: 2015221 - RNA, 19 nt, Homo sapiens
  misc_RNA (1)...(19): siRNA sense strand
gggacacuauccucaucaa

SEQ ID NO: 2015222 - RNA, 19 nt, Homo sapiens
  misc_RNA (1)...(19): siRNA sense strand
gauggacuccugucuuaca

SEQ ID NO: 2015223 - RNA, 19 nt, Homo sapiens
  misc_RNA (1)...(19): siRNA sense strand
ucaacgacuccaccuauga

SEQ ID NO: 2015224 - RNA, 19 nt, Homo sapiens
  misc_RNA (1)...(19): siRNA sense strand
ggagaacggcgaccucaac

SEQ ID NO: 2015225 - RNA, 19 nt, Homo sapiens
  misc_RNA (1)...(19): siRNA sense strand
aaguggagaugcugacaug

SEQ ID NO: 2015226 - RNA, 19 nt, Homo sapiens
  misc_RNA (1)...(19): siRNA sense strand
ccagaggcccugucaucuu

SEQ ID NO: 2015227 - RNA, 19 nt, Homo sapiens
  misc_RNA (1)...(19): siRNA sense strand
gccaggcuaugacuaugug

SEQ ID NO: 2015228 - RNA, 19 nt, Homo sapiens
  misc_RNA (1)...(19): siRNA sense strand
guggagaugcugacaugaa

SEQ ID NO: 2015229 - RNA, 19 nt, Homo sapiens
  misc_RNA (1)...(19): siRNA sense strand
ggaccaucccagacaguga

SEQ ID NO: 2015230 - RNA, 19 nt, Homo sapiens
  misc_RNA (1)...(19): siRNA sense strand
cugauguggugaacaauuc

SEQ ID NO: 2015231 - RNA, 19 nt, Homo sapiens
  misc_RNA (1)...(19): siRNA sense strand
gguccacuguaacaacaug

SEQ ID NO: 2015232 - RNA, 19 nt, Homo sapiens
  misc_RNA (1)...(19): siRNA sense strand
cagugccgcuuccucuuug

SEQ ID NO: 2015233 - RNA, 19 nt, Homo sapiens
  misc_RNA (1)...(19): siRNA sense strand
acgagcaggucaucgagaa

SEQ ID NO: 2015234 - RNA, 19 nt, Homo sapiens
  misc_RNA (1)...(19): siRNA sense strand
cagguccacuguaacaaca

SEQ ID NO: 2015235 - RNA, 19 nt, Homo sapiens
  misc_RNA (1)...(19): siRNA sense strand
gaaagaggugaagaucaug

SEQ ID NO: 2015236 - RNA, 19 nt, Homo sapiens
  misc_RNA (1)...(19): siRNA sense strand
ccucaacgacuccaccuau

SEQ ID NO: 2015237 - RNA, 19 nt, Homo sapiens
  misc_RNA (1)...(19): siRNA sense strand
uggagaugcugacaugaag

SEQ ID NO: 2015238 - RNA, 19 nt, Homo sapiens
  misc_RNA (1)...(19): siRNA sense strand
ggcagaggaugcacucaac

SEQ ID NO: 2015239 - RNA, 19 nt, Homo sapiens
  misc_RNA (1)...(19): siRNA sense strand
gagcagcgaccacccuuuu

SEQ ID NO: 2015240 - RNA, 19 nt, Homo sapiens
  misc_RNA (1)...(19): siRNA sense strand
gcauguggcagcccagauc

SEQ ID NO: 2015241 - RNA, 19 nt, Homo sapiens
  misc_RNA (1)...(19): siRNA sense strand
ugguuacucuucagcgaaa

SEQ ID NO: 2015242 - RNA, 19 nt, Homo sapiens
  misc_RNA (1)...(19): siRNA sense strand
gcaugagccggaaccucua

SEQ ID NO: 2015243 - RNA, 19 nt, Homo sapiens
  misc_RNA (1)...(19): siRNA sense strand
uggccacacucaacuuugu

SEQ ID NO: 2015244 - RNA, 19 nt, Homo sapiens
  misc_RNA (1)...(19): siRNA sense strand
aaaucuccuucaucucuga

SEQ ID NO: 2015245 - RNA, 19 nt, Homo sapiens
  misc_RNA (1)...(19): siRNA sense strand
gcuaugcagguccacugua

SEQ ID NO: 2015246 - RNA, 19 nt, Homo sapiens
  misc_RNA (1)...(19): siRNA sense strand
gaccggaccaucccagaca

SEQ ID NO: 2015247 - RNA, 19 nt, Homo sapiens
  misc_RNA (1)...(19): siRNA sense strand
gacagugacaucucugcuu

SEQ ID NO: 2015248 - RNA, 19 nt, Homo sapiens
  misc_RNA (1)...(19): siRNA sense strand
agcgaaaucuccuucaucu

SEQ ID NO: 2015249 - RNA, 19 nt, Homo sapiens
  misc_RNA (1)...(19): siRNA sense strand
gcccaugcgccacaaccua

SEQ ID NO: 2015250 - RNA, 19 nt, Homo sapiens
  misc_RNA (1)...(19): siRNA sense strand
ucagcgaaaucuccuucau

SEQ ID NO: 2015251 - RNA, 19 nt, Homo sapiens
  misc_RNA (1)...(19): siRNA sense strand
gaggugcugaugcucugua

SEQ ID NO: 2015252 - RNA, 19 nt, Homo sapiens
  misc_RNA (1)...(19): siRNA sense strand
guggcuauguggagaugga

SEQ ID NO: 2015253 - RNA, 19 nt, Homo sapiens
  misc_RNA (1)...(19): siRNA sense strand
caucaaaaucgcagacuuu

SEQ ID NO: 2015254 - RNA, 19 nt, Homo sapiens
  misc_RNA (1)...(19): siRNA sense strand
gcugacgguucaccucucu

SEQ ID NO: 2015255 - RNA, 19 nt, Homo sapiens
  misc_RNA (1)...(19): siRNA sense strand
auguggagauggaguuuga

SEQ ID NO: 2015256 - RNA, 19 nt, Homo sapiens
  misc_RNA (1)...(19): siRNA sense strand
gcagguccacuguaacaac

SEQ ID NO: 2015257 - RNA, 19 nt, Homo sapiens
  misc_RNA (1)...(19): siRNA sense strand
gcagaggaugcacucaaca

SEQ ID NO: 2015258 - RNA, 19 nt, Homo sapiens
  misc_RNA (1)...(19): siRNA sense strand
ggucgacagcccucaagau

SEQ ID NO: 2015259 - RNA, 19 nt, Homo sapiens
  misc_RNA (1)...(19): siRNA sense strand
gcccaccucccaccaacuu

SEQ ID NO: 2015260 - RNA, 19 nt, Homo sapiens
  misc_RNA (1)...(19): siRNA sense strand
gugugggccuuugguguga

SEQ ID NO: 2015261 - RNA, 19 nt, Homo sapiens
  misc_RNA (1)...(19): siRNA sense strand
ggccacacucaacuuugua

SEQ ID NO: 2015262 - RNA, 19 nt, Homo sapiens
  misc_RNA (1)...(19): siRNA sense strand
cccaccagcuggaggacaa

SEQ ID NO: 2015263 - RNA, 19 nt, Homo sapiens
  misc_RNA (1)...(19): siRNA sense strand
ccaccaacuucagcagcuu

SEQ ID NO: 2015264 - RNA, 19 nt, Homo sapiens
  misc_RNA (1)...(19): siRNA sense strand
cagcuucuccaguggcuau

SEQ ID NO: 2015265 - RNA, 19 nt, Homo sapiens
  misc_RNA (1)...(19): siRNA sense strand
ggaggugaucucaggcaau

SEQ ID NO: 2015266 - RNA, 19 nt, Homo sapiens
  misc_RNA (1)...(19): siRNA sense strand
caccaucagcuacccaaug

SEQ ID NO: 2015267 - RNA, 19 nt, Homo sapiens
  misc_RNA (1)...(19): siRNA sense strand
acggcgaccucaaccaguu

SEQ ID NO: 2015268 - RNA, 19 nt, Homo sapiens
  misc_RNA (1)...(19): siRNA sense strand
caaccgcccagguccuaga

SEQ ID NO: 2015269 - RNA, 19 nt, Homo sapiens
  misc_RNA (1)...(19): siRNA sense strand
aacggaggguguuggaaga

SEQ ID NO: 2015270 - RNA, 19 nt, Homo sapiens
  misc_RNA (1)...(19): siRNA sense strand
guacuugcagguggaucua

SEQ ID NO: 2015271 - RNA, 19 nt, Homo sapiens
  misc_RNA (1)...(19): siRNA sense strand
gcuauguggagauggaguu

SEQ ID NO: 2015272 - RNA, 19 nt, Homo sapiens
  misc_RNA (1)...(19): siRNA sense strand
gaagggacauuuugauccu

SEQ ID NO: 2015273 - RNA, 19 nt, Homo sapiens
  misc_RNA (1)...(19): siRNA sense strand
caugguugcccgacugguu

SEQ ID NO: 2015274 - RNA, 19 nt, Homo sapiens
  misc_RNA (1)...(19): siRNA sense strand
cagcgaaaucuccuucauc

SEQ ID NO: 2015275 - RNA, 19 nt, Homo sapiens
  misc_RNA (1)...(19): siRNA sense strand
gcagguuggagagcaguga

SEQ ID NO: 2015276 - RNA, 19 nt, Homo sapiens
  misc_RNA (1)...(19): siRNA sense strand
ucugcaugauuacugacua

SEQ ID NO: 2015277 - RNA, 19 nt, Homo sapiens
  misc_RNA (1)...(19): siRNA sense strand
gucgacagcccucaagauc

SEQ ID NO: 2015278 - RNA, 19 nt, Homo sapiens
  misc_RNA (1)...(19): siRNA sense strand
gggauggacuccugucuua

SEQ ID NO: 2015279 - RNA, 19 nt, Homo sapiens
  misc_RNA (1)...(19): siRNA sense strand
ggagauggaguuugaguuu

SEQ ID NO: 2015280 - RNA, 19 nt, Homo sapiens
  misc_RNA (1)...(19): siRNA sense strand
cagaggcccugucaucuuu

SEQ ID NO: 2015281 - RNA, 19 nt, Homo sapiens
  misc_RNA (1)...(19): siRNA sense strand
gcugguagcugucaagauc

SEQ ID NO: 2015282 - RNA, 19 nt, Homo sapiens
  misc_RNA (1)...(19): siRNA sense strand
ugaaagaggugaagaucau

SEQ ID NO: 2015283 - RNA, 19 nt, Homo sapiens
  misc_RNA (1)...(19): siRNA sense strand
gcagguggaucuacaacga

SEQ ID NO: 2015284 - RNA, 19 nt, Homo sapiens
  misc_RNA (1)...(19): siRNA sense strand
gaggugaucucaggcaaug

SEQ ID NO: 2015285 - RNA, 19 nt, Homo sapiens
  misc_RNA (1)...(19): siRNA sense strand
ggagcuaccggcugcguua

SEQ ID NO: 2015286 - RNA, 19 nt, Homo sapiens
  misc_RNA (1)...(19): siRNA sense strand
cgacagcccucaagaucug

SEQ ID NO: 2015287 - RNA, 19 nt, Homo sapiens
  misc_RNA (1)...(19): siRNA sense strand
aagaggagcugacgguuca

SEQ ID NO: 2015288 - RNA, 19 nt, Homo sapiens
  misc_RNA (1)...(19): siRNA sense strand
gggcagacaauguauuuau

SEQ ID NO: 2015289 - RNA, 19 nt, Homo sapiens
  misc_RNA (1)...(19): siRNA sense strand
gcagugccgcuuccucuuu

SEQ ID NO: 2015290 - RNA, 19 nt, Homo sapiens
  misc_RNA (1)...(19): siRNA sense strand
gagauggaguuugaguuug

SEQ ID NO: 2015291 - RNA, 19 nt, Homo sapiens
  misc_RNA (1)...(19): siRNA sense strand
cuaugcagguccacuguaa

SEQ ID NO: 2015292 - RNA, 19 nt, Homo sapiens
  misc_RNA (1)...(19): siRNA sense strand
gcucaucauugcccucaug

SEQ ID NO: 2015293 - RNA, 19 nt, Homo sapiens
  misc_RNA (1)...(19): siRNA sense strand
agauggaguuugaguuuga

SEQ ID NO: 2015294 - RNA, 19 nt, Homo sapiens
  misc_RNA (1)...(19): siRNA sense strand
acacuauccucaucaacaa

SEQ ID NO: 2015295 - RNA, 19 nt, Homo sapiens
  misc_RNA (1)...(19): siRNA sense strand
cgaaaucuccuucaucucu

SEQ ID NO: 2015296 - RNA, 19 nt, Homo sapiens
  misc_RNA (1)...(19): siRNA sense strand
gggacacccuuugcuggua

SEQ ID NO: 2015297 - RNA, 19 nt, Homo sapiens
  misc_RNA (1)...(19): siRNA sense strand
ucucugauguggugaacaa

SEQ ID NO: 2015298 - RNA, 19 nt, Homo sapiens
  misc_RNA (1)...(19): siRNA sense strand
ccaaggaggaggaguacuu

SEQ ID NO: 2015299 - RNA, 19 nt, Homo sapiens
  misc_RNA (1)...(19): siRNA sense strand
ggccagaugccaccaagaa

SEQ ID NO: 2015300 - RNA, 19 nt, Homo sapiens
  misc_RNA (1)...(19): siRNA sense strand
gaccagaggcccugucauc

SEQ ID NO: 2015301 - RNA, 19 nt, Homo sapiens
  misc_RNA (1)...(19): siRNA sense strand
cuggaugacuuuaggaaga

SEQ ID NO: 2015302 - RNA, 19 nt, Homo sapiens
  misc_RNA (1)...(19): siRNA sense strand
ggcagacaauguauuuauc

SEQ ID NO: 2015303 - RNA, 19 nt, Homo sapiens
  misc_RNA (1)...(19): siRNA sense strand
acacucaacuuuguacauc

SEQ ID NO: 2015304 - RNA, 19 nt, Homo sapiens
  misc_RNA (1)...(19): siRNA sense strand
gcagacaauguauuuaucu

SEQ ID NO: 2015305 - RNA, 19 nt, Homo sapiens
  misc_RNA (1)...(19): siRNA sense strand
gaucucgacuccgcuucaa

SEQ ID NO: 2015306 - RNA, 19 nt, Homo sapiens
  misc_RNA (1)...(19): siRNA sense strand
gacacuauccucaucaaca

SEQ ID NO: 2015307 - RNA, 19 nt, Homo sapiens
  misc_RNA (1)...(19): siRNA sense strand
ugccgaggcugacauuguu

SEQ ID NO: 2015308 - RNA, 19 nt, Homo sapiens
  misc_RNA (1)...(19): siRNA sense strand
cucaagaucugguuagucu

SEQ ID NO: 2015309 - RNA, 19 nt, Homo sapiens
  misc_RNA (1)...(19): siRNA sense strand
ggucgguguuucccaagga

SEQ ID NO: 2015310 - RNA, 19 nt, Homo sapiens
  misc_RNA (1)...(19): siRNA sense strand
gggccuauaugagcugaug

SEQ ID NO: 2015311 - RNA, 19 nt, Homo sapiens
  misc_RNA (1)...(19): siRNA sense strand
ccagaugccaccaagaaug

SEQ ID NO: 2015312 - RNA, 19 nt, Homo sapiens
  misc_RNA (1)...(19): siRNA sense strand
gaucugguuagucuugauu

SEQ ID NO: 2015313 - RNA, 19 nt, Homo sapiens
  misc_RNA (1)...(19): siRNA sense strand
gggacacuauccucaucaa

SEQ ID NO: 2015314 - RNA, 19 nt, Homo sapiens
  misc_RNA (1)...(19): siRNA sense strand
gauggacuccugucuuaca

SEQ ID NO: 2015315 - RNA, 19 nt, Homo sapiens
  misc_RNA (1)...(19): siRNA sense strand
ucaacgacuccaccuauga

SEQ ID NO: 2015316 - RNA, 19 nt, Homo sapiens
  misc_RNA (1)...(19): siRNA sense strand
ggagaacggcgaccucaac

SEQ ID NO: 2015317 - RNA, 19 nt, Homo sapiens
  misc_RNA (1)...(19): siRNA sense strand
aaguggagaugcugacaug

SEQ ID NO: 2015318 - RNA, 19 nt, Homo sapiens
  misc_RNA (1)...(19): siRNA sense strand
ccagaggcccugucaucuu

SEQ ID NO: 2015319 - RNA, 19 nt, Homo sapiens
  misc_RNA (1)...(19): siRNA sense strand
gccaggcuaugacuaugug

SEQ ID NO: 2015320 - RNA, 19 nt, Homo sapiens
  misc_RNA (1)...(19): siRNA sense strand
guggagaugcugacaugaa

SEQ ID NO: 2015321 - RNA, 19 nt, Homo sapiens
  misc_RNA (1)...(19): siRNA sense strand
ggaccaucccagacaguga

SEQ ID NO: 2015322 - RNA, 19 nt, Homo sapiens
  misc_RNA (1)...(19): siRNA sense strand
cugauguggugaacaauuc

SEQ ID NO: 2015323 - RNA, 19 nt, Homo sapiens
  misc_RNA (1)...(19): siRNA sense strand
gguccacuguaacaacaug

SEQ ID NO: 2015324 - RNA, 19 nt, Homo sapiens
  misc_RNA (1)...(19): siRNA sense strand
cagugccgcuuccucuuug

SEQ ID NO: 2015325 - RNA, 19 nt, Homo sapiens
  misc_RNA (1)...(19): siRNA sense strand
acgagcaggucaucgagaa

SEQ ID NO: 2015326 - RNA, 19 nt, Homo sapiens
  misc_RNA (1)...(19): siRNA sense strand
cagguccacuguaacaaca

SEQ ID NO: 2015327 - RNA, 19 nt, Homo sapiens
  misc_RNA (1)...(19): siRNA sense strand
gaaagaggugaagaucaug

SEQ ID NO: 2015328 - RNA, 19 nt, Homo sapiens
  misc_RNA (1)...(19): siRNA sense strand
ccucaacgacuccaccuau

SEQ ID NO: 2015329 - RNA, 19 nt, Homo sapiens
  misc_RNA (1)...(19): siRNA sense strand
uggagaugcugacaugaag

SEQ ID NO: 2015330 - RNA, 19 nt, Homo sapiens
  misc_RNA (1)...(19): siRNA sense strand
ggcagaggaugcacucaac

SEQ ID NO: 2015331 - RNA, 19 nt, Homo sapiens
  misc_RNA (1)...(19): siRNA sense strand
gagcagcgaccacccuuuu

SEQ ID NO: 2015332 - RNA, 19 nt, Homo sapiens
  misc_RNA (1)...(19): siRNA sense strand
gcauguggcagcccagauc

SEQ ID NO: 2015333 - RNA, 19 nt, Homo sapiens
  misc_RNA (1)...(19): siRNA sense strand
ugguuacucuucagcgaaa

SEQ ID NO: 2015334 - RNA, 19 nt, Homo sapiens
  misc_RNA (1)...(19): siRNA sense strand
gcaugagccggaaccucua

SEQ ID NO: 2015335 - RNA, 19 nt, Homo sapiens
  misc_RNA (1)...(19): siRNA sense strand
uggccacacucaacuuugu

SEQ ID NO: 2015336 - RNA, 19 nt, Homo sapiens
  misc_RNA (1)...(19): siRNA sense strand
aaaucuccuucaucucuga

SEQ ID NO: 2015337 - RNA, 19 nt, Homo sapiens
  misc_RNA (1)...(19): siRNA sense strand
gcuaugcagguccacugua

SEQ ID NO: 2015338 - RNA, 19 nt, Homo sapiens
  misc_RNA (1)...(19): siRNA sense strand
gaccggaccaucccagaca

SEQ ID NO: 2015339 - RNA, 19 nt, Homo sapiens
  misc_RNA (1)...(19): siRNA sense strand
gacagugacaucucugcuu

SEQ ID NO: 2015340 - RNA, 19 nt, Homo sapiens
  misc_RNA (1)...(19): siRNA sense strand
agcgaaaucuccuucaucu

SEQ ID NO: 2015341 - RNA, 19 nt, Homo sapiens
  misc_RNA (1)...(19): siRNA sense strand
gcccaugcgccacaaccua

SEQ ID NO: 2015342 - RNA, 19 nt, Homo sapiens
  misc_RNA (1)...(19): siRNA sense strand
ucagcgaaaucuccuucau

SEQ ID NO: 2015343 - RNA, 19 nt, Homo sapiens
  misc_RNA (1)...(19): siRNA sense strand
gaggugcugaugcucugua

SEQ ID NO: 2015344 - RNA, 19 nt, Homo sapiens
  misc_RNA (1)...(19): siRNA sense strand
guggcuauguggagaugga

SEQ ID NO: 2015345 - RNA, 19 nt, Homo sapiens
  misc_RNA (1)...(19): siRNA sense strand
caucaaaaucgcagacuuu

SEQ ID NO: 2015346 - RNA, 19 nt, Homo sapiens
  misc_RNA (1)...(19): siRNA sense strand
gcugacgguucaccucucu

SEQ ID NO: 2015347 - RNA, 19 nt, Homo sapiens
  misc_RNA (1)...(19): siRNA sense strand
auguggagauggaguuuga

SEQ ID NO: 2015348 - RNA, 19 nt, Homo sapiens
  misc_RNA (1)...(19): siRNA sense strand
gcagguccacuguaacaac

SEQ ID NO: 2015349 - RNA, 19 nt, Homo sapiens
  misc_RNA (1)...(19): siRNA sense strand
gcagaggaugcacucaaca

SEQ ID NO: 2015350 - RNA, 19 nt, Homo sapiens
  misc_RNA (1)...(19): siRNA sense strand
ggucgacagcccucaagau

SEQ ID NO: 2015351 - RNA, 19 nt, Homo sapiens
  misc_RNA (1)...(19): siRNA sense strand
gcccaccucccaccaacuu

SEQ ID NO: 2015352 - RNA, 19 nt, Homo sapiens
  misc_RNA (1)...(19): siRNA sense strand
gugugggccuuugguguga

SEQ ID NO: 2015353 - RNA, 19 nt, Homo sapiens
  misc_RNA (1)...(19): siRNA sense strand
ggccacacucaacuuugua

SEQ ID NO: 2015354 - RNA, 19 nt, Homo sapiens
  misc_RNA (1)...(19): siRNA sense strand
cccaccagcuggaggacaa

SEQ ID NO: 2015355 - RNA, 19 nt, Homo sapiens
  misc_RNA (1)...(19): siRNA sense strand
ccaccaacuucagcagcuu

SEQ ID NO: 2015356 - RNA, 19 nt, Homo sapiens
  misc_RNA (1)...(19): siRNA sense strand
cagcuucuccaguggcuau

SEQ ID NO: 2015357 - RNA, 19 nt, Homo sapiens
  misc_RNA (1)...(19): siRNA sense strand
ggaggugaucucaggcaau

SEQ ID NO: 2015358 - RNA, 19 nt, Homo sapiens
  misc_RNA (1)...(19): siRNA sense strand
caccaucagcuacccaaug

SEQ ID NO: 2015359 - RNA, 19 nt, Homo sapiens
  misc_RNA (1)...(19): siRNA sense strand
acggcgaccucaaccaguu

SEQ ID NO: 2015360 - RNA, 19 nt, Homo sapiens
  misc_RNA (1)...(19): siRNA sense strand
caaccgcccagguccuaga

SEQ ID NO: 2015361 - RNA, 19 nt, Homo sapiens
  misc_RNA (1)...(19): siRNA sense strand
aacggaggguguuggaaga

SEQ ID NO: 2015362 - RNA, 19 nt, Homo sapiens
  misc_RNA (1)...(19): siRNA sense strand
guacuugcagguggaucua

SEQ ID NO: 2015363 - RNA, 19 nt, Homo sapiens
  misc_RNA (1)...(19): siRNA sense strand
gcuauguggagauggaguu

SEQ ID NO: 2015364 - RNA, 19 nt, Homo sapiens
  misc_RNA (1)...(19): siRNA sense strand
gaagggacauuuugauccu

SEQ ID NO: 2015365 - RNA, 19 nt, Homo sapiens
  misc_RNA (1)...(19): siRNA sense strand
caugguugcccgacugguu

SEQ ID NO: 2015366 - RNA, 19 nt, Homo sapiens
  misc_RNA (1)...(19): siRNA sense strand
cagcgaaaucuccuucauc

SEQ ID NO: 2015367 - RNA, 19 nt, Homo sapiens
  misc_RNA (1)...(19): siRNA sense strand
gcagguuggagagcaguga

SEQ ID NO: 2015368 - RNA, 19 nt, Homo sapiens
  misc_RNA (1)...(19): siRNA sense strand
ucugcaugauuacugacua

SEQ ID NO: 2015369 - RNA, 19 nt, Homo sapiens
  misc_RNA (1)...(19): siRNA sense strand
gucgacagcccucaagauc

SEQ ID NO: 2015370 - RNA, 19 nt, Homo sapiens
  misc_RNA (1)...(19): siRNA sense strand
gggauggacuccugucuua

SEQ ID NO: 2015371 - RNA, 19 nt, Homo sapiens
  misc_RNA (1)...(19): siRNA sense strand
ggagauggaguuugaguuu

SEQ ID NO: 2015372 - RNA, 19 nt, Homo sapiens
  misc_RNA (1)...(19): siRNA sense strand
cagaggcccugucaucuuu

SEQ ID NO: 2015373 - RNA, 19 nt, Homo sapiens
  misc_RNA (1)...(19): siRNA sense strand
gcugguagcugucaagauc

SEQ ID NO: 2015374 - RNA, 19 nt, Homo sapiens
  misc_RNA (1)...(19): siRNA sense strand
ugaaagaggugaagaucau

SEQ ID NO: 2015375 - RNA, 19 nt, Homo sapiens
  misc_RNA (1)...(19): siRNA sense strand
gcagguggaucuacaacga

SEQ ID NO: 2015376 - RNA, 19 nt, Homo sapiens
  misc_RNA (1)...(19): siRNA sense strand
gaggugaucucaggcaaug

SEQ ID NO: 2015377 - RNA, 19 nt, Homo sapiens
  misc_RNA (1)...(19): siRNA sense strand
ggagcuaccggcugcguua

SEQ ID NO: 2015378 - RNA, 19 nt, Homo sapiens
  misc_RNA (1)...(19): siRNA sense strand
cgacagcccucaagaucug

SEQ ID NO: 2015379 - RNA, 19 nt, Homo sapiens
  misc_RNA (1)...(19): siRNA sense strand
aagaggagcugacgguuca

SEQ ID NO: 2015380 - RNA, 19 nt, Homo sapiens
  misc_RNA (1)...(19): siRNA sense strand
gggcagacaauguauuuau

SEQ ID NO: 2015381 - RNA, 19 nt, Homo sapiens
  misc_RNA (1)...(19): siRNA sense strand
gcagugccgcuuccucuuu

SEQ ID NO: 2015382 - RNA, 19 nt, Homo sapiens
  misc_RNA (1)...(19): siRNA sense strand
gagauggaguuugaguuug

SEQ ID NO: 2015383 - RNA, 19 nt, Homo sapiens
  misc_RNA (1)...(19): siRNA sense strand
cuaugcagguccacuguaa

SEQ ID NO: 2015384 - RNA, 19 nt, Homo sapiens
  misc_RNA (1)...(19): siRNA sense strand
gcucaucauugcccucaug

SEQ ID NO: 2015385 - RNA, 19 nt, Homo sapiens
  misc_RNA (1)...(19): siRNA sense strand
agauggaguuugaguuuga

SEQ ID NO: 2015386 - RNA, 19 nt, Homo sapiens
  misc_RNA (1)...(19): siRNA sense strand
acacuauccucaucaacaa

SEQ ID NO: 2015387 - RNA, 19 nt, Homo sapiens
  misc_RNA (1)...(19): siRNA sense strand
cgaaaucuccuucaucucu

SEQ ID NO: 2015388 - RNA, 19 nt, Homo sapiens
  misc_RNA (1)...(19): siRNA sense strand
gggacacccuuugcuggua

SEQ ID NO: 2015389 - RNA, 19 nt, Homo sapiens
  misc_RNA (1)...(19): siRNA sense strand
ucucugauguggugaacaa

SEQ ID NO: 2015390 - RNA, 19 nt, Homo sapiens
  misc_RNA (1)...(19): siRNA sense strand
ccaaggaggaggaguacuu

SEQ ID NO: 2015391 - RNA, 19 nt, Homo sapiens
  misc_RNA (1)...(19): siRNA sense strand
ggccagaugccaccaagaa

SEQ ID NO: 2015392 - RNA, 19 nt, Homo sapiens
  misc_RNA (1)...(19): siRNA sense strand
gaccagaggcccugucauc

SEQ ID NO: 2015393 - RNA, 19 nt, Homo sapiens
  misc_RNA (1)...(19): siRNA sense strand
cuggaugacuuuaggaaga

SEQ ID NO: 2015394 - RNA, 19 nt, Homo sapiens
  misc_RNA (1)...(19): siRNA sense strand
ggcagacaauguauuuauc

SEQ ID NO: 2015395 - RNA, 19 nt, Homo sapiens
  misc_RNA (1)...(19): siRNA sense strand
gcucaaggacccaaacauc

SEQ ID NO: 2015396 - RNA, 19 nt, Homo sapiens
  misc_RNA (1)...(19): siRNA sense strand
acacucaacuuuguacauc

SEQ ID NO: 2015397 - RNA, 19 nt, Homo sapiens
  misc_RNA (1)...(19): siRNA sense strand
gcagacaauguauuuaucu

SEQ ID NO: 2015398 - RNA, 19 nt, Homo sapiens
  misc_RNA (1)...(19): siRNA sense strand
caaggacccaaacaucauu

SEQ ID NO: 2015399 - RNA, 19 nt, Homo sapiens
  misc_RNA (1)...(19): siRNA sense strand
gaucucgacuccgcuucaa

SEQ ID NO: 2015400 - RNA, 19 nt, Homo sapiens
  misc_RNA (1)...(19): siRNA sense strand
gacacuauccucaucaaca

SEQ ID NO: 2015401 - RNA, 19 nt, Homo sapiens
  misc_RNA (1)...(19): siRNA sense strand
ugccgaggcugacauuguu

SEQ ID NO: 2015402 - RNA, 19 nt, Homo sapiens
  misc_RNA (1)...(19): siRNA sense strand
cucaagaucugguuagucu

SEQ ID NO: 2015403 - RNA, 19 nt, Homo sapiens
  misc_RNA (1)...(19): siRNA sense strand
ggucgguguuucccaagga

SEQ ID NO: 2015404 - RNA, 19 nt, Homo sapiens
  misc_RNA (1)...(19): siRNA sense strand
gggccuauaugagcugaug

SEQ ID NO: 2015405 - RNA, 19 nt, Homo sapiens
  misc_RNA (1)...(19): siRNA sense strand
ccagaugccaccaagaaug

SEQ ID NO: 2015406 - RNA, 19 nt, Homo sapiens
  misc_RNA (1)...(19): siRNA sense strand
gaucugguuagucuugauu

SEQ ID NO: 2015407 - RNA, 19 nt, Homo sapiens
  misc_RNA (1)...(19): siRNA sense strand
gggacacuauccucaucaa

SEQ ID NO: 2015408 - RNA, 19 nt, Homo sapiens
  misc_RNA (1)...(19): siRNA sense strand
gauggacuccugucuuaca

SEQ ID NO: 2015409 - RNA, 19 nt, Homo sapiens
  misc_RNA (1)...(19): siRNA sense strand
ucaacgacuccaccuauga

SEQ ID NO: 2015410 - RNA, 19 nt, Homo sapiens
  misc_RNA (1)...(19): siRNA sense strand
ggagaacggcgaccucaac

SEQ ID NO: 2015411 - RNA, 19 nt, Homo sapiens
  misc_RNA (1)...(19): siRNA sense strand
aaguggagaugcugacaug

SEQ ID NO: 2015412 - RNA, 19 nt, Homo sapiens
  misc_RNA (1)...(19): siRNA sense strand
ccagaggcccugucaucuu

SEQ ID NO: 2015413 - RNA, 19 nt, Homo sapiens
  misc_RNA (1)...(19): siRNA sense strand
ggaccaucccagacaguga

SEQ ID NO: 2015414 - RNA, 19 nt, Homo sapiens
  misc_RNA (1)...(19): siRNA sense strand
guggagaugcugacaugaa

SEQ ID NO: 2015415 - RNA, 19 nt, Homo sapiens
  misc_RNA (1)...(19): siRNA sense strand
cugauguggugaacaauuc

SEQ ID NO: 2015416 - RNA, 19 nt, Homo sapiens
  misc_RNA (1)...(19): siRNA sense strand
gguccacuguaacaacaug

SEQ ID NO: 2015417 - RNA, 19 nt, Homo sapiens
  misc_RNA (1)...(19): siRNA sense strand
gccaggcuaugacuaugug

SEQ ID NO: 2015418 - RNA, 19 nt, Homo sapiens
  misc_RNA (1)...(19): siRNA sense strand
cagugccgcuuccucuuug

SEQ ID NO: 2015419 - RNA, 19 nt, Homo sapiens
  misc_RNA (1)...(19): siRNA sense strand
acgagcaggucaucgagaa

SEQ ID NO: 2015420 - RNA, 19 nt, Homo sapiens
  misc_RNA (1)...(19): siRNA sense strand
cagguccacuguaacaaca

SEQ ID NO: 2015421 - RNA, 19 nt, Homo sapiens
  misc_RNA (1)...(19): siRNA sense strand
gaaagaggugaagaucaug

SEQ ID NO: 2015422 - RNA, 19 nt, Homo sapiens
  misc_RNA (1)...(19): siRNA sense strand
ccucaacgacuccaccuau

SEQ ID NO: 2015423 - RNA, 19 nt, Homo sapiens
  misc_RNA (1)...(19): siRNA sense strand
uggagaugcugacaugaag

SEQ ID NO: 2015424 - RNA, 19 nt, Homo sapiens
  misc_RNA (1)...(19): siRNA sense strand
ggcagaggaugcacucaac

SEQ ID NO: 2015425 - RNA, 19 nt, Homo sapiens
  misc_RNA (1)...(19): siRNA sense strand
gagcagcgaccacccuuuu

SEQ ID NO: 2015426 - RNA, 19 nt, Homo sapiens
  misc_RNA (1)...(19): siRNA sense strand
gcauguggcagcccagauc

SEQ ID NO: 2015427 - RNA, 19 nt, Homo sapiens
  misc_RNA (1)...(19): siRNA sense strand
ugguuacucuucagcgaaa

SEQ ID NO: 2015428 - RNA, 19 nt, Homo sapiens
  misc_RNA (1)...(19): siRNA sense strand
gcaugagccggaaccucua

SEQ ID NO: 2015429 - RNA, 19 nt, Homo sapiens
  misc_RNA (1)...(19): siRNA sense strand
uggccacacucaacuuugu

SEQ ID NO: 2015430 - RNA, 19 nt, Homo sapiens
  misc_RNA (1)...(19): siRNA sense strand
aaaucuccuucaucucuga

SEQ ID NO: 2015431 - RNA, 19 nt, Homo sapiens
  misc_RNA (1)...(19): siRNA sense strand
gcuaugcagguccacugua

SEQ ID NO: 2015432 - RNA, 19 nt, Homo sapiens
  misc_RNA (1)...(19): siRNA sense strand
gaccggaccaucccagaca

SEQ ID NO: 2015433 - RNA, 19 nt, Homo sapiens
  misc_RNA (1)...(19): siRNA sense strand
gacagugacaucucugcuu

SEQ ID NO: 2015434 - RNA, 19 nt, Homo sapiens
  misc_RNA (1)...(19): siRNA sense strand
agcgaaaucuccuucaucu

SEQ ID NO: 2015435 - RNA, 19 nt, Homo sapiens
  misc_RNA (1)...(19): siRNA sense strand
gcccaugcgccacaaccua

SEQ ID NO: 2015436 - RNA, 19 nt, Homo sapiens
  misc_RNA (1)...(19): siRNA sense strand
ucagcgaaaucuccuucau

SEQ ID NO: 2015437 - RNA, 19 nt, Homo sapiens
  misc_RNA (1)...(19): siRNA sense strand
gaggugcugaugcucugua

SEQ ID NO: 2015438 - RNA, 19 nt, Homo sapiens
  misc_RNA (1)...(19): siRNA sense strand
ucaaggacccaaacaucau

SEQ ID NO: 2015439 - RNA, 19 nt, Homo sapiens
  misc_RNA (1)...(19): siRNA sense strand
guggcuauguggagaugga

SEQ ID NO: 2015440 - RNA, 19 nt, Homo sapiens
  misc_RNA (1)...(19): siRNA sense strand
caucaaaaucgcagacuuu

SEQ ID NO: 2015441 - RNA, 19 nt, Homo sapiens
  misc_RNA (1)...(19): siRNA sense strand
gcugacgguucaccucucu

SEQ ID NO: 2015442 - RNA, 19 nt, Homo sapiens
  misc_RNA (1)...(19): siRNA sense strand
auguggagauggaguuuga

SEQ ID NO: 2015443 - RNA, 19 nt, Homo sapiens
  misc_RNA (1)...(19): siRNA sense strand
gcagguccacuguaacaac

SEQ ID NO: 2015444 - RNA, 19 nt, Homo sapiens
  misc_RNA (1)...(19): siRNA sense strand
gcagaggaugcacucaaca

SEQ ID NO: 2015445 - RNA, 19 nt, Homo sapiens
  misc_RNA (1)...(19): siRNA sense strand
ggucgacagcccucaagau

SEQ ID NO: 2015446 - RNA, 19 nt, Homo sapiens
  misc_RNA (1)...(19): siRNA sense strand
gcccaccucccaccaacuu

SEQ ID NO: 2015447 - RNA, 19 nt, Homo sapiens
  misc_RNA (1)...(19): siRNA sense strand
gugugggccuuugguguga

SEQ ID NO: 2015448 - RNA, 19 nt, Homo sapiens
  misc_RNA (1)...(19): siRNA sense strand
ggccacacucaacuuugua

SEQ ID NO: 2015449 - RNA, 19 nt, Homo sapiens
  misc_RNA (1)...(19): siRNA sense strand
cccaccagcuggaggacaa

SEQ ID NO: 2015450 - RNA, 19 nt, Homo sapiens
  misc_RNA (1)...(19): siRNA sense strand
ccaccaacuucagcagcuu

SEQ ID NO: 2015451 - RNA, 19 nt, Homo sapiens
  misc_RNA (1)...(19): siRNA sense strand
cagcuucuccaguggcuau

SEQ ID NO: 2015452 - RNA, 19 nt, Homo sapiens
  misc_RNA (1)...(19): siRNA sense strand
ggaggugaucucaggcaau

SEQ ID NO: 2015453 - RNA, 19 nt, Homo sapiens
  misc_RNA (1)...(19): siRNA sense strand
guacuugcagguggaucua

SEQ ID NO: 2015454 - RNA, 19 nt, Homo sapiens
  misc_RNA (1)...(19): siRNA sense strand
caccaucagcuacccaaug

SEQ ID NO: 2015455 - RNA, 19 nt, Homo sapiens
  misc_RNA (1)...(19): siRNA sense strand
acggcgaccucaaccaguu

SEQ ID NO: 2015456 - RNA, 19 nt, Homo sapiens
  misc_RNA (1)...(19): siRNA sense strand
caaccgcccagguccuaga

SEQ ID NO: 2015457 - RNA, 19 nt, Homo sapiens
  misc_RNA (1)...(19): siRNA sense strand
aacggaggguguuggaaga

SEQ ID NO: 2015458 - RNA, 19 nt, Homo sapiens
  misc_RNA (1)...(19): siRNA sense strand
gcuauguggagauggaguu

SEQ ID NO: 2015459 - RNA, 19 nt, Homo sapiens
  misc_RNA (1)...(19): siRNA sense strand
cagcgaaaucuccuucauc

SEQ ID NO: 2015460 - RNA, 19 nt, Homo sapiens
  misc_RNA (1)...(19): siRNA sense strand
caugguugcccgacugguu

SEQ ID NO: 2015461 - RNA, 19 nt, Homo sapiens
  misc_RNA (1)...(19): siRNA sense strand
gaagggacauuuugauccu

SEQ ID NO: 2015462 - RNA, 19 nt, Homo sapiens
  misc_RNA (1)...(19): siRNA sense strand
gucgacagcccucaagauc

SEQ ID NO: 2015463 - RNA, 19 nt, Homo sapiens
  misc_RNA (1)...(19): siRNA sense strand
gcagguuggagagcaguga

SEQ ID NO: 2015464 - RNA, 19 nt, Homo sapiens
  misc_RNA (1)...(19): siRNA sense strand
ucugcaugauuacugacua

SEQ ID NO: 2015465 - RNA, 19 nt, Homo sapiens
  misc_RNA (1)...(19): siRNA sense strand
gggauggacuccugucuua

SEQ ID NO: 2015466 - RNA, 19 nt, Homo sapiens
  misc_RNA (1)...(19): siRNA sense strand
ggagauggaguuugaguuu

SEQ ID NO: 2015467 - RNA, 19 nt, Homo sapiens
  misc_RNA (1)...(19): siRNA sense strand
cagaggcccugucaucuuu

SEQ ID NO: 2015468 - RNA, 19 nt, Homo sapiens
  misc_RNA (1)...(19): siRNA sense strand
gcugguagcugucaagauc

SEQ ID NO: 2015469 - RNA, 19 nt, Homo sapiens
  misc_RNA (1)...(19): siRNA sense strand
ugaaagaggugaagaucau

SEQ ID NO: 2015470 - RNA, 19 nt, Homo sapiens
  misc_RNA (1)...(19): siRNA sense strand
gcagguggaucuacaacga

SEQ ID NO: 2015471 - RNA, 19 nt, Homo sapiens
  misc_RNA (1)...(19): siRNA sense strand
gaggugaucucaggcaaug

SEQ ID NO: 2015472 - RNA, 19 nt, Homo sapiens
  misc_RNA (1)...(19): siRNA sense strand
ggagcuaccggcugcguua

SEQ ID NO: 2015473 - RNA, 19 nt, Homo sapiens
  misc_RNA (1)...(19): siRNA sense strand
cgacagcccucaagaucug

SEQ ID NO: 2015474 - RNA, 19 nt, Homo sapiens
  misc_RNA (1)...(19): siRNA sense strand
aagaggagcugacgguuca

SEQ ID NO: 2015475 - RNA, 19 nt, Homo sapiens
  misc_RNA (1)...(19): siRNA sense strand
gggcagacaauguauuuau

SEQ ID NO: 2015476 - RNA, 19 nt, Homo sapiens
  misc_RNA (1)...(19): siRNA sense strand
gcagugccgcuuccucuuu

SEQ ID NO: 2015477 - RNA, 19 nt, Homo sapiens
  misc_RNA (1)...(19): siRNA sense strand
gagauggaguuugaguuug

SEQ ID NO: 2015478 - RNA, 19 nt, Homo sapiens
  misc_RNA (1)...(19): siRNA sense strand
cuaugcagguccacuguaa

SEQ ID NO: 2015479 - RNA, 19 nt, Homo sapiens
  misc_RNA (1)...(19): siRNA sense strand
gcucaucauugcccucaug

SEQ ID NO: 2015480 - RNA, 19 nt, Homo sapiens
  misc_RNA (1)...(19): siRNA sense strand
agauggaguuugaguuuga

SEQ ID NO: 2015481 - RNA, 19 nt, Homo sapiens
  misc_RNA (1)...(19): siRNA sense strand
acacuauccucaucaacaa

SEQ ID NO: 2015482 - RNA, 19 nt, Homo sapiens
  misc_RNA (1)...(19): siRNA sense strand
cgaaaucuccuucaucucu

SEQ ID NO: 2015483 - RNA, 19 nt, Homo sapiens
  misc_RNA (1)...(19): siRNA sense strand
gggacacccuuugcuggua

SEQ ID NO: 2015484 - RNA, 19 nt, Homo sapiens
  misc_RNA (1)...(19): siRNA sense strand
ucucugauguggugaacaa

SEQ ID NO: 2015485 - RNA, 19 nt, Homo sapiens
  misc_RNA (1)...(19): siRNA sense strand
ccaaggaggaggaguacuu

SEQ ID NO: 2015486 - RNA, 19 nt, Homo sapiens
  misc_RNA (1)...(19): siRNA sense strand
ggccagaugccaccaagaa

SEQ ID NO: 2015487 - RNA, 19 nt, Homo sapiens
  misc_RNA (1)...(19): siRNA sense strand
gaccagaggcccugucauc

SEQ ID NO: 2015488 - RNA, 19 nt, Homo sapiens
  misc_RNA (1)...(19): siRNA sense strand
cuggaugacuuuaggaaga

SEQ ID NO: 2015489 - RNA, 19 nt, Homo sapiens
  misc_RNA (1)...(19): siRNA sense strand
ggcagacaauguauuuauc

SEQ ID NO: 2015490 - RNA, 19 nt, Homo sapiens
  misc_RNA (1)...(19): siRNA sense strand
acacucaacuuuguacauc

SEQ ID NO: 2015491 - RNA, 19 nt, Homo sapiens
  misc_RNA (1)...(19): siRNA sense strand
gcagacaauguauuuaucu

SEQ ID NO: 2015492 - RNA, 19 nt, Homo sapiens
  misc_RNA (1)...(19): siRNA sense strand
gaucucgacuccgcuucaa

SEQ ID NO: 2015493 - RNA, 19 nt, Homo sapiens
  misc_RNA (1)...(19): siRNA sense strand
gacacuauccucaucaaca

SEQ ID NO: 2015494 - RNA, 19 nt, Homo sapiens
  misc_RNA (1)...(19): siRNA sense strand
ugccgaggcugacauuguu

SEQ ID NO: 2015495 - RNA, 19 nt, Homo sapiens
  misc_RNA (1)...(19): siRNA sense strand
cucaagaucugguuagucu

SEQ ID NO: 2015496 - RNA, 19 nt, Homo sapiens
  misc_RNA (1)...(19): siRNA sense strand
ggucgguguuucccaagga

SEQ ID NO: 2015497 - RNA, 19 nt, Homo sapiens
  misc_RNA (1)...(19): siRNA sense strand
gggccuauaugagcugaug

SEQ ID NO: 2015498 - RNA, 19 nt, Homo sapiens
  misc_RNA (1)...(19): siRNA sense strand
ccagaugccaccaagaaug

SEQ ID NO: 2015499 - RNA, 19 nt, Homo sapiens
  misc_RNA (1)...(19): siRNA sense strand
gaucugguuagucuugauu

SEQ ID NO: 2015500 - RNA, 19 nt, Homo sapiens
  misc_RNA (1)...(19): siRNA sense strand
gggacacuauccucaucaa

SEQ ID NO: 2015501 - RNA, 19 nt, Homo sapiens
  misc_RNA (1)...(19): siRNA sense strand
gauggacuccugucuuaca

SEQ ID NO: 2015502 - RNA, 19 nt, Homo sapiens
  misc_RNA (1)...(19): siRNA sense strand
ucaacgacuccaccuauga

SEQ ID NO: 2015503 - RNA, 19 nt, Homo sapiens
  misc_RNA (1)...(19): siRNA sense strand
ggagaacggcgaccucaac

SEQ ID NO: 2015504 - RNA, 19 nt, Homo sapiens
  misc_RNA (1)...(19): siRNA sense strand
aaguggagaugcugacaug

SEQ ID NO: 2015505 - RNA, 19 nt, Homo sapiens
  misc_RNA (1)...(19): siRNA sense strand
ccagaggcccugucaucuu

SEQ ID NO: 2015506 - RNA, 19 nt, Homo sapiens
  misc_RNA (1)...(19): siRNA sense strand
gccaggcuaugacuaugug

SEQ ID NO: 2015507 - RNA, 19 nt, Homo sapiens
  misc_RNA (1)...(19): siRNA sense strand
guggagaugcugacaugaa

SEQ ID NO: 2015508 - RNA, 19 nt, Homo sapiens
  misc_RNA (1)...(19): siRNA sense strand
ggaccaucccagacaguga

SEQ ID NO: 2015509 - RNA, 19 nt, Homo sapiens
  misc_RNA (1)...(19): siRNA sense strand
cugauguggugaacaauuc

SEQ ID NO: 2015510 - RNA, 19 nt, Homo sapiens
  misc_RNA (1)...(19): siRNA sense strand
gguccacuguaacaacaug

SEQ ID NO: 2015511 - RNA, 19 nt, Homo sapiens
  misc_RNA (1)...(19): siRNA sense strand
cagugccgcuuccucuuug

SEQ ID NO: 2015512 - RNA, 19 nt, Homo sapiens
  misc_RNA (1)...(19): siRNA sense strand
acgagcaggucaucgagaa

SEQ ID NO: 2015513 - RNA, 19 nt, Homo sapiens
  misc_RNA (1)...(19): siRNA sense strand
cagguccacuguaacaaca

SEQ ID NO: 2015514 - RNA, 19 nt, Homo sapiens
  misc_RNA (1)...(19): siRNA sense strand
gaaagaggugaagaucaug

SEQ ID NO: 2015515 - RNA, 19 nt, Homo sapiens
  misc_RNA (1)...(19): siRNA sense strand
ccucaacgacuccaccuau

SEQ ID NO: 2015516 - RNA, 19 nt, Homo sapiens
  misc_RNA (1)...(19): siRNA sense strand
uggagaugcugacaugaag

SEQ ID NO: 2015517 - RNA, 19 nt, Homo sapiens
  misc_RNA (1)...(19): siRNA sense strand
ggcagaggaugcacucaac

SEQ ID NO: 2015518 - RNA, 19 nt, Homo sapiens
  misc_RNA (1)...(19): siRNA sense strand
gagcagcgaccacccuuuu

SEQ ID NO: 2015519 - RNA, 19 nt, Homo sapiens
  misc_RNA (1)...(19): siRNA sense strand
gcauguggcagcccagauc

SEQ ID NO: 2015520 - RNA, 19 nt, Homo sapiens
  misc_RNA (1)...(19): siRNA sense strand
ugguuacucuucagcgaaa

SEQ ID NO: 2015521 - RNA, 19 nt, Homo sapiens
  misc_RNA (1)...(19): siRNA sense strand
gcaugagccggaaccucua

SEQ ID NO: 2015522 - RNA, 19 nt, Homo sapiens
  misc_RNA (1)...(19): siRNA sense strand
uggccacacucaacuuugu

SEQ ID NO: 2015523 - RNA, 19 nt, Homo sapiens
  misc_RNA (1)...(19): siRNA sense strand
aaaucuccuucaucucuga

SEQ ID NO: 2015524 - RNA, 19 nt, Homo sapiens
  misc_RNA (1)...(19): siRNA sense strand
gcuaugcagguccacugua

SEQ ID NO: 2015525 - RNA, 19 nt, Homo sapiens
  misc_RNA (1)...(19): siRNA sense strand
gaccggaccaucccagaca

SEQ ID NO: 2015526 - RNA, 19 nt, Homo sapiens
  misc_RNA (1)...(19): siRNA sense strand
gacagugacaucucugcuu

SEQ ID NO: 2015527 - RNA, 19 nt, Homo sapiens
  misc_RNA (1)...(19): siRNA sense strand
agcgaaaucuccuucaucu

SEQ ID NO: 2015528 - RNA, 19 nt, Homo sapiens
  misc_RNA (1)...(19): siRNA sense strand
gcccaugcgccacaaccua

SEQ ID NO: 2015529 - RNA, 19 nt, Homo sapiens
  misc_RNA (1)...(19): siRNA sense strand
ucagcgaaaucuccuucau

SEQ ID NO: 2015530 - RNA, 19 nt, Homo sapiens
  misc_RNA (1)...(19): siRNA sense strand
gaggugcugaugcucugua

SEQ ID NO: 2015531 - RNA, 19 nt, Homo sapiens
  misc_RNA (1)...(19): siRNA sense strand
guggcuauguggagaugga

SEQ ID NO: 2015532 - RNA, 19 nt, Homo sapiens
  misc_RNA (1)...(19): siRNA sense strand
caucaaaaucgcagacuuu

SEQ ID NO: 2015533 - RNA, 19 nt, Homo sapiens
  misc_RNA (1)...(19): siRNA sense strand
gcugacgguucaccucucu

SEQ ID NO: 2015534 - RNA, 19 nt, Homo sapiens
  misc_RNA (1)...(19): siRNA sense strand
auguggagauggaguuuga

SEQ ID NO: 2015535 - RNA, 19 nt, Homo sapiens
  misc_RNA (1)...(19): siRNA sense strand
gcagguccacuguaacaac

SEQ ID NO: 2015536 - RNA, 19 nt, Homo sapiens
  misc_RNA (1)...(19): siRNA sense strand
gcagaggaugcacucaaca

SEQ ID NO: 2015537 - RNA, 19 nt, Homo sapiens
  misc_RNA (1)...(19): siRNA sense strand
ggucgacagcccucaagau

SEQ ID NO: 2015538 - RNA, 19 nt, Homo sapiens
  misc_RNA (1)...(19): siRNA sense strand
gcccaccucccaccaacuu

SEQ ID NO: 2015539 - RNA, 19 nt, Homo sapiens
  misc_RNA (1)...(19): siRNA sense strand
gugugggccuuugguguga

SEQ ID NO: 2015540 - RNA, 19 nt, Homo sapiens
  misc_RNA (1)...(19): siRNA sense strand
ggccacacucaacuuugua

SEQ ID NO: 2015541 - RNA, 19 nt, Homo sapiens
  misc_RNA (1)...(19): siRNA sense strand
cccaccagcuggaggacaa

SEQ ID NO: 2015542 - RNA, 19 nt, Homo sapiens
  misc_RNA (1)...(19): siRNA sense strand
ccaccaacuucagcagcuu

SEQ ID NO: 2015543 - RNA, 19 nt, Homo sapiens
  misc_RNA (1)...(19): siRNA sense strand
cagcuucuccaguggcuau

SEQ ID NO: 2015544 - RNA, 19 nt, Homo sapiens
  misc_RNA (1)...(19): siRNA sense strand
ggaggugaucucaggcaau

SEQ ID NO: 2015545 - RNA, 19 nt, Homo sapiens
  misc_RNA (1)...(19): siRNA sense strand
caccaucagcuacccaaug

SEQ ID NO: 2015546 - RNA, 19 nt, Homo sapiens
  misc_RNA (1)...(19): siRNA sense strand
acggcgaccucaaccaguu

SEQ ID NO: 2015547 - RNA, 19 nt, Homo sapiens
  misc_RNA (1)...(19): siRNA sense strand
caaccgcccagguccuaga

SEQ ID NO: 2015548 - RNA, 19 nt, Homo sapiens
  misc_RNA (1)...(19): siRNA sense strand
aacggaggguguuggaaga

SEQ ID NO: 2015549 - RNA, 19 nt, Homo sapiens
  misc_RNA (1)...(19): siRNA sense strand
guacuugcagguggaucua

SEQ ID NO: 2015550 - RNA, 19 nt, Homo sapiens
  misc_RNA (1)...(19): siRNA sense strand
gcuauguggagauggaguu

SEQ ID NO: 2015551 - RNA, 19 nt, Homo sapiens
  misc_RNA (1)...(19): siRNA sense strand
gaagggacauuuugauccu

SEQ ID NO: 2015552 - RNA, 19 nt, Homo sapiens
  misc_RNA (1)...(19): siRNA sense strand
caugguugcccgacugguu

SEQ ID NO: 2015553 - RNA, 19 nt, Homo sapiens
  misc_RNA (1)...(19): siRNA sense strand
cagcgaaaucuccuucauc

SEQ ID NO: 2015554 - RNA, 19 nt, Homo sapiens
  misc_RNA (1)...(19): siRNA sense strand
gcagguuggagagcaguga

SEQ ID NO: 2015555 - RNA, 19 nt, Homo sapiens
  misc_RNA (1)...(19): siRNA sense strand
ucugcaugauuacugacua

SEQ ID NO: 2015556 - RNA, 19 nt, Homo sapiens
  misc_RNA (1)...(19): siRNA sense strand
gucgacagcccucaagauc

SEQ ID NO: 2015557 - RNA, 19 nt, Homo sapiens
  misc_RNA (1)...(19): siRNA sense strand
gggauggacuccugucuua

SEQ ID NO: 2015558 - RNA, 19 nt, Homo sapiens
  misc_RNA (1)...(19): siRNA sense strand
ggagauggaguuugaguuu

SEQ ID NO: 2015559 - RNA, 19 nt, Homo sapiens
  misc_RNA (1)...(19): siRNA sense strand
cagaggcccugucaucuuu

SEQ ID NO: 2015560 - RNA, 19 nt, Homo sapiens
  misc_RNA (1)...(19): siRNA sense strand
gcugguagcugucaagauc

SEQ ID NO: 2015561 - RNA, 19 nt, Homo sapiens
  misc_RNA (1)...(19): siRNA sense strand
ugaaagaggugaagaucau

SEQ ID NO: 2015562 - RNA, 19 nt, Homo sapiens
  misc_RNA (1)...(19): siRNA sense strand
gcagguggaucuacaacga

SEQ ID NO: 2015563 - RNA, 19 nt, Homo sapiens
  misc_RNA (1)...(19): siRNA sense strand
gaggugaucucaggcaaug

SEQ ID NO: 2015564 - RNA, 19 nt, Homo sapiens
  misc_RNA (1)...(19): siRNA sense strand
ggagcuaccggcugcguua

SEQ ID NO: 2015565 - RNA, 19 nt, Homo sapiens
  misc_RNA (1)...(19): siRNA sense strand
cgacagcccucaagaucug

SEQ ID NO: 2015566 - RNA, 19 nt, Homo sapiens
  misc_RNA (1)...(19): siRNA sense strand
aagaggagcugacgguuca

SEQ ID NO: 2015567 - RNA, 19 nt, Homo sapiens
  misc_RNA (1)...(19): siRNA sense strand
gggcagacaauguauuuau

SEQ ID NO: 2015568 - RNA, 19 nt, Homo sapiens
  misc_RNA (1)...(19): siRNA sense strand
gcagugccgcuuccucuuu

SEQ ID NO: 2015569 - RNA, 19 nt, Homo sapiens
  misc_RNA (1)...(19): siRNA sense strand
gagauggaguuugaguuug

SEQ ID NO: 2015570 - RNA, 19 nt, Homo sapiens
  misc_RNA (1)...(19): siRNA sense strand
cuaugcagguccacuguaa

SEQ ID NO: 2015571 - RNA, 19 nt, Homo sapiens
  misc_RNA (1)...(19): siRNA sense strand
gcucaucauugcccucaug

SEQ ID NO: 2015572 - RNA, 19 nt, Homo sapiens
  misc_RNA (1)...(19): siRNA sense strand
agauggaguuugaguuuga

SEQ ID NO: 2015573 - RNA, 19 nt, Homo sapiens
  misc_RNA (1)...(19): siRNA sense strand
acacuauccucaucaacaa

SEQ ID NO: 2015574 - RNA, 19 nt, Homo sapiens
  misc_RNA (1)...(19): siRNA sense strand
cgaaaucuccuucaucucu

SEQ ID NO: 2015575 - RNA, 19 nt, Homo sapiens
  misc_RNA (1)...(19): siRNA sense strand
gggacacccuuugcuggua

SEQ ID NO: 2015576 - RNA, 19 nt, Homo sapiens
  misc_RNA (1)...(19): siRNA sense strand
ucucugauguggugaacaa

SEQ ID NO: 2015577 - RNA, 19 nt, Homo sapiens
  misc_RNA (1)...(19): siRNA sense strand
ccaaggaggaggaguacuu

SEQ ID NO: 2015578 - RNA, 19 nt, Homo sapiens
  misc_RNA (1)...(19): siRNA sense strand
ggccagaugccaccaagaa

SEQ ID NO: 2015579 - RNA, 19 nt, Homo sapiens
  misc_RNA (1)...(19): siRNA sense strand
gaccagaggcccugucauc

SEQ ID NO: 2015580 - RNA, 19 nt, Homo sapiens
  misc_RNA (1)...(19): siRNA sense strand
cuggaugacuuuaggaaga

SEQ ID NO: 2015581 - RNA, 19 nt, Homo sapiens
  misc_RNA (1)...(19): siRNA sense strand
ggcagacaauguauuuauc

SEQ ID NO: 2015582 - RNA, 19 nt, Homo sapiens
  misc_RNA (1)...(19): siRNA sense strand
acacucaacuuuguacauc

SEQ ID NO: 2015583 - RNA, 19 nt, Homo sapiens
  misc_RNA (1)...(19): siRNA sense strand
gcagacaauguauuuaucu

SEQ ID NO: 2015584 - RNA, 19 nt, Homo sapiens
  misc_RNA (1)...(19): siRNA sense strand
gaucucgacuccgcuucaa

SEQ ID NO: 2015585 - RNA, 19 nt, Homo sapiens
  misc_RNA (1)...(19): siRNA sense strand
gacacuauccucaucaaca

SEQ ID NO: 2015586 - RNA, 19 nt, Homo sapiens
  misc_RNA (1)...(19): siRNA sense strand
ugccgaggcugacauuguu

SEQ ID NO: 2015587 - RNA, 19 nt, Homo sapiens
  misc_RNA (1)...(19): siRNA sense strand
cucaagaucugguuagucu

SEQ ID NO: 2015588 - RNA, 19 nt, Homo sapiens
  misc_RNA (1)...(19): siRNA sense strand
ggucgguguuucccaagga

SEQ ID NO: 2015589 - RNA, 19 nt, Homo sapiens
  misc_RNA (1)...(19): siRNA sense strand
gggccuauaugagcugaug

SEQ ID NO: 2015590 - RNA, 19 nt, Homo sapiens
  misc_RNA (1)...(19): siRNA sense strand
ccagaugccaccaagaaug

SEQ ID NO: 2015591 - RNA, 19 nt, Homo sapiens
  misc_RNA (1)...(19): siRNA sense strand
gaucugguuagucuugauu

SEQ ID NO: 2015592 - RNA, 19 nt, Homo sapiens
  misc_RNA (1)...(19): siRNA sense strand
gggacacuauccucaucaa

SEQ ID NO: 2015593 - RNA, 19 nt, Homo sapiens
  misc_RNA (1)...(19): siRNA sense strand
gauggacuccugucuuaca

SEQ ID NO: 2015594 - RNA, 19 nt, Homo sapiens
  misc_RNA (1)...(19): siRNA sense strand
ucaacgacuccaccuauga

SEQ ID NO: 2015595 - RNA, 19 nt, Homo sapiens
  misc_RNA (1)...(19): siRNA sense strand
ggagaacggcgaccucaac

SEQ ID NO: 2015596 - RNA, 19 nt, Homo sapiens
  misc_RNA (1)...(19): siRNA sense strand
aaguggagaugcugacaug

SEQ ID NO: 2015597 - RNA, 19 nt, Homo sapiens
  misc_RNA (1)...(19): siRNA sense strand
ccagaggcccugucaucuu

SEQ ID NO: 2015598 - RNA, 19 nt, Homo sapiens
  misc_RNA (1)...(19): siRNA sense strand
gccaggcuaugacuaugug

SEQ ID NO: 2015599 - RNA, 19 nt, Homo sapiens
  misc_RNA (1)...(19): siRNA sense strand
guggagaugcugacaugaa

SEQ ID NO: 2015600 - RNA, 19 nt, Homo sapiens
  misc_RNA (1)...(19): siRNA sense strand
ggaccaucccagacaguga

SEQ ID NO: 2015601 - RNA, 19 nt, Homo sapiens
  misc_RNA (1)...(19): siRNA sense strand
cugauguggugaacaauuc

SEQ ID NO: 2015602 - RNA, 19 nt, Homo sapiens
  misc_RNA (1)...(19): siRNA sense strand
gguccacuguaacaacaug

SEQ ID NO: 2015603 - RNA, 19 nt, Homo sapiens
  misc_RNA (1)...(19): siRNA sense strand
cagugccgcuuccucuuug

SEQ ID NO: 2015604 - RNA, 19 nt, Homo sapiens
  misc_RNA (1)...(19): siRNA sense strand
acgagcaggucaucgagaa

SEQ ID NO: 2015605 - RNA, 19 nt, Homo sapiens
  misc_RNA (1)...(19): siRNA sense strand
cagguccacuguaacaaca

SEQ ID NO: 2015606 - RNA, 19 nt, Homo sapiens
  misc_RNA (1)...(19): siRNA sense strand
gaaagaggugaagaucaug

SEQ ID NO: 2015607 - RNA, 19 nt, Homo sapiens
  misc_RNA (1)...(19): siRNA sense strand
ccucaacgacuccaccuau

SEQ ID NO: 2015608 - RNA, 19 nt, Homo sapiens
  misc_RNA (1)...(19): siRNA sense strand
uggagaugcugacaugaag

SEQ ID NO: 2015609 - RNA, 19 nt, Homo sapiens
  misc_RNA (1)...(19): siRNA sense strand
ggcagaggaugcacucaac

SEQ ID NO: 2015610 - RNA, 19 nt, Homo sapiens
  misc_RNA (1)...(19): siRNA sense strand
gagcagcgaccacccuuuu

SEQ ID NO: 2015611 - RNA, 19 nt, Homo sapiens
  misc_RNA (1)...(19): siRNA sense strand
gcauguggcagcccagauc

SEQ ID NO: 2015612 - RNA, 19 nt, Homo sapiens
  misc_RNA (1)...(19): siRNA sense strand
ugguuacucuucagcgaaa

SEQ ID NO: 2015613 - RNA, 19 nt, Homo sapiens
  misc_RNA (1)...(19): siRNA sense strand
gcaugagccggaaccucua

SEQ ID NO: 2015614 - RNA, 19 nt, Homo sapiens
  misc_RNA (1)...(19): siRNA sense strand
uggccacacucaacuuugu

SEQ ID NO: 2015615 - RNA, 19 nt, Homo sapiens
  misc_RNA (1)...(19): siRNA sense strand
aaaucuccuucaucucuga

SEQ ID NO: 2015616 - RNA, 19 nt, Homo sapiens
  misc_RNA (1)...(19): siRNA sense strand
gcuaugcagguccacugua

SEQ ID NO: 2015617 - RNA, 19 nt, Homo sapiens
  misc_RNA (1)...(19): siRNA sense strand
gaccggaccaucccagaca

SEQ ID NO: 2015618 - RNA, 19 nt, Homo sapiens
  misc_RNA (1)...(19): siRNA sense strand
gacagugacaucucugcuu

SEQ ID NO: 2015619 - RNA, 19 nt, Homo sapiens
  misc_RNA (1)...(19): siRNA sense strand
agcgaaaucuccuucaucu

SEQ ID NO: 2015620 - RNA, 19 nt, Homo sapiens
  misc_RNA (1)...(19): siRNA sense strand
gcccaugcgccacaaccua

SEQ ID NO: 2015621 - RNA, 19 nt, Homo sapiens
  misc_RNA (1)...(19): siRNA sense strand
ucagcgaaaucuccuucau

SEQ ID NO: 2015622 - RNA, 19 nt, Homo sapiens
  misc_RNA (1)...(19): siRNA sense strand
gaggugcugaugcucugua

SEQ ID NO: 2015623 - RNA, 19 nt, Homo sapiens
  misc_RNA (1)...(19): siRNA sense strand
guggcuauguggagaugga

SEQ ID NO: 2015624 - RNA, 19 nt, Homo sapiens
  misc_RNA (1)...(19): siRNA sense strand
caucaaaaucgcagacuuu

SEQ ID NO: 2015625 - RNA, 19 nt, Homo sapiens
  misc_RNA (1)...(19): siRNA sense strand
gcugacgguucaccucucu

SEQ ID NO: 2015626 - RNA, 19 nt, Homo sapiens
  misc_RNA (1)...(19): siRNA sense strand
auguggagauggaguuuga

SEQ ID NO: 2015627 - RNA, 19 nt, Homo sapiens
  misc_RNA (1)...(19): siRNA sense strand
gcagguccacuguaacaac

SEQ ID NO: 2015628 - RNA, 19 nt, Homo sapiens
  misc_RNA (1)...(19): siRNA sense strand
gcagaggaugcacucaaca

SEQ ID NO: 2015629 - RNA, 19 nt, Homo sapiens
  misc_RNA (1)...(19): siRNA sense strand
ggucgacagcccucaagau

SEQ ID NO: 2015630 - RNA, 19 nt, Homo sapiens
  misc_RNA (1)...(19): siRNA sense strand
gcccaccucccaccaacuu

SEQ ID NO: 2015631 - RNA, 19 nt, Homo sapiens
  misc_RNA (1)...(19): siRNA sense strand
gugugggccuuugguguga

SEQ ID NO: 2015632 - RNA, 19 nt, Homo sapiens
  misc_RNA (1)...(19): siRNA sense strand
ggccacacucaacuuugua

SEQ ID NO: 2015633 - RNA, 19 nt, Homo sapiens
  misc_RNA (1)...(19): siRNA sense strand
cccaccagcuggaggacaa

SEQ ID NO: 2015634 - RNA, 19 nt, Homo sapiens
  misc_RNA (1)...(19): siRNA sense strand
ccaccaacuucagcagcuu

SEQ ID NO: 2015635 - RNA, 19 nt, Homo sapiens
  misc_RNA (1)...(19): siRNA sense strand
cagcuucuccaguggcuau

SEQ ID NO: 2015636 - RNA, 19 nt, Homo sapiens
  misc_RNA (1)...(19): siRNA sense strand
ggaggugaucucaggcaau

SEQ ID NO: 2015637 - RNA, 19 nt, Homo sapiens
  misc_RNA (1)...(19): siRNA sense strand
caccaucagcuacccaaug

SEQ ID NO: 2015638 - RNA, 19 nt, Homo sapiens
  misc_RNA (1)...(19): siRNA sense strand
acggcgaccucaaccaguu

SEQ ID NO: 2015639 - RNA, 19 nt, Homo sapiens
  misc_RNA (1)...(19): siRNA sense strand
caaccgcccagguccuaga

SEQ ID NO: 2015640 - RNA, 19 nt, Homo sapiens
  misc_RNA (1)...(19): siRNA sense strand
aacggaggguguuggaaga

SEQ ID NO: 2015641 - RNA, 19 nt, Homo sapiens
  misc_RNA (1)...(19): siRNA sense strand
guacuugcagguggaucua

SEQ ID NO: 2015642 - RNA, 19 nt, Homo sapiens
  misc_RNA (1)...(19): siRNA sense strand
gcuauguggagauggaguu

SEQ ID NO: 2015643 - RNA, 19 nt, Homo sapiens
  misc_RNA (1)...(19): siRNA sense strand
gaagggacauuuugauccu

SEQ ID NO: 2015644 - RNA, 19 nt, Homo sapiens
  misc_RNA (1)...(19): siRNA sense strand
caugguugcccgacugguu

SEQ ID NO: 2015645 - RNA, 19 nt, Homo sapiens
  misc_RNA (1)...(19): siRNA sense strand
cagcgaaaucuccuucauc

SEQ ID NO: 2015646 - RNA, 19 nt, Homo sapiens
  misc_RNA (1)...(19): siRNA sense strand
gcagguuggagagcaguga

SEQ ID NO: 2015647 - RNA, 19 nt, Homo sapiens
  misc_RNA (1)...(19): siRNA sense strand
ucugcaugauuacugacua

SEQ ID NO: 2015648 - RNA, 19 nt, Homo sapiens
  misc_RNA (1)...(19): siRNA sense strand
gucgacagcccucaagauc

SEQ ID NO: 2015649 - RNA, 19 nt, Homo sapiens
  misc_RNA (1)...(19): siRNA sense strand
gggauggacuccugucuua

SEQ ID NO: 2015650 - RNA, 19 nt, Homo sapiens
  misc_RNA (1)...(19): siRNA sense strand
ggagauggaguuugaguuu

SEQ ID NO: 2015651 - RNA, 19 nt, Homo sapiens
  misc_RNA (1)...(19): siRNA sense strand
cagaggcccugucaucuuu

SEQ ID NO: 2015652 - RNA, 19 nt, Homo sapiens
  misc_RNA (1)...(19): siRNA sense strand
gcugguagcugucaagauc

SEQ ID NO: 2015653 - RNA, 19 nt, Homo sapiens
  misc_RNA (1)...(19): siRNA sense strand
ugaaagaggugaagaucau

SEQ ID NO: 2015654 - RNA, 19 nt, Homo sapiens
  misc_RNA (1)...(19): siRNA sense strand
gcagguggaucuacaacga

SEQ ID NO: 2015655 - RNA, 19 nt, Homo sapiens
  misc_RNA (1)...(19): siRNA sense strand
gaggugaucucaggcaaug

SEQ ID NO: 2015656 - RNA, 19 nt, Homo sapiens
  misc_RNA (1)...(19): siRNA sense strand
ggagcuaccggcugcguua

SEQ ID NO: 2015657 - RNA, 19 nt, Homo sapiens
  misc_RNA (1)...(19): siRNA sense strand
cgacagcccucaagaucug

SEQ ID NO: 2015658 - RNA, 19 nt, Homo sapiens
  misc_RNA (1)...(19): siRNA sense strand
aagaggagcugacgguuca

SEQ ID NO: 2015659 - RNA, 19 nt, Homo sapiens
  misc_RNA (1)...(19): siRNA sense strand
gggcagacaauguauuuau

SEQ ID NO: 2015660 - RNA, 19 nt, Homo sapiens
  misc_RNA (1)...(19): siRNA sense strand
gcagugccgcuuccucuuu

SEQ ID NO: 2015661 - RNA, 19 nt, Homo sapiens
  misc_RNA (1)...(19): siRNA sense strand
gagauggaguuugaguuug

SEQ ID NO: 2015662 - RNA, 19 nt, Homo sapiens
  misc_RNA (1)...(19): siRNA sense strand
cuaugcagguccacuguaa

SEQ ID NO: 2015663 - RNA, 19 nt, Homo sapiens
  misc_RNA (1)...(19): siRNA sense strand
gcucaucauugcccucaug

SEQ ID NO: 2015664 - RNA, 19 nt, Homo sapiens
  misc_RNA (1)...(19): siRNA sense strand
agauggaguuugaguuuga

SEQ ID NO: 2015665 - RNA, 19 nt, Homo sapiens
  misc_RNA (1)...(19): siRNA sense strand
acacuauccucaucaacaa

SEQ ID NO: 2015666 - RNA, 19 nt, Homo sapiens
  misc_RNA (1)...(19): siRNA sense strand
cgaaaucuccuucaucucu

SEQ ID NO: 2015667 - RNA, 19 nt, Homo sapiens
  misc_RNA (1)...(19): siRNA sense strand
gggacacccuuugcuggua

SEQ ID NO: 2015668 - RNA, 19 nt, Homo sapiens
  misc_RNA (1)...(19): siRNA sense strand
ucucugauguggugaacaa

SEQ ID NO: 2015669 - RNA, 19 nt, Homo sapiens
  misc_RNA (1)...(19): siRNA sense strand
ccaaggaggaggaguacuu

SEQ ID NO: 2015670 - RNA, 19 nt, Homo sapiens
  misc_RNA (1)...(19): siRNA sense strand
ggccagaugccaccaagaa

SEQ ID NO: 2015671 - RNA, 19 nt, Homo sapiens
  misc_RNA (1)...(19): siRNA sense strand
gaccagaggcccugucauc

SEQ ID NO: 2015672 - RNA, 19 nt, Homo sapiens
  misc_RNA (1)...(19): siRNA sense strand
cuggaugacuuuaggaaga

SEQ ID NO: 2015673 - RNA, 19 nt, Homo sapiens
  misc_RNA (1)...(19): siRNA sense strand
ggcagacaauguauuuauc

SEQ ID NO: 2015674 - RNA, 19 nt, Homo sapiens
  misc_RNA (1)...(19): siRNA sense strand
gcucaaggacccaaacauc

SEQ ID NO: 2015675 - RNA, 19 nt, Homo sapiens
  misc_RNA (1)...(19): siRNA sense strand
acacucaacuuuguacauc

SEQ ID NO: 2015676 - RNA, 19 nt, Homo sapiens
  misc_RNA (1)...(19): siRNA sense strand
gcagacaauguauuuaucu

SEQ ID NO: 2015677 - RNA, 19 nt, Homo sapiens
  misc_RNA (1)...(19): siRNA sense strand
caaggacccaaacaucauu

SEQ ID NO: 2015678 - RNA, 19 nt, Homo sapiens
  misc_RNA (1)...(19): siRNA sense strand
gaucucgacuccgcuucaa

SEQ ID NO: 2015679 - RNA, 19 nt, Homo sapiens
  misc_RNA (1)...(19): siRNA sense strand
gacacuauccucaucaaca

SEQ ID NO: 2015680 - RNA, 19 nt, Homo sapiens
  misc_RNA (1)...(19): siRNA sense strand
ugccgaggcugacauuguu

SEQ ID NO: 2015681 - RNA, 19 nt, Homo sapiens
  misc_RNA (1)...(19): siRNA sense strand
cucaagaucugguuagucu

SEQ ID NO: 2015682 - RNA, 19 nt, Homo sapiens
  misc_RNA (1)...(19): siRNA sense strand
ggucgguguuucccaagga

SEQ ID NO: 2015683 - RNA, 19 nt, Homo sapiens
  misc_RNA (1)...(19): siRNA sense strand
gggccuauaugagcugaug

SEQ ID NO: 2015684 - RNA, 19 nt, Homo sapiens
  misc_RNA (1)...(19): siRNA sense strand
ccagaugccaccaagaaug

SEQ ID NO: 2015685 - RNA, 19 nt, Homo sapiens
  misc_RNA (1)...(19): siRNA sense strand
gaucugguuagucuugauu

SEQ ID NO: 2015686 - RNA, 19 nt, Homo sapiens
  misc_RNA (1)...(19): siRNA sense strand
gggacacuauccucaucaa

SEQ ID NO: 2015687 - RNA, 19 nt, Homo sapiens
  misc_RNA (1)...(19): siRNA sense strand
gauggacuccugucuuaca

SEQ ID NO: 2015688 - RNA, 19 nt, Homo sapiens
  misc_RNA (1)...(19): siRNA sense strand
ucaacgacuccaccuauga

SEQ ID NO: 2015689 - RNA, 19 nt, Homo sapiens
  misc_RNA (1)...(19): siRNA sense strand
ggagaacggcgaccucaac

SEQ ID NO: 2015690 - RNA, 19 nt, Homo sapiens
  misc_RNA (1)...(19): siRNA sense strand
aaguggagaugcugacaug

SEQ ID NO: 2015691 - RNA, 19 nt, Homo sapiens
  misc_RNA (1)...(19): siRNA sense strand
ccagaggcccugucaucuu

SEQ ID NO: 2015692 - RNA, 19 nt, Homo sapiens
  misc_RNA (1)...(19): siRNA sense strand
ggaccaucccagacaguga

SEQ ID NO: 2015693 - RNA, 19 nt, Homo sapiens
  misc_RNA (1)...(19): siRNA sense strand
guggagaugcugacaugaa

SEQ ID NO: 2015694 - RNA, 19 nt, Homo sapiens
  misc_RNA (1)...(19): siRNA sense strand
cugauguggugaacaauuc

SEQ ID NO: 2015695 - RNA, 19 nt, Homo sapiens
  misc_RNA (1)...(19): siRNA sense strand
gguccacuguaacaacaug

SEQ ID NO: 2015696 - RNA, 19 nt, Homo sapiens
  misc_RNA (1)...(19): siRNA sense strand
gccaggcuaugacuaugug

SEQ ID NO: 2015697 - RNA, 19 nt, Homo sapiens
  misc_RNA (1)...(19): siRNA sense strand
cagugccgcuuccucuuug

SEQ ID NO: 2015698 - RNA, 19 nt, Homo sapiens
  misc_RNA (1)...(19): siRNA sense strand
acgagcaggucaucgagaa

SEQ ID NO: 2015699 - RNA, 19 nt, Homo sapiens
  misc_RNA (1)...(19): siRNA sense strand
cagguccacuguaacaaca

SEQ ID NO: 2015700 - RNA, 19 nt, Homo sapiens
  misc_RNA (1)...(19): siRNA sense strand
gaaagaggugaagaucaug

SEQ ID NO: 2015701 - RNA, 19 nt, Homo sapiens
  misc_RNA (1)...(19): siRNA sense strand
ccucaacgacuccaccuau

SEQ ID NO: 2015702 - RNA, 19 nt, Homo sapiens
  misc_RNA (1)...(19): siRNA sense strand
uggagaugcugacaugaag

SEQ ID NO: 2015703 - RNA, 19 nt, Homo sapiens
  misc_RNA (1)...(19): siRNA sense strand
ggcagaggaugcacucaac

SEQ ID NO: 2015704 - RNA, 19 nt, Homo sapiens
  misc_RNA (1)...(19): siRNA sense strand
gagcagcgaccacccuuuu

SEQ ID NO: 2015705 - RNA, 19 nt, Homo sapiens
  misc_RNA (1)...(19): siRNA sense strand
gcauguggcagcccagauc

SEQ ID NO: 2015706 - RNA, 19 nt, Homo sapiens
  misc_RNA (1)...(19): siRNA sense strand
ugguuacucuucagcgaaa

SEQ ID NO: 2015707 - RNA, 19 nt, Homo sapiens
  misc_RNA (1)...(19): siRNA sense strand
gcaugagccggaaccucua

SEQ ID NO: 2015708 - RNA, 19 nt, Homo sapiens
  misc_RNA (1)...(19): siRNA sense strand
uggccacacucaacuuugu

SEQ ID NO: 2015709 - RNA, 19 nt, Homo sapiens
  misc_RNA (1)...(19): siRNA sense strand
aaaucuccuucaucucuga

SEQ ID NO: 2015710 - RNA, 19 nt, Homo sapiens
  misc_RNA (1)...(19): siRNA sense strand
gcuaugcagguccacugua

SEQ ID NO: 2015711 - RNA, 19 nt, Homo sapiens
  misc_RNA (1)...(19): siRNA sense strand
gaccggaccaucccagaca

SEQ ID NO: 2015712 - RNA, 19 nt, Homo sapiens
  misc_RNA (1)...(19): siRNA sense strand
gacagugacaucucugcuu

SEQ ID NO: 2015713 - RNA, 19 nt, Homo sapiens
  misc_RNA (1)...(19): siRNA sense strand
agcgaaaucuccuucaucu

SEQ ID NO: 2015714 - RNA, 19 nt, Homo sapiens
  misc_RNA (1)...(19): siRNA sense strand
gcccaugcgccacaaccua

SEQ ID NO: 2015715 - RNA, 19 nt, Homo sapiens
  misc_RNA (1)...(19): siRNA sense strand
ucagcgaaaucuccuucau

SEQ ID NO: 2015716 - RNA, 19 nt, Homo sapiens
  misc_RNA (1)...(19): siRNA sense strand
gaggugcugaugcucugua

SEQ ID NO: 2015717 - RNA, 19 nt, Homo sapiens
  misc_RNA (1)...(19): siRNA sense strand
ucaaggacccaaacaucau

SEQ ID NO: 2015718 - RNA, 19 nt, Homo sapiens
  misc_RNA (1)...(19): siRNA sense strand
guggcuauguggagaugga

SEQ ID NO: 2015719 - RNA, 19 nt, Homo sapiens
  misc_RNA (1)...(19): siRNA sense strand
caucaaaaucgcagacuuu

SEQ ID NO: 2015720 - RNA, 19 nt, Homo sapiens
  misc_RNA (1)...(19): siRNA sense strand
gcugacgguucaccucucu

SEQ ID NO: 2015721 - RNA, 19 nt, Homo sapiens
  misc_RNA (1)...(19): siRNA sense strand
auguggagauggaguuuga

SEQ ID NO: 2015722 - RNA, 19 nt, Homo sapiens
  misc_RNA (1)...(19): siRNA sense strand
gcagguccacuguaacaac

SEQ ID NO: 2015723 - RNA, 19 nt, Homo sapiens
  misc_RNA (1)...(19): siRNA sense strand
gcagaggaugcacucaaca

SEQ ID NO: 2015724 - RNA, 19 nt, Homo sapiens
  misc_RNA (1)...(19): siRNA sense strand
ggucgacagcccucaagau

SEQ ID NO: 2015725 - RNA, 19 nt, Homo sapiens
  misc_RNA (1)...(19): siRNA sense strand
gcccaccucccaccaacuu

SEQ ID NO: 2015726 - RNA, 19 nt, Homo sapiens
  misc_RNA (1)...(19): siRNA sense strand
gugugggccuuugguguga

SEQ ID NO: 2015727 - RNA, 19 nt, Homo sapiens
  misc_RNA (1)...(19): siRNA sense strand
ggccacacucaacuuugua

SEQ ID NO: 2015728 - RNA, 19 nt, Homo sapiens
  misc_RNA (1)...(19): siRNA sense strand
cccaccagcuggaggacaa

SEQ ID NO: 2015729 - RNA, 19 nt, Homo sapiens
  misc_RNA (1)...(19): siRNA sense strand
ccaccaacuucagcagcuu

SEQ ID NO: 2015730 - RNA, 19 nt, Homo sapiens
  misc_RNA (1)...(19): siRNA sense strand
cagcuucuccaguggcuau

SEQ ID NO: 2015731 - RNA, 19 nt, Homo sapiens
  misc_RNA (1)...(19): siRNA sense strand
ggaggugaucucaggcaau

SEQ ID NO: 2015732 - RNA, 19 nt, Homo sapiens
  misc_RNA (1)...(19): siRNA sense strand
guacuugcagguggaucua

SEQ ID NO: 2015733 - RNA, 19 nt, Homo sapiens
  misc_RNA (1)...(19): siRNA sense strand
caccaucagcuacccaaug

SEQ ID NO: 2015734 - RNA, 19 nt, Homo sapiens
  misc_RNA (1)...(19): siRNA sense strand
acggcgaccucaaccaguu

SEQ ID NO: 2015735 - RNA, 19 nt, Homo sapiens
  misc_RNA (1)...(19): siRNA sense strand
caaccgcccagguccuaga

SEQ ID NO: 2015736 - RNA, 19 nt, Homo sapiens
  misc_RNA (1)...(19): siRNA sense strand
aacggaggguguuggaaga

SEQ ID NO: 2015737 - RNA, 19 nt, Homo sapiens
  misc_RNA (1)...(19): siRNA sense strand
gcuauguggagauggaguu

SEQ ID NO: 2015738 - RNA, 19 nt, Homo sapiens
  misc_RNA (1)...(19): siRNA sense strand
cagcgaaaucuccuucauc

SEQ ID NO: 2015739 - RNA, 19 nt, Homo sapiens
  misc_RNA (1)...(19): siRNA sense strand
caugguugcccgacugguu

SEQ ID NO: 2015740 - RNA, 19 nt, Homo sapiens
  misc_RNA (1)...(19): siRNA sense strand
gaagggacauuuugauccu

SEQ ID NO: 2015741 - RNA, 19 nt, Homo sapiens
  misc_RNA (1)...(19): siRNA sense strand
gucgacagcccucaagauc

SEQ ID NO: 2015742 - RNA, 19 nt, Homo sapiens
  misc_RNA (1)...(19): siRNA sense strand
gcagguuggagagcaguga

SEQ ID NO: 2015743 - RNA, 19 nt, Homo sapiens
  misc_RNA (1)...(19): siRNA sense strand
ucugcaugauuacugacua

SEQ ID NO: 2015744 - RNA, 19 nt, Homo sapiens
  misc_RNA (1)...(19): siRNA sense strand
gggauggacuccugucuua

SEQ ID NO: 2015745 - RNA, 19 nt, Homo sapiens
  misc_RNA (1)...(19): siRNA sense strand
ggagauggaguuugaguuu

SEQ ID NO: 2015746 - RNA, 19 nt, Homo sapiens
  misc_RNA (1)...(19): siRNA sense strand
cagaggcccugucaucuuu

SEQ ID NO: 2015747 - RNA, 19 nt, Homo sapiens
  misc_RNA (1)...(19): siRNA sense strand
gcugguagcugucaagauc

SEQ ID NO: 2015748 - RNA, 19 nt, Homo sapiens
  misc_RNA (1)...(19): siRNA sense strand
ugaaagaggugaagaucau

SEQ ID NO: 2015749 - RNA, 19 nt, Homo sapiens
  misc_RNA (1)...(19): siRNA sense strand
gcagguggaucuacaacga

SEQ ID NO: 2015750 - RNA, 19 nt, Homo sapiens
  misc_RNA (1)...(19): siRNA sense strand
gaggugaucucaggcaaug

SEQ ID NO: 2015751 - RNA, 19 nt, Homo sapiens
  misc_RNA (1)...(19): siRNA sense strand
ggagcuaccggcugcguua

SEQ ID NO: 2015752 - RNA, 19 nt, Homo sapiens
  misc_RNA (1)...(19): siRNA sense strand
cgacagcccucaagaucug

SEQ ID NO: 2015753 - RNA, 19 nt, Homo sapiens
  misc_RNA (1)...(19): siRNA sense strand
aagaggagcugacgguuca

SEQ ID NO: 2015754 - RNA, 19 nt, Homo sapiens
  misc_RNA (1)...(19): siRNA sense strand
gggcagacaauguauuuau

SEQ ID NO: 2015755 - RNA, 19 nt, Homo sapiens
  misc_RNA (1)...(19): siRNA sense strand
gcagugccgcuuccucuuu

SEQ ID NO: 2015756 - RNA, 19 nt, Homo sapiens
  misc_RNA (1)...(19): siRNA sense strand
gagauggaguuugaguuug

SEQ ID NO: 2015757 - RNA, 19 nt, Homo sapiens
  misc_RNA (1)...(19): siRNA sense strand
cuaugcagguccacuguaa

SEQ ID NO: 2015758 - RNA, 19 nt, Homo sapiens
  misc_RNA (1)...(19): siRNA sense strand
gcucaucauugcccucaug

SEQ ID NO: 2015759 - RNA, 19 nt, Homo sapiens
  misc_RNA (1)...(19): siRNA sense strand
agauggaguuugaguuuga

SEQ ID NO: 2015760 - RNA, 19 nt, Homo sapiens
  misc_RNA (1)...(19): siRNA sense strand
acacuauccucaucaacaa

SEQ ID NO: 2015761 - RNA, 19 nt, Homo sapiens
  misc_RNA (1)...(19): siRNA sense strand
cgaaaucuccuucaucucu

SEQ ID NO: 2015762 - RNA, 19 nt, Homo sapiens
  misc_RNA (1)...(19): siRNA sense strand
gggacacccuuugcuggua

SEQ ID NO: 2015763 - RNA, 19 nt, Homo sapiens
  misc_RNA (1)...(19): siRNA sense strand
ucucugauguggugaacaa

SEQ ID NO: 2015764 - RNA, 19 nt, Homo sapiens
  misc_RNA (1)...(19): siRNA sense strand
ccaaggaggaggaguacuu

SEQ ID NO: 2015765 - RNA, 19 nt, Homo sapiens
  misc_RNA (1)...(19): siRNA sense strand
ggccagaugccaccaagaa

SEQ ID NO: 2015766 - RNA, 19 nt, Homo sapiens
  misc_RNA (1)...(19): siRNA sense strand
gaccagaggcccugucauc

SEQ ID NO: 2015767 - RNA, 19 nt, Homo sapiens
  misc_RNA (1)...(19): siRNA sense strand
cuggaugacuuuaggaaga

SEQ ID NO: 2015768 - RNA, 19 nt, Homo sapiens
  misc_RNA (1)...(19): siRNA sense strand
ggcagacaauguauuuauc

SEQ ID NO: 2015769 - RNA, 19 nt, Homo sapiens
  misc_RNA (1)...(19): siRNA sense strand
acacucaacuuuguacauc

SEQ ID NO: 2015770 - RNA, 19 nt, Homo sapiens
  misc_RNA (1)...(19): siRNA sense strand
gcagacaauguauuuaucu

SEQ ID NO: 2015771 - RNA, 19 nt, Homo sapiens
  misc_RNA (1)...(19): siRNA sense strand
gaucucgacuccgcuucaa

SEQ ID NO: 2015772 - RNA, 19 nt, Homo sapiens
  misc_RNA (1)...(19): siRNA sense strand
gacacuauccucaucaaca

SEQ ID NO: 2015773 - RNA, 19 nt, Homo sapiens
  misc_RNA (1)...(19): siRNA sense strand
ugccgaggcugacauuguu

SEQ ID NO: 2015774 - RNA, 19 nt, Homo sapiens
  misc_RNA (1)...(19): siRNA sense strand
cucaagaucugguuagucu

SEQ ID NO: 2015775 - RNA, 19 nt, Homo sapiens
  misc_RNA (1)...(19): siRNA sense strand
ggucgguguuucccaagga

SEQ ID NO: 2015776 - RNA, 19 nt, Homo sapiens
  misc_RNA (1)...(19): siRNA sense strand
gggccuauaugagcugaug

SEQ ID NO: 2015777 - RNA, 19 nt, Homo sapiens
  misc_RNA (1)...(19): siRNA sense strand
ccagaugccaccaagaaug

SEQ ID NO: 2015778 - RNA, 19 nt, Homo sapiens
  misc_RNA (1)...(19): siRNA sense strand
gaucugguuagucuugauu

SEQ ID NO: 2015779 - RNA, 19 nt, Homo sapiens
  misc_RNA (1)...(19): siRNA sense strand
gggacacuauccucaucaa

SEQ ID NO: 2015780 - RNA, 19 nt, Homo sapiens
  misc_RNA (1)...(19): siRNA sense strand
gauggacuccugucuuaca

SEQ ID NO: 2015781 - RNA, 19 nt, Homo sapiens
  misc_RNA (1)...(19): siRNA sense strand
ucaacgacuccaccuauga

SEQ ID NO: 2015782 - RNA, 19 nt, Homo sapiens
  misc_RNA (1)...(19): siRNA sense strand
ggagaacggcgaccucaac

SEQ ID NO: 2015783 - RNA, 19 nt, Homo sapiens
  misc_RNA (1)...(19): siRNA sense strand
aaguggagaugcugacaug

SEQ ID NO: 2015784 - RNA, 19 nt, Homo sapiens
  misc_RNA (1)...(19): siRNA sense strand
ccagaggcccugucaucuu

SEQ ID NO: 2015785 - RNA, 19 nt, Homo sapiens
  misc_RNA (1)...(19): siRNA sense strand
gccaggcuaugacuaugug

SEQ ID NO: 2015786 - RNA, 19 nt, Homo sapiens
  misc_RNA (1)...(19): siRNA sense strand
guggagaugcugacaugaa

SEQ ID NO: 2015787 - RNA, 19 nt, Homo sapiens
  misc_RNA (1)...(19): siRNA sense strand
ggaccaucccagacaguga

SEQ ID NO: 2015788 - RNA, 19 nt, Homo sapiens
  misc_RNA (1)...(19): siRNA sense strand
cugauguggugaacaauuc

SEQ ID NO: 2015789 - RNA, 19 nt, Homo sapiens
  misc_RNA (1)...(19): siRNA sense strand
gguccacuguaacaacaug

SEQ ID NO: 2015790 - RNA, 19 nt, Homo sapiens
  misc_RNA (1)...(19): siRNA sense strand
cagugccgcuuccucuuug

SEQ ID NO: 2015791 - RNA, 19 nt, Homo sapiens
  misc_RNA (1)...(19): siRNA sense strand
acgagcaggucaucgagaa

SEQ ID NO: 2015792 - RNA, 19 nt, Homo sapiens
  misc_RNA (1)...(19): siRNA sense strand
cagguccacuguaacaaca

SEQ ID NO: 2015793 - RNA, 19 nt, Homo sapiens
  misc_RNA (1)...(19): siRNA sense strand
gaaagaggugaagaucaug

SEQ ID NO: 2015794 - RNA, 19 nt, Homo sapiens
  misc_RNA (1)...(19): siRNA sense strand
ccucaacgacuccaccuau

SEQ ID NO: 2015795 - RNA, 19 nt, Homo sapiens
  misc_RNA (1)...(19): siRNA sense strand
uggagaugcugacaugaag

SEQ ID NO: 2015796 - RNA, 19 nt, Homo sapiens
  misc_RNA (1)...(19): siRNA sense strand
ggcagaggaugcacucaac

SEQ ID NO: 2015797 - RNA, 19 nt, Homo sapiens
  misc_RNA (1)...(19): siRNA sense strand
gagcagcgaccacccuuuu

SEQ ID NO: 2015798 - RNA, 19 nt, Homo sapiens
  misc_RNA (1)...(19): siRNA sense strand
gcauguggcagcccagauc

SEQ ID NO: 2015799 - RNA, 19 nt, Homo sapiens
  misc_RNA (1)...(19): siRNA sense strand
ugguuacucuucagcgaaa

SEQ ID NO: 2015800 - RNA, 19 nt, Homo sapiens
  misc_RNA (1)...(19): siRNA sense strand
gcaugagccggaaccucua

SEQ ID NO: 2015801 - RNA, 19 nt, Homo sapiens
  misc_RNA (1)...(19): siRNA sense strand
uggccacacucaacuuugu

SEQ ID NO: 2015802 - RNA, 19 nt, Homo sapiens
  misc_RNA (1)...(19): siRNA sense strand
aaaucuccuucaucucuga

SEQ ID NO: 2015803 - RNA, 19 nt, Homo sapiens
  misc_RNA (1)...(19): siRNA sense strand
gcuaugcagguccacugua

SEQ ID NO: 2015804 - RNA, 19 nt, Homo sapiens
  misc_RNA (1)...(19): siRNA sense strand
gaccggaccaucccagaca

SEQ ID NO: 2015805 - RNA, 19 nt, Homo sapiens
  misc_RNA (1)...(19): siRNA sense strand
gacagugacaucucugcuu

SEQ ID NO: 2015806 - RNA, 19 nt, Homo sapiens
  misc_RNA (1)...(19): siRNA sense strand
agcgaaaucuccuucaucu

SEQ ID NO: 2015807 - RNA, 19 nt, Homo sapiens
  misc_RNA (1)...(19): siRNA sense strand
gcccaugcgccacaaccua

SEQ ID NO: 2015808 - RNA, 19 nt, Homo sapiens
  misc_RNA (1)...(19): siRNA sense strand
ucagcgaaaucuccuucau

SEQ ID NO: 2015809 - RNA, 19 nt, Homo sapiens
  misc_RNA (1)...(19): siRNA sense strand
gaggugcugaugcucugua

SEQ ID NO: 2015810 - RNA, 19 nt, Homo sapiens
  misc_RNA (1)...(19): siRNA sense strand
guggcuauguggagaugga

SEQ ID NO: 2015811 - RNA, 19 nt, Homo sapiens
  misc_RNA (1)...(19): siRNA sense strand
caucaaaaucgcagacuuu

SEQ ID NO: 2015812 - RNA, 19 nt, Homo sapiens
  misc_RNA (1)...(19): siRNA sense strand
gcugacgguucaccucucu

SEQ ID NO: 2015813 - RNA, 19 nt, Homo sapiens
  misc_RNA (1)...(19): siRNA sense strand
auguggagauggaguuuga

SEQ ID NO: 2015814 - RNA, 19 nt, Homo sapiens
  misc_RNA (1)...(19): siRNA sense strand
gcagguccacuguaacaac

SEQ ID NO: 2015815 - RNA, 19 nt, Homo sapiens
  misc_RNA (1)...(19): siRNA sense strand
gcagaggaugcacucaaca

SEQ ID NO: 2015816 - RNA, 19 nt, Homo sapiens
  misc_RNA (1)...(19): siRNA sense strand
ggucgacagcccucaagau

SEQ ID NO: 2015817 - RNA, 19 nt, Homo sapiens
  misc_RNA (1)...(19): siRNA sense strand
gcccaccucccaccaacuu

SEQ ID NO: 2015818 - RNA, 19 nt, Homo sapiens
  misc_RNA (1)...(19): siRNA sense strand
gugugggccuuugguguga

SEQ ID NO: 2015819 - RNA, 19 nt, Homo sapiens
  misc_RNA (1)...(19): siRNA sense strand
ggccacacucaacuuugua

SEQ ID NO: 2015820 - RNA, 19 nt, Homo sapiens
  misc_RNA (1)...(19): siRNA sense strand
cccaccagcuggaggacaa

SEQ ID NO: 2015821 - RNA, 19 nt, Homo sapiens
  misc_RNA (1)...(19): siRNA sense strand
ccaccaacuucagcagcuu

SEQ ID NO: 2015822 - RNA, 19 nt, Homo sapiens
  misc_RNA (1)...(19): siRNA sense strand
cagcuucuccaguggcuau

SEQ ID NO: 2015823 - RNA, 19 nt, Homo sapiens
  misc_RNA (1)...(19): siRNA sense strand
ggaggugaucucaggcaau

SEQ ID NO: 2015824 - RNA, 19 nt, Homo sapiens
  misc_RNA (1)...(19): siRNA sense strand
caccaucagcuacccaaug

SEQ ID NO: 2015825 - RNA, 19 nt, Homo sapiens
  misc_RNA (1)...(19): siRNA sense strand
acggcgaccucaaccaguu

SEQ ID NO: 2015826 - RNA, 19 nt, Homo sapiens
  misc_RNA (1)...(19): siRNA sense strand
caaccgcccagguccuaga

SEQ ID NO: 2015827 - RNA, 19 nt, Homo sapiens
  misc_RNA (1)...(19): siRNA sense strand
aacggaggguguuggaaga

SEQ ID NO: 2015828 - RNA, 19 nt, Homo sapiens
  misc_RNA (1)...(19): siRNA sense strand
guacuugcagguggaucua

SEQ ID NO: 2015829 - RNA, 19 nt, Homo sapiens
  misc_RNA (1)...(19): siRNA sense strand
gcuauguggagauggaguu

SEQ ID NO: 2015830 - RNA, 19 nt, Homo sapiens
  misc_RNA (1)...(19): siRNA sense strand
gaagggacauuuugauccu

SEQ ID NO: 2015831 - RNA, 19 nt, Homo sapiens
  misc_RNA (1)...(19): siRNA sense strand
caugguugcccgacugguu

SEQ ID NO: 2015832 - RNA, 19 nt, Homo sapiens
  misc_RNA (1)...(19): siRNA sense strand
cagcgaaaucuccuucauc

SEQ ID NO: 2015833 - RNA, 19 nt, Homo sapiens
  misc_RNA (1)...(19): siRNA sense strand
gcagguuggagagcaguga

SEQ ID NO: 2015834 - RNA, 19 nt, Homo sapiens
  misc_RNA (1)...(19): siRNA sense strand
ucugcaugauuacugacua

SEQ ID NO: 2015835 - RNA, 19 nt, Homo sapiens
  misc_RNA (1)...(19): siRNA sense strand
gucgacagcccucaagauc

SEQ ID NO: 2015836 - RNA, 19 nt, Homo sapiens
  misc_RNA (1)...(19): siRNA sense strand
gggauggacuccugucuua

SEQ ID NO: 2015837 - RNA, 19 nt, Homo sapiens
  misc_RNA (1)...(19): siRNA sense strand
ggagauggaguuugaguuu

SEQ ID NO: 2015838 - RNA, 19 nt, Homo sapiens
  misc_RNA (1)...(19): siRNA sense strand
cagaggcccugucaucuuu

SEQ ID NO: 2015839 - RNA, 19 nt, Homo sapiens
  misc_RNA (1)...(19): siRNA sense strand
gcugguagcugucaagauc

SEQ ID NO: 2015840 - RNA, 19 nt, Homo sapiens
  misc_RNA (1)...(19): siRNA sense strand
ugaaagaggugaagaucau

SEQ ID NO: 2015841 - RNA, 19 nt, Homo sapiens
  misc_RNA (1)...(19): siRNA sense strand
gcagguggaucuacaacga

SEQ ID NO: 2015842 - RNA, 19 nt, Homo sapiens
  misc_RNA (1)...(19): siRNA sense strand
gaggugaucucaggcaaug

SEQ ID NO: 2015843 - RNA, 19 nt, Homo sapiens
  misc_RNA (1)...(19): siRNA sense strand
ggagcuaccggcugcguua

SEQ ID NO: 2015844 - RNA, 19 nt, Homo sapiens
  misc_RNA (1)...(19): siRNA sense strand
cgacagcccucaagaucug

SEQ ID NO: 2015845 - RNA, 19 nt, Homo sapiens
  misc_RNA (1)...(19): siRNA sense strand
aagaggagcugacgguuca

SEQ ID NO: 2015846 - RNA, 19 nt, Homo sapiens
  misc_RNA (1)...(19): siRNA sense strand
gggcagacaauguauuuau

SEQ ID NO: 2015847 - RNA, 19 nt, Homo sapiens
  misc_RNA (1)...(19): siRNA sense strand
gcagugccgcuuccucuuu

SEQ ID NO: 2015848 - RNA, 19 nt, Homo sapiens
  misc_RNA (1)...(19): siRNA sense strand
gagauggaguuugaguuug

SEQ ID NO: 2015849 - RNA, 19 nt, Homo sapiens
  misc_RNA (1)...(19): siRNA sense strand
cuaugcagguccacuguaa

SEQ ID NO: 2015850 - RNA, 19 nt, Homo sapiens
  misc_RNA (1)...(19): siRNA sense strand
gcucaucauugcccucaug

SEQ ID NO: 2015851 - RNA, 19 nt, Homo sapiens
  misc_RNA (1)...(19): siRNA sense strand
agauggaguuugaguuuga

SEQ ID NO: 2015852 - RNA, 19 nt, Homo sapiens
  misc_RNA (1)...(19): siRNA sense strand
acacuauccucaucaacaa

SEQ ID NO: 2015853 - RNA, 19 nt, Homo sapiens
  misc_RNA (1)...(19): siRNA sense strand
cgaaaucuccuucaucucu

SEQ ID NO: 2015854 - RNA, 19 nt, Homo sapiens
  misc_RNA (1)...(19): siRNA sense strand
gggacacccuuugcuggua

SEQ ID NO: 2015855 - RNA, 19 nt, Homo sapiens
  misc_RNA (1)...(19): siRNA sense strand
ucucugauguggugaacaa

SEQ ID NO: 2015856 - RNA, 19 nt, Homo sapiens
  misc_RNA (1)...(19): siRNA sense strand
ccaaggaggaggaguacuu

SEQ ID NO: 2015857 - RNA, 19 nt, Homo sapiens
  misc_RNA (1)...(19): siRNA sense strand
ggccagaugccaccaagaa

SEQ ID NO: 2015858 - RNA, 19 nt, Homo sapiens
  misc_RNA (1)...(19): siRNA sense strand
gaccagaggcccugucauc

SEQ ID NO: 2015859 - RNA, 19 nt, Homo sapiens
  misc_RNA (1)...(19): siRNA sense strand
cuggaugacuuuaggaaga

SEQ ID NO: 2015860 - RNA, 19 nt, Homo sapiens
  misc_RNA (1)...(19): siRNA sense strand
ggcagacaauguauuuauc

SEQ ID NO: 2015861 - RNA, 19 nt, Homo sapiens
  misc_RNA (1)...(19): siRNA sense strand
acacucaacuuuguacauc

SEQ ID NO: 2015862 - RNA, 19 nt, Homo sapiens
  misc_RNA (1)...(19): siRNA sense strand
gcagacaauguauuuaucu

SEQ ID NO: 2015863 - RNA, 19 nt, Homo sapiens
  misc_RNA (1)...(19): siRNA sense strand
gaucucgacuccgcuucaa

SEQ ID NO: 2015864 - RNA, 19 nt, Homo sapiens
  misc_RNA (1)...(19): siRNA sense strand
gacacuauccucaucaaca

SEQ ID NO: 2015865 - RNA, 19 nt, Homo sapiens
  misc_RNA (1)...(19): siRNA sense strand
ugccgaggcugacauuguu

SEQ ID NO: 2015866 - RNA, 19 nt, Homo sapiens
  misc_RNA (1)...(19): siRNA sense strand
cucaagaucugguuagucu

SEQ ID NO: 2015867 - RNA, 19 nt, Homo sapiens
  misc_RNA (1)...(19): siRNA sense strand
ggucgguguuucccaagga

SEQ ID NO: 2015868 - RNA, 19 nt, Homo sapiens
  misc_RNA (1)...(19): siRNA sense strand
gggccuauaugagcugaug

SEQ ID NO: 2015869 - RNA, 19 nt, Homo sapiens
  misc_RNA (1)...(19): siRNA sense strand
ccagaugccaccaagaaug

SEQ ID NO: 2015870 - RNA, 19 nt, Homo sapiens
  misc_RNA (1)...(19): siRNA sense strand
gaucugguuagucuugauu

SEQ ID NO: 2015871 - RNA, 19 nt, Homo sapiens
  misc_RNA (1)...(19): siRNA sense strand
gggacacuauccucaucaa

SEQ ID NO: 2015872 - RNA, 19 nt, Homo sapiens
  misc_RNA (1)...(19): siRNA sense strand
gauggacuccugucuuaca

SEQ ID NO: 2015873 - RNA, 19 nt, Homo sapiens
  misc_RNA (1)...(19): siRNA sense strand
ucaacgacuccaccuauga

SEQ ID NO: 2015874 - RNA, 19 nt, Homo sapiens
  misc_RNA (1)...(19): siRNA sense strand
ggagaacggcgaccucaac

SEQ ID NO: 2015875 - RNA, 19 nt, Homo sapiens
  misc_RNA (1)...(19): siRNA sense strand
aaguggagaugcugacaug

SEQ ID NO: 2015876 - RNA, 19 nt, Homo sapiens
  misc_RNA (1)...(19): siRNA sense strand
ccagaggcccugucaucuu

SEQ ID NO: 2015877 - RNA, 19 nt, Homo sapiens
  misc_RNA (1)...(19): siRNA sense strand
gccaggcuaugacuaugug

SEQ ID NO: 2015878 - RNA, 19 nt, Homo sapiens
  misc_RNA (1)...(19): siRNA sense strand
guggagaugcugacaugaa

SEQ ID NO: 2015879 - RNA, 19 nt, Homo sapiens
  misc_RNA (1)...(19): siRNA sense strand
ggaccaucccagacaguga

SEQ ID NO: 2015880 - RNA, 19 nt, Homo sapiens
  misc_RNA (1)...(19): siRNA sense strand
cugauguggugaacaauuc

SEQ ID NO: 2015881 - RNA, 19 nt, Homo sapiens
  misc_RNA (1)...(19): siRNA sense strand
gguccacuguaacaacaug

SEQ ID NO: 2015882 - RNA, 19 nt, Homo sapiens
  misc_RNA (1)...(19): siRNA sense strand
cagugccgcuuccucuuug

SEQ ID NO: 2015883 - RNA, 19 nt, Homo sapiens
  misc_RNA (1)...(19): siRNA sense strand
acgagcaggucaucgagaa

SEQ ID NO: 2015884 - RNA, 19 nt, Homo sapiens
  misc_RNA (1)...(19): siRNA sense strand
cagguccacuguaacaaca

SEQ ID NO: 2015885 - RNA, 19 nt, Homo sapiens
  misc_RNA (1)...(19): siRNA sense strand
gaaagaggugaagaucaug

SEQ ID NO: 2015886 - RNA, 19 nt, Homo sapiens
  misc_RNA (1)...(19): siRNA sense strand
ccucaacgacuccaccuau

SEQ ID NO: 2015887 - RNA, 19 nt, Homo sapiens
  misc_RNA (1)...(19): siRNA sense strand
uggagaugcugacaugaag

SEQ ID NO: 2015888 - RNA, 19 nt, Homo sapiens
  misc_RNA (1)...(19): siRNA sense strand
ggcagaggaugcacucaac

SEQ ID NO: 2015889 - RNA, 19 nt, Homo sapiens
  misc_RNA (1)...(19): siRNA sense strand
gagcagcgaccacccuuuu

SEQ ID NO: 2015890 - RNA, 19 nt, Homo sapiens
  misc_RNA (1)...(19): siRNA sense strand
gcauguggcagcccagauc

SEQ ID NO: 2015891 - RNA, 19 nt, Homo sapiens
  misc_RNA (1)...(19): siRNA sense strand
ugguuacucuucagcgaaa

SEQ ID NO: 2015892 - RNA, 19 nt, Homo sapiens
  misc_RNA (1)...(19): siRNA sense strand
gcaugagccggaaccucua

SEQ ID NO: 2015893 - RNA, 19 nt, Homo sapiens
  misc_RNA (1)...(19): siRNA sense strand
uggccacacucaacuuugu

SEQ ID NO: 2015894 - RNA, 19 nt, Homo sapiens
  misc_RNA (1)...(19): siRNA sense strand
aaaucuccuucaucucuga

SEQ ID NO: 2015895 - RNA, 19 nt, Homo sapiens
  misc_RNA (1)...(19): siRNA sense strand
gcuaugcagguccacugua

SEQ ID NO: 2015896 - RNA, 19 nt, Homo sapiens
  misc_RNA (1)...(19): siRNA sense strand
gaccggaccaucccagaca

SEQ ID NO: 2015897 - RNA, 19 nt, Homo sapiens
  misc_RNA (1)...(19): siRNA sense strand
gacagugacaucucugcuu

SEQ ID NO: 2015898 - RNA, 19 nt, Homo sapiens
  misc_RNA (1)...(19): siRNA sense strand
agcgaaaucuccuucaucu

SEQ ID NO: 2015899 - RNA, 19 nt, Homo sapiens
  misc_RNA (1)...(19): siRNA sense strand
gcccaugcgccacaaccua

SEQ ID NO: 2015900 - RNA, 19 nt, Homo sapiens
  misc_RNA (1)...(19): siRNA sense strand
ucagcgaaaucuccuucau

SEQ ID NO: 2015901 - RNA, 19 nt, Homo sapiens
  misc_RNA (1)...(19): siRNA sense strand
gaggugcugaugcucugua

SEQ ID NO: 2015902 - RNA, 19 nt, Homo sapiens
  misc_RNA (1)...(19): siRNA sense strand
guggcuauguggagaugga

SEQ ID NO: 2015903 - RNA, 19 nt, Homo sapiens
  misc_RNA (1)...(19): siRNA sense strand
caucaaaaucgcagacuuu

SEQ ID NO: 2015904 - RNA, 19 nt, Homo sapiens
  misc_RNA (1)...(19): siRNA sense strand
gcugacgguucaccucucu

SEQ ID NO: 2015905 - RNA, 19 nt, Homo sapiens
  misc_RNA (1)...(19): siRNA sense strand
auguggagauggaguuuga

SEQ ID NO: 2015906 - RNA, 19 nt, Homo sapiens
  misc_RNA (1)...(19): siRNA sense strand
gcagguccacuguaacaac

SEQ ID NO: 2015907 - RNA, 19 nt, Homo sapiens
  misc_RNA (1)...(19): siRNA sense strand
gcagaggaugcacucaaca

SEQ ID NO: 2015908 - RNA, 19 nt, Homo sapiens
  misc_RNA (1)...(19): siRNA sense strand
ggucgacagcccucaagau

SEQ ID NO: 2015909 - RNA, 19 nt, Homo sapiens
  misc_RNA (1)...(19): siRNA sense strand
gcccaccucccaccaacuu

SEQ ID NO: 2015910 - RNA, 19 nt, Homo sapiens
  misc_RNA (1)...(19): siRNA sense strand
gugugggccuuugguguga

SEQ ID NO: 2015911 - RNA, 19 nt, Homo sapiens
  misc_RNA (1)...(19): siRNA sense strand
ggccacacucaacuuugua

SEQ ID NO: 2015912 - RNA, 19 nt, Homo sapiens
  misc_RNA (1)...(19): siRNA sense strand
cccaccagcuggaggacaa

SEQ ID NO: 2015913 - RNA, 19 nt, Homo sapiens
  misc_RNA (1)...(19): siRNA sense strand
ccaccaacuucagcagcuu

SEQ ID NO: 2015914 - RNA, 19 nt, Homo sapiens
  misc_RNA (1)...(19): siRNA sense strand
cagcuucuccaguggcuau

SEQ ID NO: 2015915 - RNA, 19 nt, Homo sapiens
  misc_RNA (1)...(19): siRNA sense strand
ggaggugaucucaggcaau

SEQ ID NO: 2015916 - RNA, 19 nt, Homo sapiens
  misc_RNA (1)...(19): siRNA sense strand
caccaucagcuacccaaug

SEQ ID NO: 2015917 - RNA, 19 nt, Homo sapiens
  misc_RNA (1)...(19): siRNA sense strand
acggcgaccucaaccaguu

SEQ ID NO: 2015918 - RNA, 19 nt, Homo sapiens
  misc_RNA (1)...(19): siRNA sense strand
caaccgcccagguccuaga

SEQ ID NO: 2015919 - RNA, 19 nt, Homo sapiens
  misc_RNA (1)...(19): siRNA sense strand
aacggaggguguuggaaga

SEQ ID NO: 2015920 - RNA, 19 nt, Homo sapiens
  misc_RNA (1)...(19): siRNA sense strand
guacuugcagguggaucua

SEQ ID NO: 2015921 - RNA, 19 nt, Homo sapiens
  misc_RNA (1)...(19): siRNA sense strand
gcuauguggagauggaguu

SEQ ID NO: 2015922 - RNA, 19 nt, Homo sapiens
  misc_RNA (1)...(19): siRNA sense strand
gaagggacauuuugauccu

SEQ ID NO: 2015923 - RNA, 19 nt, Homo sapiens
  misc_RNA (1)...(19): siRNA sense strand
caugguugcccgacugguu

SEQ ID NO: 2015924 - RNA, 19 nt, Homo sapiens
  misc_RNA (1)...(19): siRNA sense strand
cagcgaaaucuccuucauc

SEQ ID NO: 2015925 - RNA, 19 nt, Homo sapiens
  misc_RNA (1)...(19): siRNA sense strand
gcagguuggagagcaguga

SEQ ID NO: 2015926 - RNA, 19 nt, Homo sapiens
  misc_RNA (1)...(19): siRNA sense strand
ucugcaugauuacugacua

SEQ ID NO: 2015927 - RNA, 19 nt, Homo sapiens
  misc_RNA (1)...(19): siRNA sense strand
gucgacagcccucaagauc

SEQ ID NO: 2015928 - RNA, 19 nt, Homo sapiens
  misc_RNA (1)...(19): siRNA sense strand
ggacgcagcuccucaacua

SEQ ID NO: 2015929 - RNA, 19 nt, Homo sapiens
  misc_RNA (1)...(19): siRNA sense strand
ggagaugacuacaggaaua

SEQ ID NO: 2015930 - RNA, 19 nt, Homo sapiens
  misc_RNA (1)...(19): siRNA sense strand
agaaacaccugcagaagua

SEQ ID NO: 2015931 - RNA, 19 nt, Homo sapiens
  misc_RNA (1)...(19): siRNA sense strand
caagacaacugaaugaugu

SEQ ID NO: 2015932 - RNA, 19 nt, Homo sapiens
  misc_RNA (1)...(19): siRNA sense strand
gaagcggaccggauuguuu

SEQ ID NO: 2015933 - RNA, 19 nt, Homo sapiens
  misc_RNA (1)...(19): siRNA sense strand
gaugacuacaggaauauua

SEQ ID NO: 2015934 - RNA, 19 nt, Homo sapiens
  misc_RNA (1)...(19): siRNA sense strand
gagaccaucugcgaguaua

SEQ ID NO: 2015935 - RNA, 19 nt, Homo sapiens
  misc_RNA (1)...(19): siRNA sense strand
gcccugagcuccaauugca

SEQ ID NO: 2015936 - RNA, 19 nt, Homo sapiens
  misc_RNA (1)...(19): siRNA sense strand
cuacagcaccuaucacuug

SEQ ID NO: 2015937 - RNA, 19 nt, Homo sapiens
  misc_RNA (1)...(19): siRNA sense strand
gagaaacaccugcagaagu

SEQ ID NO: 2015938 - RNA, 19 nt, Homo sapiens
  misc_RNA (1)...(19): siRNA sense strand
uugcaguucuccaaugaua

SEQ ID NO: 2015939 - RNA, 19 nt, Homo sapiens
  misc_RNA (1)...(19): siRNA sense strand
gcagcucgaugacuuguac

SEQ ID NO: 2015940 - RNA, 19 nt, Homo sapiens
  misc_RNA (1)...(19): siRNA sense strand
uggcugaggugaucgagaa

SEQ ID NO: 2015941 - RNA, 19 nt, Homo sapiens
  misc_RNA (1)...(19): siRNA sense strand
caagaggaagcgcgaauug

SEQ ID NO: 2015942 - RNA, 19 nt, Homo sapiens
  misc_RNA (1)...(19): siRNA sense strand
gaguauaccugcacuaccu

SEQ ID NO: 2015943 - RNA, 19 nt, Homo sapiens
  misc_RNA (1)...(19): siRNA sense strand
cagcaccuaucacuuguuc

SEQ ID NO: 2015944 - RNA, 19 nt, Homo sapiens
  misc_RNA (1)...(19): siRNA sense strand
gggagaccaucugcgagua

SEQ ID NO: 2015945 - RNA, 19 nt, Homo sapiens
  misc_RNA (1)...(19): siRNA sense strand
cugcagcgcuaccggauga

SEQ ID NO: 2015946 - RNA, 19 nt, Homo sapiens
  misc_RNA (1)...(19): siRNA sense strand
uguauaacauucucgacaa

SEQ ID NO: 2015947 - RNA, 19 nt, Homo sapiens
  misc_RNA (1)...(19): siRNA sense strand
guaaagacgaccgugguuu

SEQ ID NO: 2015948 - RNA, 19 nt, Homo sapiens
  misc_RNA (1)...(19): siRNA sense strand
gcaggaggcucagcaaagc

SEQ ID NO: 2015949 - RNA, 19 nt, Homo sapiens
  misc_RNA (1)...(19): siRNA sense strand
gcaagaggaagcgcgaauu

SEQ ID NO: 2015950 - RNA, 19 nt, Homo sapiens
  misc_RNA (1)...(19): siRNA sense strand
ccucaucccugaccucaag

SEQ ID NO: 2015951 - RNA, 19 nt, Homo sapiens
  misc_RNA (1)...(19): siRNA sense strand
gcaguucuccaaugauauc

SEQ ID NO: 2015952 - RNA, 19 nt, Homo sapiens
  misc_RNA (1)...(19): siRNA sense strand
ucgagaacuuggaguguga

SEQ ID NO: 2015953 - RNA, 19 nt, Homo sapiens
  misc_RNA (1)...(19): siRNA sense strand
ucccugaccucaaguggaa

SEQ ID NO: 2015954 - RNA, 19 nt, Homo sapiens
  misc_RNA (1)...(19): siRNA sense strand
cagagaaacaccugcagaa

SEQ ID NO: 2015955 - RNA, 19 nt, Homo sapiens
  misc_RNA (1)...(19): siRNA sense strand
ccaagacaacugaaugaug

SEQ ID NO: 2015956 - RNA, 19 nt, Homo sapiens
  misc_RNA (1)...(19): siRNA sense strand
acaacugaaugauguaaag

SEQ ID NO: 2015957 - RNA, 19 nt, Homo sapiens
  misc_RNA (1)...(19): siRNA sense strand
gcaggaguuggaaauggua

SEQ ID NO: 2015958 - RNA, 19 nt, Homo sapiens
  misc_RNA (1)...(19): siRNA sense strand
guauaacauucucgacaag

SEQ ID NO: 2015959 - RNA, 19 nt, Homo sapiens
  misc_RNA (1)...(19): siRNA sense strand
ggaggcaggaguuggaaau

SEQ ID NO: 2015960 - RNA, 19 nt, Homo sapiens
  misc_RNA (1)...(19): siRNA sense strand
gcauccaguggguguauaa

SEQ ID NO: 2015961 - RNA, 19 nt, Homo sapiens
  misc_RNA (1)...(19): siRNA sense strand
aacagcagcucgaugacuu

SEQ ID NO: 2015962 - RNA, 19 nt, Homo sapiens
  misc_RNA (1)...(19): siRNA sense strand
gagaugacuacaggaauau

SEQ ID NO: 2015963 - RNA, 19 nt, Homo sapiens
  misc_RNA (1)...(19): siRNA sense strand
gagagacgggagaugacua

SEQ ID NO: 2015964 - RNA, 19 nt, Homo sapiens
  misc_RNA (1)...(19): siRNA sense strand
ggcaggaguuggaaauggu

SEQ ID NO: 2015965 - RNA, 19 nt, Homo sapiens
  misc_RNA (1)...(19): siRNA sense strand
ggagaccaucugcgaguau

SEQ ID NO: 2015966 - RNA, 19 nt, Homo sapiens
  misc_RNA (1)...(19): siRNA sense strand
gagaggaugccguugugau

SEQ ID NO: 2015967 - RNA, 19 nt, Homo sapiens
  misc_RNA (1)...(19): siRNA sense strand
cucgaugacuuguacuuga

SEQ ID NO: 2015968 - RNA, 19 nt, Homo sapiens
  misc_RNA (1)...(19): siRNA sense strand
gagcuccaauugcaguucu

SEQ ID NO: 2015969 - RNA, 19 nt, Homo sapiens
  misc_RNA (1)...(19): siRNA sense strand
caacugaaugauguaaaga

SEQ ID NO: 2015970 - RNA, 19 nt, Homo sapiens
  misc_RNA (1)...(19): siRNA sense strand
ugcacuaccugcccuccua

SEQ ID NO: 2015971 - RNA, 19 nt, Homo sapiens
  misc_RNA (1)...(19): siRNA sense strand
ccaguggguguauaacauu

SEQ ID NO: 2015972 - RNA, 19 nt, Homo sapiens
  misc_RNA (1)...(19): siRNA sense strand
uggagaagacgccauuuca

SEQ ID NO: 2015973 - RNA, 19 nt, Homo sapiens
  misc_RNA (1)...(19): siRNA sense strand
agaggaagcgcgaauugga

SEQ ID NO: 2015974 - RNA, 19 nt, Homo sapiens
  misc_RNA (1)...(19): siRNA sense strand
ggagaagacgccauuucag

SEQ ID NO: 2015975 - RNA, 19 nt, Homo sapiens
  misc_RNA (1)...(19): siRNA sense strand
ggaaaaggaggcaggaguu

SEQ ID NO: 2015976 - RNA, 19 nt, Homo sapiens
  misc_RNA (1)...(19): siRNA sense strand
guucuccaaugauaucuac

SEQ ID NO: 2015977 - RNA, 19 nt, Homo sapiens
  misc_RNA (1)...(19): siRNA sense strand
gacaacugaaugauguaaa

SEQ ID NO: 2015978 - RNA, 19 nt, Homo sapiens
  misc_RNA (1)...(19): siRNA sense strand
uggagaggaugccguugug

SEQ ID NO: 2015979 - RNA, 19 nt, Homo sapiens
  misc_RNA (1)...(19): siRNA sense strand
ucgaugacuuguacuugau

SEQ ID NO: 2015980 - RNA, 19 nt, Homo sapiens
  misc_RNA (1)...(19): siRNA sense strand
aaaggaggcaggaguugga

SEQ ID NO: 2015981 - RNA, 19 nt, Homo sapiens
  misc_RNA (1)...(19): siRNA sense strand
gaaccaacagcagcucgau

SEQ ID NO: 2015982 - RNA, 19 nt, Homo sapiens
  misc_RNA (1)...(19): siRNA sense strand
gaucgagaacuuggagugu

SEQ ID NO: 2015983 - RNA, 19 nt, Homo sapiens
  misc_RNA (1)...(19): siRNA sense strand
gcucgaugacuuguacuug

SEQ ID NO: 2015984 - RNA, 19 nt, Homo sapiens
  misc_RNA (1)...(19): siRNA sense strand
ggagaggaugccguuguga

SEQ ID NO: 2015985 - RNA, 19 nt, Homo sapiens
  misc_RNA (1)...(19): siRNA sense strand
cugaggugaucgagaacuu

SEQ ID NO: 2015986 - RNA, 19 nt, Homo sapiens
  misc_RNA (1)...(19): siRNA sense strand
guugugauccuggagaaga

SEQ ID NO: 2015987 - RNA, 19 nt, Homo sapiens
  misc_RNA (1)...(19): siRNA sense strand
uacagcaccuaucacuugu

SEQ ID NO: 2015988 - RNA, 19 nt, Homo sapiens
  misc_RNA (1)...(19): siRNA sense strand
uaucacuuguucccuccaa

SEQ ID NO: 2015989 - RNA, 19 nt, Homo sapiens
  misc_RNA (1)...(19): siRNA sense strand
uccaguggguguauaacau

SEQ ID NO: 2015990 - RNA, 19 nt, Homo sapiens
  misc_RNA (1)...(19): siRNA sense strand
agacaacugaaugauguaa

SEQ ID NO: 2015991 - RNA, 19 nt, Homo sapiens
  misc_RNA (1)...(19): siRNA sense strand
gggagaugacuacaggaau

SEQ ID NO: 2015992 - RNA, 19 nt, Homo sapiens
  misc_RNA (1)...(19): siRNA sense strand
caguggguguauaacauuc

SEQ ID NO: 2015993 - RNA, 19 nt, Homo sapiens
  misc_RNA (1)...(19): siRNA sense strand
acaggaauauuacuuuacc

SEQ ID NO: 2015994 - RNA, 19 nt, Homo sapiens
  misc_RNA (1)...(19): siRNA sense strand
gacuacaggaauauuacuu

SEQ ID NO: 2015995 - RNA, 19 nt, Homo sapiens
  misc_RNA (1)...(19): siRNA sense strand
accaacagcagcucgauga

SEQ ID NO: 2015996 - RNA, 19 nt, Homo sapiens
  misc_RNA (1)...(19): siRNA sense strand
gaaaaggaggcaggaguug

SEQ ID NO: 2015997 - RNA, 19 nt, Homo sapiens
  misc_RNA (1)...(19): siRNA sense strand
gaaauugccuugucauaga

SEQ ID NO: 2015998 - RNA, 19 nt, Homo sapiens
  misc_RNA (1)...(19): siRNA sense strand
gcagaacacaccaggauua

SEQ ID NO: 2015999 - RNA, 19 nt, Homo sapiens
  misc_RNA (1)...(19): siRNA sense strand
gauaagagacuuugcuaaa

SEQ ID NO: 2016000 - RNA, 19 nt, Homo sapiens
  misc_RNA (1)...(19): siRNA sense strand
ggaaagaaucaaaguauga

SEQ ID NO: 2016001 - RNA, 19 nt, Homo sapiens
  misc_RNA (1)...(19): siRNA sense strand
gaagagaaauucggaacau

SEQ ID NO: 2016002 - RNA, 19 nt, Homo sapiens
  misc_RNA (1)...(19): siRNA sense strand
ugaaaugucugaccuuuua

SEQ ID NO: 2016003 - RNA, 19 nt, Homo sapiens
  misc_RNA (1)...(19): siRNA sense strand
cagcagaauucuuugauga

SEQ ID NO: 2016004 - RNA, 19 nt, Homo sapiens
  misc_RNA (1)...(19): siRNA sense strand
ggaaacuucaggauaauuu

SEQ ID NO: 2016005 - RNA, 19 nt, Homo sapiens
  misc_RNA (1)...(19): siRNA sense strand
caacauauggugcaauuau

SEQ ID NO: 2016006 - RNA, 19 nt, Homo sapiens
  misc_RNA (1)...(19): siRNA sense strand
cacggaaacuucaggauaa

SEQ ID NO: 2016007 - RNA, 19 nt, Homo sapiens
  misc_RNA (1)...(19): siRNA sense strand
ggaaagagacaaugcaauc

SEQ ID NO: 2016008 - RNA, 19 nt, Homo sapiens
  misc_RNA (1)...(19): siRNA sense strand
agaagaagcuccucaugau

SEQ ID NO: 2016009 - RNA, 19 nt, Homo sapiens
  misc_RNA (1)...(19): siRNA sense strand
cagcaaagcagcagaauuc

SEQ ID NO: 2016010 - RNA, 19 nt, Homo sapiens
  misc_RNA (1)...(19): siRNA sense strand
gagaaauugccuugucaua

SEQ ID NO: 2016011 - RNA, 19 nt, Homo sapiens
  misc_RNA (1)...(19): siRNA sense strand
gaaacuucauccacggaaa

SEQ ID NO: 2016012 - RNA, 19 nt, Homo sapiens
  misc_RNA (1)...(19): siRNA sense strand
gaagaagcuccucaugauu

SEQ ID NO: 2016013 - RNA, 19 nt, Homo sapiens
  misc_RNA (1)...(19): siRNA sense strand
ggacuggcuuucucgaaga

SEQ ID NO: 2016014 - RNA, 19 nt, Homo sapiens
  misc_RNA (1)...(19): siRNA sense strand
ccacggaaacuucaggaua

SEQ ID NO: 2016015 - RNA, 19 nt, Homo sapiens
  misc_RNA (1)...(19): siRNA sense strand
agauugaacuugcccauug

SEQ ID NO: 2016016 - RNA, 19 nt, Homo sapiens
  misc_RNA (1)...(19): siRNA sense strand
gaccauaaugcuauaauga

SEQ ID NO: 2016017 - RNA, 19 nt, Homo sapiens
  misc_RNA (1)...(19): siRNA sense strand
gcagcagaauucuuugaug

SEQ ID NO: 2016018 - RNA, 19 nt, Homo sapiens
  misc_RNA (1)...(19): siRNA sense strand
aaagcugucuucagucauu

SEQ ID NO: 2016019 - RNA, 19 nt, Homo sapiens
  misc_RNA (1)...(19): siRNA sense strand
uuacuuggauuucuacaug

SEQ ID NO: 2016020 - RNA, 19 nt, Homo sapiens
  misc_RNA (1)...(19): siRNA sense strand
cuaaagcugucuucaguca

SEQ ID NO: 2016021 - RNA, 19 nt, Homo sapiens
  misc_RNA (1)...(19): siRNA sense strand
gugcaauuauucuugauga

SEQ ID NO: 2016022 - RNA, 19 nt, Homo sapiens
  misc_RNA (1)...(19): siRNA sense strand
gagaaauucggaacauuga

SEQ ID NO: 2016023 - RNA, 19 nt, Homo sapiens
  misc_RNA (1)...(19): siRNA sense strand
gaucucugcagccgauuua

SEQ ID NO: 2016024 - RNA, 19 nt, Homo sapiens
  misc_RNA (1)...(19): siRNA sense strand
gcagaauucuuugaugaag

SEQ ID NO: 2016025 - RNA, 19 nt, Homo sapiens
  misc_RNA (1)...(19): siRNA sense strand
gaagaccaguugcuagaac

SEQ ID NO: 2016026 - RNA, 19 nt, Homo sapiens
  misc_RNA (1)...(19): siRNA sense strand
ggacagcccguggcaugua

SEQ ID NO: 2016027 - RNA, 19 nt, Homo sapiens
  misc_RNA (1)...(19): siRNA sense strand
gcaauuauucuugaugaga

SEQ ID NO: 2016028 - RNA, 19 nt, Homo sapiens
  misc_RNA (1)...(19): siRNA sense strand
gacagcccguggcauguaa

SEQ ID NO: 2016029 - RNA, 19 nt, Homo sapiens
  misc_RNA (1)...(19): siRNA sense strand
guaucaagauucaccuaau

SEQ ID NO: 2016030 - RNA, 19 nt, Homo sapiens
  misc_RNA (1)...(19): siRNA sense strand
ggauaagagacuuugcuaa

SEQ ID NO: 2016031 - RNA, 19 nt, Homo sapiens
  misc_RNA (1)...(19): siRNA sense strand
gaugaagugugaaaagaaa

SEQ ID NO: 2016032 - RNA, 19 nt, Homo sapiens
  misc_RNA (1)...(19): siRNA sense strand
cagcaaaagccauauaaua

SEQ ID NO: 2016033 - RNA, 19 nt, Homo sapiens
  misc_RNA (1)...(19): siRNA sense strand
aaaugggaguaccaacaua

SEQ ID NO: 2016034 - RNA, 19 nt, Homo sapiens
  misc_RNA (1)...(19): siRNA sense strand
gaaauucggaacauugagu

SEQ ID NO: 2016035 - RNA, 19 nt, Homo sapiens
  misc_RNA (1)...(19): siRNA sense strand
gcaaagcagcagaauucuu

SEQ ID NO: 2016036 - RNA, 19 nt, Homo sapiens
  misc_RNA (1)...(19): siRNA sense strand
guauaugacuugccuagcu

SEQ ID NO: 2016037 - RNA, 19 nt, Homo sapiens
  misc_RNA (1)...(19): siRNA sense strand
gaacacaccaggauuaccu

SEQ ID NO: 2016038 - RNA, 19 nt, Homo sapiens
  misc_RNA (1)...(19): siRNA sense strand
aagaagaagcuccucauga

SEQ ID NO: 2016039 - RNA, 19 nt, Homo sapiens
  misc_RNA (1)...(19): siRNA sense strand
agaauucuuugaugaagug

SEQ ID NO: 2016040 - RNA, 19 nt, Homo sapiens
  misc_RNA (1)...(19): siRNA sense strand
aagaagcuccucaugauug

SEQ ID NO: 2016041 - RNA, 19 nt, Homo sapiens
  misc_RNA (1)...(19): siRNA sense strand
gggauaagagacuuugcua

SEQ ID NO: 2016042 - RNA, 19 nt, Homo sapiens
  misc_RNA (1)...(19): siRNA sense strand
ugaccauaaugcuauaaug

SEQ ID NO: 2016043 - RNA, 19 nt, Homo sapiens
  misc_RNA (1)...(19): siRNA sense strand
gcagaaaacaguaucaaga

SEQ ID NO: 2016044 - RNA, 19 nt, Homo sapiens
  misc_RNA (1)...(19): siRNA sense strand
gaggaaagagacaaugcaa

SEQ ID NO: 2016045 - RNA, 19 nt, Homo sapiens
  misc_RNA (1)...(19): siRNA sense strand
gaacuugcccauugguuuu

SEQ ID NO: 2016046 - RNA, 19 nt, Homo sapiens
  misc_RNA (1)...(19): siRNA sense strand
gaggggaaauggcagaaaa

SEQ ID NO: 2016047 - RNA, 19 nt, Homo sapiens
  misc_RNA (1)...(19): siRNA sense strand
gaaagaaucaaaguaugag

SEQ ID NO: 2016048 - RNA, 19 nt, Homo sapiens
  misc_RNA (1)...(19): siRNA sense strand
ucugaaaugucugaccuuu

SEQ ID NO: 2016049 - RNA, 19 nt, Homo sapiens
  misc_RNA (1)...(19): siRNA sense strand
aaauugccuugucauagaa

SEQ ID NO: 2016050 - RNA, 19 nt, Homo sapiens
  misc_RNA (1)...(19): siRNA sense strand
ucucgaagauuuggcgauu

SEQ ID NO: 2016051 - RNA, 19 nt, Homo sapiens
  misc_RNA (1)...(19): siRNA sense strand
ugaacuugcccauugguuu

SEQ ID NO: 2016052 - RNA, 19 nt, Homo sapiens
  misc_RNA (1)...(19): siRNA sense strand
gaaaacaguaucaagauuc

SEQ ID NO: 2016053 - RNA, 19 nt, Homo sapiens
  misc_RNA (1)...(19): siRNA sense strand
agacagugacaauggauuu

SEQ ID NO: 2016054 - RNA, 19 nt, Homo sapiens
  misc_RNA (1)...(19): siRNA sense strand
agagaaauucggaacauug

SEQ ID NO: 2016055 - RNA, 19 nt, Homo sapiens
  misc_RNA (1)...(19): siRNA sense strand
gugaagaccaguugcuaga

SEQ ID NO: 2016056 - RNA, 19 nt, Homo sapiens
  misc_RNA (1)...(19): siRNA sense strand
ggauuuuccucaacuggua

SEQ ID NO: 2016057 - RNA, 19 nt, Homo sapiens
  misc_RNA (1)...(19): siRNA sense strand
ucgaaucaaugaccagcuu

SEQ ID NO: 2016058 - RNA, 19 nt, Homo sapiens
  misc_RNA (1)...(19): siRNA sense strand
cagaugcuguauaugacuu

SEQ ID NO: 2016059 - RNA, 19 nt, Homo sapiens
  misc_RNA (1)...(19): siRNA sense strand
aggaaagaaucaaaguaug

SEQ ID NO: 2016060 - RNA, 19 nt, Homo sapiens
  misc_RNA (1)...(19): siRNA sense strand
aagagaaauucggaacauu

SEQ ID NO: 2016061 - RNA, 19 nt, Homo sapiens
  misc_RNA (1)...(19): siRNA sense strand
ugcuaaagcugucuucagu

SEQ ID NO: 2016062 - RNA, 19 nt, Homo sapiens
  misc_RNA (1)...(19): siRNA sense strand
gaaaaucuuggaccuuuga

SEQ ID NO: 2016063 - RNA, 19 nt, Homo sapiens
  misc_RNA (1)...(19): siRNA sense strand
ggaaauggcagaaaacagu

SEQ ID NO: 2016064 - RNA, 19 nt, Homo sapiens
  misc_RNA (1)...(19): siRNA sense strand
gcucguuuguacaucauuc

SEQ ID NO: 2016065 - RNA, 19 nt, Homo sapiens
  misc_RNA (1)...(19): siRNA sense strand
gauugaacuugcccauugg

SEQ ID NO: 2016066 - RNA, 19 nt, Homo sapiens
  misc_RNA (1)...(19): siRNA sense strand
cuucagucauuguccguuu

SEQ ID NO: 2016067 - RNA, 19 nt, Homo sapiens
  misc_RNA (1)...(19): siRNA sense strand
guuugaccauaaugcuaua

SEQ ID NO: 2016068 - RNA, 19 nt, Homo sapiens
  misc_RNA (1)...(19): siRNA sense strand
ccacagucagcaguuauuu

SEQ ID NO: 2016069 - RNA, 19 nt, Homo sapiens
  misc_RNA (1)...(19): siRNA sense strand
uugagugguucucuauuga

SEQ ID NO: 2016070 - RNA, 19 nt, Homo sapiens
  misc_RNA (1)...(19): siRNA sense strand
ccagcuugcucguuuguac

SEQ ID NO: 2016071 - RNA, 19 nt, Homo sapiens
  misc_RNA (1)...(19): siRNA sense strand
acaccaggauuaccucagu

SEQ ID NO: 2016072 - RNA, 19 nt, Homo sapiens
  misc_RNA (1)...(19): siRNA sense strand
cagaauucuuugaugaagu

SEQ ID NO: 2016073 - RNA, 19 nt, Homo sapiens
  misc_RNA (1)...(19): siRNA sense strand
ccgccacagucagcaguua

SEQ ID NO: 2016074 - RNA, 19 nt, Homo sapiens
  misc_RNA (1)...(19): siRNA sense strand
ccaaauuccgccacaguca

SEQ ID NO: 2016075 - RNA, 19 nt, Homo sapiens
  misc_RNA (1)...(19): siRNA sense strand
ggccauucccuuuaucaga

SEQ ID NO: 2016076 - RNA, 19 nt, Homo sapiens
  misc_RNA (1)...(19): siRNA sense strand
gaugaauggaaggaauaua

SEQ ID NO: 2016077 - RNA, 19 nt, Homo sapiens
  misc_RNA (1)...(19): siRNA sense strand
ccaaacggguggagauucc

SEQ ID NO: 2016078 - RNA, 19 nt, Homo sapiens
  misc_RNA (1)...(19): siRNA sense strand
uuaccucagugugggauaa

SEQ ID NO: 2016079 - RNA, 19 nt, Homo sapiens
  misc_RNA (1)...(19): siRNA sense strand
aaaauugagucgaaccaaa

SEQ ID NO: 2016080 - RNA, 19 nt, Homo sapiens
  misc_RNA (1)...(19): siRNA sense strand
gacaauggauuuuccucaa

SEQ ID NO: 2016081 - RNA, 19 nt, Homo sapiens
  misc_RNA (1)...(19): siRNA sense strand
augaccagcuugcucguuu

SEQ ID NO: 2016082 - RNA, 19 nt, Homo sapiens
  misc_RNA (1)...(19): siRNA sense strand
gaccaaacggguggagauu

SEQ ID NO: 2016083 - RNA, 19 nt, Homo sapiens
  misc_RNA (1)...(19): siRNA sense strand
agaagcuccucaugauugu

SEQ ID NO: 2016084 - RNA, 19 nt, Homo sapiens
  misc_RNA (1)...(19): siRNA sense strand
uaaagaagaagcuccucau

SEQ ID NO: 2016085 - RNA, 19 nt, Homo sapiens
  misc_RNA (1)...(19): siRNA sense strand
auugagugguucucuauug

SEQ ID NO: 2016086 - RNA, 19 nt, Homo sapiens
  misc_RNA (1)...(19): siRNA sense strand
ugagacacuugaaaaugua

SEQ ID NO: 2016087 - RNA, 19 nt, Homo sapiens
  misc_RNA (1)...(19): siRNA sense strand
gaaauggcagaaaacagua

SEQ ID NO: 2016088 - RNA, 19 nt, Homo sapiens
  misc_RNA (1)...(19): siRNA sense strand
aaauugagucgaaccaaau

SEQ ID NO: 2016089 - RNA, 19 nt, Homo sapiens
  misc_RNA (1)...(19): siRNA sense strand
agaaauugccuugucauag

SEQ ID NO: 2016090 - RNA, 19 nt, Homo sapiens
  misc_RNA (1)...(19): siRNA sense strand
uggaugaauggaaggaaua

SEQ ID NO: 2016091 - RNA, 19 nt, Homo sapiens
  misc_RNA (1)...(19): siRNA sense strand
gacaaugcaauccgagugu

SEQ ID NO: 2016092 - RNA, 19 nt, Homo sapiens
  misc_RNA (1)...(19): siRNA sense strand
auucuuugaugaaguguga

SEQ ID NO: 2016093 - RNA, 19 nt, Homo sapiens
  misc_RNA (1)...(19): siRNA sense strand
uuaagggacuggcuuucuc

SEQ ID NO: 2016094 - RNA, 19 nt, Homo sapiens
  misc_RNA (1)...(19): siRNA sense strand
uuauggccauucccuuuau

SEQ ID NO: 2016095 - RNA, 19 nt, Homo sapiens
  misc_RNA (1)...(19): siRNA sense strand
ccauuaagggacuggcuuu

SEQ ID NO: 2016096 - RNA, 19 nt, Homo sapiens
  misc_RNA (1)...(19): siRNA sense strand
uugccuagcuccagugaag

SEQ ID NO: 2016097 - RNA, 19 nt, Homo sapiens
  misc_RNA (1)...(19): siRNA sense strand
gaaacaggcuuccagcuuu

SEQ ID NO: 2016098 - RNA, 19 nt, Homo sapiens
  misc_RNA (1)...(19): siRNA sense strand
acacauagaccacacauuu

SEQ ID NO: 2016099 - RNA, 19 nt, Homo sapiens
  misc_RNA (1)...(19): siRNA sense strand
gcagagaaacacauaaaga

SEQ ID NO: 2016100 - RNA, 19 nt, Homo sapiens
  misc_RNA (1)...(19): siRNA sense strand
ucacugacguugacuacuu

SEQ ID NO: 2016101 - RNA, 19 nt, Homo sapiens
  misc_RNA (1)...(19): siRNA sense strand
gccaauacaucgucucugu

SEQ ID NO: 2016102 - RNA, 19 nt, Homo sapiens
  misc_RNA (1)...(19): siRNA sense strand
gaaagugggaggagaagau

SEQ ID NO: 2016103 - RNA, 19 nt, Homo sapiens
  misc_RNA (1)...(19): siRNA sense strand
ccucagaucuacccacaga

SEQ ID NO: 2016104 - RNA, 19 nt, Homo sapiens
  misc_RNA (1)...(19): siRNA sense strand
auaaagagcucagugaaca

SEQ ID NO: 2016105 - RNA, 19 nt, Homo sapiens
  misc_RNA (1)...(19): siRNA sense strand
gguguucccuguaggauuc

SEQ ID NO: 2016106 - RNA, 19 nt, Homo sapiens
  misc_RNA (1)...(19): siRNA sense strand
ggaguggccucugguuaug

SEQ ID NO: 2016107 - RNA, 19 nt, Homo sapiens
  misc_RNA (1)...(19): siRNA sense strand
gcagaaagugggaggagaa

SEQ ID NO: 2016108 - RNA, 19 nt, Homo sapiens
  misc_RNA (1)...(19): siRNA sense strand
gggcagagaaacacauaaa

SEQ ID NO: 2016109 - RNA, 19 nt, Homo sapiens
  misc_RNA (1)...(19): siRNA sense strand
gguacaggcugcgcagaaa

SEQ ID NO: 2016110 - RNA, 19 nt, Homo sapiens
  misc_RNA (1)...(19): siRNA sense strand
aaacaggcuuccagcuuug

SEQ ID NO: 2016111 - RNA, 19 nt, Homo sapiens
  misc_RNA (1)...(19): siRNA sense strand
gaacgggagcgcagagcuu

SEQ ID NO: 2016112 - RNA, 19 nt, Homo sapiens
  misc_RNA (1)...(19): siRNA sense strand
ccugugaccucagugauga

SEQ ID NO: 2016113 - RNA, 19 nt, Homo sapiens
  misc_RNA (1)...(19): siRNA sense strand
gagggcagagaaacacaua

SEQ ID NO: 2016114 - RNA, 19 nt, Homo sapiens
  misc_RNA (1)...(19): siRNA sense strand
caauacaucgucucuguuc

SEQ ID NO: 2016115 - RNA, 19 nt, Homo sapiens
  misc_RNA (1)...(19): siRNA sense strand
ccacacaccugagaaacag

SEQ ID NO: 2016116 - RNA, 19 nt, Homo sapiens
  misc_RNA (1)...(19): siRNA sense strand
gucauucccugccagaguu

SEQ ID NO: 2016117 - RNA, 19 nt, Homo sapiens
  misc_RNA (1)...(19): siRNA sense strand
ugucaccucucaccauaga

SEQ ID NO: 2016118 - RNA, 19 nt, Homo sapiens
  misc_RNA (1)...(19): siRNA sense strand
ugaccucagugaugacaug

SEQ ID NO: 2016119 - RNA, 19 nt, Homo sapiens
  misc_RNA (1)...(19): siRNA sense strand
acauagaccacacauuuga

SEQ ID NO: 2016120 - RNA, 19 nt, Homo sapiens
  misc_RNA (1)...(19): siRNA sense strand
gcaccgaccaggaccacuu

SEQ ID NO: 2016121 - RNA, 19 nt, Homo sapiens
  misc_RNA (1)...(19): siRNA sense strand
ggucuccuuuggccuauuc

SEQ ID NO: 2016122 - RNA, 19 nt, Homo sapiens
  misc_RNA (1)...(19): siRNA sense strand
ucauucagcucuucaaagc

SEQ ID NO: 2016123 - RNA, 19 nt, Homo sapiens
  misc_RNA (1)...(19): siRNA sense strand
gaacacauagaccacacau

SEQ ID NO: 2016124 - RNA, 19 nt, Homo sapiens
  misc_RNA (1)...(19): siRNA sense strand
cagagaaacacauaaagag

SEQ ID NO: 2016125 - RNA, 19 nt, Homo sapiens
  misc_RNA (1)...(19): siRNA sense strand
agagccaccuguuccagaa

SEQ ID NO: 2016126 - RNA, 19 nt, Homo sapiens
  misc_RNA (1)...(19): siRNA sense strand
agaaacaggcuuccagcuu

SEQ ID NO: 2016127 - RNA, 19 nt, Homo sapiens
  misc_RNA (1)...(19): siRNA sense strand
gcaugucggccuucacuag

SEQ ID NO: 2016128 - RNA, 19 nt, Homo sapiens
  misc_RNA (1)...(19): siRNA sense strand
caggggaucuggaguuuga

SEQ ID NO: 2016129 - RNA, 19 nt, Homo sapiens
  misc_RNA (1)...(19): siRNA sense strand
gcagcaagugggcgacuau

SEQ ID NO: 2016130 - RNA, 19 nt, Homo sapiens
  misc_RNA (1)...(19): siRNA sense strand
caaaagcccuguccugaac

SEQ ID NO: 2016131 - RNA, 19 nt, Homo sapiens
  misc_RNA (1)...(19): siRNA sense strand
cauuugagauccaguacag

SEQ ID NO: 2016132 - RNA, 19 nt, Homo sapiens
  misc_RNA (1)...(19): siRNA sense strand
ggccagcucggucuccuuu

SEQ ID NO: 2016133 - RNA, 19 nt, Homo sapiens
  misc_RNA (1)...(19): siRNA sense strand
caaguggagcccagagguu

SEQ ID NO: 2016134 - RNA, 19 nt, Homo sapiens
  misc_RNA (1)...(19): siRNA sense strand
gaaccuagaccaggcuuuu

SEQ ID NO: 2016135 - RNA, 19 nt, Homo sapiens
  misc_RNA (1)...(19): siRNA sense strand
gagauccaguacaggaaag

SEQ ID NO: 2016136 - RNA, 19 nt, Homo sapiens
  misc_RNA (1)...(19): siRNA sense strand
gcgcugggaaacaaugaaa

SEQ ID NO: 2016137 - RNA, 19 nt, Homo sapiens
  misc_RNA (1)...(19): siRNA sense strand
caaggagggcagagaaaca

SEQ ID NO: 2016138 - RNA, 19 nt, Homo sapiens
  misc_RNA (1)...(19): siRNA sense strand
cccaggagaugugucauuc

SEQ ID NO: 2016139 - RNA, 19 nt, Homo sapiens
  misc_RNA (1)...(19): siRNA sense strand
ccaaggauggagacagcua

SEQ ID NO: 2016140 - RNA, 19 nt, Homo sapiens
  misc_RNA (1)...(19): siRNA sense strand
ugacguugacuacuucuca

SEQ ID NO: 2016141 - RNA, 19 nt, Homo sapiens
  misc_RNA (1)...(19): siRNA sense strand
cagcaagagccaccuguuc

SEQ ID NO: 2016142 - RNA, 19 nt, Homo sapiens
  misc_RNA (1)...(19): siRNA sense strand
aaugcgauacgaacacaua

SEQ ID NO: 2016143 - RNA, 19 nt, Homo sapiens
  misc_RNA (1)...(19): siRNA sense strand
cacauaaagagcucaguga

SEQ ID NO: 2016144 - RNA, 19 nt, Homo sapiens
  misc_RNA (1)...(19): siRNA sense strand
aguuugagguggucuacaa

SEQ ID NO: 2016145 - RNA, 19 nt, Homo sapiens
  misc_RNA (1)...(19): siRNA sense strand
ccagcucggucuccuuugg

SEQ ID NO: 2016146 - RNA, 19 nt, Homo sapiens
  misc_RNA (1)...(19): siRNA sense strand
agaccgagacccuccagaa

SEQ ID NO: 2016147 - RNA, 19 nt, Homo sapiens
  misc_RNA (1)...(19): siRNA sense strand
acacauuugagauccagua

SEQ ID NO: 2016148 - RNA, 19 nt, Homo sapiens
  misc_RNA (1)...(19): siRNA sense strand
ccugggaggugaggaagga

SEQ ID NO: 2016149 - RNA, 19 nt, Homo sapiens
  misc_RNA (1)...(19): siRNA sense strand
gacuccagcugccucagau

SEQ ID NO: 2016150 - RNA, 19 nt, Homo sapiens
  misc_RNA (1)...(19): siRNA sense strand
cacauagaccacacauuug

SEQ ID NO: 2016151 - RNA, 19 nt, Homo sapiens
  misc_RNA (1)...(19): siRNA sense strand
gcccaggagaugugucauu

SEQ ID NO: 2016152 - RNA, 19 nt, Homo sapiens
  misc_RNA (1)...(19): siRNA sense strand
gcaagagccaccuguucca

SEQ ID NO: 2016153 - RNA, 19 nt, Homo sapiens
  misc_RNA (1)...(19): siRNA sense strand
ugagauccaguacaggaaa

SEQ ID NO: 2016154 - RNA, 19 nt, Homo sapiens
  misc_RNA (1)...(19): siRNA sense strand
gccaaggagggcagagaaa

SEQ ID NO: 2016155 - RNA, 19 nt, Homo sapiens
  misc_RNA (1)...(19): siRNA sense strand
guccugagaucaagaaccu

SEQ ID NO: 2016156 - RNA, 19 nt, Homo sapiens
  misc_RNA (1)...(19): siRNA sense strand
uggaguggccucugguuau

SEQ ID NO: 2016157 - RNA, 19 nt, Homo sapiens
  misc_RNA (1)...(19): siRNA sense strand
cgacuacaccagccacauc

SEQ ID NO: 2016158 - RNA, 19 nt, Homo sapiens
  misc_RNA (1)...(19): siRNA sense strand
ggguacaggcugcgcagaa

SEQ ID NO: 2016159 - RNA, 19 nt, Homo sapiens
  misc_RNA (1)...(19): siRNA sense strand
ccacguggaaggacagcaa

SEQ ID NO: 2016160 - RNA, 19 nt, Homo sapiens
  misc_RNA (1)...(19): siRNA sense strand
acauaaagagcucagugaa

SEQ ID NO: 2016161 - RNA, 19 nt, Homo sapiens
  misc_RNA (1)...(19): siRNA sense strand
ccuuuggccuauucuacaa

SEQ ID NO: 2016162 - RNA, 19 nt, Homo sapiens
  misc_RNA (1)...(19): siRNA sense strand
ccaauacaucgucucuguu

SEQ ID NO: 2016163 - RNA, 19 nt, Homo sapiens
  misc_RNA (1)...(19): siRNA sense strand
cagccauccuccucuccaa

SEQ ID NO: 2016164 - RNA, 19 nt, Homo sapiens
  misc_RNA (1)...(19): siRNA sense strand
gcuuccagcuuugacuuca

SEQ ID NO: 2016165 - RNA, 19 nt, Homo sapiens
  misc_RNA (1)...(19): siRNA sense strand
gacguugacuacuucucau

SEQ ID NO: 2016166 - RNA, 19 nt, Homo sapiens
  misc_RNA (1)...(19): siRNA sense strand
uggagccaguguccuguga

SEQ ID NO: 2016167 - RNA, 19 nt, Homo sapiens
  misc_RNA (1)...(19): siRNA sense strand
caacgugaccaaggaugga

SEQ ID NO: 2016168 - RNA, 19 nt, Homo sapiens
  misc_RNA (1)...(19): siRNA sense strand
ccgcuucuguggcaucuac

SEQ ID NO: 2016169 - RNA, 19 nt, Homo sapiens
  misc_RNA (1)...(19): siRNA sense strand
cugcagaccugguauucac

SEQ ID NO: 2016170 - RNA, 19 nt, Homo sapiens
  misc_RNA (1)...(19): siRNA sense strand
ugacuacuucucauuccaa

SEQ ID NO: 2016171 - RNA, 19 nt, Homo sapiens
  misc_RNA (1)...(19): siRNA sense strand
cggcucaccgucacucuga

SEQ ID NO: 2016172 - RNA, 19 nt, Homo sapiens
  misc_RNA (1)...(19): siRNA sense strand
cauaaagagcucagugaac

SEQ ID NO: 2016173 - RNA, 19 nt, Homo sapiens
  misc_RNA (1)...(19): siRNA sense strand
gacuacaccagccacauca

SEQ ID NO: 2016174 - RNA, 19 nt, Homo sapiens
  misc_RNA (1)...(19): siRNA sense strand
agucggugcugccuaugug

SEQ ID NO: 2016175 - RNA, 19 nt, Homo sapiens
  misc_RNA (1)...(19): siRNA sense strand
gcucagugaacauccagau

SEQ ID NO: 2016176 - RNA, 19 nt, Homo sapiens
  misc_RNA (1)...(19): siRNA sense strand
guucagaaacuaccucuua

SEQ ID NO: 2016177 - RNA, 19 nt, Homo sapiens
  misc_RNA (1)...(19): siRNA sense strand
gagcaugacugacaucuac

SEQ ID NO: 2016178 - RNA, 19 nt, Homo sapiens
  misc_RNA (1)...(19): siRNA sense strand
gccaaacgcuucugcaaau

SEQ ID NO: 2016179 - RNA, 19 nt, Homo sapiens
  misc_RNA (1)...(19): siRNA sense strand
gaagaauuuccagacauua

SEQ ID NO: 2016180 - RNA, 19 nt, Homo sapiens
  misc_RNA (1)...(19): siRNA sense strand
ugacagggcucuauuuuau

SEQ ID NO: 2016181 - RNA, 19 nt, Homo sapiens
  misc_RNA (1)...(19): siRNA sense strand
ucaccaucaugauuguuua

SEQ ID NO: 2016182 - RNA, 19 nt, Homo sapiens
  misc_RNA (1)...(19): siRNA sense strand
ucacugguguucaucuuug

SEQ ID NO: 2016183 - RNA, 19 nt, Homo sapiens
  misc_RNA (1)...(19): siRNA sense strand
cagugggacuuuggaaaua

SEQ ID NO: 2016184 - RNA, 19 nt, Homo sapiens
  misc_RNA (1)...(19): siRNA sense strand
ucuggaaucuucuucauca

SEQ ID NO: 2016185 - RNA, 19 nt, Homo sapiens
  misc_RNA (1)...(19): siRNA sense strand
aggcuuaucuucaccauca

SEQ ID NO: 2016186 - RNA, 19 nt, Homo sapiens
  misc_RNA (1)...(19): siRNA sense strand
guaccuggcugucguccau

SEQ ID NO: 2016187 - RNA, 19 nt, Homo sapiens
  misc_RNA (1)...(19): siRNA sense strand
uaucaagugucaaguccaa

SEQ ID NO: 2016188 - RNA, 19 nt, Homo sapiens
  misc_RNA (1)...(19): siRNA sense strand
ugucguccaugcuguguuu

SEQ ID NO: 2016189 - RNA, 19 nt, Homo sapiens
  misc_RNA (1)...(19): siRNA sense strand
caguaucaauucuggaaga

SEQ ID NO: 2016190 - RNA, 19 nt, Homo sapiens
  misc_RNA (1)...(19): siRNA sense strand
caucaucuaugccuuuguc

SEQ ID NO: 2016191 - RNA, 19 nt, Homo sapiens
  misc_RNA (1)...(19): siRNA sense strand
ucuuuggccugaauaauug

SEQ ID NO: 2016192 - RNA, 19 nt, Homo sapiens
  misc_RNA (1)...(19): siRNA sense strand
cuucuucucuggaaucuuc

SEQ ID NO: 2016193 - RNA, 19 nt, Homo sapiens
  misc_RNA (1)...(19): siRNA sense strand
ugucaaguccaaucuauga

SEQ ID NO: 2016194 - RNA, 19 nt, Homo sapiens
  misc_RNA (1)...(19): siRNA sense strand
ccaggacggucaccuuugg

SEQ ID NO: 2016195 - RNA, 19 nt, Homo sapiens
  misc_RNA (1)...(19): siRNA sense strand
gcugugaggcuuaucuuca

SEQ ID NO: 2016196 - RNA, 19 nt, Homo sapiens
  misc_RNA (1)...(19): siRNA sense strand
ccaaacgcuucugcaaaug

SEQ ID NO: 2016197 - RNA, 19 nt, Homo sapiens
  misc_RNA (1)...(19): siRNA sense strand
ggacuuuggaaauacaaug

SEQ ID NO: 2016198 - RNA, 19 nt, Homo sapiens
  misc_RNA (1)...(19): siRNA sense strand
uaucuucaccaucaugauu

SEQ ID NO: 2016199 - RNA, 19 nt, Homo sapiens
  misc_RNA (1)...(19): siRNA sense strand
ugaagagcaugacugacau

SEQ ID NO: 2016200 - RNA, 19 nt, Homo sapiens
  misc_RNA (1)...(19): siRNA sense strand
gcaguagcucuaacagguu

SEQ ID NO: 2016201 - RNA, 19 nt, Homo sapiens
  misc_RNA (1)...(19): siRNA sense strand
caaguccaaucuaugacau

SEQ ID NO: 2016202 - RNA, 19 nt, Homo sapiens
  misc_RNA (1)...(19): siRNA sense strand
ccagugggacuuuggaaau

SEQ ID NO: 2016203 - RNA, 19 nt, Homo sapiens
  misc_RNA (1)...(19): siRNA sense strand
uuccagacauuaaagauag

SEQ ID NO: 2016204 - RNA, 19 nt, Homo sapiens
  misc_RNA (1)...(19): siRNA sense strand
uccaaucuaugacaucaau

SEQ ID NO: 2016205 - RNA, 19 nt, Homo sapiens
  misc_RNA (1)...(19): siRNA sense strand
gcaacaugcuggucauccu

SEQ ID NO: 2016206 - RNA, 19 nt, Homo sapiens
  misc_RNA (1)...(19): siRNA sense strand
caugcuguguuugcuuuaa

SEQ ID NO: 2016207 - RNA, 19 nt, Homo sapiens
  misc_RNA (1)...(19): siRNA sense strand
uccaugcuguguuugcuuu

SEQ ID NO: 2016208 - RNA, 19 nt, Homo sapiens
  misc_RNA (1)...(19): siRNA sense strand
cugcaaaugcuguucuauu

SEQ ID NO: 2016209 - RNA, 19 nt, Homo sapiens
  misc_RNA (1)...(19): siRNA sense strand
cugaagagcaugacugaca

SEQ ID NO: 2016210 - RNA, 19 nt, Homo sapiens
  misc_RNA (1)...(19): siRNA sense strand
gaauuuccagacauuaaag

SEQ ID NO: 2016211 - RNA, 19 nt, Homo sapiens
  misc_RNA (1)...(19): siRNA sense strand
aauaauugcaguagcucua

SEQ ID NO: 2016212 - RNA, 19 nt, Homo sapiens
  misc_RNA (1)...(19): siRNA sense strand
gaagagcaugacugacauc

SEQ ID NO: 2016213 - RNA, 19 nt, Homo sapiens
  misc_RNA (1)...(19): siRNA sense strand
ccucuuagucuucuuccaa

SEQ ID NO: 2016214 - RNA, 19 nt, Homo sapiens
  misc_RNA (1)...(19): siRNA sense strand
gacauuaaagauagucauc

SEQ ID NO: 2016215 - RNA, 19 nt, Homo sapiens
  misc_RNA (1)...(19): siRNA sense strand
agugucaaguccaaucuau

SEQ ID NO: 2016216 - RNA, 19 nt, Homo sapiens
  misc_RNA (1)...(19): siRNA sense strand
cuucugggcucccuacaac

SEQ ID NO: 2016217 - RNA, 19 nt, Homo sapiens
  misc_RNA (1)...(19): siRNA sense strand
gcuaugcaggugacagaga

SEQ ID NO: 2016218 - RNA, 19 nt, Homo sapiens
  misc_RNA (1)...(19): siRNA sense strand
gauuaucaagugucaaguc

SEQ ID NO: 2016219 - RNA, 19 nt, Homo sapiens
  misc_RNA (1)...(19): siRNA sense strand
aaauaucugugggcuugug

SEQ ID NO: 2016220 - RNA, 19 nt, Homo sapiens
  misc_RNA (1)...(19): siRNA sense strand
cugaauaauugcaguagcu

SEQ ID NO: 2016221 - RNA, 19 nt, Homo sapiens
  misc_RNA (1)...(19): siRNA sense strand
gucaguaucaauucuggaa

SEQ ID NO: 2016222 - RNA, 19 nt, Homo sapiens
  misc_RNA (1)...(19): siRNA sense strand
acauuguccuucuccugaa

SEQ ID NO: 2016223 - RNA, 19 nt, Homo sapiens
  misc_RNA (1)...(19): siRNA sense strand
ugccaaacgcuucugcaaa

SEQ ID NO: 2016224 - RNA, 19 nt, Homo sapiens
  misc_RNA (1)...(19): siRNA sense strand
gcagcucucauuuuccaua

SEQ ID NO: 2016225 - RNA, 19 nt, Homo sapiens
  misc_RNA (1)...(19): siRNA sense strand
ggccugaauaauugcagua

SEQ ID NO: 2016226 - RNA, 19 nt, Homo sapiens
  misc_RNA (1)...(19): siRNA sense strand
ggacaaguaugaaugguuu

SEQ ID NO: 2016227 - RNA, 19 nt, Homo sapiens
  misc_RNA (1)...(19): siRNA sense strand
ucaccaagcuaucacauua

SEQ ID NO: 2016228 - RNA, 19 nt, Homo sapiens
  misc_RNA (1)...(19): siRNA sense strand
gaugagagauuaccgcauu

SEQ ID NO: 2016229 - RNA, 19 nt, Homo sapiens
  misc_RNA (1)...(19): siRNA sense strand
ugacacaucuguaccaauu

SEQ ID NO: 2016230 - RNA, 19 nt, Homo sapiens
  misc_RNA (1)...(19): siRNA sense strand
gagauuaccgcauuaagua

SEQ ID NO: 2016231 - RNA, 19 nt, Homo sapiens
  misc_RNA (1)...(19): siRNA sense strand
acaaagaacccaaagauaa

SEQ ID NO: 2016232 - RNA, 19 nt, Homo sapiens
  misc_RNA (1)...(19): siRNA sense strand
caaagaacccaaagauaaa

SEQ ID NO: 2016233 - RNA, 19 nt, Homo sapiens
  misc_RNA (1)...(19): siRNA sense strand
gcacaaagaacccaaagau

SEQ ID NO: 2016234 - RNA, 19 nt, Homo sapiens
  misc_RNA (1)...(19): siRNA sense strand
guaggauccucccaguuua

SEQ ID NO: 2016235 - RNA, 19 nt, Homo sapiens
  misc_RNA (1)...(19): siRNA sense strand
gaacaugguccaagacaau

SEQ ID NO: 2016236 - RNA, 19 nt, Homo sapiens
  misc_RNA (1)...(19): siRNA sense strand
gcaaauacagcaacacaga

SEQ ID NO: 2016237 - RNA, 19 nt, Homo sapiens
  misc_RNA (1)...(19): siRNA sense strand
ggcaucacguguauuuaua

SEQ ID NO: 2016238 - RNA, 19 nt, Homo sapiens
  misc_RNA (1)...(19): siRNA sense strand
gcacaagaguuggccaaga

SEQ ID NO: 2016239 - RNA, 19 nt, Homo sapiens
  misc_RNA (1)...(19): siRNA sense strand
gcugagauguggcuggaaa

SEQ ID NO: 2016240 - RNA, 19 nt, Homo sapiens
  misc_RNA (1)...(19): siRNA sense strand
cgacauguuugugagauuu

SEQ ID NO: 2016241 - RNA, 19 nt, Homo sapiens
  misc_RNA (1)...(19): siRNA sense strand
gaagagugagcacaaagaa

SEQ ID NO: 2016242 - RNA, 19 nt, Homo sapiens
  misc_RNA (1)...(19): siRNA sense strand
caaugaaucuuugcucuuc

SEQ ID NO: 2016243 - RNA, 19 nt, Homo sapiens
  misc_RNA (1)...(19): siRNA sense strand
ugacaaggccaaacaaguu

SEQ ID NO: 2016244 - RNA, 19 nt, Homo sapiens
  misc_RNA (1)...(19): siRNA sense strand
gagcagaugaugacgugua

SEQ ID NO: 2016245 - RNA, 19 nt, Homo sapiens
  misc_RNA (1)...(19): siRNA sense strand
gagaaucaaucaggaaucu

SEQ ID NO: 2016246 - RNA, 19 nt, Homo sapiens
  misc_RNA (1)...(19): siRNA sense strand
gcuccgccaucgcacaaua

SEQ ID NO: 2016247 - RNA, 19 nt, Homo sapiens
  misc_RNA (1)...(19): siRNA sense strand
acccaaagauuguuuauag

SEQ ID NO: 2016248 - RNA, 19 nt, Homo sapiens
  misc_RNA (1)...(19): siRNA sense strand
cgacgucgaccucguguuu

SEQ ID NO: 2016249 - RNA, 19 nt, Homo sapiens
  misc_RNA (1)...(19): siRNA sense strand
guggguggcuuugauguuu

SEQ ID NO: 2016250 - RNA, 19 nt, Homo sapiens
  misc_RNA (1)...(19): siRNA sense strand
guucaguucuucucaagug

SEQ ID NO: 2016251 - RNA, 19 nt, Homo sapiens
  misc_RNA (1)...(19): siRNA sense strand
gaagguguguccggagguu

SEQ ID NO: 2016252 - RNA, 19 nt, Homo sapiens
  misc_RNA (1)...(19): siRNA sense strand
gaccagagggcgcaucauu

SEQ ID NO: 2016253 - RNA, 19 nt, Homo sapiens
  misc_RNA (1)...(19): siRNA sense strand
ccagagggcgcaucauuga

SEQ ID NO: 2016254 - RNA, 19 nt, Homo sapiens
  misc_RNA (1)...(19): siRNA sense strand
ugaggaggcacgcguauuu

SEQ ID NO: 2016255 - RNA, 19 nt, Homo sapiens
  misc_RNA (1)...(19): siRNA sense strand
gaacgucaagcucgugguu

SEQ ID NO: 2016256 - RNA, 19 nt, Homo sapiens
  misc_RNA (1)...(19): siRNA sense strand
uuagagaucuccauaacag

SEQ ID NO: 2016257 - RNA, 19 nt, Homo sapiens
  misc_RNA (1)...(19): siRNA sense strand
cacaaagaacccaaagaua

SEQ ID NO: 2016258 - RNA, 19 nt, Homo sapiens
  misc_RNA (1)...(19): siRNA sense strand
gaggaggcacgcguauuua

SEQ ID NO: 2016259 - RNA, 19 nt, Homo sapiens
  misc_RNA (1)...(19): siRNA sense strand
ccaaagauuguuuauagug

SEQ ID NO: 2016260 - RNA, 19 nt, Homo sapiens
  misc_RNA (1)...(19): siRNA sense strand
gcaacacagaaauucauaa

SEQ ID NO: 2016261 - RNA, 19 nt, Homo sapiens
  misc_RNA (1)...(19): siRNA sense strand
gccugugucuggagaguuu

SEQ ID NO: 2016262 - RNA, 19 nt, Homo sapiens
  misc_RNA (1)...(19): siRNA sense strand
caaacucccugaagaagcu

SEQ ID NO: 2016263 - RNA, 19 nt, Homo sapiens
  misc_RNA (1)...(19): siRNA sense strand
ggagcuggaugcacaagag

SEQ ID NO: 2016264 - RNA, 19 nt, Homo sapiens
  misc_RNA (1)...(19): siRNA sense strand
ugucuggucuuaugagaug

SEQ ID NO: 2016265 - RNA, 19 nt, Homo sapiens
  misc_RNA (1)...(19): siRNA sense strand
gcaucacguguauuuauaa

SEQ ID NO: 2016266 - RNA, 19 nt, Homo sapiens
  misc_RNA (1)...(19): siRNA sense strand
guucugggccaacaaauau

SEQ ID NO: 2016267 - RNA, 19 nt, Homo sapiens
  misc_RNA (1)...(19): siRNA sense strand
ccucccaguuuaacaauga

SEQ ID NO: 2016268 - RNA, 19 nt, Homo sapiens
  misc_RNA (1)...(19): siRNA sense strand
cgacaggaacuuucucuuc

SEQ ID NO: 2016269 - RNA, 19 nt, Homo sapiens
  misc_RNA (1)...(19): siRNA sense strand
gaaaguucaguucuucuca

SEQ ID NO: 2016270 - RNA, 19 nt, Homo sapiens
  misc_RNA (1)...(19): siRNA sense strand
gagcaaauacagcaacaca

SEQ ID NO: 2016271 - RNA, 19 nt, Homo sapiens
  misc_RNA (1)...(19): siRNA sense strand
cauuagagaucuccauaac

SEQ ID NO: 2016272 - RNA, 19 nt, Homo sapiens
  misc_RNA (1)...(19): siRNA sense strand
caagagaaucaaucaggaa

SEQ ID NO: 2016273 - RNA, 19 nt, Homo sapiens
  misc_RNA (1)...(19): siRNA sense strand
uacagaacaugguccaaga

SEQ ID NO: 2016274 - RNA, 19 nt, Homo sapiens
  misc_RNA (1)...(19): siRNA sense strand
gaauuacgagcagaacaaa

SEQ ID NO: 2016275 - RNA, 19 nt, Homo sapiens
  misc_RNA (1)...(19): siRNA sense strand
caaauacagcaacacagaa

SEQ ID NO: 2016276 - RNA, 19 nt, Homo sapiens
  misc_RNA (1)...(19): siRNA sense strand
gagaucuccauaacaguaa

SEQ ID NO: 2016277 - RNA, 19 nt, Homo sapiens
  misc_RNA (1)...(19): siRNA sense strand
agagaucuccauaacagua

SEQ ID NO: 2016278 - RNA, 19 nt, Homo sapiens
  misc_RNA (1)...(19): siRNA sense strand
cacaagaguuggccaagag

SEQ ID NO: 2016279 - RNA, 19 nt, Homo sapiens
  misc_RNA (1)...(19): siRNA sense strand
acagcagacuuucagcaaa

SEQ ID NO: 2016280 - RNA, 19 nt, Homo sapiens
  misc_RNA (1)...(19): siRNA sense strand
gagccaggaaguaggagua

SEQ ID NO: 2016281 - RNA, 19 nt, Homo sapiens
  misc_RNA (1)...(19): siRNA sense strand
ugacaaccauuuugccuuu

SEQ ID NO: 2016282 - RNA, 19 nt, Homo sapiens
  misc_RNA (1)...(19): siRNA sense strand
aguaggauccucccaguuu

SEQ ID NO: 2016283 - RNA, 19 nt, Homo sapiens
  misc_RNA (1)...(19): siRNA sense strand
aaauacagcaacacagaaa

SEQ ID NO: 2016284 - RNA, 19 nt, Homo sapiens
  misc_RNA (1)...(19): siRNA sense strand
gacaaggccaaacaaguug

SEQ ID NO: 2016285 - RNA, 19 nt, Homo sapiens
  misc_RNA (1)...(19): siRNA sense strand
aaaguucaguucuucucaa

SEQ ID NO: 2016286 - RNA, 19 nt, Homo sapiens
  misc_RNA (1)...(19): siRNA sense strand
cagugugucuggucuuaug

SEQ ID NO: 2016287 - RNA, 19 nt, Homo sapiens
  misc_RNA (1)...(19): siRNA sense strand
cguccaccauccugucuuu

SEQ ID NO: 2016288 - RNA, 19 nt, Homo sapiens
  misc_RNA (1)...(19): siRNA sense strand
gguuuggcaucacguguau

SEQ ID NO: 2016289 - RNA, 19 nt, Homo sapiens
  misc_RNA (1)...(19): siRNA sense strand
caguaugacccaaagauug

SEQ ID NO: 2016290 - RNA, 19 nt, Homo sapiens
  misc_RNA (1)...(19): siRNA sense strand
gggaggugcuucggagaau

SEQ ID NO: 2016291 - RNA, 19 nt, Homo sapiens
  misc_RNA (1)...(19): siRNA sense strand
ucagcgaugucgagcaaau

SEQ ID NO: 2016292 - RNA, 19 nt, Homo sapiens
  misc_RNA (1)...(19): siRNA sense strand
gauccucccaguuuaacaa

SEQ ID NO: 2016293 - RNA, 19 nt, Homo sapiens
  misc_RNA (1)...(19): siRNA sense strand
guacaugcacgaccacuac

SEQ ID NO: 2016294 - RNA, 19 nt, Homo sapiens
  misc_RNA (1)...(19): siRNA sense strand
ggucgaagagugagcacaa

SEQ ID NO: 2016295 - RNA, 19 nt, Homo sapiens
  misc_RNA (1)...(19): siRNA sense strand
cacagaaauucauaaagag

SEQ ID NO: 2016296 - RNA, 19 nt, Homo sapiens
  misc_RNA (1)...(19): siRNA sense strand
ccgcgaaauuguccugaug

SEQ ID NO: 2016297 - RNA, 19 nt, Homo sapiens
  misc_RNA (1)...(19): siRNA sense strand
aguacaggcuccacagcua

SEQ ID NO: 2016298 - RNA, 19 nt, Homo sapiens
  misc_RNA (1)...(19): siRNA sense strand
guaugaaugguuuaugaga

SEQ ID NO: 2016299 - RNA, 19 nt, Homo sapiens
  misc_RNA (1)...(19): siRNA sense strand
gcaauaauaauggcucagu

SEQ ID NO: 2016300 - RNA, 19 nt, Homo sapiens
  misc_RNA (1)...(19): siRNA sense strand
ccaguaugacccaaagauu

SEQ ID NO: 2016301 - RNA, 19 nt, Homo sapiens
  misc_RNA (1)...(19): siRNA sense strand
cuucagcgaugucgagcaa

SEQ ID NO: 2016302 - RNA, 19 nt, Homo sapiens
  misc_RNA (1)...(19): siRNA sense strand
gagauuuaugggaaacuuu

SEQ ID NO: 2016303 - RNA, 19 nt, Homo sapiens
  misc_RNA (1)...(19): siRNA sense strand
gacauguuugugagauuua

SEQ ID NO: 2016304 - RNA, 19 nt, Homo sapiens
  misc_RNA (1)...(19): siRNA sense strand
ucaugaccgcccagaaaua

SEQ ID NO: 2016305 - RNA, 19 nt, Homo sapiens
  misc_RNA (1)...(19): siRNA sense strand
cgaagagugagcacaaaga

SEQ ID NO: 2016306 - RNA, 19 nt, Homo sapiens
  misc_RNA (1)...(19): siRNA sense strand
cagcagacuuucagcaaaa

SEQ ID NO: 2016307 - RNA, 19 nt, Homo sapiens
  misc_RNA (1)...(19): siRNA sense strand
gggccuggcgugaucauga

SEQ ID NO: 2016308 - RNA, 19 nt, Homo sapiens
  misc_RNA (1)...(19): siRNA sense strand
gggcaccacggaagaaaug

SEQ ID NO: 2016309 - RNA, 19 nt, Homo sapiens
  misc_RNA (1)...(19): siRNA sense strand
ggaggugcuucggagaaug

SEQ ID NO: 2016310 - RNA, 19 nt, Homo sapiens
  misc_RNA (1)...(19): siRNA sense strand
gacccaaagauuguuuaua

SEQ ID NO: 2016311 - RNA, 19 nt, Homo sapiens
  misc_RNA (1)...(19): siRNA sense strand
uugaacugaugagagauua

SEQ ID NO: 2016312 - RNA, 19 nt, Homo sapiens
  misc_RNA (1)...(19): siRNA sense strand
ggaaugggaguuucugacu

SEQ ID NO: 2016313 - RNA, 19 nt, Homo sapiens
  misc_RNA (1)...(19): siRNA sense strand
ucaugaugcucaaguacau

SEQ ID NO: 2016314 - RNA, 19 nt, Homo sapiens
  misc_RNA (1)...(19): siRNA sense strand
gagggcgcaucauugacuu

SEQ ID NO: 2016315 - RNA, 19 nt, Homo sapiens
  misc_RNA (1)...(19): siRNA sense strand
gcagguuugaagacguuua

SEQ ID NO: 2016316 - RNA, 19 nt, Homo sapiens
  misc_RNA (1)...(19): siRNA sense strand
aaucuuugcucuucuucug

SEQ ID NO: 2016317 - RNA, 19 nt, Homo sapiens
  misc_RNA (1)...(19): siRNA sense strand
gcgaaauuguccugaugag

SEQ ID NO: 2016318 - RNA, 19 nt, Homo sapiens
  misc_RNA (1)...(19): siRNA sense strand
aauaauaauggcucaguga

SEQ ID NO: 2016319 - RNA, 19 nt, Homo sapiens
  misc_RNA (1)...(19): siRNA sense strand
caucacguguauuuauaag

SEQ ID NO: 2016320 - RNA, 19 nt, Homo sapiens
  misc_RNA (1)...(19): siRNA sense strand
gaaaguucccagugacaac

SEQ ID NO: 2016321 - RNA, 19 nt, Homo sapiens
  misc_RNA (1)...(19): siRNA sense strand
aaacauacugauuccuuug

SEQ ID NO: 2016322 - RNA, 19 nt, Homo sapiens
  misc_RNA (1)...(19): siRNA sense strand
ggaaaguucaguucuucuc

SEQ ID NO: 2016323 - RNA, 19 nt, Homo sapiens
  misc_RNA (1)...(19): siRNA sense strand
ggaggcacgcguauuuaca

SEQ ID NO: 2016324 - RNA, 19 nt, Homo sapiens
  misc_RNA (1)...(19): siRNA sense strand
auacagcaacacagaaauu

SEQ ID NO: 2016325 - RNA, 19 nt, Homo sapiens
  misc_RNA (1)...(19): siRNA sense strand
aaauuguccugaugagcaa

SEQ ID NO: 2016326 - RNA, 19 nt, Homo sapiens
  misc_RNA (1)...(19): siRNA sense strand
gaaaucagcucuacaguuc

SEQ ID NO: 2016327 - RNA, 19 nt, Homo sapiens
  misc_RNA (1)...(19): siRNA sense strand
gaaauucaguuugcagauu

SEQ ID NO: 2016328 - RNA, 19 nt, Homo sapiens
  misc_RNA (1)...(19): siRNA sense strand
uaaugaagcugccaaguau

SEQ ID NO: 2016329 - RNA, 19 nt, Homo sapiens
  misc_RNA (1)...(19): siRNA sense strand
ggaagaagucccuauagaa

SEQ ID NO: 2016330 - RNA, 19 nt, Homo sapiens
  misc_RNA (1)...(19): siRNA sense strand
gaaccuagaggcuccuaua

SEQ ID NO: 2016331 - RNA, 19 nt, Homo sapiens
  misc_RNA (1)...(19): siRNA sense strand
gcacucagguucaugugau

SEQ ID NO: 2016332 - RNA, 19 nt, Homo sapiens
  misc_RNA (1)...(19): siRNA sense strand
ccuagaggcuccuauauca

SEQ ID NO: 2016333 - RNA, 19 nt, Homo sapiens
  misc_RNA (1)...(19): siRNA sense strand
ggaaaucagcucuacaguu

SEQ ID NO: 2016334 - RNA, 19 nt, Homo sapiens
  misc_RNA (1)...(19): siRNA sense strand
gcuccuauaucaagaguau

SEQ ID NO: 2016335 - RNA, 19 nt, Homo sapiens
  misc_RNA (1)...(19): siRNA sense strand
ggaggaauguuucuugaac

SEQ ID NO: 2016336 - RNA, 19 nt, Homo sapiens
  misc_RNA (1)...(19): siRNA sense strand
gaagaagucccuauagaac

SEQ ID NO: 2016337 - RNA, 19 nt, Homo sapiens
  misc_RNA (1)...(19): siRNA sense strand
cggaagaagucccuauaga

SEQ ID NO: 2016338 - RNA, 19 nt, Homo sapiens
  misc_RNA (1)...(19): siRNA sense strand
ucacgaggcucccuugaca

SEQ ID NO: 2016339 - RNA, 19 nt, Homo sapiens
  misc_RNA (1)...(19): siRNA sense strand
gaucugaggacuauaauac

SEQ ID NO: 2016340 - RNA, 19 nt, Homo sapiens
  misc_RNA (1)...(19): siRNA sense strand
uauaauaccuugggaugug

SEQ ID NO: 2016341 - RNA, 19 nt, Homo sapiens
  misc_RNA (1)...(19): siRNA sense strand
uuaaugaagcugccaagua

SEQ ID NO: 2016342 - RNA, 19 nt, Homo sapiens
  misc_RNA (1)...(19): siRNA sense strand
aaauggaaguguuaugaug

SEQ ID NO: 2016343 - RNA, 19 nt, Homo sapiens
  misc_RNA (1)...(19): siRNA sense strand
ccagacaaauggaaguguu

SEQ ID NO: 2016344 - RNA, 19 nt, Homo sapiens
  misc_RNA (1)...(19): siRNA sense strand
ggaagggagugauguuacu

SEQ ID NO: 2016345 - RNA, 19 nt, Homo sapiens
  misc_RNA (1)...(19): siRNA sense strand
caggaggaauguuucuuga

SEQ ID NO: 2016346 - RNA, 19 nt, Homo sapiens
  misc_RNA (1)...(19): siRNA sense strand
uaucaagaguaugugguua

SEQ ID NO: 2016347 - RNA, 19 nt, Homo sapiens
  misc_RNA (1)...(19): siRNA sense strand
ugucaugcauagaggauaa

SEQ ID NO: 2016348 - RNA, 19 nt, Homo sapiens
  misc_RNA (1)...(19): siRNA sense strand
ggcggcagguggcucauuu

SEQ ID NO: 2016349 - RNA, 19 nt, Homo sapiens
  misc_RNA (1)...(19): siRNA sense strand
gcauuugaucagauuguua

SEQ ID NO: 2016350 - RNA, 19 nt, Homo sapiens
  misc_RNA (1)...(19): siRNA sense strand
ucauugaucugaggacuau

SEQ ID NO: 2016351 - RNA, 19 nt, Homo sapiens
  misc_RNA (1)...(19): siRNA sense strand
gucuuuagaugcacuguug

SEQ ID NO: 2016352 - RNA, 19 nt, Homo sapiens
  misc_RNA (1)...(19): siRNA sense strand
ggaauuguuggauuuggaa

SEQ ID NO: 2016353 - RNA, 19 nt, Homo sapiens
  misc_RNA (1)...(19): siRNA sense strand
gaucagauuguuaaugaag

SEQ ID NO: 2016354 - RNA, 19 nt, Homo sapiens
  misc_RNA (1)...(19): siRNA sense strand
gguggagucuuuagaugca

SEQ ID NO: 2016355 - RNA, 19 nt, Homo sapiens
  misc_RNA (1)...(19): siRNA sense strand
acaaauggaaguguuauga

SEQ ID NO: 2016356 - RNA, 19 nt, Homo sapiens
  misc_RNA (1)...(19): siRNA sense strand
cuacugccauugcggaaau

SEQ ID NO: 2016357 - RNA, 19 nt, Homo sapiens
  misc_RNA (1)...(19): siRNA sense strand
gaaucaaggugguuauacc

SEQ ID NO: 2016358 - RNA, 19 nt, Homo sapiens
  misc_RNA (1)...(19): siRNA sense strand
cagacaaauggaaguguua

SEQ ID NO: 2016359 - RNA, 19 nt, Homo sapiens
  misc_RNA (1)...(19): siRNA sense strand
ucaagaguaugugguuaug

SEQ ID NO: 2016360 - RNA, 19 nt, Homo sapiens
  misc_RNA (1)...(19): siRNA sense strand
caggaagggagugauguua

SEQ ID NO: 2016361 - RNA, 19 nt, Homo sapiens
  misc_RNA (1)...(19): siRNA sense strand
guuaugaugcccuucgaaa

SEQ ID NO: 2016362 - RNA, 19 nt, Homo sapiens
  misc_RNA (1)...(19): siRNA sense strand
ggaaauucaguuugcagau

SEQ ID NO: 2016363 - RNA, 19 nt, Homo sapiens
  misc_RNA (1)...(19): siRNA sense strand
cacuggagcuacugccauu

SEQ ID NO: 2016364 - RNA, 19 nt, Homo sapiens
  misc_RNA (1)...(19): siRNA sense strand
caaauggaaguguuaugau

SEQ ID NO: 2016365 - RNA, 19 nt, Homo sapiens
  misc_RNA (1)...(19): siRNA sense strand
uggagugucuugugaaguc

SEQ ID NO: 2016366 - RNA, 19 nt, Homo sapiens
  misc_RNA (1)...(19): siRNA sense strand
ccaggaaucaaggugguua

SEQ ID NO: 2016367 - RNA, 19 nt, Homo sapiens
  misc_RNA (1)...(19): siRNA sense strand
uauagaaccauacaacauc

SEQ ID NO: 2016368 - RNA, 19 nt, Homo sapiens
  misc_RNA (1)...(19): siRNA sense strand
ggauaacucauuggccaaa

SEQ ID NO: 2016369 - RNA, 19 nt, Homo sapiens
  misc_RNA (1)...(19): siRNA sense strand
gucccaggccgaagucaua

SEQ ID NO: 2016370 - RNA, 19 nt, Homo sapiens
  misc_RNA (1)...(19): siRNA sense strand
gcagguggcucauuuuacu

SEQ ID NO: 2016371 - RNA, 19 nt, Homo sapiens
  misc_RNA (1)...(19): siRNA sense strand
cuacaucccagacaaaugg

SEQ ID NO: 2016372 - RNA, 19 nt, Homo sapiens
  misc_RNA (1)...(19): siRNA sense strand
gacacaccauuuccucaca

SEQ ID NO: 2016373 - RNA, 19 nt, Homo sapiens
  misc_RNA (1)...(19): siRNA sense strand
agaagucccuauagaacca

SEQ ID NO: 2016374 - RNA, 19 nt, Homo sapiens
  misc_RNA (1)...(19): siRNA sense strand
ucaggaggaauguuucuug

SEQ ID NO: 2016375 - RNA, 19 nt, Homo sapiens
  misc_RNA (1)...(19): siRNA sense strand
caucggaaaucagcucuac

SEQ ID NO: 2016376 - RNA, 19 nt, Homo sapiens
  misc_RNA (1)...(19): siRNA sense strand
ugccuuugguggagucuuu

SEQ ID NO: 2016377 - RNA, 19 nt, Homo sapiens
  misc_RNA (1)...(19): siRNA sense strand
aaacagggcgacugcuaau

SEQ ID NO: 2016378 - RNA, 19 nt, Homo sapiens
  misc_RNA (1)...(19): siRNA sense strand
ugccuuggauaacucauug

SEQ ID NO: 2016379 - RNA, 19 nt, Homo sapiens
  misc_RNA (1)...(19): siRNA sense strand
ggaaucaaggugguuauac

SEQ ID NO: 2016380 - RNA, 19 nt, Homo sapiens
  misc_RNA (1)...(19): siRNA sense strand
guacgggcaaacucagaaa

SEQ ID NO: 2016381 - RNA, 19 nt, Homo sapiens
  misc_RNA (1)...(19): siRNA sense strand
caaggaauuguuggauuug

SEQ ID NO: 2016382 - RNA, 19 nt, Homo sapiens
  misc_RNA (1)...(19): siRNA sense strand
gguuaugacacaccauuuc

SEQ ID NO: 2016383 - RNA, 19 nt, Homo sapiens
  misc_RNA (1)...(19): siRNA sense strand
ggagugucuugugaaguca

SEQ ID NO: 2016384 - RNA, 19 nt, Homo sapiens
  misc_RNA (1)...(19): siRNA sense strand
ggaauguuucuugaaccua

SEQ ID NO: 2016385 - RNA, 19 nt, Homo sapiens
  misc_RNA (1)...(19): siRNA sense strand
acagggcgacugcuaauca

SEQ ID NO: 2016386 - RNA, 19 nt, Homo sapiens
  misc_RNA (1)...(19): siRNA sense strand
auaacucauuggccaaaga

SEQ ID NO: 2016387 - RNA, 19 nt, Homo sapiens
  misc_RNA (1)...(19): siRNA sense strand
cacaccauuuccucacauu

SEQ ID NO: 2016388 - RNA, 19 nt, Homo sapiens
  misc_RNA (1)...(19): siRNA sense strand
acuguuggcuugcgagaca

SEQ ID NO: 2016389 - RNA, 19 nt, Homo sapiens
  misc_RNA (1)...(19): siRNA sense strand
ccauacaacaucccacugu

SEQ ID NO: 2016390 - RNA, 19 nt, Homo sapiens
  misc_RNA (1)...(19): siRNA sense strand
gcggaagaagucccuauag

SEQ ID NO: 2016391 - RNA, 19 nt, Homo sapiens
  misc_RNA (1)...(19): siRNA sense strand
gauaacucauuggccaaag

SEQ ID NO: 2016392 - RNA, 19 nt, Homo sapiens
  misc_RNA (1)...(19): siRNA sense strand
gcccauugcccaggaauca

SEQ ID NO: 2016393 - RNA, 19 nt, Homo sapiens
  misc_RNA (1)...(19): siRNA sense strand
cauucuacaucccagacaa

SEQ ID NO: 2016394 - RNA, 19 nt, Homo sapiens
  misc_RNA (1)...(19): siRNA sense strand
aagaguaugugguuaugac

SEQ ID NO: 2016395 - RNA, 19 nt, Homo sapiens
  misc_RNA (1)...(19): siRNA sense strand
caguucaggaggaauguuu

SEQ ID NO: 2016396 - RNA, 19 nt, Homo sapiens
  misc_RNA (1)...(19): siRNA sense strand
caaaacagggcgacugcua

SEQ ID NO: 2016397 - RNA, 19 nt, Homo sapiens
  misc_RNA (1)...(19): siRNA sense strand
guaagucugugaucaaaac

SEQ ID NO: 2016398 - RNA, 19 nt, Homo sapiens
  misc_RNA (1)...(19): siRNA sense strand
cuauagaaccauacaacau

SEQ ID NO: 2016399 - RNA, 19 nt, Homo sapiens
  misc_RNA (1)...(19): siRNA sense strand
cuacaguucaggaggaaug

SEQ ID NO: 2016400 - RNA, 19 nt, Homo sapiens
  misc_RNA (1)...(19): siRNA sense strand
uagaggcuccuauaucaag

SEQ ID NO: 2016401 - RNA, 19 nt, Homo sapiens
  misc_RNA (1)...(19): siRNA sense strand
gggcagcagcggaagaagu

SEQ ID NO: 2016402 - RNA, 19 nt, Homo sapiens
  misc_RNA (1)...(19): siRNA sense strand
gacaaauggaaguguuaug

SEQ ID NO: 2016403 - RNA, 19 nt, Homo sapiens
  misc_RNA (1)...(19): siRNA sense strand
uuguaagucugugaucaaa

SEQ ID NO: 2016404 - RNA, 19 nt, Homo sapiens
  misc_RNA (1)...(19): siRNA sense strand
cuugugaagucauugaucu

SEQ ID NO: 2016405 - RNA, 19 nt, Homo sapiens
  misc_RNA (1)...(19): siRNA sense strand
uaacucauuggccaaagau

SEQ ID NO: 2016406 - RNA, 19 nt, Homo sapiens
  misc_RNA (1)...(19): siRNA sense strand
ggccgaagucauacaggaa

SEQ ID NO: 2016407 - RNA, 19 nt, Homo sapiens
  misc_RNA (1)...(19): siRNA sense strand
caagaguaugugguuauga

SEQ ID NO: 2016408 - RNA, 19 nt, Homo sapiens
  misc_RNA (1)...(19): siRNA sense strand
aaucagcucuacaguucag

SEQ ID NO: 2016409 - RNA, 19 nt, Homo sapiens
  misc_RNA (1)...(19): siRNA sense strand
aggaauuguuggauuugga

SEQ ID NO: 2016410 - RNA, 19 nt, Homo sapiens
  misc_RNA (1)...(19): siRNA sense strand
ggacuucuuuugucaugca

SEQ ID NO: 2016411 - RNA, 19 nt, Homo sapiens
  misc_RNA (1)...(19): siRNA sense strand
gggcaaacucagaaaauga

SEQ ID NO: 2016412 - RNA, 19 nt, Homo sapiens
  misc_RNA (1)...(19): siRNA sense strand
ggcagcagcggaagaaguc

SEQ ID NO: 2016413 - RNA, 19 nt, Homo sapiens
  misc_RNA (1)...(19): siRNA sense strand
gaaaucagcucuacaguuc

SEQ ID NO: 2016414 - RNA, 19 nt, Homo sapiens
  misc_RNA (1)...(19): siRNA sense strand
gaaauucaguuugcagauu

SEQ ID NO: 2016415 - RNA, 19 nt, Homo sapiens
  misc_RNA (1)...(19): siRNA sense strand
uaaugaagcugccaaguau

SEQ ID NO: 2016416 - RNA, 19 nt, Homo sapiens
  misc_RNA (1)...(19): siRNA sense strand
ggaagaagucccuauagaa

SEQ ID NO: 2016417 - RNA, 19 nt, Homo sapiens
  misc_RNA (1)...(19): siRNA sense strand
gaaccuagaggcuccuaua

SEQ ID NO: 2016418 - RNA, 19 nt, Homo sapiens
  misc_RNA (1)...(19): siRNA sense strand
gcacucagguucaugugau

SEQ ID NO: 2016419 - RNA, 19 nt, Homo sapiens
  misc_RNA (1)...(19): siRNA sense strand
ccuagaggcuccuauauca

SEQ ID NO: 2016420 - RNA, 19 nt, Homo sapiens
  misc_RNA (1)...(19): siRNA sense strand
ggaaaucagcucuacaguu

SEQ ID NO: 2016421 - RNA, 19 nt, Homo sapiens
  misc_RNA (1)...(19): siRNA sense strand
gcuccuauaucaagaguau

SEQ ID NO: 2016422 - RNA, 19 nt, Homo sapiens
  misc_RNA (1)...(19): siRNA sense strand
ggaggaauguuucuugaac

SEQ ID NO: 2016423 - RNA, 19 nt, Homo sapiens
  misc_RNA (1)...(19): siRNA sense strand
gaagaagucccuauagaac

SEQ ID NO: 2016424 - RNA, 19 nt, Homo sapiens
  misc_RNA (1)...(19): siRNA sense strand
cggaagaagucccuauaga

SEQ ID NO: 2016425 - RNA, 19 nt, Homo sapiens
  misc_RNA (1)...(19): siRNA sense strand
ucacgaggcucccuugaca

SEQ ID NO: 2016426 - RNA, 19 nt, Homo sapiens
  misc_RNA (1)...(19): siRNA sense strand
gaucugaggacuauaauac

SEQ ID NO: 2016427 - RNA, 19 nt, Homo sapiens
  misc_RNA (1)...(19): siRNA sense strand
uauaauaccuugggaugug

SEQ ID NO: 2016428 - RNA, 19 nt, Homo sapiens
  misc_RNA (1)...(19): siRNA sense strand
uuaaugaagcugccaagua

SEQ ID NO: 2016429 - RNA, 19 nt, Homo sapiens
  misc_RNA (1)...(19): siRNA sense strand
aaauggaaguguuaugaug

SEQ ID NO: 2016430 - RNA, 19 nt, Homo sapiens
  misc_RNA (1)...(19): siRNA sense strand
ccagacaaauggaaguguu

SEQ ID NO: 2016431 - RNA, 19 nt, Homo sapiens
  misc_RNA (1)...(19): siRNA sense strand
ggaagggagugauguuacu

SEQ ID NO: 2016432 - RNA, 19 nt, Homo sapiens
  misc_RNA (1)...(19): siRNA sense strand
caggaggaauguuucuuga

SEQ ID NO: 2016433 - RNA, 19 nt, Homo sapiens
  misc_RNA (1)...(19): siRNA sense strand
uaucaagaguaugugguua

SEQ ID NO: 2016434 - RNA, 19 nt, Homo sapiens
  misc_RNA (1)...(19): siRNA sense strand
ugucaugcauagaggauaa

SEQ ID NO: 2016435 - RNA, 19 nt, Homo sapiens
  misc_RNA (1)...(19): siRNA sense strand
ggcggcagguggcucauuu

SEQ ID NO: 2016436 - RNA, 19 nt, Homo sapiens
  misc_RNA (1)...(19): siRNA sense strand
gcauuugaucagauuguua

SEQ ID NO: 2016437 - RNA, 19 nt, Homo sapiens
  misc_RNA (1)...(19): siRNA sense strand
ucauugaucugaggacuau

SEQ ID NO: 2016438 - RNA, 19 nt, Homo sapiens
  misc_RNA (1)...(19): siRNA sense strand
gucuuuagaugcacuguug

SEQ ID NO: 2016439 - RNA, 19 nt, Homo sapiens
  misc_RNA (1)...(19): siRNA sense strand
ggaauuguuggauuuggaa

SEQ ID NO: 2016440 - RNA, 19 nt, Homo sapiens
  misc_RNA (1)...(19): siRNA sense strand
gaucagauuguuaaugaag

SEQ ID NO: 2016441 - RNA, 19 nt, Homo sapiens
  misc_RNA (1)...(19): siRNA sense strand
gguggagucuuuagaugca

SEQ ID NO: 2016442 - RNA, 19 nt, Homo sapiens
  misc_RNA (1)...(19): siRNA sense strand
acaaauggaaguguuauga

SEQ ID NO: 2016443 - RNA, 19 nt, Homo sapiens
  misc_RNA (1)...(19): siRNA sense strand
cuacugccauugcggaaau

SEQ ID NO: 2016444 - RNA, 19 nt, Homo sapiens
  misc_RNA (1)...(19): siRNA sense strand
gaaucaaggugguuauacc

SEQ ID NO: 2016445 - RNA, 19 nt, Homo sapiens
  misc_RNA (1)...(19): siRNA sense strand
cagacaaauggaaguguua

SEQ ID NO: 2016446 - RNA, 19 nt, Homo sapiens
  misc_RNA (1)...(19): siRNA sense strand
ucaagaguaugugguuaug

SEQ ID NO: 2016447 - RNA, 19 nt, Homo sapiens
  misc_RNA (1)...(19): siRNA sense strand
caggaagggagugauguua

SEQ ID NO: 2016448 - RNA, 19 nt, Homo sapiens
  misc_RNA (1)...(19): siRNA sense strand
guuaugaugcccuucgaaa

SEQ ID NO: 2016449 - RNA, 19 nt, Homo sapiens
  misc_RNA (1)...(19): siRNA sense strand
ggaaauucaguuugcagau

SEQ ID NO: 2016450 - RNA, 19 nt, Homo sapiens
  misc_RNA (1)...(19): siRNA sense strand
cacuggagcuacugccauu

SEQ ID NO: 2016451 - RNA, 19 nt, Homo sapiens
  misc_RNA (1)...(19): siRNA sense strand
caaauggaaguguuaugau

SEQ ID NO: 2016452 - RNA, 19 nt, Homo sapiens
  misc_RNA (1)...(19): siRNA sense strand
uggagugucuugugaaguc

SEQ ID NO: 2016453 - RNA, 19 nt, Homo sapiens
  misc_RNA (1)...(19): siRNA sense strand
ccaggaaucaaggugguua

SEQ ID NO: 2016454 - RNA, 19 nt, Homo sapiens
  misc_RNA (1)...(19): siRNA sense strand
uauagaaccauacaacauc

SEQ ID NO: 2016455 - RNA, 19 nt, Homo sapiens
  misc_RNA (1)...(19): siRNA sense strand
ggauaacucauuggccaaa

SEQ ID NO: 2016456 - RNA, 19 nt, Homo sapiens
  misc_RNA (1)...(19): siRNA sense strand
gucccaggccgaagucaua

SEQ ID NO: 2016457 - RNA, 19 nt, Homo sapiens
  misc_RNA (1)...(19): siRNA sense strand
gcagguggcucauuuuacu

SEQ ID NO: 2016458 - RNA, 19 nt, Homo sapiens
  misc_RNA (1)...(19): siRNA sense strand
cuacaucccagacaaaugg

SEQ ID NO: 2016459 - RNA, 19 nt, Homo sapiens
  misc_RNA (1)...(19): siRNA sense strand
gacacaccauuuccucaca

SEQ ID NO: 2016460 - RNA, 19 nt, Homo sapiens
  misc_RNA (1)...(19): siRNA sense strand
agaagucccuauagaacca

SEQ ID NO: 2016461 - RNA, 19 nt, Homo sapiens
  misc_RNA (1)...(19): siRNA sense strand
ucaggaggaauguuucuug

SEQ ID NO: 2016462 - RNA, 19 nt, Homo sapiens
  misc_RNA (1)...(19): siRNA sense strand
caucggaaaucagcucuac

SEQ ID NO: 2016463 - RNA, 19 nt, Homo sapiens
  misc_RNA (1)...(19): siRNA sense strand
ugccuuugguggagucuuu

SEQ ID NO: 2016464 - RNA, 19 nt, Homo sapiens
  misc_RNA (1)...(19): siRNA sense strand
aaacagggcgacugcuaau

SEQ ID NO: 2016465 - RNA, 19 nt, Homo sapiens
  misc_RNA (1)...(19): siRNA sense strand
ugccuuggauaacucauug

SEQ ID NO: 2016466 - RNA, 19 nt, Homo sapiens
  misc_RNA (1)...(19): siRNA sense strand
ggaaucaaggugguuauac

SEQ ID NO: 2016467 - RNA, 19 nt, Homo sapiens
  misc_RNA (1)...(19): siRNA sense strand
guacgggcaaacucagaaa

SEQ ID NO: 2016468 - RNA, 19 nt, Homo sapiens
  misc_RNA (1)...(19): siRNA sense strand
caaggaauuguuggauuug

SEQ ID NO: 2016469 - RNA, 19 nt, Homo sapiens
  misc_RNA (1)...(19): siRNA sense strand
gguuaugacacaccauuuc

SEQ ID NO: 2016470 - RNA, 19 nt, Homo sapiens
  misc_RNA (1)...(19): siRNA sense strand
ggagugucuugugaaguca

SEQ ID NO: 2016471 - RNA, 19 nt, Homo sapiens
  misc_RNA (1)...(19): siRNA sense strand
ggaauguuucuugaaccua

SEQ ID NO: 2016472 - RNA, 19 nt, Homo sapiens
  misc_RNA (1)...(19): siRNA sense strand
acagggcgacugcuaauca

SEQ ID NO: 2016473 - RNA, 19 nt, Homo sapiens
  misc_RNA (1)...(19): siRNA sense strand
auaacucauuggccaaaga

SEQ ID NO: 2016474 - RNA, 19 nt, Homo sapiens
  misc_RNA (1)...(19): siRNA sense strand
cacaccauuuccucacauu

SEQ ID NO: 2016475 - RNA, 19 nt, Homo sapiens
  misc_RNA (1)...(19): siRNA sense strand
acuguuggcuugcgagaca

SEQ ID NO: 2016476 - RNA, 19 nt, Homo sapiens
  misc_RNA (1)...(19): siRNA sense strand
ccauacaacaucccacugu

SEQ ID NO: 2016477 - RNA, 19 nt, Homo sapiens
  misc_RNA (1)...(19): siRNA sense strand
gcggaagaagucccuauag

SEQ ID NO: 2016478 - RNA, 19 nt, Homo sapiens
  misc_RNA (1)...(19): siRNA sense strand
gauaacucauuggccaaag

SEQ ID NO: 2016479 - RNA, 19 nt, Homo sapiens
  misc_RNA (1)...(19): siRNA sense strand
gcccauugcccaggaauca

SEQ ID NO: 2016480 - RNA, 19 nt, Homo sapiens
  misc_RNA (1)...(19): siRNA sense strand
cauucuacaucccagacaa

SEQ ID NO: 2016481 - RNA, 19 nt, Homo sapiens
  misc_RNA (1)...(19): siRNA sense strand
aagaguaugugguuaugac

SEQ ID NO: 2016482 - RNA, 19 nt, Homo sapiens
  misc_RNA (1)...(19): siRNA sense strand
caguucaggaggaauguuu

SEQ ID NO: 2016483 - RNA, 19 nt, Homo sapiens
  misc_RNA (1)...(19): siRNA sense strand
caaaacagggcgacugcua

SEQ ID NO: 2016484 - RNA, 19 nt, Homo sapiens
  misc_RNA (1)...(19): siRNA sense strand
guaagucugugaucaaaac

SEQ ID NO: 2016485 - RNA, 19 nt, Homo sapiens
  misc_RNA (1)...(19): siRNA sense strand
cuauagaaccauacaacau

SEQ ID NO: 2016486 - RNA, 19 nt, Homo sapiens
  misc_RNA (1)...(19): siRNA sense strand
cuacaguucaggaggaaug

SEQ ID NO: 2016487 - RNA, 19 nt, Homo sapiens
  misc_RNA (1)...(19): siRNA sense strand
uagaggcuccuauaucaag

SEQ ID NO: 2016488 - RNA, 19 nt, Homo sapiens
  misc_RNA (1)...(19): siRNA sense strand
gggcagcagcggaagaagu

SEQ ID NO: 2016489 - RNA, 19 nt, Homo sapiens
  misc_RNA (1)...(19): siRNA sense strand
gacaaauggaaguguuaug

SEQ ID NO: 2016490 - RNA, 19 nt, Homo sapiens
  misc_RNA (1)...(19): siRNA sense strand
uuguaagucugugaucaaa

SEQ ID NO: 2016491 - RNA, 19 nt, Homo sapiens
  misc_RNA (1)...(19): siRNA sense strand
cuugugaagucauugaucu

SEQ ID NO: 2016492 - RNA, 19 nt, Homo sapiens
  misc_RNA (1)...(19): siRNA sense strand
uaacucauuggccaaagau

SEQ ID NO: 2016493 - RNA, 19 nt, Homo sapiens
  misc_RNA (1)...(19): siRNA sense strand
ggccgaagucauacaggaa

SEQ ID NO: 2016494 - RNA, 19 nt, Homo sapiens
  misc_RNA (1)...(19): siRNA sense strand
caagaguaugugguuauga

SEQ ID NO: 2016495 - RNA, 19 nt, Homo sapiens
  misc_RNA (1)...(19): siRNA sense strand
aaucagcucuacaguucag

SEQ ID NO: 2016496 - RNA, 19 nt, Homo sapiens
  misc_RNA (1)...(19): siRNA sense strand
aggaauuguuggauuugga

SEQ ID NO: 2016497 - RNA, 19 nt, Homo sapiens
  misc_RNA (1)...(19): siRNA sense strand
ggacuucuuuugucaugca

SEQ ID NO: 2016498 - RNA, 19 nt, Homo sapiens
  misc_RNA (1)...(19): siRNA sense strand
gggcaaacucagaaaauga

SEQ ID NO: 2016499 - RNA, 19 nt, Homo sapiens
  misc_RNA (1)...(19): siRNA sense strand
ggcagcagcggaagaaguc

SEQ ID NO: 2016500 - RNA, 19 nt, Homo sapiens
  misc_RNA (1)...(19): siRNA sense strand
gcacguggccuucgaguuc

SEQ ID NO: 2016501 - RNA, 19 nt, Homo sapiens
  misc_RNA (1)...(19): siRNA sense strand
gcacagcgaggacgugucu

SEQ ID NO: 2016502 - RNA, 19 nt, Homo sapiens
  misc_RNA (1)...(19): siRNA sense strand
uggaggacaugcuggagaa

SEQ ID NO: 2016503 - RNA, 19 nt, Homo sapiens
  misc_RNA (1)...(19): siRNA sense strand
ccaaggugcuggccaugcu

SEQ ID NO: 2016504 - RNA, 19 nt, Homo sapiens
  misc_RNA (1)...(19): siRNA sense strand
gcaacucugcgacuacuac

SEQ ID NO: 2016505 - RNA, 19 nt, Homo sapiens
  misc_RNA (1)...(19): siRNA sense strand
ccuggcaacucugcgacua

SEQ ID NO: 2016506 - RNA, 19 nt, Homo sapiens
  misc_RNA (1)...(19): siRNA sense strand
gcugaagacugcuggauga

SEQ ID NO: 2016507 - RNA, 19 nt, Homo sapiens
  misc_RNA (1)...(19): siRNA sense strand
gaagacugcuggaugaagu

SEQ ID NO: 2016508 - RNA, 19 nt, Homo sapiens
  misc_RNA (1)...(19): siRNA sense strand
ggaggcaaacccauuuaua

SEQ ID NO: 2016509 - RNA, 19 nt, Homo sapiens
  misc_RNA (1)...(19): siRNA sense strand
cggcuaaccugcuguuuga

SEQ ID NO: 2016510 - RNA, 19 nt, Homo sapiens
  misc_RNA (1)...(19): siRNA sense strand
ucaagaggccuaugagaaa

SEQ ID NO: 2016511 - RNA, 19 nt, Homo sapiens
  misc_RNA (1)...(19): siRNA sense strand
gaggcaaacccauuuauau

SEQ ID NO: 2016512 - RNA, 19 nt, Homo sapiens
  misc_RNA (1)...(19): siRNA sense strand
gaccuuggaucccuacaga

SEQ ID NO: 2016513 - RNA, 19 nt, Homo sapiens
  misc_RNA (1)...(19): siRNA sense strand
gcugugaucuugucgaagu

SEQ ID NO: 2016514 - RNA, 19 nt, Homo sapiens
  misc_RNA (1)...(19): siRNA sense strand
gagaucacacaaucacaua

SEQ ID NO: 2016515 - RNA, 19 nt, Homo sapiens
  misc_RNA (1)...(19): siRNA sense strand
gaaugucaaucuuuacaac

SEQ ID NO: 2016516 - RNA, 19 nt, Homo sapiens
  misc_RNA (1)...(19): siRNA sense strand
gugaugggcugugaucuug

SEQ ID NO: 2016517 - RNA, 19 nt, Homo sapiens
  misc_RNA (1)...(19): siRNA sense strand
gcaaacccauuuauaucag

SEQ ID NO: 2016518 - RNA, 19 nt, Homo sapiens
  misc_RNA (1)...(19): siRNA sense strand
gaauucaagaggccuauga

SEQ ID NO: 2016519 - RNA, 19 nt, Homo sapiens
  misc_RNA (1)...(19): siRNA sense strand
ccauuuauaucagcuuuga

SEQ ID NO: 2016520 - RNA, 19 nt, Homo sapiens
  misc_RNA (1)...(19): siRNA sense strand
gaugugaaugucaaucuuu

SEQ ID NO: 2016521 - RNA, 19 nt, Homo sapiens
  misc_RNA (1)...(19): siRNA sense strand
ugaaauugcuggucucacu

SEQ ID NO: 2016522 - RNA, 19 nt, Homo sapiens
  misc_RNA (1)...(19): siRNA sense strand
gcuggacgcugccuucauc

SEQ ID NO: 2016523 - RNA, 19 nt, Homo sapiens
  misc_RNA (1)...(19): siRNA sense strand
gggcugugaucuugucgaa

SEQ ID NO: 2016524 - RNA, 19 nt, Homo sapiens
  misc_RNA (1)...(19): siRNA sense strand
ccucaugguugcagaccua

SEQ ID NO: 2016525 - RNA, 19 nt, Homo sapiens
  misc_RNA (1)...(19): siRNA sense strand
ggcaaacccauuuauauca

SEQ ID NO: 2016526 - RNA, 19 nt, Homo sapiens
  misc_RNA (1)...(19): siRNA sense strand
caaagugacaaccgucuga

SEQ ID NO: 2016527 - RNA, 19 nt, Homo sapiens
  misc_RNA (1)...(19): siRNA sense strand
ggguggagaucacacaauc

SEQ ID NO: 2016528 - RNA, 19 nt, Homo sapiens
  misc_RNA (1)...(19): siRNA sense strand
cacaaucacauaucccaua

SEQ ID NO: 2016529 - RNA, 19 nt, Homo sapiens
  misc_RNA (1)...(19): siRNA sense strand
ggagaucacacaaucacau

SEQ ID NO: 2016530 - RNA, 19 nt, Homo sapiens
  misc_RNA (1)...(19): siRNA sense strand
gaucacacaaucacauauc

SEQ ID NO: 2016531 - RNA, 19 nt, Homo sapiens
  misc_RNA (1)...(19): siRNA sense strand
ccuuggaucccuacagaua

SEQ ID NO: 2016532 - RNA, 19 nt, Homo sapiens
  misc_RNA (1)...(19): siRNA sense strand
guaagcguguggugcagau

SEQ ID NO: 2016533 - RNA, 19 nt, Homo sapiens
  misc_RNA (1)...(19): siRNA sense strand
ggguaguccuggcugaaga

SEQ ID NO: 2016534 - RNA, 19 nt, Homo sapiens
  misc_RNA (1)...(19): siRNA sense strand
cgaugugaaugucaaucuu

SEQ ID NO: 2016535 - RNA, 19 nt, Homo sapiens
  misc_RNA (1)...(19): siRNA sense strand
gaugggcugugaucuuguc

SEQ ID NO: 2016536 - RNA, 19 nt, Homo sapiens
  misc_RNA (1)...(19): siRNA sense strand
gugggcgucugcuccauga

SEQ ID NO: 2016537 - RNA, 19 nt, Homo sapiens
  misc_RNA (1)...(19): siRNA sense strand
gaaguuucaccaccguaug

SEQ ID NO: 2016538 - RNA, 19 nt, Homo sapiens
  misc_RNA (1)...(19): siRNA sense strand
gcuaaccugcuguuugaga

SEQ ID NO: 2016539 - RNA, 19 nt, Homo sapiens
  misc_RNA (1)...(19): siRNA sense strand
gacaaggcccuaggagaga

SEQ ID NO: 2016540 - RNA, 19 nt, Homo sapiens
  misc_RNA (1)...(19): siRNA sense strand
caagaggccuaugagaaaa

SEQ ID NO: 2016541 - RNA, 19 nt, Homo sapiens
  misc_RNA (1)...(19): siRNA sense strand
gcggcuaaccugcuguuug

SEQ ID NO: 2016542 - RNA, 19 nt, Homo sapiens
  misc_RNA (1)...(19): siRNA sense strand
ucaccaccguaugaucuuu

SEQ ID NO: 2016543 - RNA, 19 nt, Homo sapiens
  misc_RNA (1)...(19): siRNA sense strand
gucaaggccugaacgugau

SEQ ID NO: 2016544 - RNA, 19 nt, Homo sapiens
  misc_RNA (1)...(19): siRNA sense strand
agaccuaggcgaugugaau

SEQ ID NO: 2016545 - RNA, 19 nt, Homo sapiens
  misc_RNA (1)...(19): siRNA sense strand
gcuaugugcucuccccaaa

SEQ ID NO: 2016546 - RNA, 19 nt, Homo sapiens
  misc_RNA (1)...(19): siRNA sense strand
gagggucuccuggacugua

SEQ ID NO: 2016547 - RNA, 19 nt, Homo sapiens
  misc_RNA (1)...(19): siRNA sense strand
acaaggcccuaggagagaa

SEQ ID NO: 2016548 - RNA, 19 nt, Homo sapiens
  misc_RNA (1)...(19): siRNA sense strand
gggaggcaaacccauuuau

SEQ ID NO: 2016549 - RNA, 19 nt, Homo sapiens
  misc_RNA (1)...(19): siRNA sense strand
ugaacgugaugggcuguga

SEQ ID NO: 2016550 - RNA, 19 nt, Homo sapiens
  misc_RNA (1)...(19): siRNA sense strand
cuaaccugcuguuugagau

SEQ ID NO: 2016551 - RNA, 19 nt, Homo sapiens
  misc_RNA (1)...(19): siRNA sense strand
gggcgucugcuccaugaug

SEQ ID NO: 2016552 - RNA, 19 nt, Homo sapiens
  misc_RNA (1)...(19): siRNA sense strand
ggaagucaggcagcagaug

SEQ ID NO: 2016553 - RNA, 19 nt, Homo sapiens
  misc_RNA (1)...(19): siRNA sense strand
cgaaguuucaccaccguau

SEQ ID NO: 2016554 - RNA, 19 nt, Homo sapiens
  misc_RNA (1)...(19): siRNA sense strand
gaccuuggguggagaucac

SEQ ID NO: 2016555 - RNA, 19 nt, Homo sapiens
  misc_RNA (1)...(19): siRNA sense strand
gaacgugaugggcugugau

SEQ ID NO: 2016556 - RNA, 19 nt, Homo sapiens
  misc_RNA (1)...(19): siRNA sense strand
aggcaaacccauuuauauc

SEQ ID NO: 2016557 - RNA, 19 nt, Homo sapiens
  misc_RNA (1)...(19): siRNA sense strand
gugaaugucaaucuuuaca

SEQ ID NO: 2016558 - RNA, 19 nt, Homo sapiens
  misc_RNA (1)...(19): siRNA sense strand
uucaagaggccuaugagaa

SEQ ID NO: 2016559 - RNA, 19 nt, Homo sapiens
  misc_RNA (1)...(19): siRNA sense strand
gcagaccuaggcgauguga

SEQ ID NO: 2016560 - RNA, 19 nt, Homo sapiens
  misc_RNA (1)...(19): siRNA sense strand
gucaggcucuggagaucau

SEQ ID NO: 2016561 - RNA, 19 nt, Homo sapiens
  misc_RNA (1)...(19): siRNA sense strand
acacggacacgaccgacaa

SEQ ID NO: 2016562 - RNA, 19 nt, Homo sapiens
  misc_RNA (1)...(19): siRNA sense strand
uaggcgaugugaaugucaa

SEQ ID NO: 2016563 - RNA, 19 nt, Homo sapiens
  misc_RNA (1)...(19): siRNA sense strand
ugucaaucuuuacaaccuu

SEQ ID NO: 2016564 - RNA, 19 nt, Homo sapiens
  misc_RNA (1)...(19): siRNA sense strand
gcacacaucuuuggaauua

SEQ ID NO: 2016565 - RNA, 19 nt, Homo sapiens
  misc_RNA (1)...(19): siRNA sense strand
gaaacugccucauaaauuu

SEQ ID NO: 2016566 - RNA, 19 nt, Homo sapiens
  misc_RNA (1)...(19): siRNA sense strand
agaaagaacuugaaaggua

SEQ ID NO: 2016567 - RNA, 19 nt, Homo sapiens
  misc_RNA (1)...(19): siRNA sense strand
gacaagcacugaaagauaa

SEQ ID NO: 2016568 - RNA, 19 nt, Homo sapiens
  misc_RNA (1)...(19): siRNA sense strand
gaaaguauaccuccaguuu

SEQ ID NO: 2016569 - RNA, 19 nt, Homo sapiens
  misc_RNA (1)...(19): siRNA sense strand
ggaaaugucuucaaaugau

SEQ ID NO: 2016570 - RNA, 19 nt, Homo sapiens
  misc_RNA (1)...(19): siRNA sense strand
gagcagaaguuugaacaua

SEQ ID NO: 2016571 - RNA, 19 nt, Homo sapiens
  misc_RNA (1)...(19): siRNA sense strand
gcacaaaccagauaauauu

SEQ ID NO: 2016572 - RNA, 19 nt, Homo sapiens
  misc_RNA (1)...(19): siRNA sense strand
gaaaggcauuuacuucaaa

SEQ ID NO: 2016573 - RNA, 19 nt, Homo sapiens
  misc_RNA (1)...(19): siRNA sense strand
gaccauaaauguaagguuu

SEQ ID NO: 2016574 - RNA, 19 nt, Homo sapiens
  misc_RNA (1)...(19): siRNA sense strand
uagaagaucugaugucaaa

SEQ ID NO: 2016575 - RNA, 19 nt, Homo sapiens
  misc_RNA (1)...(19): siRNA sense strand
gaaauguucacuucaguua

SEQ ID NO: 2016576 - RNA, 19 nt, Homo sapiens
  misc_RNA (1)...(19): siRNA sense strand
ugagaaagcugucaaggaa

SEQ ID NO: 2016577 - RNA, 19 nt, Homo sapiens
  misc_RNA (1)...(19): siRNA sense strand
gagauaggcugguuugaug

SEQ ID NO: 2016578 - RNA, 19 nt, Homo sapiens
  misc_RNA (1)...(19): siRNA sense strand
gaagaucgcuacugaagca

SEQ ID NO: 2016579 - RNA, 19 nt, Homo sapiens
  misc_RNA (1)...(19): siRNA sense strand
ggacaagcacugaaagaua

SEQ ID NO: 2016580 - RNA, 19 nt, Homo sapiens
  misc_RNA (1)...(19): siRNA sense strand
gagcuuaacacccgacuua

SEQ ID NO: 2016581 - RNA, 19 nt, Homo sapiens
  misc_RNA (1)...(19): siRNA sense strand
caacauacaugccuucauc

SEQ ID NO: 2016582 - RNA, 19 nt, Homo sapiens
  misc_RNA (1)...(19): siRNA sense strand
ugacagauaucuuugcaaa

SEQ ID NO: 2016583 - RNA, 19 nt, Homo sapiens
  misc_RNA (1)...(19): siRNA sense strand
gaaauaaagcgacugaaug

SEQ ID NO: 2016584 - RNA, 19 nt, Homo sapiens
  misc_RNA (1)...(19): siRNA sense strand
ccagguaugccuauuauua

SEQ ID NO: 2016585 - RNA, 19 nt, Homo sapiens
  misc_RNA (1)...(19): siRNA sense strand
gaagcuaacccuugugauu

SEQ ID NO: 2016586 - RNA, 19 nt, Homo sapiens
  misc_RNA (1)...(19): siRNA sense strand
gauucaagauccagucuaa

SEQ ID NO: 2016587 - RNA, 19 nt, Homo sapiens
  misc_RNA (1)...(19): siRNA sense strand
gauacaggguucuucauga

SEQ ID NO: 2016588 - RNA, 19 nt, Homo sapiens
  misc_RNA (1)...(19): siRNA sense strand
ggacaggaauaauuauauc

SEQ ID NO: 2016589 - RNA, 19 nt, Homo sapiens
  misc_RNA (1)...(19): siRNA sense strand
gaucgcuacugaagcaaua

SEQ ID NO: 2016590 - RNA, 19 nt, Homo sapiens
  misc_RNA (1)...(19): siRNA sense strand
gaacugugauugcauuugg

SEQ ID NO: 2016591 - RNA, 19 nt, Homo sapiens
  misc_RNA (1)...(19): siRNA sense strand
gauccagucuaauaagaaa

SEQ ID NO: 2016592 - RNA, 19 nt, Homo sapiens
  misc_RNA (1)...(19): siRNA sense strand
gauauuaggaccauaaaug

SEQ ID NO: 2016593 - RNA, 19 nt, Homo sapiens
  misc_RNA (1)...(19): siRNA sense strand
gcagaaguuugaacauaug

SEQ ID NO: 2016594 - RNA, 19 nt, Homo sapiens
  misc_RNA (1)...(19): siRNA sense strand
aaacaccacuggagcauug

SEQ ID NO: 2016595 - RNA, 19 nt, Homo sapiens
  misc_RNA (1)...(19): siRNA sense strand
ggacaaguacucacuguau

SEQ ID NO: 2016596 - RNA, 19 nt, Homo sapiens
  misc_RNA (1)...(19): siRNA sense strand
gaugugaguugguuugaug

SEQ ID NO: 2016597 - RNA, 19 nt, Homo sapiens
  misc_RNA (1)...(19): siRNA sense strand
caaccagcauuugcaauaa

SEQ ID NO: 2016598 - RNA, 19 nt, Homo sapiens
  misc_RNA (1)...(19): siRNA sense strand
acagauaucuuugcaaaug

SEQ ID NO: 2016599 - RNA, 19 nt, Homo sapiens
  misc_RNA (1)...(19): siRNA sense strand
ccagaaugcagacuuaaua

SEQ ID NO: 2016600 - RNA, 19 nt, Homo sapiens
  misc_RNA (1)...(19): siRNA sense strand
ucgagucacugccuaauaa

SEQ ID NO: 2016601 - RNA, 19 nt, Homo sapiens
  misc_RNA (1)...(19): siRNA sense strand
ggacaggcaucuccaagca

SEQ ID NO: 2016602 - RNA, 19 nt, Homo sapiens
  misc_RNA (1)...(19): siRNA sense strand
gagcaaagaagaagaacuu

SEQ ID NO: 2016603 - RNA, 19 nt, Homo sapiens
  misc_RNA (1)...(19): siRNA sense strand
gaccagguaugccuauuau

SEQ ID NO: 2016604 - RNA, 19 nt, Homo sapiens
  misc_RNA (1)...(19): siRNA sense strand
gcacagaaaggcaucuauu

SEQ ID NO: 2016605 - RNA, 19 nt, Homo sapiens
  misc_RNA (1)...(19): siRNA sense strand
gaaacaacgcauugccaua

SEQ ID NO: 2016606 - RNA, 19 nt, Homo sapiens
  misc_RNA (1)...(19): siRNA sense strand
guaauuacccagaauauag

SEQ ID NO: 2016607 - RNA, 19 nt, Homo sapiens
  misc_RNA (1)...(19): siRNA sense strand
ugugauagcucaucguuug

SEQ ID NO: 2016608 - RNA, 19 nt, Homo sapiens
  misc_RNA (1)...(19): siRNA sense strand
ggaauguucuuucagucaa

SEQ ID NO: 2016609 - RNA, 19 nt, Homo sapiens
  misc_RNA (1)...(19): siRNA sense strand
cauccagaaugcagacuua

SEQ ID NO: 2016610 - RNA, 19 nt, Homo sapiens
  misc_RNA (1)...(19): siRNA sense strand
caaugaugcugcucaaguu

SEQ ID NO: 2016611 - RNA, 19 nt, Homo sapiens
  misc_RNA (1)...(19): siRNA sense strand
cuaccaggcucgccaauga

SEQ ID NO: 2016612 - RNA, 19 nt, Homo sapiens
  misc_RNA (1)...(19): siRNA sense strand
gcagacagcaggaaaugaa

SEQ ID NO: 2016613 - RNA, 19 nt, Homo sapiens
  misc_RNA (1)...(19): siRNA sense strand
gacaaguacucacuguauu

SEQ ID NO: 2016614 - RNA, 19 nt, Homo sapiens
  misc_RNA (1)...(19): siRNA sense strand
gaaaugacagauaucuuug

SEQ ID NO: 2016615 - RNA, 19 nt, Homo sapiens
  misc_RNA (1)...(19): siRNA sense strand
ugaaauugaugccuuggaa

SEQ ID NO: 2016616 - RNA, 19 nt, Homo sapiens
  misc_RNA (1)...(19): siRNA sense strand
ugucaaacaucacuaauag

SEQ ID NO: 2016617 - RNA, 19 nt, Homo sapiens
  misc_RNA (1)...(19): siRNA sense strand
gcugguugcugcuuacauu

SEQ ID NO: 2016618 - RNA, 19 nt, Homo sapiens
  misc_RNA (1)...(19): siRNA sense strand
caaaggaacucagcucucu

SEQ ID NO: 2016619 - RNA, 19 nt, Homo sapiens
  misc_RNA (1)...(19): siRNA sense strand
uggcaaagcuggagagauc

SEQ ID NO: 2016620 - RNA, 19 nt, Homo sapiens
  misc_RNA (1)...(19): siRNA sense strand
uaacugaauggccuuauuu

SEQ ID NO: 2016621 - RNA, 19 nt, Homo sapiens
  misc_RNA (1)...(19): siRNA sense strand
acagaaagcuuaguaccaa

SEQ ID NO: 2016622 - RNA, 19 nt, Homo sapiens
  misc_RNA (1)...(19): siRNA sense strand
gagaaaggcauuuacuuca

SEQ ID NO: 2016623 - RNA, 19 nt, Homo sapiens
  misc_RNA (1)...(19): siRNA sense strand
gcacaacaguccagcugau

SEQ ID NO: 2016624 - RNA, 19 nt, Homo sapiens
  misc_RNA (1)...(19): siRNA sense strand
gccaaugccuaugacuuua

SEQ ID NO: 2016625 - RNA, 19 nt, Homo sapiens
  misc_RNA (1)...(19): siRNA sense strand
cagaaacucuuugaggaaa

SEQ ID NO: 2016626 - RNA, 19 nt, Homo sapiens
  misc_RNA (1)...(19): siRNA sense strand
caagacagaaagcuuagua

SEQ ID NO: 2016627 - RNA, 19 nt, Homo sapiens
  misc_RNA (1)...(19): siRNA sense strand
ugaaacugccucauaaauu

SEQ ID NO: 2016628 - RNA, 19 nt, Homo sapiens
  misc_RNA (1)...(19): siRNA sense strand
gaaugcagacuuaauagug

SEQ ID NO: 2016629 - RNA, 19 nt, Homo sapiens
  misc_RNA (1)...(19): siRNA sense strand
ccaagaagcccuggacaaa

SEQ ID NO: 2016630 - RNA, 19 nt, Homo sapiens
  misc_RNA (1)...(19): siRNA sense strand
ggaggauuaugaagcuaaa

SEQ ID NO: 2016631 - RNA, 19 nt, Homo sapiens
  misc_RNA (1)...(19): siRNA sense strand
ucaugaaucuggaggaaga

SEQ ID NO: 2016632 - RNA, 19 nt, Homo sapiens
  misc_RNA (1)...(19): siRNA sense strand
cacauaaacucaugagcuu

SEQ ID NO: 2016633 - RNA, 19 nt, Homo sapiens
  misc_RNA (1)...(19): siRNA sense strand
gaaacaaaacgacagaaua

SEQ ID NO: 2016634 - RNA, 19 nt, Homo sapiens
  misc_RNA (1)...(19): siRNA sense strand
ugaaagagaaaggcauuua

SEQ ID NO: 2016635 - RNA, 19 nt, Homo sapiens
  misc_RNA (1)...(19): siRNA sense strand
gaagaucugaugucaaaca

SEQ ID NO: 2016636 - RNA, 19 nt, Homo sapiens
  misc_RNA (1)...(19): siRNA sense strand
uaaaguaggagacaaagga

SEQ ID NO: 2016637 - RNA, 19 nt, Homo sapiens
  misc_RNA (1)...(19): siRNA sense strand
caaaggaggccaacauaca

SEQ ID NO: 2016638 - RNA, 19 nt, Homo sapiens
  misc_RNA (1)...(19): siRNA sense strand
ggcauuuacuucaaacuug

SEQ ID NO: 2016639 - RNA, 19 nt, Homo sapiens
  misc_RNA (1)...(19): siRNA sense strand
gcugaucuaugcaucuuau

SEQ ID NO: 2016640 - RNA, 19 nt, Homo sapiens
  misc_RNA (1)...(19): siRNA sense strand
aggaagacaugaccaggua

SEQ ID NO: 2016641 - RNA, 19 nt, Homo sapiens
  misc_RNA (1)...(19): siRNA sense strand
uaauagugguguuucagaa

SEQ ID NO: 2016642 - RNA, 19 nt, Homo sapiens
  misc_RNA (1)...(19): siRNA sense strand
gcacuaaaguaggagacaa

SEQ ID NO: 2016643 - RNA, 19 nt, Homo sapiens
  misc_RNA (1)...(19): siRNA sense strand
caaggaagccaaugccuau

SEQ ID NO: 2016644 - RNA, 19 nt, Homo sapiens
  misc_RNA (1)...(19): siRNA sense strand
ugaagggucugaaccugaa

SEQ ID NO: 2016645 - RNA, 19 nt, Homo sapiens
  misc_RNA (1)...(19): siRNA sense strand
gggcacaaaccagauaaua

SEQ ID NO: 2016646 - RNA, 19 nt, Homo sapiens
  misc_RNA (1)...(19): siRNA sense strand
agaaaggcauuuacuucaa

SEQ ID NO: 2016647 - RNA, 19 nt, Homo sapiens
  misc_RNA (1)...(19): siRNA sense strand
ggccgcaccugcauuguga

SEQ ID NO: 2016648 - RNA, 19 nt, Homo sapiens
  misc_RNA (1)...(19): siRNA sense strand
gaacacauuggaaggaaau

SEQ ID NO: 2016649 - RNA, 19 nt, Homo sapiens
  misc_RNA (1)...(19): siRNA sense strand
gaaaagaaaccaacuguca

SEQ ID NO: 2016650 - RNA, 19 nt, Homo sapiens
  misc_RNA (1)...(19): siRNA sense strand
cagaauauagcaaaucuug

SEQ ID NO: 2016651 - RNA, 19 nt, Homo sapiens
  misc_RNA (1)...(19): siRNA sense strand
gcauuuacuucaaacuugu

SEQ ID NO: 2016652 - RNA, 19 nt, Homo sapiens
  misc_RNA (1)...(19): siRNA sense strand
gcccaagacagaaagcuua

SEQ ID NO: 2016653 - RNA, 19 nt, Homo sapiens
  misc_RNA (1)...(19): siRNA sense strand
acacgugguuggaagcuaa

SEQ ID NO: 2016654 - RNA, 19 nt, Homo sapiens
  misc_RNA (1)...(19): siRNA sense strand
gaaggccgcaccugcauug

SEQ ID NO: 2016655 - RNA, 19 nt, Homo sapiens
  misc_RNA (1)...(19): siRNA sense strand
gcucuggccuucugguaug

SEQ ID NO: 2016656 - RNA, 19 nt, Homo sapiens
  misc_RNA (1)...(19): siRNA sense strand
gggauaaagaaagcuauua

SEQ ID NO: 2016657 - RNA, 19 nt, Homo sapiens
  misc_RNA (1)...(19): siRNA sense strand
gggcaagucaguucauuug

SEQ ID NO: 2016658 - RNA, 19 nt, Homo sapiens
  misc_RNA (1)...(19): siRNA sense strand
cccaggcaaugauguauuu

SEQ ID NO: 2016659 - RNA, 19 nt, Homo sapiens
  misc_RNA (1)...(19): siRNA sense strand
gaaauugaugccuuggaaa

SEQ ID NO: 2016660 - RNA, 19 nt, Homo sapiens
  misc_RNA (1)...(19): siRNA sense strand
gcaggaaauuuagaagauc

SEQ ID NO: 2016661 - RNA, 19 nt, Homo sapiens
  misc_RNA (1)...(19): siRNA sense strand
cacauuuggugaaguugua

SEQ ID NO: 2016662 - RNA, 19 nt, Homo sapiens
  misc_RNA (1)...(19): siRNA sense strand
uagcaggaguuguugaaau

SEQ ID NO: 2016663 - RNA, 19 nt, Homo sapiens
  misc_RNA (1)...(19): siRNA sense strand
ucaagauccagucuaauaa

SEQ ID NO: 2016664 - RNA, 19 nt, Homo sapiens
  misc_RNA (1)...(19): siRNA sense strand
gcaaggaggugaccgaguu

SEQ ID NO: 2016665 - RNA, 19 nt, Homo sapiens
  misc_RNA (1)...(19): siRNA sense strand
ggagaaagcucgcaacaac

SEQ ID NO: 2016666 - RNA, 19 nt, Homo sapiens
  misc_RNA (1)...(19): siRNA sense strand
uggaagagaucaucaccua

SEQ ID NO: 2016667 - RNA, 19 nt, Homo sapiens
  misc_RNA (1)...(19): siRNA sense strand
ggacggaggagaugaagug

SEQ ID NO: 2016668 - RNA, 19 nt, Homo sapiens
  misc_RNA (1)...(19): siRNA sense strand
ccauguaccucaucagcaa

SEQ ID NO: 2016669 - RNA, 19 nt, Homo sapiens
  misc_RNA (1)...(19): siRNA sense strand
caaguucuccuccuacaga

SEQ ID NO: 2016670 - RNA, 19 nt, Homo sapiens
  misc_RNA (1)...(19): siRNA sense strand
gaaggaggcccagcaagug

SEQ ID NO: 2016671 - RNA, 19 nt, Homo sapiens
  misc_RNA (1)...(19): siRNA sense strand
gaagagaucaucaccuacu

SEQ ID NO: 2016672 - RNA, 19 nt, Homo sapiens
  misc_RNA (1)...(19): siRNA sense strand
gcgcagggcugagaucaag

SEQ ID NO: 2016673 - RNA, 19 nt, Homo sapiens
  misc_RNA (1)...(19): siRNA sense strand
agaaagcucgcaacaacua

SEQ ID NO: 2016674 - RNA, 19 nt, Homo sapiens
  misc_RNA (1)...(19): siRNA sense strand
gaaagcucgcaacaacuaa

SEQ ID NO: 2016675 - RNA, 19 nt, Homo sapiens
  misc_RNA (1)...(19): siRNA sense strand
gcucgcaacaacuaaauga

SEQ ID NO: 2016676 - RNA, 19 nt, Homo sapiens
  misc_RNA (1)...(19): siRNA sense strand
ucagcgcccucaagaccua

SEQ ID NO: 2016677 - RNA, 19 nt, Homo sapiens
  misc_RNA (1)...(19): siRNA sense strand
gccugcagcugacccugua

SEQ ID NO: 2016678 - RNA, 19 nt, Homo sapiens
  misc_RNA (1)...(19): siRNA sense strand
gcagggcugagaucaaguu

SEQ ID NO: 2016679 - RNA, 19 nt, Homo sapiens
  misc_RNA (1)...(19): siRNA sense strand
aagagaucaucaccuacua

SEQ ID NO: 2016680 - RNA, 19 nt, Homo sapiens
  misc_RNA (1)...(19): siRNA sense strand
cuaugaggcugcugacaag

SEQ ID NO: 2016681 - RNA, 19 nt, Homo sapiens
  misc_RNA (1)...(19): siRNA sense strand
ucgcugauuuggcggugua

SEQ ID NO: 2016682 - RNA, 19 nt, Homo sapiens
  misc_RNA (1)...(19): siRNA sense strand
agaucaaguucuccuccua

SEQ ID NO: 2016683 - RNA, 19 nt, Homo sapiens
  misc_RNA (1)...(19): siRNA sense strand
gaagccgaaucucgcugau

SEQ ID NO: 2016684 - RNA, 19 nt, Homo sapiens
  misc_RNA (1)...(19): siRNA sense strand
ugcauucgaugaccugaug

SEQ ID NO: 2016685 - RNA, 19 nt, Homo sapiens
  misc_RNA (1)...(19): siRNA sense strand
ccaugaaggcugugaacga

SEQ ID NO: 2016686 - RNA, 19 nt, Homo sapiens
  misc_RNA (1)...(19): siRNA sense strand
uacaagacgugucccuucu

SEQ ID NO: 2016687 - RNA, 19 nt, Homo sapiens
  misc_RNA (1)...(19): siRNA sense strand
gcucuggcguccuuugacu

SEQ ID NO: 2016688 - RNA, 19 nt, Homo sapiens
  misc_RNA (1)...(19): siRNA sense strand
agaaggaggcccagcaagu

SEQ ID NO: 2016689 - RNA, 19 nt, Homo sapiens
  misc_RNA (1)...(19): siRNA sense strand
acagaaaggugcccauccu

SEQ ID NO: 2016690 - RNA, 19 nt, Homo sapiens
  misc_RNA (1)...(19): siRNA sense strand
agggugccguggccaagua

SEQ ID NO: 2016691 - RNA, 19 nt, Homo sapiens
  misc_RNA (1)...(19): siRNA sense strand
ucuaugaggcugcugacaa

SEQ ID NO: 2016692 - RNA, 19 nt, Homo sapiens
  misc_RNA (1)...(19): siRNA sense strand
caauaaguacuggcucaug

SEQ ID NO: 2016693 - RNA, 19 nt, Homo sapiens
  misc_RNA (1)...(19): siRNA sense strand
cgagaaggaggcccagcaa

SEQ ID NO: 2016694 - RNA, 19 nt, Homo sapiens
  misc_RNA (1)...(19): siRNA sense strand
ccaggacggaggagaugaa

SEQ ID NO: 2016695 - RNA, 19 nt, Homo sapiens
  misc_RNA (1)...(19): siRNA sense strand
ggaggcccagcaaguguau

SEQ ID NO: 2016696 - RNA, 19 nt, Homo sapiens
  misc_RNA (1)...(19): siRNA sense strand
gagaaagcucgcaacaacu

SEQ ID NO: 2016697 - RNA, 19 nt, Homo sapiens
  misc_RNA (1)...(19): siRNA sense strand
ggcguccuuugacuacauu

SEQ ID NO: 2016698 - RNA, 19 nt, Homo sapiens
  misc_RNA (1)...(19): siRNA sense strand
aguacuggcucaugcucaa

SEQ ID NO: 2016699 - RNA, 19 nt, Homo sapiens
  misc_RNA (1)...(19): siRNA sense strand
ugaacgagcagggcaagga

SEQ ID NO: 2016700 - RNA, 19 nt, Homo sapiens
  misc_RNA (1)...(19): siRNA sense strand
gagccuuccucgacuucca

SEQ ID NO: 2016701 - RNA, 19 nt, Homo sapiens
  misc_RNA (1)...(19): siRNA sense strand
aaagcucgcaacaacuaaa

SEQ ID NO: 2016702 - RNA, 19 nt, Homo sapiens
  misc_RNA (1)...(19): siRNA sense strand
ggcucaugcucaacgagaa

SEQ ID NO: 2016703 - RNA, 19 nt, Homo sapiens
  misc_RNA (1)...(19): siRNA sense strand
gcaaccagguggagaaauu

SEQ ID NO: 2016704 - RNA, 19 nt, Homo sapiens
  misc_RNA (1)...(19): siRNA sense strand
gaaauugacccaccuaagu

SEQ ID NO: 2016705 - RNA, 19 nt, Homo sapiens
  misc_RNA (1)...(19): siRNA sense strand
gaaugcaucuaccagaaga

SEQ ID NO: 2016706 - RNA, 19 nt, Homo sapiens
  misc_RNA (1)...(19): siRNA sense strand
ccaccuaaguuacaaggaa

SEQ ID NO: 2016707 - RNA, 19 nt, Homo sapiens
  misc_RNA (1)...(19): siRNA sense strand
gcacugggccguauaugug

SEQ ID NO: 2016708 - RNA, 19 nt, Homo sapiens
  misc_RNA (1)...(19): siRNA sense strand
ccgagaaccugcucaacaa

SEQ ID NO: 2016709 - RNA, 19 nt, Homo sapiens
  misc_RNA (1)...(19): siRNA sense strand
uagaggaccugaucaugga

SEQ ID NO: 2016710 - RNA, 19 nt, Homo sapiens
  misc_RNA (1)...(19): siRNA sense strand
gagaaauugacccaccuaa

SEQ ID NO: 2016711 - RNA, 19 nt, Homo sapiens
  misc_RNA (1)...(19): siRNA sense strand
ggagaaauugacccaccua

SEQ ID NO: 2016712 - RNA, 19 nt, Homo sapiens
  misc_RNA (1)...(19): siRNA sense strand
gcagucacacgcucgaguu

SEQ ID NO: 2016713 - RNA, 19 nt, Homo sapiens
  misc_RNA (1)...(19): siRNA sense strand
aaauugacccaccuaaguu

SEQ ID NO: 2016714 - RNA, 19 nt, Homo sapiens
  misc_RNA (1)...(19): siRNA sense strand
acgaaugcaucuaccagaa

SEQ ID NO: 2016715 - RNA, 19 nt, Homo sapiens
  misc_RNA (1)...(19): siRNA sense strand
ggaaugcuccguguucuac

SEQ ID NO: 2016716 - RNA, 19 nt, Homo sapiens
  misc_RNA (1)...(19): siRNA sense strand
guaccuacacgcccgagaa

SEQ ID NO: 2016717 - RNA, 19 nt, Homo sapiens
  misc_RNA (1)...(19): siRNA sense strand
cgggcgaucugguggaguu

SEQ ID NO: 2016718 - RNA, 19 nt, Homo sapiens
  misc_RNA (1)...(19): siRNA sense strand
agaaccugcucaacaagug

SEQ ID NO: 2016719 - RNA, 19 nt, Homo sapiens
  misc_RNA (1)...(19): siRNA sense strand
gguggaaugcuccguguuc

SEQ ID NO: 2016720 - RNA, 19 nt, Homo sapiens
  misc_RNA (1)...(19): siRNA sense strand
ccuaccggcugcagauuca

SEQ ID NO: 2016721 - RNA, 19 nt, Homo sapiens
  misc_RNA (1)...(19): siRNA sense strand
uuaacagcuuccugacuga

SEQ ID NO: 2016722 - RNA, 19 nt, Homo sapiens
  misc_RNA (1)...(19): siRNA sense strand
gagaaccugcucaacaagu

SEQ ID NO: 2016723 - RNA, 19 nt, Homo sapiens
  misc_RNA (1)...(19): siRNA sense strand
gcaucuaccagaagagcuu

SEQ ID NO: 2016724 - RNA, 19 nt, Homo sapiens
  misc_RNA (1)...(19): siRNA sense strand
ggcaagcgcgaguucaaga

SEQ ID NO: 2016725 - RNA, 19 nt, Homo sapiens
  misc_RNA (1)...(19): siRNA sense strand
ugacccaccuaaguuacaa

SEQ ID NO: 2016726 - RNA, 19 nt, Homo sapiens
  misc_RNA (1)...(19): siRNA sense strand
aauugacccaccuaaguua

SEQ ID NO: 2016727 - RNA, 19 nt, Homo sapiens
  misc_RNA (1)...(19): siRNA sense strand
ccguauauguggguaacuu

SEQ ID NO: 2016728 - RNA, 19 nt, Homo sapiens
  misc_RNA (1)...(19): siRNA sense strand
gcaagcgcgaguucaagau

SEQ ID NO: 2016729 - RNA, 19 nt, Homo sapiens
  misc_RNA (1)...(19): siRNA sense strand
caaccagguggagaaauug

SEQ ID NO: 2016730 - RNA, 19 nt, Homo sapiens
  misc_RNA (1)...(19): siRNA sense strand
ggcuggaggugauuaacag

SEQ ID NO: 2016731 - RNA, 19 nt, Homo sapiens
  misc_RNA (1)...(19): siRNA sense strand
uggaggugauuaacagcuu

SEQ ID NO: 2016732 - RNA, 19 nt, Homo sapiens
  misc_RNA (1)...(19): siRNA sense strand
gggcaaccagguggagaaa

SEQ ID NO: 2016733 - RNA, 19 nt, Homo sapiens
  misc_RNA (1)...(19): siRNA sense strand
gaacauaggugacguguau

SEQ ID NO: 2016734 - RNA, 19 nt, Homo sapiens
  misc_RNA (1)...(19): siRNA sense strand
gagaugguguuuacuuuau

SEQ ID NO: 2016735 - RNA, 19 nt, Homo sapiens
  misc_RNA (1)...(19): siRNA sense strand
gagcccaccuuguguuuga

SEQ ID NO: 2016736 - RNA, 19 nt, Homo sapiens
  misc_RNA (1)...(19): siRNA sense strand
uaaagucggugucucauac

SEQ ID NO: 2016737 - RNA, 19 nt, Homo sapiens
  misc_RNA (1)...(19): siRNA sense strand
gaaggucgaaguugaguau

SEQ ID NO: 2016738 - RNA, 19 nt, Homo sapiens
  misc_RNA (1)...(19): siRNA sense strand
gagaagaggcucaucaucu

SEQ ID NO: 2016739 - RNA, 19 nt, Homo sapiens
  misc_RNA (1)...(19): siRNA sense strand
ugacagagcccaccuugug

SEQ ID NO: 2016740 - RNA, 19 nt, Homo sapiens
  misc_RNA (1)...(19): siRNA sense strand
ucuaagauaugcucacaug

SEQ ID NO: 2016741 - RNA, 19 nt, Homo sapiens
  misc_RNA (1)...(19): siRNA sense strand
cgagaugguguuuacuuua

SEQ ID NO: 2016742 - RNA, 19 nt, Homo sapiens
  misc_RNA (1)...(19): siRNA sense strand
ggucgaaguugaguaugaa

SEQ ID NO: 2016743 - RNA, 19 nt, Homo sapiens
  misc_RNA (1)...(19): siRNA sense strand
ccgagaugguguuuacuuu

SEQ ID NO: 2016744 - RNA, 19 nt, Homo sapiens
  misc_RNA (1)...(19): siRNA sense strand
ccacuugccaggcuuguuu

SEQ ID NO: 2016745 - RNA, 19 nt, Homo sapiens
  misc_RNA (1)...(19): siRNA sense strand
gguccgagaugguguuuac

SEQ ID NO: 2016746 - RNA, 19 nt, Homo sapiens
  misc_RNA (1)...(19): siRNA sense strand
ggaccaaccuacucuucca

SEQ ID NO: 2016747 - RNA, 19 nt, Homo sapiens
  misc_RNA (1)...(19): siRNA sense strand
gaugguguuuacuuuaugu

SEQ ID NO: 2016748 - RNA, 19 nt, Homo sapiens
  misc_RNA (1)...(19): siRNA sense strand
gguguuuacuuuauguaug

SEQ ID NO: 2016749 - RNA, 19 nt, Homo sapiens
  misc_RNA (1)...(19): siRNA sense strand
gagcagaucaacgagauug

SEQ ID NO: 2016750 - RNA, 19 nt, Homo sapiens
  misc_RNA (1)...(19): siRNA sense strand
gaacuacauccgcuuugug

SEQ ID NO: 2016751 - RNA, 19 nt, Homo sapiens
  misc_RNA (1)...(19): siRNA sense strand
ugacgaagcuggacauccu

SEQ ID NO: 2016752 - RNA, 19 nt, Homo sapiens
  misc_RNA (1)...(19): siRNA sense strand
agaagaggcucaucaucuc

SEQ ID NO: 2016753 - RNA, 19 nt, Homo sapiens
  misc_RNA (1)...(19): siRNA sense strand
gcgaccuccugucagauuu

SEQ ID NO: 2016754 - RNA, 19 nt, Homo sapiens
  misc_RNA (1)...(19): siRNA sense strand
ccugaugauucuaagauau

SEQ ID NO: 2016755 - RNA, 19 nt, Homo sapiens
  misc_RNA (1)...(19): siRNA sense strand
gcacaagaggggaagaaua

SEQ ID NO: 2016756 - RNA, 19 nt, Homo sapiens
  misc_RNA (1)...(19): siRNA sense strand
ggacguacugggugagguu

SEQ ID NO: 2016757 - RNA, 19 nt, Homo sapiens
  misc_RNA (1)...(19): siRNA sense strand
uaagauaugcucacauggu

SEQ ID NO: 2016758 - RNA, 19 nt, Homo sapiens
  misc_RNA (1)...(19): siRNA sense strand
gaagcagagaagaaugaaa

SEQ ID NO: 2016759 - RNA, 19 nt, Homo sapiens
  misc_RNA (1)...(19): siRNA sense strand
gggagucgcagucaaaugg

SEQ ID NO: 2016760 - RNA, 19 nt, Homo sapiens
  misc_RNA (1)...(19): siRNA sense strand
ccaccgagcagaucaacga

SEQ ID NO: 2016761 - RNA, 19 nt, Homo sapiens
  misc_RNA (1)...(19): siRNA sense strand
gaccugaugauucuaagau

SEQ ID NO: 2016762 - RNA, 19 nt, Homo sapiens
  misc_RNA (1)...(19): siRNA sense strand
accaggagaugcuucagaa

SEQ ID NO: 2016763 - RNA, 19 nt, Homo sapiens
  misc_RNA (1)...(19): siRNA sense strand
ggagaagaggcucaucauc

SEQ ID NO: 2016764 - RNA, 19 nt, Homo sapiens
  misc_RNA (1)...(19): siRNA sense strand
ccagaacuacauccgcuuu

SEQ ID NO: 2016765 - RNA, 19 nt, Homo sapiens
  misc_RNA (1)...(19): siRNA sense strand
gauaugcucacauggucaa

SEQ ID NO: 2016766 - RNA, 19 nt, Homo sapiens
  misc_RNA (1)...(19): siRNA sense strand
ccgagcagaucaacgagau

SEQ ID NO: 2016767 - RNA, 19 nt, Homo sapiens
  misc_RNA (1)...(19): siRNA sense strand
gguuaaagucggugucuca

SEQ ID NO: 2016768 - RNA, 19 nt, Homo sapiens
  misc_RNA (1)...(19): siRNA sense strand
caagagagucgaugaucca

SEQ ID NO: 2016769 - RNA, 19 nt, Homo sapiens
  misc_RNA (1)...(19): siRNA sense strand
uucagaaggucgaaguuga

SEQ ID NO: 2016770 - RNA, 19 nt, Homo sapiens
  misc_RNA (1)...(19): siRNA sense strand
ggaagcagagaagaaugaa

SEQ ID NO: 2016771 - RNA, 19 nt, Homo sapiens
  misc_RNA (1)...(19): siRNA sense strand
gcagaucaacgagauugga

SEQ ID NO: 2016772 - RNA, 19 nt, Homo sapiens
  misc_RNA (1)...(19): siRNA sense strand
cugaaggacugggagaaga

SEQ ID NO: 2016773 - RNA, 19 nt, Homo sapiens
  misc_RNA (1)...(19): siRNA sense strand
uuaaagucggugucucaua

SEQ ID NO: 2016774 - RNA, 19 nt, Homo sapiens
  misc_RNA (1)...(19): siRNA sense strand
ggacauccuggacguacug

SEQ ID NO: 2016775 - RNA, 19 nt, Homo sapiens
  misc_RNA (1)...(19): siRNA sense strand
aauauaggcaccaccaaga

SEQ ID NO: 2016776 - RNA, 19 nt, Homo sapiens
  misc_RNA (1)...(19): siRNA sense strand
cguacugggugagguuaaa

SEQ ID NO: 2016777 - RNA, 19 nt, Homo sapiens
  misc_RNA (1)...(19): siRNA sense strand
caucugcgaccuccuguca

SEQ ID NO: 2016778 - RNA, 19 nt, Homo sapiens
  misc_RNA (1)...(19): siRNA sense strand
ucacauggucaacggauuc

SEQ ID NO: 2016779 - RNA, 19 nt, Homo sapiens
  misc_RNA (1)...(19): siRNA sense strand
agaacuacauccgcuuugu

SEQ ID NO: 2016780 - RNA, 19 nt, Homo sapiens
  misc_RNA (1)...(19): siRNA sense strand
ugaggaagcagagaagaau

SEQ ID NO: 2016781 - RNA, 19 nt, Homo sapiens
  misc_RNA (1)...(19): siRNA sense strand
cagagcccaccuuguguuu

SEQ ID NO: 2016782 - RNA, 19 nt, Homo sapiens
  misc_RNA (1)...(19): siRNA sense strand
ccaaccuacucuuccaaag

SEQ ID NO: 2016783 - RNA, 19 nt, Homo sapiens
  misc_RNA (1)...(19): siRNA sense strand
ccacaggcccagaacuaca

SEQ ID NO: 2016784 - RNA, 19 nt, Homo sapiens
  misc_RNA (1)...(19): siRNA sense strand
gggagaagaggcucaucau

SEQ ID NO: 2016785 - RNA, 19 nt, Homo sapiens
  misc_RNA (1)...(19): siRNA sense strand
gcaagucaagagagucgau

SEQ ID NO: 2016786 - RNA, 19 nt, Homo sapiens
  misc_RNA (1)...(19): siRNA sense strand
guuggcaagucaagagagu

SEQ ID NO: 2016787 - RNA, 19 nt, Homo sapiens
  misc_RNA (1)...(19): siRNA sense strand
ggugguggaugggaaagag

SEQ ID NO: 2016788 - RNA, 19 nt, Homo sapiens
  misc_RNA (1)...(19): siRNA sense strand
aggucgaaguugaguauga

SEQ ID NO: 2016789 - RNA, 19 nt, Homo sapiens
  misc_RNA (1)...(19): siRNA sense strand
gaggaagcagagaagaaug

SEQ ID NO: 2016790 - RNA, 19 nt, Homo sapiens
  misc_RNA (1)...(19): siRNA sense strand
gacagagcccaccuugugu

SEQ ID NO: 2016791 - RNA, 19 nt, Homo sapiens
  misc_RNA (1)...(19): siRNA sense strand
cagagaagaaugaaaagaa

SEQ ID NO: 2016792 - RNA, 19 nt, Homo sapiens
  misc_RNA (1)...(19): siRNA sense strand
ugggaaagaguacgacuuc

SEQ ID NO: 2016793 - RNA, 19 nt, Homo sapiens
  misc_RNA (1)...(19): siRNA sense strand
gacauugaaggccaacuca

SEQ ID NO: 2016794 - RNA, 19 nt, Homo sapiens
  misc_RNA (1)...(19): siRNA sense strand
ggaaucggaccaaccuacu

SEQ ID NO: 2016795 - RNA, 19 nt, Homo sapiens
  misc_RNA (1)...(19): siRNA sense strand
cgugggagucgcagucaaa

SEQ ID NO: 2016796 - RNA, 19 nt, Homo sapiens
  misc_RNA (1)...(19): siRNA sense strand
aggaagcagagaagaauga

SEQ ID NO: 2016797 - RNA, 19 nt, Homo sapiens
  misc_RNA (1)...(19): siRNA sense strand
agaugguguuuacuuuaug

SEQ ID NO: 2016798 - RNA, 19 nt, Homo sapiens
  misc_RNA (1)...(19): siRNA sense strand
gcaccaccaagaagggaau

SEQ ID NO: 2016799 - RNA, 19 nt, Homo sapiens
  misc_RNA (1)...(19): siRNA sense strand
accugaugauucuaagaua

SEQ ID NO: 2016800 - RNA, 19 nt, Homo sapiens
  misc_RNA (1)...(19): siRNA sense strand
ggcucgaccugaugauucu

SEQ ID NO: 2016801 - RNA, 19 nt, Homo sapiens
  misc_RNA (1)...(19): siRNA sense strand
ccacggacgccgacaucau

SEQ ID NO: 2016802 - RNA, 19 nt, Homo sapiens
  misc_RNA (1)...(19): siRNA sense strand
cccuggaaauagacauuga

SEQ ID NO: 2016803 - RNA, 19 nt, Homo sapiens
  misc_RNA (1)...(19): siRNA sense strand
gaaagaagcccacauagaa

SEQ ID NO: 2016804 - RNA, 19 nt, Homo sapiens
  misc_RNA (1)...(19): siRNA sense strand
gaagauugcugccuuuauu

SEQ ID NO: 2016805 - RNA, 19 nt, Homo sapiens
  misc_RNA (1)...(19): siRNA sense strand
ggucaaagcugcccugaaa

SEQ ID NO: 2016806 - RNA, 19 nt, Homo sapiens
  misc_RNA (1)...(19): siRNA sense strand
aaacaaagaugcugaaaga

SEQ ID NO: 2016807 - RNA, 19 nt, Homo sapiens
  misc_RNA (1)...(19): siRNA sense strand
gaaaguggcagaauaugua

SEQ ID NO: 2016808 - RNA, 19 nt, Homo sapiens
  misc_RNA (1)...(19): siRNA sense strand
gcucugggauggaauauuu

SEQ ID NO: 2016809 - RNA, 19 nt, Homo sapiens
  misc_RNA (1)...(19): siRNA sense strand
guaagaggcucaagacaug

SEQ ID NO: 2016810 - RNA, 19 nt, Homo sapiens
  misc_RNA (1)...(19): siRNA sense strand
guuuauagcugaugaaguu

SEQ ID NO: 2016811 - RNA, 19 nt, Homo sapiens
  misc_RNA (1)...(19): siRNA sense strand
gagauuagcccauauaagu

SEQ ID NO: 2016812 - RNA, 19 nt, Homo sapiens
  misc_RNA (1)...(19): siRNA sense strand
ugaagaagaugcaaaguuc

SEQ ID NO: 2016813 - RNA, 19 nt, Homo sapiens
  misc_RNA (1)...(19): siRNA sense strand
gauguauggugaagacuuu

SEQ ID NO: 2016814 - RNA, 19 nt, Homo sapiens
  misc_RNA (1)...(19): siRNA sense strand
ccaagagaguagggaauua

SEQ ID NO: 2016815 - RNA, 19 nt, Homo sapiens
  misc_RNA (1)...(19): siRNA sense strand
gauaggauucuaacaguuu

SEQ ID NO: 2016816 - RNA, 19 nt, Homo sapiens
  misc_RNA (1)...(19): siRNA sense strand
ggaccaacuugauaggauu

SEQ ID NO: 2016817 - RNA, 19 nt, Homo sapiens
  misc_RNA (1)...(19): siRNA sense strand
ggcaguacauguuugauga

SEQ ID NO: 2016818 - RNA, 19 nt, Homo sapiens
  misc_RNA (1)...(19): siRNA sense strand
gguaacaaccaaagaaauu

SEQ ID NO: 2016819 - RNA, 19 nt, Homo sapiens
  misc_RNA (1)...(19): siRNA sense strand
gaggaaauccaguaucuug

SEQ ID NO: 2016820 - RNA, 19 nt, Homo sapiens
  misc_RNA (1)...(19): siRNA sense strand
ucaaggaaaugccaagaga

SEQ ID NO: 2016821 - RNA, 19 nt, Homo sapiens
  misc_RNA (1)...(19): siRNA sense strand
gaauugauuuagugaagga

SEQ ID NO: 2016822 - RNA, 19 nt, Homo sapiens
  misc_RNA (1)...(19): siRNA sense strand
ggucaccuaucauccuuaa

SEQ ID NO: 2016823 - RNA, 19 nt, Homo sapiens
  misc_RNA (1)...(19): siRNA sense strand
gcugaaagaagcccacaua

SEQ ID NO: 2016824 - RNA, 19 nt, Homo sapiens
  misc_RNA (1)...(19): siRNA sense strand
cagcaacucugccggagaa

SEQ ID NO: 2016825 - RNA, 19 nt, Homo sapiens
  misc_RNA (1)...(19): siRNA sense strand
cgauggaccucauagaaau

SEQ ID NO: 2016826 - RNA, 19 nt, Homo sapiens
  misc_RNA (1)...(19): siRNA sense strand
cagauggaacugcuaaaua

SEQ ID NO: 2016827 - RNA, 19 nt, Homo sapiens
  misc_RNA (1)...(19): siRNA sense strand
gauuagcccauauaaguuu

SEQ ID NO: 2016828 - RNA, 19 nt, Homo sapiens
  misc_RNA (1)...(19): siRNA sense strand
ugagaauacuccaugcaaa

SEQ ID NO: 2016829 - RNA, 19 nt, Homo sapiens
  misc_RNA (1)...(19): siRNA sense strand
uaaacacacuuugauagga

SEQ ID NO: 2016830 - RNA, 19 nt, Homo sapiens
  misc_RNA (1)...(19): siRNA sense strand
ucaccuaucauccuuaauu

SEQ ID NO: 2016831 - RNA, 19 nt, Homo sapiens
  misc_RNA (1)...(19): siRNA sense strand
cagcaccacugacuccaaa

SEQ ID NO: 2016832 - RNA, 19 nt, Homo sapiens
  misc_RNA (1)...(19): siRNA sense strand
ugaagaugcucauaacagu

SEQ ID NO: 2016833 - RNA, 19 nt, Homo sapiens
  misc_RNA (1)...(19): siRNA sense strand
caccaacuccagauacuua

SEQ ID NO: 2016834 - RNA, 19 nt, Homo sapiens
  misc_RNA (1)...(19): siRNA sense strand
gaaagugugaccucugaga

SEQ ID NO: 2016835 - RNA, 19 nt, Homo sapiens
  misc_RNA (1)...(19): siRNA sense strand
ccagauacuuacagaggaa

SEQ ID NO: 2016836 - RNA, 19 nt, Homo sapiens
  misc_RNA (1)...(19): siRNA sense strand
ugaaagaagcccacauaga

SEQ ID NO: 2016837 - RNA, 19 nt, Homo sapiens
  misc_RNA (1)...(19): siRNA sense strand
ccgaaagugugaccucuga

SEQ ID NO: 2016838 - RNA, 19 nt, Homo sapiens
  misc_RNA (1)...(19): siRNA sense strand
ccagaaaguggcagaauau

SEQ ID NO: 2016839 - RNA, 19 nt, Homo sapiens
  misc_RNA (1)...(19): siRNA sense strand
uccagaaaguggcagaaua

SEQ ID NO: 2016840 - RNA, 19 nt, Homo sapiens
  misc_RNA (1)...(19): siRNA sense strand
caacuugauaggauucuaa

SEQ ID NO: 2016841 - RNA, 19 nt, Homo sapiens
  misc_RNA (1)...(19): siRNA sense strand
gaaaaucccagcagaaaga

SEQ ID NO: 2016842 - RNA, 19 nt, Homo sapiens
  misc_RNA (1)...(19): siRNA sense strand
ggaaaugccaagagaguag

SEQ ID NO: 2016843 - RNA, 19 nt, Homo sapiens
  misc_RNA (1)...(19): siRNA sense strand
aauggaaugugcacggaua

SEQ ID NO: 2016844 - RNA, 19 nt, Homo sapiens
  misc_RNA (1)...(19): siRNA sense strand
gcagaaagagaaauggaau

SEQ ID NO: 2016845 - RNA, 19 nt, Homo sapiens
  misc_RNA (1)...(19): siRNA sense strand
ugagaacggugaacaguac

SEQ ID NO: 2016846 - RNA, 19 nt, Homo sapiens
  misc_RNA (1)...(19): siRNA sense strand
ggaaauccaguaucuugug

SEQ ID NO: 2016847 - RNA, 19 nt, Homo sapiens
  misc_RNA (1)...(19): siRNA sense strand
gcagaguugggaaacauuu

SEQ ID NO: 2016848 - RNA, 19 nt, Homo sapiens
  misc_RNA (1)...(19): siRNA sense strand
guacauguuugaugagaac

SEQ ID NO: 2016849 - RNA, 19 nt, Homo sapiens
  misc_RNA (1)...(19): siRNA sense strand
agauggaacugcuaaauac

SEQ ID NO: 2016850 - RNA, 19 nt, Homo sapiens
  misc_RNA (1)...(19): siRNA sense strand
gaaaggaaaagaugucaaa

SEQ ID NO: 2016851 - RNA, 19 nt, Homo sapiens
  misc_RNA (1)...(19): siRNA sense strand
gcuaaacacacuuugauag

SEQ ID NO: 2016852 - RNA, 19 nt, Homo sapiens
  misc_RNA (1)...(19): siRNA sense strand
aaacagauggaacugcuaa

SEQ ID NO: 2016853 - RNA, 19 nt, Homo sapiens
  misc_RNA (1)...(19): siRNA sense strand
ccucauagaaauguacuua

SEQ ID NO: 2016854 - RNA, 19 nt, Homo sapiens
  misc_RNA (1)...(19): siRNA sense strand
cagcagcucugggauggaa

SEQ ID NO: 2016855 - RNA, 19 nt, Homo sapiens
  misc_RNA (1)...(19): siRNA sense strand
ggaagauugcugccuuuau

SEQ ID NO: 2016856 - RNA, 19 nt, Homo sapiens
  misc_RNA (1)...(19): siRNA sense strand
agugugaccucugagaaua

SEQ ID NO: 2016857 - RNA, 19 nt, Homo sapiens
  misc_RNA (1)...(19): siRNA sense strand
uggaacugcuaaauacaaa

SEQ ID NO: 2016858 - RNA, 19 nt, Homo sapiens
  misc_RNA (1)...(19): siRNA sense strand
caccuaucauccuuaauug

SEQ ID NO: 2016859 - RNA, 19 nt, Homo sapiens
  misc_RNA (1)...(19): siRNA sense strand
gccaaacgccuuucagcaa

SEQ ID NO: 2016860 - RNA, 19 nt, Homo sapiens
  misc_RNA (1)...(19): siRNA sense strand
agaagaccaugcagacuca

SEQ ID NO: 2016861 - RNA, 19 nt, Homo sapiens
  misc_RNA (1)...(19): siRNA sense strand
uaauacguauggaggaaau

SEQ ID NO: 2016862 - RNA, 19 nt, Homo sapiens
  misc_RNA (1)...(19): siRNA sense strand
ccagaggcaguacauguuu

SEQ ID NO: 2016863 - RNA, 19 nt, Homo sapiens
  misc_RNA (1)...(19): siRNA sense strand
cugaauccaugcagaguug

SEQ ID NO: 2016864 - RNA, 19 nt, Homo sapiens
  misc_RNA (1)...(19): siRNA sense strand
gcucauaacaguggaagga

SEQ ID NO: 2016865 - RNA, 19 nt, Homo sapiens
  misc_RNA (1)...(19): siRNA sense strand
gaacggugaacaguacuug

SEQ ID NO: 2016866 - RNA, 19 nt, Homo sapiens
  misc_RNA (1)...(19): siRNA sense strand
gaagaagaugcaaaguuca

SEQ ID NO: 2016867 - RNA, 19 nt, Homo sapiens
  misc_RNA (1)...(19): siRNA sense strand
cagcacaucaucuacaaga

SEQ ID NO: 2016868 - RNA, 19 nt, Homo sapiens
  misc_RNA (1)...(19): siRNA sense strand
guaacaaccaaagaaauug

SEQ ID NO: 2016869 - RNA, 19 nt, Homo sapiens
  misc_RNA (1)...(19): siRNA sense strand
gaaacagauggaacugcua

SEQ ID NO: 2016870 - RNA, 19 nt, Homo sapiens
  misc_RNA (1)...(19): siRNA sense strand
aaacagaaggcuaaacaca

SEQ ID NO: 2016871 - RNA, 19 nt, Homo sapiens
  misc_RNA (1)...(19): siRNA sense strand
caagagaguagggaauuau

SEQ ID NO: 2016872 - RNA, 19 nt, Homo sapiens
  misc_RNA (1)...(19): siRNA sense strand
gcagcucugggauggaaua

SEQ ID NO: 2016873 - RNA, 19 nt, Homo sapiens
  misc_RNA (1)...(19): siRNA sense strand
gcccauauaaguuucagaa

SEQ ID NO: 2016874 - RNA, 19 nt, Homo sapiens
  misc_RNA (1)...(19): siRNA sense strand
gcaggcuacuuccagaaag

SEQ ID NO: 2016875 - RNA, 19 nt, Homo sapiens
  misc_RNA (1)...(19): siRNA sense strand
ugauaggauucuaacaguu

SEQ ID NO: 2016876 - RNA, 19 nt, Homo sapiens
  misc_RNA (1)...(19): siRNA sense strand
ccagauguauggugaagac

SEQ ID NO: 2016877 - RNA, 19 nt, Homo sapiens
  misc_RNA (1)...(19): siRNA sense strand
uccaguaucuugugcuguu

SEQ ID NO: 2016878 - RNA, 19 nt, Homo sapiens
  misc_RNA (1)...(19): siRNA sense strand
acaaagaugcugaaagaag

SEQ ID NO: 2016879 - RNA, 19 nt, Homo sapiens
  misc_RNA (1)...(19): siRNA sense strand
cagaugaagugaagaaaau

SEQ ID NO: 2016880 - RNA, 19 nt, Homo sapiens
  misc_RNA (1)...(19): siRNA sense strand
gugcacggauacacauuca

SEQ ID NO: 2016881 - RNA, 19 nt, Homo sapiens
  misc_RNA (1)...(19): siRNA sense strand
gcaccacugacuccaaaga

SEQ ID NO: 2016882 - RNA, 19 nt, Homo sapiens
  misc_RNA (1)...(19): siRNA sense strand
ccgauggaccucauagaaa

SEQ ID NO: 2016883 - RNA, 19 nt, Homo sapiens
  misc_RNA (1)...(19): siRNA sense strand
gccgauggaccucauagaa

SEQ ID NO: 2016884 - RNA, 19 nt, Homo sapiens
  misc_RNA (1)...(19): siRNA sense strand
ggcuaaacacacuuugaua

SEQ ID NO: 2016885 - RNA, 19 nt, Homo sapiens
  misc_RNA (1)...(19): siRNA sense strand
acagaaggcuaaacacacu

SEQ ID NO: 2016886 - RNA, 19 nt, Homo sapiens
  misc_RNA (1)...(19): siRNA sense strand
ucauugaagaugcucauaa

SEQ ID NO: 2016887 - RNA, 19 nt, Homo sapiens
  misc_RNA (1)...(19): siRNA sense strand
gaaagagaaauggaaugug

SEQ ID NO: 2016888 - RNA, 19 nt, Homo sapiens
  misc_RNA (1)...(19): siRNA sense strand
ucaaagcugcccugaaaca

SEQ ID NO: 2016889 - RNA, 19 nt, Homo sapiens
  misc_RNA (1)...(19): siRNA sense strand
cagaggcaguacauguuug

SEQ ID NO: 2016890 - RNA, 19 nt, Homo sapiens
  misc_RNA (1)...(19): siRNA sense strand
cauugaagaugcucauaac

SEQ ID NO: 2016891 - RNA, 19 nt, Homo sapiens
  misc_RNA (1)...(19): siRNA sense strand
uggaauugauuuagugaag

SEQ ID NO: 2016892 - RNA, 19 nt, Homo sapiens
  misc_RNA (1)...(19): siRNA sense strand
gccaagagaguagggaauu

SEQ ID NO: 2016893 - RNA, 19 nt, Homo sapiens
  misc_RNA (1)...(19): siRNA sense strand
guucagaggccaccaggau

SEQ ID NO: 2016894 - RNA, 19 nt, Homo sapiens
  misc_RNA (1)...(19): siRNA sense strand
gagaauacuccaugcaaaa

SEQ ID NO: 2016895 - RNA, 19 nt, Homo sapiens
  misc_RNA (1)...(19): siRNA sense strand
ccagacaucgucacaaugg

SEQ ID NO: 2016896 - RNA, 19 nt, Homo sapiens
  misc_RNA (1)...(19): siRNA sense strand
aagcugcccugaaacagau

SEQ ID NO: 2016897 - RNA, 19 nt, Homo sapiens
  misc_RNA (1)...(19): siRNA sense strand
uuaccauggucaccuauca

SEQ ID NO: 2016898 - RNA, 19 nt, Homo sapiens
  misc_RNA (1)...(19): siRNA sense strand
gcacggauacacauucacu

SEQ ID NO: 2016899 - RNA, 19 nt, Homo sapiens
  misc_RNA (1)...(19): siRNA sense strand
guacuuggacugcaucaac

SEQ ID NO: 2016900 - RNA, 19 nt, Homo sapiens
  misc_RNA (1)...(19): siRNA sense strand
uaucuugugcuguugguuu

SEQ ID NO: 2016901 - RNA, 19 nt, Homo sapiens
  misc_RNA (1)...(19): siRNA sense strand
gcccagaggcaguacaugu

SEQ ID NO: 2016902 - RNA, 19 nt, Homo sapiens
  misc_RNA (1)...(19): siRNA sense strand
gcccacauagaacugcuua

SEQ ID NO: 2016903 - RNA, 19 nt, Homo sapiens
  misc_RNA (1)...(19): siRNA sense strand
ggacugggcuggucucuga

SEQ ID NO: 2016904 - RNA, 19 nt, Homo sapiens
  misc_RNA (1)...(19): siRNA sense strand
caaagacucucuaaauguu

SEQ ID NO: 2016905 - RNA, 19 nt, Homo sapiens
  misc_RNA (1)...(19): siRNA sense strand
cauccuaucuucaagcuua

SEQ ID NO: 2016906 - RNA, 19 nt, Homo sapiens
  misc_RNA (1)...(19): siRNA sense strand
gauacacccuggaaauuaa

SEQ ID NO: 2016907 - RNA, 19 nt, Homo sapiens
  misc_RNA (1)...(19): siRNA sense strand
gaaaucaucuaucgguaug

SEQ ID NO: 2016908 - RNA, 19 nt, Homo sapiens
  misc_RNA (1)...(19): siRNA sense strand
ggaaggaucuagaugacuu

SEQ ID NO: 2016909 - RNA, 19 nt, Homo sapiens
  misc_RNA (1)...(19): siRNA sense strand
ggaccagguuugccacuuu

SEQ ID NO: 2016910 - RNA, 19 nt, Homo sapiens
  misc_RNA (1)...(19): siRNA sense strand
gaucaaggccaacgucauu

SEQ ID NO: 2016911 - RNA, 19 nt, Homo sapiens
  misc_RNA (1)...(19): siRNA sense strand
gcaaacggcaccuccuuaa

SEQ ID NO: 2016912 - RNA, 19 nt, Homo sapiens
  misc_RNA (1)...(19): siRNA sense strand
gaagagagaaggaaguugu

SEQ ID NO: 2016913 - RNA, 19 nt, Homo sapiens
  misc_RNA (1)...(19): siRNA sense strand
caagagaguugacuuugag

SEQ ID NO: 2016914 - RNA, 19 nt, Homo sapiens
  misc_RNA (1)...(19): siRNA sense strand
gaggucagguucccuuguu

SEQ ID NO: 2016915 - RNA, 19 nt, Homo sapiens
  misc_RNA (1)...(19): siRNA sense strand
gagcugcagucucaucuuc

SEQ ID NO: 2016916 - RNA, 19 nt, Homo sapiens
  misc_RNA (1)...(19): siRNA sense strand
cgauacacccuggaaauua

SEQ ID NO: 2016917 - RNA, 19 nt, Homo sapiens
  misc_RNA (1)...(19): siRNA sense strand
acaagagaguugacuuuga

SEQ ID NO: 2016918 - RNA, 19 nt, Homo sapiens
  misc_RNA (1)...(19): siRNA sense strand
ggacaugcccuacgaguac

SEQ ID NO: 2016919 - RNA, 19 nt, Homo sapiens
  misc_RNA (1)...(19): siRNA sense strand
ggaaaucaucuaucgguau

SEQ ID NO: 2016920 - RNA, 19 nt, Homo sapiens
  misc_RNA (1)...(19): siRNA sense strand
gaaauugagauccggaaug

SEQ ID NO: 2016921 - RNA, 19 nt, Homo sapiens
  misc_RNA (1)...(19): siRNA sense strand
cuaaggcugugcugaagaa

SEQ ID NO: 2016922 - RNA, 19 nt, Homo sapiens
  misc_RNA (1)...(19): siRNA sense strand
ucaaagacucucuaaaugu

SEQ ID NO: 2016923 - RNA, 19 nt, Homo sapiens
  misc_RNA (1)...(19): siRNA sense strand
gucgagagaucacugaaau

SEQ ID NO: 2016924 - RNA, 19 nt, Homo sapiens
  misc_RNA (1)...(19): siRNA sense strand
ggaucuagaugacuucaac

SEQ ID NO: 2016925 - RNA, 19 nt, Homo sapiens
  misc_RNA (1)...(19): siRNA sense strand
gcaaggagacagaacucaa

SEQ ID NO: 2016926 - RNA, 19 nt, Homo sapiens
  misc_RNA (1)...(19): siRNA sense strand
gaagaagagcuggaagaga

SEQ ID NO: 2016927 - RNA, 19 nt, Homo sapiens
  misc_RNA (1)...(19): siRNA sense strand
gaccagguuugccacuuug

SEQ ID NO: 2016928 - RNA, 19 nt, Homo sapiens
  misc_RNA (1)...(19): siRNA sense strand
ucgugagucuccacuauaa

SEQ ID NO: 2016929 - RNA, 19 nt, Homo sapiens
  misc_RNA (1)...(19): siRNA sense strand
gaggguuuccugucucuuu

SEQ ID NO: 2016930 - RNA, 19 nt, Homo sapiens
  misc_RNA (1)...(19): siRNA sense strand
agaguugacuuugagguuu

SEQ ID NO: 2016931 - RNA, 19 nt, Homo sapiens
  misc_RNA (1)...(19): siRNA sense strand
gcuggaaggaucuagauga

SEQ ID NO: 2016932 - RNA, 19 nt, Homo sapiens
  misc_RNA (1)...(19): siRNA sense strand
ggagggaggcacacuguuc

SEQ ID NO: 2016933 - RNA, 19 nt, Homo sapiens
  misc_RNA (1)...(19): siRNA sense strand
aaggacggguuaauucuga

SEQ ID NO: 2016934 - RNA, 19 nt, Homo sapiens
  misc_RNA (1)...(19): siRNA sense strand
gcgauacacccuggaaauu

SEQ ID NO: 2016935 - RNA, 19 nt, Homo sapiens
  misc_RNA (1)...(19): siRNA sense strand
gguaccaguuucuuaaugg

SEQ ID NO: 2016936 - RNA, 19 nt, Homo sapiens
  misc_RNA (1)...(19): siRNA sense strand
aaacuggaaggacggguua

SEQ ID NO: 2016937 - RNA, 19 nt, Homo sapiens
  misc_RNA (1)...(19): siRNA sense strand
gaccgaggguuuccugucu

SEQ ID NO: 2016938 - RNA, 19 nt, Homo sapiens
  misc_RNA (1)...(19): siRNA sense strand
ggguaccaguuucuuaaug

SEQ ID NO: 2016939 - RNA, 19 nt, Homo sapiens
  misc_RNA (1)...(19): siRNA sense strand
gagaguugacuuugagguu

SEQ ID NO: 2016940 - RNA, 19 nt, Homo sapiens
  misc_RNA (1)...(19): siRNA sense strand
agacaagagaguugacuuu

SEQ ID NO: 2016941 - RNA, 19 nt, Homo sapiens
  misc_RNA (1)...(19): siRNA sense strand
gggaagaagagcuggaaga

SEQ ID NO: 2016942 - RNA, 19 nt, Homo sapiens
  misc_RNA (1)...(19): siRNA sense strand
ggaaggacggguuaauucu

SEQ ID NO: 2016943 - RNA, 19 nt, Homo sapiens
  misc_RNA (1)...(19): siRNA sense strand
gacaagagaguugacuuug

SEQ ID NO: 2016944 - RNA, 19 nt, Homo sapiens
  misc_RNA (1)...(19): siRNA sense strand
cagcuggacugguacucuu

SEQ ID NO: 2016945 - RNA, 19 nt, Homo sapiens
  misc_RNA (1)...(19): siRNA sense strand
uggcugaggucauuguugu

SEQ ID NO: 2016946 - RNA, 19 nt, Homo sapiens
  misc_RNA (1)...(19): siRNA sense strand
gaguugacuuugagguuuc

SEQ ID NO: 2016947 - RNA, 19 nt, Homo sapiens
  misc_RNA (1)...(19): siRNA sense strand
gaaggacggguuaauucug

SEQ ID NO: 2016948 - RNA, 19 nt, Homo sapiens
  misc_RNA (1)...(19): siRNA sense strand
aggcugugcugaagaaguu

SEQ ID NO: 2016949 - RNA, 19 nt, Homo sapiens
  misc_RNA (1)...(19): siRNA sense strand
aaucgugagucuccacuau

SEQ ID NO: 2016950 - RNA, 19 nt, Homo sapiens
  misc_RNA (1)...(19): siRNA sense strand
cuugauggcugaggucauu

SEQ ID NO: 2016951 - RNA, 19 nt, Homo sapiens
  misc_RNA (1)...(19): siRNA sense strand
aucaaagacucucuaaaug

SEQ ID NO: 2016952 - RNA, 19 nt, Homo sapiens
  misc_RNA (1)...(19): siRNA sense strand
gaccuggugucgagagauc

SEQ ID NO: 2016953 - RNA, 19 nt, Homo sapiens
  misc_RNA (1)...(19): siRNA sense strand
gaggcgcucugcucaccuu

SEQ ID NO: 2016954 - RNA, 19 nt, Homo sapiens
  misc_RNA (1)...(19): siRNA sense strand
ccagaaacaccgggaagaa

SEQ ID NO: 2016955 - RNA, 19 nt, Homo sapiens
  misc_RNA (1)...(19): siRNA sense strand
aaacaguguggccaucuaa

SEQ ID NO: 2016956 - RNA, 19 nt, Homo sapiens
  misc_RNA (1)...(19): siRNA sense strand
uggcugcccuggauaagga

SEQ ID NO: 2016957 - RNA, 19 nt, Homo sapiens
  misc_RNA (1)...(19): siRNA sense strand
ggaagaagagcuggaagag

SEQ ID NO: 2016958 - RNA, 19 nt, Homo sapiens
  misc_RNA (1)...(19): siRNA sense strand
aggguuuccugucucuuua

SEQ ID NO: 2016959 - RNA, 19 nt, Homo sapiens
  misc_RNA (1)...(19): siRNA sense strand
agaaacaccgggaagaaga

SEQ ID NO: 2016960 - RNA, 19 nt, Homo sapiens
  misc_RNA (1)...(19): siRNA sense strand
gcuaucaaagacucucuaa

SEQ ID NO: 2016961 - RNA, 19 nt, Homo sapiens
  misc_RNA (1)...(19): siRNA sense strand
cgaccucgcuaucaaagac

SEQ ID NO: 2016962 - RNA, 19 nt, Homo sapiens
  misc_RNA (1)...(19): siRNA sense strand
uggcgacacugcccaacuu

SEQ ID NO: 2016963 - RNA, 19 nt, Homo sapiens
  misc_RNA (1)...(19): siRNA sense strand
ggaaguaccggaguaucug

SEQ ID NO: 2016964 - RNA, 19 nt, Homo sapiens
  misc_RNA (1)...(19): siRNA sense strand
gugagucuccacuauaaga

SEQ ID NO: 2016965 - RNA, 19 nt, Homo sapiens
  misc_RNA (1)...(19): siRNA sense strand
ugaggugccugccgucgau

SEQ ID NO: 2016966 - RNA, 19 nt, Homo sapiens
  misc_RNA (1)...(19): siRNA sense strand
caagcuggagccuuccuaa

SEQ ID NO: 2016967 - RNA, 19 nt, Homo sapiens
  misc_RNA (1)...(19): siRNA sense strand
ggaaauugagauccggaau

SEQ ID NO: 2016968 - RNA, 19 nt, Homo sapiens
  misc_RNA (1)...(19): siRNA sense strand
ccaacgucauucucuguag

SEQ ID NO: 2016969 - RNA, 19 nt, Homo sapiens
  misc_RNA (1)...(19): siRNA sense strand
aaauugagauccggaaugc

SEQ ID NO: 2016970 - RNA, 19 nt, Homo sapiens
  misc_RNA (1)...(19): siRNA sense strand
ggauaaggaaauugagauc

SEQ ID NO: 2016971 - RNA, 19 nt, Homo sapiens
  misc_RNA (1)...(19): siRNA sense strand
gcagacgccagcccguuau

SEQ ID NO: 2016972 - RNA, 19 nt, Homo sapiens
  misc_RNA (1)...(19): siRNA sense strand
ccaggcuucucuccagaug

SEQ ID NO: 2016973 - RNA, 19 nt, Homo sapiens
  misc_RNA (1)...(19): siRNA sense strand
aaacggcaccuccuuaagg

SEQ ID NO: 2016974 - RNA, 19 nt, Homo sapiens
  misc_RNA (1)...(19): siRNA sense strand
gcucugggaaaucaucuau

SEQ ID NO: 2016975 - RNA, 19 nt, Homo sapiens
  misc_RNA (1)...(19): siRNA sense strand
cucuaaauguucugacuug

SEQ ID NO: 2016976 - RNA, 19 nt, Homo sapiens
  misc_RNA (1)...(19): siRNA sense strand
uggaaggacggguuaauuc

SEQ ID NO: 2016977 - RNA, 19 nt, Homo sapiens
  misc_RNA (1)...(19): siRNA sense strand
ggccgcugcuguuugugaa

SEQ ID NO: 2016978 - RNA, 19 nt, Homo sapiens
  misc_RNA (1)...(19): siRNA sense strand
augcaacgcuggagacagu

SEQ ID NO: 2016979 - RNA, 19 nt, Homo sapiens
  misc_RNA (1)...(19): siRNA sense strand
gaaacaccgggaagaagag

SEQ ID NO: 2016980 - RNA, 19 nt, Homo sapiens
  misc_RNA (1)...(19): siRNA sense strand
agacguggcugugaaagac

SEQ ID NO: 2016981 - RNA, 19 nt, Homo sapiens
  misc_RNA (1)...(19): siRNA sense strand
gaagagcuggaagagagaa

SEQ ID NO: 2016982 - RNA, 19 nt, Homo sapiens
  misc_RNA (1)...(19): siRNA sense strand
gcugcagucucaucuucug

SEQ ID NO: 2016983 - RNA, 19 nt, Homo sapiens
  misc_RNA (1)...(19): siRNA sense strand
uggccgaccucgcuaucaa

SEQ ID NO: 2016984 - RNA, 19 nt, Homo sapiens
  misc_RNA (1)...(19): siRNA sense strand
caaggagacagaacucaag

SEQ ID NO: 2016985 - RNA, 19 nt, Homo sapiens
  misc_RNA (1)...(19): siRNA sense strand
gaacucaagguggaaguac

SEQ ID NO: 2016986 - RNA, 19 nt, Homo sapiens
  misc_RNA (1)...(19): siRNA sense strand
agcaugaggaggaguauuu

SEQ ID NO: 2016987 - RNA, 19 nt, Homo sapiens
  misc_RNA (1)...(19): siRNA sense strand
gcaagcuggagccuuccua

SEQ ID NO: 2016988 - RNA, 19 nt, Homo sapiens
  misc_RNA (1)...(19): siRNA sense strand
ggaaacucuugcccauggu

SEQ ID NO: 2016989 - RNA, 19 nt, Homo sapiens
  misc_RNA (1)...(19): siRNA sense strand
gccaacgucauucucugua

SEQ ID NO: 2016990 - RNA, 19 nt, Homo sapiens
  misc_RNA (1)...(19): siRNA sense strand
gcgcaaacggcaccuccuu

SEQ ID NO: 2016991 - RNA, 19 nt, Homo sapiens
  misc_RNA (1)...(19): siRNA sense strand
gaugacuucaaccggauuu

SEQ ID NO: 2016992 - RNA, 19 nt, Homo sapiens
  misc_RNA (1)...(19): siRNA sense strand
cgcaaacggcaccuccuua

SEQ ID NO: 2016993 - RNA, 19 nt, Homo sapiens
  misc_RNA (1)...(19): siRNA sense strand
aggcccagcuggagaagga

SEQ ID NO: 2016994 - RNA, 19 nt, Homo sapiens
  misc_RNA (1)...(19): siRNA sense strand
gagcuggcugcccuggaua

SEQ ID NO: 2016995 - RNA, 19 nt, Homo sapiens
  misc_RNA (1)...(19): siRNA sense strand
uggaaggaaucgugagucu

SEQ ID NO: 2016996 - RNA, 19 nt, Homo sapiens
  misc_RNA (1)...(19): siRNA sense strand
ggaugagcgauuucuggaa

SEQ ID NO: 2016997 - RNA, 19 nt, Homo sapiens
  misc_RNA (1)...(19): siRNA sense strand
ggaaugcaaagcuggacau

SEQ ID NO: 2016998 - RNA, 19 nt, Homo sapiens
  misc_RNA (1)...(19): siRNA sense strand
ggaagagagaaggaaguug

SEQ ID NO: 2016999 - RNA, 19 nt, Homo sapiens
  misc_RNA (1)...(19): siRNA sense strand
gcaacgcuggagacaguga

SEQ ID NO: 2017000 - RNA, 19 nt, Homo sapiens
  misc_RNA (1)...(19): siRNA sense strand
aaucaucuaucgguaugug

SEQ ID NO: 2017001 - RNA, 19 nt, Homo sapiens
  misc_RNA (1)...(19): siRNA sense strand
gaaucgugagucuccacua

SEQ ID NO: 2017002 - RNA, 19 nt, Homo sapiens
  misc_RNA (1)...(19): siRNA sense strand
gggaccagguuugccacuu

SEQ ID NO: 2017003 - RNA, 19 nt, Homo sapiens
  misc_RNA (1)...(19): siRNA sense strand
caaagagugugaagacuua

SEQ ID NO: 2017004 - RNA, 19 nt, Homo sapiens
  misc_RNA (1)...(19): siRNA sense strand
gcaaagagugugaagacuu

SEQ ID NO: 2017005 - RNA, 19 nt, Homo sapiens
  misc_RNA (1)...(19): siRNA sense strand
ccauggagcucaagaugca

SEQ ID NO: 2017006 - RNA, 19 nt, Homo sapiens
  misc_RNA (1)...(19): siRNA sense strand
gcacggccauggagcucaa

SEQ ID NO: 2017007 - RNA, 19 nt, Homo sapiens
  misc_RNA (1)...(19): siRNA sense strand
gaaaugccugcgucccuuu

SEQ ID NO: 2017008 - RNA, 19 nt, Homo sapiens
  misc_RNA (1)...(19): siRNA sense strand
gaaccacugugagcuugug

SEQ ID NO: 2017009 - RNA, 19 nt, Homo sapiens
  misc_RNA (1)...(19): siRNA sense strand
cccaaucucuaccaucugu

SEQ ID NO: 2017010 - RNA, 19 nt, Homo sapiens
  misc_RNA (1)...(19): siRNA sense strand
ggagggcacagaccuaugg

SEQ ID NO: 2017011 - RNA, 19 nt, Homo sapiens
  misc_RNA (1)...(19): siRNA sense strand
gcagugaggaugggagugu

SEQ ID NO: 2017012 - RNA, 19 nt, Homo sapiens
  misc_RNA (1)...(19): siRNA sense strand
cuuguggacugguugaguu

SEQ ID NO: 2017013 - RNA, 19 nt, Homo sapiens
  misc_RNA (1)...(19): siRNA sense strand
ggccauggagcucaagaug

SEQ ID NO: 2017014 - RNA, 19 nt, Homo sapiens
  misc_RNA (1)...(19): siRNA sense strand
cagcauggagcuugugauc

SEQ ID NO: 2017015 - RNA, 19 nt, Homo sapiens
  misc_RNA (1)...(19): siRNA sense strand
gugcaaagagugugaagac

SEQ ID NO: 2017016 - RNA, 19 nt, Homo sapiens
  misc_RNA (1)...(19): siRNA sense strand
gaugggcucguggcuguga

SEQ ID NO: 2017017 - RNA, 19 nt, Homo sapiens
  misc_RNA (1)...(19): siRNA sense strand
gagcuuguggacugguuga

SEQ ID NO: 2017018 - RNA, 19 nt, Homo sapiens
  misc_RNA (1)...(19): siRNA sense strand
aaaugccugcgucccuuua

SEQ ID NO: 2017019 - RNA, 19 nt, Homo sapiens
  misc_RNA (1)...(19): siRNA sense strand
gcggaaccacugugagcuu

SEQ ID NO: 2017020 - RNA, 19 nt, Homo sapiens
  misc_RNA (1)...(19): siRNA sense strand
ccaccgauggucagacugu

SEQ ID NO: 2017021 - RNA, 19 nt, Homo sapiens
  misc_RNA (1)...(19): siRNA sense strand
gguggagggcacagaccua

SEQ ID NO: 2017022 - RNA, 19 nt, Homo sapiens
  misc_RNA (1)...(19): siRNA sense strand
ucaagaacuuucaccagua

SEQ ID NO: 2017023 - RNA, 19 nt, Homo sapiens
  misc_RNA (1)...(19): siRNA sense strand
gagcaacuguggccuggaa

SEQ ID NO: 2017024 - RNA, 19 nt, Homo sapiens
  misc_RNA (1)...(19): siRNA sense strand
gcucaggaauucagugaug

SEQ ID NO: 2017025 - RNA, 19 nt, Homo sapiens
  misc_RNA (1)...(19): siRNA sense strand
gagaagcggccaagagugu

SEQ ID NO: 2017026 - RNA, 19 nt, Homo sapiens
  misc_RNA (1)...(19): siRNA sense strand
cagcugcaaugacucuaaa

SEQ ID NO: 2017027 - RNA, 19 nt, Homo sapiens
  misc_RNA (1)...(19): siRNA sense strand
caagaacuuucaccaguac

SEQ ID NO: 2017028 - RNA, 19 nt, Homo sapiens
  misc_RNA (1)...(19): siRNA sense strand
cagaggaugcucaggaauu

SEQ ID NO: 2017029 - RNA, 19 nt, Homo sapiens
  misc_RNA (1)...(19): siRNA sense strand
gcagcugcaaugacucuaa

SEQ ID NO: 2017030 - RNA, 19 nt, Homo sapiens
  misc_RNA (1)...(19): siRNA sense strand
gaagcggccaagaguguga

SEQ ID NO: 2017031 - RNA, 19 nt, Homo sapiens
  misc_RNA (1)...(19): siRNA sense strand
agaggaugcucaggaauuc

SEQ ID NO: 2017032 - RNA, 19 nt, Homo sapiens
  misc_RNA (1)...(19): siRNA sense strand
cgcagaggaugcucaggaa

SEQ ID NO: 2017033 - RNA, 19 nt, Homo sapiens
  misc_RNA (1)...(19): siRNA sense strand
guggagagggccauugaga

SEQ ID NO: 2017034 - RNA, 19 nt, Homo sapiens
  misc_RNA (1)...(19): siRNA sense strand
gcaacuguggccuggaaga

SEQ ID NO: 2017035 - RNA, 19 nt, Homo sapiens
  misc_RNA (1)...(19): siRNA sense strand
acuguggccuggaagagaa

SEQ ID NO: 2017036 - RNA, 19 nt, Homo sapiens
  misc_RNA (1)...(19): siRNA sense strand
gcugaccccuucugagcua

SEQ ID NO: 2017037 - RNA, 19 nt, Homo sapiens
  misc_RNA (1)...(19): siRNA sense strand
gcagaggaugcucaggaau

SEQ ID NO: 2017038 - RNA, 19 nt, Homo sapiens
  misc_RNA (1)...(19): siRNA sense strand
gaagaaagaccaugaaugu

SEQ ID NO: 2017039 - RNA, 19 nt, Homo sapiens
  misc_RNA (1)...(19): siRNA sense strand
agucaaagcucauaucuaa

SEQ ID NO: 2017040 - RNA, 19 nt, Homo sapiens
  misc_RNA (1)...(19): siRNA sense strand
gagaaacccuauaagugua

SEQ ID NO: 2017041 - RNA, 19 nt, Homo sapiens
  misc_RNA (1)...(19): siRNA sense strand
gagaaacccuucgaaugua

SEQ ID NO: 2017042 - RNA, 19 nt, Homo sapiens
  misc_RNA (1)...(19): siRNA sense strand
gggaaggccuuuagucaaa

SEQ ID NO: 2017043 - RNA, 19 nt, Homo sapiens
  misc_RNA (1)...(19): siRNA sense strand
ggaacagucuugugaguau

SEQ ID NO: 2017044 - RNA, 19 nt, Homo sapiens
  misc_RNA (1)...(19): siRNA sense strand
gaaaagagccuucccauug

SEQ ID NO: 2017045 - RNA, 19 nt, Homo sapiens
  misc_RNA (1)...(19): siRNA sense strand
ugacugugcuggaggauuu

SEQ ID NO: 2017046 - RNA, 19 nt, Homo sapiens
  misc_RNA (1)...(19): siRNA sense strand
gaaagaccaugaauguagu

SEQ ID NO: 2017047 - RNA, 19 nt, Homo sapiens
  misc_RNA (1)...(19): siRNA sense strand
uaggauggcuguaucacua

SEQ ID NO: 2017048 - RNA, 19 nt, Homo sapiens
  misc_RNA (1)...(19): siRNA sense strand
gagagaaacccuauaagug

SEQ ID NO: 2017049 - RNA, 19 nt, Homo sapiens
  misc_RNA (1)...(19): siRNA sense strand
gcauccagcuccagccuaa

SEQ ID NO: 2017050 - RNA, 19 nt, Homo sapiens
  misc_RNA (1)...(19): siRNA sense strand
gcuggaggauuuagagaaa

SEQ ID NO: 2017051 - RNA, 19 nt, Homo sapiens
  misc_RNA (1)...(19): siRNA sense strand
gaagagccaugggagaaga

SEQ ID NO: 2017052 - RNA, 19 nt, Homo sapiens
  misc_RNA (1)...(19): siRNA sense strand
gagagaaacccuucgaaug

SEQ ID NO: 2017053 - RNA, 19 nt, Homo sapiens
  misc_RNA (1)...(19): siRNA sense strand
gaccaugaauguagugaau

SEQ ID NO: 2017054 - RNA, 19 nt, Homo sapiens
  misc_RNA (1)...(19): siRNA sense strand
ggagagaaacccuauaagu

SEQ ID NO: 2017055 - RNA, 19 nt, Homo sapiens
  misc_RNA (1)...(19): siRNA sense strand
caagagaagaugaugauga

SEQ ID NO: 2017056 - RNA, 19 nt, Homo sapiens
  misc_RNA (1)...(19): siRNA sense strand
gagaagcccuaugagugua

SEQ ID NO: 2017057 - RNA, 19 nt, Homo sapiens
  misc_RNA (1)...(19): siRNA sense strand
gagugaacagguauauuua

SEQ ID NO: 2017058 - RNA, 19 nt, Homo sapiens
  misc_RNA (1)...(19): siRNA sense strand
gaaccacucuaccagucaa

SEQ ID NO: 2017059 - RNA, 19 nt, Homo sapiens
  misc_RNA (1)...(19): siRNA sense strand
agagugaacagguauauuu

SEQ ID NO: 2017060 - RNA, 19 nt, Homo sapiens
  misc_RNA (1)...(19): siRNA sense strand
ggaagaaagaccaugaaug

SEQ ID NO: 2017061 - RNA, 19 nt, Homo sapiens
  misc_RNA (1)...(19): siRNA sense strand
aaucacagguguucucaga

SEQ ID NO: 2017062 - RNA, 19 nt, Homo sapiens
  misc_RNA (1)...(19): siRNA sense strand
ugacaccucuacauuugaa

SEQ ID NO: 2017063 - RNA, 19 nt, Homo sapiens
  misc_RNA (1)...(19): siRNA sense strand
ggacaagagaagaugauga

SEQ ID NO: 2017064 - RNA, 19 nt, Homo sapiens
  misc_RNA (1)...(19): siRNA sense strand
agaaacccuucgaauguaa

SEQ ID NO: 2017065 - RNA, 19 nt, Homo sapiens
  misc_RNA (1)...(19): siRNA sense strand
ggagagaaacccuucgaau

SEQ ID NO: 2017066 - RNA, 19 nt, Homo sapiens
  misc_RNA (1)...(19): siRNA sense strand
gagaggaggcugugacugu

SEQ ID NO: 2017067 - RNA, 19 nt, Homo sapiens
  misc_RNA (1)...(19): siRNA sense strand
gaggaacagucuugugagu

SEQ ID NO: 2017068 - RNA, 19 nt, Homo sapiens
  misc_RNA (1)...(19): siRNA sense strand
agagaaacccuucgaaugu

SEQ ID NO: 2017069 - RNA, 19 nt, Homo sapiens
  misc_RNA (1)...(19): siRNA sense strand
gaauguagugaauguggua

SEQ ID NO: 2017070 - RNA, 19 nt, Homo sapiens
  misc_RNA (1)...(19): siRNA sense strand
aagagaagaugaugaugau

SEQ ID NO: 2017071 - RNA, 19 nt, Homo sapiens
  misc_RNA (1)...(19): siRNA sense strand
ggagagaaaccuuuuauau

SEQ ID NO: 2017072 - RNA, 19 nt, Homo sapiens
  misc_RNA (1)...(19): siRNA sense strand
gugaacagguauauuuaca

SEQ ID NO: 2017073 - RNA, 19 nt, Homo sapiens
  misc_RNA (1)...(19): siRNA sense strand
ggagaguucaugccagaaa

SEQ ID NO: 2017074 - RNA, 19 nt, Homo sapiens
  misc_RNA (1)...(19): siRNA sense strand
ggagagaagcccuaugagu

SEQ ID NO: 2017075 - RNA, 19 nt, Homo sapiens
  misc_RNA (1)...(19): siRNA sense strand
cagcaucagagaauucaua

SEQ ID NO: 2017076 - RNA, 19 nt, Homo sapiens
  misc_RNA (1)...(19): siRNA sense strand
uaacucacaucuuguuguc

SEQ ID NO: 2017077 - RNA, 19 nt, Homo sapiens
  misc_RNA (1)...(19): siRNA sense strand
gaacagucuugugaguaug

SEQ ID NO: 2017078 - RNA, 19 nt, Homo sapiens
  misc_RNA (1)...(19): siRNA sense strand
caggagagaagcccuauga

SEQ ID NO: 2017079 - RNA, 19 nt, Homo sapiens
  misc_RNA (1)...(19): siRNA sense strand
agagaaacccuauaagugu

SEQ ID NO: 2017080 - RNA, 19 nt, Homo sapiens
  misc_RNA (1)...(19): siRNA sense strand
cccaaagagugaacaggua

SEQ ID NO: 2017081 - RNA, 19 nt, Homo sapiens
  misc_RNA (1)...(19): siRNA sense strand
ccaugaauguagugaaugu

SEQ ID NO: 2017082 - RNA, 19 nt, Homo sapiens
  misc_RNA (1)...(19): siRNA sense strand
agaaagaccaugaauguag

SEQ ID NO: 2017083 - RNA, 19 nt, Homo sapiens
  misc_RNA (1)...(19): siRNA sense strand
gcccagagcccaaggacaa

SEQ ID NO: 2017084 - RNA, 19 nt, Homo sapiens
  misc_RNA (1)...(19): siRNA sense strand
uuacugaaguggaaucaca

SEQ ID NO: 2017085 - RNA, 19 nt, Homo sapiens
  misc_RNA (1)...(19): siRNA sense strand
cuacugacaccucuacauu

SEQ ID NO: 2017086 - RNA, 19 nt, Homo sapiens
  misc_RNA (1)...(19): siRNA sense strand
ucaaagcucauaucuaagu

SEQ ID NO: 2017087 - RNA, 19 nt, Homo sapiens
  misc_RNA (1)...(19): siRNA sense strand
gacaagagaagaugaugau

SEQ ID NO: 2017088 - RNA, 19 nt, Homo sapiens
  misc_RNA (1)...(19): siRNA sense strand
acugacaccucuacauuug

SEQ ID NO: 2017089 - RNA, 19 nt, Homo sapiens
  misc_RNA (1)...(19): siRNA sense strand
gaugaugggaccaaaggaa

SEQ ID NO: 2017090 - RNA, 19 nt, Homo sapiens
  misc_RNA (1)...(19): siRNA sense strand
caaagagugaacagguaua

SEQ ID NO: 2017091 - RNA, 19 nt, Homo sapiens
  misc_RNA (1)...(19): siRNA sense strand
aaaagagccuucccauuga

SEQ ID NO: 2017092 - RNA, 19 nt, Homo sapiens
  misc_RNA (1)...(19): siRNA sense strand
guacacagggacaagagaa

SEQ ID NO: 2017093 - RNA, 19 nt, Homo sapiens
  misc_RNA (1)...(19): siRNA sense strand
gagagaaaccuuuuauaug

SEQ ID NO: 2017094 - RNA, 19 nt, Homo sapiens
  misc_RNA (1)...(19): siRNA sense strand
cagagaaacacacgaagga

SEQ ID NO: 2017095 - RNA, 19 nt, Homo sapiens
  misc_RNA (1)...(19): siRNA sense strand
uaaagaaugugggaaagcu

SEQ ID NO: 2017096 - RNA, 19 nt, Homo sapiens
  misc_RNA (1)...(19): siRNA sense strand
caaaggaucauugccacaa

SEQ ID NO: 2017097 - RNA, 19 nt, Homo sapiens
  misc_RNA (1)...(19): siRNA sense strand
cuucgaauguaaugaaugu

SEQ ID NO: 2017098 - RNA, 19 nt, Homo sapiens
  misc_RNA (1)...(19): siRNA sense strand
agacuaggauggcuguauc

SEQ ID NO: 2017099 - RNA, 19 nt, Homo sapiens
  misc_RNA (1)...(19): siRNA sense strand
aagaaugugggaaagcuua

SEQ ID NO: 2017100 - RNA, 19 nt, Homo sapiens
  misc_RNA (1)...(19): siRNA sense strand
gcaagauuccagcugguau

SEQ ID NO: 2017101 - RNA, 19 nt, Homo sapiens
  misc_RNA (1)...(19): siRNA sense strand
caaggacaaaggaucauug

SEQ ID NO: 2017102 - RNA, 19 nt, Homo sapiens
  misc_RNA (1)...(19): siRNA sense strand
ccaaagagugaacagguau

SEQ ID NO: 2017103 - RNA, 19 nt, Homo sapiens
  misc_RNA (1)...(19): siRNA sense strand
ugucauccauaaggaaauu

SEQ ID NO: 2017104 - RNA, 19 nt, Homo sapiens
  misc_RNA (1)...(19): siRNA sense strand
ccacaaccacccauuacug

SEQ ID NO: 2017105 - RNA, 19 nt, Homo sapiens
  misc_RNA (1)...(19): siRNA sense strand
cauuagacaucggagaguu

SEQ ID NO: 2017106 - RNA, 19 nt, Homo sapiens
  misc_RNA (1)...(19): siRNA sense strand
gaaccuccugguccuguga

SEQ ID NO: 2017107 - RNA, 19 nt, Homo sapiens
  misc_RNA (1)...(19): siRNA sense strand
ggauuuagagaaaggacuu

SEQ ID NO: 2017108 - RNA, 19 nt, Homo sapiens
  misc_RNA (1)...(19): siRNA sense strand
caucagagaauucauacag

SEQ ID NO: 2017109 - RNA, 19 nt, Homo sapiens
  misc_RNA (1)...(19): siRNA sense strand
cacaaccacccauuacuga

SEQ ID NO: 2017110 - RNA, 19 nt, Homo sapiens
  misc_RNA (1)...(19): siRNA sense strand
ugucaguuguuacagaaga

SEQ ID NO: 2017111 - RNA, 19 nt, Homo sapiens
  misc_RNA (1)...(19): siRNA sense strand
gggaagaaagaccaugaau

SEQ ID NO: 2017112 - RNA, 19 nt, Homo sapiens
  misc_RNA (1)...(19): siRNA sense strand
agacccagccuuucccaaa

SEQ ID NO: 2017113 - RNA, 19 nt, Homo sapiens
  misc_RNA (1)...(19): siRNA sense strand
agagaagcccuaugagugu

SEQ ID NO: 2017114 - RNA, 19 nt, Homo sapiens
  misc_RNA (1)...(19): siRNA sense strand
gaccaaaggaagaggaaca

SEQ ID NO: 2017115 - RNA, 19 nt, Homo sapiens
  misc_RNA (1)...(19): siRNA sense strand
cuggagagaaacccuauaa

SEQ ID NO: 2017116 - RNA, 19 nt, Homo sapiens
  misc_RNA (1)...(19): siRNA sense strand
caaagcucauaucuaaguc

SEQ ID NO: 2017117 - RNA, 19 nt, Homo sapiens
  misc_RNA (1)...(19): siRNA sense strand
ggccagagaaacacacgaa

SEQ ID NO: 2017118 - RNA, 19 nt, Homo sapiens
  misc_RNA (1)...(19): siRNA sense strand
gugggaaggccuuuaguca

SEQ ID NO: 2017119 - RNA, 19 nt, Homo sapiens
  misc_RNA (1)...(19): siRNA sense strand
cauuugaagcuaccucuga

SEQ ID NO: 2017120 - RNA, 19 nt, Homo sapiens
  misc_RNA (1)...(19): siRNA sense strand
ggaaucacagguguucuca

SEQ ID NO: 2017121 - RNA, 19 nt, Homo sapiens
  misc_RNA (1)...(19): siRNA sense strand
gagaguucaugccagaaaa

SEQ ID NO: 2017122 - RNA, 19 nt, Homo sapiens
  misc_RNA (1)...(19): siRNA sense strand
ggaaccacucuaccaguca

SEQ ID NO: 2017123 - RNA, 19 nt, Homo sapiens
  misc_RNA (1)...(19): siRNA sense strand
gaagcccuaugaguguaau

SEQ ID NO: 2017124 - RNA, 19 nt, Homo sapiens
  misc_RNA (1)...(19): siRNA sense strand
ggucagcaucagagaauuc

SEQ ID NO: 2017125 - RNA, 19 nt, Homo sapiens
  misc_RNA (1)...(19): siRNA sense strand
aagaaagaccaugaaugua

SEQ ID NO: 2017126 - RNA, 19 nt, Homo sapiens
  misc_RNA (1)...(19): siRNA sense strand
ucagagcucauuagacauc

SEQ ID NO: 2017127 - RNA, 19 nt, Homo sapiens
  misc_RNA (1)...(19): siRNA sense strand
caagauuccagcugguaug

SEQ ID NO: 2017128 - RNA, 19 nt, Homo sapiens
  misc_RNA (1)...(19): siRNA sense strand
cuauaaguguagugacugu

SEQ ID NO: 2017129 - RNA, 19 nt, Homo sapiens
  misc_RNA (1)...(19): siRNA sense strand
gcccaaggacaaaggauca

SEQ ID NO: 2017130 - RNA, 19 nt, Homo sapiens
  misc_RNA (1)...(19): siRNA sense strand
cagcaucggagaauucaca

SEQ ID NO: 2017131 - RNA, 19 nt, Homo sapiens
  misc_RNA (1)...(19): siRNA sense strand
cagggaagaaagaccauga

SEQ ID NO: 2017132 - RNA, 19 nt, Homo sapiens
  misc_RNA (1)...(19): siRNA sense strand
caaccacccauuacugaag

SEQ ID NO: 2017133 - RNA, 19 nt, Homo sapiens
  misc_RNA (1)...(19): siRNA sense strand
aaaggaagaggaacagucu

SEQ ID NO: 2017134 - RNA, 19 nt, Homo sapiens
  misc_RNA (1)...(19): siRNA sense strand
uaagucagcaucggagaau

SEQ ID NO: 2017135 - RNA, 19 nt, Homo sapiens
  misc_RNA (1)...(19): siRNA sense strand
gaaacccuucgaauguaau

SEQ ID NO: 2017136 - RNA, 19 nt, Homo sapiens
  misc_RNA (1)...(19): siRNA sense strand
ucaggcagaugguugucau

SEQ ID NO: 2017137 - RNA, 19 nt, Homo sapiens
  misc_RNA (1)...(19): siRNA sense strand
acccauuacugaaguggaa

SEQ ID NO: 2017138 - RNA, 19 nt, Homo sapiens
  misc_RNA (1)...(19): siRNA sense strand
ggacguggcuguuuacuuc

SEQ ID NO: 2017139 - RNA, 19 nt, Homo sapiens
  misc_RNA (1)...(19): siRNA sense strand
gcaaagcucuagccuuauu

SEQ ID NO: 2017140 - RNA, 19 nt, Homo sapiens
  misc_RNA (1)...(19): siRNA sense strand
ggaaaggccuuaugagugu

SEQ ID NO: 2017141 - RNA, 19 nt, Homo sapiens
  misc_RNA (1)...(19): siRNA sense strand
ggaguaagaucucaugaau

SEQ ID NO: 2017142 - RNA, 19 nt, Homo sapiens
  misc_RNA (1)...(19): siRNA sense strand
gagaaugugugaaagcuuu

SEQ ID NO: 2017143 - RNA, 19 nt, Homo sapiens
  misc_RNA (1)...(19): siRNA sense strand
gcucuaaccucacuaauca

SEQ ID NO: 2017144 - RNA, 19 nt, Homo sapiens
  misc_RNA (1)...(19): siRNA sense strand
gaaauuugaccucauugua

SEQ ID NO: 2017145 - RNA, 19 nt, Homo sapiens
  misc_RNA (1)...(19): siRNA sense strand
cuggagaacuugacacuua

SEQ ID NO: 2017146 - RNA, 19 nt, Homo sapiens
  misc_RNA (1)...(19): siRNA sense strand
gggaaauccuuuagccaua

SEQ ID NO: 2017147 - RNA, 19 nt, Homo sapiens
  misc_RNA (1)...(19): siRNA sense strand
gagaaaggccuuaugaaug

SEQ ID NO: 2017148 - RNA, 19 nt, Homo sapiens
  misc_RNA (1)...(19): siRNA sense strand
gcaaggagguugggaagga

SEQ ID NO: 2017149 - RNA, 19 nt, Homo sapiens
  misc_RNA (1)...(19): siRNA sense strand
agaaagaagucaaacagaa

SEQ ID NO: 2017150 - RNA, 19 nt, Homo sapiens
  misc_RNA (1)...(19): siRNA sense strand
gagaaaggccuuacaagug

SEQ ID NO: 2017151 - RNA, 19 nt, Homo sapiens
  misc_RNA (1)...(19): siRNA sense strand
ggagaaaggccuuaugaau

SEQ ID NO: 2017152 - RNA, 19 nt, Homo sapiens
  misc_RNA (1)...(19): siRNA sense strand
gagcaaggccuuaugaaug

SEQ ID NO: 2017153 - RNA, 19 nt, Homo sapiens
  misc_RNA (1)...(19): siRNA sense strand
gaucuuacaugugcaguga

SEQ ID NO: 2017154 - RNA, 19 nt, Homo sapiens
  misc_RNA (1)...(19): siRNA sense strand
gugggaaauuguuuacuua

SEQ ID NO: 2017155 - RNA, 19 nt, Homo sapiens
  misc_RNA (1)...(19): siRNA sense strand
aguaagaucucaugaaugu

SEQ ID NO: 2017156 - RNA, 19 nt, Homo sapiens
  misc_RNA (1)...(19): siRNA sense strand
guacaaggccuuauaugug

SEQ ID NO: 2017157 - RNA, 19 nt, Homo sapiens
  misc_RNA (1)...(19): siRNA sense strand
ggacagaaacacuucagaa

SEQ ID NO: 2017158 - RNA, 19 nt, Homo sapiens
  misc_RNA (1)...(19): siRNA sense strand
aguaagaccucaucaaugu

SEQ ID NO: 2017159 - RNA, 19 nt, Homo sapiens
  misc_RNA (1)...(19): siRNA sense strand
ggaguaagaccucaucaau

SEQ ID NO: 2017160 - RNA, 19 nt, Homo sapiens
  misc_RNA (1)...(19): siRNA sense strand
gcucuacgcuccuucaaca

SEQ ID NO: 2017161 - RNA, 19 nt, Homo sapiens
  misc_RNA (1)...(19): siRNA sense strand
ggagaaaggccuuacaagu

SEQ ID NO: 2017162 - RNA, 19 nt, Homo sapiens
  misc_RNA (1)...(19): siRNA sense strand
ggagaaaggccuuaugagu

SEQ ID NO: 2017163 - RNA, 19 nt, Homo sapiens
  misc_RNA (1)...(19): siRNA sense strand
caaugaaugugggaaguuu

SEQ ID NO: 2017164 - RNA, 19 nt, Homo sapiens
  misc_RNA (1)...(19): siRNA sense strand
ggagaaaggccuuaugagu

SEQ ID NO: 2017165 - RNA, 19 nt, Homo sapiens
  misc_RNA (1)...(19): siRNA sense strand
ggagaaaggccauaugagu

SEQ ID NO: 2017166 - RNA, 19 nt, Homo sapiens
  misc_RNA (1)...(19): siRNA sense strand
ggaaugaggccuuaugagu

SEQ ID NO: 2017167 - RNA, 19 nt, Homo sapiens
  misc_RNA (1)...(19): siRNA sense strand
ccagagcugucaccucauu

SEQ ID NO: 2017168 - RNA, 19 nt, Homo sapiens
  misc_RNA (1)...(19): siRNA sense strand
caggaaauuugaccucauu

SEQ ID NO: 2017169 - RNA, 19 nt, Homo sapiens
  misc_RNA (1)...(19): siRNA sense strand
cagcgggugucacagguua

SEQ ID NO: 2017170 - RNA, 19 nt, Homo sapiens
  misc_RNA (1)...(19): siRNA sense strand
ggaaaauccuuuaccugua

SEQ ID NO: 2017171 - RNA, 19 nt, Homo sapiens
  misc_RNA (1)...(19): siRNA sense strand
uuauagaucucguuucuuc

SEQ ID NO: 2017172 - RNA, 19 nt, Homo sapiens
  misc_RNA (1)...(19): siRNA sense strand
gaaugugggaaauuguuua

SEQ ID NO: 2017173 - RNA, 19 nt, Homo sapiens
  misc_RNA (1)...(19): siRNA sense strand
gaacacaccauggucagaa

SEQ ID NO: 2017174 - RNA, 19 nt, Homo sapiens
  misc_RNA (1)...(19): siRNA sense strand
gcugucaccucauuaaaca

SEQ ID NO: 2017175 - RNA, 19 nt, Homo sapiens
  misc_RNA (1)...(19): siRNA sense strand
gggaugaggaggcaccuua

SEQ ID NO: 2017176 - RNA, 19 nt, Homo sapiens
  misc_RNA (1)...(19): siRNA sense strand
gcucuagccucauuacaca

SEQ ID NO: 2017177 - RNA, 19 nt, Homo sapiens
  misc_RNA (1)...(19): siRNA sense strand
ggaaauccuuuagccauag

SEQ ID NO: 2017178 - RNA, 19 nt, Homo sapiens
  misc_RNA (1)...(19): siRNA sense strand
gaaugugggaaauccuuua

SEQ ID NO: 2017179 - RNA, 19 nt, Homo sapiens
  misc_RNA (1)...(19): siRNA sense strand
agaaaggccuuaugaaugc

SEQ ID NO: 2017180 - RNA, 19 nt, Homo sapiens
  misc_RNA (1)...(19): siRNA sense strand
gaaugugggaaauccuuua

SEQ ID NO: 2017181 - RNA, 19 nt, Homo sapiens
  misc_RNA (1)...(19): siRNA sense strand
gggaaauccuauaggcaaa

SEQ ID NO: 2017182 - RNA, 19 nt, Homo sapiens
  misc_RNA (1)...(19): siRNA sense strand
ccauagcucuagccucauu

SEQ ID NO: 2017183 - RNA, 19 nt, Homo sapiens
  misc_RNA (1)...(19): siRNA sense strand
gaaaggccuuaugagugua

SEQ ID NO: 2017184 - RNA, 19 nt, Homo sapiens
  misc_RNA (1)...(19): siRNA sense strand
guucuagccuuauuacaca

SEQ ID NO: 2017185 - RNA, 19 nt, Homo sapiens
  misc_RNA (1)...(19): siRNA sense strand
cagcugcacauuugaagua

SEQ ID NO: 2017186 - RNA, 19 nt, Homo sapiens
  misc_RNA (1)...(19): siRNA sense strand
uguuggaaauccuuuagua

SEQ ID NO: 2017187 - RNA, 19 nt, Homo sapiens
  misc_RNA (1)...(19): siRNA sense strand
ggagcaaggccuuaugaau

SEQ ID NO: 2017188 - RNA, 19 nt, Homo sapiens
  misc_RNA (1)...(19): siRNA sense strand
gguacaaggccuuauaugu

SEQ ID NO: 2017189 - RNA, 19 nt, Homo sapiens
  misc_RNA (1)...(19): siRNA sense strand
gagaaugugggaaauccua

SEQ ID NO: 2017190 - RNA, 19 nt, Homo sapiens
  misc_RNA (1)...(19): siRNA sense strand
gaaagaagucaaacagaac

SEQ ID NO: 2017191 - RNA, 19 nt, Homo sapiens
  misc_RNA (1)...(19): siRNA sense strand
gcagcauguuggacagaaa

SEQ ID NO: 2017192 - RNA, 19 nt, Homo sapiens
  misc_RNA (1)...(19): siRNA sense strand
uaaccacucuagccucguu

SEQ ID NO: 2017193 - RNA, 19 nt, Homo sapiens
  misc_RNA (1)...(19): siRNA sense strand
uaagaucucaugaauguca

SEQ ID NO: 2017194 - RNA, 19 nt, Homo sapiens
  misc_RNA (1)...(19): siRNA sense strand
gaaugugggaaauccuaua

SEQ ID NO: 2017195 - RNA, 19 nt, Homo sapiens
  misc_RNA (1)...(19): siRNA sense strand
gcuuucagcuacaaacaug

SEQ ID NO: 2017196 - RNA, 19 nt, Homo sapiens
  misc_RNA (1)...(19): siRNA sense strand
agggaaagaucuuacaugu

SEQ ID NO: 2017197 - RNA, 19 nt, Homo sapiens
  misc_RNA (1)...(19): siRNA sense strand
ggaaauccuuuaguaacca

SEQ ID NO: 2017198 - RNA, 19 nt, Homo sapiens
  misc_RNA (1)...(19): siRNA sense strand
uugaggacguggcuguuua

SEQ ID NO: 2017199 - RNA, 19 nt, Homo sapiens
  misc_RNA (1)...(19): siRNA sense strand
ggccuuauaugugcaguga

SEQ ID NO: 2017200 - RNA, 19 nt, Homo sapiens
  misc_RNA (1)...(19): siRNA sense strand
uugagcagcugcacauuug

SEQ ID NO: 2017201 - RNA, 19 nt, Homo sapiens
  misc_RNA (1)...(19): siRNA sense strand
ccauaguucuagccuuauu

SEQ ID NO: 2017202 - RNA, 19 nt, Homo sapiens
  misc_RNA (1)...(19): siRNA sense strand
auccauaguucuagccuua

SEQ ID NO: 2017203 - RNA, 19 nt, Homo sapiens
  misc_RNA (1)...(19): siRNA sense strand
ggaaaucuuuuauccauag

SEQ ID NO: 2017204 - RNA, 19 nt, Homo sapiens
  misc_RNA (1)...(19): siRNA sense strand
gaguaagaccucaucaaug

SEQ ID NO: 2017205 - RNA, 19 nt, Homo sapiens
  misc_RNA (1)...(19): siRNA sense strand
ggagaccucauuagggaaa

SEQ ID NO: 2017206 - RNA, 19 nt, Homo sapiens
  misc_RNA (1)...(19): siRNA sense strand
guuaaacaccgaagaguuc

SEQ ID NO: 2017207 - RNA, 19 nt, Homo sapiens
  misc_RNA (1)...(19): siRNA sense strand
ccauaugagugcagugaau

SEQ ID NO: 2017208 - RNA, 19 nt, Homo sapiens
  misc_RNA (1)...(19): siRNA sense strand
acaauuuacugcauaccuu

SEQ ID NO: 2017209 - RNA, 19 nt, Homo sapiens
  misc_RNA (1)...(19): siRNA sense strand
uaagaccucaucaauguga

SEQ ID NO: 2017210 - RNA, 19 nt, Homo sapiens
  misc_RNA (1)...(19): siRNA sense strand
gauauguggcccagucuug

SEQ ID NO: 2017211 - RNA, 19 nt, Homo sapiens
  misc_RNA (1)...(19): siRNA sense strand
gcuccagccucauuagaca

SEQ ID NO: 2017212 - RNA, 19 nt, Homo sapiens
  misc_RNA (1)...(19): siRNA sense strand
caggagaaaggccauauga

SEQ ID NO: 2017213 - RNA, 19 nt, Homo sapiens
  misc_RNA (1)...(19): siRNA sense strand
gcaggaaauuugaccucau

SEQ ID NO: 2017214 - RNA, 19 nt, Homo sapiens
  misc_RNA (1)...(19): siRNA sense strand
gagaguucauacuggagaa

SEQ ID NO: 2017215 - RNA, 19 nt, Homo sapiens
  misc_RNA (1)...(19): siRNA sense strand
gggcauguaggaaacaauu

SEQ ID NO: 2017216 - RNA, 19 nt, Homo sapiens
  misc_RNA (1)...(19): siRNA sense strand
gcaccagggagaccucauu

SEQ ID NO: 2017217 - RNA, 19 nt, Homo sapiens
  misc_RNA (1)...(19): siRNA sense strand
gugaaugugggaaaucuuu

SEQ ID NO: 2017218 - RNA, 19 nt, Homo sapiens
  misc_RNA (1)...(19): siRNA sense strand
caucagagaguucauacug

SEQ ID NO: 2017219 - RNA, 19 nt, Homo sapiens
  misc_RNA (1)...(19): siRNA sense strand
gugaaugugggaaaucuuu

SEQ ID NO: 2017220 - RNA, 19 nt, Homo sapiens
  misc_RNA (1)...(19): siRNA sense strand
cagaaaagccuuauacaug

SEQ ID NO: 2017221 - RNA, 19 nt, Homo sapiens
  misc_RNA (1)...(19): siRNA sense strand
gaacguucacaagggauaa

SEQ ID NO: 2017222 - RNA, 19 nt, Homo sapiens
  misc_RNA (1)...(19): siRNA sense strand
ggaaauuugaccucauugu

SEQ ID NO: 2017223 - RNA, 19 nt, Homo sapiens
  misc_RNA (1)...(19): siRNA sense strand
ugugggaaauuguuuacuu

SEQ ID NO: 2017224 - RNA, 19 nt, Homo sapiens
  misc_RNA (1)...(19): siRNA sense strand
caaagcucuagccuuauua

SEQ ID NO: 2017225 - RNA, 19 nt, Homo sapiens
  misc_RNA (1)...(19): siRNA sense strand
gagcagcugcacauuugaa

SEQ ID NO: 2017226 - RNA, 19 nt, Homo sapiens
  misc_RNA (1)...(19): siRNA sense strand
gcaaugaaugugggaaguu

SEQ ID NO: 2017227 - RNA, 19 nt, Homo sapiens
  misc_RNA (1)...(19): siRNA sense strand
agcaaggccuuaugaaugu

SEQ ID NO: 2017228 - RNA, 19 nt, Homo sapiens
  misc_RNA (1)...(19): siRNA sense strand
caacaccagagaguucaua

SEQ ID NO: 2017229 - RNA, 19 nt, Homo sapiens
  misc_RNA (1)...(19): siRNA sense strand
caccggagacuucacauug

SEQ ID NO: 2017230 - RNA, 19 nt, Homo sapiens
  misc_RNA (1)...(19): siRNA sense strand
ccuuauaugugcagugaau

SEQ ID NO: 2017231 - RNA, 19 nt, Homo sapiens
  misc_RNA (1)...(19): siRNA sense strand
cuggugagaucaagauuuc

SEQ ID NO: 2017232 - RNA, 19 nt, Homo sapiens
  misc_RNA (1)...(19): siRNA sense strand
auacuggaaugaggccuua

SEQ ID NO: 2017233 - RNA, 19 nt, Homo sapiens
  misc_RNA (1)...(19): siRNA sense strand
aaacaccgaagaguucaua

SEQ ID NO: 2017234 - RNA, 19 nt, Homo sapiens
  misc_RNA (1)...(19): siRNA sense strand
guuggaaauccuuuaguaa

SEQ ID NO: 2017235 - RNA, 19 nt, Homo sapiens
  misc_RNA (1)...(19): siRNA sense strand
aauccuaccucaucucaca

SEQ ID NO: 2017236 - RNA, 19 nt, Homo sapiens
  misc_RNA (1)...(19): siRNA sense strand
gagcugucaccucauuaaa

SEQ ID NO: 2017237 - RNA, 19 nt, Homo sapiens
  misc_RNA (1)...(19): siRNA sense strand
ggaauggggucuucuugau

SEQ ID NO: 2017238 - RNA, 19 nt, Homo sapiens
  misc_RNA (1)...(19): siRNA sense strand
gaacaacacuuaagacuuu

SEQ ID NO: 2017239 - RNA, 19 nt, Homo sapiens
  misc_RNA (1)...(19): siRNA sense strand
gaaaggaccugaaaacuua

SEQ ID NO: 2017240 - RNA, 19 nt, Homo sapiens
  misc_RNA (1)...(19): siRNA sense strand
gaagauuccugcagcaauu

SEQ ID NO: 2017241 - RNA, 19 nt, Homo sapiens
  misc_RNA (1)...(19): siRNA sense strand
ccaaagaaacucuguguua

SEQ ID NO: 2017242 - RNA, 19 nt, Homo sapiens
  misc_RNA (1)...(19): siRNA sense strand
gcaggacucuuucuuaaug

SEQ ID NO: 2017243 - RNA, 19 nt, Homo sapiens
  misc_RNA (1)...(19): siRNA sense strand
gaaugcagcuuuccuuuca

SEQ ID NO: 2017244 - RNA, 19 nt, Homo sapiens
  misc_RNA (1)...(19): siRNA sense strand
caacuagucucacgaaugu

SEQ ID NO: 2017245 - RNA, 19 nt, Homo sapiens
  misc_RNA (1)...(19): siRNA sense strand
gaaauaauguucuggugau

SEQ ID NO: 2017246 - RNA, 19 nt, Homo sapiens
  misc_RNA (1)...(19): siRNA sense strand
guaggaaacucauuuagug

SEQ ID NO: 2017247 - RNA, 19 nt, Homo sapiens
  misc_RNA (1)...(19): siRNA sense strand
acaaagagaugaagaacaa

SEQ ID NO: 2017248 - RNA, 19 nt, Homo sapiens
  misc_RNA (1)...(19): siRNA sense strand
uaacaucacugcagaauac

SEQ ID NO: 2017249 - RNA, 19 nt, Homo sapiens
  misc_RNA (1)...(19): siRNA sense strand
gaacgaagaccuccugaga

SEQ ID NO: 2017250 - RNA, 19 nt, Homo sapiens
  misc_RNA (1)...(19): siRNA sense strand
guaaauuucucuggcguua

SEQ ID NO: 2017251 - RNA, 19 nt, Homo sapiens
  misc_RNA (1)...(19): siRNA sense strand
caaagaaacucuguguuau

SEQ ID NO: 2017252 - RNA, 19 nt, Homo sapiens
  misc_RNA (1)...(19): siRNA sense strand
gaaacucuuuaccucaaua

SEQ ID NO: 2017253 - RNA, 19 nt, Homo sapiens
  misc_RNA (1)...(19): siRNA sense strand
gaagaccuccugagacuaa

SEQ ID NO: 2017254 - RNA, 19 nt, Homo sapiens
  misc_RNA (1)...(19): siRNA sense strand
gccaaugguuuaauaauga

SEQ ID NO: 2017255 - RNA, 19 nt, Homo sapiens
  misc_RNA (1)...(19): siRNA sense strand
ggaagaugaugaugauguu

SEQ ID NO: 2017256 - RNA, 19 nt, Homo sapiens
  misc_RNA (1)...(19): siRNA sense strand
gaagggagcaacuaaagaa

SEQ ID NO: 2017257 - RNA, 19 nt, Homo sapiens
  misc_RNA (1)...(19): siRNA sense strand
uaacugagauucgccauga

SEQ ID NO: 2017258 - RNA, 19 nt, Homo sapiens
  misc_RNA (1)...(19): siRNA sense strand
gaaacucuguguuaugugu

SEQ ID NO: 2017259 - RNA, 19 nt, Homo sapiens
  misc_RNA (1)...(19): siRNA sense strand
gaugauaguucugacaauu

SEQ ID NO: 2017260 - RNA, 19 nt, Homo sapiens
  misc_RNA (1)...(19): siRNA sense strand
ggacagcagugagaagauu

SEQ ID NO: 2017261 - RNA, 19 nt, Homo sapiens
  misc_RNA (1)...(19): siRNA sense strand
gaaccaaugauguggauuu

SEQ ID NO: 2017262 - RNA, 19 nt, Homo sapiens
  misc_RNA (1)...(19): siRNA sense strand
ugacggauaugaugaguga

SEQ ID NO: 2017263 - RNA, 19 nt, Homo sapiens
  misc_RNA (1)...(19): siRNA sense strand
ccagacagcuuaucaacga

SEQ ID NO: 2017264 - RNA, 19 nt, Homo sapiens
  misc_RNA (1)...(19): siRNA sense strand
uaaaggugcuggaaauaau

SEQ ID NO: 2017265 - RNA, 19 nt, Homo sapiens
  misc_RNA (1)...(19): siRNA sense strand
gcccagaccucgaucuaaa

SEQ ID NO: 2017266 - RNA, 19 nt, Homo sapiens
  misc_RNA (1)...(19): siRNA sense strand
uaaugcagccugagaaaua

SEQ ID NO: 2017267 - RNA, 19 nt, Homo sapiens
  misc_RNA (1)...(19): siRNA sense strand
gaccaagacuggaguagga

SEQ ID NO: 2017268 - RNA, 19 nt, Homo sapiens
  misc_RNA (1)...(19): siRNA sense strand
ugaauacacuguucuacuu

SEQ ID NO: 2017269 - RNA, 19 nt, Homo sapiens
  misc_RNA (1)...(19): siRNA sense strand
gaacuacaaggaaaugauu

SEQ ID NO: 2017270 - RNA, 19 nt, Homo sapiens
  misc_RNA (1)...(19): siRNA sense strand
uaagagaccuuucuguagu

SEQ ID NO: 2017271 - RNA, 19 nt, Homo sapiens
  misc_RNA (1)...(19): siRNA sense strand
uaagguaaaugcaggaaug

SEQ ID NO: 2017272 - RNA, 19 nt, Homo sapiens
  misc_RNA (1)...(19): siRNA sense strand
gacagcaucuauuaccuuu

SEQ ID NO: 2017273 - RNA, 19 nt, Homo sapiens
  misc_RNA (1)...(19): siRNA sense strand
ugugaaugauggccaauua

SEQ ID NO: 2017274 - RNA, 19 nt, Homo sapiens
  misc_RNA (1)...(19): siRNA sense strand
caacaucaacaguguaauu

SEQ ID NO: 2017275 - RNA, 19 nt, Homo sapiens
  misc_RNA (1)...(19): siRNA sense strand
caaccaacaucaacagugu

SEQ ID NO: 2017276 - RNA, 19 nt, Homo sapiens
  misc_RNA (1)...(19): siRNA sense strand
ucagacaucucgaaccaaa

SEQ ID NO: 2017277 - RNA, 19 nt, Homo sapiens
  misc_RNA (1)...(19): siRNA sense strand
caaacagaauccuacuaaa

SEQ ID NO: 2017278 - RNA, 19 nt, Homo sapiens
  misc_RNA (1)...(19): siRNA sense strand
caaccagaaugcucuaguu

SEQ ID NO: 2017279 - RNA, 19 nt, Homo sapiens
  misc_RNA (1)...(19): siRNA sense strand
cagcuuuccuuucaaauau

SEQ ID NO: 2017280 - RNA, 19 nt, Homo sapiens
  misc_RNA (1)...(19): siRNA sense strand
ggauugagauguguuacuu

SEQ ID NO: 2017281 - RNA, 19 nt, Homo sapiens
  misc_RNA (1)...(19): siRNA sense strand
ccaguuguguggcuaaauu

SEQ ID NO: 2017282 - RNA, 19 nt, Homo sapiens
  misc_RNA (1)...(19): siRNA sense strand
cuaaaggagcucuaaauaa

SEQ ID NO: 2017283 - RNA, 19 nt, Homo sapiens
  misc_RNA (1)...(19): siRNA sense strand
gcgaaacucuuuaccucaa

SEQ ID NO: 2017284 - RNA, 19 nt, Homo sapiens
  misc_RNA (1)...(19): siRNA sense strand
gcagcuuuccuuucaaaua

SEQ ID NO: 2017285 - RNA, 19 nt, Homo sapiens
  misc_RNA (1)...(19): siRNA sense strand
caacuauuguucucagcua

SEQ ID NO: 2017286 - RNA, 19 nt, Homo sapiens
  misc_RNA (1)...(19): siRNA sense strand
gguguaagcucugugaaug

SEQ ID NO: 2017287 - RNA, 19 nt, Homo sapiens
  misc_RNA (1)...(19): siRNA sense strand
ucaauauucucucgaguug

SEQ ID NO: 2017288 - RNA, 19 nt, Homo sapiens
  misc_RNA (1)...(19): siRNA sense strand
cagaugcucuugauacaga

SEQ ID NO: 2017289 - RNA, 19 nt, Homo sapiens
  misc_RNA (1)...(19): siRNA sense strand
guaaaggugcuggaaauaa

SEQ ID NO: 2017290 - RNA, 19 nt, Homo sapiens
  misc_RNA (1)...(19): siRNA sense strand
uagaauggccaaugguuua

SEQ ID NO: 2017291 - RNA, 19 nt, Homo sapiens
  misc_RNA (1)...(19): siRNA sense strand
gauauagaauggccaaugg

SEQ ID NO: 2017292 - RNA, 19 nt, Homo sapiens
  misc_RNA (1)...(19): siRNA sense strand
gauuagaauugacugauca

SEQ ID NO: 2017293 - RNA, 19 nt, Homo sapiens
  misc_RNA (1)...(19): siRNA sense strand
ggaugaagacacagacuaa

SEQ ID NO: 2017294 - RNA, 19 nt, Homo sapiens
  misc_RNA (1)...(19): siRNA sense strand
cgaaacaccuuggaaaaua

SEQ ID NO: 2017295 - RNA, 19 nt, Homo sapiens
  misc_RNA (1)...(19): siRNA sense strand
guuaagagaccuuucugua

SEQ ID NO: 2017296 - RNA, 19 nt, Homo sapiens
  misc_RNA (1)...(19): siRNA sense strand
ggccaaugguuuaauaaug

SEQ ID NO: 2017297 - RNA, 19 nt, Homo sapiens
  misc_RNA (1)...(19): siRNA sense strand
gaagacaaacagaauccua

SEQ ID NO: 2017298 - RNA, 19 nt, Homo sapiens
  misc_RNA (1)...(19): siRNA sense strand
ccacaagccugcuccaaag

SEQ ID NO: 2017299 - RNA, 19 nt, Homo sapiens
  misc_RNA (1)...(19): siRNA sense strand
aaagcaagguuucuucaga

SEQ ID NO: 2017300 - RNA, 19 nt, Homo sapiens
  misc_RNA (1)...(19): siRNA sense strand
guaagaagggagcaacuaa

SEQ ID NO: 2017301 - RNA, 19 nt, Homo sapiens
  misc_RNA (1)...(19): siRNA sense strand
ugaaggcugcaaauuauua

SEQ ID NO: 2017302 - RNA, 19 nt, Homo sapiens
  misc_RNA (1)...(19): siRNA sense strand
gaccacugcuuuaauagau

SEQ ID NO: 2017303 - RNA, 19 nt, Homo sapiens
  misc_RNA (1)...(19): siRNA sense strand
gaucaaagaaccauaacau

SEQ ID NO: 2017304 - RNA, 19 nt, Homo sapiens
  misc_RNA (1)...(19): siRNA sense strand
uugcaaaccuuuaacaaug

SEQ ID NO: 2017305 - RNA, 19 nt, Homo sapiens
  misc_RNA (1)...(19): siRNA sense strand
caacaugacaacucagaaa

SEQ ID NO: 2017306 - RNA, 19 nt, Homo sapiens
  misc_RNA (1)...(19): siRNA sense strand
aggaucagcucaccucuuu

SEQ ID NO: 2017307 - RNA, 19 nt, Homo sapiens
  misc_RNA (1)...(19): siRNA sense strand
agugguagcugaucaaaga

SEQ ID NO: 2017308 - RNA, 19 nt, Homo sapiens
  misc_RNA (1)...(19): siRNA sense strand
cuacuucacuggaccgaaa

SEQ ID NO: 2017309 - RNA, 19 nt, Homo sapiens
  misc_RNA (1)...(19): siRNA sense strand
ggccaaauggagagaauua

SEQ ID NO: 2017310 - RNA, 19 nt, Homo sapiens
  misc_RNA (1)...(19): siRNA sense strand
gauacagaguugcuuacaa

SEQ ID NO: 2017311 - RNA, 19 nt, Homo sapiens
  misc_RNA (1)...(19): siRNA sense strand
uagugaaggcugcaaauua

SEQ ID NO: 2017312 - RNA, 19 nt, Homo sapiens
  misc_RNA (1)...(19): siRNA sense strand
aagaggacauggaaacaaa

SEQ ID NO: 2017313 - RNA, 19 nt, Homo sapiens
  misc_RNA (1)...(19): siRNA sense strand
gcaacuugaugaagaucuu

SEQ ID NO: 2017314 - RNA, 19 nt, Homo sapiens
  misc_RNA (1)...(19): siRNA sense strand
uacaaucugugguaaacua

SEQ ID NO: 2017315 - RNA, 19 nt, Homo sapiens
  misc_RNA (1)...(19): siRNA sense strand
acaaacagaauccuacuaa

SEQ ID NO: 2017316 - RNA, 19 nt, Homo sapiens
  misc_RNA (1)...(19): siRNA sense strand
gaauacacuguucuacuuu

SEQ ID NO: 2017317 - RNA, 19 nt, Homo sapiens
  misc_RNA (1)...(19): siRNA sense strand
ccagaugggucaauauucu

SEQ ID NO: 2017318 - RNA, 19 nt, Homo sapiens
  misc_RNA (1)...(19): siRNA sense strand
guaaaugcauggaaacacu

SEQ ID NO: 2017319 - RNA, 19 nt, Homo sapiens
  misc_RNA (1)...(19): siRNA sense strand
caagagaaaggcuguauca

SEQ ID NO: 2017320 - RNA, 19 nt, Homo sapiens
  misc_RNA (1)...(19): siRNA sense strand
auacagaguugcuuacaau

SEQ ID NO: 2017321 - RNA, 19 nt, Homo sapiens
  misc_RNA (1)...(19): siRNA sense strand
ugauaugacucaguguaua

SEQ ID NO: 2017322 - RNA, 19 nt, Homo sapiens
  misc_RNA (1)...(19): siRNA sense strand
aaaguugugucagugaaua

SEQ ID NO: 2017323 - RNA, 19 nt, Homo sapiens
  misc_RNA (1)...(19): siRNA sense strand
gccaugaagucagcuuuaa

SEQ ID NO: 2017324 - RNA, 19 nt, Homo sapiens
  misc_RNA (1)...(19): siRNA sense strand
caaaagaguuggcaucuca

SEQ ID NO: 2017325 - RNA, 19 nt, Homo sapiens
  misc_RNA (1)...(19): siRNA sense strand
gaacagcccagaccucgau

SEQ ID NO: 2017326 - RNA, 19 nt, Homo sapiens
  misc_RNA (1)...(19): siRNA sense strand
ccacaaugccugauggaaa

SEQ ID NO: 2017327 - RNA, 19 nt, Homo sapiens
  misc_RNA (1)...(19): siRNA sense strand
caguaaaggugcuggaaau

SEQ ID NO: 2017328 - RNA, 19 nt, Homo sapiens
  misc_RNA (1)...(19): siRNA sense strand
ggcgagauaugaacuuaau

SEQ ID NO: 2017329 - RNA, 19 nt, Homo sapiens
  misc_RNA (1)...(19): siRNA sense strand
guuuaucucucuaugaaga

SEQ ID NO: 2017330 - RNA, 19 nt, Homo sapiens
  misc_RNA (1)...(19): siRNA sense strand
ccacagaaucuuaaucaga

SEQ ID NO: 2017331 - RNA, 19 nt, Homo sapiens
  misc_RNA (1)...(19): siRNA sense strand
aauauucucucgaguugaa

SEQ ID NO: 2017332 - RNA, 19 nt, Homo sapiens
  misc_RNA (1)...(19): siRNA sense strand
cagugaagauugcuguaaa

SEQ ID NO: 2017333 - RNA, 19 nt, Homo sapiens
  misc_RNA (1)...(19): siRNA sense strand
agugaaggcugcaaauuau

SEQ ID NO: 2017334 - RNA, 19 nt, Homo sapiens
  misc_RNA (1)...(19): siRNA sense strand
ugaaggagguucgagauca

SEQ ID NO: 2017335 - RNA, 19 nt, Homo sapiens
  misc_RNA (1)...(19): siRNA sense strand
gauguacaaucugugguaa

SEQ ID NO: 2017336 - RNA, 19 nt, Homo sapiens
  misc_RNA (1)...(19): siRNA sense strand
aaacaaagcgugucuucga

SEQ ID NO: 2017337 - RNA, 19 nt, Homo sapiens
  misc_RNA (1)...(19): siRNA sense strand
gcaacuagucucacgaaug

SEQ ID NO: 2017338 - RNA, 19 nt, Homo sapiens
  misc_RNA (1)...(19): siRNA sense strand
gaacaacacuuaagacuuu

SEQ ID NO: 2017339 - RNA, 19 nt, Homo sapiens
  misc_RNA (1)...(19): siRNA sense strand
gaaaggaccugaaaacuua

SEQ ID NO: 2017340 - RNA, 19 nt, Homo sapiens
  misc_RNA (1)...(19): siRNA sense strand
gaagauuccugcagcaauu

SEQ ID NO: 2017341 - RNA, 19 nt, Homo sapiens
  misc_RNA (1)...(19): siRNA sense strand
ccaaagaaacucuguguua

SEQ ID NO: 2017342 - RNA, 19 nt, Homo sapiens
  misc_RNA (1)...(19): siRNA sense strand
gcaggacucuuucuuaaug

SEQ ID NO: 2017343 - RNA, 19 nt, Homo sapiens
  misc_RNA (1)...(19): siRNA sense strand
gaaugcagcuuuccuuuca

SEQ ID NO: 2017344 - RNA, 19 nt, Homo sapiens
  misc_RNA (1)...(19): siRNA sense strand
caacuagucucacgaaugu

SEQ ID NO: 2017345 - RNA, 19 nt, Homo sapiens
  misc_RNA (1)...(19): siRNA sense strand
gaaauaauguucuggugau

SEQ ID NO: 2017346 - RNA, 19 nt, Homo sapiens
  misc_RNA (1)...(19): siRNA sense strand
guaggaaacucauuuagug

SEQ ID NO: 2017347 - RNA, 19 nt, Homo sapiens
  misc_RNA (1)...(19): siRNA sense strand
acaaagagaugaagaacaa

SEQ ID NO: 2017348 - RNA, 19 nt, Homo sapiens
  misc_RNA (1)...(19): siRNA sense strand
uaacaucacugcagaauac

SEQ ID NO: 2017349 - RNA, 19 nt, Homo sapiens
  misc_RNA (1)...(19): siRNA sense strand
gaacgaagaccuccugaga

SEQ ID NO: 2017350 - RNA, 19 nt, Homo sapiens
  misc_RNA (1)...(19): siRNA sense strand
guaaauuucucuggcguua

SEQ ID NO: 2017351 - RNA, 19 nt, Homo sapiens
  misc_RNA (1)...(19): siRNA sense strand
caaagaaacucuguguuau

SEQ ID NO: 2017352 - RNA, 19 nt, Homo sapiens
  misc_RNA (1)...(19): siRNA sense strand
gaaacucuuuaccucaaua

SEQ ID NO: 2017353 - RNA, 19 nt, Homo sapiens
  misc_RNA (1)...(19): siRNA sense strand
gaagaccuccugagacuaa

SEQ ID NO: 2017354 - RNA, 19 nt, Homo sapiens
  misc_RNA (1)...(19): siRNA sense strand
gccaaugguuuaauaauga

SEQ ID NO: 2017355 - RNA, 19 nt, Homo sapiens
  misc_RNA (1)...(19): siRNA sense strand
ggaagaugaugaugauguu

SEQ ID NO: 2017356 - RNA, 19 nt, Homo sapiens
  misc_RNA (1)...(19): siRNA sense strand
gaagggagcaacuaaagaa

SEQ ID NO: 2017357 - RNA, 19 nt, Homo sapiens
  misc_RNA (1)...(19): siRNA sense strand
uaacugagauucgccauga

SEQ ID NO: 2017358 - RNA, 19 nt, Homo sapiens
  misc_RNA (1)...(19): siRNA sense strand
gaaacucuguguuaugugu

SEQ ID NO: 2017359 - RNA, 19 nt, Homo sapiens
  misc_RNA (1)...(19): siRNA sense strand
gaugauaguucugacaauu

SEQ ID NO: 2017360 - RNA, 19 nt, Homo sapiens
  misc_RNA (1)...(19): siRNA sense strand
ggacagcagugagaagauu

SEQ ID NO: 2017361 - RNA, 19 nt, Homo sapiens
  misc_RNA (1)...(19): siRNA sense strand
gaaccaaugauguggauuu

SEQ ID NO: 2017362 - RNA, 19 nt, Homo sapiens
  misc_RNA (1)...(19): siRNA sense strand
ugacggauaugaugaguga

SEQ ID NO: 2017363 - RNA, 19 nt, Homo sapiens
  misc_RNA (1)...(19): siRNA sense strand
ccagacagcuuaucaacga

SEQ ID NO: 2017364 - RNA, 19 nt, Homo sapiens
  misc_RNA (1)...(19): siRNA sense strand
uaaaggugcuggaaauaau

SEQ ID NO: 2017365 - RNA, 19 nt, Homo sapiens
  misc_RNA (1)...(19): siRNA sense strand
gcccagaccucgaucuaaa

SEQ ID NO: 2017366 - RNA, 19 nt, Homo sapiens
  misc_RNA (1)...(19): siRNA sense strand
uaaugcagccugagaaaua

SEQ ID NO: 2017367 - RNA, 19 nt, Homo sapiens
  misc_RNA (1)...(19): siRNA sense strand
gaccaagacuggaguagga

SEQ ID NO: 2017368 - RNA, 19 nt, Homo sapiens
  misc_RNA (1)...(19): siRNA sense strand
ugaauacacuguucuacuu

SEQ ID NO: 2017369 - RNA, 19 nt, Homo sapiens
  misc_RNA (1)...(19): siRNA sense strand
gaacuacaaggaaaugauu

SEQ ID NO: 2017370 - RNA, 19 nt, Homo sapiens
  misc_RNA (1)...(19): siRNA sense strand
uaagagaccuuucuguagu

SEQ ID NO: 2017371 - RNA, 19 nt, Homo sapiens
  misc_RNA (1)...(19): siRNA sense strand
uaagguaaaugcaggaaug

SEQ ID NO: 2017372 - RNA, 19 nt, Homo sapiens
  misc_RNA (1)...(19): siRNA sense strand
gacagcaucuauuaccuuu

SEQ ID NO: 2017373 - RNA, 19 nt, Homo sapiens
  misc_RNA (1)...(19): siRNA sense strand
ugugaaugauggccaauua

SEQ ID NO: 2017374 - RNA, 19 nt, Homo sapiens
  misc_RNA (1)...(19): siRNA sense strand
caacaucaacaguguaauu

SEQ ID NO: 2017375 - RNA, 19 nt, Homo sapiens
  misc_RNA (1)...(19): siRNA sense strand
caaccaacaucaacagugu

SEQ ID NO: 2017376 - RNA, 19 nt, Homo sapiens
  misc_RNA (1)...(19): siRNA sense strand
ucagacaucucgaaccaaa

SEQ ID NO: 2017377 - RNA, 19 nt, Homo sapiens
  misc_RNA (1)...(19): siRNA sense strand
caaacagaauccuacuaaa

SEQ ID NO: 2017378 - RNA, 19 nt, Homo sapiens
  misc_RNA (1)...(19): siRNA sense strand
caaccagaaugcucuaguu

SEQ ID NO: 2017379 - RNA, 19 nt, Homo sapiens
  misc_RNA (1)...(19): siRNA sense strand
cagcuuuccuuucaaauau

SEQ ID NO: 2017380 - RNA, 19 nt, Homo sapiens
  misc_RNA (1)...(19): siRNA sense strand
ggauugagauguguuacuu

SEQ ID NO: 2017381 - RNA, 19 nt, Homo sapiens
  misc_RNA (1)...(19): siRNA sense strand
ccaguuguguggcuaaauu

SEQ ID NO: 2017382 - RNA, 19 nt, Homo sapiens
  misc_RNA (1)...(19): siRNA sense strand
cuaaaggagcucuaaauaa

SEQ ID NO: 2017383 - RNA, 19 nt, Homo sapiens
  misc_RNA (1)...(19): siRNA sense strand
gcgaaacucuuuaccucaa

SEQ ID NO: 2017384 - RNA, 19 nt, Homo sapiens
  misc_RNA (1)...(19): siRNA sense strand
gcagcuuuccuuucaaaua

SEQ ID NO: 2017385 - RNA, 19 nt, Homo sapiens
  misc_RNA (1)...(19): siRNA sense strand
caacuauuguucucagcua

SEQ ID NO: 2017386 - RNA, 19 nt, Homo sapiens
  misc_RNA (1)...(19): siRNA sense strand
gguguaagcucugugaaug

SEQ ID NO: 2017387 - RNA, 19 nt, Homo sapiens
  misc_RNA (1)...(19): siRNA sense strand
ucaauauucucucgaguug

SEQ ID NO: 2017388 - RNA, 19 nt, Homo sapiens
  misc_RNA (1)...(19): siRNA sense strand
cagaugcucuugauacaga

SEQ ID NO: 2017389 - RNA, 19 nt, Homo sapiens
  misc_RNA (1)...(19): siRNA sense strand
guaaaggugcuggaaauaa

SEQ ID NO: 2017390 - RNA, 19 nt, Homo sapiens
  misc_RNA (1)...(19): siRNA sense strand
uagaauggccaaugguuua

SEQ ID NO: 2017391 - RNA, 19 nt, Homo sapiens
  misc_RNA (1)...(19): siRNA sense strand
gauauagaauggccaaugg

SEQ ID NO: 2017392 - RNA, 19 nt, Homo sapiens
  misc_RNA (1)...(19): siRNA sense strand
gauuagaauugacugauca

SEQ ID NO: 2017393 - RNA, 19 nt, Homo sapiens
  misc_RNA (1)...(19): siRNA sense strand
ggaugaagacacagacuaa

SEQ ID NO: 2017394 - RNA, 19 nt, Homo sapiens
  misc_RNA (1)...(19): siRNA sense strand
cgaaacaccuuggaaaaua

SEQ ID NO: 2017395 - RNA, 19 nt, Homo sapiens
  misc_RNA (1)...(19): siRNA sense strand
guuaagagaccuuucugua

SEQ ID NO: 2017396 - RNA, 19 nt, Homo sapiens
  misc_RNA (1)...(19): siRNA sense strand
ggccaaugguuuaauaaug

SEQ ID NO: 2017397 - RNA, 19 nt, Homo sapiens
  misc_RNA (1)...(19): siRNA sense strand
gaagacaaacagaauccua

SEQ ID NO: 2017398 - RNA, 19 nt, Homo sapiens
  misc_RNA (1)...(19): siRNA sense strand
ccacaagccugcuccaaag

SEQ ID NO: 2017399 - RNA, 19 nt, Homo sapiens
  misc_RNA (1)...(19): siRNA sense strand
aaagcaagguuucuucaga

SEQ ID NO: 2017400 - RNA, 19 nt, Homo sapiens
  misc_RNA (1)...(19): siRNA sense strand
guaagaagggagcaacuaa

SEQ ID NO: 2017401 - RNA, 19 nt, Homo sapiens
  misc_RNA (1)...(19): siRNA sense strand
ugaaggcugcaaauuauua

SEQ ID NO: 2017402 - RNA, 19 nt, Homo sapiens
  misc_RNA (1)...(19): siRNA sense strand
gaccacugcuuuaauagau

SEQ ID NO: 2017403 - RNA, 19 nt, Homo sapiens
  misc_RNA (1)...(19): siRNA sense strand
gaucaaagaaccauaacau

SEQ ID NO: 2017404 - RNA, 19 nt, Homo sapiens
  misc_RNA (1)...(19): siRNA sense strand
uugcaaaccuuuaacaaug

SEQ ID NO: 2017405 - RNA, 19 nt, Homo sapiens
  misc_RNA (1)...(19): siRNA sense strand
caacaugacaacucagaaa

SEQ ID NO: 2017406 - RNA, 19 nt, Homo sapiens
  misc_RNA (1)...(19): siRNA sense strand
aggaucagcucaccucuuu

SEQ ID NO: 2017407 - RNA, 19 nt, Homo sapiens
  misc_RNA (1)...(19): siRNA sense strand
agugguagcugaucaaaga

SEQ ID NO: 2017408 - RNA, 19 nt, Homo sapiens
  misc_RNA (1)...(19): siRNA sense strand
cuacuucacuggaccgaaa

SEQ ID NO: 2017409 - RNA, 19 nt, Homo sapiens
  misc_RNA (1)...(19): siRNA sense strand
ggccaaauggagagaauua

SEQ ID NO: 2017410 - RNA, 19 nt, Homo sapiens
  misc_RNA (1)...(19): siRNA sense strand
gauacagaguugcuuacaa

SEQ ID NO: 2017411 - RNA, 19 nt, Homo sapiens
  misc_RNA (1)...(19): siRNA sense strand
uagugaaggcugcaaauua

SEQ ID NO: 2017412 - RNA, 19 nt, Homo sapiens
  misc_RNA (1)...(19): siRNA sense strand
aagaggacauggaaacaaa

SEQ ID NO: 2017413 - RNA, 19 nt, Homo sapiens
  misc_RNA (1)...(19): siRNA sense strand
gcaacuugaugaagaucuu

SEQ ID NO: 2017414 - RNA, 19 nt, Homo sapiens
  misc_RNA (1)...(19): siRNA sense strand
uacaaucugugguaaacua

SEQ ID NO: 2017415 - RNA, 19 nt, Homo sapiens
  misc_RNA (1)...(19): siRNA sense strand
acaaacagaauccuacuaa

SEQ ID NO: 2017416 - RNA, 19 nt, Homo sapiens
  misc_RNA (1)...(19): siRNA sense strand
gaauacacuguucuacuuu

SEQ ID NO: 2017417 - RNA, 19 nt, Homo sapiens
  misc_RNA (1)...(19): siRNA sense strand
ccagaugggucaauauucu

SEQ ID NO: 2017418 - RNA, 19 nt, Homo sapiens
  misc_RNA (1)...(19): siRNA sense strand
guaaaugcauggaaacacu

SEQ ID NO: 2017419 - RNA, 19 nt, Homo sapiens
  misc_RNA (1)...(19): siRNA sense strand
caagagaaaggcuguauca

SEQ ID NO: 2017420 - RNA, 19 nt, Homo sapiens
  misc_RNA (1)...(19): siRNA sense strand
auacagaguugcuuacaau

SEQ ID NO: 2017421 - RNA, 19 nt, Homo sapiens
  misc_RNA (1)...(19): siRNA sense strand
ugauaugacucaguguaua

SEQ ID NO: 2017422 - RNA, 19 nt, Homo sapiens
  misc_RNA (1)...(19): siRNA sense strand
aaaguugugucagugaaua

SEQ ID NO: 2017423 - RNA, 19 nt, Homo sapiens
  misc_RNA (1)...(19): siRNA sense strand
gccaugaagucagcuuuaa

SEQ ID NO: 2017424 - RNA, 19 nt, Homo sapiens
  misc_RNA (1)...(19): siRNA sense strand
caaaagaguuggcaucuca

SEQ ID NO: 2017425 - RNA, 19 nt, Homo sapiens
  misc_RNA (1)...(19): siRNA sense strand
gaacagcccagaccucgau

SEQ ID NO: 2017426 - RNA, 19 nt, Homo sapiens
  misc_RNA (1)...(19): siRNA sense strand
ccacaaugccugauggaaa

SEQ ID NO: 2017427 - RNA, 19 nt, Homo sapiens
  misc_RNA (1)...(19): siRNA sense strand
caguaaaggugcuggaaau

SEQ ID NO: 2017428 - RNA, 19 nt, Homo sapiens
  misc_RNA (1)...(19): siRNA sense strand
ggcgagauaugaacuuaau

SEQ ID NO: 2017429 - RNA, 19 nt, Homo sapiens
  misc_RNA (1)...(19): siRNA sense strand
guuuaucucucuaugaaga

SEQ ID NO: 2017430 - RNA, 19 nt, Homo sapiens
  misc_RNA (1)...(19): siRNA sense strand
ccacagaaucuuaaucaga

SEQ ID NO: 2017431 - RNA, 19 nt, Homo sapiens
  misc_RNA (1)...(19): siRNA sense strand
aauauucucucgaguugaa

SEQ ID NO: 2017432 - RNA, 19 nt, Homo sapiens
  misc_RNA (1)...(19): siRNA sense strand
cagugaagauugcuguaaa

SEQ ID NO: 2017433 - RNA, 19 nt, Homo sapiens
  misc_RNA (1)...(19): siRNA sense strand
agugaaggcugcaaauuau

SEQ ID NO: 2017434 - RNA, 19 nt, Homo sapiens
  misc_RNA (1)...(19): siRNA sense strand
ugaaggagguucgagauca

SEQ ID NO: 2017435 - RNA, 19 nt, Homo sapiens
  misc_RNA (1)...(19): siRNA sense strand
gauguacaaucugugguaa

SEQ ID NO: 2017436 - RNA, 19 nt, Homo sapiens
  misc_RNA (1)...(19): siRNA sense strand
aaacaaagcgugucuucga

SEQ ID NO: 2017437 - RNA, 19 nt, Homo sapiens
  misc_RNA (1)...(19): siRNA sense strand
gcaacuagucucacgaaug

SEQ ID NO: 2017438 - RNA, 19 nt, Homo sapiens
  misc_RNA (1)...(19): siRNA sense strand
gaacaacacuuaagacuuu

SEQ ID NO: 2017439 - RNA, 19 nt, Homo sapiens
  misc_RNA (1)...(19): siRNA sense strand
gaaaggaccugaaaacuua

SEQ ID NO: 2017440 - RNA, 19 nt, Homo sapiens
  misc_RNA (1)...(19): siRNA sense strand
gaagauuccugcagcaauu

SEQ ID NO: 2017441 - RNA, 19 nt, Homo sapiens
  misc_RNA (1)...(19): siRNA sense strand
ccaaagaaacucuguguua

SEQ ID NO: 2017442 - RNA, 19 nt, Homo sapiens
  misc_RNA (1)...(19): siRNA sense strand
gcaggacucuuucuuaaug

SEQ ID NO: 2017443 - RNA, 19 nt, Homo sapiens
  misc_RNA (1)...(19): siRNA sense strand
gaaugcagcuuuccuuuca

SEQ ID NO: 2017444 - RNA, 19 nt, Homo sapiens
  misc_RNA (1)...(19): siRNA sense strand
caacuagucucacgaaugu

SEQ ID NO: 2017445 - RNA, 19 nt, Homo sapiens
  misc_RNA (1)...(19): siRNA sense strand
gaaauaauguucuggugau

SEQ ID NO: 2017446 - RNA, 19 nt, Homo sapiens
  misc_RNA (1)...(19): siRNA sense strand
guaggaaacucauuuagug

SEQ ID NO: 2017447 - RNA, 19 nt, Homo sapiens
  misc_RNA (1)...(19): siRNA sense strand
acaaagagaugaagaacaa

SEQ ID NO: 2017448 - RNA, 19 nt, Homo sapiens
  misc_RNA (1)...(19): siRNA sense strand
uaacaucacugcagaauac

SEQ ID NO: 2017449 - RNA, 19 nt, Homo sapiens
  misc_RNA (1)...(19): siRNA sense strand
gaacgaagaccuccugaga

SEQ ID NO: 2017450 - RNA, 19 nt, Homo sapiens
  misc_RNA (1)...(19): siRNA sense strand
guaaauuucucuggcguua

SEQ ID NO: 2017451 - RNA, 19 nt, Homo sapiens
  misc_RNA (1)...(19): siRNA sense strand
caaagaaacucuguguuau

SEQ ID NO: 2017452 - RNA, 19 nt, Homo sapiens
  misc_RNA (1)...(19): siRNA sense strand
gaaacucuuuaccucaaua

SEQ ID NO: 2017453 - RNA, 19 nt, Homo sapiens
  misc_RNA (1)...(19): siRNA sense strand
gaagaccuccugagacuaa

SEQ ID NO: 2017454 - RNA, 19 nt, Homo sapiens
  misc_RNA (1)...(19): siRNA sense strand
gccaaugguuuaauaauga

SEQ ID NO: 2017455 - RNA, 19 nt, Homo sapiens
  misc_RNA (1)...(19): siRNA sense strand
ggaagaugaugaugauguu

SEQ ID NO: 2017456 - RNA, 19 nt, Homo sapiens
  misc_RNA (1)...(19): siRNA sense strand
gaagggagcaacuaaagaa

SEQ ID NO: 2017457 - RNA, 19 nt, Homo sapiens
  misc_RNA (1)...(19): siRNA sense strand
uaacugagauucgccauga

SEQ ID NO: 2017458 - RNA, 19 nt, Homo sapiens
  misc_RNA (1)...(19): siRNA sense strand
gaaacucuguguuaugugu

SEQ ID NO: 2017459 - RNA, 19 nt, Homo sapiens
  misc_RNA (1)...(19): siRNA sense strand
gaugauaguucugacaauu

SEQ ID NO: 2017460 - RNA, 19 nt, Homo sapiens
  misc_RNA (1)...(19): siRNA sense strand
ggacagcagugagaagauu

SEQ ID NO: 2017461 - RNA, 19 nt, Homo sapiens
  misc_RNA (1)...(19): siRNA sense strand
gaaccaaugauguggauuu

SEQ ID NO: 2017462 - RNA, 19 nt, Homo sapiens
  misc_RNA (1)...(19): siRNA sense strand
ugacggauaugaugaguga

SEQ ID NO: 2017463 - RNA, 19 nt, Homo sapiens
  misc_RNA (1)...(19): siRNA sense strand
ccagacagcuuaucaacga

SEQ ID NO: 2017464 - RNA, 19 nt, Homo sapiens
  misc_RNA (1)...(19): siRNA sense strand
uaaaggugcuggaaauaau

SEQ ID NO: 2017465 - RNA, 19 nt, Homo sapiens
  misc_RNA (1)...(19): siRNA sense strand
gcccagaccucgaucuaaa

SEQ ID NO: 2017466 - RNA, 19 nt, Homo sapiens
  misc_RNA (1)...(19): siRNA sense strand
uaaugcagccugagaaaua

SEQ ID NO: 2017467 - RNA, 19 nt, Homo sapiens
  misc_RNA (1)...(19): siRNA sense strand
gaccaagacuggaguagga

SEQ ID NO: 2017468 - RNA, 19 nt, Homo sapiens
  misc_RNA (1)...(19): siRNA sense strand
ugaauacacuguucuacuu

SEQ ID NO: 2017469 - RNA, 19 nt, Homo sapiens
  misc_RNA (1)...(19): siRNA sense strand
gaacuacaaggaaaugauu

SEQ ID NO: 2017470 - RNA, 19 nt, Homo sapiens
  misc_RNA (1)...(19): siRNA sense strand
uaagagaccuuucuguagu

SEQ ID NO: 2017471 - RNA, 19 nt, Homo sapiens
  misc_RNA (1)...(19): siRNA sense strand
uaagguaaaugcaggaaug

SEQ ID NO: 2017472 - RNA, 19 nt, Homo sapiens
  misc_RNA (1)...(19): siRNA sense strand
gacagcaucuauuaccuuu

SEQ ID NO: 2017473 - RNA, 19 nt, Homo sapiens
  misc_RNA (1)...(19): siRNA sense strand
ugugaaugauggccaauua

SEQ ID NO: 2017474 - RNA, 19 nt, Homo sapiens
  misc_RNA (1)...(19): siRNA sense strand
caacaucaacaguguaauu

SEQ ID NO: 2017475 - RNA, 19 nt, Homo sapiens
  misc_RNA (1)...(19): siRNA sense strand
caaccaacaucaacagugu

SEQ ID NO: 2017476 - RNA, 19 nt, Homo sapiens
  misc_RNA (1)...(19): siRNA sense strand
ucagacaucucgaaccaaa

SEQ ID NO: 2017477 - RNA, 19 nt, Homo sapiens
  misc_RNA (1)...(19): siRNA sense strand
caaacagaauccuacuaaa

SEQ ID NO: 2017478 - RNA, 19 nt, Homo sapiens
  misc_RNA (1)...(19): siRNA sense strand
caaccagaaugcucuaguu

SEQ ID NO: 2017479 - RNA, 19 nt, Homo sapiens
  misc_RNA (1)...(19): siRNA sense strand
cagcuuuccuuucaaauau

SEQ ID NO: 2017480 - RNA, 19 nt, Homo sapiens
  misc_RNA (1)...(19): siRNA sense strand
ggauugagauguguuacuu

SEQ ID NO: 2017481 - RNA, 19 nt, Homo sapiens
  misc_RNA (1)...(19): siRNA sense strand
ccaguuguguggcuaaauu

SEQ ID NO: 2017482 - RNA, 19 nt, Homo sapiens
  misc_RNA (1)...(19): siRNA sense strand
cuaaaggagcucuaaauaa

SEQ ID NO: 2017483 - RNA, 19 nt, Homo sapiens
  misc_RNA (1)...(19): siRNA sense strand
gcgaaacucuuuaccucaa

SEQ ID NO: 2017484 - RNA, 19 nt, Homo sapiens
  misc_RNA (1)...(19): siRNA sense strand
gcagcuuuccuuucaaaua

SEQ ID NO: 2017485 - RNA, 19 nt, Homo sapiens
  misc_RNA (1)...(19): siRNA sense strand
caacuauuguucucagcua

SEQ ID NO: 2017486 - RNA, 19 nt, Homo sapiens
  misc_RNA (1)...(19): siRNA sense strand
gguguaagcucugugaaug

SEQ ID NO: 2017487 - RNA, 19 nt, Homo sapiens
  misc_RNA (1)...(19): siRNA sense strand
ucaauauucucucgaguug

SEQ ID NO: 2017488 - RNA, 19 nt, Homo sapiens
  misc_RNA (1)...(19): siRNA sense strand
cagaugcucuugauacaga

SEQ ID NO: 2017489 - RNA, 19 nt, Homo sapiens
  misc_RNA (1)...(19): siRNA sense strand
guaaaggugcuggaaauaa

SEQ ID NO: 2017490 - RNA, 19 nt, Homo sapiens
  misc_RNA (1)...(19): siRNA sense strand
uagaauggccaaugguuua

SEQ ID NO: 2017491 - RNA, 19 nt, Homo sapiens
  misc_RNA (1)...(19): siRNA sense strand
gauauagaauggccaaugg

SEQ ID NO: 2017492 - RNA, 19 nt, Homo sapiens
  misc_RNA (1)...(19): siRNA sense strand
gauuagaauugacugauca

SEQ ID NO: 2017493 - RNA, 19 nt, Homo sapiens
  misc_RNA (1)...(19): siRNA sense strand
ggaugaagacacagacuaa

SEQ ID NO: 2017494 - RNA, 19 nt, Homo sapiens
  misc_RNA (1)...(19): siRNA sense strand
cgaaacaccuuggaaaaua

SEQ ID NO: 2017495 - RNA, 19 nt, Homo sapiens
  misc_RNA (1)...(19): siRNA sense strand
guuaagagaccuuucugua

SEQ ID NO: 2017496 - RNA, 19 nt, Homo sapiens
  misc_RNA (1)...(19): siRNA sense strand
ggccaaugguuuaauaaug

SEQ ID NO: 2017497 - RNA, 19 nt, Homo sapiens
  misc_RNA (1)...(19): siRNA sense strand
gaagacaaacagaauccua

SEQ ID NO: 2017498 - RNA, 19 nt, Homo sapiens
  misc_RNA (1)...(19): siRNA sense strand
ccacaagccugcuccaaag

SEQ ID NO: 2017499 - RNA, 19 nt, Homo sapiens
  misc_RNA (1)...(19): siRNA sense strand
aaagcaagguuucuucaga

SEQ ID NO: 2017500 - RNA, 19 nt, Homo sapiens
  misc_RNA (1)...(19): siRNA sense strand
guaagaagggagcaacuaa

SEQ ID NO: 2017501 - RNA, 19 nt, Homo sapiens
  misc_RNA (1)...(19): siRNA sense strand
ugaaggcugcaaauuauua

SEQ ID NO: 2017502 - RNA, 19 nt, Homo sapiens
  misc_RNA (1)...(19): siRNA sense strand
gaccacugcuuuaauagau

SEQ ID NO: 2017503 - RNA, 19 nt, Homo sapiens
  misc_RNA (1)...(19): siRNA sense strand
gaucaaagaaccauaacau

SEQ ID NO: 2017504 - RNA, 19 nt, Homo sapiens
  misc_RNA (1)...(19): siRNA sense strand
uugcaaaccuuuaacaaug

SEQ ID NO: 2017505 - RNA, 19 nt, Homo sapiens
  misc_RNA (1)...(19): siRNA sense strand
caacaugacaacucagaaa

SEQ ID NO: 2017506 - RNA, 19 nt, Homo sapiens
  misc_RNA (1)...(19): siRNA sense strand
aggaucagcucaccucuuu

SEQ ID NO: 2017507 - RNA, 19 nt, Homo sapiens
  misc_RNA (1)...(19): siRNA sense strand
agugguagcugaucaaaga

SEQ ID NO: 2017508 - RNA, 19 nt, Homo sapiens
  misc_RNA (1)...(19): siRNA sense strand
cuacuucacuggaccgaaa

SEQ ID NO: 2017509 - RNA, 19 nt, Homo sapiens
  misc_RNA (1)...(19): siRNA sense strand
ggccaaauggagagaauua

SEQ ID NO: 2017510 - RNA, 19 nt, Homo sapiens
  misc_RNA (1)...(19): siRNA sense strand
gauacagaguugcuuacaa

SEQ ID NO: 2017511 - RNA, 19 nt, Homo sapiens
  misc_RNA (1)...(19): siRNA sense strand
uagugaaggcugcaaauua

SEQ ID NO: 2017512 - RNA, 19 nt, Homo sapiens
  misc_RNA (1)...(19): siRNA sense strand
aagaggacauggaaacaaa

SEQ ID NO: 2017513 - RNA, 19 nt, Homo sapiens
  misc_RNA (1)...(19): siRNA sense strand
gcaacuugaugaagaucuu

SEQ ID NO: 2017514 - RNA, 19 nt, Homo sapiens
  misc_RNA (1)...(19): siRNA sense strand
uacaaucugugguaaacua

SEQ ID NO: 2017515 - RNA, 19 nt, Homo sapiens
  misc_RNA (1)...(19): siRNA sense strand
acaaacagaauccuacuaa

SEQ ID NO: 2017516 - RNA, 19 nt, Homo sapiens
  misc_RNA (1)...(19): siRNA sense strand
gaauacacuguucuacuuu

SEQ ID NO: 2017517 - RNA, 19 nt, Homo sapiens
  misc_RNA (1)...(19): siRNA sense strand
ccagaugggucaauauucu

SEQ ID NO: 2017518 - RNA, 19 nt, Homo sapiens
  misc_RNA (1)...(19): siRNA sense strand
guaaaugcauggaaacacu

SEQ ID NO: 2017519 - RNA, 19 nt, Homo sapiens
  misc_RNA (1)...(19): siRNA sense strand
caagagaaaggcuguauca

SEQ ID NO: 2017520 - RNA, 19 nt, Homo sapiens
  misc_RNA (1)...(19): siRNA sense strand
auacagaguugcuuacaau

SEQ ID NO: 2017521 - RNA, 19 nt, Homo sapiens
  misc_RNA (1)...(19): siRNA sense strand
ugauaugacucaguguaua

SEQ ID NO: 2017522 - RNA, 19 nt, Homo sapiens
  misc_RNA (1)...(19): siRNA sense strand
aaaguugugucagugaaua

SEQ ID NO: 2017523 - RNA, 19 nt, Homo sapiens
  misc_RNA (1)...(19): siRNA sense strand
gccaugaagucagcuuuaa

SEQ ID NO: 2017524 - RNA, 19 nt, Homo sapiens
  misc_RNA (1)...(19): siRNA sense strand
caaaagaguuggcaucuca

SEQ ID NO: 2017525 - RNA, 19 nt, Homo sapiens
  misc_RNA (1)...(19): siRNA sense strand
gaacagcccagaccucgau

SEQ ID NO: 2017526 - RNA, 19 nt, Homo sapiens
  misc_RNA (1)...(19): siRNA sense strand
ccacaaugccugauggaaa

SEQ ID NO: 2017527 - RNA, 19 nt, Homo sapiens
  misc_RNA (1)...(19): siRNA sense strand
caguaaaggugcuggaaau

SEQ ID NO: 2017528 - RNA, 19 nt, Homo sapiens
  misc_RNA (1)...(19): siRNA sense strand
ggcgagauaugaacuuaau

SEQ ID NO: 2017529 - RNA, 19 nt, Homo sapiens
  misc_RNA (1)...(19): siRNA sense strand
guuuaucucucuaugaaga

SEQ ID NO: 2017530 - RNA, 19 nt, Homo sapiens
  misc_RNA (1)...(19): siRNA sense strand
ccacagaaucuuaaucaga

SEQ ID NO: 2017531 - RNA, 19 nt, Homo sapiens
  misc_RNA (1)...(19): siRNA sense strand
aauauucucucgaguugaa

SEQ ID NO: 2017532 - RNA, 19 nt, Homo sapiens
  misc_RNA (1)...(19): siRNA sense strand
cagugaagauugcuguaaa

SEQ ID NO: 2017533 - RNA, 19 nt, Homo sapiens
  misc_RNA (1)...(19): siRNA sense strand
agugaaggcugcaaauuau

SEQ ID NO: 2017534 - RNA, 19 nt, Homo sapiens
  misc_RNA (1)...(19): siRNA sense strand
ugaaggagguucgagauca

SEQ ID NO: 2017535 - RNA, 19 nt, Homo sapiens
  misc_RNA (1)...(19): siRNA sense strand
gauguacaaucugugguaa

SEQ ID NO: 2017536 - RNA, 19 nt, Homo sapiens
  misc_RNA (1)...(19): siRNA sense strand
aaacaaagcgugucuucga

SEQ ID NO: 2017537 - RNA, 19 nt, Homo sapiens
  misc_RNA (1)...(19): siRNA sense strand
gcaacuagucucacgaaug

SEQ ID NO: 2017538 - RNA, 19 nt, Homo sapiens
  misc_RNA (1)...(19): siRNA sense strand
gaacaacacuuaagacuuu

SEQ ID NO: 2017539 - RNA, 19 nt, Homo sapiens
  misc_RNA (1)...(19): siRNA sense strand
gaaaggaccugaaaacuua

SEQ ID NO: 2017540 - RNA, 19 nt, Homo sapiens
  misc_RNA (1)...(19): siRNA sense strand
gaagauuccugcagcaauu

SEQ ID NO: 2017541 - RNA, 19 nt, Homo sapiens
  misc_RNA (1)...(19): siRNA sense strand
ccaaagaaacucuguguua

SEQ ID NO: 2017542 - RNA, 19 nt, Homo sapiens
  misc_RNA (1)...(19): siRNA sense strand
gcaggacucuuucuuaaug

SEQ ID NO: 2017543 - RNA, 19 nt, Homo sapiens
  misc_RNA (1)...(19): siRNA sense strand
gaaugcagcuuuccuuuca

SEQ ID NO: 2017544 - RNA, 19 nt, Homo sapiens
  misc_RNA (1)...(19): siRNA sense strand
caacuagucucacgaaugu

SEQ ID NO: 2017545 - RNA, 19 nt, Homo sapiens
  misc_RNA (1)...(19): siRNA sense strand
gaaauaauguucuggugau

SEQ ID NO: 2017546 - RNA, 19 nt, Homo sapiens
  misc_RNA (1)...(19): siRNA sense strand
guaggaaacucauuuagug

SEQ ID NO: 2017547 - RNA, 19 nt, Homo sapiens
  misc_RNA (1)...(19): siRNA sense strand
acaaagagaugaagaacaa

SEQ ID NO: 2017548 - RNA, 19 nt, Homo sapiens
  misc_RNA (1)...(19): siRNA sense strand
uaacaucacugcagaauac

SEQ ID NO: 2017549 - RNA, 19 nt, Homo sapiens
  misc_RNA (1)...(19): siRNA sense strand
gaacgaagaccuccugaga

SEQ ID NO: 2017550 - RNA, 19 nt, Homo sapiens
  misc_RNA (1)...(19): siRNA sense strand
guaaauuucucuggcguua

SEQ ID NO: 2017551 - RNA, 19 nt, Homo sapiens
  misc_RNA (1)...(19): siRNA sense strand
caaagaaacucuguguuau

SEQ ID NO: 2017552 - RNA, 19 nt, Homo sapiens
  misc_RNA (1)...(19): siRNA sense strand
gaaacucuuuaccucaaua

SEQ ID NO: 2017553 - RNA, 19 nt, Homo sapiens
  misc_RNA (1)...(19): siRNA sense strand
gaagaccuccugagacuaa

SEQ ID NO: 2017554 - RNA, 19 nt, Homo sapiens
  misc_RNA (1)...(19): siRNA sense strand
gccaaugguuuaauaauga

SEQ ID NO: 2017555 - RNA, 19 nt, Homo sapiens
  misc_RNA (1)...(19): siRNA sense strand
ggaagaugaugaugauguu

SEQ ID NO: 2017556 - RNA, 19 nt, Homo sapiens
  misc_RNA (1)...(19): siRNA sense strand
gaagggagcaacuaaagaa

SEQ ID NO: 2017557 - RNA, 19 nt, Homo sapiens
  misc_RNA (1)...(19): siRNA sense strand
uaacugagauucgccauga

SEQ ID NO: 2017558 - RNA, 19 nt, Homo sapiens
  misc_RNA (1)...(19): siRNA sense strand
gaaacucuguguuaugugu

SEQ ID NO: 2017559 - RNA, 19 nt, Homo sapiens
  misc_RNA (1)...(19): siRNA sense strand
gaugauaguucugacaauu

SEQ ID NO: 2017560 - RNA, 19 nt, Homo sapiens
  misc_RNA (1)...(19): siRNA sense strand
ggacagcagugagaagauu

SEQ ID NO: 2017561 - RNA, 19 nt, Homo sapiens
  misc_RNA (1)...(19): siRNA sense strand
gaaccaaugauguggauuu

SEQ ID NO: 2017562 - RNA, 19 nt, Homo sapiens
  misc_RNA (1)...(19): siRNA sense strand
ugacggauaugaugaguga

SEQ ID NO: 2017563 - RNA, 19 nt, Homo sapiens
  misc_RNA (1)...(19): siRNA sense strand
ccagacagcuuaucaacga

SEQ ID NO: 2017564 - RNA, 19 nt, Homo sapiens
  misc_RNA (1)...(19): siRNA sense strand
uaaaggugcuggaaauaau

SEQ ID NO: 2017565 - RNA, 19 nt, Homo sapiens
  misc_RNA (1)...(19): siRNA sense strand
gcccagaccucgaucuaaa

SEQ ID NO: 2017566 - RNA, 19 nt, Homo sapiens
  misc_RNA (1)...(19): siRNA sense strand
uaaugcagccugagaaaua

SEQ ID NO: 2017567 - RNA, 19 nt, Homo sapiens
  misc_RNA (1)...(19): siRNA sense strand
gaccaagacuggaguagga

SEQ ID NO: 2017568 - RNA, 19 nt, Homo sapiens
  misc_RNA (1)...(19): siRNA sense strand
ugaauacacuguucuacuu

SEQ ID NO: 2017569 - RNA, 19 nt, Homo sapiens
  misc_RNA (1)...(19): siRNA sense strand
gaacuacaaggaaaugauu

SEQ ID NO: 2017570 - RNA, 19 nt, Homo sapiens
  misc_RNA (1)...(19): siRNA sense strand
uaagagaccuuucuguagu

SEQ ID NO: 2017571 - RNA, 19 nt, Homo sapiens
  misc_RNA (1)...(19): siRNA sense strand
uaagguaaaugcaggaaug

SEQ ID NO: 2017572 - RNA, 19 nt, Homo sapiens
  misc_RNA (1)...(19): siRNA sense strand
gacagcaucuauuaccuuu

SEQ ID NO: 2017573 - RNA, 19 nt, Homo sapiens
  misc_RNA (1)...(19): siRNA sense strand
ugugaaugauggccaauua

SEQ ID NO: 2017574 - RNA, 19 nt, Homo sapiens
  misc_RNA (1)...(19): siRNA sense strand
caacaucaacaguguaauu

SEQ ID NO: 2017575 - RNA, 19 nt, Homo sapiens
  misc_RNA (1)...(19): siRNA sense strand
caaccaacaucaacagugu

SEQ ID NO: 2017576 - RNA, 19 nt, Homo sapiens
  misc_RNA (1)...(19): siRNA sense strand
ucagacaucucgaaccaaa

SEQ ID NO: 2017577 - RNA, 19 nt, Homo sapiens
  misc_RNA (1)...(19): siRNA sense strand
caaacagaauccuacuaaa

SEQ ID NO: 2017578 - RNA, 19 nt, Homo sapiens
  misc_RNA (1)...(19): siRNA sense strand
caaccagaaugcucuaguu

SEQ ID NO: 2017579 - RNA, 19 nt, Homo sapiens
  misc_RNA (1)...(19): siRNA sense strand
cagcuuuccuuucaaauau

SEQ ID NO: 2017580 - RNA, 19 nt, Homo sapiens
  misc_RNA (1)...(19): siRNA sense strand
ggauugagauguguuacuu

SEQ ID NO: 2017581 - RNA, 19 nt, Homo sapiens
  misc_RNA (1)...(19): siRNA sense strand
ccaguuguguggcuaaauu

SEQ ID NO: 2017582 - RNA, 19 nt, Homo sapiens
  misc_RNA (1)...(19): siRNA sense strand
cuaaaggagcucuaaauaa

SEQ ID NO: 2017583 - RNA, 19 nt, Homo sapiens
  misc_RNA (1)...(19): siRNA sense strand
gcgaaacucuuuaccucaa

SEQ ID NO: 2017584 - RNA, 19 nt, Homo sapiens
  misc_RNA (1)...(19): siRNA sense strand
gcagcuuuccuuucaaaua

SEQ ID NO: 2017585 - RNA, 19 nt, Homo sapiens
  misc_RNA (1)...(19): siRNA sense strand
caacuauuguucucagcua

SEQ ID NO: 2017586 - RNA, 19 nt, Homo sapiens
  misc_RNA (1)...(19): siRNA sense strand
gguguaagcucugugaaug

SEQ ID NO: 2017587 - RNA, 19 nt, Homo sapiens
  misc_RNA (1)...(19): siRNA sense strand
ucaauauucucucgaguug

SEQ ID NO: 2017588 - RNA, 19 nt, Homo sapiens
  misc_RNA (1)...(19): siRNA sense strand
cagaugcucuugauacaga

SEQ ID NO: 2017589 - RNA, 19 nt, Homo sapiens
  misc_RNA (1)...(19): siRNA sense strand
guaaaggugcuggaaauaa

SEQ ID NO: 2017590 - RNA, 19 nt, Homo sapiens
  misc_RNA (1)...(19): siRNA sense strand
uagaauggccaaugguuua

SEQ ID NO: 2017591 - RNA, 19 nt, Homo sapiens
  misc_RNA (1)...(19): siRNA sense strand
gauauagaauggccaaugg

SEQ ID NO: 2017592 - RNA, 19 nt, Homo sapiens
  misc_RNA (1)...(19): siRNA sense strand
gauuagaauugacugauca

SEQ ID NO: 2017593 - RNA, 19 nt, Homo sapiens
  misc_RNA (1)...(19): siRNA sense strand
ggaugaagacacagacuaa

SEQ ID NO: 2017594 - RNA, 19 nt, Homo sapiens
  misc_RNA (1)...(19): siRNA sense strand
cgaaacaccuuggaaaaua

SEQ ID NO: 2017595 - RNA, 19 nt, Homo sapiens
  misc_RNA (1)...(19): siRNA sense strand
guuaagagaccuuucugua

SEQ ID NO: 2017596 - RNA, 19 nt, Homo sapiens
  misc_RNA (1)...(19): siRNA sense strand
ggccaaugguuuaauaaug

SEQ ID NO: 2017597 - RNA, 19 nt, Homo sapiens
  misc_RNA (1)...(19): siRNA sense strand
gaagacaaacagaauccua

SEQ ID NO: 2017598 - RNA, 19 nt, Homo sapiens
  misc_RNA (1)...(19): siRNA sense strand
ccacaagccugcuccaaag

SEQ ID NO: 2017599 - RNA, 19 nt, Homo sapiens
  misc_RNA (1)...(19): siRNA sense strand
aaagcaagguuucuucaga

SEQ ID NO: 2017600 - RNA, 19 nt, Homo sapiens
  misc_RNA (1)...(19): siRNA sense strand
guaagaagggagcaacuaa

SEQ ID NO: 2017601 - RNA, 19 nt, Homo sapiens
  misc_RNA (1)...(19): siRNA sense strand
ugaaggcugcaaauuauua

SEQ ID NO: 2017602 - RNA, 19 nt, Homo sapiens
  misc_RNA (1)...(19): siRNA sense strand
gaccacugcuuuaauagau

SEQ ID NO: 2017603 - RNA, 19 nt, Homo sapiens
  misc_RNA (1)...(19): siRNA sense strand
gaucaaagaaccauaacau

SEQ ID NO: 2017604 - RNA, 19 nt, Homo sapiens
  misc_RNA (1)...(19): siRNA sense strand
uugcaaaccuuuaacaaug

SEQ ID NO: 2017605 - RNA, 19 nt, Homo sapiens
  misc_RNA (1)...(19): siRNA sense strand
caacaugacaacucagaaa

SEQ ID NO: 2017606 - RNA, 19 nt, Homo sapiens
  misc_RNA (1)...(19): siRNA sense strand
aggaucagcucaccucuuu

SEQ ID NO: 2017607 - RNA, 19 nt, Homo sapiens
  misc_RNA (1)...(19): siRNA sense strand
agugguagcugaucaaaga

SEQ ID NO: 2017608 - RNA, 19 nt, Homo sapiens
  misc_RNA (1)...(19): siRNA sense strand
cuacuucacuggaccgaaa

SEQ ID NO: 2017609 - RNA, 19 nt, Homo sapiens
  misc_RNA (1)...(19): siRNA sense strand
ggccaaauggagagaauua

SEQ ID NO: 2017610 - RNA, 19 nt, Homo sapiens
  misc_RNA (1)...(19): siRNA sense strand
gauacagaguugcuuacaa

SEQ ID NO: 2017611 - RNA, 19 nt, Homo sapiens
  misc_RNA (1)...(19): siRNA sense strand
uagugaaggcugcaaauua

SEQ ID NO: 2017612 - RNA, 19 nt, Homo sapiens
  misc_RNA (1)...(19): siRNA sense strand
aagaggacauggaaacaaa

SEQ ID NO: 2017613 - RNA, 19 nt, Homo sapiens
  misc_RNA (1)...(19): siRNA sense strand
gcaacuugaugaagaucuu

SEQ ID NO: 2017614 - RNA, 19 nt, Homo sapiens
  misc_RNA (1)...(19): siRNA sense strand
uacaaucugugguaaacua

SEQ ID NO: 2017615 - RNA, 19 nt, Homo sapiens
  misc_RNA (1)...(19): siRNA sense strand
acaaacagaauccuacuaa

SEQ ID NO: 2017616 - RNA, 19 nt, Homo sapiens
  misc_RNA (1)...(19): siRNA sense strand
gaauacacuguucuacuuu

SEQ ID NO: 2017617 - RNA, 19 nt, Homo sapiens
  misc_RNA (1)...(19): siRNA sense strand
ccagaugggucaauauucu

SEQ ID NO: 2017618 - RNA, 19 nt, Homo sapiens
  misc_RNA (1)...(19): siRNA sense strand
guaaaugcauggaaacacu

SEQ ID NO: 2017619 - RNA, 19 nt, Homo sapiens
  misc_RNA (1)...(19): siRNA sense strand
caagagaaaggcuguauca

SEQ ID NO: 2017620 - RNA, 19 nt, Homo sapiens
  misc_RNA (1)...(19): siRNA sense strand
auacagaguugcuuacaau

SEQ ID NO: 2017621 - RNA, 19 nt, Homo sapiens
  misc_RNA (1)...(19): siRNA sense strand
ugauaugacucaguguaua

SEQ ID NO: 2017622 - RNA, 19 nt, Homo sapiens
  misc_RNA (1)...(19): siRNA sense strand
aaaguugugucagugaaua

SEQ ID NO: 2017623 - RNA, 19 nt, Homo sapiens
  misc_RNA (1)...(19): siRNA sense strand
gccaugaagucagcuuuaa

SEQ ID NO: 2017624 - RNA, 19 nt, Homo sapiens
  misc_RNA (1)...(19): siRNA sense strand
caaaagaguuggcaucuca

SEQ ID NO: 2017625 - RNA, 19 nt, Homo sapiens
  misc_RNA (1)...(19): siRNA sense strand
gaacagcccagaccucgau

SEQ ID NO: 2017626 - RNA, 19 nt, Homo sapiens
  misc_RNA (1)...(19): siRNA sense strand
ccacaaugccugauggaaa

SEQ ID NO: 2017627 - RNA, 19 nt, Homo sapiens
  misc_RNA (1)...(19): siRNA sense strand
caguaaaggugcuggaaau

SEQ ID NO: 2017628 - RNA, 19 nt, Homo sapiens
  misc_RNA (1)...(19): siRNA sense strand
ggcgagauaugaacuuaau

SEQ ID NO: 2017629 - RNA, 19 nt, Homo sapiens
  misc_RNA (1)...(19): siRNA sense strand
guuuaucucucuaugaaga

SEQ ID NO: 2017630 - RNA, 19 nt, Homo sapiens
  misc_RNA (1)...(19): siRNA sense strand
ccacagaaucuuaaucaga

SEQ ID NO: 2017631 - RNA, 19 nt, Homo sapiens
  misc_RNA (1)...(19): siRNA sense strand
aauauucucucgaguugaa

SEQ ID NO: 2017632 - RNA, 19 nt, Homo sapiens
  misc_RNA (1)...(19): siRNA sense strand
cagugaagauugcuguaaa

SEQ ID NO: 2017633 - RNA, 19 nt, Homo sapiens
  misc_RNA (1)...(19): siRNA sense strand
agugaaggcugcaaauuau

SEQ ID NO: 2017634 - RNA, 19 nt, Homo sapiens
  misc_RNA (1)...(19): siRNA sense strand
ugaaggagguucgagauca

SEQ ID NO: 2017635 - RNA, 19 nt, Homo sapiens
  misc_RNA (1)...(19): siRNA sense strand
gauguacaaucugugguaa

SEQ ID NO: 2017636 - RNA, 19 nt, Homo sapiens
  misc_RNA (1)...(19): siRNA sense strand
aaacaaagcgugucuucga

SEQ ID NO: 2017637 - RNA, 19 nt, Homo sapiens
  misc_RNA (1)...(19): siRNA sense strand
gcaacuagucucacgaaug

SEQ ID NO: 2017638 - RNA, 19 nt, Homo sapiens
  misc_RNA (1)...(19): siRNA sense strand
ccaaggugcuaguguauga

SEQ ID NO: 2017639 - RNA, 19 nt, Homo sapiens
  misc_RNA (1)...(19): siRNA sense strand
gggaagaucuuugccuuug

SEQ ID NO: 2017640 - RNA, 19 nt, Homo sapiens
  misc_RNA (1)...(19): siRNA sense strand
ccgaugauguaguugauua

SEQ ID NO: 2017641 - RNA, 19 nt, Homo sapiens
  misc_RNA (1)...(19): siRNA sense strand
agacagaucugcaugaaca

SEQ ID NO: 2017642 - RNA, 19 nt, Homo sapiens
  misc_RNA (1)...(19): siRNA sense strand
ggaagaucuuugccuuuga

SEQ ID NO: 2017643 - RNA, 19 nt, Homo sapiens
  misc_RNA (1)...(19): siRNA sense strand
gacaagguuucuccuauca

SEQ ID NO: 2017644 - RNA, 19 nt, Homo sapiens
  misc_RNA (1)...(19): siRNA sense strand
ggaaugaggaccuguugga

SEQ ID NO: 2017645 - RNA, 19 nt, Homo sapiens
  misc_RNA (1)...(19): siRNA sense strand
gaaccaagggaagaucuuu

SEQ ID NO: 2017646 - RNA, 19 nt, Homo sapiens
  misc_RNA (1)...(19): siRNA sense strand
gcaauaagaccagucacuu

SEQ ID NO: 2017647 - RNA, 19 nt, Homo sapiens
  misc_RNA (1)...(19): siRNA sense strand
ucacuuggcugcucuucug

SEQ ID NO: 2017648 - RNA, 19 nt, Homo sapiens
  misc_RNA (1)...(19): siRNA sense strand
gaccugcuccgaugaugua

SEQ ID NO: 2017649 - RNA, 19 nt, Homo sapiens
  misc_RNA (1)...(19): siRNA sense strand
gcuaguguaugaguuguug

SEQ ID NO: 2017650 - RNA, 19 nt, Homo sapiens
  misc_RNA (1)...(19): siRNA sense strand
gaagaucuuugccuuugac

SEQ ID NO: 2017651 - RNA, 19 nt, Homo sapiens
  misc_RNA (1)...(19): siRNA sense strand
caauaagaccagucacuug

SEQ ID NO: 2017652 - RNA, 19 nt, Homo sapiens
  misc_RNA (1)...(19): siRNA sense strand
cuucuucguugcuguaauu

SEQ ID NO: 2017653 - RNA, 19 nt, Homo sapiens
  misc_RNA (1)...(19): siRNA sense strand
uggccaaggugcuagugua

SEQ ID NO: 2017654 - RNA, 19 nt, Homo sapiens
  misc_RNA (1)...(19): siRNA sense strand
cuucguugcuguaauugaa

SEQ ID NO: 2017655 - RNA, 19 nt, Homo sapiens
  misc_RNA (1)...(19): siRNA sense strand
agacaagguuucuccuauc

SEQ ID NO: 2017656 - RNA, 19 nt, Homo sapiens
  misc_RNA (1)...(19): siRNA sense strand
ccaagcggcuggcauccau

SEQ ID NO: 2017657 - RNA, 19 nt, Homo sapiens
  misc_RNA (1)...(19): siRNA sense strand
ccucccagcugccucgauu

SEQ ID NO: 2017658 - RNA, 19 nt, Homo sapiens
  misc_RNA (1)...(19): siRNA sense strand
gaaugaggaccuguuggaa

SEQ ID NO: 2017659 - RNA, 19 nt, Homo sapiens
  misc_RNA (1)...(19): siRNA sense strand
ccagcugccucgauuugug

SEQ ID NO: 2017660 - RNA, 19 nt, Homo sapiens
  misc_RNA (1)...(19): siRNA sense strand
cagccucgaugacuuacga

SEQ ID NO: 2017661 - RNA, 19 nt, Homo sapiens
  misc_RNA (1)...(19): siRNA sense strand
ugccggagcugcugguguu

SEQ ID NO: 2017662 - RNA, 19 nt, Homo sapiens
  misc_RNA (1)...(19): siRNA sense strand
cugcuccgaugauguaguu

SEQ ID NO: 2017663 - RNA, 19 nt, Homo sapiens
  misc_RNA (1)...(19): siRNA sense strand
gccaggaggagaaugaaga

SEQ ID NO: 2017664 - RNA, 19 nt, Homo sapiens
  misc_RNA (1)...(19): siRNA sense strand
gcaugaacacccacuguac

SEQ ID NO: 2017665 - RNA, 19 nt, Homo sapiens
  misc_RNA (1)...(19): siRNA sense strand
gaagaaccaagggaagauc

SEQ ID NO: 2017666 - RNA, 19 nt, Homo sapiens
  misc_RNA (1)...(19): siRNA sense strand
acucagcaguggcuucuuc

SEQ ID NO: 2017667 - RNA, 19 nt, Homo sapiens
  misc_RNA (1)...(19): siRNA sense strand
cagcaguggcuucuucguu

SEQ ID NO: 2017668 - RNA, 19 nt, Homo sapiens
  misc_RNA (1)...(19): siRNA sense strand
uggcucggcucaagguuca

SEQ ID NO: 2017669 - RNA, 19 nt, Homo sapiens
  misc_RNA (1)...(19): siRNA sense strand
gcuccgaugauguaguuga

SEQ ID NO: 2017670 - RNA, 19 nt, Homo sapiens
  misc_RNA (1)...(19): siRNA sense strand
gcaacuuccagaacgugaa

SEQ ID NO: 2017671 - RNA, 19 nt, Homo sapiens
  misc_RNA (1)...(19): siRNA sense strand
ggugcuaguguaugaguug

SEQ ID NO: 2017672 - RNA, 19 nt, Homo sapiens
  misc_RNA (1)...(19): siRNA sense strand
gaacgugaagcagcuguac

SEQ ID NO: 2017673 - RNA, 19 nt, Homo sapiens
  misc_RNA (1)...(19): siRNA sense strand
augaggaccuguuggaagu

SEQ ID NO: 2017674 - RNA, 19 nt, Homo sapiens
  misc_RNA (1)...(19): siRNA sense strand
gguguacuccagcaacuuc

SEQ ID NO: 2017675 - RNA, 19 nt, Homo sapiens
  misc_RNA (1)...(19): siRNA sense strand
ggccaaggugcuaguguau

SEQ ID NO: 2017676 - RNA, 19 nt, Homo sapiens
  misc_RNA (1)...(19): siRNA sense strand
accaugagguccacuacau

SEQ ID NO: 2017677 - RNA, 19 nt, Homo sapiens
  misc_RNA (1)...(19): siRNA sense strand
caagaccugcuccgaugau

SEQ ID NO: 2017678 - RNA, 19 nt, Homo sapiens
  misc_RNA (1)...(19): siRNA sense strand
ccaaggugcuaguguauga

SEQ ID NO: 2017679 - RNA, 19 nt, Homo sapiens
  misc_RNA (1)...(19): siRNA sense strand
gggaagaucuuugccuuug

SEQ ID NO: 2017680 - RNA, 19 nt, Homo sapiens
  misc_RNA (1)...(19): siRNA sense strand
ccgaugauguaguugauua

SEQ ID NO: 2017681 - RNA, 19 nt, Homo sapiens
  misc_RNA (1)...(19): siRNA sense strand
agacagaucugcaugaaca

SEQ ID NO: 2017682 - RNA, 19 nt, Homo sapiens
  misc_RNA (1)...(19): siRNA sense strand
gcacaccgccuugcacaua

SEQ ID NO: 2017683 - RNA, 19 nt, Homo sapiens
  misc_RNA (1)...(19): siRNA sense strand
ggaagaucuuugccuuuga

SEQ ID NO: 2017684 - RNA, 19 nt, Homo sapiens
  misc_RNA (1)...(19): siRNA sense strand
gacaagguuucuccuauca

SEQ ID NO: 2017685 - RNA, 19 nt, Homo sapiens
  misc_RNA (1)...(19): siRNA sense strand
gaaagaagagacagcaaag

SEQ ID NO: 2017686 - RNA, 19 nt, Homo sapiens
  misc_RNA (1)...(19): siRNA sense strand
ggaaugaggaccuguugga

SEQ ID NO: 2017687 - RNA, 19 nt, Homo sapiens
  misc_RNA (1)...(19): siRNA sense strand
gaaccaagggaagaucuuu

SEQ ID NO: 2017688 - RNA, 19 nt, Homo sapiens
  misc_RNA (1)...(19): siRNA sense strand
gcaauaagaccagucacuu

SEQ ID NO: 2017689 - RNA, 19 nt, Homo sapiens
  misc_RNA (1)...(19): siRNA sense strand
ucacuuggcugcucuucug

SEQ ID NO: 2017690 - RNA, 19 nt, Homo sapiens
  misc_RNA (1)...(19): siRNA sense strand
gaccugcuccgaugaugua

SEQ ID NO: 2017691 - RNA, 19 nt, Homo sapiens
  misc_RNA (1)...(19): siRNA sense strand
gcuaguguaugaguuguug

SEQ ID NO: 2017692 - RNA, 19 nt, Homo sapiens
  misc_RNA (1)...(19): siRNA sense strand
gaagaucuuugccuuugac

SEQ ID NO: 2017693 - RNA, 19 nt, Homo sapiens
  misc_RNA (1)...(19): siRNA sense strand
caaagcaucagcaccagaa

SEQ ID NO: 2017694 - RNA, 19 nt, Homo sapiens
  misc_RNA (1)...(19): siRNA sense strand
caauaagaccagucacuug

SEQ ID NO: 2017695 - RNA, 19 nt, Homo sapiens
  misc_RNA (1)...(19): siRNA sense strand
cuucuucguugcuguaauu

SEQ ID NO: 2017696 - RNA, 19 nt, Homo sapiens
  misc_RNA (1)...(19): siRNA sense strand
uggccaaggugcuagugua

SEQ ID NO: 2017697 - RNA, 19 nt, Homo sapiens
  misc_RNA (1)...(19): siRNA sense strand
cuucguugcuguaauugaa

SEQ ID NO: 2017698 - RNA, 19 nt, Homo sapiens
  misc_RNA (1)...(19): siRNA sense strand
agacaagguuucuccuauc

SEQ ID NO: 2017699 - RNA, 19 nt, Homo sapiens
  misc_RNA (1)...(19): siRNA sense strand
agaaagaagagacagcaaa

SEQ ID NO: 2017700 - RNA, 19 nt, Homo sapiens
  misc_RNA (1)...(19): siRNA sense strand
ccaagcggcuggcauccau

SEQ ID NO: 2017701 - RNA, 19 nt, Homo sapiens
  misc_RNA (1)...(19): siRNA sense strand
ccucccagcugccucgauu

SEQ ID NO: 2017702 - RNA, 19 nt, Homo sapiens
  misc_RNA (1)...(19): siRNA sense strand
gaaugaggaccuguuggaa

SEQ ID NO: 2017703 - RNA, 19 nt, Homo sapiens
  misc_RNA (1)...(19): siRNA sense strand
ccagcugccucgauuugug

SEQ ID NO: 2017704 - RNA, 19 nt, Homo sapiens
  misc_RNA (1)...(19): siRNA sense strand
cagccucgaugacuuacga

SEQ ID NO: 2017705 - RNA, 19 nt, Homo sapiens
  misc_RNA (1)...(19): siRNA sense strand
ugccggagcugcugguguu

SEQ ID NO: 2017706 - RNA, 19 nt, Homo sapiens
  misc_RNA (1)...(19): siRNA sense strand
caaagagaaagaagagaca

SEQ ID NO: 2017707 - RNA, 19 nt, Homo sapiens
  misc_RNA (1)...(19): siRNA sense strand
cugcuccgaugauguaguu

SEQ ID NO: 2017708 - RNA, 19 nt, Homo sapiens
  misc_RNA (1)...(19): siRNA sense strand
gccaggaggagaaugaaga

SEQ ID NO: 2017709 - RNA, 19 nt, Homo sapiens
  misc_RNA (1)...(19): siRNA sense strand
gcaugaacacccacuguac

SEQ ID NO: 2017710 - RNA, 19 nt, Homo sapiens
  misc_RNA (1)...(19): siRNA sense strand
gaagaaccaagggaagauc

SEQ ID NO: 2017711 - RNA, 19 nt, Homo sapiens
  misc_RNA (1)...(19): siRNA sense strand
acucagcaguggcuucuuc

SEQ ID NO: 2017712 - RNA, 19 nt, Homo sapiens
  misc_RNA (1)...(19): siRNA sense strand
cagcaguggcuucuucguu

SEQ ID NO: 2017713 - RNA, 19 nt, Homo sapiens
  misc_RNA (1)...(19): siRNA sense strand
gagaaagaagagacagcaa

SEQ ID NO: 2017714 - RNA, 19 nt, Homo sapiens
  misc_RNA (1)...(19): siRNA sense strand
uggcucggcucaagguuca

SEQ ID NO: 2017715 - RNA, 19 nt, Homo sapiens
  misc_RNA (1)...(19): siRNA sense strand
gcuccgaugauguaguuga

SEQ ID NO: 2017716 - RNA, 19 nt, Homo sapiens
  misc_RNA (1)...(19): siRNA sense strand
gcaacuuccagaacgugaa

SEQ ID NO: 2017717 - RNA, 19 nt, Homo sapiens
  misc_RNA (1)...(19): siRNA sense strand
augaggaccuguuggaagu

SEQ ID NO: 2017718 - RNA, 19 nt, Homo sapiens
  misc_RNA (1)...(19): siRNA sense strand
ggugcuaguguaugaguug

SEQ ID NO: 2017719 - RNA, 19 nt, Homo sapiens
  misc_RNA (1)...(19): siRNA sense strand
gaacgugaagcagcuguac

SEQ ID NO: 2017720 - RNA, 19 nt, Homo sapiens
  misc_RNA (1)...(19): siRNA sense strand
gguguacuccagcaacuuc

SEQ ID NO: 2017721 - RNA, 19 nt, Homo sapiens
  misc_RNA (1)...(19): siRNA sense strand
aagaagagacagcaaagag

SEQ ID NO: 2017722 - RNA, 19 nt, Homo sapiens
  misc_RNA (1)...(19): siRNA sense strand
ggccaaggugcuaguguau

SEQ ID NO: 2017723 - RNA, 19 nt, Homo sapiens
  misc_RNA (1)...(19): siRNA sense strand
accaugagguccacuacau

SEQ ID NO: 2017724 - RNA, 19 nt, Homo sapiens
  misc_RNA (1)...(19): siRNA sense strand
aaagaagagacagcaaaga

SEQ ID NO: 2017725 - RNA, 19 nt, Homo sapiens
  misc_RNA (1)...(19): siRNA sense strand
caagaccugcuccgaugau

SEQ ID NO: 2017726 - RNA, 19 nt, Homo sapiens
  misc_RNA (1)...(19): siRNA sense strand
gaagagaaaugccauaaau

SEQ ID NO: 2017727 - RNA, 19 nt, Homo sapiens
  misc_RNA (1)...(19): siRNA sense strand
gcacauaccuuauacaaca

SEQ ID NO: 2017728 - RNA, 19 nt, Homo sapiens
  misc_RNA (1)...(19): siRNA sense strand
gaaagacccuaucagugua

SEQ ID NO: 2017729 - RNA, 19 nt, Homo sapiens
  misc_RNA (1)...(19): siRNA sense strand
gaaauucauugcuuguuga

SEQ ID NO: 2017730 - RNA, 19 nt, Homo sapiens
  misc_RNA (1)...(19): siRNA sense strand
guauaaagaugucaugaug

SEQ ID NO: 2017731 - RNA, 19 nt, Homo sapiens
  misc_RNA (1)...(19): siRNA sense strand
aagaagagcuuuagucgaa

SEQ ID NO: 2017732 - RNA, 19 nt, Homo sapiens
  misc_RNA (1)...(19): siRNA sense strand
ggaaaucacaccuuauuga

SEQ ID NO: 2017733 - RNA, 19 nt, Homo sapiens
  misc_RNA (1)...(19): siRNA sense strand
ggagaagacuuauccauac

SEQ ID NO: 2017734 - RNA, 19 nt, Homo sapiens
  misc_RNA (1)...(19): siRNA sense strand
ccaaauugcagucuuguua

SEQ ID NO: 2017735 - RNA, 19 nt, Homo sapiens
  misc_RNA (1)...(19): siRNA sense strand
gaaaagcccuaucuaugua

SEQ ID NO: 2017736 - RNA, 19 nt, Homo sapiens
  misc_RNA (1)...(19): siRNA sense strand
ugagaaaccuuaucacugu

SEQ ID NO: 2017737 - RNA, 19 nt, Homo sapiens
  misc_RNA (1)...(19): siRNA sense strand
gaacaucagaggauccaua

SEQ ID NO: 2017738 - RNA, 19 nt, Homo sapiens
  misc_RNA (1)...(19): siRNA sense strand
agucggagcucauuccuua

SEQ ID NO: 2017739 - RNA, 19 nt, Homo sapiens
  misc_RNA (1)...(19): siRNA sense strand
gaaaugccauaaaugugaa

SEQ ID NO: 2017740 - RNA, 19 nt, Homo sapiens
  misc_RNA (1)...(19): siRNA sense strand
acacuaacauuauccguaa

SEQ ID NO: 2017741 - RNA, 19 nt, Homo sapiens
  misc_RNA (1)...(19): siRNA sense strand
agagaaaccuuauaagugu

SEQ ID NO: 2017742 - RNA, 19 nt, Homo sapiens
  misc_RNA (1)...(19): siRNA sense strand
gaaaggcccuaugagugua

SEQ ID NO: 2017743 - RNA, 19 nt, Homo sapiens
  misc_RNA (1)...(19): siRNA sense strand
gcaguucauuuguuauuga

SEQ ID NO: 2017744 - RNA, 19 nt, Homo sapiens
  misc_RNA (1)...(19): siRNA sense strand
cagagaauguucagagaaa

SEQ ID NO: 2017745 - RNA, 19 nt, Homo sapiens
  misc_RNA (1)...(19): siRNA sense strand
gagagaaaccuuauaagug

SEQ ID NO: 2017746 - RNA, 19 nt, Homo sapiens
  misc_RNA (1)...(19): siRNA sense strand
agccggagcucauuucuua

SEQ ID NO: 2017747 - RNA, 19 nt, Homo sapiens
  misc_RNA (1)...(19): siRNA sense strand
gaacagagauaaggaugag

SEQ ID NO: 2017748 - RNA, 19 nt, Homo sapiens
  misc_RNA (1)...(19): siRNA sense strand
ccauaaaugugaugaaugu

SEQ ID NO: 2017749 - RNA, 19 nt, Homo sapiens
  misc_RNA (1)...(19): siRNA sense strand
aguagaagcucaggucuua

SEQ ID NO: 2017750 - RNA, 19 nt, Homo sapiens
  misc_RNA (1)...(19): siRNA sense strand
ccauaaaugugaagaaugu

SEQ ID NO: 2017751 - RNA, 19 nt, Homo sapiens
  misc_RNA (1)...(19): siRNA sense strand
gcucaacccuuauuagaca

SEQ ID NO: 2017752 - RNA, 19 nt, Homo sapiens
  misc_RNA (1)...(19): siRNA sense strand
agagaagccuguauaaaga

SEQ ID NO: 2017753 - RNA, 19 nt, Homo sapiens
  misc_RNA (1)...(19): siRNA sense strand
gggagaagacuuauccaua

SEQ ID NO: 2017754 - RNA, 19 nt, Homo sapiens
  misc_RNA (1)...(19): siRNA sense strand
ggaaaggcccuaugagugu

SEQ ID NO: 2017755 - RNA, 19 nt, Homo sapiens
  misc_RNA (1)...(19): siRNA sense strand
ccauaaauguggugaaugu

SEQ ID NO: 2017756 - RNA, 19 nt, Homo sapiens
  misc_RNA (1)...(19): siRNA sense strand
cgaaauucauugcuuguug

SEQ ID NO: 2017757 - RNA, 19 nt, Homo sapiens
  misc_RNA (1)...(19): siRNA sense strand
agugugagcucaacccuua

SEQ ID NO: 2017758 - RNA, 19 nt, Homo sapiens
  misc_RNA (1)...(19): siRNA sense strand
ccacaggguguaauaguua

SEQ ID NO: 2017759 - RNA, 19 nt, Homo sapiens
  misc_RNA (1)...(19): siRNA sense strand
ccaagaaacccaugaaugu

SEQ ID NO: 2017760 - RNA, 19 nt, Homo sapiens
  misc_RNA (1)...(19): siRNA sense strand
ggagagaaaccuuauaagu

SEQ ID NO: 2017761 - RNA, 19 nt, Homo sapiens
  misc_RNA (1)...(19): siRNA sense strand
gggaaagccuucaguugga

SEQ ID NO: 2017762 - RNA, 19 nt, Homo sapiens
  misc_RNA (1)...(19): siRNA sense strand
gaagagcuuuagucgaaau

SEQ ID NO: 2017763 - RNA, 19 nt, Homo sapiens
  misc_RNA (1)...(19): siRNA sense strand
gcucagagaagccuguaua

SEQ ID NO: 2017764 - RNA, 19 nt, Homo sapiens
  misc_RNA (1)...(19): siRNA sense strand
gauccaaauugcagucuug

SEQ ID NO: 2017765 - RNA, 19 nt, Homo sapiens
  misc_RNA (1)...(19): siRNA sense strand
gaagacuuauccauacaau

SEQ ID NO: 2017766 - RNA, 19 nt, Homo sapiens
  misc_RNA (1)...(19): siRNA sense strand
ggagaaagacccuaucagu

SEQ ID NO: 2017767 - RNA, 19 nt, Homo sapiens
  misc_RNA (1)...(19): siRNA sense strand
gcucauuucuuauugaaca

SEQ ID NO: 2017768 - RNA, 19 nt, Homo sapiens
  misc_RNA (1)...(19): siRNA sense strand
gagcucauuucuuauugaa

SEQ ID NO: 2017769 - RNA, 19 nt, Homo sapiens
  misc_RNA (1)...(19): siRNA sense strand
gagaaaccuuaucacugua

SEQ ID NO: 2017770 - RNA, 19 nt, Homo sapiens
  misc_RNA (1)...(19): siRNA sense strand
caacagcgcagucuuguca

SEQ ID NO: 2017771 - RNA, 19 nt, Homo sapiens
  misc_RNA (1)...(19): siRNA sense strand
gauccauacuggugaaaga

SEQ ID NO: 2017772 - RNA, 19 nt, Homo sapiens
  misc_RNA (1)...(19): siRNA sense strand
gagaaacauuugaacuugu

SEQ ID NO: 2017773 - RNA, 19 nt, Homo sapiens
  misc_RNA (1)...(19): siRNA sense strand
gcucauuccuuauugaaca

SEQ ID NO: 2017774 - RNA, 19 nt, Homo sapiens
  misc_RNA (1)...(19): siRNA sense strand
agacuuauccauacaauga

SEQ ID NO: 2017775 - RNA, 19 nt, Homo sapiens
  misc_RNA (1)...(19): siRNA sense strand
ggaaccacaggguguaaua

SEQ ID NO: 2017776 - RNA, 19 nt, Homo sapiens
  misc_RNA (1)...(19): siRNA sense strand
agucagcuuuguaaucuua

SEQ ID NO: 2017777 - RNA, 19 nt, Homo sapiens
  misc_RNA (1)...(19): siRNA sense strand
ggagcucauuucuuauuga

SEQ ID NO: 2017778 - RNA, 19 nt, Homo sapiens
  misc_RNA (1)...(19): siRNA sense strand
gagaagacuuauccauaca

SEQ ID NO: 2017779 - RNA, 19 nt, Homo sapiens
  misc_RNA (1)...(19): siRNA sense strand
ggaaagaccccauaaaugu

SEQ ID NO: 2017780 - RNA, 19 nt, Homo sapiens
  misc_RNA (1)...(19): siRNA sense strand
ggaaagccuucaguuggaa

SEQ ID NO: 2017781 - RNA, 19 nt, Homo sapiens
  misc_RNA (1)...(19): siRNA sense strand
gaacaucagagaauucaca

SEQ ID NO: 2017782 - RNA, 19 nt, Homo sapiens
  misc_RNA (1)...(19): siRNA sense strand
gagcucaacccuuauuaga

SEQ ID NO: 2017783 - RNA, 19 nt, Homo sapiens
  misc_RNA (1)...(19): siRNA sense strand
cagagaagccuguauaaag

SEQ ID NO: 2017784 - RNA, 19 nt, Homo sapiens
  misc_RNA (1)...(19): siRNA sense strand
gaugaggagccaacuguaa

SEQ ID NO: 2017785 - RNA, 19 nt, Homo sapiens
  misc_RNA (1)...(19): siRNA sense strand
agagaaacauuugaacuug

SEQ ID NO: 2017786 - RNA, 19 nt, Homo sapiens
  misc_RNA (1)...(19): siRNA sense strand
agucgcaguucauuuguua

SEQ ID NO: 2017787 - RNA, 19 nt, Homo sapiens
  misc_RNA (1)...(19): siRNA sense strand
gaaauugaccaggauccua

SEQ ID NO: 2017788 - RNA, 19 nt, Homo sapiens
  misc_RNA (1)...(19): siRNA sense strand
gaacucgggucuuauucag

SEQ ID NO: 2017789 - RNA, 19 nt, Homo sapiens
  misc_RNA (1)...(19): siRNA sense strand
ggagcucauuccuuauuga

SEQ ID NO: 2017790 - RNA, 19 nt, Homo sapiens
  misc_RNA (1)...(19): siRNA sense strand
agaaagacccuaucagugu

SEQ ID NO: 2017791 - RNA, 19 nt, Homo sapiens
  misc_RNA (1)...(19): siRNA sense strand
caggagagaaaccuuauaa

SEQ ID NO: 2017792 - RNA, 19 nt, Homo sapiens
  misc_RNA (1)...(19): siRNA sense strand
auaaagaugucaugaugga

SEQ ID NO: 2017793 - RNA, 19 nt, Homo sapiens
  misc_RNA (1)...(19): siRNA sense strand
gagcuuuagucgaaauuca

SEQ ID NO: 2017794 - RNA, 19 nt, Homo sapiens
  misc_RNA (1)...(19): siRNA sense strand
ugaagaaauugaggaagaa

SEQ ID NO: 2017795 - RNA, 19 nt, Homo sapiens
  misc_RNA (1)...(19): siRNA sense strand
gcaaggcccauuucauuca

SEQ ID NO: 2017796 - RNA, 19 nt, Homo sapiens
  misc_RNA (1)...(19): siRNA sense strand
ugaacuuguugguagguua

SEQ ID NO: 2017797 - RNA, 19 nt, Homo sapiens
  misc_RNA (1)...(19): siRNA sense strand
gccuuuaauugccguauuu

SEQ ID NO: 2017798 - RNA, 19 nt, Homo sapiens
  misc_RNA (1)...(19): siRNA sense strand
ccauaaaugugaggaaugu

SEQ ID NO: 2017799 - RNA, 19 nt, Homo sapiens
  misc_RNA (1)...(19): siRNA sense strand
agaaaugccauaaauguga

SEQ ID NO: 2017800 - RNA, 19 nt, Homo sapiens
  misc_RNA (1)...(19): siRNA sense strand
ccgcaaggcccauuucauu

SEQ ID NO: 2017801 - RNA, 19 nt, Homo sapiens
  misc_RNA (1)...(19): siRNA sense strand
gguccauacuggugagaaa

SEQ ID NO: 2017802 - RNA, 19 nt, Homo sapiens
  misc_RNA (1)...(19): siRNA sense strand
gaaaucacaccuuauugag

SEQ ID NO: 2017803 - RNA, 19 nt, Homo sapiens
  misc_RNA (1)...(19): siRNA sense strand
ccauaaauguagugacugu

SEQ ID NO: 2017804 - RNA, 19 nt, Homo sapiens
  misc_RNA (1)...(19): siRNA sense strand
uguaaucaguguaaacaga

SEQ ID NO: 2017805 - RNA, 19 nt, Homo sapiens
  misc_RNA (1)...(19): siRNA sense strand
caaugaaacuaaggaaagu

SEQ ID NO: 2017806 - RNA, 19 nt, Homo sapiens
  misc_RNA (1)...(19): siRNA sense strand
uugaagaaauugaggaaga

SEQ ID NO: 2017807 - RNA, 19 nt, Homo sapiens
  misc_RNA (1)...(19): siRNA sense strand
gugcucaucuuguacaaca

SEQ ID NO: 2017808 - RNA, 19 nt, Homo sapiens
  misc_RNA (1)...(19): siRNA sense strand
gagaaaugccauaaaugug

SEQ ID NO: 2017809 - RNA, 19 nt, Homo sapiens
  misc_RNA (1)...(19): siRNA sense strand
guaauaaaccccauaaaug

SEQ ID NO: 2017810 - RNA, 19 nt, Homo sapiens
  misc_RNA (1)...(19): siRNA sense strand
ggugagagacccuaucugu

SEQ ID NO: 2017811 - RNA, 19 nt, Homo sapiens
  misc_RNA (1)...(19): siRNA sense strand
agagaaaugccauaaaugu

SEQ ID NO: 2017812 - RNA, 19 nt, Homo sapiens
  misc_RNA (1)...(19): siRNA sense strand
ggugaaagaccuuaucagu

SEQ ID NO: 2017813 - RNA, 19 nt, Homo sapiens
  misc_RNA (1)...(19): siRNA sense strand
ggaaauaccaagggaaucu

SEQ ID NO: 2017814 - RNA, 19 nt, Homo sapiens
  misc_RNA (1)...(19): siRNA sense strand
uguuagugcucaucuugua

SEQ ID NO: 2017815 - RNA, 19 nt, Homo sapiens
  misc_RNA (1)...(19): siRNA sense strand
agucagcuuugcaaccuua

SEQ ID NO: 2017816 - RNA, 19 nt, Homo sapiens
  misc_RNA (1)...(19): siRNA sense strand
gaggauccauacuggugaa

SEQ ID NO: 2017817 - RNA, 19 nt, Homo sapiens
  misc_RNA (1)...(19): siRNA sense strand
gauccuauggguagagaaa

SEQ ID NO: 2017818 - RNA, 19 nt, Homo sapiens
  misc_RNA (1)...(19): siRNA sense strand
acacaggagagaaaccuua

SEQ ID NO: 2017819 - RNA, 19 nt, Homo sapiens
  misc_RNA (1)...(19): siRNA sense strand
caacaucaaaggguccaua

SEQ ID NO: 2017820 - RNA, 19 nt, Homo sapiens
  misc_RNA (1)...(19): siRNA sense strand
agaccaaacucagaagaga

SEQ ID NO: 2017821 - RNA, 19 nt, Homo sapiens
  misc_RNA (1)...(19): siRNA sense strand
gugcaaagagugugggaaa

SEQ ID NO: 2017822 - RNA, 19 nt, Homo sapiens
  misc_RNA (1)...(19): siRNA sense strand
caaggcccauuucauucaa

SEQ ID NO: 2017823 - RNA, 19 nt, Homo sapiens
  misc_RNA (1)...(19): siRNA sense strand
caaauugcagucuuguuau

SEQ ID NO: 2017824 - RNA, 19 nt, Homo sapiens
  misc_RNA (1)...(19): siRNA sense strand
gauggagaauuauggaaac

SEQ ID NO: 2017825 - RNA, 19 nt, Homo sapiens
  misc_RNA (1)...(19): siRNA sense strand
guggugaagccuuuaauug

SEQ ID NO: 2017826 - RNA, 19 nt, Homo sapiens
  misc_RNA (1)...(19): siRNA sense strand
gaagagaaaugccauaaau

SEQ ID NO: 2017827 - RNA, 19 nt, Homo sapiens
  misc_RNA (1)...(19): siRNA sense strand
gcacauaccuuauacaaca

SEQ ID NO: 2017828 - RNA, 19 nt, Homo sapiens
  misc_RNA (1)...(19): siRNA sense strand
gaaagacccuaucagugua

SEQ ID NO: 2017829 - RNA, 19 nt, Homo sapiens
  misc_RNA (1)...(19): siRNA sense strand
gaaauucauugcuuguuga

SEQ ID NO: 2017830 - RNA, 19 nt, Homo sapiens
  misc_RNA (1)...(19): siRNA sense strand
aagaagagcuuuagucgaa

SEQ ID NO: 2017831 - RNA, 19 nt, Homo sapiens
  misc_RNA (1)...(19): siRNA sense strand
ggaaaucacaccuuauuga

SEQ ID NO: 2017832 - RNA, 19 nt, Homo sapiens
  misc_RNA (1)...(19): siRNA sense strand
ggagaagacuuauccauac

SEQ ID NO: 2017833 - RNA, 19 nt, Homo sapiens
  misc_RNA (1)...(19): siRNA sense strand
ccaaauugcagucuuguua

SEQ ID NO: 2017834 - RNA, 19 nt, Homo sapiens
  misc_RNA (1)...(19): siRNA sense strand
gaaaagcccuaucuaugua

SEQ ID NO: 2017835 - RNA, 19 nt, Homo sapiens
  misc_RNA (1)...(19): siRNA sense strand
ugagaaaccuuaucacugu

SEQ ID NO: 2017836 - RNA, 19 nt, Homo sapiens
  misc_RNA (1)...(19): siRNA sense strand
gaacaucagaggauccaua

SEQ ID NO: 2017837 - RNA, 19 nt, Homo sapiens
  misc_RNA (1)...(19): siRNA sense strand
agucggagcucauuccuua

SEQ ID NO: 2017838 - RNA, 19 nt, Homo sapiens
  misc_RNA (1)...(19): siRNA sense strand
gaaaugccauaaaugugaa

SEQ ID NO: 2017839 - RNA, 19 nt, Homo sapiens
  misc_RNA (1)...(19): siRNA sense strand
acacuaacauuauccguaa

SEQ ID NO: 2017840 - RNA, 19 nt, Homo sapiens
  misc_RNA (1)...(19): siRNA sense strand
agagaaaccuuauaagugu

SEQ ID NO: 2017841 - RNA, 19 nt, Homo sapiens
  misc_RNA (1)...(19): siRNA sense strand
gaaaggcccuaugagugua

SEQ ID NO: 2017842 - RNA, 19 nt, Homo sapiens
  misc_RNA (1)...(19): siRNA sense strand
gcaguucauuuguuauuga

SEQ ID NO: 2017843 - RNA, 19 nt, Homo sapiens
  misc_RNA (1)...(19): siRNA sense strand
cagagaauguucagagaaa

SEQ ID NO: 2017844 - RNA, 19 nt, Homo sapiens
  misc_RNA (1)...(19): siRNA sense strand
gagagaaaccuuauaagug

SEQ ID NO: 2017845 - RNA, 19 nt, Homo sapiens
  misc_RNA (1)...(19): siRNA sense strand
agccggagcucauuucuua

SEQ ID NO: 2017846 - RNA, 19 nt, Homo sapiens
  misc_RNA (1)...(19): siRNA sense strand
ccauaaaugugaagaaugu

SEQ ID NO: 2017847 - RNA, 19 nt, Homo sapiens
  misc_RNA (1)...(19): siRNA sense strand
ccauaaaugugaugaaugu

SEQ ID NO: 2017848 - RNA, 19 nt, Homo sapiens
  misc_RNA (1)...(19): siRNA sense strand
gaacagagauaaggaugag

SEQ ID NO: 2017849 - RNA, 19 nt, Homo sapiens
  misc_RNA (1)...(19): siRNA sense strand
aguagaagcucaggucuua

SEQ ID NO: 2017850 - RNA, 19 nt, Homo sapiens
  misc_RNA (1)...(19): siRNA sense strand
gcucaacccuuauuagaca

SEQ ID NO: 2017851 - RNA, 19 nt, Homo sapiens
  misc_RNA (1)...(19): siRNA sense strand
gggagaagacuuauccaua

SEQ ID NO: 2017852 - RNA, 19 nt, Homo sapiens
  misc_RNA (1)...(19): siRNA sense strand
ggaaaggcccuaugagugu

SEQ ID NO: 2017853 - RNA, 19 nt, Homo sapiens
  misc_RNA (1)...(19): siRNA sense strand
ccauaaauguggugaaugu

SEQ ID NO: 2017854 - RNA, 19 nt, Homo sapiens
  misc_RNA (1)...(19): siRNA sense strand
cgaaauucauugcuuguug

SEQ ID NO: 2017855 - RNA, 19 nt, Homo sapiens
  misc_RNA (1)...(19): siRNA sense strand
agugugagcucaacccuua

SEQ ID NO: 2017856 - RNA, 19 nt, Homo sapiens
  misc_RNA (1)...(19): siRNA sense strand
ccacaggguguaauaguua

SEQ ID NO: 2017857 - RNA, 19 nt, Homo sapiens
  misc_RNA (1)...(19): siRNA sense strand
ccaagaaacccaugaaugu

SEQ ID NO: 2017858 - RNA, 19 nt, Homo sapiens
  misc_RNA (1)...(19): siRNA sense strand
ggagagaaaccuuauaagu

SEQ ID NO: 2017859 - RNA, 19 nt, Homo sapiens
  misc_RNA (1)...(19): siRNA sense strand
gggaaagccuucaguugga

SEQ ID NO: 2017860 - RNA, 19 nt, Homo sapiens
  misc_RNA (1)...(19): siRNA sense strand
gaagagcuuuagucgaaau

SEQ ID NO: 2017861 - RNA, 19 nt, Homo sapiens
  misc_RNA (1)...(19): siRNA sense strand
gauccaaauugcagucuug

SEQ ID NO: 2017862 - RNA, 19 nt, Homo sapiens
  misc_RNA (1)...(19): siRNA sense strand
gaagacuuauccauacaau

SEQ ID NO: 2017863 - RNA, 19 nt, Homo sapiens
  misc_RNA (1)...(19): siRNA sense strand
ggagaaagacccuaucagu

SEQ ID NO: 2017864 - RNA, 19 nt, Homo sapiens
  misc_RNA (1)...(19): siRNA sense strand
gcucauuucuuauugaaca

SEQ ID NO: 2017865 - RNA, 19 nt, Homo sapiens
  misc_RNA (1)...(19): siRNA sense strand
gagcucauuucuuauugaa

SEQ ID NO: 2017866 - RNA, 19 nt, Homo sapiens
  misc_RNA (1)...(19): siRNA sense strand
gagaaaccuuaucacugua

SEQ ID NO: 2017867 - RNA, 19 nt, Homo sapiens
  misc_RNA (1)...(19): siRNA sense strand
caacagcgcagucuuguca

SEQ ID NO: 2017868 - RNA, 19 nt, Homo sapiens
  misc_RNA (1)...(19): siRNA sense strand
gauccauacuggugaaaga

SEQ ID NO: 2017869 - RNA, 19 nt, Homo sapiens
  misc_RNA (1)...(19): siRNA sense strand
gagaaacauuugaacuugu

SEQ ID NO: 2017870 - RNA, 19 nt, Homo sapiens
  misc_RNA (1)...(19): siRNA sense strand
gcucauuccuuauugaaca

SEQ ID NO: 2017871 - RNA, 19 nt, Homo sapiens
  misc_RNA (1)...(19): siRNA sense strand
agacuuauccauacaauga

SEQ ID NO: 2017872 - RNA, 19 nt, Homo sapiens
  misc_RNA (1)...(19): siRNA sense strand
gaacaucagagaauucaca

SEQ ID NO: 2017873 - RNA, 19 nt, Homo sapiens
  misc_RNA (1)...(19): siRNA sense strand
agucagcuuuguaaucuua

SEQ ID NO: 2017874 - RNA, 19 nt, Homo sapiens
  misc_RNA (1)...(19): siRNA sense strand
ggagcucauuucuuauuga

SEQ ID NO: 2017875 - RNA, 19 nt, Homo sapiens
  misc_RNA (1)...(19): siRNA sense strand
gagaagacuuauccauaca

SEQ ID NO: 2017876 - RNA, 19 nt, Homo sapiens
  misc_RNA (1)...(19): siRNA sense strand
ggaaccacaggguguaaua

SEQ ID NO: 2017877 - RNA, 19 nt, Homo sapiens
  misc_RNA (1)...(19): siRNA sense strand
ggaaagaccccauaaaugu

SEQ ID NO: 2017878 - RNA, 19 nt, Homo sapiens
  misc_RNA (1)...(19): siRNA sense strand
ggaaagccuucaguuggaa

SEQ ID NO: 2017879 - RNA, 19 nt, Homo sapiens
  misc_RNA (1)...(19): siRNA sense strand
gaugaggagccaacuguaa

SEQ ID NO: 2017880 - RNA, 19 nt, Homo sapiens
  misc_RNA (1)...(19): siRNA sense strand
gagcucaacccuuauuaga

SEQ ID NO: 2017881 - RNA, 19 nt, Homo sapiens
  misc_RNA (1)...(19): siRNA sense strand
agagaaacauuugaacuug

SEQ ID NO: 2017882 - RNA, 19 nt, Homo sapiens
  misc_RNA (1)...(19): siRNA sense strand
agucgcaguucauuuguua

SEQ ID NO: 2017883 - RNA, 19 nt, Homo sapiens
  misc_RNA (1)...(19): siRNA sense strand
gaaauugaccaggauccua

SEQ ID NO: 2017884 - RNA, 19 nt, Homo sapiens
  misc_RNA (1)...(19): siRNA sense strand
gaacucgggucuuauucag

SEQ ID NO: 2017885 - RNA, 19 nt, Homo sapiens
  misc_RNA (1)...(19): siRNA sense strand
ggagcucauuccuuauuga

SEQ ID NO: 2017886 - RNA, 19 nt, Homo sapiens
  misc_RNA (1)...(19): siRNA sense strand
agaaagacccuaucagugu

SEQ ID NO: 2017887 - RNA, 19 nt, Homo sapiens
  misc_RNA (1)...(19): siRNA sense strand
caggagagaaaccuuauaa

SEQ ID NO: 2017888 - RNA, 19 nt, Homo sapiens
  misc_RNA (1)...(19): siRNA sense strand
gagcuuuagucgaaauuca

SEQ ID NO: 2017889 - RNA, 19 nt, Homo sapiens
  misc_RNA (1)...(19): siRNA sense strand
gcaaggcccauuucauuca

SEQ ID NO: 2017890 - RNA, 19 nt, Homo sapiens
  misc_RNA (1)...(19): siRNA sense strand
ugaagaaauugaggaagaa

SEQ ID NO: 2017891 - RNA, 19 nt, Homo sapiens
  misc_RNA (1)...(19): siRNA sense strand
ugaacuuguugguagguua

SEQ ID NO: 2017892 - RNA, 19 nt, Homo sapiens
  misc_RNA (1)...(19): siRNA sense strand
gccuuuaauugccguauuu

SEQ ID NO: 2017893 - RNA, 19 nt, Homo sapiens
  misc_RNA (1)...(19): siRNA sense strand
ccauaaaugugaggaaugu

SEQ ID NO: 2017894 - RNA, 19 nt, Homo sapiens
  misc_RNA (1)...(19): siRNA sense strand
agaaaugccauaaauguga

SEQ ID NO: 2017895 - RNA, 19 nt, Homo sapiens
  misc_RNA (1)...(19): siRNA sense strand
ccgcaaggcccauuucauu

SEQ ID NO: 2017896 - RNA, 19 nt, Homo sapiens
  misc_RNA (1)...(19): siRNA sense strand
gguccauacuggugagaaa

SEQ ID NO: 2017897 - RNA, 19 nt, Homo sapiens
  misc_RNA (1)...(19): siRNA sense strand
gaaaucacaccuuauugag

SEQ ID NO: 2017898 - RNA, 19 nt, Homo sapiens
  misc_RNA (1)...(19): siRNA sense strand
ccauaaauguagugacugu

SEQ ID NO: 2017899 - RNA, 19 nt, Homo sapiens
  misc_RNA (1)...(19): siRNA sense strand
uguaaucaguguaaacaga

SEQ ID NO: 2017900 - RNA, 19 nt, Homo sapiens
  misc_RNA (1)...(19): siRNA sense strand
caaugaaacuaaggaaagu

SEQ ID NO: 2017901 - RNA, 19 nt, Homo sapiens
  misc_RNA (1)...(19): siRNA sense strand
uugaagaaauugaggaaga

SEQ ID NO: 2017902 - RNA, 19 nt, Homo sapiens
  misc_RNA (1)...(19): siRNA sense strand
gugcucaucuuguacaaca

SEQ ID NO: 2017903 - RNA, 19 nt, Homo sapiens
  misc_RNA (1)...(19): siRNA sense strand
gagaaaugccauaaaugug

SEQ ID NO: 2017904 - RNA, 19 nt, Homo sapiens
  misc_RNA (1)...(19): siRNA sense strand
guaauaaaccccauaaaug

SEQ ID NO: 2017905 - RNA, 19 nt, Homo sapiens
  misc_RNA (1)...(19): siRNA sense strand
ggugagagacccuaucugu

SEQ ID NO: 2017906 - RNA, 19 nt, Homo sapiens
  misc_RNA (1)...(19): siRNA sense strand
agagaaaugccauaaaugu

SEQ ID NO: 2017907 - RNA, 19 nt, Homo sapiens
  misc_RNA (1)...(19): siRNA sense strand
ggugaaagaccuuaucagu

SEQ ID NO: 2017908 - RNA, 19 nt, Homo sapiens
  misc_RNA (1)...(19): siRNA sense strand
ggaaauaccaagggaaucu

SEQ ID NO: 2017909 - RNA, 19 nt, Homo sapiens
  misc_RNA (1)...(19): siRNA sense strand
uguuagugcucaucuugua

SEQ ID NO: 2017910 - RNA, 19 nt, Homo sapiens
  misc_RNA (1)...(19): siRNA sense strand
agucagcuuugcaaccuua

SEQ ID NO: 2017911 - RNA, 19 nt, Homo sapiens
  misc_RNA (1)...(19): siRNA sense strand
gaggauccauacuggugaa

SEQ ID NO: 2017912 - RNA, 19 nt, Homo sapiens
  misc_RNA (1)...(19): siRNA sense strand
agaccaaacucagaagaga

SEQ ID NO: 2017913 - RNA, 19 nt, Homo sapiens
  misc_RNA (1)...(19): siRNA sense strand
acacaggagagaaaccuua

SEQ ID NO: 2017914 - RNA, 19 nt, Homo sapiens
  misc_RNA (1)...(19): siRNA sense strand
caacaucaaaggguccaua

SEQ ID NO: 2017915 - RNA, 19 nt, Homo sapiens
  misc_RNA (1)...(19): siRNA sense strand
gauccuauggguagagaaa

SEQ ID NO: 2017916 - RNA, 19 nt, Homo sapiens
  misc_RNA (1)...(19): siRNA sense strand
gugcaaagagugugggaaa

SEQ ID NO: 2017917 - RNA, 19 nt, Homo sapiens
  misc_RNA (1)...(19): siRNA sense strand
gauggagaauuauggaaac

SEQ ID NO: 2017918 - RNA, 19 nt, Homo sapiens
  misc_RNA (1)...(19): siRNA sense strand
caaauugcagucuuguuau

SEQ ID NO: 2017919 - RNA, 19 nt, Homo sapiens
  misc_RNA (1)...(19): siRNA sense strand
caaggcccauuucauucaa

SEQ ID NO: 2017920 - RNA, 19 nt, Homo sapiens
  misc_RNA (1)...(19): siRNA sense strand
gaguguaauuacuguggaa

SEQ ID NO: 2017921 - RNA, 19 nt, Homo sapiens
  misc_RNA (1)...(19): siRNA sense strand
guggugaagccuuuaauug

SEQ ID NO: 2017922 - RNA, 19 nt, Homo sapiens
  misc_RNA (1)...(19): siRNA sense strand
ggaacucgggucuuauuca

SEQ ID NO: 2017923 - RNA, 19 nt, Homo sapiens
  misc_RNA (1)...(19): siRNA sense strand
uagaagcucaggucuuauu

SEQ ID NO: 2017924 - RNA, 19 nt, Homo sapiens
  misc_RNA (1)...(19): siRNA sense strand
ccuuaucacuguaccaaau

SEQ ID NO: 2017925 - RNA, 19 nt, Homo sapiens
  misc_RNA (1)...(19): siRNA sense strand
aguuggaaaucacaccuua

SEQ ID NO: 2017926 - RNA, 19 nt, Homo sapiens
  misc_RNA (1)...(19): siRNA sense strand
gaacauggcaucaaguuua

SEQ ID NO: 2017927 - RNA, 19 nt, Homo sapiens
  misc_RNA (1)...(19): siRNA sense strand
gauagaagcuguacagaau

SEQ ID NO: 2017928 - RNA, 19 nt, Homo sapiens
  misc_RNA (1)...(19): siRNA sense strand
gcaagacucucgaaauuau

SEQ ID NO: 2017929 - RNA, 19 nt, Homo sapiens
  misc_RNA (1)...(19): siRNA sense strand
gaacggcccugaagaucuu

SEQ ID NO: 2017930 - RNA, 19 nt, Homo sapiens
  misc_RNA (1)...(19): siRNA sense strand
ggaaaucauugaaggagaa

SEQ ID NO: 2017931 - RNA, 19 nt, Homo sapiens
  misc_RNA (1)...(19): siRNA sense strand
ggagaaagcuguggagaag

SEQ ID NO: 2017932 - RNA, 19 nt, Homo sapiens
  misc_RNA (1)...(19): siRNA sense strand
gggcaucccuggugacaaa

SEQ ID NO: 2017933 - RNA, 19 nt, Homo sapiens
  misc_RNA (1)...(19): siRNA sense strand
ggauuaaggcaacaaauaa

SEQ ID NO: 2017934 - RNA, 19 nt, Homo sapiens
  misc_RNA (1)...(19): siRNA sense strand
ggagugcgcuggauuucuu

SEQ ID NO: 2017935 - RNA, 19 nt, Homo sapiens
  misc_RNA (1)...(19): siRNA sense strand
ggaagaacauggcaucaag

SEQ ID NO: 2017936 - RNA, 19 nt, Homo sapiens
  misc_RNA (1)...(19): siRNA sense strand
cacauuggcucuuugaauu

SEQ ID NO: 2017937 - RNA, 19 nt, Homo sapiens
  misc_RNA (1)...(19): siRNA sense strand
gucaagagauaacaacaaa

SEQ ID NO: 2017938 - RNA, 19 nt, Homo sapiens
  misc_RNA (1)...(19): siRNA sense strand
gcagagguauucacaacau

SEQ ID NO: 2017939 - RNA, 19 nt, Homo sapiens
  misc_RNA (1)...(19): siRNA sense strand
cugcaagacucucgaaauu

SEQ ID NO: 2017940 - RNA, 19 nt, Homo sapiens
  misc_RNA (1)...(19): siRNA sense strand
caagagauaacaacaaaug

SEQ ID NO: 2017941 - RNA, 19 nt, Homo sapiens
  misc_RNA (1)...(19): siRNA sense strand
ugaaagaccacguuacuug

SEQ ID NO: 2017942 - RNA, 19 nt, Homo sapiens
  misc_RNA (1)...(19): siRNA sense strand
agaaagcuguggagaaguu

SEQ ID NO: 2017943 - RNA, 19 nt, Homo sapiens
  misc_RNA (1)...(19): siRNA sense strand
ggaggaacaugugugaaug

SEQ ID NO: 2017944 - RNA, 19 nt, Homo sapiens
  misc_RNA (1)...(19): siRNA sense strand
uaaagacaaugaacguguu

SEQ ID NO: 2017945 - RNA, 19 nt, Homo sapiens
  misc_RNA (1)...(19): siRNA sense strand
guagcucaguccaccaaua

SEQ ID NO: 2017946 - RNA, 19 nt, Homo sapiens
  misc_RNA (1)...(19): siRNA sense strand
agacaguucguaccaauua

SEQ ID NO: 2017947 - RNA, 19 nt, Homo sapiens
  misc_RNA (1)...(19): siRNA sense strand
ggacauggccaacaaaauu

SEQ ID NO: 2017948 - RNA, 19 nt, Homo sapiens
  misc_RNA (1)...(19): siRNA sense strand
gacaaagaauacugcauca

SEQ ID NO: 2017949 - RNA, 19 nt, Homo sapiens
  misc_RNA (1)...(19): siRNA sense strand
gcaucaaguuuauaagaca

SEQ ID NO: 2017950 - RNA, 19 nt, Homo sapiens
  misc_RNA (1)...(19): siRNA sense strand
gguaagacccugguuguug

SEQ ID NO: 2017951 - RNA, 19 nt, Homo sapiens
  misc_RNA (1)...(19): siRNA sense strand
ggcgauauauuggaggaua

SEQ ID NO: 2017952 - RNA, 19 nt, Homo sapiens
  misc_RNA (1)...(19): siRNA sense strand
uaagacaguucguaccaau

SEQ ID NO: 2017953 - RNA, 19 nt, Homo sapiens
  misc_RNA (1)...(19): siRNA sense strand
gcgauauauuggaggauaa

SEQ ID NO: 2017954 - RNA, 19 nt, Homo sapiens
  misc_RNA (1)...(19): siRNA sense strand
gaaugcuuaugggcaauuu

SEQ ID NO: 2017955 - RNA, 19 nt, Homo sapiens
  misc_RNA (1)...(19): siRNA sense strand
ggaagaaaauauugagguu

SEQ ID NO: 2017956 - RNA, 19 nt, Homo sapiens
  misc_RNA (1)...(19): siRNA sense strand
uaaggaggcagcccaauau

SEQ ID NO: 2017957 - RNA, 19 nt, Homo sapiens
  misc_RNA (1)...(19): siRNA sense strand
cuaaggaggcagcccaaua

SEQ ID NO: 2017958 - RNA, 19 nt, Homo sapiens
  misc_RNA (1)...(19): siRNA sense strand
uagaagcuguacagaauca

SEQ ID NO: 2017959 - RNA, 19 nt, Homo sapiens
  misc_RNA (1)...(19): siRNA sense strand
ccacuguauuuacuccuuu

SEQ ID NO: 2017960 - RNA, 19 nt, Homo sapiens
  misc_RNA (1)...(19): siRNA sense strand
gacaguucguaccaauuaa

SEQ ID NO: 2017961 - RNA, 19 nt, Homo sapiens
  misc_RNA (1)...(19): siRNA sense strand
agaaucacauuggcucuuu

SEQ ID NO: 2017962 - RNA, 19 nt, Homo sapiens
  misc_RNA (1)...(19): siRNA sense strand
gaaagucgaggagacaguu

SEQ ID NO: 2017963 - RNA, 19 nt, Homo sapiens
  misc_RNA (1)...(19): siRNA sense strand
gguuuaccauaguuacuuu

SEQ ID NO: 2017964 - RNA, 19 nt, Homo sapiens
  misc_RNA (1)...(19): siRNA sense strand
ggacaagcccugcaagacu

SEQ ID NO: 2017965 - RNA, 19 nt, Homo sapiens
  misc_RNA (1)...(19): siRNA sense strand
gaaucacauuggcucuuug

SEQ ID NO: 2017966 - RNA, 19 nt, Homo sapiens
  misc_RNA (1)...(19): siRNA sense strand
ggacagcacaauuggaauc

SEQ ID NO: 2017967 - RNA, 19 nt, Homo sapiens
  misc_RNA (1)...(19): siRNA sense strand
acgauuccgucaagagaua

SEQ ID NO: 2017968 - RNA, 19 nt, Homo sapiens
  misc_RNA (1)...(19): siRNA sense strand
gugaacacauggaagaaca

SEQ ID NO: 2017969 - RNA, 19 nt, Homo sapiens
  misc_RNA (1)...(19): siRNA sense strand
caaaauuggugaacacaug

SEQ ID NO: 2017970 - RNA, 19 nt, Homo sapiens
  misc_RNA (1)...(19): siRNA sense strand
gaauguggguugcauaccu

SEQ ID NO: 2017971 - RNA, 19 nt, Homo sapiens
  misc_RNA (1)...(19): siRNA sense strand
gcgcucaaauguggacuga

SEQ ID NO: 2017972 - RNA, 19 nt, Homo sapiens
  misc_RNA (1)...(19): siRNA sense strand
gaaauuauggauggaaagu

SEQ ID NO: 2017973 - RNA, 19 nt, Homo sapiens
  misc_RNA (1)...(19): siRNA sense strand
gagaauauaauacggugau

SEQ ID NO: 2017974 - RNA, 19 nt, Homo sapiens
  misc_RNA (1)...(19): siRNA sense strand
guuagguccauucuucuua

SEQ ID NO: 2017975 - RNA, 19 nt, Homo sapiens
  misc_RNA (1)...(19): siRNA sense strand
gaguagcucugcgggagaa

SEQ ID NO: 2017976 - RNA, 19 nt, Homo sapiens
  misc_RNA (1)...(19): siRNA sense strand
gugcagagguauucacaac

SEQ ID NO: 2017977 - RNA, 19 nt, Homo sapiens
  misc_RNA (1)...(19): siRNA sense strand
ccaaaugcuggagaaguua

SEQ ID NO: 2017978 - RNA, 19 nt, Homo sapiens
  misc_RNA (1)...(19): siRNA sense strand
gaaguuacacaaggcuuug

SEQ ID NO: 2017979 - RNA, 19 nt, Homo sapiens
  misc_RNA (1)...(19): siRNA sense strand
aggauuaaggcaacaaaua

SEQ ID NO: 2017980 - RNA, 19 nt, Homo sapiens
  misc_RNA (1)...(19): siRNA sense strand
uguauuuacuccuuuggaa

SEQ ID NO: 2017981 - RNA, 19 nt, Homo sapiens
  misc_RNA (1)...(19): siRNA sense strand
guuccaaccacuguauuua

SEQ ID NO: 2017982 - RNA, 19 nt, Homo sapiens
  misc_RNA (1)...(19): siRNA sense strand
guucguaccaauuaaaguu

SEQ ID NO: 2017983 - RNA, 19 nt, Homo sapiens
  misc_RNA (1)...(19): siRNA sense strand
cauggcaucaaguuuauaa

SEQ ID NO: 2017984 - RNA, 19 nt, Homo sapiens
  misc_RNA (1)...(19): siRNA sense strand
cauccuaugucgcuuugga

SEQ ID NO: 2017985 - RNA, 19 nt, Homo sapiens
  misc_RNA (1)...(19): siRNA sense strand
ggagacaguuaagcaugau

SEQ ID NO: 2017986 - RNA, 19 nt, Homo sapiens
  misc_RNA (1)...(19): siRNA sense strand
caggcuggcugcugagguu

SEQ ID NO: 2017987 - RNA, 19 nt, Homo sapiens
  misc_RNA (1)...(19): siRNA sense strand
auauugagguuuaccauag

SEQ ID NO: 2017988 - RNA, 19 nt, Homo sapiens
  misc_RNA (1)...(19): siRNA sense strand
caauagugaggaaaucauu

SEQ ID NO: 2017989 - RNA, 19 nt, Homo sapiens
  misc_RNA (1)...(19): siRNA sense strand
gagcauccuaugucgcuuu

SEQ ID NO: 2017990 - RNA, 19 nt, Homo sapiens
  misc_RNA (1)...(19): siRNA sense strand
caacauugucugugaccaa

SEQ ID NO: 2017991 - RNA, 19 nt, Homo sapiens
  misc_RNA (1)...(19): siRNA sense strand
ucgaaauuauggauggaaa

SEQ ID NO: 2017992 - RNA, 19 nt, Homo sapiens
  misc_RNA (1)...(19): siRNA sense strand
cagagguauucacaacauu

SEQ ID NO: 2017993 - RNA, 19 nt, Homo sapiens
  misc_RNA (1)...(19): siRNA sense strand
ucacauuggcucuuugaau

SEQ ID NO: 2017994 - RNA, 19 nt, Homo sapiens
  misc_RNA (1)...(19): siRNA sense strand
ugauagaagcuguacagaa

SEQ ID NO: 2017995 - RNA, 19 nt, Homo sapiens
  misc_RNA (1)...(19): siRNA sense strand
aggagacaguuaagcauga

SEQ ID NO: 2017996 - RNA, 19 nt, Homo sapiens
  misc_RNA (1)...(19): siRNA sense strand
gaagaacauggcaucaagu

SEQ ID NO: 2017997 - RNA, 19 nt, Homo sapiens
  misc_RNA (1)...(19): siRNA sense strand
cauugccacuggugaaaga

SEQ ID NO: 2017998 - RNA, 19 nt, Homo sapiens
  misc_RNA (1)...(19): siRNA sense strand
gaugaagaacagaccaaug

SEQ ID NO: 2017999 - RNA, 19 nt, Homo sapiens
  misc_RNA (1)...(19): siRNA sense strand
ugauugggacagaaugaua

SEQ ID NO: 2018000 - RNA, 19 nt, Homo sapiens
  misc_RNA (1)...(19): siRNA sense strand
ugucacagaugaagaacag

SEQ ID NO: 2018001 - RNA, 19 nt, Homo sapiens
  misc_RNA (1)...(19): siRNA sense strand
gcaauaggaagagaugcuu

SEQ ID NO: 2018002 - RNA, 19 nt, Homo sapiens
  misc_RNA (1)...(19): siRNA sense strand
aacauggcaucaaguuuau

SEQ ID NO: 2018003 - RNA, 19 nt, Homo sapiens
  misc_RNA (1)...(19): siRNA sense strand
ggugaaagaccacguuacu

SEQ ID NO: 2018004 - RNA, 19 nt, Homo sapiens
  misc_RNA (1)...(19): siRNA sense strand
ugcaagacucucgaaauua

SEQ ID NO: 2018005 - RNA, 19 nt, Homo sapiens
  misc_RNA (1)...(19): siRNA sense strand
gugaugaucuuuucuccuu

SEQ ID NO: 2018006 - RNA, 19 nt, Homo sapiens
  misc_RNA (1)...(19): siRNA sense strand
gaaagcuguggagaaguuu

SEQ ID NO: 2018007 - RNA, 19 nt, Homo sapiens
  misc_RNA (1)...(19): siRNA sense strand
ggcaucaaguuuauaagac

SEQ ID NO: 2018008 - RNA, 19 nt, Homo sapiens
  misc_RNA (1)...(19): siRNA sense strand
aauguggguugcauaccua

SEQ ID NO: 2018009 - RNA, 19 nt, Homo sapiens
  misc_RNA (1)...(19): siRNA sense strand
caucccuggugacaaagaa

SEQ ID NO: 2018010 - RNA, 19 nt, Homo sapiens
  misc_RNA (1)...(19): siRNA sense strand
gggugaagauaaaugaaaa

SEQ ID NO: 2018011 - RNA, 19 nt, Homo sapiens
  misc_RNA (1)...(19): siRNA sense strand
gaauuggggcuaccgagua

SEQ ID NO: 2018012 - RNA, 19 nt, Homo sapiens
  misc_RNA (1)...(19): siRNA sense strand
ggaagagaugcuugcacaa

SEQ ID NO: 2018013 - RNA, 19 nt, Homo sapiens
  misc_RNA (1)...(19): siRNA sense strand
gcucaguccaccaauagug

SEQ ID NO: 2018014 - RNA, 19 nt, Homo sapiens
  misc_RNA (1)...(19): siRNA sense strand
gagaaugcuuaugggcaau

SEQ ID NO: 2018015 - RNA, 19 nt, Homo sapiens
  misc_RNA (1)...(19): siRNA sense strand
uggcaucaaguuuauaaga

SEQ ID NO: 2018016 - RNA, 19 nt, Homo sapiens
  misc_RNA (1)...(19): siRNA sense strand
ccaccaauagugaggaaau

SEQ ID NO: 2018017 - RNA, 19 nt, Homo sapiens
  misc_RNA (1)...(19): siRNA sense strand
ggacagaaugauagaagcu

SEQ ID NO: 2018018 - RNA, 19 nt, Homo sapiens
  misc_RNA (1)...(19): siRNA sense strand
agaaguuacacaaggcuuu

SEQ ID NO: 2018019 - RNA, 19 nt, Homo sapiens
  misc_RNA (1)...(19): siRNA sense strand
gaucuucccaaguccuaug

SEQ ID NO: 2018020 - RNA, 19 nt, Homo sapiens
  misc_RNA (1)...(19): siRNA sense strand
cggaggaacaugugugaau

SEQ ID NO: 2018021 - RNA, 19 nt, Homo sapiens
  misc_RNA (1)...(19): siRNA sense strand
gaagcuguacagaaucaca

SEQ ID NO: 2018022 - RNA, 19 nt, Homo sapiens
  misc_RNA (1)...(19): siRNA sense strand
cagaaugauagaagcugua

SEQ ID NO: 2018023 - RNA, 19 nt, Homo sapiens
  misc_RNA (1)...(19): siRNA sense strand
uuagguccauucuucuuag

SEQ ID NO: 2018024 - RNA, 19 nt, Homo sapiens
  misc_RNA (1)...(19): siRNA sense strand
gaugcuggcaauaggaaga

SEQ ID NO: 2018025 - RNA, 19 nt, Homo sapiens
  misc_RNA (1)...(19): siRNA sense strand
aagaacauggcaucaaguu

SEQ ID NO: 2018026 - RNA, 19 nt, Homo sapiens
  misc_RNA (1)...(19): siRNA sense strand
gaacauggcaucaaguuua

SEQ ID NO: 2018027 - RNA, 19 nt, Homo sapiens
  misc_RNA (1)...(19): siRNA sense strand
gauagaagcuguacagaau

SEQ ID NO: 2018028 - RNA, 19 nt, Homo sapiens
  misc_RNA (1)...(19): siRNA sense strand
gcaagacucucgaaauuau

SEQ ID NO: 2018029 - RNA, 19 nt, Homo sapiens
  misc_RNA (1)...(19): siRNA sense strand
gaacggcccugaagaucuu

SEQ ID NO: 2018030 - RNA, 19 nt, Homo sapiens
  misc_RNA (1)...(19): siRNA sense strand
ggaaaucauugaaggagaa

SEQ ID NO: 2018031 - RNA, 19 nt, Homo sapiens
  misc_RNA (1)...(19): siRNA sense strand
ggagaaagcuguggagaag

SEQ ID NO: 2018032 - RNA, 19 nt, Homo sapiens
  misc_RNA (1)...(19): siRNA sense strand
gggcaucccuggugacaaa

SEQ ID NO: 2018033 - RNA, 19 nt, Homo sapiens
  misc_RNA (1)...(19): siRNA sense strand
ggauuaaggcaacaaauaa

SEQ ID NO: 2018034 - RNA, 19 nt, Homo sapiens
  misc_RNA (1)...(19): siRNA sense strand
ggagugcgcuggauuucuu

SEQ ID NO: 2018035 - RNA, 19 nt, Homo sapiens
  misc_RNA (1)...(19): siRNA sense strand
ggaagaacauggcaucaag

SEQ ID NO: 2018036 - RNA, 19 nt, Homo sapiens
  misc_RNA (1)...(19): siRNA sense strand
cacauuggcucuuugaauu

SEQ ID NO: 2018037 - RNA, 19 nt, Homo sapiens
  misc_RNA (1)...(19): siRNA sense strand
gucaagagauaacaacaaa

SEQ ID NO: 2018038 - RNA, 19 nt, Homo sapiens
  misc_RNA (1)...(19): siRNA sense strand
gcagagguauucacaacau

SEQ ID NO: 2018039 - RNA, 19 nt, Homo sapiens
  misc_RNA (1)...(19): siRNA sense strand
cugcaagacucucgaaauu

SEQ ID NO: 2018040 - RNA, 19 nt, Homo sapiens
  misc_RNA (1)...(19): siRNA sense strand
caagagauaacaacaaaug

SEQ ID NO: 2018041 - RNA, 19 nt, Homo sapiens
  misc_RNA (1)...(19): siRNA sense strand
ugaaagaccacguuacuug

SEQ ID NO: 2018042 - RNA, 19 nt, Homo sapiens
  misc_RNA (1)...(19): siRNA sense strand
agaaagcuguggagaaguu

SEQ ID NO: 2018043 - RNA, 19 nt, Homo sapiens
  misc_RNA (1)...(19): siRNA sense strand
ggaggaacaugugugaaug

SEQ ID NO: 2018044 - RNA, 19 nt, Homo sapiens
  misc_RNA (1)...(19): siRNA sense strand
uaaagacaaugaacguguu

SEQ ID NO: 2018045 - RNA, 19 nt, Homo sapiens
  misc_RNA (1)...(19): siRNA sense strand
guagcucaguccaccaaua

SEQ ID NO: 2018046 - RNA, 19 nt, Homo sapiens
  misc_RNA (1)...(19): siRNA sense strand
agacaguucguaccaauua

SEQ ID NO: 2018047 - RNA, 19 nt, Homo sapiens
  misc_RNA (1)...(19): siRNA sense strand
ggacauggccaacaaaauu

SEQ ID NO: 2018048 - RNA, 19 nt, Homo sapiens
  misc_RNA (1)...(19): siRNA sense strand
gacaaagaauacugcauca

SEQ ID NO: 2018049 - RNA, 19 nt, Homo sapiens
  misc_RNA (1)...(19): siRNA sense strand
gcaucaaguuuauaagaca

SEQ ID NO: 2018050 - RNA, 19 nt, Homo sapiens
  misc_RNA (1)...(19): siRNA sense strand
gguaagacccugguuguug

SEQ ID NO: 2018051 - RNA, 19 nt, Homo sapiens
  misc_RNA (1)...(19): siRNA sense strand
ggcgauauauuggaggaua

SEQ ID NO: 2018052 - RNA, 19 nt, Homo sapiens
  misc_RNA (1)...(19): siRNA sense strand
uaagacaguucguaccaau

SEQ ID NO: 2018053 - RNA, 19 nt, Homo sapiens
  misc_RNA (1)...(19): siRNA sense strand
gcgauauauuggaggauaa

SEQ ID NO: 2018054 - RNA, 19 nt, Homo sapiens
  misc_RNA (1)...(19): siRNA sense strand
gaaugcuuaugggcaauuu

SEQ ID NO: 2018055 - RNA, 19 nt, Homo sapiens
  misc_RNA (1)...(19): siRNA sense strand
ggaagaaaauauugagguu

SEQ ID NO: 2018056 - RNA, 19 nt, Homo sapiens
  misc_RNA (1)...(19): siRNA sense strand
uaaggaggcagcccaauau

SEQ ID NO: 2018057 - RNA, 19 nt, Homo sapiens
  misc_RNA (1)...(19): siRNA sense strand
cuaaggaggcagcccaaua

SEQ ID NO: 2018058 - RNA, 19 nt, Homo sapiens
  misc_RNA (1)...(19): siRNA sense strand
uagaagcuguacagaauca

SEQ ID NO: 2018059 - RNA, 19 nt, Homo sapiens
  misc_RNA (1)...(19): siRNA sense strand
ccacuguauuuacuccuuu

SEQ ID NO: 2018060 - RNA, 19 nt, Homo sapiens
  misc_RNA (1)...(19): siRNA sense strand
gacaguucguaccaauuaa

SEQ ID NO: 2018061 - RNA, 19 nt, Homo sapiens
  misc_RNA (1)...(19): siRNA sense strand
agaaucacauuggcucuuu

SEQ ID NO: 2018062 - RNA, 19 nt, Homo sapiens
  misc_RNA (1)...(19): siRNA sense strand
gaaagucgaggagacaguu

SEQ ID NO: 2018063 - RNA, 19 nt, Homo sapiens
  misc_RNA (1)...(19): siRNA sense strand
gguuuaccauaguuacuuu

SEQ ID NO: 2018064 - RNA, 19 nt, Homo sapiens
  misc_RNA (1)...(19): siRNA sense strand
ggacaagcccugcaagacu

SEQ ID NO: 2018065 - RNA, 19 nt, Homo sapiens
  misc_RNA (1)...(19): siRNA sense strand
gaaucacauuggcucuuug

SEQ ID NO: 2018066 - RNA, 19 nt, Homo sapiens
  misc_RNA (1)...(19): siRNA sense strand
ggacagcacaauuggaauc

SEQ ID NO: 2018067 - RNA, 19 nt, Homo sapiens
  misc_RNA (1)...(19): siRNA sense strand
acgauuccgucaagagaua

SEQ ID NO: 2018068 - RNA, 19 nt, Homo sapiens
  misc_RNA (1)...(19): siRNA sense strand
gugaacacauggaagaaca

SEQ ID NO: 2018069 - RNA, 19 nt, Homo sapiens
  misc_RNA (1)...(19): siRNA sense strand
caaaauuggugaacacaug

SEQ ID NO: 2018070 - RNA, 19 nt, Homo sapiens
  misc_RNA (1)...(19): siRNA sense strand
gaauguggguugcauaccu

SEQ ID NO: 2018071 - RNA, 19 nt, Homo sapiens
  misc_RNA (1)...(19): siRNA sense strand
gcgcucaaauguggacuga

SEQ ID NO: 2018072 - RNA, 19 nt, Homo sapiens
  misc_RNA (1)...(19): siRNA sense strand
gaaauuauggauggaaagu

SEQ ID NO: 2018073 - RNA, 19 nt, Homo sapiens
  misc_RNA (1)...(19): siRNA sense strand
gagaauauaauacggugau

SEQ ID NO: 2018074 - RNA, 19 nt, Homo sapiens
  misc_RNA (1)...(19): siRNA sense strand
guuagguccauucuucuua

SEQ ID NO: 2018075 - RNA, 19 nt, Homo sapiens
  misc_RNA (1)...(19): siRNA sense strand
gaguagcucugcgggagaa

SEQ ID NO: 2018076 - RNA, 19 nt, Homo sapiens
  misc_RNA (1)...(19): siRNA sense strand
gugcagagguauucacaac

SEQ ID NO: 2018077 - RNA, 19 nt, Homo sapiens
  misc_RNA (1)...(19): siRNA sense strand
ccaaaugcuggagaaguua

SEQ ID NO: 2018078 - RNA, 19 nt, Homo sapiens
  misc_RNA (1)...(19): siRNA sense strand
gaaguuacacaaggcuuug

SEQ ID NO: 2018079 - RNA, 19 nt, Homo sapiens
  misc_RNA (1)...(19): siRNA sense strand
aggauuaaggcaacaaaua

SEQ ID NO: 2018080 - RNA, 19 nt, Homo sapiens
  misc_RNA (1)...(19): siRNA sense strand
uguauuuacuccuuuggaa

SEQ ID NO: 2018081 - RNA, 19 nt, Homo sapiens
  misc_RNA (1)...(19): siRNA sense strand
guuccaaccacuguauuua

SEQ ID NO: 2018082 - RNA, 19 nt, Homo sapiens
  misc_RNA (1)...(19): siRNA sense strand
guucguaccaauuaaaguu

SEQ ID NO: 2018083 - RNA, 19 nt, Homo sapiens
  misc_RNA (1)...(19): siRNA sense strand
cauggcaucaaguuuauaa

SEQ ID NO: 2018084 - RNA, 19 nt, Homo sapiens
  misc_RNA (1)...(19): siRNA sense strand
cauccuaugucgcuuugga

SEQ ID NO: 2018085 - RNA, 19 nt, Homo sapiens
  misc_RNA (1)...(19): siRNA sense strand
ggagacaguuaagcaugau

SEQ ID NO: 2018086 - RNA, 19 nt, Homo sapiens
  misc_RNA (1)...(19): siRNA sense strand
caggcuggcugcugagguu

SEQ ID NO: 2018087 - RNA, 19 nt, Homo sapiens
  misc_RNA (1)...(19): siRNA sense strand
auauugagguuuaccauag

SEQ ID NO: 2018088 - RNA, 19 nt, Homo sapiens
  misc_RNA (1)...(19): siRNA sense strand
caauagugaggaaaucauu

SEQ ID NO: 2018089 - RNA, 19 nt, Homo sapiens
  misc_RNA (1)...(19): siRNA sense strand
gagcauccuaugucgcuuu

SEQ ID NO: 2018090 - RNA, 19 nt, Homo sapiens
  misc_RNA (1)...(19): siRNA sense strand
caacauugucugugaccaa

SEQ ID NO: 2018091 - RNA, 19 nt, Homo sapiens
  misc_RNA (1)...(19): siRNA sense strand
ucgaaauuauggauggaaa

SEQ ID NO: 2018092 - RNA, 19 nt, Homo sapiens
  misc_RNA (1)...(19): siRNA sense strand
cagagguauucacaacauu

SEQ ID NO: 2018093 - RNA, 19 nt, Homo sapiens
  misc_RNA (1)...(19): siRNA sense strand
ucacauuggcucuuugaau

SEQ ID NO: 2018094 - RNA, 19 nt, Homo sapiens
  misc_RNA (1)...(19): siRNA sense strand
ugauagaagcuguacagaa

SEQ ID NO: 2018095 - RNA, 19 nt, Homo sapiens
  misc_RNA (1)...(19): siRNA sense strand
aggagacaguuaagcauga

SEQ ID NO: 2018096 - RNA, 19 nt, Homo sapiens
  misc_RNA (1)...(19): siRNA sense strand
gaagaacauggcaucaagu

SEQ ID NO: 2018097 - RNA, 19 nt, Homo sapiens
  misc_RNA (1)...(19): siRNA sense strand
cauugccacuggugaaaga

SEQ ID NO: 2018098 - RNA, 19 nt, Homo sapiens
  misc_RNA (1)...(19): siRNA sense strand
gaugaagaacagaccaaug

SEQ ID NO: 2018099 - RNA, 19 nt, Homo sapiens
  misc_RNA (1)...(19): siRNA sense strand
ugauugggacagaaugaua

SEQ ID NO: 2018100 - RNA, 19 nt, Homo sapiens
  misc_RNA (1)...(19): siRNA sense strand
ugucacagaugaagaacag

SEQ ID NO: 2018101 - RNA, 19 nt, Homo sapiens
  misc_RNA (1)...(19): siRNA sense strand
gcaauaggaagagaugcuu

SEQ ID NO: 2018102 - RNA, 19 nt, Homo sapiens
  misc_RNA (1)...(19): siRNA sense strand
aacauggcaucaaguuuau

SEQ ID NO: 2018103 - RNA, 19 nt, Homo sapiens
  misc_RNA (1)...(19): siRNA sense strand
ggugaaagaccacguuacu

SEQ ID NO: 2018104 - RNA, 19 nt, Homo sapiens
  misc_RNA (1)...(19): siRNA sense strand
ugcaagacucucgaaauua

SEQ ID NO: 2018105 - RNA, 19 nt, Homo sapiens
  misc_RNA (1)...(19): siRNA sense strand
gugaugaucuuuucuccuu

SEQ ID NO: 2018106 - RNA, 19 nt, Homo sapiens
  misc_RNA (1)...(19): siRNA sense strand
gaaagcuguggagaaguuu

SEQ ID NO: 2018107 - RNA, 19 nt, Homo sapiens
  misc_RNA (1)...(19): siRNA sense strand
ggcaucaaguuuauaagac

SEQ ID NO: 2018108 - RNA, 19 nt, Homo sapiens
  misc_RNA (1)...(19): siRNA sense strand
aauguggguugcauaccua

SEQ ID NO: 2018109 - RNA, 19 nt, Homo sapiens
  misc_RNA (1)...(19): siRNA sense strand
caucccuggugacaaagaa

SEQ ID NO: 2018110 - RNA, 19 nt, Homo sapiens
  misc_RNA (1)...(19): siRNA sense strand
gggugaagauaaaugaaaa

SEQ ID NO: 2018111 - RNA, 19 nt, Homo sapiens
  misc_RNA (1)...(19): siRNA sense strand
gaauuggggcuaccgagua

SEQ ID NO: 2018112 - RNA, 19 nt, Homo sapiens
  misc_RNA (1)...(19): siRNA sense strand
ggaagagaugcuugcacaa

SEQ ID NO: 2018113 - RNA, 19 nt, Homo sapiens
  misc_RNA (1)...(19): siRNA sense strand
gcucaguccaccaauagug

SEQ ID NO: 2018114 - RNA, 19 nt, Homo sapiens
  misc_RNA (1)...(19): siRNA sense strand
gagaaugcuuaugggcaau

SEQ ID NO: 2018115 - RNA, 19 nt, Homo sapiens
  misc_RNA (1)...(19): siRNA sense strand
uggcaucaaguuuauaaga

SEQ ID NO: 2018116 - RNA, 19 nt, Homo sapiens
  misc_RNA (1)...(19): siRNA sense strand
ccaccaauagugaggaaau

SEQ ID NO: 2018117 - RNA, 19 nt, Homo sapiens
  misc_RNA (1)...(19): siRNA sense strand
ggacagaaugauagaagcu

SEQ ID NO: 2018118 - RNA, 19 nt, Homo sapiens
  misc_RNA (1)...(19): siRNA sense strand
agaaguuacacaaggcuuu

SEQ ID NO: 2018119 - RNA, 19 nt, Homo sapiens
  misc_RNA (1)...(19): siRNA sense strand
gaucuucccaaguccuaug

SEQ ID NO: 2018120 - RNA, 19 nt, Homo sapiens
  misc_RNA (1)...(19): siRNA sense strand
cggaggaacaugugugaau

SEQ ID NO: 2018121 - RNA, 19 nt, Homo sapiens
  misc_RNA (1)...(19): siRNA sense strand
gaagcuguacagaaucaca

SEQ ID NO: 2018122 - RNA, 19 nt, Homo sapiens
  misc_RNA (1)...(19): siRNA sense strand
cagaaugauagaagcugua

SEQ ID NO: 2018123 - RNA, 19 nt, Homo sapiens
  misc_RNA (1)...(19): siRNA sense strand
uuagguccauucuucuuag

SEQ ID NO: 2018124 - RNA, 19 nt, Homo sapiens
  misc_RNA (1)...(19): siRNA sense strand
gaugcuggcaauaggaaga

SEQ ID NO: 2018125 - RNA, 19 nt, Homo sapiens
  misc_RNA (1)...(19): siRNA sense strand
aagaacauggcaucaaguu

SEQ ID NO: 2018126 - RNA, 19 nt, Homo sapiens
  misc_RNA (1)...(19): siRNA sense strand
gaacauggcaucaaguuua

SEQ ID NO: 2018127 - RNA, 19 nt, Homo sapiens
  misc_RNA (1)...(19): siRNA sense strand
gauagaagcuguacagaau

SEQ ID NO: 2018128 - RNA, 19 nt, Homo sapiens
  misc_RNA (1)...(19): siRNA sense strand
gcaagacucucgaaauuau

SEQ ID NO: 2018129 - RNA, 19 nt, Homo sapiens
  misc_RNA (1)...(19): siRNA sense strand
gaacggcccugaagaucuu

SEQ ID NO: 2018130 - RNA, 19 nt, Homo sapiens
  misc_RNA (1)...(19): siRNA sense strand
ggaaaucauugaaggagaa

SEQ ID NO: 2018131 - RNA, 19 nt, Homo sapiens
  misc_RNA (1)...(19): siRNA sense strand
ggagaaagcuguggagaag

SEQ ID NO: 2018132 - RNA, 19 nt, Homo sapiens
  misc_RNA (1)...(19): siRNA sense strand
gggcaucccuggugacaaa

SEQ ID NO: 2018133 - RNA, 19 nt, Homo sapiens
  misc_RNA (1)...(19): siRNA sense strand
ggauuaaggcaacaaauaa

SEQ ID NO: 2018134 - RNA, 19 nt, Homo sapiens
  misc_RNA (1)...(19): siRNA sense strand
ggagugcgcuggauuucuu

SEQ ID NO: 2018135 - RNA, 19 nt, Homo sapiens
  misc_RNA (1)...(19): siRNA sense strand
ggaagaacauggcaucaag

SEQ ID NO: 2018136 - RNA, 19 nt, Homo sapiens
  misc_RNA (1)...(19): siRNA sense strand
cacauuggcucuuugaauu

SEQ ID NO: 2018137 - RNA, 19 nt, Homo sapiens
  misc_RNA (1)...(19): siRNA sense strand
gucaagagauaacaacaaa

SEQ ID NO: 2018138 - RNA, 19 nt, Homo sapiens
  misc_RNA (1)...(19): siRNA sense strand
gcagagguauucacaacau

SEQ ID NO: 2018139 - RNA, 19 nt, Homo sapiens
  misc_RNA (1)...(19): siRNA sense strand
cugcaagacucucgaaauu

SEQ ID NO: 2018140 - RNA, 19 nt, Homo sapiens
  misc_RNA (1)...(19): siRNA sense strand
caagagauaacaacaaaug

SEQ ID NO: 2018141 - RNA, 19 nt, Homo sapiens
  misc_RNA (1)...(19): siRNA sense strand
ugaaagaccacguuacuug

SEQ ID NO: 2018142 - RNA, 19 nt, Homo sapiens
  misc_RNA (1)...(19): siRNA sense strand
agaaagcuguggagaaguu

SEQ ID NO: 2018143 - RNA, 19 nt, Homo sapiens
  misc_RNA (1)...(19): siRNA sense strand
ggaggaacaugugugaaug

SEQ ID NO: 2018144 - RNA, 19 nt, Homo sapiens
  misc_RNA (1)...(19): siRNA sense strand
uaaagacaaugaacguguu

SEQ ID NO: 2018145 - RNA, 19 nt, Homo sapiens
  misc_RNA (1)...(19): siRNA sense strand
guagcucaguccaccaaua

SEQ ID NO: 2018146 - RNA, 19 nt, Homo sapiens
  misc_RNA (1)...(19): siRNA sense strand
agacaguucguaccaauua

SEQ ID NO: 2018147 - RNA, 19 nt, Homo sapiens
  misc_RNA (1)...(19): siRNA sense strand
ggacauggccaacaaaauu

SEQ ID NO: 2018148 - RNA, 19 nt, Homo sapiens
  misc_RNA (1)...(19): siRNA sense strand
gacaaagaauacugcauca

SEQ ID NO: 2018149 - RNA, 19 nt, Homo sapiens
  misc_RNA (1)...(19): siRNA sense strand
gcaucaaguuuauaagaca

SEQ ID NO: 2018150 - RNA, 19 nt, Homo sapiens
  misc_RNA (1)...(19): siRNA sense strand
gguaagacccugguuguug

SEQ ID NO: 2018151 - RNA, 19 nt, Homo sapiens
  misc_RNA (1)...(19): siRNA sense strand
ggcgauauauuggaggaua

SEQ ID NO: 2018152 - RNA, 19 nt, Homo sapiens
  misc_RNA (1)...(19): siRNA sense strand
uaagacaguucguaccaau

SEQ ID NO: 2018153 - RNA, 19 nt, Homo sapiens
  misc_RNA (1)...(19): siRNA sense strand
gcgauauauuggaggauaa

SEQ ID NO: 2018154 - RNA, 19 nt, Homo sapiens
  misc_RNA (1)...(19): siRNA sense strand
gaaugcuuaugggcaauuu

SEQ ID NO: 2018155 - RNA, 19 nt, Homo sapiens
  misc_RNA (1)...(19): siRNA sense strand
ggaagaaaauauugagguu

SEQ ID NO: 2018156 - RNA, 19 nt, Homo sapiens
  misc_RNA (1)...(19): siRNA sense strand
uaaggaggcagcccaauau

SEQ ID NO: 2018157 - RNA, 19 nt, Homo sapiens
  misc_RNA (1)...(19): siRNA sense strand
cuaaggaggcagcccaaua

SEQ ID NO: 2018158 - RNA, 19 nt, Homo sapiens
  misc_RNA (1)...(19): siRNA sense strand
uagaagcuguacagaauca

SEQ ID NO: 2018159 - RNA, 19 nt, Homo sapiens
  misc_RNA (1)...(19): siRNA sense strand
ccacuguauuuacuccuuu

SEQ ID NO: 2018160 - RNA, 19 nt, Homo sapiens
  misc_RNA (1)...(19): siRNA sense strand
gacaguucguaccaauuaa

SEQ ID NO: 2018161 - RNA, 19 nt, Homo sapiens
  misc_RNA (1)...(19): siRNA sense strand
agaaucacauuggcucuuu

SEQ ID NO: 2018162 - RNA, 19 nt, Homo sapiens
  misc_RNA (1)...(19): siRNA sense strand
gaaagucgaggagacaguu

SEQ ID NO: 2018163 - RNA, 19 nt, Homo sapiens
  misc_RNA (1)...(19): siRNA sense strand
gguuuaccauaguuacuuu

SEQ ID NO: 2018164 - RNA, 19 nt, Homo sapiens
  misc_RNA (1)...(19): siRNA sense strand
ggacaagcccugcaagacu

SEQ ID NO: 2018165 - RNA, 19 nt, Homo sapiens
  misc_RNA (1)...(19): siRNA sense strand
gaaucacauuggcucuuug

SEQ ID NO: 2018166 - RNA, 19 nt, Homo sapiens
  misc_RNA (1)...(19): siRNA sense strand
ggacagcacaauuggaauc

SEQ ID NO: 2018167 - RNA, 19 nt, Homo sapiens
  misc_RNA (1)...(19): siRNA sense strand
acgauuccgucaagagaua

SEQ ID NO: 2018168 - RNA, 19 nt, Homo sapiens
  misc_RNA (1)...(19): siRNA sense strand
gugaacacauggaagaaca

SEQ ID NO: 2018169 - RNA, 19 nt, Homo sapiens
  misc_RNA (1)...(19): siRNA sense strand
caaaauuggugaacacaug

SEQ ID NO: 2018170 - RNA, 19 nt, Homo sapiens
  misc_RNA (1)...(19): siRNA sense strand
gaauguggguugcauaccu

SEQ ID NO: 2018171 - RNA, 19 nt, Homo sapiens
  misc_RNA (1)...(19): siRNA sense strand
gcgcucaaauguggacuga

SEQ ID NO: 2018172 - RNA, 19 nt, Homo sapiens
  misc_RNA (1)...(19): siRNA sense strand
gaaauuauggauggaaagu

SEQ ID NO: 2018173 - RNA, 19 nt, Homo sapiens
  misc_RNA (1)...(19): siRNA sense strand
gagaauauaauacggugau

SEQ ID NO: 2018174 - RNA, 19 nt, Homo sapiens
  misc_RNA (1)...(19): siRNA sense strand
guuagguccauucuucuua

SEQ ID NO: 2018175 - RNA, 19 nt, Homo sapiens
  misc_RNA (1)...(19): siRNA sense strand
gaguagcucugcgggagaa

SEQ ID NO: 2018176 - RNA, 19 nt, Homo sapiens
  misc_RNA (1)...(19): siRNA sense strand
gugcagagguauucacaac

SEQ ID NO: 2018177 - RNA, 19 nt, Homo sapiens
  misc_RNA (1)...(19): siRNA sense strand
ccaaaugcuggagaaguua

SEQ ID NO: 2018178 - RNA, 19 nt, Homo sapiens
  misc_RNA (1)...(19): siRNA sense strand
gaaguuacacaaggcuuug

SEQ ID NO: 2018179 - RNA, 19 nt, Homo sapiens
  misc_RNA (1)...(19): siRNA sense strand
aggauuaaggcaacaaaua

SEQ ID NO: 2018180 - RNA, 19 nt, Homo sapiens
  misc_RNA (1)...(19): siRNA sense strand
uguauuuacuccuuuggaa

SEQ ID NO: 2018181 - RNA, 19 nt, Homo sapiens
  misc_RNA (1)...(19): siRNA sense strand
guuccaaccacuguauuua

SEQ ID NO: 2018182 - RNA, 19 nt, Homo sapiens
  misc_RNA (1)...(19): siRNA sense strand
guucguaccaauuaaaguu

SEQ ID NO: 2018183 - RNA, 19 nt, Homo sapiens
  misc_RNA (1)...(19): siRNA sense strand
cauggcaucaaguuuauaa

SEQ ID NO: 2018184 - RNA, 19 nt, Homo sapiens
  misc_RNA (1)...(19): siRNA sense strand
cauccuaugucgcuuugga

SEQ ID NO: 2018185 - RNA, 19 nt, Homo sapiens
  misc_RNA (1)...(19): siRNA sense strand
ggagacaguuaagcaugau

SEQ ID NO: 2018186 - RNA, 19 nt, Homo sapiens
  misc_RNA (1)...(19): siRNA sense strand
caggcuggcugcugagguu

SEQ ID NO: 2018187 - RNA, 19 nt, Homo sapiens
  misc_RNA (1)...(19): siRNA sense strand
auauugagguuuaccauag

SEQ ID NO: 2018188 - RNA, 19 nt, Homo sapiens
  misc_RNA (1)...(19): siRNA sense strand
caauagugaggaaaucauu

SEQ ID NO: 2018189 - RNA, 19 nt, Homo sapiens
  misc_RNA (1)...(19): siRNA sense strand
gagcauccuaugucgcuuu

SEQ ID NO: 2018190 - RNA, 19 nt, Homo sapiens
  misc_RNA (1)...(19): siRNA sense strand
caacauugucugugaccaa

SEQ ID NO: 2018191 - RNA, 19 nt, Homo sapiens
  misc_RNA (1)...(19): siRNA sense strand
ucgaaauuauggauggaaa

SEQ ID NO: 2018192 - RNA, 19 nt, Homo sapiens
  misc_RNA (1)...(19): siRNA sense strand
cagagguauucacaacauu

SEQ ID NO: 2018193 - RNA, 19 nt, Homo sapiens
  misc_RNA (1)...(19): siRNA sense strand
ucacauuggcucuuugaau

SEQ ID NO: 2018194 - RNA, 19 nt, Homo sapiens
  misc_RNA (1)...(19): siRNA sense strand
ugauagaagcuguacagaa

SEQ ID NO: 2018195 - RNA, 19 nt, Homo sapiens
  misc_RNA (1)...(19): siRNA sense strand
aggagacaguuaagcauga

SEQ ID NO: 2018196 - RNA, 19 nt, Homo sapiens
  misc_RNA (1)...(19): siRNA sense strand
gaagaacauggcaucaagu

SEQ ID NO: 2018197 - RNA, 19 nt, Homo sapiens
  misc_RNA (1)...(19): siRNA sense strand
cauugccacuggugaaaga

SEQ ID NO: 2018198 - RNA, 19 nt, Homo sapiens
  misc_RNA (1)...(19): siRNA sense strand
gaugaagaacagaccaaug

SEQ ID NO: 2018199 - RNA, 19 nt, Homo sapiens
  misc_RNA (1)...(19): siRNA sense strand
ugauugggacagaaugaua

SEQ ID NO: 2018200 - RNA, 19 nt, Homo sapiens
  misc_RNA (1)...(19): siRNA sense strand
ugucacagaugaagaacag

SEQ ID NO: 2018201 - RNA, 19 nt, Homo sapiens
  misc_RNA (1)...(19): siRNA sense strand
gcaauaggaagagaugcuu

SEQ ID NO: 2018202 - RNA, 19 nt, Homo sapiens
  misc_RNA (1)...(19): siRNA sense strand
aacauggcaucaaguuuau

SEQ ID NO: 2018203 - RNA, 19 nt, Homo sapiens
  misc_RNA (1)...(19): siRNA sense strand
ggugaaagaccacguuacu

SEQ ID NO: 2018204 - RNA, 19 nt, Homo sapiens
  misc_RNA (1)...(19): siRNA sense strand
ugcaagacucucgaaauua

SEQ ID NO: 2018205 - RNA, 19 nt, Homo sapiens
  misc_RNA (1)...(19): siRNA sense strand
gugaugaucuuuucuccuu

SEQ ID NO: 2018206 - RNA, 19 nt, Homo sapiens
  misc_RNA (1)...(19): siRNA sense strand
gaaagcuguggagaaguuu

SEQ ID NO: 2018207 - RNA, 19 nt, Homo sapiens
  misc_RNA (1)...(19): siRNA sense strand
ggcaucaaguuuauaagac

SEQ ID NO: 2018208 - RNA, 19 nt, Homo sapiens
  misc_RNA (1)...(19): siRNA sense strand
aauguggguugcauaccua

SEQ ID NO: 2018209 - RNA, 19 nt, Homo sapiens
  misc_RNA (1)...(19): siRNA sense strand
caucccuggugacaaagaa

SEQ ID NO: 2018210 - RNA, 19 nt, Homo sapiens
  misc_RNA (1)...(19): siRNA sense strand
gggugaagauaaaugaaaa

SEQ ID NO: 2018211 - RNA, 19 nt, Homo sapiens
  misc_RNA (1)...(19): siRNA sense strand
gaauuggggcuaccgagua

SEQ ID NO: 2018212 - RNA, 19 nt, Homo sapiens
  misc_RNA (1)...(19): siRNA sense strand
ggaagagaugcuugcacaa

SEQ ID NO: 2018213 - RNA, 19 nt, Homo sapiens
  misc_RNA (1)...(19): siRNA sense strand
gcucaguccaccaauagug

SEQ ID NO: 2018214 - RNA, 19 nt, Homo sapiens
  misc_RNA (1)...(19): siRNA sense strand
gagaaugcuuaugggcaau

SEQ ID NO: 2018215 - RNA, 19 nt, Homo sapiens
  misc_RNA (1)...(19): siRNA sense strand
uggcaucaaguuuauaaga

SEQ ID NO: 2018216 - RNA, 19 nt, Homo sapiens
  misc_RNA (1)...(19): siRNA sense strand
ccaccaauagugaggaaau

SEQ ID NO: 2018217 - RNA, 19 nt, Homo sapiens
  misc_RNA (1)...(19): siRNA sense strand
ggacagaaugauagaagcu

SEQ ID NO: 2018218 - RNA, 19 nt, Homo sapiens
  misc_RNA (1)...(19): siRNA sense strand
agaaguuacacaaggcuuu

SEQ ID NO: 2018219 - RNA, 19 nt, Homo sapiens
  misc_RNA (1)...(19): siRNA sense strand
gaucuucccaaguccuaug

SEQ ID NO: 2018220 - RNA, 19 nt, Homo sapiens
  misc_RNA (1)...(19): siRNA sense strand
cggaggaacaugugugaau

SEQ ID NO: 2018221 - RNA, 19 nt, Homo sapiens
  misc_RNA (1)...(19): siRNA sense strand
gaagcuguacagaaucaca

SEQ ID NO: 2018222 - RNA, 19 nt, Homo sapiens
  misc_RNA (1)...(19): siRNA sense strand
cagaaugauagaagcugua

SEQ ID NO: 2018223 - RNA, 19 nt, Homo sapiens
  misc_RNA (1)...(19): siRNA sense strand
uuagguccauucuucuuag

SEQ ID NO: 2018224 - RNA, 19 nt, Homo sapiens
  misc_RNA (1)...(19): siRNA sense strand
gaugcuggcaauaggaaga

SEQ ID NO: 2018225 - RNA, 19 nt, Homo sapiens
  misc_RNA (1)...(19): siRNA sense strand
aagaacauggcaucaaguu

SEQ ID NO: 2018226 - RNA, 19 nt, Homo sapiens
  misc_RNA (1)...(19): siRNA sense strand
gaacauggcaucaaguuua

SEQ ID NO: 2018227 - RNA, 19 nt, Homo sapiens
  misc_RNA (1)...(19): siRNA sense strand
gauagaagcuguacagaau

SEQ ID NO: 2018228 - RNA, 19 nt, Homo sapiens
  misc_RNA (1)...(19): siRNA sense strand
gcaagacucucgaaauuau

SEQ ID NO: 2018229 - RNA, 19 nt, Homo sapiens
  misc_RNA (1)...(19): siRNA sense strand
gaacggcccugaagaucuu

SEQ ID NO: 2018230 - RNA, 19 nt, Homo sapiens
  misc_RNA (1)...(19): siRNA sense strand
ggaaaucauugaaggagaa

SEQ ID NO: 2018231 - RNA, 19 nt, Homo sapiens
  misc_RNA (1)...(19): siRNA sense strand
ggagaaagcuguggagaag

SEQ ID NO: 2018232 - RNA, 19 nt, Homo sapiens
  misc_RNA (1)...(19): siRNA sense strand
gggcaucccuggugacaaa

SEQ ID NO: 2018233 - RNA, 19 nt, Homo sapiens
  misc_RNA (1)...(19): siRNA sense strand
ggauuaaggcaacaaauaa

SEQ ID NO: 2018234 - RNA, 19 nt, Homo sapiens
  misc_RNA (1)...(19): siRNA sense strand
ggagugcgcuggauuucuu

SEQ ID NO: 2018235 - RNA, 19 nt, Homo sapiens
  misc_RNA (1)...(19): siRNA sense strand
ggaagaacauggcaucaag

SEQ ID NO: 2018236 - RNA, 19 nt, Homo sapiens
  misc_RNA (1)...(19): siRNA sense strand
cacauuggcucuuugaauu

SEQ ID NO: 2018237 - RNA, 19 nt, Homo sapiens
  misc_RNA (1)...(19): siRNA sense strand
gucaagagauaacaacaaa

SEQ ID NO: 2018238 - RNA, 19 nt, Homo sapiens
  misc_RNA (1)...(19): siRNA sense strand
gcagagguauucacaacau

SEQ ID NO: 2018239 - RNA, 19 nt, Homo sapiens
  misc_RNA (1)...(19): siRNA sense strand
cugcaagacucucgaaauu

SEQ ID NO: 2018240 - RNA, 19 nt, Homo sapiens
  misc_RNA (1)...(19): siRNA sense strand
caagagauaacaacaaaug

SEQ ID NO: 2018241 - RNA, 19 nt, Homo sapiens
  misc_RNA (1)...(19): siRNA sense strand
ugaaagaccacguuacuug

SEQ ID NO: 2018242 - RNA, 19 nt, Homo sapiens
  misc_RNA (1)...(19): siRNA sense strand
agaaagcuguggagaaguu

SEQ ID NO: 2018243 - RNA, 19 nt, Homo sapiens
  misc_RNA (1)...(19): siRNA sense strand
ggaggaacaugugugaaug

SEQ ID NO: 2018244 - RNA, 19 nt, Homo sapiens
  misc_RNA (1)...(19): siRNA sense strand
uaaagacaaugaacguguu

SEQ ID NO: 2018245 - RNA, 19 nt, Homo sapiens
  misc_RNA (1)...(19): siRNA sense strand
guagcucaguccaccaaua

SEQ ID NO: 2018246 - RNA, 19 nt, Homo sapiens
  misc_RNA (1)...(19): siRNA sense strand
agacaguucguaccaauua

SEQ ID NO: 2018247 - RNA, 19 nt, Homo sapiens
  misc_RNA (1)...(19): siRNA sense strand
ggacauggccaacaaaauu

SEQ ID NO: 2018248 - RNA, 19 nt, Homo sapiens
  misc_RNA (1)...(19): siRNA sense strand
gacaaagaauacugcauca

SEQ ID NO: 2018249 - RNA, 19 nt, Homo sapiens
  misc_RNA (1)...(19): siRNA sense strand
gcaucaaguuuauaagaca

SEQ ID NO: 2018250 - RNA, 19 nt, Homo sapiens
  misc_RNA (1)...(19): siRNA sense strand
gguaagacccugguuguug

SEQ ID NO: 2018251 - RNA, 19 nt, Homo sapiens
  misc_RNA (1)...(19): siRNA sense strand
ggcgauauauuggaggaua

SEQ ID NO: 2018252 - RNA, 19 nt, Homo sapiens
  misc_RNA (1)...(19): siRNA sense strand
uaagacaguucguaccaau

SEQ ID NO: 2018253 - RNA, 19 nt, Homo sapiens
  misc_RNA (1)...(19): siRNA sense strand
gcgauauauuggaggauaa

SEQ ID NO: 2018254 - RNA, 19 nt, Homo sapiens
  misc_RNA (1)...(19): siRNA sense strand
gaaugcuuaugggcaauuu

SEQ ID NO: 2018255 - RNA, 19 nt, Homo sapiens
  misc_RNA (1)...(19): siRNA sense strand
ggaagaaaauauugagguu

SEQ ID NO: 2018256 - RNA, 19 nt, Homo sapiens
  misc_RNA (1)...(19): siRNA sense strand
uaaggaggcagcccaauau

SEQ ID NO: 2018257 - RNA, 19 nt, Homo sapiens
  misc_RNA (1)...(19): siRNA sense strand
cuaaggaggcagcccaaua

SEQ ID NO: 2018258 - RNA, 19 nt, Homo sapiens
  misc_RNA (1)...(19): siRNA sense strand
uagaagcuguacagaauca

SEQ ID NO: 2018259 - RNA, 19 nt, Homo sapiens
  misc_RNA (1)...(19): siRNA sense strand
ccacuguauuuacuccuuu

SEQ ID NO: 2018260 - RNA, 19 nt, Homo sapiens
  misc_RNA (1)...(19): siRNA sense strand
gacaguucguaccaauuaa

SEQ ID NO: 2018261 - RNA, 19 nt, Homo sapiens
  misc_RNA (1)...(19): siRNA sense strand
agaaucacauuggcucuuu

SEQ ID NO: 2018262 - RNA, 19 nt, Homo sapiens
  misc_RNA (1)...(19): siRNA sense strand
gaaagucgaggagacaguu

SEQ ID NO: 2018263 - RNA, 19 nt, Homo sapiens
  misc_RNA (1)...(19): siRNA sense strand
gguuuaccauaguuacuuu

SEQ ID NO: 2018264 - RNA, 19 nt, Homo sapiens
  misc_RNA (1)...(19): siRNA sense strand
ggacaagcccugcaagacu

SEQ ID NO: 2018265 - RNA, 19 nt, Homo sapiens
  misc_RNA (1)...(19): siRNA sense strand
gaaucacauuggcucuuug

SEQ ID NO: 2018266 - RNA, 19 nt, Homo sapiens
  misc_RNA (1)...(19): siRNA sense strand
ggacagcacaauuggaauc

SEQ ID NO: 2018267 - RNA, 19 nt, Homo sapiens
  misc_RNA (1)...(19): siRNA sense strand
acgauuccgucaagagaua

SEQ ID NO: 2018268 - RNA, 19 nt, Homo sapiens
  misc_RNA (1)...(19): siRNA sense strand
gugaacacauggaagaaca

SEQ ID NO: 2018269 - RNA, 19 nt, Homo sapiens
  misc_RNA (1)...(19): siRNA sense strand
caaaauuggugaacacaug

SEQ ID NO: 2018270 - RNA, 19 nt, Homo sapiens
  misc_RNA (1)...(19): siRNA sense strand
gaauguggguugcauaccu

SEQ ID NO: 2018271 - RNA, 19 nt, Homo sapiens
  misc_RNA (1)...(19): siRNA sense strand
gcgcucaaauguggacuga

SEQ ID NO: 2018272 - RNA, 19 nt, Homo sapiens
  misc_RNA (1)...(19): siRNA sense strand
gaaauuauggauggaaagu

SEQ ID NO: 2018273 - RNA, 19 nt, Homo sapiens
  misc_RNA (1)...(19): siRNA sense strand
gagaauauaauacggugau

SEQ ID NO: 2018274 - RNA, 19 nt, Homo sapiens
  misc_RNA (1)...(19): siRNA sense strand
guuagguccauucuucuua

SEQ ID NO: 2018275 - RNA, 19 nt, Homo sapiens
  misc_RNA (1)...(19): siRNA sense strand
gaguagcucugcgggagaa

SEQ ID NO: 2018276 - RNA, 19 nt, Homo sapiens
  misc_RNA (1)...(19): siRNA sense strand
gugcagagguauucacaac

SEQ ID NO: 2018277 - RNA, 19 nt, Homo sapiens
  misc_RNA (1)...(19): siRNA sense strand
ccaaaugcuggagaaguua

SEQ ID NO: 2018278 - RNA, 19 nt, Homo sapiens
  misc_RNA (1)...(19): siRNA sense strand
gaaguuacacaaggcuuug

SEQ ID NO: 2018279 - RNA, 19 nt, Homo sapiens
  misc_RNA (1)...(19): siRNA sense strand
aggauuaaggcaacaaaua

SEQ ID NO: 2018280 - RNA, 19 nt, Homo sapiens
  misc_RNA (1)...(19): siRNA sense strand
uguauuuacuccuuuggaa

SEQ ID NO: 2018281 - RNA, 19 nt, Homo sapiens
  misc_RNA (1)...(19): siRNA sense strand
guuccaaccacuguauuua

SEQ ID NO: 2018282 - RNA, 19 nt, Homo sapiens
  misc_RNA (1)...(19): siRNA sense strand
guucguaccaauuaaaguu

SEQ ID NO: 2018283 - RNA, 19 nt, Homo sapiens
  misc_RNA (1)...(19): siRNA sense strand
cauggcaucaaguuuauaa

SEQ ID NO: 2018284 - RNA, 19 nt, Homo sapiens
  misc_RNA (1)...(19): siRNA sense strand
cauccuaugucgcuuugga

SEQ ID NO: 2018285 - RNA, 19 nt, Homo sapiens
  misc_RNA (1)...(19): siRNA sense strand
ggagacaguuaagcaugau

SEQ ID NO: 2018286 - RNA, 19 nt, Homo sapiens
  misc_RNA (1)...(19): siRNA sense strand
caggcuggcugcugagguu

SEQ ID NO: 2018287 - RNA, 19 nt, Homo sapiens
  misc_RNA (1)...(19): siRNA sense strand
auauugagguuuaccauag

SEQ ID NO: 2018288 - RNA, 19 nt, Homo sapiens
  misc_RNA (1)...(19): siRNA sense strand
caauagugaggaaaucauu

SEQ ID NO: 2018289 - RNA, 19 nt, Homo sapiens
  misc_RNA (1)...(19): siRNA sense strand
gagcauccuaugucgcuuu

SEQ ID NO: 2018290 - RNA, 19 nt, Homo sapiens
  misc_RNA (1)...(19): siRNA sense strand
caacauugucugugaccaa

SEQ ID NO: 2018291 - RNA, 19 nt, Homo sapiens
  misc_RNA (1)...(19): siRNA sense strand
ucgaaauuauggauggaaa

SEQ ID NO: 2018292 - RNA, 19 nt, Homo sapiens
  misc_RNA (1)...(19): siRNA sense strand
cagagguauucacaacauu

SEQ ID NO: 2018293 - RNA, 19 nt, Homo sapiens
  misc_RNA (1)...(19): siRNA sense strand
ucacauuggcucuuugaau

SEQ ID NO: 2018294 - RNA, 19 nt, Homo sapiens
  misc_RNA (1)...(19): siRNA sense strand
ugauagaagcuguacagaa

SEQ ID NO: 2018295 - RNA, 19 nt, Homo sapiens
  misc_RNA (1)...(19): siRNA sense strand
aggagacaguuaagcauga

SEQ ID NO: 2018296 - RNA, 19 nt, Homo sapiens
  misc_RNA (1)...(19): siRNA sense strand
gaagaacauggcaucaagu

SEQ ID NO: 2018297 - RNA, 19 nt, Homo sapiens
  misc_RNA (1)...(19): siRNA sense strand
cauugccacuggugaaaga

SEQ ID NO: 2018298 - RNA, 19 nt, Homo sapiens
  misc_RNA (1)...(19): siRNA sense strand
gaugaagaacagaccaaug

SEQ ID NO: 2018299 - RNA, 19 nt, Homo sapiens
  misc_RNA (1)...(19): siRNA sense strand
ugauugggacagaaugaua

SEQ ID NO: 2018300 - RNA, 19 nt, Homo sapiens
  misc_RNA (1)...(19): siRNA sense strand
ugucacagaugaagaacag

SEQ ID NO: 2018301 - RNA, 19 nt, Homo sapiens
  misc_RNA (1)...(19): siRNA sense strand
gcaauaggaagagaugcuu

SEQ ID NO: 2018302 - RNA, 19 nt, Homo sapiens
  misc_RNA (1)...(19): siRNA sense strand
aacauggcaucaaguuuau

SEQ ID NO: 2018303 - RNA, 19 nt, Homo sapiens
  misc_RNA (1)...(19): siRNA sense strand
ggugaaagaccacguuacu

SEQ ID NO: 2018304 - RNA, 19 nt, Homo sapiens
  misc_RNA (1)...(19): siRNA sense strand
ugcaagacucucgaaauua

SEQ ID NO: 2018305 - RNA, 19 nt, Homo sapiens
  misc_RNA (1)...(19): siRNA sense strand
gugaugaucuuuucuccuu

SEQ ID NO: 2018306 - RNA, 19 nt, Homo sapiens
  misc_RNA (1)...(19): siRNA sense strand
gaaagcuguggagaaguuu

SEQ ID NO: 2018307 - RNA, 19 nt, Homo sapiens
  misc_RNA (1)...(19): siRNA sense strand
ggcaucaaguuuauaagac

SEQ ID NO: 2018308 - RNA, 19 nt, Homo sapiens
  misc_RNA (1)...(19): siRNA sense strand
aauguggguugcauaccua

SEQ ID NO: 2018309 - RNA, 19 nt, Homo sapiens
  misc_RNA (1)...(19): siRNA sense strand
caucccuggugacaaagaa

SEQ ID NO: 2018310 - RNA, 19 nt, Homo sapiens
  misc_RNA (1)...(19): siRNA sense strand
gggugaagauaaaugaaaa

SEQ ID NO: 2018311 - RNA, 19 nt, Homo sapiens
  misc_RNA (1)...(19): siRNA sense strand
gaauuggggcuaccgagua

SEQ ID NO: 2018312 - RNA, 19 nt, Homo sapiens
  misc_RNA (1)...(19): siRNA sense strand
ggaagagaugcuugcacaa

SEQ ID NO: 2018313 - RNA, 19 nt, Homo sapiens
  misc_RNA (1)...(19): siRNA sense strand
gcucaguccaccaauagug

SEQ ID NO: 2018314 - RNA, 19 nt, Homo sapiens
  misc_RNA (1)...(19): siRNA sense strand
gagaaugcuuaugggcaau

SEQ ID NO: 2018315 - RNA, 19 nt, Homo sapiens
  misc_RNA (1)...(19): siRNA sense strand
uggcaucaaguuuauaaga

SEQ ID NO: 2018316 - RNA, 19 nt, Homo sapiens
  misc_RNA (1)...(19): siRNA sense strand
ccaccaauagugaggaaau

SEQ ID NO: 2018317 - RNA, 19 nt, Homo sapiens
  misc_RNA (1)...(19): siRNA sense strand
ggacagaaugauagaagcu

SEQ ID NO: 2018318 - RNA, 19 nt, Homo sapiens
  misc_RNA (1)...(19): siRNA sense strand
agaaguuacacaaggcuuu

SEQ ID NO: 2018319 - RNA, 19 nt, Homo sapiens
  misc_RNA (1)...(19): siRNA sense strand
gaucuucccaaguccuaug

SEQ ID NO: 2018320 - RNA, 19 nt, Homo sapiens
  misc_RNA (1)...(19): siRNA sense strand
cggaggaacaugugugaau

SEQ ID NO: 2018321 - RNA, 19 nt, Homo sapiens
  misc_RNA (1)...(19): siRNA sense strand
gaagcuguacagaaucaca

SEQ ID NO: 2018322 - RNA, 19 nt, Homo sapiens
  misc_RNA (1)...(19): siRNA sense strand
cagaaugauagaagcugua

SEQ ID NO: 2018323 - RNA, 19 nt, Homo sapiens
  misc_RNA (1)...(19): siRNA sense strand
uuagguccauucuucuuag

SEQ ID NO: 2018324 - RNA, 19 nt, Homo sapiens
  misc_RNA (1)...(19): siRNA sense strand
gaugcuggcaauaggaaga

SEQ ID NO: 2018325 - RNA, 19 nt, Homo sapiens
  misc_RNA (1)...(19): siRNA sense strand
aagaacauggcaucaaguu

SEQ ID NO: 2018326 - RNA, 19 nt, Homo sapiens
  misc_RNA (1)...(19): siRNA sense strand
ccaaggugcuaguguauga

SEQ ID NO: 2018327 - RNA, 19 nt, Homo sapiens
  misc_RNA (1)...(19): siRNA sense strand
gggaagaucuuugccuuug

SEQ ID NO: 2018328 - RNA, 19 nt, Homo sapiens
  misc_RNA (1)...(19): siRNA sense strand
ccgaugauguaguugauua

SEQ ID NO: 2018329 - RNA, 19 nt, Homo sapiens
  misc_RNA (1)...(19): siRNA sense strand
agacagaucugcaugaaca

SEQ ID NO: 2018330 - RNA, 19 nt, Homo sapiens
  misc_RNA (1)...(19): siRNA sense strand
ggaagaucuuugccuuuga

SEQ ID NO: 2018331 - RNA, 19 nt, Homo sapiens
  misc_RNA (1)...(19): siRNA sense strand
gacaagguuucuccuauca

SEQ ID NO: 2018332 - RNA, 19 nt, Homo sapiens
  misc_RNA (1)...(19): siRNA sense strand
ggaaugaggaccuguugga

SEQ ID NO: 2018333 - RNA, 19 nt, Homo sapiens
  misc_RNA (1)...(19): siRNA sense strand
gaaccaagggaagaucuuu

SEQ ID NO: 2018334 - RNA, 19 nt, Homo sapiens
  misc_RNA (1)...(19): siRNA sense strand
gcaauaagaccagucacuu

SEQ ID NO: 2018335 - RNA, 19 nt, Homo sapiens
  misc_RNA (1)...(19): siRNA sense strand
ucacuuggcugcucuucug

SEQ ID NO: 2018336 - RNA, 19 nt, Homo sapiens
  misc_RNA (1)...(19): siRNA sense strand
gaccugcuccgaugaugua

SEQ ID NO: 2018337 - RNA, 19 nt, Homo sapiens
  misc_RNA (1)...(19): siRNA sense strand
gcuaguguaugaguuguug

SEQ ID NO: 2018338 - RNA, 19 nt, Homo sapiens
  misc_RNA (1)...(19): siRNA sense strand
gaagaucuuugccuuugac

SEQ ID NO: 2018339 - RNA, 19 nt, Homo sapiens
  misc_RNA (1)...(19): siRNA sense strand
caauaagaccagucacuug

SEQ ID NO: 2018340 - RNA, 19 nt, Homo sapiens
  misc_RNA (1)...(19): siRNA sense strand
cuucuucguugcuguaauu

SEQ ID NO: 2018341 - RNA, 19 nt, Homo sapiens
  misc_RNA (1)...(19): siRNA sense strand
uggccaaggugcuagugua

SEQ ID NO: 2018342 - RNA, 19 nt, Homo sapiens
  misc_RNA (1)...(19): siRNA sense strand
cuucguugcuguaauugaa

SEQ ID NO: 2018343 - RNA, 19 nt, Homo sapiens
  misc_RNA (1)...(19): siRNA sense strand
agacaagguuucuccuauc

SEQ ID NO: 2018344 - RNA, 19 nt, Homo sapiens
  misc_RNA (1)...(19): siRNA sense strand
ccaagcggcuggcauccau

SEQ ID NO: 2018345 - RNA, 19 nt, Homo sapiens
  misc_RNA (1)...(19): siRNA sense strand
ccucccagcugccucgauu

SEQ ID NO: 2018346 - RNA, 19 nt, Homo sapiens
  misc_RNA (1)...(19): siRNA sense strand
gaaugaggaccuguuggaa

SEQ ID NO: 2018347 - RNA, 19 nt, Homo sapiens
  misc_RNA (1)...(19): siRNA sense strand
ccagcugccucgauuugug

SEQ ID NO: 2018348 - RNA, 19 nt, Homo sapiens
  misc_RNA (1)...(19): siRNA sense strand
cagccucgaugacuuacga

SEQ ID NO: 2018349 - RNA, 19 nt, Homo sapiens
  misc_RNA (1)...(19): siRNA sense strand
ugccggagcugcugguguu

SEQ ID NO: 2018350 - RNA, 19 nt, Homo sapiens
  misc_RNA (1)...(19): siRNA sense strand
cugcuccgaugauguaguu

SEQ ID NO: 2018351 - RNA, 19 nt, Homo sapiens
  misc_RNA (1)...(19): siRNA sense strand
gccaggaggagaaugaaga

SEQ ID NO: 2018352 - RNA, 19 nt, Homo sapiens
  misc_RNA (1)...(19): siRNA sense strand
gcaugaacacccacuguac

SEQ ID NO: 2018353 - RNA, 19 nt, Homo sapiens
  misc_RNA (1)...(19): siRNA sense strand
gaagaaccaagggaagauc

SEQ ID NO: 2018354 - RNA, 19 nt, Homo sapiens
  misc_RNA (1)...(19): siRNA sense strand
acucagcaguggcuucuuc

SEQ ID NO: 2018355 - RNA, 19 nt, Homo sapiens
  misc_RNA (1)...(19): siRNA sense strand
cagcaguggcuucuucguu

SEQ ID NO: 2018356 - RNA, 19 nt, Homo sapiens
  misc_RNA (1)...(19): siRNA sense strand
uggcucggcucaagguuca

SEQ ID NO: 2018357 - RNA, 19 nt, Homo sapiens
  misc_RNA (1)...(19): siRNA sense strand
gcuccgaugauguaguuga

SEQ ID NO: 2018358 - RNA, 19 nt, Homo sapiens
  misc_RNA (1)...(19): siRNA sense strand
gcaacuuccagaacgugaa

SEQ ID NO: 2018359 - RNA, 19 nt, Homo sapiens
  misc_RNA (1)...(19): siRNA sense strand
ggugcuaguguaugaguug

SEQ ID NO: 2018360 - RNA, 19 nt, Homo sapiens
  misc_RNA (1)...(19): siRNA sense strand
gaacgugaagcagcuguac

SEQ ID NO: 2018361 - RNA, 19 nt, Homo sapiens
  misc_RNA (1)...(19): siRNA sense strand
augaggaccuguuggaagu

SEQ ID NO: 2018362 - RNA, 19 nt, Homo sapiens
  misc_RNA (1)...(19): siRNA sense strand
gguguacuccagcaacuuc

SEQ ID NO: 2018363 - RNA, 19 nt, Homo sapiens
  misc_RNA (1)...(19): siRNA sense strand
ggccaaggugcuaguguau

SEQ ID NO: 2018364 - RNA, 19 nt, Homo sapiens
  misc_RNA (1)...(19): siRNA sense strand
accaugagguccacuacau

SEQ ID NO: 2018365 - RNA, 19 nt, Homo sapiens
  misc_RNA (1)...(19): siRNA sense strand
caagaccugcuccgaugau

SEQ ID NO: 2018366 - RNA, 19 nt, Homo sapiens
  misc_RNA (1)...(19): siRNA sense strand
ccaaggugcuaguguauga

SEQ ID NO: 2018367 - RNA, 19 nt, Homo sapiens
  misc_RNA (1)...(19): siRNA sense strand
gggaagaucuuugccuuug

SEQ ID NO: 2018368 - RNA, 19 nt, Homo sapiens
  misc_RNA (1)...(19): siRNA sense strand
ccgaugauguaguugauua

SEQ ID NO: 2018369 - RNA, 19 nt, Homo sapiens
  misc_RNA (1)...(19): siRNA sense strand
agacagaucugcaugaaca

SEQ ID NO: 2018370 - RNA, 19 nt, Homo sapiens
  misc_RNA (1)...(19): siRNA sense strand
gcacaccgccuugcacaua

SEQ ID NO: 2018371 - RNA, 19 nt, Homo sapiens
  misc_RNA (1)...(19): siRNA sense strand
ggaagaucuuugccuuuga

SEQ ID NO: 2018372 - RNA, 19 nt, Homo sapiens
  misc_RNA (1)...(19): siRNA sense strand
gacaagguuucuccuauca

SEQ ID NO: 2018373 - RNA, 19 nt, Homo sapiens
  misc_RNA (1)...(19): siRNA sense strand
gaaagaagagacagcaaag

SEQ ID NO: 2018374 - RNA, 19 nt, Homo sapiens
  misc_RNA (1)...(19): siRNA sense strand
ggaaugaggaccuguugga

SEQ ID NO: 2018375 - RNA, 19 nt, Homo sapiens
  misc_RNA (1)...(19): siRNA sense strand
gaaccaagggaagaucuuu

SEQ ID NO: 2018376 - RNA, 19 nt, Homo sapiens
  misc_RNA (1)...(19): siRNA sense strand
gcaauaagaccagucacuu

SEQ ID NO: 2018377 - RNA, 19 nt, Homo sapiens
  misc_RNA (1)...(19): siRNA sense strand
ucacuuggcugcucuucug

SEQ ID NO: 2018378 - RNA, 19 nt, Homo sapiens
  misc_RNA (1)...(19): siRNA sense strand
gaccugcuccgaugaugua

SEQ ID NO: 2018379 - RNA, 19 nt, Homo sapiens
  misc_RNA (1)...(19): siRNA sense strand
gcuaguguaugaguuguug

SEQ ID NO: 2018380 - RNA, 19 nt, Homo sapiens
  misc_RNA (1)...(19): siRNA sense strand
gaagaucuuugccuuugac

SEQ ID NO: 2018381 - RNA, 19 nt, Homo sapiens
  misc_RNA (1)...(19): siRNA sense strand
caaagcaucagcaccagaa

SEQ ID NO: 2018382 - RNA, 19 nt, Homo sapiens
  misc_RNA (1)...(19): siRNA sense strand
caauaagaccagucacuug

SEQ ID NO: 2018383 - RNA, 19 nt, Homo sapiens
  misc_RNA (1)...(19): siRNA sense strand
cuucuucguugcuguaauu

SEQ ID NO: 2018384 - RNA, 19 nt, Homo sapiens
  misc_RNA (1)...(19): siRNA sense strand
uggccaaggugcuagugua

SEQ ID NO: 2018385 - RNA, 19 nt, Homo sapiens
  misc_RNA (1)...(19): siRNA sense strand
cuucguugcuguaauugaa

SEQ ID NO: 2018386 - RNA, 19 nt, Homo sapiens
  misc_RNA (1)...(19): siRNA sense strand
agacaagguuucuccuauc

SEQ ID NO: 2018387 - RNA, 19 nt, Homo sapiens
  misc_RNA (1)...(19): siRNA sense strand
agaaagaagagacagcaaa

SEQ ID NO: 2018388 - RNA, 19 nt, Homo sapiens
  misc_RNA (1)...(19): siRNA sense strand
ccaagcggcuggcauccau

SEQ ID NO: 2018389 - RNA, 19 nt, Homo sapiens
  misc_RNA (1)...(19): siRNA sense strand
ccucccagcugccucgauu

SEQ ID NO: 2018390 - RNA, 19 nt, Homo sapiens
  misc_RNA (1)...(19): siRNA sense strand
gaaugaggaccuguuggaa

SEQ ID NO: 2018391 - RNA, 19 nt, Homo sapiens
  misc_RNA (1)...(19): siRNA sense strand
ccagcugccucgauuugug

SEQ ID NO: 2018392 - RNA, 19 nt, Homo sapiens
  misc_RNA (1)...(19): siRNA sense strand
cagccucgaugacuuacga

SEQ ID NO: 2018393 - RNA, 19 nt, Homo sapiens
  misc_RNA (1)...(19): siRNA sense strand
ugccggagcugcugguguu

SEQ ID NO: 2018394 - RNA, 19 nt, Homo sapiens
  misc_RNA (1)...(19): siRNA sense strand
caaagagaaagaagagaca

SEQ ID NO: 2018395 - RNA, 19 nt, Homo sapiens
  misc_RNA (1)...(19): siRNA sense strand
cugcuccgaugauguaguu

SEQ ID NO: 2018396 - RNA, 19 nt, Homo sapiens
  misc_RNA (1)...(19): siRNA sense strand
gccaggaggagaaugaaga

SEQ ID NO: 2018397 - RNA, 19 nt, Homo sapiens
  misc_RNA (1)...(19): siRNA sense strand
gcaugaacacccacuguac

SEQ ID NO: 2018398 - RNA, 19 nt, Homo sapiens
  misc_RNA (1)...(19): siRNA sense strand
gaagaaccaagggaagauc

SEQ ID NO: 2018399 - RNA, 19 nt, Homo sapiens
  misc_RNA (1)...(19): siRNA sense strand
acucagcaguggcuucuuc

SEQ ID NO: 2018400 - RNA, 19 nt, Homo sapiens
  misc_RNA (1)...(19): siRNA sense strand
cagcaguggcuucuucguu

SEQ ID NO: 2018401 - RNA, 19 nt, Homo sapiens
  misc_RNA (1)...(19): siRNA sense strand
gagaaagaagagacagcaa

SEQ ID NO: 2018402 - RNA, 19 nt, Homo sapiens
  misc_RNA (1)...(19): siRNA sense strand
uggcucggcucaagguuca

SEQ ID NO: 2018403 - RNA, 19 nt, Homo sapiens
  misc_RNA (1)...(19): siRNA sense strand
gcuccgaugauguaguuga

SEQ ID NO: 2018404 - RNA, 19 nt, Homo sapiens
  misc_RNA (1)...(19): siRNA sense strand
gcaacuuccagaacgugaa

SEQ ID NO: 2018405 - RNA, 19 nt, Homo sapiens
  misc_RNA (1)...(19): siRNA sense strand
augaggaccuguuggaagu

SEQ ID NO: 2018406 - RNA, 19 nt, Homo sapiens
  misc_RNA (1)...(19): siRNA sense strand
ggugcuaguguaugaguug

SEQ ID NO: 2018407 - RNA, 19 nt, Homo sapiens
  misc_RNA (1)...(19): siRNA sense strand
gaacgugaagcagcuguac

SEQ ID NO: 2018408 - RNA, 19 nt, Homo sapiens
  misc_RNA (1)...(19): siRNA sense strand
gguguacuccagcaacuuc

SEQ ID NO: 2018409 - RNA, 19 nt, Homo sapiens
  misc_RNA (1)...(19): siRNA sense strand
aagaagagacagcaaagag

SEQ ID NO: 2018410 - RNA, 19 nt, Homo sapiens
  misc_RNA (1)...(19): siRNA sense strand
ggccaaggugcuaguguau

SEQ ID NO: 2018411 - RNA, 19 nt, Homo sapiens
  misc_RNA (1)...(19): siRNA sense strand
accaugagguccacuacau

SEQ ID NO: 2018412 - RNA, 19 nt, Homo sapiens
  misc_RNA (1)...(19): siRNA sense strand
aaagaagagacagcaaaga

SEQ ID NO: 2018413 - RNA, 19 nt, Homo sapiens
  misc_RNA (1)...(19): siRNA sense strand
caagaccugcuccgaugau

SEQ ID NO: 2018414 - RNA, 19 nt, Homo sapiens
  misc_RNA (1)...(19): siRNA sense strand
caacucaccuccacuauua

SEQ ID NO: 2018415 - RNA, 19 nt, Homo sapiens
  misc_RNA (1)...(19): siRNA sense strand
gauagcagcuccagaaaua

SEQ ID NO: 2018416 - RNA, 19 nt, Homo sapiens
  misc_RNA (1)...(19): siRNA sense strand
gaacaggccuucacuauuc

SEQ ID NO: 2018417 - RNA, 19 nt, Homo sapiens
  misc_RNA (1)...(19): siRNA sense strand
gaagucaacugauagauga

SEQ ID NO: 2018418 - RNA, 19 nt, Homo sapiens
  misc_RNA (1)...(19): siRNA sense strand
ggaaagagcuucaggaaaa

SEQ ID NO: 2018419 - RNA, 19 nt, Homo sapiens
  misc_RNA (1)...(19): siRNA sense strand
gaaagcagcucuacaaagg

SEQ ID NO: 2018420 - RNA, 19 nt, Homo sapiens
  misc_RNA (1)...(19): siRNA sense strand
gcagauaucuucaaacagu

SEQ ID NO: 2018421 - RNA, 19 nt, Homo sapiens
  misc_RNA (1)...(19): siRNA sense strand
gaaauuuacuugcagcauu

SEQ ID NO: 2018422 - RNA, 19 nt, Homo sapiens
  misc_RNA (1)...(19): siRNA sense strand
ggaugaagauguauaguga

SEQ ID NO: 2018423 - RNA, 19 nt, Homo sapiens
  misc_RNA (1)...(19): siRNA sense strand
ggagagccauccaccuuua

SEQ ID NO: 2018424 - RNA, 19 nt, Homo sapiens
  misc_RNA (1)...(19): siRNA sense strand
acaaagagcuuaauuccaa

SEQ ID NO: 2018425 - RNA, 19 nt, Homo sapiens
  misc_RNA (1)...(19): siRNA sense strand
gaauacagcugcagauauc

SEQ ID NO: 2018426 - RNA, 19 nt, Homo sapiens
  misc_RNA (1)...(19): siRNA sense strand
acacaaagauggcauagaa

SEQ ID NO: 2018427 - RNA, 19 nt, Homo sapiens
  misc_RNA (1)...(19): siRNA sense strand
guacggcaaugucaauaua

SEQ ID NO: 2018428 - RNA, 19 nt, Homo sapiens
  misc_RNA (1)...(19): siRNA sense strand
cuacugagcugcugaaaga

SEQ ID NO: 2018429 - RNA, 19 nt, Homo sapiens
  misc_RNA (1)...(19): siRNA sense strand
gcacaagccuaauggaaga

SEQ ID NO: 2018430 - RNA, 19 nt, Homo sapiens
  misc_RNA (1)...(19): siRNA sense strand
guacauagauaccgugaug

SEQ ID NO: 2018431 - RNA, 19 nt, Homo sapiens
  misc_RNA (1)...(19): siRNA sense strand
ggagauaucaucaaagaaa

SEQ ID NO: 2018432 - RNA, 19 nt, Homo sapiens
  misc_RNA (1)...(19): siRNA sense strand
gcacacagauacagauguu

SEQ ID NO: 2018433 - RNA, 19 nt, Homo sapiens
  misc_RNA (1)...(19): siRNA sense strand
cgacagauccggaauauug

SEQ ID NO: 2018434 - RNA, 19 nt, Homo sapiens
  misc_RNA (1)...(19): siRNA sense strand
ggugguagaugauuggaua

SEQ ID NO: 2018435 - RNA, 19 nt, Homo sapiens
  misc_RNA (1)...(19): siRNA sense strand
gcauuuggaugaagaugua

SEQ ID NO: 2018436 - RNA, 19 nt, Homo sapiens
  misc_RNA (1)...(19): siRNA sense strand
gcaguugccucaguacuuu

SEQ ID NO: 2018437 - RNA, 19 nt, Homo sapiens
  misc_RNA (1)...(19): siRNA sense strand
gagaagaaauuuacuugca

SEQ ID NO: 2018438 - RNA, 19 nt, Homo sapiens
  misc_RNA (1)...(19): siRNA sense strand
gcacaagagaagaaauuua

SEQ ID NO: 2018439 - RNA, 19 nt, Homo sapiens
  misc_RNA (1)...(19): siRNA sense strand
cagcauaccuuguggauag

SEQ ID NO: 2018440 - RNA, 19 nt, Homo sapiens
  misc_RNA (1)...(19): siRNA sense strand
ugaagaaccugaugaagau

SEQ ID NO: 2018441 - RNA, 19 nt, Homo sapiens
  misc_RNA (1)...(19): siRNA sense strand
gggcaaagguggaaaugga

SEQ ID NO: 2018442 - RNA, 19 nt, Homo sapiens
  misc_RNA (1)...(19): siRNA sense strand
uaagcaaggugaaguaaga

SEQ ID NO: 2018443 - RNA, 19 nt, Homo sapiens
  misc_RNA (1)...(19): siRNA sense strand
ugaauucauuggcguguua

SEQ ID NO: 2018444 - RNA, 19 nt, Homo sapiens
  misc_RNA (1)...(19): siRNA sense strand
cuacaagggcuuuauuaua

SEQ ID NO: 2018445 - RNA, 19 nt, Homo sapiens
  misc_RNA (1)...(19): siRNA sense strand
gaauacuacuguuaaggaa

SEQ ID NO: 2018446 - RNA, 19 nt, Homo sapiens
  misc_RNA (1)...(19): siRNA sense strand
ugaagaggaucacugcuuu

SEQ ID NO: 2018447 - RNA, 19 nt, Homo sapiens
  misc_RNA (1)...(19): siRNA sense strand
caaagaauaugauguugca

SEQ ID NO: 2018448 - RNA, 19 nt, Homo sapiens
  misc_RNA (1)...(19): siRNA sense strand
aguagcagcuggagaauuu

SEQ ID NO: 2018449 - RNA, 19 nt, Homo sapiens
  misc_RNA (1)...(19): siRNA sense strand
gaagaaaguaguaguagug

SEQ ID NO: 2018450 - RNA, 19 nt, Homo sapiens
  misc_RNA (1)...(19): siRNA sense strand
gaugacagcuuuggugaau

SEQ ID NO: 2018451 - RNA, 19 nt, Homo sapiens
  misc_RNA (1)...(19): siRNA sense strand
cagaguagauauuucaaga

SEQ ID NO: 2018452 - RNA, 19 nt, Homo sapiens
  misc_RNA (1)...(19): siRNA sense strand
gagauuggcauuuggauga

SEQ ID NO: 2018453 - RNA, 19 nt, Homo sapiens
  misc_RNA (1)...(19): siRNA sense strand
ggauugaggaucuuaauga

SEQ ID NO: 2018454 - RNA, 19 nt, Homo sapiens
  misc_RNA (1)...(19): siRNA sense strand
gaaauaaugcuuuguacca

SEQ ID NO: 2018455 - RNA, 19 nt, Homo sapiens
  misc_RNA (1)...(19): siRNA sense strand
ccaaaugccaaccuuguua

SEQ ID NO: 2018456 - RNA, 19 nt, Homo sapiens
  misc_RNA (1)...(19): siRNA sense strand
gaaguaagacucaaauguc

SEQ ID NO: 2018457 - RNA, 19 nt, Homo sapiens
  misc_RNA (1)...(19): siRNA sense strand
uagaugaauuggcagauaa

SEQ ID NO: 2018458 - RNA, 19 nt, Homo sapiens
  misc_RNA (1)...(19): siRNA sense strand
guagauauuucaagaaguc

SEQ ID NO: 2018459 - RNA, 19 nt, Homo sapiens
  misc_RNA (1)...(19): siRNA sense strand
cagcagaaauguuuagaca

SEQ ID NO: 2018460 - RNA, 19 nt, Homo sapiens
  misc_RNA (1)...(19): siRNA sense strand
ugaugaagaugaugcauau

SEQ ID NO: 2018461 - RNA, 19 nt, Homo sapiens
  misc_RNA (1)...(19): siRNA sense strand
gaggaagcacuaacagaua

SEQ ID NO: 2018462 - RNA, 19 nt, Homo sapiens
  misc_RNA (1)...(19): siRNA sense strand
guagagaagcacacagaua

SEQ ID NO: 2018463 - RNA, 19 nt, Homo sapiens
  misc_RNA (1)...(19): siRNA sense strand
ggaacaggccuucacuauu

SEQ ID NO: 2018464 - RNA, 19 nt, Homo sapiens
  misc_RNA (1)...(19): siRNA sense strand
caacagaguagauauuuca

SEQ ID NO: 2018465 - RNA, 19 nt, Homo sapiens
  misc_RNA (1)...(19): siRNA sense strand
agaauaugauguugcagua

SEQ ID NO: 2018466 - RNA, 19 nt, Homo sapiens
  misc_RNA (1)...(19): siRNA sense strand
cagcuucaauuauggauga

SEQ ID NO: 2018467 - RNA, 19 nt, Homo sapiens
  misc_RNA (1)...(19): siRNA sense strand
caaagauggcauagaauuu

SEQ ID NO: 2018468 - RNA, 19 nt, Homo sapiens
  misc_RNA (1)...(19): siRNA sense strand
gaguagauauuucaagaag

SEQ ID NO: 2018469 - RNA, 19 nt, Homo sapiens
  misc_RNA (1)...(19): siRNA sense strand
gggaauguaugaauagcuu

SEQ ID NO: 2018470 - RNA, 19 nt, Homo sapiens
  misc_RNA (1)...(19): siRNA sense strand
acagucauuucacuucuua

SEQ ID NO: 2018471 - RNA, 19 nt, Homo sapiens
  misc_RNA (1)...(19): siRNA sense strand
gaaaguaguaguagugaca

SEQ ID NO: 2018472 - RNA, 19 nt, Homo sapiens
  misc_RNA (1)...(19): siRNA sense strand
ccagaaauaccaacugauu

SEQ ID NO: 2018473 - RNA, 19 nt, Homo sapiens
  misc_RNA (1)...(19): siRNA sense strand
gaacaggaugaugauaaua

SEQ ID NO: 2018474 - RNA, 19 nt, Homo sapiens
  misc_RNA (1)...(19): siRNA sense strand
ugaaguugaugacagcuuu

SEQ ID NO: 2018475 - RNA, 19 nt, Homo sapiens
  misc_RNA (1)...(19): siRNA sense strand
gagaguauuuugucagaua

SEQ ID NO: 2018476 - RNA, 19 nt, Homo sapiens
  misc_RNA (1)...(19): siRNA sense strand
ucuaucaucugguuuauuc

SEQ ID NO: 2018477 - RNA, 19 nt, Homo sapiens
  misc_RNA (1)...(19): siRNA sense strand
aaaggugacuaacuuguug

SEQ ID NO: 2018478 - RNA, 19 nt, Homo sapiens
  misc_RNA (1)...(19): siRNA sense strand
guagaugauuggauagaau

SEQ ID NO: 2018479 - RNA, 19 nt, Homo sapiens
  misc_RNA (1)...(19): siRNA sense strand
gacaguaugugguuaagca

SEQ ID NO: 2018480 - RNA, 19 nt, Homo sapiens
  misc_RNA (1)...(19): siRNA sense strand
gugaagaaccugaugaaga

SEQ ID NO: 2018481 - RNA, 19 nt, Homo sapiens
  misc_RNA (1)...(19): siRNA sense strand
gacugggaauguaugaaua

SEQ ID NO: 2018482 - RNA, 19 nt, Homo sapiens
  misc_RNA (1)...(19): siRNA sense strand
aaaggaguguuuguacaua

SEQ ID NO: 2018483 - RNA, 19 nt, Homo sapiens
  misc_RNA (1)...(19): siRNA sense strand
acugaagccugauuucuuu

SEQ ID NO: 2018484 - RNA, 19 nt, Homo sapiens
  misc_RNA (1)...(19): siRNA sense strand
caccauggauauagauuug

SEQ ID NO: 2018485 - RNA, 19 nt, Homo sapiens
  misc_RNA (1)...(19): siRNA sense strand
gggauuuauuugcuuguaa

SEQ ID NO: 2018486 - RNA, 19 nt, Homo sapiens
  misc_RNA (1)...(19): siRNA sense strand
caaagagcuuaauuccaaa

SEQ ID NO: 2018487 - RNA, 19 nt, Homo sapiens
  misc_RNA (1)...(19): siRNA sense strand
ugacagcuuuggugaaugu

SEQ ID NO: 2018488 - RNA, 19 nt, Homo sapiens
  misc_RNA (1)...(19): siRNA sense strand
ucaaagaacagacgagaga

SEQ ID NO: 2018489 - RNA, 19 nt, Homo sapiens
  misc_RNA (1)...(19): siRNA sense strand
agacaugccugagcagauu

SEQ ID NO: 2018490 - RNA, 19 nt, Homo sapiens
  misc_RNA (1)...(19): siRNA sense strand
uucaagaagucaacugaua

SEQ ID NO: 2018491 - RNA, 19 nt, Homo sapiens
  misc_RNA (1)...(19): siRNA sense strand
guuggacuaugcaugauaa

SEQ ID NO: 2018492 - RNA, 19 nt, Homo sapiens
  misc_RNA (1)...(19): siRNA sense strand
gauguauagugaugccuuu

SEQ ID NO: 2018493 - RNA, 19 nt, Homo sapiens
  misc_RNA (1)...(19): siRNA sense strand
uagauaccgugaugcgaua

SEQ ID NO: 2018494 - RNA, 19 nt, Homo sapiens
  misc_RNA (1)...(19): siRNA sense strand
caacgugaauacuacuguu

SEQ ID NO: 2018495 - RNA, 19 nt, Homo sapiens
  misc_RNA (1)...(19): siRNA sense strand
auauaccacuggacgauua

SEQ ID NO: 2018496 - RNA, 19 nt, Homo sapiens
  misc_RNA (1)...(19): siRNA sense strand
gugaugccuuucuuaauga

SEQ ID NO: 2018497 - RNA, 19 nt, Homo sapiens
  misc_RNA (1)...(19): siRNA sense strand
gauguuguuugaaguuguu

SEQ ID NO: 2018498 - RNA, 19 nt, Homo sapiens
  misc_RNA (1)...(19): siRNA sense strand
cuauggagauaucaucaaa

SEQ ID NO: 2018499 - RNA, 19 nt, Homo sapiens
  misc_RNA (1)...(19): siRNA sense strand
ugaacaggaugaugauaau

SEQ ID NO: 2018500 - RNA, 19 nt, Homo sapiens
  misc_RNA (1)...(19): siRNA sense strand
gucagagcauuucgacaua

SEQ ID NO: 2018501 - RNA, 19 nt, Homo sapiens
  misc_RNA (1)...(19): siRNA sense strand
gaauguggcacuaaaucuu

SEQ ID NO: 2018502 - RNA, 19 nt, Homo sapiens
  misc_RNA (1)...(19): siRNA sense strand
ggucaacaguacggaguaa

SEQ ID NO: 2018503 - RNA, 19 nt, Homo sapiens
  misc_RNA (1)...(19): siRNA sense strand
uuaccgaaauucuuugcua

SEQ ID NO: 2018504 - RNA, 19 nt, Homo sapiens
  misc_RNA (1)...(19): siRNA sense strand
ccauccaccuuuaaauuug

SEQ ID NO: 2018505 - RNA, 19 nt, Homo sapiens
  misc_RNA (1)...(19): siRNA sense strand
aaacaaggcagauagacaa

SEQ ID NO: 2018506 - RNA, 19 nt, Homo sapiens
  misc_RNA (1)...(19): siRNA sense strand
gaguugcucagcuuuauuu

SEQ ID NO: 2018507 - RNA, 19 nt, Homo sapiens
  misc_RNA (1)...(19): siRNA sense strand
guaauccuuuggcaacuug

SEQ ID NO: 2018508 - RNA, 19 nt, Homo sapiens
  misc_RNA (1)...(19): siRNA sense strand
gcaagagggugaagaaccu

SEQ ID NO: 2018509 - RNA, 19 nt, Homo sapiens
  misc_RNA (1)...(19): siRNA sense strand
agacacaguuggaugauag

SEQ ID NO: 2018510 - RNA, 19 nt, Homo sapiens
  misc_RNA (1)...(19): siRNA sense strand
gacaaagaauaugauguug

SEQ ID NO: 2018511 - RNA, 19 nt, Homo sapiens
  misc_RNA (1)...(19): siRNA sense strand
caaaggagaagaagacaca

SEQ ID NO: 2018512 - RNA, 19 nt, Homo sapiens
  misc_RNA (1)...(19): siRNA sense strand
ggcuuccacugaugucuua

SEQ ID NO: 2018513 - RNA, 19 nt, Homo sapiens
  misc_RNA (1)...(19): siRNA sense strand
gccauccaccuuuaaauuu

SEQ ID NO: 2018514 - RNA, 19 nt, Homo sapiens
  misc_RNA (1)...(19): siRNA sense strand
uaagaacuaugaagacuac

SEQ ID NO: 2018515 - RNA, 19 nt, Homo sapiens
  misc_RNA (1)...(19): siRNA sense strand
cagcagcgauuggcagauu

SEQ ID NO: 2018516 - RNA, 19 nt, Homo sapiens
  misc_RNA (1)...(19): siRNA sense strand
gcaacuauauuuucguuug

SEQ ID NO: 2018517 - RNA, 19 nt, Homo sapiens
  misc_RNA (1)...(19): siRNA sense strand
cagcugaccaccaguacua

SEQ ID NO: 2018518 - RNA, 19 nt, Homo sapiens
  misc_RNA (1)...(19): siRNA sense strand
acugugagcuugaaaauuu

SEQ ID NO: 2018519 - RNA, 19 nt, Homo sapiens
  misc_RNA (1)...(19): siRNA sense strand
uuuauugccugaacccuaa

SEQ ID NO: 2018520 - RNA, 19 nt, Homo sapiens
  misc_RNA (1)...(19): siRNA sense strand
ucucgaaggcguuucuaua

SEQ ID NO: 2018521 - RNA, 19 nt, Homo sapiens
  misc_RNA (1)...(19): siRNA sense strand
gaacuaugaagacuacuac

SEQ ID NO: 2018522 - RNA, 19 nt, Homo sapiens
  misc_RNA (1)...(19): siRNA sense strand
ucgaaggcguuucuauaga

SEQ ID NO: 2018523 - RNA, 19 nt, Homo sapiens
  misc_RNA (1)...(19): siRNA sense strand
cgaaggcguuucuauagac

SEQ ID NO: 2018524 - RNA, 19 nt, Homo sapiens
  misc_RNA (1)...(19): siRNA sense strand
gauugcuacucuggcuuua

SEQ ID NO: 2018525 - RNA, 19 nt, Homo sapiens
  misc_RNA (1)...(19): siRNA sense strand
ucacagcugaccaccagua

SEQ ID NO: 2018526 - RNA, 19 nt, Homo sapiens
  misc_RNA (1)...(19): siRNA sense strand
gccugaacccuaagaacua

SEQ ID NO: 2018527 - RNA, 19 nt, Homo sapiens
  misc_RNA (1)...(19): siRNA sense strand
gcaguuguuuuacagguuu

SEQ ID NO: 2018528 - RNA, 19 nt, Homo sapiens
  misc_RNA (1)...(19): siRNA sense strand
gaaaauuuaccaugaguuc

SEQ ID NO: 2018529 - RNA, 19 nt, Homo sapiens
  misc_RNA (1)...(19): siRNA sense strand
uugcauuccugguggguuu

SEQ ID NO: 2018530 - RNA, 19 nt, Homo sapiens
  misc_RNA (1)...(19): siRNA sense strand
ccaucauucucauugcauu

SEQ ID NO: 2018531 - RNA, 19 nt, Homo sapiens
  misc_RNA (1)...(19): siRNA sense strand
gcuugaaaauuuaccauga

SEQ ID NO: 2018532 - RNA, 19 nt, Homo sapiens
  misc_RNA (1)...(19): siRNA sense strand
ccugaacccuaagaacuau

SEQ ID NO: 2018533 - RNA, 19 nt, Homo sapiens
  misc_RNA (1)...(19): siRNA sense strand
cuaagaacuaugaagacua

SEQ ID NO: 2018534 - RNA, 19 nt, Homo sapiens
  misc_RNA (1)...(19): siRNA sense strand
uuugcagccugguccuuua

SEQ ID NO: 2018535 - RNA, 19 nt, Homo sapiens
  misc_RNA (1)...(19): siRNA sense strand
cuaugaagacuacuacuag

SEQ ID NO: 2018536 - RNA, 19 nt, Homo sapiens
  misc_RNA (1)...(19): siRNA sense strand
ccuaagaacuaugaagacu

SEQ ID NO: 2018537 - RNA, 19 nt, Homo sapiens
  misc_RNA (1)...(19): siRNA sense strand
aguacuaccugucguugug

SEQ ID NO: 2018538 - RNA, 19 nt, Homo sapiens
  misc_RNA (1)...(19): siRNA sense strand
gcgcugccaucauucucau

SEQ ID NO: 2018539 - RNA, 19 nt, Homo sapiens
  misc_RNA (1)...(19): siRNA sense strand
acuaugaagacuacuacua

SEQ ID NO: 2018540 - RNA, 19 nt, Homo sapiens
  misc_RNA (1)...(19): siRNA sense strand
ggccuggggugcaacuaua

SEQ ID NO: 2018541 - RNA, 19 nt, Homo sapiens
  misc_RNA (1)...(19): siRNA sense strand
gcugccaucauucucauug

SEQ ID NO: 2018542 - RNA, 19 nt, Homo sapiens
  misc_RNA (1)...(19): siRNA sense strand
ggggugccauccuuuauug

SEQ ID NO: 2018543 - RNA, 19 nt, Homo sapiens
  misc_RNA (1)...(19): siRNA sense strand
cugguggguuugauuucua

SEQ ID NO: 2018544 - RNA, 19 nt, Homo sapiens
  misc_RNA (1)...(19): siRNA sense strand
gaaacugugagcuugaaaa

SEQ ID NO: 2018545 - RNA, 19 nt, Homo sapiens
  misc_RNA (1)...(19): siRNA sense strand
agaacuaugaagacuacua

SEQ ID NO: 2018546 - RNA, 19 nt, Homo sapiens
  misc_RNA (1)...(19): siRNA sense strand
gcguuucuauagaccuguu

SEQ ID NO: 2018547 - RNA, 19 nt, Homo sapiens
  misc_RNA (1)...(19): siRNA sense strand
gcaaacccgccagcuugga

SEQ ID NO: 2018548 - RNA, 19 nt, Homo sapiens
  misc_RNA (1)...(19): siRNA sense strand
ugaacccuaagaacuauga

SEQ ID NO: 2018549 - RNA, 19 nt, Homo sapiens
  misc_RNA (1)...(19): siRNA sense strand
ucauugaaacugugagcuu

SEQ ID NO: 2018550 - RNA, 19 nt, Homo sapiens
  misc_RNA (1)...(19): siRNA sense strand
uugaaacugugagcuugaa

SEQ ID NO: 2018551 - RNA, 19 nt, Homo sapiens
  misc_RNA (1)...(19): siRNA sense strand
gcacaugucugggaggaua

SEQ ID NO: 2018552 - RNA, 19 nt, Homo sapiens
  misc_RNA (1)...(19): siRNA sense strand
ugacuucucuaaucaguua

SEQ ID NO: 2018553 - RNA, 19 nt, Homo sapiens
  misc_RNA (1)...(19): siRNA sense strand
gaaacaugguuauaagaug

SEQ ID NO: 2018554 - RNA, 19 nt, Homo sapiens
  misc_RNA (1)...(19): siRNA sense strand
gaggaugacuucucuaauc

SEQ ID NO: 2018555 - RNA, 19 nt, Homo sapiens
  misc_RNA (1)...(19): siRNA sense strand
gagcugaacuagagaaaca

SEQ ID NO: 2018556 - RNA, 19 nt, Homo sapiens
  misc_RNA (1)...(19): siRNA sense strand
guuauaagauggagacuuc

SEQ ID NO: 2018557 - RNA, 19 nt, Homo sapiens
  misc_RNA (1)...(19): siRNA sense strand
agacugggcuggcuuagau

SEQ ID NO: 2018558 - RNA, 19 nt, Homo sapiens
  misc_RNA (1)...(19): siRNA sense strand
uggcuuagaugaagaugaa

SEQ ID NO: 2018559 - RNA, 19 nt, Homo sapiens
  misc_RNA (1)...(19): siRNA sense strand
guuacgagcugaacuagag

SEQ ID NO: 2018560 - RNA, 19 nt, Homo sapiens
  misc_RNA (1)...(19): siRNA sense strand
gaggauaauugggaugaug

SEQ ID NO: 2018561 - RNA, 19 nt, Homo sapiens
  misc_RNA (1)...(19): siRNA sense strand
agagaaacaugguuauaag

SEQ ID NO: 2018562 - RNA, 19 nt, Homo sapiens
  misc_RNA (1)...(19): siRNA sense strand
gagaaacaugguuauaaga

SEQ ID NO: 2018563 - RNA, 19 nt, Homo sapiens
  misc_RNA (1)...(19): siRNA sense strand
gaacuagagaaacaugguu

SEQ ID NO: 2018564 - RNA, 19 nt, Homo sapiens
  misc_RNA (1)...(19): siRNA sense strand
gaugacuucucuaaucagu

SEQ ID NO: 2018565 - RNA, 19 nt, Homo sapiens
  misc_RNA (1)...(19): siRNA sense strand
caauguagaggaugacuuc

SEQ ID NO: 2018566 - RNA, 19 nt, Homo sapiens
  misc_RNA (1)...(19): siRNA sense strand
cgaagacugggcuggcuua

SEQ ID NO: 2018567 - RNA, 19 nt, Homo sapiens
  misc_RNA (1)...(19): siRNA sense strand
aggaugacuucucuaauca

SEQ ID NO: 2018568 - RNA, 19 nt, Homo sapiens
  misc_RNA (1)...(19): siRNA sense strand
cuagagaaacaugguuaua

SEQ ID NO: 2018569 - RNA, 19 nt, Homo sapiens
  misc_RNA (1)...(19): siRNA sense strand
agaugaagaugaagaugca

SEQ ID NO: 2018570 - RNA, 19 nt, Homo sapiens
  misc_RNA (1)...(19): siRNA sense strand
agaugaagaugcacauguc

SEQ ID NO: 2018571 - RNA, 19 nt, Homo sapiens
  misc_RNA (1)...(19): siRNA sense strand
gggaugaugacaauguaga

SEQ ID NO: 2018572 - RNA, 19 nt, Homo sapiens
  misc_RNA (1)...(19): siRNA sense strand
uaagauggagacuucauag

SEQ ID NO: 2018573 - RNA, 19 nt, Homo sapiens
  misc_RNA (1)...(19): siRNA sense strand
gggcuggcuuagaugaaga

SEQ ID NO: 2018574 - RNA, 19 nt, Homo sapiens
  misc_RNA (1)...(19): siRNA sense strand
gaagaugaagaugcacaug

SEQ ID NO: 2018575 - RNA, 19 nt, Homo sapiens
  misc_RNA (1)...(19): siRNA sense strand
gggaggauaauugggauga

SEQ ID NO: 2018576 - RNA, 19 nt, Homo sapiens
  misc_RNA (1)...(19): siRNA sense strand
ggaggauaauugggaugau

SEQ ID NO: 2018577 - RNA, 19 nt, Homo sapiens
  misc_RNA (1)...(19): siRNA sense strand
ugaugacaauguagaggau

SEQ ID NO: 2018578 - RNA, 19 nt, Homo sapiens
  misc_RNA (1)...(19): siRNA sense strand
auaagauggagacuucaua

SEQ ID NO: 2018579 - RNA, 19 nt, Homo sapiens
  misc_RNA (1)...(19): siRNA sense strand
uugggaugaugacaaugua

SEQ ID NO: 2018580 - RNA, 19 nt, Homo sapiens
  misc_RNA (1)...(19): siRNA sense strand
agaguucccugccgaagac

SEQ ID NO: 2018581 - RNA, 19 nt, Homo sapiens
  misc_RNA (1)...(19): siRNA sense strand
gcuuagaugaagaugaaga

SEQ ID NO: 2018582 - RNA, 19 nt, Homo sapiens
  misc_RNA (1)...(19): siRNA sense strand
aacuagagaaacaugguua

SEQ ID NO: 2018583 - RNA, 19 nt, Homo sapiens
  misc_RNA (1)...(19): siRNA sense strand
gaaaggacuuguucugauu

SEQ ID NO: 2018584 - RNA, 19 nt, Homo sapiens
  misc_RNA (1)...(19): siRNA sense strand
caacgucaaugauuucuuu

SEQ ID NO: 2018585 - RNA, 19 nt, Homo sapiens
  misc_RNA (1)...(19): siRNA sense strand
gaaauagcaucucaaagga

SEQ ID NO: 2018586 - RNA, 19 nt, Homo sapiens
  misc_RNA (1)...(19): siRNA sense strand
ucaaagaucgggauaaaua

SEQ ID NO: 2018587 - RNA, 19 nt, Homo sapiens
  misc_RNA (1)...(19): siRNA sense strand
gaaggucccugcacuccua

SEQ ID NO: 2018588 - RNA, 19 nt, Homo sapiens
  misc_RNA (1)...(19): siRNA sense strand
gaacauggaugcuuaucuc

SEQ ID NO: 2018589 - RNA, 19 nt, Homo sapiens
  misc_RNA (1)...(19): siRNA sense strand
ggaaaggacuuguucugau

SEQ ID NO: 2018590 - RNA, 19 nt, Homo sapiens
  misc_RNA (1)...(19): siRNA sense strand
gaaaugaggaacuuaauca

SEQ ID NO: 2018591 - RNA, 19 nt, Homo sapiens
  misc_RNA (1)...(19): siRNA sense strand
ggaaauagcaucucaaagg

SEQ ID NO: 2018592 - RNA, 19 nt, Homo sapiens
  misc_RNA (1)...(19): siRNA sense strand
gcagaucucagugaauuua

SEQ ID NO: 2018593 - RNA, 19 nt, Homo sapiens
  misc_RNA (1)...(19): siRNA sense strand
gagcauauauuccuagaac

SEQ ID NO: 2018594 - RNA, 19 nt, Homo sapiens
  misc_RNA (1)...(19): siRNA sense strand
gaaccaauaaugcuaagaa

SEQ ID NO: 2018595 - RNA, 19 nt, Homo sapiens
  misc_RNA (1)...(19): siRNA sense strand
guucaaagaucgggauaaa

SEQ ID NO: 2018596 - RNA, 19 nt, Homo sapiens
  misc_RNA (1)...(19): siRNA sense strand
gcgccaacgucaaugauuu

SEQ ID NO: 2018597 - RNA, 19 nt, Homo sapiens
  misc_RNA (1)...(19): siRNA sense strand
gcuaaacacagcagagaua

SEQ ID NO: 2018598 - RNA, 19 nt, Homo sapiens
  misc_RNA (1)...(19): siRNA sense strand
ggaaaauggugaaaacuug

SEQ ID NO: 2018599 - RNA, 19 nt, Homo sapiens
  misc_RNA (1)...(19): siRNA sense strand
ccacggacccugacauuga

SEQ ID NO: 2018600 - RNA, 19 nt, Homo sapiens
  misc_RNA (1)...(19): siRNA sense strand
gaagacagccaagacgaaa

SEQ ID NO: 2018601 - RNA, 19 nt, Homo sapiens
  misc_RNA (1)...(19): siRNA sense strand
cgucauggcuauuguaaag

SEQ ID NO: 2018602 - RNA, 19 nt, Homo sapiens
  misc_RNA (1)...(19): siRNA sense strand
uaaaggaaacccuaggaaa

SEQ ID NO: 2018603 - RNA, 19 nt, Homo sapiens
  misc_RNA (1)...(19): siRNA sense strand
gaagucauguucuugucau

SEQ ID NO: 2018604 - RNA, 19 nt, Homo sapiens
  misc_RNA (1)...(19): siRNA sense strand
uuacaggauugaagaaaga

SEQ ID NO: 2018605 - RNA, 19 nt, Homo sapiens
  misc_RNA (1)...(19): siRNA sense strand
ccuagaaccuugaaugaag

SEQ ID NO: 2018606 - RNA, 19 nt, Homo sapiens
  misc_RNA (1)...(19): siRNA sense strand
cgucaaugauuucuuuaug

SEQ ID NO: 2018607 - RNA, 19 nt, Homo sapiens
  misc_RNA (1)...(19): siRNA sense strand
ugucacagauccauccauu

SEQ ID NO: 2018608 - RNA, 19 nt, Homo sapiens
  misc_RNA (1)...(19): siRNA sense strand
ggaggcguguauaucauug

SEQ ID NO: 2018609 - RNA, 19 nt, Homo sapiens
  misc_RNA (1)...(19): siRNA sense strand
ugcgggagcucuuugaauu

SEQ ID NO: 2018610 - RNA, 19 nt, Homo sapiens
  misc_RNA (1)...(19): siRNA sense strand
augagaacauggaugcuua

SEQ ID NO: 2018611 - RNA, 19 nt, Homo sapiens
  misc_RNA (1)...(19): siRNA sense strand
ggccaugaaugcccaacaa

SEQ ID NO: 2018612 - RNA, 19 nt, Homo sapiens
  misc_RNA (1)...(19): siRNA sense strand
cauggaugcuuaucucuca

SEQ ID NO: 2018613 - RNA, 19 nt, Homo sapiens
  misc_RNA (1)...(19): siRNA sense strand
ccaauaaugcuaagaaguc

SEQ ID NO: 2018614 - RNA, 19 nt, Homo sapiens
  misc_RNA (1)...(19): siRNA sense strand
caauaaugcuaagaaguca

SEQ ID NO: 2018615 - RNA, 19 nt, Homo sapiens
  misc_RNA (1)...(19): siRNA sense strand
guaaaggaaacccuaggaa

SEQ ID NO: 2018616 - RNA, 19 nt, Homo sapiens
  misc_RNA (1)...(19): siRNA sense strand
ccaaggcucgggaguugua

SEQ ID NO: 2018617 - RNA, 19 nt, Homo sapiens
  misc_RNA (1)...(19): siRNA sense strand
gagauaccauguccagaac

SEQ ID NO: 2018618 - RNA, 19 nt, Homo sapiens
  misc_RNA (1)...(19): siRNA sense strand
caaagaucgggauaaauau

SEQ ID NO: 2018619 - RNA, 19 nt, Homo sapiens
  misc_RNA (1)...(19): siRNA sense strand
ccagaaccaauaaugcuaa

SEQ ID NO: 2018620 - RNA, 19 nt, Homo sapiens
  misc_RNA (1)...(19): siRNA sense strand
ugaaugcccaacaagauaa

SEQ ID NO: 2018621 - RNA, 19 nt, Homo sapiens
  misc_RNA (1)...(19): siRNA sense strand
ggaacuuaaucaggcuaaa

SEQ ID NO: 2018622 - RNA, 19 nt, Homo sapiens
  misc_RNA (1)...(19): siRNA sense strand
uagccaagaucauguggau

SEQ ID NO: 2018623 - RNA, 19 nt, Homo sapiens
  misc_RNA (1)...(19): siRNA sense strand
ucacagauccauccauuac

SEQ ID NO: 2018624 - RNA, 19 nt, Homo sapiens
  misc_RNA (1)...(19): siRNA sense strand
cgggagcucuuugaauuug

SEQ ID NO: 2018625 - RNA, 19 nt, Homo sapiens
  misc_RNA (1)...(19): siRNA sense strand
augcagaucucagugaauu

SEQ ID NO: 2018626 - RNA, 19 nt, Homo sapiens
  misc_RNA (1)...(19): siRNA sense strand
ccaugcagaucucagugaa

SEQ ID NO: 2018627 - RNA, 19 nt, Homo sapiens
  misc_RNA (1)...(19): siRNA sense strand
agagauaccauguccagaa

SEQ ID NO: 2018628 - RNA, 19 nt, Homo sapiens
  misc_RNA (1)...(19): siRNA sense strand
gcgagcauauauuccuaga

SEQ ID NO: 2018629 - RNA, 19 nt, Homo sapiens
  misc_RNA (1)...(19): siRNA sense strand
ccauggaaauagcaucuca

SEQ ID NO: 2018630 - RNA, 19 nt, Homo sapiens
  misc_RNA (1)...(19): siRNA sense strand
caaaggccauggaaauagc

SEQ ID NO: 2018631 - RNA, 19 nt, Homo sapiens
  misc_RNA (1)...(19): siRNA sense strand
gguggaggcguguauauca

SEQ ID NO: 2018632 - RNA, 19 nt, Homo sapiens
  misc_RNA (1)...(19): siRNA sense strand
gcaggucauucaguacaug

SEQ ID NO: 2018633 - RNA, 19 nt, Homo sapiens
  misc_RNA (1)...(19): siRNA sense strand
gagaagaauguaucaggau

SEQ ID NO: 2018634 - RNA, 19 nt, Homo sapiens
  misc_RNA (1)...(19): siRNA sense strand
aaccuugaaugaagugaaa

SEQ ID NO: 2018635 - RNA, 19 nt, Homo sapiens
  misc_RNA (1)...(19): siRNA sense strand
auauguaaguggagaauuc

SEQ ID NO: 2018636 - RNA, 19 nt, Homo sapiens
  misc_RNA (1)...(19): siRNA sense strand
ccacaugccuuggaguucu

SEQ ID NO: 2018637 - RNA, 19 nt, Homo sapiens
  misc_RNA (1)...(19): siRNA sense strand
ucucaaaggccauggaaau

SEQ ID NO: 2018638 - RNA, 19 nt, Homo sapiens
  misc_RNA (1)...(19): siRNA sense strand
ucaaggaagcccagagaga

SEQ ID NO: 2018639 - RNA, 19 nt, Homo sapiens
  misc_RNA (1)...(19): siRNA sense strand
gaggaaaggacuuguucug

SEQ ID NO: 2018640 - RNA, 19 nt, Homo sapiens
  misc_RNA (1)...(19): siRNA sense strand
ucauggcuauuguaaagga

SEQ ID NO: 2018641 - RNA, 19 nt, Homo sapiens
  misc_RNA (1)...(19): siRNA sense strand
gaaccuugaaugaagugaa

SEQ ID NO: 2018642 - RNA, 19 nt, Homo sapiens
  misc_RNA (1)...(19): siRNA sense strand
gaucgggauaaauauguaa

SEQ ID NO: 2018643 - RNA, 19 nt, Homo sapiens
  misc_RNA (1)...(19): siRNA sense strand
ggucaaggaagcccagaga

SEQ ID NO: 2018644 - RNA, 19 nt, Homo sapiens
  misc_RNA (1)...(19): siRNA sense strand
gaaagauuugucaggaguu

SEQ ID NO: 2018645 - RNA, 19 nt, Homo sapiens
  misc_RNA (1)...(19): siRNA sense strand
caggauugaagaaagauuu

SEQ ID NO: 2018646 - RNA, 19 nt, Homo sapiens
  misc_RNA (1)...(19): siRNA sense strand
guuacaggauugaagaaag

SEQ ID NO: 2018647 - RNA, 19 nt, Homo sapiens
  misc_RNA (1)...(19): siRNA sense strand
gauaccauguccagaacca

SEQ ID NO: 2018648 - RNA, 19 nt, Homo sapiens
  misc_RNA (1)...(19): siRNA sense strand
gcgggagcucuuugaauuu

SEQ ID NO: 2018649 - RNA, 19 nt, Homo sapiens
  misc_RNA (1)...(19): siRNA sense strand
guauaucauugacgugucu

SEQ ID NO: 2018650 - RNA, 19 nt, Homo sapiens
  misc_RNA (1)...(19): siRNA sense strand
gauauuggaagcucugagu

SEQ ID NO: 2018651 - RNA, 19 nt, Homo sapiens
  misc_RNA (1)...(19): siRNA sense strand
ucaaaggaccaaggaagaa

SEQ ID NO: 2018652 - RNA, 19 nt, Homo sapiens
  misc_RNA (1)...(19): siRNA sense strand
guaucaggaugccagacuu

SEQ ID NO: 2018653 - RNA, 19 nt, Homo sapiens
  misc_RNA (1)...(19): siRNA sense strand
caugaaugcccaacaagau

SEQ ID NO: 2018654 - RNA, 19 nt, Homo sapiens
  misc_RNA (1)...(19): siRNA sense strand
gaaaggauugcgccaacgu

SEQ ID NO: 2018655 - RNA, 19 nt, Homo sapiens
  misc_RNA (1)...(19): siRNA sense strand
caaaauuccuaaacaugug

SEQ ID NO: 2018656 - RNA, 19 nt, Homo sapiens
  misc_RNA (1)...(19): siRNA sense strand
aagcgagcauauauuccua

SEQ ID NO: 2018657 - RNA, 19 nt, Homo sapiens
  misc_RNA (1)...(19): siRNA sense strand
agaucgggauaaauaugua

SEQ ID NO: 2018658 - RNA, 19 nt, Homo sapiens
  misc_RNA (1)...(19): siRNA sense strand
ggagcucuuugaauuuguc

SEQ ID NO: 2018659 - RNA, 19 nt, Homo sapiens
  misc_RNA (1)...(19): siRNA sense strand
gagcacgaccacccacaug

SEQ ID NO: 2018660 - RNA, 19 nt, Homo sapiens
  misc_RNA (1)...(19): siRNA sense strand
gaacuuaaucaggcuaaac

SEQ ID NO: 2018661 - RNA, 19 nt, Homo sapiens
  misc_RNA (1)...(19): siRNA sense strand
cuagaaccuugaaugaagu

SEQ ID NO: 2018662 - RNA, 19 nt, Homo sapiens
  misc_RNA (1)...(19): siRNA sense strand
uggaugaagagguguuuaa

SEQ ID NO: 2018663 - RNA, 19 nt, Homo sapiens
  misc_RNA (1)...(19): siRNA sense strand
ucaaaggccauggaaauag

SEQ ID NO: 2018664 - RNA, 19 nt, Homo sapiens
  misc_RNA (1)...(19): siRNA sense strand
aaagaucgggauaaauaug

SEQ ID NO: 2018665 - RNA, 19 nt, Homo sapiens
  misc_RNA (1)...(19): siRNA sense strand
aaagauuugucaggaguuc

SEQ ID NO: 2018666 - RNA, 19 nt, Homo sapiens
  misc_RNA (1)...(19): siRNA sense strand
ggugaaaacuugggcagaa

SEQ ID NO: 2018667 - RNA, 19 nt, Homo sapiens
  misc_RNA (1)...(19): siRNA sense strand
gaucucagugaauuuaaca

SEQ ID NO: 2018668 - RNA, 19 nt, Homo sapiens
  misc_RNA (1)...(19): siRNA sense strand
agaacggucuagccaagau

SEQ ID NO: 2018669 - RNA, 19 nt, Homo sapiens
  misc_RNA (1)...(19): siRNA sense strand
cgggauaaauauguaagug

SEQ ID NO: 2018670 - RNA, 19 nt, Homo sapiens
  misc_RNA (1)...(19): siRNA sense strand
ccaugaaugcccaacaaga

SEQ ID NO: 2018671 - RNA, 19 nt, Homo sapiens
  misc_RNA (1)...(19): siRNA sense strand
guucuugucaugaguuuca

SEQ ID NO: 2018672 - RNA, 19 nt, Homo sapiens
  misc_RNA (1)...(19): siRNA sense strand
ugucaggaguucagaaggu

SEQ ID NO: 2018673 - RNA, 19 nt, Homo sapiens
  misc_RNA (1)...(19): siRNA sense strand
ugaguuucaucgguaaaga

SEQ ID NO: 2018674 - RNA, 19 nt, Homo sapiens
  misc_RNA (1)...(19): siRNA sense strand
ggaagcccagagagagaaa

SEQ ID NO: 2018675 - RNA, 19 nt, Homo sapiens
  misc_RNA (1)...(19): siRNA sense strand
ggacccugacauugauaaa

SEQ ID NO: 2018676 - RNA, 19 nt, Homo sapiens
  misc_RNA (1)...(19): siRNA sense strand
aaaggaaacccuaggaaaa

SEQ ID NO: 2018677 - RNA, 19 nt, Homo sapiens
  misc_RNA (1)...(19): siRNA sense strand
cucaaaggccauggaaaua

SEQ ID NO: 2018678 - RNA, 19 nt, Homo sapiens
  misc_RNA (1)...(19): siRNA sense strand
augaaugcccaacaagaua

SEQ ID NO: 2018679 - RNA, 19 nt, Homo sapiens
  misc_RNA (1)...(19): siRNA sense strand
auccauccauuacacauga

SEQ ID NO: 2018680 - RNA, 19 nt, Homo sapiens
  misc_RNA (1)...(19): siRNA sense strand
gcccaacaagauaauauuc

SEQ ID NO: 2018681 - RNA, 19 nt, Homo sapiens
  misc_RNA (1)...(19): siRNA sense strand
cacggacccugacauugau

SEQ ID NO: 2018682 - RNA, 19 nt, Homo sapiens
  misc_RNA (1)...(19): siRNA sense strand
agaagacagccaagacgaa

SEQ ID NO: 2018683 - RNA, 19 nt, Homo sapiens
  misc_RNA (1)...(19): siRNA sense strand
gaaaggacuuguucugauu

SEQ ID NO: 2018684 - RNA, 19 nt, Homo sapiens
  misc_RNA (1)...(19): siRNA sense strand
caacgucaaugauuucuuu

SEQ ID NO: 2018685 - RNA, 19 nt, Homo sapiens
  misc_RNA (1)...(19): siRNA sense strand
gaaauagcaucucaaagga

SEQ ID NO: 2018686 - RNA, 19 nt, Homo sapiens
  misc_RNA (1)...(19): siRNA sense strand
gaaggucccugcacuccua

SEQ ID NO: 2018687 - RNA, 19 nt, Homo sapiens
  misc_RNA (1)...(19): siRNA sense strand
gaacauggaugcuuaucuc

SEQ ID NO: 2018688 - RNA, 19 nt, Homo sapiens
  misc_RNA (1)...(19): siRNA sense strand
ggaaaggacuuguucugau

SEQ ID NO: 2018689 - RNA, 19 nt, Homo sapiens
  misc_RNA (1)...(19): siRNA sense strand
gaaaugaggaacuuaauca

SEQ ID NO: 2018690 - RNA, 19 nt, Homo sapiens
  misc_RNA (1)...(19): siRNA sense strand
ggaaauagcaucucaaagg

SEQ ID NO: 2018691 - RNA, 19 nt, Homo sapiens
  misc_RNA (1)...(19): siRNA sense strand
gcagaucucagugaauuua

SEQ ID NO: 2018692 - RNA, 19 nt, Homo sapiens
  misc_RNA (1)...(19): siRNA sense strand
gagcauauauuccuagaac

SEQ ID NO: 2018693 - RNA, 19 nt, Homo sapiens
  misc_RNA (1)...(19): siRNA sense strand
gaaccaauaaugcuaagaa

SEQ ID NO: 2018694 - RNA, 19 nt, Homo sapiens
  misc_RNA (1)...(19): siRNA sense strand
gcgccaacgucaaugauuu

SEQ ID NO: 2018695 - RNA, 19 nt, Homo sapiens
  misc_RNA (1)...(19): siRNA sense strand
gcuaaacacagcagagaua

SEQ ID NO: 2018696 - RNA, 19 nt, Homo sapiens
  misc_RNA (1)...(19): siRNA sense strand
ccacggacccugacauuga

SEQ ID NO: 2018697 - RNA, 19 nt, Homo sapiens
  misc_RNA (1)...(19): siRNA sense strand
gaagacagccaagacgaaa

SEQ ID NO: 2018698 - RNA, 19 nt, Homo sapiens
  misc_RNA (1)...(19): siRNA sense strand
gaagucauguucuugucau

SEQ ID NO: 2018699 - RNA, 19 nt, Homo sapiens
  misc_RNA (1)...(19): siRNA sense strand
uuacaggauugaagaaaga

SEQ ID NO: 2018700 - RNA, 19 nt, Homo sapiens
  misc_RNA (1)...(19): siRNA sense strand
ccuagaaccuugaaugaag

SEQ ID NO: 2018701 - RNA, 19 nt, Homo sapiens
  misc_RNA (1)...(19): siRNA sense strand
cgucaaugauuucuuuaug

SEQ ID NO: 2018702 - RNA, 19 nt, Homo sapiens
  misc_RNA (1)...(19): siRNA sense strand
ugucacagauccauccauu

SEQ ID NO: 2018703 - RNA, 19 nt, Homo sapiens
  misc_RNA (1)...(19): siRNA sense strand
ggaggcguguauaucauug

SEQ ID NO: 2018704 - RNA, 19 nt, Homo sapiens
  misc_RNA (1)...(19): siRNA sense strand
ugcgggagcucuuugaauu

SEQ ID NO: 2018705 - RNA, 19 nt, Homo sapiens
  misc_RNA (1)...(19): siRNA sense strand
augagaacauggaugcuua

SEQ ID NO: 2018706 - RNA, 19 nt, Homo sapiens
  misc_RNA (1)...(19): siRNA sense strand
ggccaugaaugcccaacaa

SEQ ID NO: 2018707 - RNA, 19 nt, Homo sapiens
  misc_RNA (1)...(19): siRNA sense strand
cauggaugcuuaucucuca

SEQ ID NO: 2018708 - RNA, 19 nt, Homo sapiens
  misc_RNA (1)...(19): siRNA sense strand
ccaauaaugcuaagaaguc

SEQ ID NO: 2018709 - RNA, 19 nt, Homo sapiens
  misc_RNA (1)...(19): siRNA sense strand
caauaaugcuaagaaguca

SEQ ID NO: 2018710 - RNA, 19 nt, Homo sapiens
  misc_RNA (1)...(19): siRNA sense strand
ccaaggcucgggaguugua

SEQ ID NO: 2018711 - RNA, 19 nt, Homo sapiens
  misc_RNA (1)...(19): siRNA sense strand
gagauaccauguccagaac

SEQ ID NO: 2018712 - RNA, 19 nt, Homo sapiens
  misc_RNA (1)...(19): siRNA sense strand
ccagaaccaauaaugcuaa

SEQ ID NO: 2018713 - RNA, 19 nt, Homo sapiens
  misc_RNA (1)...(19): siRNA sense strand
ugaaugcccaacaagauaa

SEQ ID NO: 2018714 - RNA, 19 nt, Homo sapiens
  misc_RNA (1)...(19): siRNA sense strand
ccaugcagaucucagugaa

SEQ ID NO: 2018715 - RNA, 19 nt, Homo sapiens
  misc_RNA (1)...(19): siRNA sense strand
uagccaagaucauguggau

SEQ ID NO: 2018716 - RNA, 19 nt, Homo sapiens
  misc_RNA (1)...(19): siRNA sense strand
ggaacuuaaucaggcuaaa

SEQ ID NO: 2018717 - RNA, 19 nt, Homo sapiens
  misc_RNA (1)...(19): siRNA sense strand
ucacagauccauccauuac

SEQ ID NO: 2018718 - RNA, 19 nt, Homo sapiens
  misc_RNA (1)...(19): siRNA sense strand
cgggagcucuuugaauuug

SEQ ID NO: 2018719 - RNA, 19 nt, Homo sapiens
  misc_RNA (1)...(19): siRNA sense strand
augcagaucucagugaauu

SEQ ID NO: 2018720 - RNA, 19 nt, Homo sapiens
  misc_RNA (1)...(19): siRNA sense strand
gcaggucauucaguacaug

SEQ ID NO: 2018721 - RNA, 19 nt, Homo sapiens
  misc_RNA (1)...(19): siRNA sense strand
gcgagcauauauuccuaga

SEQ ID NO: 2018722 - RNA, 19 nt, Homo sapiens
  misc_RNA (1)...(19): siRNA sense strand
ccauggaaauagcaucuca

SEQ ID NO: 2018723 - RNA, 19 nt, Homo sapiens
  misc_RNA (1)...(19): siRNA sense strand
caaaggccauggaaauagc

SEQ ID NO: 2018724 - RNA, 19 nt, Homo sapiens
  misc_RNA (1)...(19): siRNA sense strand
agagauaccauguccagaa

SEQ ID NO: 2018725 - RNA, 19 nt, Homo sapiens
  misc_RNA (1)...(19): siRNA sense strand
gguggaggcguguauauca

SEQ ID NO: 2018726 - RNA, 19 nt, Homo sapiens
  misc_RNA (1)...(19): siRNA sense strand
gagaagaauguaucaggau

SEQ ID NO: 2018727 - RNA, 19 nt, Homo sapiens
  misc_RNA (1)...(19): siRNA sense strand
aaccuugaaugaagugaaa

SEQ ID NO: 2018728 - RNA, 19 nt, Homo sapiens
  misc_RNA (1)...(19): siRNA sense strand
ccacaugccuuggaguucu

SEQ ID NO: 2018729 - RNA, 19 nt, Homo sapiens
  misc_RNA (1)...(19): siRNA sense strand
ucucaaaggccauggaaau

SEQ ID NO: 2018730 - RNA, 19 nt, Homo sapiens
  misc_RNA (1)...(19): siRNA sense strand
ucaaggaagcccagagaga

SEQ ID NO: 2018731 - RNA, 19 nt, Homo sapiens
  misc_RNA (1)...(19): siRNA sense strand
gaggaaaggacuuguucug

SEQ ID NO: 2018732 - RNA, 19 nt, Homo sapiens
  misc_RNA (1)...(19): siRNA sense strand
gaaccuugaaugaagugaa

SEQ ID NO: 2018733 - RNA, 19 nt, Homo sapiens
  misc_RNA (1)...(19): siRNA sense strand
guuacaggauugaagaaag

SEQ ID NO: 2018734 - RNA, 19 nt, Homo sapiens
  misc_RNA (1)...(19): siRNA sense strand
ggucaaggaagcccagaga

SEQ ID NO: 2018735 - RNA, 19 nt, Homo sapiens
  misc_RNA (1)...(19): siRNA sense strand
gaaagauuugucaggaguu

SEQ ID NO: 2018736 - RNA, 19 nt, Homo sapiens
  misc_RNA (1)...(19): siRNA sense strand
caggauugaagaaagauuu

SEQ ID NO: 2018737 - RNA, 19 nt, Homo sapiens
  misc_RNA (1)...(19): siRNA sense strand
gcgggagcucuuugaauuu

SEQ ID NO: 2018738 - RNA, 19 nt, Homo sapiens
  misc_RNA (1)...(19): siRNA sense strand
gauaccauguccagaacca

SEQ ID NO: 2018739 - RNA, 19 nt, Homo sapiens
  misc_RNA (1)...(19): siRNA sense strand
guauaucauugacgugucu

SEQ ID NO: 2018740 - RNA, 19 nt, Homo sapiens
  misc_RNA (1)...(19): siRNA sense strand
gauauuggaagcucugagu

SEQ ID NO: 2018741 - RNA, 19 nt, Homo sapiens
  misc_RNA (1)...(19): siRNA sense strand
ucaaaggaccaaggaagaa

SEQ ID NO: 2018742 - RNA, 19 nt, Homo sapiens
  misc_RNA (1)...(19): siRNA sense strand
guaucaggaugccagacuu

SEQ ID NO: 2018743 - RNA, 19 nt, Homo sapiens
  misc_RNA (1)...(19): siRNA sense strand
caugaaugcccaacaagau

SEQ ID NO: 2018744 - RNA, 19 nt, Homo sapiens
  misc_RNA (1)...(19): siRNA sense strand
gaaaggauugcgccaacgu

SEQ ID NO: 2018745 - RNA, 19 nt, Homo sapiens
  misc_RNA (1)...(19): siRNA sense strand
caaaauuccuaaacaugug

SEQ ID NO: 2018746 - RNA, 19 nt, Homo sapiens
  misc_RNA (1)...(19): siRNA sense strand
aagcgagcauauauuccua

SEQ ID NO: 2018747 - RNA, 19 nt, Homo sapiens
  misc_RNA (1)...(19): siRNA sense strand
ggagcucuuugaauuuguc

SEQ ID NO: 2018748 - RNA, 19 nt, Homo sapiens
  misc_RNA (1)...(19): siRNA sense strand
gaacuuaaucaggcuaaac

SEQ ID NO: 2018749 - RNA, 19 nt, Homo sapiens
  misc_RNA (1)...(19): siRNA sense strand
cuagaaccuugaaugaagu

SEQ ID NO: 2018750 - RNA, 19 nt, Homo sapiens
  misc_RNA (1)...(19): siRNA sense strand
uggaugaagagguguuuaa

SEQ ID NO: 2018751 - RNA, 19 nt, Homo sapiens
  misc_RNA (1)...(19): siRNA sense strand
ucaaaggccauggaaauag

SEQ ID NO: 2018752 - RNA, 19 nt, Homo sapiens
  misc_RNA (1)...(19): siRNA sense strand
gagcacgaccacccacaug

SEQ ID NO: 2018753 - RNA, 19 nt, Homo sapiens
  misc_RNA (1)...(19): siRNA sense strand
gaucucagugaauuuaaca

SEQ ID NO: 2018754 - RNA, 19 nt, Homo sapiens
  misc_RNA (1)...(19): siRNA sense strand
ggugaaaacuugggcagaa

SEQ ID NO: 2018755 - RNA, 19 nt, Homo sapiens
  misc_RNA (1)...(19): siRNA sense strand
aaagauuugucaggaguuc

SEQ ID NO: 2018756 - RNA, 19 nt, Homo sapiens
  misc_RNA (1)...(19): siRNA sense strand
agaacggucuagccaagau

SEQ ID NO: 2018757 - RNA, 19 nt, Homo sapiens
  misc_RNA (1)...(19): siRNA sense strand
ccaugaaugcccaacaaga

SEQ ID NO: 2018758 - RNA, 19 nt, Homo sapiens
  misc_RNA (1)...(19): siRNA sense strand
guucuugucaugaguuuca

SEQ ID NO: 2018759 - RNA, 19 nt, Homo sapiens
  misc_RNA (1)...(19): siRNA sense strand
ugucaggaguucagaaggu

SEQ ID NO: 2018760 - RNA, 19 nt, Homo sapiens
  misc_RNA (1)...(19): siRNA sense strand
ugaguuucaucgguaaaga

SEQ ID NO: 2018761 - RNA, 19 nt, Homo sapiens
  misc_RNA (1)...(19): siRNA sense strand
ggaagcccagagagagaaa

SEQ ID NO: 2018762 - RNA, 19 nt, Homo sapiens
  misc_RNA (1)...(19): siRNA sense strand
ggacccugacauugauaaa

SEQ ID NO: 2018763 - RNA, 19 nt, Homo sapiens
  misc_RNA (1)...(19): siRNA sense strand
cucaaaggccauggaaaua

SEQ ID NO: 2018764 - RNA, 19 nt, Homo sapiens
  misc_RNA (1)...(19): siRNA sense strand
augaaugcccaacaagaua

SEQ ID NO: 2018765 - RNA, 19 nt, Homo sapiens
  misc_RNA (1)...(19): siRNA sense strand
auccauccauuacacauga

SEQ ID NO: 2018766 - RNA, 19 nt, Homo sapiens
  misc_RNA (1)...(19): siRNA sense strand
gcccaacaagauaauauuc

SEQ ID NO: 2018767 - RNA, 19 nt, Homo sapiens
  misc_RNA (1)...(19): siRNA sense strand
ucagugaauuuaacaugcu

SEQ ID NO: 2018768 - RNA, 19 nt, Homo sapiens
  misc_RNA (1)...(19): siRNA sense strand
agaagacagccaagacgaa

SEQ ID NO: 2018769 - RNA, 19 nt, Homo sapiens
  misc_RNA (1)...(19): siRNA sense strand
cacggacccugacauugau

SEQ ID NO: 2018770 - RNA, 19 nt, Homo sapiens
  misc_RNA (1)...(19): siRNA sense strand
aaacacagcagagauacca

SEQ ID NO: 2018771 - RNA, 19 nt, Homo sapiens
  misc_RNA (1)...(19): siRNA sense strand
uuuaagcgagcauauauuc

SEQ ID NO: 2018772 - RNA, 19 nt, Homo sapiens
  misc_RNA (1)...(19): siRNA sense strand
gauccauccauuacacaug

SEQ ID NO: 2018773 - RNA, 19 nt, Homo sapiens
  misc_RNA (1)...(19): siRNA sense strand
guggaggcguguauaucau

SEQ ID NO: 2018774 - RNA, 19 nt, Homo sapiens
  misc_RNA (1)...(19): siRNA sense strand
caccacggacccugacauu

SEQ ID NO: 2018775 - RNA, 19 nt, Homo sapiens
  misc_RNA (1)...(19): siRNA sense strand
gaagcucugagugcucuga

SEQ ID NO: 2018776 - RNA, 19 nt, Homo sapiens
  misc_RNA (1)...(19): siRNA sense strand
gaaugcccaacaagauaau

SEQ ID NO: 2018777 - RNA, 19 nt, Homo sapiens
  misc_RNA (1)...(19): siRNA sense strand
ccauguccagaaccaauaa

SEQ ID NO: 2018778 - RNA, 19 nt, Homo sapiens
  misc_RNA (1)...(19): siRNA sense strand
uguuuaagcgagcauauau

SEQ ID NO: 2018779 - RNA, 19 nt, Homo sapiens
  misc_RNA (1)...(19): siRNA sense strand
ggaugcuuaucucucaaag

SEQ ID NO: 2018780 - RNA, 19 nt, Homo sapiens
  misc_RNA (1)...(19): siRNA sense strand
ucuuugaauuugucacaga

SEQ ID NO: 2018781 - RNA, 19 nt, Homo sapiens
  misc_RNA (1)...(19): siRNA sense strand
gcauauauuccuagaaccu

SEQ ID NO: 2018782 - RNA, 19 nt, Homo sapiens
  misc_RNA (1)...(19): siRNA sense strand
gaaaaucaaguggaggaaa

SEQ ID NO: 2018783 - RNA, 19 nt, Homo sapiens
  misc_RNA (1)...(19): siRNA sense strand
ggacggagauuacaucaau

SEQ ID NO: 2018784 - RNA, 19 nt, Homo sapiens
  misc_RNA (1)...(19): siRNA sense strand
gaacccaucugcucuguga

SEQ ID NO: 2018785 - RNA, 19 nt, Homo sapiens
  misc_RNA (1)...(19): siRNA sense strand
ggagaaauguguccacuac

SEQ ID NO: 2018786 - RNA, 19 nt, Homo sapiens
  misc_RNA (1)...(19): siRNA sense strand
ccaagcaacuggaagaaga

SEQ ID NO: 2018787 - RNA, 19 nt, Homo sapiens
  misc_RNA (1)...(19): siRNA sense strand
ggaggucacccuacacuuu

SEQ ID NO: 2018788 - RNA, 19 nt, Homo sapiens
  misc_RNA (1)...(19): siRNA sense strand
gcacagccguugaccuugu

SEQ ID NO: 2018789 - RNA, 19 nt, Homo sapiens
  misc_RNA (1)...(19): siRNA sense strand
ugaaagagugcccagaaua

SEQ ID NO: 2018790 - RNA, 19 nt, Homo sapiens
  misc_RNA (1)...(19): siRNA sense strand
gcugaaagcccgaggagaa

SEQ ID NO: 2018791 - RNA, 19 nt, Homo sapiens
  misc_RNA (1)...(19): siRNA sense strand
gagcacagccguugaccuu

SEQ ID NO: 2018792 - RNA, 19 nt, Homo sapiens
  misc_RNA (1)...(19): siRNA sense strand
gaaagagugcccagaauac

SEQ ID NO: 2018793 - RNA, 19 nt, Homo sapiens
  misc_RNA (1)...(19): siRNA sense strand
gaaggagaaggucuacauu

SEQ ID NO: 2018794 - RNA, 19 nt, Homo sapiens
  misc_RNA (1)...(19): siRNA sense strand
gcaacuggaagaagaauuc

SEQ ID NO: 2018795 - RNA, 19 nt, Homo sapiens
  misc_RNA (1)...(19): siRNA sense strand
ggaaggagaaggucuacau

SEQ ID NO: 2018796 - RNA, 19 nt, Homo sapiens
  misc_RNA (1)...(19): siRNA sense strand
gaagugucccucauuguca

SEQ ID NO: 2018797 - RNA, 19 nt, Homo sapiens
  misc_RNA (1)...(19): siRNA sense strand
ccacagaagaggaaaccua

SEQ ID NO: 2018798 - RNA, 19 nt, Homo sapiens
  misc_RNA (1)...(19): siRNA sense strand
agaaauguguccacuacug

SEQ ID NO: 2018799 - RNA, 19 nt, Homo sapiens
  misc_RNA (1)...(19): siRNA sense strand
ggaagugucccucauuguc

SEQ ID NO: 2018800 - RNA, 19 nt, Homo sapiens
  misc_RNA (1)...(19): siRNA sense strand
uuacaucaaugccaacuac

SEQ ID NO: 2018801 - RNA, 19 nt, Homo sapiens
  misc_RNA (1)...(19): siRNA sense strand
cggcagagcaguaccaguu

SEQ ID NO: 2018802 - RNA, 19 nt, Homo sapiens
  misc_RNA (1)...(19): siRNA sense strand
caugaaagagugcccagaa

SEQ ID NO: 2018803 - RNA, 19 nt, Homo sapiens
  misc_RNA (1)...(19): siRNA sense strand
gccaggaggacggagauua

SEQ ID NO: 2018804 - RNA, 19 nt, Homo sapiens
  misc_RNA (1)...(19): siRNA sense strand
gagagggcaaggagaaaug

SEQ ID NO: 2018805 - RNA, 19 nt, Homo sapiens
  misc_RNA (1)...(19): siRNA sense strand
gaggucacccuacacuuuc

SEQ ID NO: 2018806 - RNA, 19 nt, Homo sapiens
  misc_RNA (1)...(19): siRNA sense strand
gaaagcccgaggagaagug

SEQ ID NO: 2018807 - RNA, 19 nt, Homo sapiens
  misc_RNA (1)...(19): siRNA sense strand
ggaggacggagauuacauc

SEQ ID NO: 2018808 - RNA, 19 nt, Homo sapiens
  misc_RNA (1)...(19): siRNA sense strand
gcuaugacgggaaggagaa

SEQ ID NO: 2018809 - RNA, 19 nt, Homo sapiens
  misc_RNA (1)...(19): siRNA sense strand
caacuacauccgaggcuau

SEQ ID NO: 2018810 - RNA, 19 nt, Homo sapiens
  misc_RNA (1)...(19): siRNA sense strand
gcuccaauguggcucugau

SEQ ID NO: 2018811 - RNA, 19 nt, Homo sapiens
  misc_RNA (1)...(19): siRNA sense strand
cagaagaggaaaccuaugg

SEQ ID NO: 2018812 - RNA, 19 nt, Homo sapiens
  misc_RNA (1)...(19): siRNA sense strand
gggagaugguguggcaaga

SEQ ID NO: 2018813 - RNA, 19 nt, Homo sapiens
  misc_RNA (1)...(19): siRNA sense strand
gcauccaggacaugaaaga

SEQ ID NO: 2018814 - RNA, 19 nt, Homo sapiens
  misc_RNA (1)...(19): siRNA sense strand
caagcaacuggaagaagaa

SEQ ID NO: 2018815 - RNA, 19 nt, Homo sapiens
  misc_RNA (1)...(19): siRNA sense strand
caucaaugccaacuacauc

SEQ ID NO: 2018816 - RNA, 19 nt, Homo sapiens
  misc_RNA (1)...(19): siRNA sense strand
cacagaagaggaaaccuau

SEQ ID NO: 2018817 - RNA, 19 nt, Homo sapiens
  misc_RNA (1)...(19): siRNA sense strand
ccguugaccuugucuuugg

SEQ ID NO: 2018818 - RNA, 19 nt, Homo sapiens
  misc_RNA (1)...(19): siRNA sense strand
gacggagauuacaucaaug

SEQ ID NO: 2018819 - RNA, 19 nt, Homo sapiens
  misc_RNA (1)...(19): siRNA sense strand
gaccaucagacaccagaau

SEQ ID NO: 2018820 - RNA, 19 nt, Homo sapiens
  misc_RNA (1)...(19): siRNA sense strand
caguaaagcacauccucuu

SEQ ID NO: 2018821 - RNA, 19 nt, Homo sapiens
  misc_RNA (1)...(19): siRNA sense strand
aggagaaggucuacauugc

SEQ ID NO: 2018822 - RNA, 19 nt, Homo sapiens
  misc_RNA (1)...(19): siRNA sense strand
aaggagaaggucuacauug

SEQ ID NO: 2018823 - RNA, 19 nt, Homo sapiens
  misc_RNA (1)...(19): siRNA sense strand
ccacgcgaauuggcuguca

SEQ ID NO: 2018824 - RNA, 19 nt, Homo sapiens
  misc_RNA (1)...(19): siRNA sense strand
aaguggacauucuggguau

SEQ ID NO: 2018825 - RNA, 19 nt, Homo sapiens
  misc_RNA (1)...(19): siRNA sense strand
gaugguguggcaagaggaa

SEQ ID NO: 2018826 - RNA, 19 nt, Homo sapiens
  misc_RNA (1)...(19): siRNA sense strand
gacauucuggguauugugu

SEQ ID NO: 2018827 - RNA, 19 nt, Homo sapiens
  misc_RNA (1)...(19): siRNA sense strand
ggacauucuggguauugug

SEQ ID NO: 2018828 - RNA, 19 nt, Homo sapiens
  misc_RNA (1)...(19): siRNA sense strand
ccacuacuggcccacagaa

SEQ ID NO: 2018829 - RNA, 19 nt, Homo sapiens
  misc_RNA (1)...(19): siRNA sense strand
ccgcauccaggacaugaaa

SEQ ID NO: 2018830 - RNA, 19 nt, Homo sapiens
  misc_RNA (1)...(19): siRNA sense strand
uccaaggaccgauacaaga

SEQ ID NO: 2018831 - RNA, 19 nt, Homo sapiens
  misc_RNA (1)...(19): siRNA sense strand
gaggacggagauuacauca

SEQ ID NO: 2018832 - RNA, 19 nt, Homo sapiens
  misc_RNA (1)...(19): siRNA sense strand
ccaggaggacggagauuac

SEQ ID NO: 2018833 - RNA, 19 nt, Homo sapiens
  misc_RNA (1)...(19): siRNA sense strand
augaaagagugcccagaau

SEQ ID NO: 2018834 - RNA, 19 nt, Homo sapiens
  misc_RNA (1)...(19): siRNA sense strand
ucauugucaugcucacuca

SEQ ID NO: 2018835 - RNA, 19 nt, Homo sapiens
  misc_RNA (1)...(19): siRNA sense strand
ccaaggaccgauacaagac

SEQ ID NO: 2018836 - RNA, 19 nt, Homo sapiens
  misc_RNA (1)...(19): siRNA sense strand
uagaacccaucugcucugu

SEQ ID NO: 2018837 - RNA, 19 nt, Homo sapiens
  misc_RNA (1)...(19): siRNA sense strand
aaagagugcccagaauaca

SEQ ID NO: 2018838 - RNA, 19 nt, Homo sapiens
  misc_RNA (1)...(19): siRNA sense strand
ggacggagauuacaucaau

SEQ ID NO: 2018839 - RNA, 19 nt, Homo sapiens
  misc_RNA (1)...(19): siRNA sense strand
gaacccaucugcucuguga

SEQ ID NO: 2018840 - RNA, 19 nt, Homo sapiens
  misc_RNA (1)...(19): siRNA sense strand
ggagaaauguguccacuac

SEQ ID NO: 2018841 - RNA, 19 nt, Homo sapiens
  misc_RNA (1)...(19): siRNA sense strand
ccaagcaacuggaagaaga

SEQ ID NO: 2018842 - RNA, 19 nt, Homo sapiens
  misc_RNA (1)...(19): siRNA sense strand
ggaggucacccuacacuuu

SEQ ID NO: 2018843 - RNA, 19 nt, Homo sapiens
  misc_RNA (1)...(19): siRNA sense strand
gcacagccguugaccuugu

SEQ ID NO: 2018844 - RNA, 19 nt, Homo sapiens
  misc_RNA (1)...(19): siRNA sense strand
ugaaagagugcccagaaua

SEQ ID NO: 2018845 - RNA, 19 nt, Homo sapiens
  misc_RNA (1)...(19): siRNA sense strand
gcugaaagcccgaggagaa

SEQ ID NO: 2018846 - RNA, 19 nt, Homo sapiens
  misc_RNA (1)...(19): siRNA sense strand
gagcacagccguugaccuu

SEQ ID NO: 2018847 - RNA, 19 nt, Homo sapiens
  misc_RNA (1)...(19): siRNA sense strand
gaaagagugcccagaauac

SEQ ID NO: 2018848 - RNA, 19 nt, Homo sapiens
  misc_RNA (1)...(19): siRNA sense strand
gaaggagaaggucuacauu

SEQ ID NO: 2018849 - RNA, 19 nt, Homo sapiens
  misc_RNA (1)...(19): siRNA sense strand
gcaacuggaagaagaauuc

SEQ ID NO: 2018850 - RNA, 19 nt, Homo sapiens
  misc_RNA (1)...(19): siRNA sense strand
ggaaggagaaggucuacau

SEQ ID NO: 2018851 - RNA, 19 nt, Homo sapiens
  misc_RNA (1)...(19): siRNA sense strand
gaagugucccucauuguca

SEQ ID NO: 2018852 - RNA, 19 nt, Homo sapiens
  misc_RNA (1)...(19): siRNA sense strand
ccacagaagaggaaaccua

SEQ ID NO: 2018853 - RNA, 19 nt, Homo sapiens
  misc_RNA (1)...(19): siRNA sense strand
agaaauguguccacuacug

SEQ ID NO: 2018854 - RNA, 19 nt, Homo sapiens
  misc_RNA (1)...(19): siRNA sense strand
ggaagugucccucauuguc

SEQ ID NO: 2018855 - RNA, 19 nt, Homo sapiens
  misc_RNA (1)...(19): siRNA sense strand
uuacaucaaugccaacuac

SEQ ID NO: 2018856 - RNA, 19 nt, Homo sapiens
  misc_RNA (1)...(19): siRNA sense strand
cggcagagcaguaccaguu

SEQ ID NO: 2018857 - RNA, 19 nt, Homo sapiens
  misc_RNA (1)...(19): siRNA sense strand
caugaaagagugcccagaa

SEQ ID NO: 2018858 - RNA, 19 nt, Homo sapiens
  misc_RNA (1)...(19): siRNA sense strand
gccaggaggacggagauua

SEQ ID NO: 2018859 - RNA, 19 nt, Homo sapiens
  misc_RNA (1)...(19): siRNA sense strand
gagagggcaaggagaaaug

SEQ ID NO: 2018860 - RNA, 19 nt, Homo sapiens
  misc_RNA (1)...(19): siRNA sense strand
gaggucacccuacacuuuc

SEQ ID NO: 2018861 - RNA, 19 nt, Homo sapiens
  misc_RNA (1)...(19): siRNA sense strand
gaaagcccgaggagaagug

SEQ ID NO: 2018862 - RNA, 19 nt, Homo sapiens
  misc_RNA (1)...(19): siRNA sense strand
ggaggacggagauuacauc

SEQ ID NO: 2018863 - RNA, 19 nt, Homo sapiens
  misc_RNA (1)...(19): siRNA sense strand
gcuaugacgggaaggagaa

SEQ ID NO: 2018864 - RNA, 19 nt, Homo sapiens
  misc_RNA (1)...(19): siRNA sense strand
gcuccaauguggcucugau

SEQ ID NO: 2018865 - RNA, 19 nt, Homo sapiens
  misc_RNA (1)...(19): siRNA sense strand
caacuacauccgaggcuau

SEQ ID NO: 2018866 - RNA, 19 nt, Homo sapiens
  misc_RNA (1)...(19): siRNA sense strand
cagaagaggaaaccuaugg

SEQ ID NO: 2018867 - RNA, 19 nt, Homo sapiens
  misc_RNA (1)...(19): siRNA sense strand
gggagaugguguggcaaga

SEQ ID NO: 2018868 - RNA, 19 nt, Homo sapiens
  misc_RNA (1)...(19): siRNA sense strand
gcauccaggacaugaaaga

SEQ ID NO: 2018869 - RNA, 19 nt, Homo sapiens
  misc_RNA (1)...(19): siRNA sense strand
caagcaacuggaagaagaa

SEQ ID NO: 2018870 - RNA, 19 nt, Homo sapiens
  misc_RNA (1)...(19): siRNA sense strand
caucaaugccaacuacauc

SEQ ID NO: 2018871 - RNA, 19 nt, Homo sapiens
  misc_RNA (1)...(19): siRNA sense strand
ccguugaccuugucuuugg

SEQ ID NO: 2018872 - RNA, 19 nt, Homo sapiens
  misc_RNA (1)...(19): siRNA sense strand
cacagaagaggaaaccuau

SEQ ID NO: 2018873 - RNA, 19 nt, Homo sapiens
  misc_RNA (1)...(19): siRNA sense strand
gacggagauuacaucaaug

SEQ ID NO: 2018874 - RNA, 19 nt, Homo sapiens
  misc_RNA (1)...(19): siRNA sense strand
gaccaucagacaccagaau

SEQ ID NO: 2018875 - RNA, 19 nt, Homo sapiens
  misc_RNA (1)...(19): siRNA sense strand
caguaaagcacauccucuu

SEQ ID NO: 2018876 - RNA, 19 nt, Homo sapiens
  misc_RNA (1)...(19): siRNA sense strand
aggagaaggucuacauugc

SEQ ID NO: 2018877 - RNA, 19 nt, Homo sapiens
  misc_RNA (1)...(19): siRNA sense strand
aaggagaaggucuacauug

SEQ ID NO: 2018878 - RNA, 19 nt, Homo sapiens
  misc_RNA (1)...(19): siRNA sense strand
ccacgcgaauuggcuguca

SEQ ID NO: 2018879 - RNA, 19 nt, Homo sapiens
  misc_RNA (1)...(19): siRNA sense strand
aaguggacauucuggguau

SEQ ID NO: 2018880 - RNA, 19 nt, Homo sapiens
  misc_RNA (1)...(19): siRNA sense strand
gaugguguggcaagaggaa

SEQ ID NO: 2018881 - RNA, 19 nt, Homo sapiens
  misc_RNA (1)...(19): siRNA sense strand
gacauucuggguauugugu

SEQ ID NO: 2018882 - RNA, 19 nt, Homo sapiens
  misc_RNA (1)...(19): siRNA sense strand
ggacauucuggguauugug

SEQ ID NO: 2018883 - RNA, 19 nt, Homo sapiens
  misc_RNA (1)...(19): siRNA sense strand
ccacuacuggcccacagaa

SEQ ID NO: 2018884 - RNA, 19 nt, Homo sapiens
  misc_RNA (1)...(19): siRNA sense strand
ccgcauccaggacaugaaa

SEQ ID NO: 2018885 - RNA, 19 nt, Homo sapiens
  misc_RNA (1)...(19): siRNA sense strand
uccaaggaccgauacaaga

SEQ ID NO: 2018886 - RNA, 19 nt, Homo sapiens
  misc_RNA (1)...(19): siRNA sense strand
gaggacggagauuacauca

SEQ ID NO: 2018887 - RNA, 19 nt, Homo sapiens
  misc_RNA (1)...(19): siRNA sense strand
ccaggaggacggagauuac

SEQ ID NO: 2018888 - RNA, 19 nt, Homo sapiens
  misc_RNA (1)...(19): siRNA sense strand
augaaagagugcccagaau

SEQ ID NO: 2018889 - RNA, 19 nt, Homo sapiens
  misc_RNA (1)...(19): siRNA sense strand
ucauugucaugcucacuca

SEQ ID NO: 2018890 - RNA, 19 nt, Homo sapiens
  misc_RNA (1)...(19): siRNA sense strand
ccaaggaccgauacaagac

SEQ ID NO: 2018891 - RNA, 19 nt, Homo sapiens
  misc_RNA (1)...(19): siRNA sense strand
aaagagugcccagaauaca

SEQ ID NO: 2018892 - RNA, 19 nt, Homo sapiens
  misc_RNA (1)...(19): siRNA sense strand
uagaacccaucugcucugu

SEQ ID NO: 2018893 - RNA, 19 nt, Homo sapiens
  misc_RNA (1)...(19): siRNA sense strand
ggacggagauuacaucaau

SEQ ID NO: 2018894 - RNA, 19 nt, Homo sapiens
  misc_RNA (1)...(19): siRNA sense strand
gaacccaucugcucuguga

SEQ ID NO: 2018895 - RNA, 19 nt, Homo sapiens
  misc_RNA (1)...(19): siRNA sense strand
ggagaaauguguccacuac

SEQ ID NO: 2018896 - RNA, 19 nt, Homo sapiens
  misc_RNA (1)...(19): siRNA sense strand
ccaagcaacuggaagaaga

SEQ ID NO: 2018897 - RNA, 19 nt, Homo sapiens
  misc_RNA (1)...(19): siRNA sense strand
ggaggucacccuacacuuu

SEQ ID NO: 2018898 - RNA, 19 nt, Homo sapiens
  misc_RNA (1)...(19): siRNA sense strand
gcacagccguugaccuugu

SEQ ID NO: 2018899 - RNA, 19 nt, Homo sapiens
  misc_RNA (1)...(19): siRNA sense strand
ugaaagagugcccagaaua

SEQ ID NO: 2018900 - RNA, 19 nt, Homo sapiens
  misc_RNA (1)...(19): siRNA sense strand
gcugaaagcccgaggagaa

SEQ ID NO: 2018901 - RNA, 19 nt, Homo sapiens
  misc_RNA (1)...(19): siRNA sense strand
gagcacagccguugaccuu

SEQ ID NO: 2018902 - RNA, 19 nt, Homo sapiens
  misc_RNA (1)...(19): siRNA sense strand
gaaagagugcccagaauac

SEQ ID NO: 2018903 - RNA, 19 nt, Homo sapiens
  misc_RNA (1)...(19): siRNA sense strand
gaaggagaaggucuacauu

SEQ ID NO: 2018904 - RNA, 19 nt, Homo sapiens
  misc_RNA (1)...(19): siRNA sense strand
gcaacuggaagaagaauuc

SEQ ID NO: 2018905 - RNA, 19 nt, Homo sapiens
  misc_RNA (1)...(19): siRNA sense strand
ggaaggagaaggucuacau

SEQ ID NO: 2018906 - RNA, 19 nt, Homo sapiens
  misc_RNA (1)...(19): siRNA sense strand
gaagugucccucauuguca

SEQ ID NO: 2018907 - RNA, 19 nt, Homo sapiens
  misc_RNA (1)...(19): siRNA sense strand
ccacagaagaggaaaccua

SEQ ID NO: 2018908 - RNA, 19 nt, Homo sapiens
  misc_RNA (1)...(19): siRNA sense strand
agaaauguguccacuacug

SEQ ID NO: 2018909 - RNA, 19 nt, Homo sapiens
  misc_RNA (1)...(19): siRNA sense strand
ggaagugucccucauuguc

SEQ ID NO: 2018910 - RNA, 19 nt, Homo sapiens
  misc_RNA (1)...(19): siRNA sense strand
uuacaucaaugccaacuac

SEQ ID NO: 2018911 - RNA, 19 nt, Homo sapiens
  misc_RNA (1)...(19): siRNA sense strand
cggcagagcaguaccaguu

SEQ ID NO: 2018912 - RNA, 19 nt, Homo sapiens
  misc_RNA (1)...(19): siRNA sense strand
caugaaagagugcccagaa

SEQ ID NO: 2018913 - RNA, 19 nt, Homo sapiens
  misc_RNA (1)...(19): siRNA sense strand
gccaggaggacggagauua

SEQ ID NO: 2018914 - RNA, 19 nt, Homo sapiens
  misc_RNA (1)...(19): siRNA sense strand
gagagggcaaggagaaaug

SEQ ID NO: 2018915 - RNA, 19 nt, Homo sapiens
  misc_RNA (1)...(19): siRNA sense strand
gaggucacccuacacuuuc

SEQ ID NO: 2018916 - RNA, 19 nt, Homo sapiens
  misc_RNA (1)...(19): siRNA sense strand
gaaagcccgaggagaagug

SEQ ID NO: 2018917 - RNA, 19 nt, Homo sapiens
  misc_RNA (1)...(19): siRNA sense strand
ggaggacggagauuacauc

SEQ ID NO: 2018918 - RNA, 19 nt, Homo sapiens
  misc_RNA (1)...(19): siRNA sense strand
gcuaugacgggaaggagaa

SEQ ID NO: 2018919 - RNA, 19 nt, Homo sapiens
  misc_RNA (1)...(19): siRNA sense strand
caacuacauccgaggcuau

SEQ ID NO: 2018920 - RNA, 19 nt, Homo sapiens
  misc_RNA (1)...(19): siRNA sense strand
gcuccaauguggcucugau

SEQ ID NO: 2018921 - RNA, 19 nt, Homo sapiens
  misc_RNA (1)...(19): siRNA sense strand
cagaagaggaaaccuaugg

SEQ ID NO: 2018922 - RNA, 19 nt, Homo sapiens
  misc_RNA (1)...(19): siRNA sense strand
gggagaugguguggcaaga

SEQ ID NO: 2018923 - RNA, 19 nt, Homo sapiens
  misc_RNA (1)...(19): siRNA sense strand
gcauccaggacaugaaaga

SEQ ID NO: 2018924 - RNA, 19 nt, Homo sapiens
  misc_RNA (1)...(19): siRNA sense strand
caagcaacuggaagaagaa

SEQ ID NO: 2018925 - RNA, 19 nt, Homo sapiens
  misc_RNA (1)...(19): siRNA sense strand
caucaaugccaacuacauc

SEQ ID NO: 2018926 - RNA, 19 nt, Homo sapiens
  misc_RNA (1)...(19): siRNA sense strand
cacagaagaggaaaccuau

SEQ ID NO: 2018927 - RNA, 19 nt, Homo sapiens
  misc_RNA (1)...(19): siRNA sense strand
ccguugaccuugucuuugg

SEQ ID NO: 2018928 - RNA, 19 nt, Homo sapiens
  misc_RNA (1)...(19): siRNA sense strand
gacggagauuacaucaaug

SEQ ID NO: 2018929 - RNA, 19 nt, Homo sapiens
  misc_RNA (1)...(19): siRNA sense strand
gaccaucagacaccagaau

SEQ ID NO: 2018930 - RNA, 19 nt, Homo sapiens
  misc_RNA (1)...(19): siRNA sense strand
caguaaagcacauccucuu

SEQ ID NO: 2018931 - RNA, 19 nt, Homo sapiens
  misc_RNA (1)...(19): siRNA sense strand
aggagaaggucuacauugc

SEQ ID NO: 2018932 - RNA, 19 nt, Homo sapiens
  misc_RNA (1)...(19): siRNA sense strand
aaggagaaggucuacauug

SEQ ID NO: 2018933 - RNA, 19 nt, Homo sapiens
  misc_RNA (1)...(19): siRNA sense strand
ccacgcgaauuggcuguca

SEQ ID NO: 2018934 - RNA, 19 nt, Homo sapiens
  misc_RNA (1)...(19): siRNA sense strand
aaguggacauucuggguau

SEQ ID NO: 2018935 - RNA, 19 nt, Homo sapiens
  misc_RNA (1)...(19): siRNA sense strand
gaugguguggcaagaggaa

SEQ ID NO: 2018936 - RNA, 19 nt, Homo sapiens
  misc_RNA (1)...(19): siRNA sense strand
gacauucuggguauugugu

SEQ ID NO: 2018937 - RNA, 19 nt, Homo sapiens
  misc_RNA (1)...(19): siRNA sense strand
ggacauucuggguauugug

SEQ ID NO: 2018938 - RNA, 19 nt, Homo sapiens
  misc_RNA (1)...(19): siRNA sense strand
ccacuacuggcccacagaa

SEQ ID NO: 2018939 - RNA, 19 nt, Homo sapiens
  misc_RNA (1)...(19): siRNA sense strand
ccgcauccaggacaugaaa

SEQ ID NO: 2018940 - RNA, 19 nt, Homo sapiens
  misc_RNA (1)...(19): siRNA sense strand
uccaaggaccgauacaaga

SEQ ID NO: 2018941 - RNA, 19 nt, Homo sapiens
  misc_RNA (1)...(19): siRNA sense strand
gaggacggagauuacauca

SEQ ID NO: 2018942 - RNA, 19 nt, Homo sapiens
  misc_RNA (1)...(19): siRNA sense strand
ccaggaggacggagauuac

SEQ ID NO: 2018943 - RNA, 19 nt, Homo sapiens
  misc_RNA (1)...(19): siRNA sense strand
augaaagagugcccagaau

SEQ ID NO: 2018944 - RNA, 19 nt, Homo sapiens
  misc_RNA (1)...(19): siRNA sense strand
ucauugucaugcucacuca

SEQ ID NO: 2018945 - RNA, 19 nt, Homo sapiens
  misc_RNA (1)...(19): siRNA sense strand
ccaaggaccgauacaagac

SEQ ID NO: 2018946 - RNA, 19 nt, Homo sapiens
  misc_RNA (1)...(19): siRNA sense strand
uagaacccaucugcucugu

SEQ ID NO: 2018947 - RNA, 19 nt, Homo sapiens
  misc_RNA (1)...(19): siRNA sense strand
aaagagugcccagaauaca

SEQ ID NO: 2018948 - RNA, 19 nt, Homo sapiens
  misc_RNA (1)...(19): siRNA sense strand
ggacggagauuacaucaau

SEQ ID NO: 2018949 - RNA, 19 nt, Homo sapiens
  misc_RNA (1)...(19): siRNA sense strand
gaacccaucugcucuguga

SEQ ID NO: 2018950 - RNA, 19 nt, Homo sapiens
  misc_RNA (1)...(19): siRNA sense strand
ggagaaauguguccacuac

SEQ ID NO: 2018951 - RNA, 19 nt, Homo sapiens
  misc_RNA (1)...(19): siRNA sense strand
ccaagcaacuggaagaaga

SEQ ID NO: 2018952 - RNA, 19 nt, Homo sapiens
  misc_RNA (1)...(19): siRNA sense strand
ggaggucacccuacacuuu

SEQ ID NO: 2018953 - RNA, 19 nt, Homo sapiens
  misc_RNA (1)...(19): siRNA sense strand
gcacagccguugaccuugu

SEQ ID NO: 2018954 - RNA, 19 nt, Homo sapiens
  misc_RNA (1)...(19): siRNA sense strand
ugaaagagugcccagaaua

SEQ ID NO: 2018955 - RNA, 19 nt, Homo sapiens
  misc_RNA (1)...(19): siRNA sense strand
gcugaaagcccgaggagaa

SEQ ID NO: 2018956 - RNA, 19 nt, Homo sapiens
  misc_RNA (1)...(19): siRNA sense strand
gagcacagccguugaccuu

SEQ ID NO: 2018957 - RNA, 19 nt, Homo sapiens
  misc_RNA (1)...(19): siRNA sense strand
gaaagagugcccagaauac

SEQ ID NO: 2018958 - RNA, 19 nt, Homo sapiens
  misc_RNA (1)...(19): siRNA sense strand
gaaggagaaggucuacauu

SEQ ID NO: 2018959 - RNA, 19 nt, Homo sapiens
  misc_RNA (1)...(19): siRNA sense strand
gcaacuggaagaagaauuc

SEQ ID NO: 2018960 - RNA, 19 nt, Homo sapiens
  misc_RNA (1)...(19): siRNA sense strand
ggaaggagaaggucuacau

SEQ ID NO: 2018961 - RNA, 19 nt, Homo sapiens
  misc_RNA (1)...(19): siRNA sense strand
gaagugucccucauuguca

SEQ ID NO: 2018962 - RNA, 19 nt, Homo sapiens
  misc_RNA (1)...(19): siRNA sense strand
ccacagaagaggaaaccua

SEQ ID NO: 2018963 - RNA, 19 nt, Homo sapiens
  misc_RNA (1)...(19): siRNA sense strand
agaaauguguccacuacug

SEQ ID NO: 2018964 - RNA, 19 nt, Homo sapiens
  misc_RNA (1)...(19): siRNA sense strand
ggaagugucccucauuguc

SEQ ID NO: 2018965 - RNA, 19 nt, Homo sapiens
  misc_RNA (1)...(19): siRNA sense strand
uuacaucaaugccaacuac

SEQ ID NO: 2018966 - RNA, 19 nt, Homo sapiens
  misc_RNA (1)...(19): siRNA sense strand
cggcagagcaguaccaguu

SEQ ID NO: 2018967 - RNA, 19 nt, Homo sapiens
  misc_RNA (1)...(19): siRNA sense strand
caugaaagagugcccagaa

SEQ ID NO: 2018968 - RNA, 19 nt, Homo sapiens
  misc_RNA (1)...(19): siRNA sense strand
gccaggaggacggagauua

SEQ ID NO: 2018969 - RNA, 19 nt, Homo sapiens
  misc_RNA (1)...(19): siRNA sense strand
gagagggcaaggagaaaug

SEQ ID NO: 2018970 - RNA, 19 nt, Homo sapiens
  misc_RNA (1)...(19): siRNA sense strand
gaggucacccuacacuuuc

SEQ ID NO: 2018971 - RNA, 19 nt, Homo sapiens
  misc_RNA (1)...(19): siRNA sense strand
gaaagcccgaggagaagug

SEQ ID NO: 2018972 - RNA, 19 nt, Homo sapiens
  misc_RNA (1)...(19): siRNA sense strand
ggaggacggagauuacauc

SEQ ID NO: 2018973 - RNA, 19 nt, Homo sapiens
  misc_RNA (1)...(19): siRNA sense strand
gcuaugacgggaaggagaa

SEQ ID NO: 2018974 - RNA, 19 nt, Homo sapiens
  misc_RNA (1)...(19): siRNA sense strand
caacuacauccgaggcuau

SEQ ID NO: 2018975 - RNA, 19 nt, Homo sapiens
  misc_RNA (1)...(19): siRNA sense strand
gcuccaauguggcucugau

SEQ ID NO: 2018976 - RNA, 19 nt, Homo sapiens
  misc_RNA (1)...(19): siRNA sense strand
cagaagaggaaaccuaugg

SEQ ID NO: 2018977 - RNA, 19 nt, Homo sapiens
  misc_RNA (1)...(19): siRNA sense strand
gggagaugguguggcaaga

SEQ ID NO: 2018978 - RNA, 19 nt, Homo sapiens
  misc_RNA (1)...(19): siRNA sense strand
gcauccaggacaugaaaga

SEQ ID NO: 2018979 - RNA, 19 nt, Homo sapiens
  misc_RNA (1)...(19): siRNA sense strand
caagcaacuggaagaagaa

SEQ ID NO: 2018980 - RNA, 19 nt, Homo sapiens
  misc_RNA (1)...(19): siRNA sense strand
caucaaugccaacuacauc

SEQ ID NO: 2018981 - RNA, 19 nt, Homo sapiens
  misc_RNA (1)...(19): siRNA sense strand
cacagaagaggaaaccuau

SEQ ID NO: 2018982 - RNA, 19 nt, Homo sapiens
  misc_RNA (1)...(19): siRNA sense strand
ccguugaccuugucuuugg

SEQ ID NO: 2018983 - RNA, 19 nt, Homo sapiens
  misc_RNA (1)...(19): siRNA sense strand
gacggagauuacaucaaug

SEQ ID NO: 2018984 - RNA, 19 nt, Homo sapiens
  misc_RNA (1)...(19): siRNA sense strand
gaccaucagacaccagaau

SEQ ID NO: 2018985 - RNA, 19 nt, Homo sapiens
  misc_RNA (1)...(19): siRNA sense strand
caguaaagcacauccucuu

SEQ ID NO: 2018986 - RNA, 19 nt, Homo sapiens
  misc_RNA (1)...(19): siRNA sense strand
aggagaaggucuacauugc

SEQ ID NO: 2018987 - RNA, 19 nt, Homo sapiens
  misc_RNA (1)...(19): siRNA sense strand
aaggagaaggucuacauug

SEQ ID NO: 2018988 - RNA, 19 nt, Homo sapiens
  misc_RNA (1)...(19): siRNA sense strand
ccacgcgaauuggcuguca

SEQ ID NO: 2018989 - RNA, 19 nt, Homo sapiens
  misc_RNA (1)...(19): siRNA sense strand
aaguggacauucuggguau

SEQ ID NO: 2018990 - RNA, 19 nt, Homo sapiens
  misc_RNA (1)...(19): siRNA sense strand
gaugguguggcaagaggaa

SEQ ID NO: 2018991 - RNA, 19 nt, Homo sapiens
  misc_RNA (1)...(19): siRNA sense strand
gacauucuggguauugugu

SEQ ID NO: 2018992 - RNA, 19 nt, Homo sapiens
  misc_RNA (1)...(19): siRNA sense strand
ggacauucuggguauugug

SEQ ID NO: 2018993 - RNA, 19 nt, Homo sapiens
  misc_RNA (1)...(19): siRNA sense strand
ccacuacuggcccacagaa

SEQ ID NO: 2018994 - RNA, 19 nt, Homo sapiens
  misc_RNA (1)...(19): siRNA sense strand
ccgcauccaggacaugaaa

SEQ ID NO: 2018995 - RNA, 19 nt, Homo sapiens
  misc_RNA (1)...(19): siRNA sense strand
uccaaggaccgauacaaga

SEQ ID NO: 2018996 - RNA, 19 nt, Homo sapiens
  misc_RNA (1)...(19): siRNA sense strand
gaggacggagauuacauca

SEQ ID NO: 2018997 - RNA, 19 nt, Homo sapiens
  misc_RNA (1)...(19): siRNA sense strand
ccaggaggacggagauuac

SEQ ID NO: 2018998 - RNA, 19 nt, Homo sapiens
  misc_RNA (1)...(19): siRNA sense strand
augaaagagugcccagaau

SEQ ID NO: 2018999 - RNA, 19 nt, Homo sapiens
  misc_RNA (1)...(19): siRNA sense strand
ucauugucaugcucacuca

SEQ ID NO: 2019000 - RNA, 19 nt, Homo sapiens
  misc_RNA (1)...(19): siRNA sense strand
ccaaggaccgauacaagac

SEQ ID NO: 2019001 - RNA, 19 nt, Homo sapiens
  misc_RNA (1)...(19): siRNA sense strand
uagaacccaucugcucugu

SEQ ID NO: 2019002 - RNA, 19 nt, Homo sapiens
  misc_RNA (1)...(19): siRNA sense strand
aaagagugcccagaauaca

SEQ ID NO: 2019003 - RNA, 19 nt, Homo sapiens
  misc_RNA (1)...(19): siRNA sense strand
ggacggagauuacaucaau

SEQ ID NO: 2019004 - RNA, 19 nt, Homo sapiens
  misc_RNA (1)...(19): siRNA sense strand
gaacccaucugcucuguga

SEQ ID NO: 2019005 - RNA, 19 nt, Homo sapiens
  misc_RNA (1)...(19): siRNA sense strand
ggagaaauguguccacuac

SEQ ID NO: 2019006 - RNA, 19 nt, Homo sapiens
  misc_RNA (1)...(19): siRNA sense strand
ccaagcaacuggaagaaga

SEQ ID NO: 2019007 - RNA, 19 nt, Homo sapiens
  misc_RNA (1)...(19): siRNA sense strand
ggaggucacccuacacuuu

SEQ ID NO: 2019008 - RNA, 19 nt, Homo sapiens
  misc_RNA (1)...(19): siRNA sense strand
gcacagccguugaccuugu

SEQ ID NO: 2019009 - RNA, 19 nt, Homo sapiens
  misc_RNA (1)...(19): siRNA sense strand
ugaaagagugcccagaaua

SEQ ID NO: 2019010 - RNA, 19 nt, Homo sapiens
  misc_RNA (1)...(19): siRNA sense strand
gcugaaagcccgaggagaa

SEQ ID NO: 2019011 - RNA, 19 nt, Homo sapiens
  misc_RNA (1)...(19): siRNA sense strand
gagcacagccguugaccuu

SEQ ID NO: 2019012 - RNA, 19 nt, Homo sapiens
  misc_RNA (1)...(19): siRNA sense strand
gaaagagugcccagaauac

SEQ ID NO: 2019013 - RNA, 19 nt, Homo sapiens
  misc_RNA (1)...(19): siRNA sense strand
gaaggagaaggucuacauu

SEQ ID NO: 2019014 - RNA, 19 nt, Homo sapiens
  misc_RNA (1)...(19): siRNA sense strand
gcaacuggaagaagaauuc

SEQ ID NO: 2019015 - RNA, 19 nt, Homo sapiens
  misc_RNA (1)...(19): siRNA sense strand
ggaaggagaaggucuacau

SEQ ID NO: 2019016 - RNA, 19 nt, Homo sapiens
  misc_RNA (1)...(19): siRNA sense strand
gaagugucccucauuguca

SEQ ID NO: 2019017 - RNA, 19 nt, Homo sapiens
  misc_RNA (1)...(19): siRNA sense strand
ccacagaagaggaaaccua

SEQ ID NO: 2019018 - RNA, 19 nt, Homo sapiens
  misc_RNA (1)...(19): siRNA sense strand
agaaauguguccacuacug

SEQ ID NO: 2019019 - RNA, 19 nt, Homo sapiens
  misc_RNA (1)...(19): siRNA sense strand
ggaagugucccucauuguc

SEQ ID NO: 2019020 - RNA, 19 nt, Homo sapiens
  misc_RNA (1)...(19): siRNA sense strand
uuacaucaaugccaacuac

SEQ ID NO: 2019021 - RNA, 19 nt, Homo sapiens
  misc_RNA (1)...(19): siRNA sense strand
cggcagagcaguaccaguu

SEQ ID NO: 2019022 - RNA, 19 nt, Homo sapiens
  misc_RNA (1)...(19): siRNA sense strand
caugaaagagugcccagaa

SEQ ID NO: 2019023 - RNA, 19 nt, Homo sapiens
  misc_RNA (1)...(19): siRNA sense strand
gccaggaggacggagauua

SEQ ID NO: 2019024 - RNA, 19 nt, Homo sapiens
  misc_RNA (1)...(19): siRNA sense strand
gagagggcaaggagaaaug

SEQ ID NO: 2019025 - RNA, 19 nt, Homo sapiens
  misc_RNA (1)...(19): siRNA sense strand
gaggucacccuacacuuuc

SEQ ID NO: 2019026 - RNA, 19 nt, Homo sapiens
  misc_RNA (1)...(19): siRNA sense strand
gaaagcccgaggagaagug

SEQ ID NO: 2019027 - RNA, 19 nt, Homo sapiens
  misc_RNA (1)...(19): siRNA sense strand
ggaggacggagauuacauc

SEQ ID NO: 2019028 - RNA, 19 nt, Homo sapiens
  misc_RNA (1)...(19): siRNA sense strand
gcuaugacgggaaggagaa

SEQ ID NO: 2019029 - RNA, 19 nt, Homo sapiens
  misc_RNA (1)...(19): siRNA sense strand
gcuccaauguggcucugau

SEQ ID NO: 2019030 - RNA, 19 nt, Homo sapiens
  misc_RNA (1)...(19): siRNA sense strand
caacuacauccgaggcuau

SEQ ID NO: 2019031 - RNA, 19 nt, Homo sapiens
  misc_RNA (1)...(19): siRNA sense strand
cagaagaggaaaccuaugg

SEQ ID NO: 2019032 - RNA, 19 nt, Homo sapiens
  misc_RNA (1)...(19): siRNA sense strand
gggagaugguguggcaaga

SEQ ID NO: 2019033 - RNA, 19 nt, Homo sapiens
  misc_RNA (1)...(19): siRNA sense strand
gcauccaggacaugaaaga

SEQ ID NO: 2019034 - RNA, 19 nt, Homo sapiens
  misc_RNA (1)...(19): siRNA sense strand
caagcaacuggaagaagaa

SEQ ID NO: 2019035 - RNA, 19 nt, Homo sapiens
  misc_RNA (1)...(19): siRNA sense strand
caucaaugccaacuacauc

SEQ ID NO: 2019036 - RNA, 19 nt, Homo sapiens
  misc_RNA (1)...(19): siRNA sense strand
ccguugaccuugucuuugg

SEQ ID NO: 2019037 - RNA, 19 nt, Homo sapiens
  misc_RNA (1)...(19): siRNA sense strand
cacagaagaggaaaccuau

SEQ ID NO: 2019038 - RNA, 19 nt, Homo sapiens
  misc_RNA (1)...(19): siRNA sense strand
gacggagauuacaucaaug

SEQ ID NO: 2019039 - RNA, 19 nt, Homo sapiens
  misc_RNA (1)...(19): siRNA sense strand
gaccaucagacaccagaau

SEQ ID NO: 2019040 - RNA, 19 nt, Homo sapiens
  misc_RNA (1)...(19): siRNA sense strand
caguaaagcacauccucuu

SEQ ID NO: 2019041 - RNA, 19 nt, Homo sapiens
  misc_RNA (1)...(19): siRNA sense strand
aggagaaggucuacauugc

SEQ ID NO: 2019042 - RNA, 19 nt, Homo sapiens
  misc_RNA (1)...(19): siRNA sense strand
aaggagaaggucuacauug

SEQ ID NO: 2019043 - RNA, 19 nt, Homo sapiens
  misc_RNA (1)...(19): siRNA sense strand
ccacgcgaauuggcuguca

SEQ ID NO: 2019044 - RNA, 19 nt, Homo sapiens
  misc_RNA (1)...(19): siRNA sense strand
aaguggacauucuggguau

SEQ ID NO: 2019045 - RNA, 19 nt, Homo sapiens
  misc_RNA (1)...(19): siRNA sense strand
gaugguguggcaagaggaa

SEQ ID NO: 2019046 - RNA, 19 nt, Homo sapiens
  misc_RNA (1)...(19): siRNA sense strand
gacauucuggguauugugu

SEQ ID NO: 2019047 - RNA, 19 nt, Homo sapiens
  misc_RNA (1)...(19): siRNA sense strand
ggacauucuggguauugug

SEQ ID NO: 2019048 - RNA, 19 nt, Homo sapiens
  misc_RNA (1)...(19): siRNA sense strand
ccacuacuggcccacagaa

SEQ ID NO: 2019049 - RNA, 19 nt, Homo sapiens
  misc_RNA (1)...(19): siRNA sense strand
ccgcauccaggacaugaaa

SEQ ID NO: 2019050 - RNA, 19 nt, Homo sapiens
  misc_RNA (1)...(19): siRNA sense strand
uccaaggaccgauacaaga

SEQ ID NO: 2019051 - RNA, 19 nt, Homo sapiens
  misc_RNA (1)...(19): siRNA sense strand
gaggacggagauuacauca

SEQ ID NO: 2019052 - RNA, 19 nt, Homo sapiens
  misc_RNA (1)...(19): siRNA sense strand
ccaggaggacggagauuac

SEQ ID NO: 2019053 - RNA, 19 nt, Homo sapiens
  misc_RNA (1)...(19): siRNA sense strand
augaaagagugcccagaau

SEQ ID NO: 2019054 - RNA, 19 nt, Homo sapiens
  misc_RNA (1)...(19): siRNA sense strand
ucauugucaugcucacuca

SEQ ID NO: 2019055 - RNA, 19 nt, Homo sapiens
  misc_RNA (1)...(19): siRNA sense strand
ccaaggaccgauacaagac

SEQ ID NO: 2019056 - RNA, 19 nt, Homo sapiens
  misc_RNA (1)...(19): siRNA sense strand
aaagagugcccagaauaca

SEQ ID NO: 2019057 - RNA, 19 nt, Homo sapiens
  misc_RNA (1)...(19): siRNA sense strand
uagaacccaucugcucugu

SEQ ID NO: 2019058 - RNA, 19 nt, Homo sapiens
  misc_RNA (1)...(19): siRNA sense strand
ggacggagauuacaucaau

SEQ ID NO: 2019059 - RNA, 19 nt, Homo sapiens
  misc_RNA (1)...(19): siRNA sense strand
gaacccaucugcucuguga

SEQ ID NO: 2019060 - RNA, 19 nt, Homo sapiens
  misc_RNA (1)...(19): siRNA sense strand
ggagaaauguguccacuac

SEQ ID NO: 2019061 - RNA, 19 nt, Homo sapiens
  misc_RNA (1)...(19): siRNA sense strand
ccaagcaacuggaagaaga

SEQ ID NO: 2019062 - RNA, 19 nt, Homo sapiens
  misc_RNA (1)...(19): siRNA sense strand
ggaggucacccuacacuuu

SEQ ID NO: 2019063 - RNA, 19 nt, Homo sapiens
  misc_RNA (1)...(19): siRNA sense strand
gcacagccguugaccuugu

SEQ ID NO: 2019064 - RNA, 19 nt, Homo sapiens
  misc_RNA (1)...(19): siRNA sense strand
ugaaagagugcccagaaua

SEQ ID NO: 2019065 - RNA, 19 nt, Homo sapiens
  misc_RNA (1)...(19): siRNA sense strand
gcugaaagcccgaggagaa

SEQ ID NO: 2019066 - RNA, 19 nt, Homo sapiens
  misc_RNA (1)...(19): siRNA sense strand
gagcacagccguugaccuu

SEQ ID NO: 2019067 - RNA, 19 nt, Homo sapiens
  misc_RNA (1)...(19): siRNA sense strand
gaaagagugcccagaauac

SEQ ID NO: 2019068 - RNA, 19 nt, Homo sapiens
  misc_RNA (1)...(19): siRNA sense strand
gaaggagaaggucuacauu

SEQ ID NO: 2019069 - RNA, 19 nt, Homo sapiens
  misc_RNA (1)...(19): siRNA sense strand
gcaacuggaagaagaauuc

SEQ ID NO: 2019070 - RNA, 19 nt, Homo sapiens
  misc_RNA (1)...(19): siRNA sense strand
ggaaggagaaggucuacau

SEQ ID NO: 2019071 - RNA, 19 nt, Homo sapiens
  misc_RNA (1)...(19): siRNA sense strand
gaagugucccucauuguca

SEQ ID NO: 2019072 - RNA, 19 nt, Homo sapiens
  misc_RNA (1)...(19): siRNA sense strand
ccacagaagaggaaaccua

SEQ ID NO: 2019073 - RNA, 19 nt, Homo sapiens
  misc_RNA (1)...(19): siRNA sense strand
agaaauguguccacuacug

SEQ ID NO: 2019074 - RNA, 19 nt, Homo sapiens
  misc_RNA (1)...(19): siRNA sense strand
ggaagugucccucauuguc

SEQ ID NO: 2019075 - RNA, 19 nt, Homo sapiens
  misc_RNA (1)...(19): siRNA sense strand
uuacaucaaugccaacuac

SEQ ID NO: 2019076 - RNA, 19 nt, Homo sapiens
  misc_RNA (1)...(19): siRNA sense strand
cggcagagcaguaccaguu

SEQ ID NO: 2019077 - RNA, 19 nt, Homo sapiens
  misc_RNA (1)...(19): siRNA sense strand
caugaaagagugcccagaa

SEQ ID NO: 2019078 - RNA, 19 nt, Homo sapiens
  misc_RNA (1)...(19): siRNA sense strand
gccaggaggacggagauua

SEQ ID NO: 2019079 - RNA, 19 nt, Homo sapiens
  misc_RNA (1)...(19): siRNA sense strand
gagagggcaaggagaaaug

SEQ ID NO: 2019080 - RNA, 19 nt, Homo sapiens
  misc_RNA (1)...(19): siRNA sense strand
gaggucacccuacacuuuc

SEQ ID NO: 2019081 - RNA, 19 nt, Homo sapiens
  misc_RNA (1)...(19): siRNA sense strand
gaaagcccgaggagaagug

SEQ ID NO: 2019082 - RNA, 19 nt, Homo sapiens
  misc_RNA (1)...(19): siRNA sense strand
ggaggacggagauuacauc

SEQ ID NO: 2019083 - RNA, 19 nt, Homo sapiens
  misc_RNA (1)...(19): siRNA sense strand
gcuaugacgggaaggagaa

SEQ ID NO: 2019084 - RNA, 19 nt, Homo sapiens
  misc_RNA (1)...(19): siRNA sense strand
caacuacauccgaggcuau

SEQ ID NO: 2019085 - RNA, 19 nt, Homo sapiens
  misc_RNA (1)...(19): siRNA sense strand
gcuccaauguggcucugau

SEQ ID NO: 2019086 - RNA, 19 nt, Homo sapiens
  misc_RNA (1)...(19): siRNA sense strand
cagaagaggaaaccuaugg

SEQ ID NO: 2019087 - RNA, 19 nt, Homo sapiens
  misc_RNA (1)...(19): siRNA sense strand
gggagaugguguggcaaga

SEQ ID NO: 2019088 - RNA, 19 nt, Homo sapiens
  misc_RNA (1)...(19): siRNA sense strand
gcauccaggacaugaaaga

SEQ ID NO: 2019089 - RNA, 19 nt, Homo sapiens
  misc_RNA (1)...(19): siRNA sense strand
caagcaacuggaagaagaa

SEQ ID NO: 2019090 - RNA, 19 nt, Homo sapiens
  misc_RNA (1)...(19): siRNA sense strand
caucaaugccaacuacauc

SEQ ID NO: 2019091 - RNA, 19 nt, Homo sapiens
  misc_RNA (1)...(19): siRNA sense strand
cacagaagaggaaaccuau

SEQ ID NO: 2019092 - RNA, 19 nt, Homo sapiens
  misc_RNA (1)...(19): siRNA sense strand
ccguugaccuugucuuugg

SEQ ID NO: 2019093 - RNA, 19 nt, Homo sapiens
  misc_RNA (1)...(19): siRNA sense strand
gacggagauuacaucaaug

SEQ ID NO: 2019094 - RNA, 19 nt, Homo sapiens
  misc_RNA (1)...(19): siRNA sense strand
gaccaucagacaccagaau

SEQ ID NO: 2019095 - RNA, 19 nt, Homo sapiens
  misc_RNA (1)...(19): siRNA sense strand
caguaaagcacauccucuu

SEQ ID NO: 2019096 - RNA, 19 nt, Homo sapiens
  misc_RNA (1)...(19): siRNA sense strand
aggagaaggucuacauugc

SEQ ID NO: 2019097 - RNA, 19 nt, Homo sapiens
  misc_RNA (1)...(19): siRNA sense strand
aaggagaaggucuacauug

SEQ ID NO: 2019098 - RNA, 19 nt, Homo sapiens
  misc_RNA (1)...(19): siRNA sense strand
ccacgcgaauuggcuguca

SEQ ID NO: 2019099 - RNA, 19 nt, Homo sapiens
  misc_RNA (1)...(19): siRNA sense strand
aaguggacauucuggguau

SEQ ID NO: 2019100 - RNA, 19 nt, Homo sapiens
  misc_RNA (1)...(19): siRNA sense strand
gaugguguggcaagaggaa

SEQ ID NO: 2019101 - RNA, 19 nt, Homo sapiens
  misc_RNA (1)...(19): siRNA sense strand
gacauucuggguauugugu

SEQ ID NO: 2019102 - RNA, 19 nt, Homo sapiens
  misc_RNA (1)...(19): siRNA sense strand
ggacauucuggguauugug

SEQ ID NO: 2019103 - RNA, 19 nt, Homo sapiens
  misc_RNA (1)...(19): siRNA sense strand
ccacuacuggcccacagaa

SEQ ID NO: 2019104 - RNA, 19 nt, Homo sapiens
  misc_RNA (1)...(19): siRNA sense strand
ccgcauccaggacaugaaa

SEQ ID NO: 2019105 - RNA, 19 nt, Homo sapiens
  misc_RNA (1)...(19): siRNA sense strand
uccaaggaccgauacaaga

SEQ ID NO: 2019106 - RNA, 19 nt, Homo sapiens
  misc_RNA (1)...(19): siRNA sense strand
gaggacggagauuacauca

SEQ ID NO: 2019107 - RNA, 19 nt, Homo sapiens
  misc_RNA (1)...(19): siRNA sense strand
ccaggaggacggagauuac

SEQ ID NO: 2019108 - RNA, 19 nt, Homo sapiens
  misc_RNA (1)...(19): siRNA sense strand
augaaagagugcccagaau

SEQ ID NO: 2019109 - RNA, 19 nt, Homo sapiens
  misc_RNA (1)...(19): siRNA sense strand
ucauugucaugcucacuca

SEQ ID NO: 2019110 - RNA, 19 nt, Homo sapiens
  misc_RNA (1)...(19): siRNA sense strand
ccaaggaccgauacaagac

SEQ ID NO: 2019111 - RNA, 19 nt, Homo sapiens
  misc_RNA (1)...(19): siRNA sense strand
uagaacccaucugcucugu

SEQ ID NO: 2019112 - RNA, 19 nt, Homo sapiens
  misc_RNA (1)...(19): siRNA sense strand
aaagagugcccagaauaca

SEQ ID NO: 2019113 - RNA, 19 nt, Homo sapiens
  misc_RNA (1)...(19): siRNA sense strand
ggaggaagauggauugguu

SEQ ID NO: 2019114 - RNA, 19 nt, Homo sapiens
  misc_RNA (1)...(19): siRNA sense strand
gaagaagccuugguuccua

SEQ ID NO: 2019115 - RNA, 19 nt, Homo sapiens
  misc_RNA (1)...(19): siRNA sense strand
gaaagggugugacagauca

SEQ ID NO: 2019116 - RNA, 19 nt, Homo sapiens
  misc_RNA (1)...(19): siRNA sense strand
guaguaaucaugcaaguua

SEQ ID NO: 2019117 - RNA, 19 nt, Homo sapiens
  misc_RNA (1)...(19): siRNA sense strand
cagcugaacuacacagaua

SEQ ID NO: 2019118 - RNA, 19 nt, Homo sapiens
  misc_RNA (1)...(19): siRNA sense strand
gccaaugccuuccuccuua

SEQ ID NO: 2019119 - RNA, 19 nt, Homo sapiens
  misc_RNA (1)...(19): siRNA sense strand
gaagguggcuauaagagau

SEQ ID NO: 2019120 - RNA, 19 nt, Homo sapiens
  misc_RNA (1)...(19): siRNA sense strand
gaaaguggagucaaaguug

SEQ ID NO: 2019121 - RNA, 19 nt, Homo sapiens
  misc_RNA (1)...(19): siRNA sense strand
gcacaucaauuaaucaaac

SEQ ID NO: 2019122 - RNA, 19 nt, Homo sapiens
  misc_RNA (1)...(19): siRNA sense strand
gaaaauggcuggacugcuu

SEQ ID NO: 2019123 - RNA, 19 nt, Homo sapiens
  misc_RNA (1)...(19): siRNA sense strand
cgaaugaaguggaagaaug

SEQ ID NO: 2019124 - RNA, 19 nt, Homo sapiens
  misc_RNA (1)...(19): siRNA sense strand
aaagaagucugaagcaaga

SEQ ID NO: 2019125 - RNA, 19 nt, Homo sapiens
  misc_RNA (1)...(19): siRNA sense strand
gaacuacacagauauaaag

SEQ ID NO: 2019126 - RNA, 19 nt, Homo sapiens
  misc_RNA (1)...(19): siRNA sense strand
gguuguagcucaagcaaga

SEQ ID NO: 2019127 - RNA, 19 nt, Homo sapiens
  misc_RNA (1)...(19): siRNA sense strand
gcaaagacaugaaaauugu

SEQ ID NO: 2019128 - RNA, 19 nt, Homo sapiens
  misc_RNA (1)...(19): siRNA sense strand
gaagaagguggcuauaaga

SEQ ID NO: 2019129 - RNA, 19 nt, Homo sapiens
  misc_RNA (1)...(19): siRNA sense strand
uaacaggaauacucaguca

SEQ ID NO: 2019130 - RNA, 19 nt, Homo sapiens
  misc_RNA (1)...(19): siRNA sense strand
ugaagaagguggcuauaag

SEQ ID NO: 2019131 - RNA, 19 nt, Homo sapiens
  misc_RNA (1)...(19): siRNA sense strand
ggaguagaacuugaaauaa

SEQ ID NO: 2019132 - RNA, 19 nt, Homo sapiens
  misc_RNA (1)...(19): siRNA sense strand
ggagauauugccaaguuaa

SEQ ID NO: 2019133 - RNA, 19 nt, Homo sapiens
  misc_RNA (1)...(19): siRNA sense strand
cccaagaguugauccagua

SEQ ID NO: 2019134 - RNA, 19 nt, Homo sapiens
  misc_RNA (1)...(19): siRNA sense strand
ggaaaguggagucaaaguu

SEQ ID NO: 2019135 - RNA, 19 nt, Homo sapiens
  misc_RNA (1)...(19): siRNA sense strand
ugacaagaaugaaauagag

SEQ ID NO: 2019136 - RNA, 19 nt, Homo sapiens
  misc_RNA (1)...(19): siRNA sense strand
gcacagucgauacaaguuu

SEQ ID NO: 2019137 - RNA, 19 nt, Homo sapiens
  misc_RNA (1)...(19): siRNA sense strand
aaggagauauugccaaguu

SEQ ID NO: 2019138 - RNA, 19 nt, Homo sapiens
  misc_RNA (1)...(19): siRNA sense strand
agaggaaaguggagucaaa

SEQ ID NO: 2019139 - RNA, 19 nt, Homo sapiens
  misc_RNA (1)...(19): siRNA sense strand
gagaaagggugugacagau

SEQ ID NO: 2019140 - RNA, 19 nt, Homo sapiens
  misc_RNA (1)...(19): siRNA sense strand
ccaaugccuuccuccuuaa

SEQ ID NO: 2019141 - RNA, 19 nt, Homo sapiens
  misc_RNA (1)...(19): siRNA sense strand
uggaguagaacuugaaaua

SEQ ID NO: 2019142 - RNA, 19 nt, Homo sapiens
  misc_RNA (1)...(19): siRNA sense strand
cuccaucucuucucaauga

SEQ ID NO: 2019143 - RNA, 19 nt, Homo sapiens
  misc_RNA (1)...(19): siRNA sense strand
cuuaaugauugguugcuua

SEQ ID NO: 2019144 - RNA, 19 nt, Homo sapiens
  misc_RNA (1)...(19): siRNA sense strand
aagaguugauccaguagua

SEQ ID NO: 2019145 - RNA, 19 nt, Homo sapiens
  misc_RNA (1)...(19): siRNA sense strand
gaaugaaguggaagaaugu

SEQ ID NO: 2019146 - RNA, 19 nt, Homo sapiens
  misc_RNA (1)...(19): siRNA sense strand
uuacuugccuugcuggauu

SEQ ID NO: 2019147 - RNA, 19 nt, Homo sapiens
  misc_RNA (1)...(19): siRNA sense strand
ggaagcagcaggcauucuu

SEQ ID NO: 2019148 - RNA, 19 nt, Homo sapiens
  misc_RNA (1)...(19): siRNA sense strand
cuacacagauauaaaggau

SEQ ID NO: 2019149 - RNA, 19 nt, Homo sapiens
  misc_RNA (1)...(19): siRNA sense strand
gaugcccgcugguucacua

SEQ ID NO: 2019150 - RNA, 19 nt, Homo sapiens
  misc_RNA (1)...(19): siRNA sense strand
ggacauugcuguauuuugg

SEQ ID NO: 2019151 - RNA, 19 nt, Homo sapiens
  misc_RNA (1)...(19): siRNA sense strand
ccaccaagccgagcuauug

SEQ ID NO: 2019152 - RNA, 19 nt, Homo sapiens
  misc_RNA (1)...(19): siRNA sense strand
aaaagaagcugggguugua

SEQ ID NO: 2019153 - RNA, 19 nt, Homo sapiens
  misc_RNA (1)...(19): siRNA sense strand
gacaauagaagaugcuguu

SEQ ID NO: 2019154 - RNA, 19 nt, Homo sapiens
  misc_RNA (1)...(19): siRNA sense strand
uggcuggacugcuuuaaug

SEQ ID NO: 2019155 - RNA, 19 nt, Homo sapiens
  misc_RNA (1)...(19): siRNA sense strand
gaaguggaagaaugugaaa

SEQ ID NO: 2019156 - RNA, 19 nt, Homo sapiens
  misc_RNA (1)...(19): siRNA sense strand
gaagcagcaggcauucuuu

SEQ ID NO: 2019157 - RNA, 19 nt, Homo sapiens
  misc_RNA (1)...(19): siRNA sense strand
gagagaaguagaagaggaa

SEQ ID NO: 2019158 - RNA, 19 nt, Homo sapiens
  misc_RNA (1)...(19): siRNA sense strand
gcugaacuacacagauaua

SEQ ID NO: 2019159 - RNA, 19 nt, Homo sapiens
  misc_RNA (1)...(19): siRNA sense strand
gcaaguuauucauccagau

SEQ ID NO: 2019160 - RNA, 19 nt, Homo sapiens
  misc_RNA (1)...(19): siRNA sense strand
caagaaauaguuacucagu

SEQ ID NO: 2019161 - RNA, 19 nt, Homo sapiens
  misc_RNA (1)...(19): siRNA sense strand
uaauuaugcuggugaaguc

SEQ ID NO: 2019162 - RNA, 19 nt, Homo sapiens
  misc_RNA (1)...(19): siRNA sense strand
ggacugcuuuaauguaugc

SEQ ID NO: 2019163 - RNA, 19 nt, Homo sapiens
  misc_RNA (1)...(19): siRNA sense strand
agucaaaguuggccauguu

SEQ ID NO: 2019164 - RNA, 19 nt, Homo sapiens
  misc_RNA (1)...(19): siRNA sense strand
gcacuggacauugcuguau

SEQ ID NO: 2019165 - RNA, 19 nt, Homo sapiens
  misc_RNA (1)...(19): siRNA sense strand
caaacacuggauuagaaua

SEQ ID NO: 2019166 - RNA, 19 nt, Homo sapiens
  misc_RNA (1)...(19): siRNA sense strand
gaugggaccaaaugccuuu

SEQ ID NO: 2019167 - RNA, 19 nt, Homo sapiens
  misc_RNA (1)...(19): siRNA sense strand
ggaaaugcaacuaaaauug

SEQ ID NO: 2019168 - RNA, 19 nt, Homo sapiens
  misc_RNA (1)...(19): siRNA sense strand
ugccagcccuucugcaauu

SEQ ID NO: 2019169 - RNA, 19 nt, Homo sapiens
  misc_RNA (1)...(19): siRNA sense strand
aagaagccuugguuccuaa

SEQ ID NO: 2019170 - RNA, 19 nt, Homo sapiens
  misc_RNA (1)...(19): siRNA sense strand
ugagaaagggugugacaga

SEQ ID NO: 2019171 - RNA, 19 nt, Homo sapiens
  misc_RNA (1)...(19): siRNA sense strand
ggagagacaauagaagaug

SEQ ID NO: 2019172 - RNA, 19 nt, Homo sapiens
  misc_RNA (1)...(19): siRNA sense strand
gagaggaggaagauggauu

SEQ ID NO: 2019173 - RNA, 19 nt, Homo sapiens
  misc_RNA (1)...(19): siRNA sense strand
cugacuggcugcuagcuaa

SEQ ID NO: 2019174 - RNA, 19 nt, Homo sapiens
  misc_RNA (1)...(19): siRNA sense strand
acccagagauaguccaauu

SEQ ID NO: 2019175 - RNA, 19 nt, Homo sapiens
  misc_RNA (1)...(19): siRNA sense strand
aauagaagaugcuguuagg

SEQ ID NO: 2019176 - RNA, 19 nt, Homo sapiens
  misc_RNA (1)...(19): siRNA sense strand
caaguuaacaggaauacuc

SEQ ID NO: 2019177 - RNA, 19 nt, Homo sapiens
  misc_RNA (1)...(19): siRNA sense strand
ccagagauaguccaauuuc

SEQ ID NO: 2019178 - RNA, 19 nt, Homo sapiens
  misc_RNA (1)...(19): siRNA sense strand
ccuaacgaaugaaguggaa

SEQ ID NO: 2019179 - RNA, 19 nt, Homo sapiens
  misc_RNA (1)...(19): siRNA sense strand
cugguuugcucuagguaua

SEQ ID NO: 2019180 - RNA, 19 nt, Homo sapiens
  misc_RNA (1)...(19): siRNA sense strand
gcuggacugcuuuaaugua

SEQ ID NO: 2019181 - RNA, 19 nt, Homo sapiens
  misc_RNA (1)...(19): siRNA sense strand
aucaaacacuggauuagaa

SEQ ID NO: 2019182 - RNA, 19 nt, Homo sapiens
  misc_RNA (1)...(19): siRNA sense strand
gccgagcuauugcacauca

SEQ ID NO: 2019183 - RNA, 19 nt, Homo sapiens
  misc_RNA (1)...(19): siRNA sense strand
gcugcuagcuaaagaaagc

SEQ ID NO: 2019184 - RNA, 19 nt, Homo sapiens
  misc_RNA (1)...(19): siRNA sense strand
gaauucaagcaaagacaug

SEQ ID NO: 2019185 - RNA, 19 nt, Homo sapiens
  misc_RNA (1)...(19): siRNA sense strand
uggauugguugccugguuu

SEQ ID NO: 2019186 - RNA, 19 nt, Homo sapiens
  misc_RNA (1)...(19): siRNA sense strand
acaggaauacucagucauu

SEQ ID NO: 2019187 - RNA, 19 nt, Homo sapiens
  misc_RNA (1)...(19): siRNA sense strand
cuagcagugucuacagaaa

SEQ ID NO: 2019188 - RNA, 19 nt, Homo sapiens
  misc_RNA (1)...(19): siRNA sense strand
uaacgaaugaaguggaaga

SEQ ID NO: 2019189 - RNA, 19 nt, Homo sapiens
  misc_RNA (1)...(19): siRNA sense strand
gaggaugcccgcugguuca

SEQ ID NO: 2019190 - RNA, 19 nt, Homo sapiens
  misc_RNA (1)...(19): siRNA sense strand
gcagugucuacagaaauua

SEQ ID NO: 2019191 - RNA, 19 nt, Homo sapiens
  misc_RNA (1)...(19): siRNA sense strand
gaagaggaaaguggaguca

SEQ ID NO: 2019192 - RNA, 19 nt, Homo sapiens
  misc_RNA (1)...(19): siRNA sense strand
uuaaaucccuugguuacuc

SEQ ID NO: 2019193 - RNA, 19 nt, Homo sapiens
  misc_RNA (1)...(19): siRNA sense strand
gcagcaggcauucuuugug

SEQ ID NO: 2019194 - RNA, 19 nt, Homo sapiens
  misc_RNA (1)...(19): siRNA sense strand
agacugcacuggacauugc

SEQ ID NO: 2019195 - RNA, 19 nt, Homo sapiens
  misc_RNA (1)...(19): siRNA sense strand
agcagugucuacagaaauu

SEQ ID NO: 2019196 - RNA, 19 nt, Homo sapiens
  misc_RNA (1)...(19): siRNA sense strand
uaauguaugcggcaaggaa

SEQ ID NO: 2019197 - RNA, 19 nt, Homo sapiens
  misc_RNA (1)...(19): siRNA sense strand
aggagauauugccaaguua

SEQ ID NO: 2019198 - RNA, 19 nt, Homo sapiens
  misc_RNA (1)...(19): siRNA sense strand
cuggacugcuuuaauguau

SEQ ID NO: 2019199 - RNA, 19 nt, Homo sapiens
  misc_RNA (1)...(19): siRNA sense strand
gagagaggaggaagaugga

SEQ ID NO: 2019200 - RNA, 19 nt, Homo sapiens
  misc_RNA (1)...(19): siRNA sense strand
acuggacauugcuguauuu

SEQ ID NO: 2019201 - RNA, 19 nt, Homo sapiens
  misc_RNA (1)...(19): siRNA sense strand
gcucaagcaagaucuguuc

SEQ ID NO: 2019202 - RNA, 19 nt, Homo sapiens
  misc_RNA (1)...(19): siRNA sense strand
gaagucugaagcaagaaau

SEQ ID NO: 2019203 - RNA, 19 nt, Homo sapiens
  misc_RNA (1)...(19): siRNA sense strand
caauagaagaugcuguuag

SEQ ID NO: 2019204 - RNA, 19 nt, Homo sapiens
  misc_RNA (1)...(19): siRNA sense strand
guaaucaugcaaguuauuc

SEQ ID NO: 2019205 - RNA, 19 nt, Homo sapiens
  misc_RNA (1)...(19): siRNA sense strand
gauaguccaauuucugcuu

SEQ ID NO: 2019206 - RNA, 19 nt, Homo sapiens
  misc_RNA (1)...(19): siRNA sense strand
cuagguggcaauaaagaaa

SEQ ID NO: 2019207 - RNA, 19 nt, Homo sapiens
  misc_RNA (1)...(19): siRNA sense strand
uacucuagguggcaauaaa

SEQ ID NO: 2019208 - RNA, 19 nt, Homo sapiens
  misc_RNA (1)...(19): siRNA sense strand
uaaaucccuugguuacucu

SEQ ID NO: 2019209 - RNA, 19 nt, Homo sapiens
  misc_RNA (1)...(19): siRNA sense strand
gggugugacagaucaauug

SEQ ID NO: 2019210 - RNA, 19 nt, Homo sapiens
  misc_RNA (1)...(19): siRNA sense strand
cugaagcaagaaauaguua

SEQ ID NO: 2019211 - RNA, 19 nt, Homo sapiens
  misc_RNA (1)...(19): siRNA sense strand
uauugcugcugaagaauuc

SEQ ID NO: 2019212 - RNA, 19 nt, Homo sapiens
  misc_RNA (1)...(19): siRNA sense strand
gaagcaagaaauaguuacu

SEQ ID NO: 2019213 - RNA, 19 nt, Homo sapiens
  misc_RNA (1)...(19): siRNA sense strand
gaacaugccucauaguuua

SEQ ID NO: 2019214 - RNA, 19 nt, Homo sapiens
  misc_RNA (1)...(19): siRNA sense strand
gaaauaacauccugauugu

SEQ ID NO: 2019215 - RNA, 19 nt, Homo sapiens
  misc_RNA (1)...(19): siRNA sense strand
gaggauggauguuguguuu

SEQ ID NO: 2019216 - RNA, 19 nt, Homo sapiens
  misc_RNA (1)...(19): siRNA sense strand
ggaaauaacauccugauug

SEQ ID NO: 2019217 - RNA, 19 nt, Homo sapiens
  misc_RNA (1)...(19): siRNA sense strand
gcaaauuaguuguuucaga

SEQ ID NO: 2019218 - RNA, 19 nt, Homo sapiens
  misc_RNA (1)...(19): siRNA sense strand
gcaauaccauuaucgauca

SEQ ID NO: 2019219 - RNA, 19 nt, Homo sapiens
  misc_RNA (1)...(19): siRNA sense strand
cacaauaucuugaaagguu

SEQ ID NO: 2019220 - RNA, 19 nt, Homo sapiens
  misc_RNA (1)...(19): siRNA sense strand
gaacaaggcacacaacauc

SEQ ID NO: 2019221 - RNA, 19 nt, Homo sapiens
  misc_RNA (1)...(19): siRNA sense strand
ccaccaauccuuccucuua

SEQ ID NO: 2019222 - RNA, 19 nt, Homo sapiens
  misc_RNA (1)...(19): siRNA sense strand
cacauuaccugcauggaua

SEQ ID NO: 2019223 - RNA, 19 nt, Homo sapiens
  misc_RNA (1)...(19): siRNA sense strand
caguagaaguuuccaagua

SEQ ID NO: 2019224 - RNA, 19 nt, Homo sapiens
  misc_RNA (1)...(19): siRNA sense strand
ggugaagccuuauuagaga

SEQ ID NO: 2019225 - RNA, 19 nt, Homo sapiens
  misc_RNA (1)...(19): siRNA sense strand
ccacgcaucuucccuugaa

SEQ ID NO: 2019226 - RNA, 19 nt, Homo sapiens
  misc_RNA (1)...(19): siRNA sense strand
uuagagagcaauaccauua

SEQ ID NO: 2019227 - RNA, 19 nt, Homo sapiens
  misc_RNA (1)...(19): siRNA sense strand
gucagucgcuggaaaugua

SEQ ID NO: 2019228 - RNA, 19 nt, Homo sapiens
  misc_RNA (1)...(19): siRNA sense strand
gaauauggcagcugacaga

SEQ ID NO: 2019229 - RNA, 19 nt, Homo sapiens
  misc_RNA (1)...(19): siRNA sense strand
guacaaaugguccgaaaga

SEQ ID NO: 2019230 - RNA, 19 nt, Homo sapiens
  misc_RNA (1)...(19): siRNA sense strand
ggagagagaccuugcuuca

SEQ ID NO: 2019231 - RNA, 19 nt, Homo sapiens
  misc_RNA (1)...(19): siRNA sense strand
cacagaagcuuuccgacuu

SEQ ID NO: 2019232 - RNA, 19 nt, Homo sapiens
  misc_RNA (1)...(19): siRNA sense strand
ggcagcaugugacugguua

SEQ ID NO: 2019233 - RNA, 19 nt, Homo sapiens
  misc_RNA (1)...(19): siRNA sense strand
aguagaaguuuccaaguaa

SEQ ID NO: 2019234 - RNA, 19 nt, Homo sapiens
  misc_RNA (1)...(19): siRNA sense strand
cauuaucgaucaugucuau

SEQ ID NO: 2019235 - RNA, 19 nt, Homo sapiens
  misc_RNA (1)...(19): siRNA sense strand
gaaugcagcaccuggauau

SEQ ID NO: 2019236 - RNA, 19 nt, Homo sapiens
  misc_RNA (1)...(19): siRNA sense strand
ccaaggacuucguacaaau

SEQ ID NO: 2019237 - RNA, 19 nt, Homo sapiens
  misc_RNA (1)...(19): siRNA sense strand
gacccuggcuuaccacuuc

SEQ ID NO: 2019238 - RNA, 19 nt, Homo sapiens
  misc_RNA (1)...(19): siRNA sense strand
cuugaaagguuuacaacaa

SEQ ID NO: 2019239 - RNA, 19 nt, Homo sapiens
  misc_RNA (1)...(19): siRNA sense strand
gcaugugacugguuauucu

SEQ ID NO: 2019240 - RNA, 19 nt, Homo sapiens
  misc_RNA (1)...(19): siRNA sense strand
ggauggauguuguguuugg

SEQ ID NO: 2019241 - RNA, 19 nt, Homo sapiens
  misc_RNA (1)...(19): siRNA sense strand
gaacuccaaggacuucgua

SEQ ID NO: 2019242 - RNA, 19 nt, Homo sapiens
  misc_RNA (1)...(19): siRNA sense strand
acuagugggugaagccuua

SEQ ID NO: 2019243 - RNA, 19 nt, Homo sapiens
  misc_RNA (1)...(19): siRNA sense strand
gcugacagauccaccaauc

SEQ ID NO: 2019244 - RNA, 19 nt, Homo sapiens
  misc_RNA (1)...(19): siRNA sense strand
cuacagaccucacauucca

SEQ ID NO: 2019245 - RNA, 19 nt, Homo sapiens
  misc_RNA (1)...(19): siRNA sense strand
ggauauuucaugguucuua

SEQ ID NO: 2019246 - RNA, 19 nt, Homo sapiens
  misc_RNA (1)...(19): siRNA sense strand
ccaaucagcaaauuaguug

SEQ ID NO: 2019247 - RNA, 19 nt, Homo sapiens
  misc_RNA (1)...(19): siRNA sense strand
acagaagcuuuccgacuuu

SEQ ID NO: 2019248 - RNA, 19 nt, Homo sapiens
  misc_RNA (1)...(19): siRNA sense strand
gcguguaccugccaacuuc

SEQ ID NO: 2019249 - RNA, 19 nt, Homo sapiens
  misc_RNA (1)...(19): siRNA sense strand
cagaauccuaugauacuua

SEQ ID NO: 2019250 - RNA, 19 nt, Homo sapiens
  misc_RNA (1)...(19): siRNA sense strand
caacuucaucggccucuuu

SEQ ID NO: 2019251 - RNA, 19 nt, Homo sapiens
  misc_RNA (1)...(19): siRNA sense strand
gcacauuaccugcauggau

SEQ ID NO: 2019252 - RNA, 19 nt, Homo sapiens
  misc_RNA (1)...(19): siRNA sense strand
cuggguggcuaccauauuu

SEQ ID NO: 2019253 - RNA, 19 nt, Homo sapiens
  misc_RNA (1)...(19): siRNA sense strand
gaaguuuccaaguaacaaa

SEQ ID NO: 2019254 - RNA, 19 nt, Homo sapiens
  misc_RNA (1)...(19): siRNA sense strand
ugaaagguuuacaacaaga

SEQ ID NO: 2019255 - RNA, 19 nt, Homo sapiens
  misc_RNA (1)...(19): siRNA sense strand
ggaagaacaaggcacacaa

SEQ ID NO: 2019256 - RNA, 19 nt, Homo sapiens
  misc_RNA (1)...(19): siRNA sense strand
ugaacaugccucauaguuu

SEQ ID NO: 2019257 - RNA, 19 nt, Homo sapiens
  misc_RNA (1)...(19): siRNA sense strand
uaccaaggcugaugaaugc

SEQ ID NO: 2019258 - RNA, 19 nt, Homo sapiens
  misc_RNA (1)...(19): siRNA sense strand
gaaagguuuacaacaagaa

SEQ ID NO: 2019259 - RNA, 19 nt, Homo sapiens
  misc_RNA (1)...(19): siRNA sense strand
aggagaaacuggaauaugg

SEQ ID NO: 2019260 - RNA, 19 nt, Homo sapiens
  misc_RNA (1)...(19): siRNA sense strand
cgggauauccgauuugcua

SEQ ID NO: 2019261 - RNA, 19 nt, Homo sapiens
  misc_RNA (1)...(19): siRNA sense strand
guucagacugcacacaaua

SEQ ID NO: 2019262 - RNA, 19 nt, Homo sapiens
  misc_RNA (1)...(19): siRNA sense strand
uuaaauacaucgucaucca

SEQ ID NO: 2019263 - RNA, 19 nt, Homo sapiens
  misc_RNA (1)...(19): siRNA sense strand
ugccaaaggccgcuacaua

SEQ ID NO: 2019264 - RNA, 19 nt, Homo sapiens
  misc_RNA (1)...(19): siRNA sense strand
gagacgacuccucuuacua

SEQ ID NO: 2019265 - RNA, 19 nt, Homo sapiens
  misc_RNA (1)...(19): siRNA sense strand
cgacuccucuuacuaucau

SEQ ID NO: 2019266 - RNA, 19 nt, Homo sapiens
  misc_RNA (1)...(19): siRNA sense strand
cagcgaggguuggaucuau

SEQ ID NO: 2019267 - RNA, 19 nt, Homo sapiens
  misc_RNA (1)...(19): siRNA sense strand
gugagaggauggauguugu

SEQ ID NO: 2019268 - RNA, 19 nt, Homo sapiens
  misc_RNA (1)...(19): siRNA sense strand
agacgacuccucuuacuau

SEQ ID NO: 2019269 - RNA, 19 nt, Homo sapiens
  misc_RNA (1)...(19): siRNA sense strand
guuucagaauccuaugaua

SEQ ID NO: 2019270 - RNA, 19 nt, Homo sapiens
  misc_RNA (1)...(19): siRNA sense strand
gaauuaggagaaacuggaa

SEQ ID NO: 2019271 - RNA, 19 nt, Homo sapiens
  misc_RNA (1)...(19): siRNA sense strand
gauaccuccaucagaguua

SEQ ID NO: 2019272 - RNA, 19 nt, Homo sapiens
  misc_RNA (1)...(19): siRNA sense strand
cauaagaagcagcuacaug

SEQ ID NO: 2019273 - RNA, 19 nt, Homo sapiens
  misc_RNA (1)...(19): siRNA sense strand
gcacacaauaucuugaaag

SEQ ID NO: 2019274 - RNA, 19 nt, Homo sapiens
  misc_RNA (1)...(19): siRNA sense strand
uguggaaccucauaagaag

SEQ ID NO: 2019275 - RNA, 19 nt, Homo sapiens
  misc_RNA (1)...(19): siRNA sense strand
caaggacuucguacaaaug

SEQ ID NO: 2019276 - RNA, 19 nt, Homo sapiens
  misc_RNA (1)...(19): siRNA sense strand
auaagaagcagcuacaugu

SEQ ID NO: 2019277 - RNA, 19 nt, Homo sapiens
  misc_RNA (1)...(19): siRNA sense strand
gccaaaggccgcuacauac

SEQ ID NO: 2019278 - RNA, 19 nt, Homo sapiens
  misc_RNA (1)...(19): siRNA sense strand
uccaaggacuucguacaaa

SEQ ID NO: 2019279 - RNA, 19 nt, Homo sapiens
  misc_RNA (1)...(19): siRNA sense strand
gggugaagccuuauuagag

SEQ ID NO: 2019280 - RNA, 19 nt, Homo sapiens
  misc_RNA (1)...(19): siRNA sense strand
aaccugaacaugccucaua

SEQ ID NO: 2019281 - RNA, 19 nt, Homo sapiens
  misc_RNA (1)...(19): siRNA sense strand
cuucaucggccucuuugua

SEQ ID NO: 2019282 - RNA, 19 nt, Homo sapiens
  misc_RNA (1)...(19): siRNA sense strand
gaagaacaaggcacacaac

SEQ ID NO: 2019283 - RNA, 19 nt, Homo sapiens
  misc_RNA (1)...(19): siRNA sense strand
gagcaauaccauuaucgau

SEQ ID NO: 2019284 - RNA, 19 nt, Homo sapiens
  misc_RNA (1)...(19): siRNA sense strand
guggugguuuccgagauua

SEQ ID NO: 2019285 - RNA, 19 nt, Homo sapiens
  misc_RNA (1)...(19): siRNA sense strand
ucaucggccucuuuguaaa

SEQ ID NO: 2019286 - RNA, 19 nt, Homo sapiens
  misc_RNA (1)...(19): siRNA sense strand
ggacuucaucuucaugucu

SEQ ID NO: 2019287 - RNA, 19 nt, Homo sapiens
  misc_RNA (1)...(19): siRNA sense strand
ggcuucaacuggagagaga

SEQ ID NO: 2019288 - RNA, 19 nt, Homo sapiens
  misc_RNA (1)...(19): siRNA sense strand
cagcaaauuaguuguuuca

SEQ ID NO: 2019289 - RNA, 19 nt, Homo sapiens
  misc_RNA (1)...(19): siRNA sense strand
ggugagaggauggauguug

SEQ ID NO: 2019290 - RNA, 19 nt, Homo sapiens
  misc_RNA (1)...(19): siRNA sense strand
aagaagcagcuacauguga

SEQ ID NO: 2019291 - RNA, 19 nt, Homo sapiens
  misc_RNA (1)...(19): siRNA sense strand
ugugaagaauuaggagaaa

SEQ ID NO: 2019292 - RNA, 19 nt, Homo sapiens
  misc_RNA (1)...(19): siRNA sense strand
guagaaguuuccaaguaac

SEQ ID NO: 2019293 - RNA, 19 nt, Homo sapiens
  misc_RNA (1)...(19): siRNA sense strand
ggauaccuccaucagaguu

SEQ ID NO: 2019294 - RNA, 19 nt, Homo sapiens
  misc_RNA (1)...(19): siRNA sense strand
gggagcacauuaccugcau

SEQ ID NO: 2019295 - RNA, 19 nt, Homo sapiens
  misc_RNA (1)...(19): siRNA sense strand
auccaacucucucacguuu

SEQ ID NO: 2019296 - RNA, 19 nt, Homo sapiens
  misc_RNA (1)...(19): siRNA sense strand
gaucuauggcacguccuua

SEQ ID NO: 2019297 - RNA, 19 nt, Homo sapiens
  misc_RNA (1)...(19): siRNA sense strand
gacuccugccugagaauua

SEQ ID NO: 2019298 - RNA, 19 nt, Homo sapiens
  misc_RNA (1)...(19): siRNA sense strand
gagagagaccuugcuucaa

SEQ ID NO: 2019299 - RNA, 19 nt, Homo sapiens
  misc_RNA (1)...(19): siRNA sense strand
ucagaauccuaugauacuu

SEQ ID NO: 2019300 - RNA, 19 nt, Homo sapiens
  misc_RNA (1)...(19): siRNA sense strand
cacacaauaucuugaaagg

SEQ ID NO: 2019301 - RNA, 19 nt, Homo sapiens
  misc_RNA (1)...(19): siRNA sense strand
acacucugccaguucuuua

SEQ ID NO: 2019302 - RNA, 19 nt, Homo sapiens
  misc_RNA (1)...(19): siRNA sense strand
gauguuguguuugggaagu

SEQ ID NO: 2019303 - RNA, 19 nt, Homo sapiens
  misc_RNA (1)...(19): siRNA sense strand
uaaauacaucgucauccaa

SEQ ID NO: 2019304 - RNA, 19 nt, Homo sapiens
  misc_RNA (1)...(19): siRNA sense strand
ucaugguucuuauucaauc

SEQ ID NO: 2019305 - RNA, 19 nt, Homo sapiens
  misc_RNA (1)...(19): siRNA sense strand
agacauuacaggucaucua

SEQ ID NO: 2019306 - RNA, 19 nt, Homo sapiens
  misc_RNA (1)...(19): siRNA sense strand
uuguuccugugaagaauua

SEQ ID NO: 2019307 - RNA, 19 nt, Homo sapiens
  misc_RNA (1)...(19): siRNA sense strand
agagagcaauaccauuauc

SEQ ID NO: 2019308 - RNA, 19 nt, Homo sapiens
  misc_RNA (1)...(19): siRNA sense strand
ugcagcaccuggauauuuc

SEQ ID NO: 2019309 - RNA, 19 nt, Homo sapiens
  misc_RNA (1)...(19): siRNA sense strand
ugaaugcagcaccuggaua

SEQ ID NO: 2019310 - RNA, 19 nt, Homo sapiens
  misc_RNA (1)...(19): siRNA sense strand
gggaguacguccucuaccu

SEQ ID NO: 2019311 - RNA, 19 nt, Homo sapiens
  misc_RNA (1)...(19): siRNA sense strand
uuaccaaggcugaugaaug

SEQ ID NO: 2019312 - RNA, 19 nt, Homo sapiens
  misc_RNA (1)...(19): siRNA sense strand
ggacuccugccugagaauu

SEQ ID NO: 2019313 - RNA, 19 nt, Homo sapiens
  misc_RNA (1)...(19): siRNA sense strand
gagaagaucuggcuccuaa

SEQ ID NO: 2019314 - RNA, 19 nt, Homo sapiens
  misc_RNA (1)...(19): siRNA sense strand
cuaaauaccuuccucauaa

SEQ ID NO: 2019315 - RNA, 19 nt, Homo sapiens
  misc_RNA (1)...(19): siRNA sense strand
ugaaacagaucaaggaaua

SEQ ID NO: 2019316 - RNA, 19 nt, Homo sapiens
  misc_RNA (1)...(19): siRNA sense strand
gaagacaacucuccuaaca

SEQ ID NO: 2019317 - RNA, 19 nt, Homo sapiens
  misc_RNA (1)...(19): siRNA sense strand
gagcauaaccaaaguauuu

SEQ ID NO: 2019318 - RNA, 19 nt, Homo sapiens
  misc_RNA (1)...(19): siRNA sense strand
caaaguauuuccuucagua

SEQ ID NO: 2019319 - RNA, 19 nt, Homo sapiens
  misc_RNA (1)...(19): siRNA sense strand
gaaaggaccaaucucauuu

SEQ ID NO: 2019320 - RNA, 19 nt, Homo sapiens
  misc_RNA (1)...(19): siRNA sense strand
uaacacaugccaaguaaua

SEQ ID NO: 2019321 - RNA, 19 nt, Homo sapiens
  misc_RNA (1)...(19): siRNA sense strand
caucccagcuugaagaaua

SEQ ID NO: 2019322 - RNA, 19 nt, Homo sapiens
  misc_RNA (1)...(19): siRNA sense strand
caaagaagagccaggaaua

SEQ ID NO: 2019323 - RNA, 19 nt, Homo sapiens
  misc_RNA (1)...(19): siRNA sense strand
gaaggaaccugaagacaac

SEQ ID NO: 2019324 - RNA, 19 nt, Homo sapiens
  misc_RNA (1)...(19): siRNA sense strand
ggaccaaucucauuugaag

SEQ ID NO: 2019325 - RNA, 19 nt, Homo sapiens
  misc_RNA (1)...(19): siRNA sense strand
agaaauagcugagccuaaa

SEQ ID NO: 2019326 - RNA, 19 nt, Homo sapiens
  misc_RNA (1)...(19): siRNA sense strand
acagagaacuacuuagaaa

SEQ ID NO: 2019327 - RNA, 19 nt, Homo sapiens
  misc_RNA (1)...(19): siRNA sense strand
ggaaaggaccaaucucauu

SEQ ID NO: 2019328 - RNA, 19 nt, Homo sapiens
  misc_RNA (1)...(19): siRNA sense strand
ggaauacaaugaaacagau

SEQ ID NO: 2019329 - RNA, 19 nt, Homo sapiens
  misc_RNA (1)...(19): siRNA sense strand
caagaaauaucuguacuuc

SEQ ID NO: 2019330 - RNA, 19 nt, Homo sapiens
  misc_RNA (1)...(19): siRNA sense strand
uaccugggcuugaagaaua

SEQ ID NO: 2019331 - RNA, 19 nt, Homo sapiens
  misc_RNA (1)...(19): siRNA sense strand
agaaucagcugaaccuaaa

SEQ ID NO: 2019332 - RNA, 19 nt, Homo sapiens
  misc_RNA (1)...(19): siRNA sense strand
ccuaaaggcuauauucuug

SEQ ID NO: 2019333 - RNA, 19 nt, Homo sapiens
  misc_RNA (1)...(19): siRNA sense strand
gaagaccucucuccuaaaa

SEQ ID NO: 2019334 - RNA, 19 nt, Homo sapiens
  misc_RNA (1)...(19): siRNA sense strand
ccaggaagaugcuaaagau

SEQ ID NO: 2019335 - RNA, 19 nt, Homo sapiens
  misc_RNA (1)...(19): siRNA sense strand
cugaagaccucucuccuaa

SEQ ID NO: 2019336 - RNA, 19 nt, Homo sapiens
  misc_RNA (1)...(19): siRNA sense strand
cugaagaccucucuacuga

SEQ ID NO: 2019337 - RNA, 19 nt, Homo sapiens
  misc_RNA (1)...(19): siRNA sense strand
ccuaacacaugccaaguaa

SEQ ID NO: 2019338 - RNA, 19 nt, Homo sapiens
  misc_RNA (1)...(19): siRNA sense strand
cagcagaaccagaggaaua

SEQ ID NO: 2019339 - RNA, 19 nt, Homo sapiens
  misc_RNA (1)...(19): siRNA sense strand
ucaagaccauccuuucaaa

SEQ ID NO: 2019340 - RNA, 19 nt, Homo sapiens
  misc_RNA (1)...(19): siRNA sense strand
gaaccuggaguuugagaaa

SEQ ID NO: 2019341 - RNA, 19 nt, Homo sapiens
  misc_RNA (1)...(19): siRNA sense strand
agaaauaccugggcuugaa

SEQ ID NO: 2019342 - RNA, 19 nt, Homo sapiens
  misc_RNA (1)...(19): siRNA sense strand
aaacagagaacuacuuaga

SEQ ID NO: 2019343 - RNA, 19 nt, Homo sapiens
  misc_RNA (1)...(19): siRNA sense strand
ccagaggaauacaaugaaa

SEQ ID NO: 2019344 - RNA, 19 nt, Homo sapiens
  misc_RNA (1)...(19): siRNA sense strand
gcuauauucuugacacaga

SEQ ID NO: 2019345 - RNA, 19 nt, Homo sapiens
  misc_RNA (1)...(19): siRNA sense strand
agaaagcacuggcaccuau

SEQ ID NO: 2019346 - RNA, 19 nt, Homo sapiens
  misc_RNA (1)...(19): siRNA sense strand
gcaggaugcucucuucaag

SEQ ID NO: 2019347 - RNA, 19 nt, Homo sapiens
  misc_RNA (1)...(19): siRNA sense strand
gaaauuauugugccuaaag

SEQ ID NO: 2019348 - RNA, 19 nt, Homo sapiens
  misc_RNA (1)...(19): siRNA sense strand
agacaacucuccuaacaca

SEQ ID NO: 2019349 - RNA, 19 nt, Homo sapiens
  misc_RNA (1)...(19): siRNA sense strand
agaaacagagaacuacuua

SEQ ID NO: 2019350 - RNA, 19 nt, Homo sapiens
  misc_RNA (1)...(19): siRNA sense strand
auaaggaugugccuaaaga

SEQ ID NO: 2019351 - RNA, 19 nt, Homo sapiens
  misc_RNA (1)...(19): siRNA sense strand
ccugaaauauaccaagaaa

SEQ ID NO: 2019352 - RNA, 19 nt, Homo sapiens
  misc_RNA (1)...(19): siRNA sense strand
ccugaaauauaccaagaaa

SEQ ID NO: 2019353 - RNA, 19 nt, Homo sapiens
  misc_RNA (1)...(19): siRNA sense strand
gaaagcacuggcaccuaua

SEQ ID NO: 2019354 - RNA, 19 nt, Homo sapiens
  misc_RNA (1)...(19): siRNA sense strand
aggaauagcugagacagaa

SEQ ID NO: 2019355 - RNA, 19 nt, Homo sapiens
  misc_RNA (1)...(19): siRNA sense strand
gaaauaaaccaagaaacuc

SEQ ID NO: 2019356 - RNA, 19 nt, Homo sapiens
  misc_RNA (1)...(19): siRNA sense strand
guaccaagauauggcuaaa

SEQ ID NO: 2019357 - RNA, 19 nt, Homo sapiens
  misc_RNA (1)...(19): siRNA sense strand
ccugaaacguaucaagaaa

SEQ ID NO: 2019358 - RNA, 19 nt, Homo sapiens
  misc_RNA (1)...(19): siRNA sense strand
gcacuggcaccuauagaga

SEQ ID NO: 2019359 - RNA, 19 nt, Homo sapiens
  misc_RNA (1)...(19): siRNA sense strand
agauauggcuaaacgagaa

SEQ ID NO: 2019360 - RNA, 19 nt, Homo sapiens
  misc_RNA (1)...(19): siRNA sense strand
caagaaauagcaguacaaa

SEQ ID NO: 2019361 - RNA, 19 nt, Homo sapiens
  misc_RNA (1)...(19): siRNA sense strand
ccuaaauaccuuccucaua

SEQ ID NO: 2019362 - RNA, 19 nt, Homo sapiens
  misc_RNA (1)...(19): siRNA sense strand
guaccaagaaauagcagua

SEQ ID NO: 2019363 - RNA, 19 nt, Homo sapiens
  misc_RNA (1)...(19): siRNA sense strand
ugaaggaaccugaagacaa

SEQ ID NO: 2019364 - RNA, 19 nt, Homo sapiens
  misc_RNA (1)...(19): siRNA sense strand
ggaaaucgaagaggcagaa

SEQ ID NO: 2019365 - RNA, 19 nt, Homo sapiens
  misc_RNA (1)...(19): siRNA sense strand
aaaccauucuucugaaaca

SEQ ID NO: 2019366 - RNA, 19 nt, Homo sapiens
  misc_RNA (1)...(19): siRNA sense strand
caaugaaacagaucaagga

SEQ ID NO: 2019367 - RNA, 19 nt, Homo sapiens
  misc_RNA (1)...(19): siRNA sense strand
ggaagaugcuaaagaugcu

SEQ ID NO: 2019368 - RNA, 19 nt, Homo sapiens
  misc_RNA (1)...(19): siRNA sense strand
aaacaucccagcuugaaga

SEQ ID NO: 2019369 - RNA, 19 nt, Homo sapiens
  misc_RNA (1)...(19): siRNA sense strand
gagaaacagagaacuacuu

SEQ ID NO: 2019370 - RNA, 19 nt, Homo sapiens
  misc_RNA (1)...(19): siRNA sense strand
aaauaaggaugugccuaaa

SEQ ID NO: 2019371 - RNA, 19 nt, Homo sapiens
  misc_RNA (1)...(19): siRNA sense strand
guaccaagaaauaucugua

SEQ ID NO: 2019372 - RNA, 19 nt, Homo sapiens
  misc_RNA (1)...(19): siRNA sense strand
ggaugugccuaaagaaugc

SEQ ID NO: 2019373 - RNA, 19 nt, Homo sapiens
  misc_RNA (1)...(19): siRNA sense strand
ggaaauaguggagaaagca

SEQ ID NO: 2019374 - RNA, 19 nt, Homo sapiens
  misc_RNA (1)...(19): siRNA sense strand
caccugaaauauaccaaga

SEQ ID NO: 2019375 - RNA, 19 nt, Homo sapiens
  misc_RNA (1)...(19): siRNA sense strand
caccugaaauauaccaaga

SEQ ID NO: 2019376 - RNA, 19 nt, Homo sapiens
  misc_RNA (1)...(19): siRNA sense strand
agaagcugcuguacccaaa

SEQ ID NO: 2019377 - RNA, 19 nt, Homo sapiens
  misc_RNA (1)...(19): siRNA sense strand
ccaagaaacaucccagcuu

SEQ ID NO: 2019378 - RNA, 19 nt, Homo sapiens
  misc_RNA (1)...(19): siRNA sense strand
uaucuguacuucaagacaa

SEQ ID NO: 2019379 - RNA, 19 nt, Homo sapiens
  misc_RNA (1)...(19): siRNA sense strand
gaucaaggaauagcugaga

SEQ ID NO: 2019380 - RNA, 19 nt, Homo sapiens
  misc_RNA (1)...(19): siRNA sense strand
gaaacuccugggucugaaa

SEQ ID NO: 2019381 - RNA, 19 nt, Homo sapiens
  misc_RNA (1)...(19): siRNA sense strand
ccaaaguauuuccuucagu

SEQ ID NO: 2019382 - RNA, 19 nt, Homo sapiens
  misc_RNA (1)...(19): siRNA sense strand
aaacaccucauucugaaga

SEQ ID NO: 2019383 - RNA, 19 nt, Homo sapiens
  misc_RNA (1)...(19): siRNA sense strand
caaaauaugccaagacaug

SEQ ID NO: 2019384 - RNA, 19 nt, Homo sapiens
  misc_RNA (1)...(19): siRNA sense strand
aaaggaaacaucacaaugg

SEQ ID NO: 2019385 - RNA, 19 nt, Homo sapiens
  misc_RNA (1)...(19): siRNA sense strand
caaaaccauucuucugaaa

SEQ ID NO: 2019386 - RNA, 19 nt, Homo sapiens
  misc_RNA (1)...(19): siRNA sense strand
gaagaucuggcuccuaaaa

SEQ ID NO: 2019387 - RNA, 19 nt, Homo sapiens
  misc_RNA (1)...(19): siRNA sense strand
cgaaauuauugugccuaaa

SEQ ID NO: 2019388 - RNA, 19 nt, Homo sapiens
  misc_RNA (1)...(19): siRNA sense strand
acgaaauuauugugccuaa

SEQ ID NO: 2019389 - RNA, 19 nt, Homo sapiens
  misc_RNA (1)...(19): siRNA sense strand
caacaaaacacagaauuga

SEQ ID NO: 2019390 - RNA, 19 nt, Homo sapiens
  misc_RNA (1)...(19): siRNA sense strand
cuaaagcacaccaggaaga

SEQ ID NO: 2019391 - RNA, 19 nt, Homo sapiens
  misc_RNA (1)...(19): siRNA sense strand
auuggaaccuggaguuuga

SEQ ID NO: 2019392 - RNA, 19 nt, Homo sapiens
  misc_RNA (1)...(19): siRNA sense strand
ccaagaaauaucuguacuu

SEQ ID NO: 2019393 - RNA, 19 nt, Homo sapiens
  misc_RNA (1)...(19): siRNA sense strand
gagaaagcacuggcaccua

SEQ ID NO: 2019394 - RNA, 19 nt, Homo sapiens
  misc_RNA (1)...(19): siRNA sense strand
gcagaaagagacaacaaaa

SEQ ID NO: 2019395 - RNA, 19 nt, Homo sapiens
  misc_RNA (1)...(19): siRNA sense strand
ccaaagaagagccaggaau

SEQ ID NO: 2019396 - RNA, 19 nt, Homo sapiens
  misc_RNA (1)...(19): siRNA sense strand
aagaaucagcugaaccuaa

SEQ ID NO: 2019397 - RNA, 19 nt, Homo sapiens
  misc_RNA (1)...(19): siRNA sense strand
caccugacccucaucaaga

SEQ ID NO: 2019398 - RNA, 19 nt, Homo sapiens
  misc_RNA (1)...(19): siRNA sense strand
aaggaccaaucucauuuga

SEQ ID NO: 2019399 - RNA, 19 nt, Homo sapiens
  misc_RNA (1)...(19): siRNA sense strand
gcagagaacaggaaaagga

SEQ ID NO: 2019400 - RNA, 19 nt, Homo sapiens
  misc_RNA (1)...(19): siRNA sense strand
aaucagcugaaccuaaaua

SEQ ID NO: 2019401 - RNA, 19 nt, Homo sapiens
  misc_RNA (1)...(19): siRNA sense strand
gcuauuuggagaacagaaa

SEQ ID NO: 2019402 - RNA, 19 nt, Homo sapiens
  misc_RNA (1)...(19): siRNA sense strand
gaaccagaggaauacaaug

SEQ ID NO: 2019403 - RNA, 19 nt, Homo sapiens
  misc_RNA (1)...(19): siRNA sense strand
uccaacaucugaagacaca

SEQ ID NO: 2019404 - RNA, 19 nt, Homo sapiens
  misc_RNA (1)...(19): siRNA sense strand
ccaagaaauagcaguacaa

SEQ ID NO: 2019405 - RNA, 19 nt, Homo sapiens
  misc_RNA (1)...(19): siRNA sense strand
ggcagaaagagacaacaaa

SEQ ID NO: 2019406 - RNA, 19 nt, Homo sapiens
  misc_RNA (1)...(19): siRNA sense strand
aaucgaagaggcagaaaga

SEQ ID NO: 2019407 - RNA, 19 nt, Homo sapiens
  misc_RNA (1)...(19): siRNA sense strand
gaagaggcagaaagagaca

SEQ ID NO: 2019408 - RNA, 19 nt, Homo sapiens
  misc_RNA (1)...(19): siRNA sense strand
ccucaagaaaugaaagaaa

SEQ ID NO: 2019409 - RNA, 19 nt, Homo sapiens
  misc_RNA (1)...(19): siRNA sense strand
ccagaaccacaccaagaaa

SEQ ID NO: 2019410 - RNA, 19 nt, Homo sapiens
  misc_RNA (1)...(19): siRNA sense strand
gaaaaggaaacaucacaau

SEQ ID NO: 2019411 - RNA, 19 nt, Homo sapiens
  misc_RNA (1)...(19): siRNA sense strand
gaaauaccugggcuugaag

SEQ ID NO: 2019412 - RNA, 19 nt, Homo sapiens
  misc_RNA (1)...(19): siRNA sense strand
gcuaaagaugcuuauacuu

SEQ ID NO: 2019413 - RNA, 19 nt, Homo sapiens
  misc_RNA (1)...(19): siRNA sense strand
gagaagaucuggcuccuaa

SEQ ID NO: 2019414 - RNA, 19 nt, Homo sapiens
  misc_RNA (1)...(19): siRNA sense strand
cuaaauaccuuccucauaa

SEQ ID NO: 2019415 - RNA, 19 nt, Homo sapiens
  misc_RNA (1)...(19): siRNA sense strand
ugaaacagaucaaggaaua

SEQ ID NO: 2019416 - RNA, 19 nt, Homo sapiens
  misc_RNA (1)...(19): siRNA sense strand
gaagacaacucuccuaaca

SEQ ID NO: 2019417 - RNA, 19 nt, Homo sapiens
  misc_RNA (1)...(19): siRNA sense strand
gagcauaaccaaaguauuu

SEQ ID NO: 2019418 - RNA, 19 nt, Homo sapiens
  misc_RNA (1)...(19): siRNA sense strand
caaaguauuuccuucagua

SEQ ID NO: 2019419 - RNA, 19 nt, Homo sapiens
  misc_RNA (1)...(19): siRNA sense strand
gaaaggaccaaucucauuu

SEQ ID NO: 2019420 - RNA, 19 nt, Homo sapiens
  misc_RNA (1)...(19): siRNA sense strand
uaacacaugccaaguaaua

SEQ ID NO: 2019421 - RNA, 19 nt, Homo sapiens
  misc_RNA (1)...(19): siRNA sense strand
caucccagcuugaagaaua

SEQ ID NO: 2019422 - RNA, 19 nt, Homo sapiens
  misc_RNA (1)...(19): siRNA sense strand
caaagaagagccaggaaua

SEQ ID NO: 2019423 - RNA, 19 nt, Homo sapiens
  misc_RNA (1)...(19): siRNA sense strand
gaaggaaccugaagacaac

SEQ ID NO: 2019424 - RNA, 19 nt, Homo sapiens
  misc_RNA (1)...(19): siRNA sense strand
ggaccaaucucauuugaag

SEQ ID NO: 2019425 - RNA, 19 nt, Homo sapiens
  misc_RNA (1)...(19): siRNA sense strand
agaaauagcugagccuaaa

SEQ ID NO: 2019426 - RNA, 19 nt, Homo sapiens
  misc_RNA (1)...(19): siRNA sense strand
acagagaacuacuuagaaa

SEQ ID NO: 2019427 - RNA, 19 nt, Homo sapiens
  misc_RNA (1)...(19): siRNA sense strand
ggaaaggaccaaucucauu

SEQ ID NO: 2019428 - RNA, 19 nt, Homo sapiens
  misc_RNA (1)...(19): siRNA sense strand
ggaauacaaugaaacagau

SEQ ID NO: 2019429 - RNA, 19 nt, Homo sapiens
  misc_RNA (1)...(19): siRNA sense strand
caagaaauaucuguacuuc

SEQ ID NO: 2019430 - RNA, 19 nt, Homo sapiens
  misc_RNA (1)...(19): siRNA sense strand
uaccugggcuugaagaaua

SEQ ID NO: 2019431 - RNA, 19 nt, Homo sapiens
  misc_RNA (1)...(19): siRNA sense strand
agaaucagcugaaccuaaa

SEQ ID NO: 2019432 - RNA, 19 nt, Homo sapiens
  misc_RNA (1)...(19): siRNA sense strand
ccuaaaggcuauauucuug

SEQ ID NO: 2019433 - RNA, 19 nt, Homo sapiens
  misc_RNA (1)...(19): siRNA sense strand
gaagaccucucuccuaaaa

SEQ ID NO: 2019434 - RNA, 19 nt, Homo sapiens
  misc_RNA (1)...(19): siRNA sense strand
ccaggaagaugcuaaagau

SEQ ID NO: 2019435 - RNA, 19 nt, Homo sapiens
  misc_RNA (1)...(19): siRNA sense strand
cugaagaccucucuccuaa

SEQ ID NO: 2019436 - RNA, 19 nt, Homo sapiens
  misc_RNA (1)...(19): siRNA sense strand
cugaagaccucucuacuga

SEQ ID NO: 2019437 - RNA, 19 nt, Homo sapiens
  misc_RNA (1)...(19): siRNA sense strand
ccuaacacaugccaaguaa

SEQ ID NO: 2019438 - RNA, 19 nt, Homo sapiens
  misc_RNA (1)...(19): siRNA sense strand
cagcagaaccagaggaaua

SEQ ID NO: 2019439 - RNA, 19 nt, Homo sapiens
  misc_RNA (1)...(19): siRNA sense strand
ucaagaccauccuuucaaa

SEQ ID NO: 2019440 - RNA, 19 nt, Homo sapiens
  misc_RNA (1)...(19): siRNA sense strand
gaaccuggaguuugagaaa

SEQ ID NO: 2019441 - RNA, 19 nt, Homo sapiens
  misc_RNA (1)...(19): siRNA sense strand
agaaauaccugggcuugaa

SEQ ID NO: 2019442 - RNA, 19 nt, Homo sapiens
  misc_RNA (1)...(19): siRNA sense strand
aaacagagaacuacuuaga

SEQ ID NO: 2019443 - RNA, 19 nt, Homo sapiens
  misc_RNA (1)...(19): siRNA sense strand
ccagaggaauacaaugaaa

SEQ ID NO: 2019444 - RNA, 19 nt, Homo sapiens
  misc_RNA (1)...(19): siRNA sense strand
gcuauauucuugacacaga

SEQ ID NO: 2019445 - RNA, 19 nt, Homo sapiens
  misc_RNA (1)...(19): siRNA sense strand
agaaagcacuggcaccuau

SEQ ID NO: 2019446 - RNA, 19 nt, Homo sapiens
  misc_RNA (1)...(19): siRNA sense strand
gcaggaugcucucuucaag

SEQ ID NO: 2019447 - RNA, 19 nt, Homo sapiens
  misc_RNA (1)...(19): siRNA sense strand
gaaauuauugugccuaaag

SEQ ID NO: 2019448 - RNA, 19 nt, Homo sapiens
  misc_RNA (1)...(19): siRNA sense strand
agacaacucuccuaacaca

SEQ ID NO: 2019449 - RNA, 19 nt, Homo sapiens
  misc_RNA (1)...(19): siRNA sense strand
agaaacagagaacuacuua

SEQ ID NO: 2019450 - RNA, 19 nt, Homo sapiens
  misc_RNA (1)...(19): siRNA sense strand
auaaggaugugccuaaaga

SEQ ID NO: 2019451 - RNA, 19 nt, Homo sapiens
  misc_RNA (1)...(19): siRNA sense strand
ccugaaauauaccaagaaa

SEQ ID NO: 2019452 - RNA, 19 nt, Homo sapiens
  misc_RNA (1)...(19): siRNA sense strand
ccugaaauauaccaagaaa

SEQ ID NO: 2019453 - RNA, 19 nt, Homo sapiens
  misc_RNA (1)...(19): siRNA sense strand
gaaagcacuggcaccuaua

SEQ ID NO: 2019454 - RNA, 19 nt, Homo sapiens
  misc_RNA (1)...(19): siRNA sense strand
aggaauagcugagacagaa

SEQ ID NO: 2019455 - RNA, 19 nt, Homo sapiens
  misc_RNA (1)...(19): siRNA sense strand
gaaauaaaccaagaaacuc

SEQ ID NO: 2019456 - RNA, 19 nt, Homo sapiens
  misc_RNA (1)...(19): siRNA sense strand
guaccaagauauggcuaaa

SEQ ID NO: 2019457 - RNA, 19 nt, Homo sapiens
  misc_RNA (1)...(19): siRNA sense strand
ccugaaacguaucaagaaa

SEQ ID NO: 2019458 - RNA, 19 nt, Homo sapiens
  misc_RNA (1)...(19): siRNA sense strand
gcacuggcaccuauagaga

SEQ ID NO: 2019459 - RNA, 19 nt, Homo sapiens
  misc_RNA (1)...(19): siRNA sense strand
agauauggcuaaacgagaa

SEQ ID NO: 2019460 - RNA, 19 nt, Homo sapiens
  misc_RNA (1)...(19): siRNA sense strand
caagaaauagcaguacaaa

SEQ ID NO: 2019461 - RNA, 19 nt, Homo sapiens
  misc_RNA (1)...(19): siRNA sense strand
ccuaaauaccuuccucaua

SEQ ID NO: 2019462 - RNA, 19 nt, Homo sapiens
  misc_RNA (1)...(19): siRNA sense strand
guaccaagaaauagcagua

SEQ ID NO: 2019463 - RNA, 19 nt, Homo sapiens
  misc_RNA (1)...(19): siRNA sense strand
ugaaggaaccugaagacaa

SEQ ID NO: 2019464 - RNA, 19 nt, Homo sapiens
  misc_RNA (1)...(19): siRNA sense strand
ggaaaucgaagaggcagaa

SEQ ID NO: 2019465 - RNA, 19 nt, Homo sapiens
  misc_RNA (1)...(19): siRNA sense strand
aaaccauucuucugaaaca

SEQ ID NO: 2019466 - RNA, 19 nt, Homo sapiens
  misc_RNA (1)...(19): siRNA sense strand
caaugaaacagaucaagga

SEQ ID NO: 2019467 - RNA, 19 nt, Homo sapiens
  misc_RNA (1)...(19): siRNA sense strand
ggaagaugcuaaagaugcu

SEQ ID NO: 2019468 - RNA, 19 nt, Homo sapiens
  misc_RNA (1)...(19): siRNA sense strand
aaacaucccagcuugaaga

SEQ ID NO: 2019469 - RNA, 19 nt, Homo sapiens
  misc_RNA (1)...(19): siRNA sense strand
gagaaacagagaacuacuu

SEQ ID NO: 2019470 - RNA, 19 nt, Homo sapiens
  misc_RNA (1)...(19): siRNA sense strand
aaauaaggaugugccuaaa

SEQ ID NO: 2019471 - RNA, 19 nt, Homo sapiens
  misc_RNA (1)...(19): siRNA sense strand
guaccaagaaauaucugua

SEQ ID NO: 2019472 - RNA, 19 nt, Homo sapiens
  misc_RNA (1)...(19): siRNA sense strand
ggaugugccuaaagaaugc

SEQ ID NO: 2019473 - RNA, 19 nt, Homo sapiens
  misc_RNA (1)...(19): siRNA sense strand
ggaaauaguggagaaagca

SEQ ID NO: 2019474 - RNA, 19 nt, Homo sapiens
  misc_RNA (1)...(19): siRNA sense strand
caccugaaauauaccaaga

SEQ ID NO: 2019475 - RNA, 19 nt, Homo sapiens
  misc_RNA (1)...(19): siRNA sense strand
caccugaaauauaccaaga

SEQ ID NO: 2019476 - RNA, 19 nt, Homo sapiens
  misc_RNA (1)...(19): siRNA sense strand
agaagcugcuguacccaaa

SEQ ID NO: 2019477 - RNA, 19 nt, Homo sapiens
  misc_RNA (1)...(19): siRNA sense strand
ccaagaaacaucccagcuu

SEQ ID NO: 2019478 - RNA, 19 nt, Homo sapiens
  misc_RNA (1)...(19): siRNA sense strand
uaucuguacuucaagacaa

SEQ ID NO: 2019479 - RNA, 19 nt, Homo sapiens
  misc_RNA (1)...(19): siRNA sense strand
gaucaaggaauagcugaga

SEQ ID NO: 2019480 - RNA, 19 nt, Homo sapiens
  misc_RNA (1)...(19): siRNA sense strand
gaaacuccugggucugaaa

SEQ ID NO: 2019481 - RNA, 19 nt, Homo sapiens
  misc_RNA (1)...(19): siRNA sense strand
ccaaaguauuuccuucagu

SEQ ID NO: 2019482 - RNA, 19 nt, Homo sapiens
  misc_RNA (1)...(19): siRNA sense strand
aaacaccucauucugaaga

SEQ ID NO: 2019483 - RNA, 19 nt, Homo sapiens
  misc_RNA (1)...(19): siRNA sense strand
caaaauaugccaagacaug

SEQ ID NO: 2019484 - RNA, 19 nt, Homo sapiens
  misc_RNA (1)...(19): siRNA sense strand
aaaggaaacaucacaaugg

SEQ ID NO: 2019485 - RNA, 19 nt, Homo sapiens
  misc_RNA (1)...(19): siRNA sense strand
caaaaccauucuucugaaa

SEQ ID NO: 2019486 - RNA, 19 nt, Homo sapiens
  misc_RNA (1)...(19): siRNA sense strand
gaagaucuggcuccuaaaa

SEQ ID NO: 2019487 - RNA, 19 nt, Homo sapiens
  misc_RNA (1)...(19): siRNA sense strand
cgaaauuauugugccuaaa

SEQ ID NO: 2019488 - RNA, 19 nt, Homo sapiens
  misc_RNA (1)...(19): siRNA sense strand
acgaaauuauugugccuaa

SEQ ID NO: 2019489 - RNA, 19 nt, Homo sapiens
  misc_RNA (1)...(19): siRNA sense strand
caacaaaacacagaauuga

SEQ ID NO: 2019490 - RNA, 19 nt, Homo sapiens
  misc_RNA (1)...(19): siRNA sense strand
cuaaagcacaccaggaaga

SEQ ID NO: 2019491 - RNA, 19 nt, Homo sapiens
  misc_RNA (1)...(19): siRNA sense strand
auuggaaccuggaguuuga

SEQ ID NO: 2019492 - RNA, 19 nt, Homo sapiens
  misc_RNA (1)...(19): siRNA sense strand
ccaagaaauaucuguacuu

SEQ ID NO: 2019493 - RNA, 19 nt, Homo sapiens
  misc_RNA (1)...(19): siRNA sense strand
gagaaagcacuggcaccua

SEQ ID NO: 2019494 - RNA, 19 nt, Homo sapiens
  misc_RNA (1)...(19): siRNA sense strand
gcagaaagagacaacaaaa

SEQ ID NO: 2019495 - RNA, 19 nt, Homo sapiens
  misc_RNA (1)...(19): siRNA sense strand
ccaaagaagagccaggaau

SEQ ID NO: 2019496 - RNA, 19 nt, Homo sapiens
  misc_RNA (1)...(19): siRNA sense strand
aagaaucagcugaaccuaa

SEQ ID NO: 2019497 - RNA, 19 nt, Homo sapiens
  misc_RNA (1)...(19): siRNA sense strand
caccugacccucaucaaga

SEQ ID NO: 2019498 - RNA, 19 nt, Homo sapiens
  misc_RNA (1)...(19): siRNA sense strand
aaggaccaaucucauuuga

SEQ ID NO: 2019499 - RNA, 19 nt, Homo sapiens
  misc_RNA (1)...(19): siRNA sense strand
gcagagaacaggaaaagga

SEQ ID NO: 2019500 - RNA, 19 nt, Homo sapiens
  misc_RNA (1)...(19): siRNA sense strand
aaucagcugaaccuaaaua

SEQ ID NO: 2019501 - RNA, 19 nt, Homo sapiens
  misc_RNA (1)...(19): siRNA sense strand
gcuauuuggagaacagaaa

SEQ ID NO: 2019502 - RNA, 19 nt, Homo sapiens
  misc_RNA (1)...(19): siRNA sense strand
gaaccagaggaauacaaug

SEQ ID NO: 2019503 - RNA, 19 nt, Homo sapiens
  misc_RNA (1)...(19): siRNA sense strand
uccaacaucugaagacaca

SEQ ID NO: 2019504 - RNA, 19 nt, Homo sapiens
  misc_RNA (1)...(19): siRNA sense strand
ccaagaaauagcaguacaa

SEQ ID NO: 2019505 - RNA, 19 nt, Homo sapiens
  misc_RNA (1)...(19): siRNA sense strand
ggcagaaagagacaacaaa

SEQ ID NO: 2019506 - RNA, 19 nt, Homo sapiens
  misc_RNA (1)...(19): siRNA sense strand
aaucgaagaggcagaaaga

SEQ ID NO: 2019507 - RNA, 19 nt, Homo sapiens
  misc_RNA (1)...(19): siRNA sense strand
gaagaggcagaaagagaca

SEQ ID NO: 2019508 - RNA, 19 nt, Homo sapiens
  misc_RNA (1)...(19): siRNA sense strand
ccucaagaaaugaaagaaa

SEQ ID NO: 2019509 - RNA, 19 nt, Homo sapiens
  misc_RNA (1)...(19): siRNA sense strand
ccagaaccacaccaagaaa

SEQ ID NO: 2019510 - RNA, 19 nt, Homo sapiens
  misc_RNA (1)...(19): siRNA sense strand
gaaaaggaaacaucacaau

SEQ ID NO: 2019511 - RNA, 19 nt, Homo sapiens
  misc_RNA (1)...(19): siRNA sense strand
gaaauaccugggcuugaag

SEQ ID NO: 2019512 - RNA, 19 nt, Homo sapiens
  misc_RNA (1)...(19): siRNA sense strand
gcuaaagaugcuuauacuu

SEQ ID NO: 2019513 - RNA, 19 nt, Homo sapiens
  misc_RNA (1)...(19): siRNA sense strand
gaacugaccgucucauuca

SEQ ID NO: 2019514 - RNA, 19 nt, Homo sapiens
  misc_RNA (1)...(19): siRNA sense strand
ggacguaacccuacagugu

SEQ ID NO: 2019515 - RNA, 19 nt, Homo sapiens
  misc_RNA (1)...(19): siRNA sense strand
guauggcuuugaccaauuu

SEQ ID NO: 2019516 - RNA, 19 nt, Homo sapiens
  misc_RNA (1)...(19): siRNA sense strand
gaugguaccgggcuaguuu

SEQ ID NO: 2019517 - RNA, 19 nt, Homo sapiens
  misc_RNA (1)...(19): siRNA sense strand
cuacaagaaucccgagaga

SEQ ID NO: 2019518 - RNA, 19 nt, Homo sapiens
  misc_RNA (1)...(19): siRNA sense strand
gguauggcuuugaccaauu

SEQ ID NO: 2019519 - RNA, 19 nt, Homo sapiens
  misc_RNA (1)...(19): siRNA sense strand
caaacaaagucuucacaac

SEQ ID NO: 2019520 - RNA, 19 nt, Homo sapiens
  misc_RNA (1)...(19): siRNA sense strand
gggcugugauccuaauaau

SEQ ID NO: 2019521 - RNA, 19 nt, Homo sapiens
  misc_RNA (1)...(19): siRNA sense strand
acaagaaucccgagagaug

SEQ ID NO: 2019522 - RNA, 19 nt, Homo sapiens
  misc_RNA (1)...(19): siRNA sense strand
acaaagucuucacaacuga

SEQ ID NO: 2019523 - RNA, 19 nt, Homo sapiens
  misc_RNA (1)...(19): siRNA sense strand
ccaauuugcucuguacaag

SEQ ID NO: 2019524 - RNA, 19 nt, Homo sapiens
  misc_RNA (1)...(19): siRNA sense strand
aacaaagucuucacaacug

SEQ ID NO: 2019525 - RNA, 19 nt, Homo sapiens
  misc_RNA (1)...(19): siRNA sense strand
aaacaaagucuucacaacu

SEQ ID NO: 2019526 - RNA, 19 nt, Homo sapiens
  misc_RNA (1)...(19): siRNA sense strand
acugagacuucuaggagua

SEQ ID NO: 2019527 - RNA, 19 nt, Homo sapiens
  misc_RNA (1)...(19): siRNA sense strand
cgaccgcccucuucugucu

SEQ ID NO: 2019528 - RNA, 19 nt, Homo sapiens
  misc_RNA (1)...(19): siRNA sense strand
ggauggaggccgacaggau

SEQ ID NO: 2019529 - RNA, 19 nt, Homo sapiens
  misc_RNA (1)...(19): siRNA sense strand
ugaccaauuugcucuguac

SEQ ID NO: 2019530 - RNA, 19 nt, Homo sapiens
  misc_RNA (1)...(19): siRNA sense strand
gaagccaccgcugaacuga

SEQ ID NO: 2019531 - RNA, 19 nt, Homo sapiens
  misc_RNA (1)...(19): siRNA sense strand
aauuugcucuguacaagga

SEQ ID NO: 2019532 - RNA, 19 nt, Homo sapiens
  misc_RNA (1)...(19): siRNA sense strand
gaucaggcaguccucuuca

SEQ ID NO: 2019533 - RNA, 19 nt, Homo sapiens
  misc_RNA (1)...(19): siRNA sense strand
gcugugauccuaauaaucc

SEQ ID NO: 2019534 - RNA, 19 nt, Homo sapiens
  misc_RNA (1)...(19): siRNA sense strand
ugaacugaccgucucauuc

SEQ ID NO: 2019535 - RNA, 19 nt, Homo sapiens
  misc_RNA (1)...(19): siRNA sense strand
ucacaacugagacuucuag

SEQ ID NO: 2019536 - RNA, 19 nt, Homo sapiens
  misc_RNA (1)...(19): siRNA sense strand
ggaucaggcaguccucuuc

SEQ ID NO: 2019537 - RNA, 19 nt, Homo sapiens
  misc_RNA (1)...(19): siRNA sense strand
acaaacaaagucuucacaa

SEQ ID NO: 2019538 - RNA, 19 nt, Homo sapiens
  misc_RNA (1)...(19): siRNA sense strand
gcaaccugguccggauaug

SEQ ID NO: 2019539 - RNA, 19 nt, Homo sapiens
  misc_RNA (1)...(19): siRNA sense strand
gggcaaccugguccggaua

SEQ ID NO: 2019540 - RNA, 19 nt, Homo sapiens
  misc_RNA (1)...(19): siRNA sense strand
cgguauggcuuugaccaau

SEQ ID NO: 2019541 - RNA, 19 nt, Homo sapiens
  misc_RNA (1)...(19): siRNA sense strand
cuuccucgguagcagaauu

SEQ ID NO: 2019542 - RNA, 19 nt, Homo sapiens
  misc_RNA (1)...(19): siRNA sense strand
gagaagaucuggcuccuaa

SEQ ID NO: 2019543 - RNA, 19 nt, Homo sapiens
  misc_RNA (1)...(19): siRNA sense strand
cuaaauaccuuccucauaa

SEQ ID NO: 2019544 - RNA, 19 nt, Homo sapiens
  misc_RNA (1)...(19): siRNA sense strand
ugaaacagaucaaggaaua

SEQ ID NO: 2019545 - RNA, 19 nt, Homo sapiens
  misc_RNA (1)...(19): siRNA sense strand
gaagacaacucuccuaaca

SEQ ID NO: 2019546 - RNA, 19 nt, Homo sapiens
  misc_RNA (1)...(19): siRNA sense strand
gagcauaaccaaaguauuu

SEQ ID NO: 2019547 - RNA, 19 nt, Homo sapiens
  misc_RNA (1)...(19): siRNA sense strand
caaaguauuuccuucagua

SEQ ID NO: 2019548 - RNA, 19 nt, Homo sapiens
  misc_RNA (1)...(19): siRNA sense strand
gaaaggaccaaucucauuu

SEQ ID NO: 2019549 - RNA, 19 nt, Homo sapiens
  misc_RNA (1)...(19): siRNA sense strand
uaacacaugccaaguaaua

SEQ ID NO: 2019550 - RNA, 19 nt, Homo sapiens
  misc_RNA (1)...(19): siRNA sense strand
caucccagcuugaagaaua

SEQ ID NO: 2019551 - RNA, 19 nt, Homo sapiens
  misc_RNA (1)...(19): siRNA sense strand
caaagaagagccaggaaua

SEQ ID NO: 2019552 - RNA, 19 nt, Homo sapiens
  misc_RNA (1)...(19): siRNA sense strand
gaaggaaccugaagacaac

SEQ ID NO: 2019553 - RNA, 19 nt, Homo sapiens
  misc_RNA (1)...(19): siRNA sense strand
ggaccaaucucauuugaag

SEQ ID NO: 2019554 - RNA, 19 nt, Homo sapiens
  misc_RNA (1)...(19): siRNA sense strand
agaaauagcugagccuaaa

SEQ ID NO: 2019555 - RNA, 19 nt, Homo sapiens
  misc_RNA (1)...(19): siRNA sense strand
acagagaacuacuuagaaa

SEQ ID NO: 2019556 - RNA, 19 nt, Homo sapiens
  misc_RNA (1)...(19): siRNA sense strand
ggaaaggaccaaucucauu

SEQ ID NO: 2019557 - RNA, 19 nt, Homo sapiens
  misc_RNA (1)...(19): siRNA sense strand
ggaauacaaugaaacagau

SEQ ID NO: 2019558 - RNA, 19 nt, Homo sapiens
  misc_RNA (1)...(19): siRNA sense strand
caagaaauaucuguacuuc

SEQ ID NO: 2019559 - RNA, 19 nt, Homo sapiens
  misc_RNA (1)...(19): siRNA sense strand
uaccugggcuugaagaaua

SEQ ID NO: 2019560 - RNA, 19 nt, Homo sapiens
  misc_RNA (1)...(19): siRNA sense strand
agaaucagcugaaccuaaa

SEQ ID NO: 2019561 - RNA, 19 nt, Homo sapiens
  misc_RNA (1)...(19): siRNA sense strand
ccuaaaggcuauauucuug

SEQ ID NO: 2019562 - RNA, 19 nt, Homo sapiens
  misc_RNA (1)...(19): siRNA sense strand
gaagaccucucuccuaaaa

SEQ ID NO: 2019563 - RNA, 19 nt, Homo sapiens
  misc_RNA (1)...(19): siRNA sense strand
ccaggaagaugcuaaagau

SEQ ID NO: 2019564 - RNA, 19 nt, Homo sapiens
  misc_RNA (1)...(19): siRNA sense strand
cugaagaccucucuccuaa

SEQ ID NO: 2019565 - RNA, 19 nt, Homo sapiens
  misc_RNA (1)...(19): siRNA sense strand
cugaagaccucucuacuga

SEQ ID NO: 2019566 - RNA, 19 nt, Homo sapiens
  misc_RNA (1)...(19): siRNA sense strand
ccuaacacaugccaaguaa

SEQ ID NO: 2019567 - RNA, 19 nt, Homo sapiens
  misc_RNA (1)...(19): siRNA sense strand
cagcagaaccagaggaaua

SEQ ID NO: 2019568 - RNA, 19 nt, Homo sapiens
  misc_RNA (1)...(19): siRNA sense strand
ucaagaccauccuuucaaa

SEQ ID NO: 2019569 - RNA, 19 nt, Homo sapiens
  misc_RNA (1)...(19): siRNA sense strand
gaaccuggaguuugagaaa

SEQ ID NO: 2019570 - RNA, 19 nt, Homo sapiens
  misc_RNA (1)...(19): siRNA sense strand
agaaauaccugggcuugaa

SEQ ID NO: 2019571 - RNA, 19 nt, Homo sapiens
  misc_RNA (1)...(19): siRNA sense strand
aaacagagaacuacuuaga

SEQ ID NO: 2019572 - RNA, 19 nt, Homo sapiens
  misc_RNA (1)...(19): siRNA sense strand
ccagaggaauacaaugaaa

SEQ ID NO: 2019573 - RNA, 19 nt, Homo sapiens
  misc_RNA (1)...(19): siRNA sense strand
gcuauauucuugacacaga

SEQ ID NO: 2019574 - RNA, 19 nt, Homo sapiens
  misc_RNA (1)...(19): siRNA sense strand
agaaagcacuggcaccuau

SEQ ID NO: 2019575 - RNA, 19 nt, Homo sapiens
  misc_RNA (1)...(19): siRNA sense strand
gcaggaugcucucuucaag

SEQ ID NO: 2019576 - RNA, 19 nt, Homo sapiens
  misc_RNA (1)...(19): siRNA sense strand
gaaauuauugugccuaaag

SEQ ID NO: 2019577 - RNA, 19 nt, Homo sapiens
  misc_RNA (1)...(19): siRNA sense strand
agacaacucuccuaacaca

SEQ ID NO: 2019578 - RNA, 19 nt, Homo sapiens
  misc_RNA (1)...(19): siRNA sense strand
agaaacagagaacuacuua

SEQ ID NO: 2019579 - RNA, 19 nt, Homo sapiens
  misc_RNA (1)...(19): siRNA sense strand
auaaggaugugccuaaaga

SEQ ID NO: 2019580 - RNA, 19 nt, Homo sapiens
  misc_RNA (1)...(19): siRNA sense strand
ccugaaauauaccaagaaa

SEQ ID NO: 2019581 - RNA, 19 nt, Homo sapiens
  misc_RNA (1)...(19): siRNA sense strand
ccugaaauauaccaagaaa

SEQ ID NO: 2019582 - RNA, 19 nt, Homo sapiens
  misc_RNA (1)...(19): siRNA sense strand
gaaagcacuggcaccuaua

SEQ ID NO: 2019583 - RNA, 19 nt, Homo sapiens
  misc_RNA (1)...(19): siRNA sense strand
aggaauagcugagacagaa

SEQ ID NO: 2019584 - RNA, 19 nt, Homo sapiens
  misc_RNA (1)...(19): siRNA sense strand
gaaauaaaccaagaaacuc

SEQ ID NO: 2019585 - RNA, 19 nt, Homo sapiens
  misc_RNA (1)...(19): siRNA sense strand
guaccaagauauggcuaaa

SEQ ID NO: 2019586 - RNA, 19 nt, Homo sapiens
  misc_RNA (1)...(19): siRNA sense strand
ccugaaacguaucaagaaa

SEQ ID NO: 2019587 - RNA, 19 nt, Homo sapiens
  misc_RNA (1)...(19): siRNA sense strand
gcacuggcaccuauagaga

SEQ ID NO: 2019588 - RNA, 19 nt, Homo sapiens
  misc_RNA (1)...(19): siRNA sense strand
agauauggcuaaacgagaa

SEQ ID NO: 2019589 - RNA, 19 nt, Homo sapiens
  misc_RNA (1)...(19): siRNA sense strand
caagaaauagcaguacaaa

SEQ ID NO: 2019590 - RNA, 19 nt, Homo sapiens
  misc_RNA (1)...(19): siRNA sense strand
ccuaaauaccuuccucaua

SEQ ID NO: 2019591 - RNA, 19 nt, Homo sapiens
  misc_RNA (1)...(19): siRNA sense strand
guaccaagaaauagcagua

SEQ ID NO: 2019592 - RNA, 19 nt, Homo sapiens
  misc_RNA (1)...(19): siRNA sense strand
ugaaggaaccugaagacaa

SEQ ID NO: 2019593 - RNA, 19 nt, Homo sapiens
  misc_RNA (1)...(19): siRNA sense strand
ggaaaucgaagaggcagaa

SEQ ID NO: 2019594 - RNA, 19 nt, Homo sapiens
  misc_RNA (1)...(19): siRNA sense strand
aaaccauucuucugaaaca

SEQ ID NO: 2019595 - RNA, 19 nt, Homo sapiens
  misc_RNA (1)...(19): siRNA sense strand
caaugaaacagaucaagga

SEQ ID NO: 2019596 - RNA, 19 nt, Homo sapiens
  misc_RNA (1)...(19): siRNA sense strand
ggaagaugcuaaagaugcu

SEQ ID NO: 2019597 - RNA, 19 nt, Homo sapiens
  misc_RNA (1)...(19): siRNA sense strand
aaacaucccagcuugaaga

SEQ ID NO: 2019598 - RNA, 19 nt, Homo sapiens
  misc_RNA (1)...(19): siRNA sense strand
gagaaacagagaacuacuu

SEQ ID NO: 2019599 - RNA, 19 nt, Homo sapiens
  misc_RNA (1)...(19): siRNA sense strand
aaauaaggaugugccuaaa

SEQ ID NO: 2019600 - RNA, 19 nt, Homo sapiens
  misc_RNA (1)...(19): siRNA sense strand
guaccaagaaauaucugua

SEQ ID NO: 2019601 - RNA, 19 nt, Homo sapiens
  misc_RNA (1)...(19): siRNA sense strand
ggaugugccuaaagaaugc

SEQ ID NO: 2019602 - RNA, 19 nt, Homo sapiens
  misc_RNA (1)...(19): siRNA sense strand
ggaaauaguggagaaagca

SEQ ID NO: 2019603 - RNA, 19 nt, Homo sapiens
  misc_RNA (1)...(19): siRNA sense strand
caccugaaauauaccaaga

SEQ ID NO: 2019604 - RNA, 19 nt, Homo sapiens
  misc_RNA (1)...(19): siRNA sense strand
caccugaaauauaccaaga

SEQ ID NO: 2019605 - RNA, 19 nt, Homo sapiens
  misc_RNA (1)...(19): siRNA sense strand
agaagcugcuguacccaaa

SEQ ID NO: 2019606 - RNA, 19 nt, Homo sapiens
  misc_RNA (1)...(19): siRNA sense strand
ccaagaaacaucccagcuu

SEQ ID NO: 2019607 - RNA, 19 nt, Homo sapiens
  misc_RNA (1)...(19): siRNA sense strand
uaucuguacuucaagacaa

SEQ ID NO: 2019608 - RNA, 19 nt, Homo sapiens
  misc_RNA (1)...(19): siRNA sense strand
gaucaaggaauagcugaga

SEQ ID NO: 2019609 - RNA, 19 nt, Homo sapiens
  misc_RNA (1)...(19): siRNA sense strand
gaaacuccugggucugaaa

SEQ ID NO: 2019610 - RNA, 19 nt, Homo sapiens
  misc_RNA (1)...(19): siRNA sense strand
ccaaaguauuuccuucagu

SEQ ID NO: 2019611 - RNA, 19 nt, Homo sapiens
  misc_RNA (1)...(19): siRNA sense strand
aaacaccucauucugaaga

SEQ ID NO: 2019612 - RNA, 19 nt, Homo sapiens
  misc_RNA (1)...(19): siRNA sense strand
caaaauaugccaagacaug

SEQ ID NO: 2019613 - RNA, 19 nt, Homo sapiens
  misc_RNA (1)...(19): siRNA sense strand
aaaggaaacaucacaaugg

SEQ ID NO: 2019614 - RNA, 19 nt, Homo sapiens
  misc_RNA (1)...(19): siRNA sense strand
caaaaccauucuucugaaa

SEQ ID NO: 2019615 - RNA, 19 nt, Homo sapiens
  misc_RNA (1)...(19): siRNA sense strand
gaagaucuggcuccuaaaa

SEQ ID NO: 2019616 - RNA, 19 nt, Homo sapiens
  misc_RNA (1)...(19): siRNA sense strand
cgaaauuauugugccuaaa

SEQ ID NO: 2019617 - RNA, 19 nt, Homo sapiens
  misc_RNA (1)...(19): siRNA sense strand
acgaaauuauugugccuaa

SEQ ID NO: 2019618 - RNA, 19 nt, Homo sapiens
  misc_RNA (1)...(19): siRNA sense strand
caacaaaacacagaauuga

SEQ ID NO: 2019619 - RNA, 19 nt, Homo sapiens
  misc_RNA (1)...(19): siRNA sense strand
cuaaagcacaccaggaaga

SEQ ID NO: 2019620 - RNA, 19 nt, Homo sapiens
  misc_RNA (1)...(19): siRNA sense strand
auuggaaccuggaguuuga

SEQ ID NO: 2019621 - RNA, 19 nt, Homo sapiens
  misc_RNA (1)...(19): siRNA sense strand
ccaagaaauaucuguacuu

SEQ ID NO: 2019622 - RNA, 19 nt, Homo sapiens
  misc_RNA (1)...(19): siRNA sense strand
gagaaagcacuggcaccua

SEQ ID NO: 2019623 - RNA, 19 nt, Homo sapiens
  misc_RNA (1)...(19): siRNA sense strand
gcagaaagagacaacaaaa

SEQ ID NO: 2019624 - RNA, 19 nt, Homo sapiens
  misc_RNA (1)...(19): siRNA sense strand
ccaaagaagagccaggaau

SEQ ID NO: 2019625 - RNA, 19 nt, Homo sapiens
  misc_RNA (1)...(19): siRNA sense strand
aagaaucagcugaaccuaa

SEQ ID NO: 2019626 - RNA, 19 nt, Homo sapiens
  misc_RNA (1)...(19): siRNA sense strand
caccugacccucaucaaga

SEQ ID NO: 2019627 - RNA, 19 nt, Homo sapiens
  misc_RNA (1)...(19): siRNA sense strand
aaggaccaaucucauuuga

SEQ ID NO: 2019628 - RNA, 19 nt, Homo sapiens
  misc_RNA (1)...(19): siRNA sense strand
gcagagaacaggaaaagga

SEQ ID NO: 2019629 - RNA, 19 nt, Homo sapiens
  misc_RNA (1)...(19): siRNA sense strand
aaucagcugaaccuaaaua

SEQ ID NO: 2019630 - RNA, 19 nt, Homo sapiens
  misc_RNA (1)...(19): siRNA sense strand
gcuauuuggagaacagaaa

SEQ ID NO: 2019631 - RNA, 19 nt, Homo sapiens
  misc_RNA (1)...(19): siRNA sense strand
gaaccagaggaauacaaug

SEQ ID NO: 2019632 - RNA, 19 nt, Homo sapiens
  misc_RNA (1)...(19): siRNA sense strand
uccaacaucugaagacaca

SEQ ID NO: 2019633 - RNA, 19 nt, Homo sapiens
  misc_RNA (1)...(19): siRNA sense strand
ccaagaaauagcaguacaa

SEQ ID NO: 2019634 - RNA, 19 nt, Homo sapiens
  misc_RNA (1)...(19): siRNA sense strand
ggcagaaagagacaacaaa

SEQ ID NO: 2019635 - RNA, 19 nt, Homo sapiens
  misc_RNA (1)...(19): siRNA sense strand
aaucgaagaggcagaaaga

SEQ ID NO: 2019636 - RNA, 19 nt, Homo sapiens
  misc_RNA (1)...(19): siRNA sense strand
gaagaggcagaaagagaca

SEQ ID NO: 2019637 - RNA, 19 nt, Homo sapiens
  misc_RNA (1)...(19): siRNA sense strand
ccucaagaaaugaaagaaa

SEQ ID NO: 2019638 - RNA, 19 nt, Homo sapiens
  misc_RNA (1)...(19): siRNA sense strand
ccagaaccacaccaagaaa

SEQ ID NO: 2019639 - RNA, 19 nt, Homo sapiens
  misc_RNA (1)...(19): siRNA sense strand
gaaaaggaaacaucacaau

SEQ ID NO: 2019640 - RNA, 19 nt, Homo sapiens
  misc_RNA (1)...(19): siRNA sense strand
gaaauaccugggcuugaag

SEQ ID NO: 2019641 - RNA, 19 nt, Homo sapiens
  misc_RNA (1)...(19): siRNA sense strand
gcuaaagaugcuuauacuu

SEQ ID NO: 2019642 - RNA, 19 nt, Homo sapiens
  misc_RNA (1)...(19): siRNA sense strand
gagaagaucuggcuccuaa

SEQ ID NO: 2019643 - RNA, 19 nt, Homo sapiens
  misc_RNA (1)...(19): siRNA sense strand
cuaaauaccuuccucauaa

SEQ ID NO: 2019644 - RNA, 19 nt, Homo sapiens
  misc_RNA (1)...(19): siRNA sense strand
ugaaacagaucaaggaaua

SEQ ID NO: 2019645 - RNA, 19 nt, Homo sapiens
  misc_RNA (1)...(19): siRNA sense strand
gaagacaacucuccuaaca

SEQ ID NO: 2019646 - RNA, 19 nt, Homo sapiens
  misc_RNA (1)...(19): siRNA sense strand
gagcauaaccaaaguauuu

SEQ ID NO: 2019647 - RNA, 19 nt, Homo sapiens
  misc_RNA (1)...(19): siRNA sense strand
caaaguauuuccuucagua

SEQ ID NO: 2019648 - RNA, 19 nt, Homo sapiens
  misc_RNA (1)...(19): siRNA sense strand
gaaaggaccaaucucauuu

SEQ ID NO: 2019649 - RNA, 19 nt, Homo sapiens
  misc_RNA (1)...(19): siRNA sense strand
uaacacaugccaaguaaua

SEQ ID NO: 2019650 - RNA, 19 nt, Homo sapiens
  misc_RNA (1)...(19): siRNA sense strand
caucccagcuugaagaaua

SEQ ID NO: 2019651 - RNA, 19 nt, Homo sapiens
  misc_RNA (1)...(19): siRNA sense strand
caaagaagagccaggaaua

SEQ ID NO: 2019652 - RNA, 19 nt, Homo sapiens
  misc_RNA (1)...(19): siRNA sense strand
gaaggaaccugaagacaac

SEQ ID NO: 2019653 - RNA, 19 nt, Homo sapiens
  misc_RNA (1)...(19): siRNA sense strand
ggaccaaucucauuugaag

SEQ ID NO: 2019654 - RNA, 19 nt, Homo sapiens
  misc_RNA (1)...(19): siRNA sense strand
agaaauagcugagccuaaa

SEQ ID NO: 2019655 - RNA, 19 nt, Homo sapiens
  misc_RNA (1)...(19): siRNA sense strand
acagagaacuacuuagaaa

SEQ ID NO: 2019656 - RNA, 19 nt, Homo sapiens
  misc_RNA (1)...(19): siRNA sense strand
ggaaaggaccaaucucauu

SEQ ID NO: 2019657 - RNA, 19 nt, Homo sapiens
  misc_RNA (1)...(19): siRNA sense strand
ggaauacaaugaaacagau

SEQ ID NO: 2019658 - RNA, 19 nt, Homo sapiens
  misc_RNA (1)...(19): siRNA sense strand
caagaaauaucuguacuuc

SEQ ID NO: 2019659 - RNA, 19 nt, Homo sapiens
  misc_RNA (1)...(19): siRNA sense strand
uaccugggcuugaagaaua

SEQ ID NO: 2019660 - RNA, 19 nt, Homo sapiens
  misc_RNA (1)...(19): siRNA sense strand
agaaucagcugaaccuaaa

SEQ ID NO: 2019661 - RNA, 19 nt, Homo sapiens
  misc_RNA (1)...(19): siRNA sense strand
ccuaaaggcuauauucuug

SEQ ID NO: 2019662 - RNA, 19 nt, Homo sapiens
  misc_RNA (1)...(19): siRNA sense strand
gaagaccucucuccuaaaa

SEQ ID NO: 2019663 - RNA, 19 nt, Homo sapiens
  misc_RNA (1)...(19): siRNA sense strand
ccaggaagaugcuaaagau

SEQ ID NO: 2019664 - RNA, 19 nt, Homo sapiens
  misc_RNA (1)...(19): siRNA sense strand
cugaagaccucucuccuaa

SEQ ID NO: 2019665 - RNA, 19 nt, Homo sapiens
  misc_RNA (1)...(19): siRNA sense strand
cugaagaccucucuacuga

SEQ ID NO: 2019666 - RNA, 19 nt, Homo sapiens
  misc_RNA (1)...(19): siRNA sense strand
ccuaacacaugccaaguaa

SEQ ID NO: 2019667 - RNA, 19 nt, Homo sapiens
  misc_RNA (1)...(19): siRNA sense strand
cagcagaaccagaggaaua

SEQ ID NO: 2019668 - RNA, 19 nt, Homo sapiens
  misc_RNA (1)...(19): siRNA sense strand
ucaagaccauccuuucaaa

SEQ ID NO: 2019669 - RNA, 19 nt, Homo sapiens
  misc_RNA (1)...(19): siRNA sense strand
gaaccuggaguuugagaaa

SEQ ID NO: 2019670 - RNA, 19 nt, Homo sapiens
  misc_RNA (1)...(19): siRNA sense strand
agaaauaccugggcuugaa

SEQ ID NO: 2019671 - RNA, 19 nt, Homo sapiens
  misc_RNA (1)...(19): siRNA sense strand
aaacagagaacuacuuaga

SEQ ID NO: 2019672 - RNA, 19 nt, Homo sapiens
  misc_RNA (1)...(19): siRNA sense strand
ccagaggaauacaaugaaa

SEQ ID NO: 2019673 - RNA, 19 nt, Homo sapiens
  misc_RNA (1)...(19): siRNA sense strand
gcuauauucuugacacaga

SEQ ID NO: 2019674 - RNA, 19 nt, Homo sapiens
  misc_RNA (1)...(19): siRNA sense strand
agaaagcacuggcaccuau

SEQ ID NO: 2019675 - RNA, 19 nt, Homo sapiens
  misc_RNA (1)...(19): siRNA sense strand
gcaggaugcucucuucaag

SEQ ID NO: 2019676 - RNA, 19 nt, Homo sapiens
  misc_RNA (1)...(19): siRNA sense strand
gaaauuauugugccuaaag

SEQ ID NO: 2019677 - RNA, 19 nt, Homo sapiens
  misc_RNA (1)...(19): siRNA sense strand
agacaacucuccuaacaca

SEQ ID NO: 2019678 - RNA, 19 nt, Homo sapiens
  misc_RNA (1)...(19): siRNA sense strand
agaaacagagaacuacuua

SEQ ID NO: 2019679 - RNA, 19 nt, Homo sapiens
  misc_RNA (1)...(19): siRNA sense strand
auaaggaugugccuaaaga

SEQ ID NO: 2019680 - RNA, 19 nt, Homo sapiens
  misc_RNA (1)...(19): siRNA sense strand
ccugaaauauaccaagaaa

SEQ ID NO: 2019681 - RNA, 19 nt, Homo sapiens
  misc_RNA (1)...(19): siRNA sense strand
ccugaaauauaccaagaaa

SEQ ID NO: 2019682 - RNA, 19 nt, Homo sapiens
  misc_RNA (1)...(19): siRNA sense strand
gaaagcacuggcaccuaua

SEQ ID NO: 2019683 - RNA, 19 nt, Homo sapiens
  misc_RNA (1)...(19): siRNA sense strand
aggaauagcugagacagaa

SEQ ID NO: 2019684 - RNA, 19 nt, Homo sapiens
  misc_RNA (1)...(19): siRNA sense strand
gaaauaaaccaagaaacuc

SEQ ID NO: 2019685 - RNA, 19 nt, Homo sapiens
  misc_RNA (1)...(19): siRNA sense strand
guaccaagauauggcuaaa

SEQ ID NO: 2019686 - RNA, 19 nt, Homo sapiens
  misc_RNA (1)...(19): siRNA sense strand
ccugaaacguaucaagaaa

SEQ ID NO: 2019687 - RNA, 19 nt, Homo sapiens
  misc_RNA (1)...(19): siRNA sense strand
gcacuggcaccuauagaga

SEQ ID NO: 2019688 - RNA, 19 nt, Homo sapiens
  misc_RNA (1)...(19): siRNA sense strand
agauauggcuaaacgagaa

SEQ ID NO: 2019689 - RNA, 19 nt, Homo sapiens
  misc_RNA (1)...(19): siRNA sense strand
caagaaauagcaguacaaa

SEQ ID NO: 2019690 - RNA, 19 nt, Homo sapiens
  misc_RNA (1)...(19): siRNA sense strand
ccuaaauaccuuccucaua

SEQ ID NO: 2019691 - RNA, 19 nt, Homo sapiens
  misc_RNA (1)...(19): siRNA sense strand
guaccaagaaauagcagua

SEQ ID NO: 2019692 - RNA, 19 nt, Homo sapiens
  misc_RNA (1)...(19): siRNA sense strand
ugaaggaaccugaagacaa

SEQ ID NO: 2019693 - RNA, 19 nt, Homo sapiens
  misc_RNA (1)...(19): siRNA sense strand
ggaaaucgaagaggcagaa

SEQ ID NO: 2019694 - RNA, 19 nt, Homo sapiens
  misc_RNA (1)...(19): siRNA sense strand
aaaccauucuucugaaaca

SEQ ID NO: 2019695 - RNA, 19 nt, Homo sapiens
  misc_RNA (1)...(19): siRNA sense strand
caaugaaacagaucaagga

SEQ ID NO: 2019696 - RNA, 19 nt, Homo sapiens
  misc_RNA (1)...(19): siRNA sense strand
ggaagaugcuaaagaugcu

SEQ ID NO: 2019697 - RNA, 19 nt, Homo sapiens
  misc_RNA (1)...(19): siRNA sense strand
aaacaucccagcuugaaga

SEQ ID NO: 2019698 - RNA, 19 nt, Homo sapiens
  misc_RNA (1)...(19): siRNA sense strand
gagaaacagagaacuacuu

SEQ ID NO: 2019699 - RNA, 19 nt, Homo sapiens
  misc_RNA (1)...(19): siRNA sense strand
aaauaaggaugugccuaaa

SEQ ID NO: 2019700 - RNA, 19 nt, Homo sapiens
  misc_RNA (1)...(19): siRNA sense strand
guaccaagaaauaucugua

SEQ ID NO: 2019701 - RNA, 19 nt, Homo sapiens
  misc_RNA (1)...(19): siRNA sense strand
ggaugugccuaaagaaugc

SEQ ID NO: 2019702 - RNA, 19 nt, Homo sapiens
  misc_RNA (1)...(19): siRNA sense strand
ggaaauaguggagaaagca

SEQ ID NO: 2019703 - RNA, 19 nt, Homo sapiens
  misc_RNA (1)...(19): siRNA sense strand
caccugaaauauaccaaga

SEQ ID NO: 2019704 - RNA, 19 nt, Homo sapiens
  misc_RNA (1)...(19): siRNA sense strand
caccugaaauauaccaaga

SEQ ID NO: 2019705 - RNA, 19 nt, Homo sapiens
  misc_RNA (1)...(19): siRNA sense strand
agaagcugcuguacccaaa

SEQ ID NO: 2019706 - RNA, 19 nt, Homo sapiens
  misc_RNA (1)...(19): siRNA sense strand
ccaagaaacaucccagcuu

SEQ ID NO: 2019707 - RNA, 19 nt, Homo sapiens
  misc_RNA (1)...(19): siRNA sense strand
uaucuguacuucaagacaa

SEQ ID NO: 2019708 - RNA, 19 nt, Homo sapiens
  misc_RNA (1)...(19): siRNA sense strand
gaucaaggaauagcugaga

SEQ ID NO: 2019709 - RNA, 19 nt, Homo sapiens
  misc_RNA (1)...(19): siRNA sense strand
gaaacuccugggucugaaa

SEQ ID NO: 2019710 - RNA, 19 nt, Homo sapiens
  misc_RNA (1)...(19): siRNA sense strand
ccaaaguauuuccuucagu

SEQ ID NO: 2019711 - RNA, 19 nt, Homo sapiens
  misc_RNA (1)...(19): siRNA sense strand
aaacaccucauucugaaga

SEQ ID NO: 2019712 - RNA, 19 nt, Homo sapiens
  misc_RNA (1)...(19): siRNA sense strand
caaaauaugccaagacaug

SEQ ID NO: 2019713 - RNA, 19 nt, Homo sapiens
  misc_RNA (1)...(19): siRNA sense strand
aaaggaaacaucacaaugg

SEQ ID NO: 2019714 - RNA, 19 nt, Homo sapiens
  misc_RNA (1)...(19): siRNA sense strand
caaaaccauucuucugaaa

SEQ ID NO: 2019715 - RNA, 19 nt, Homo sapiens
  misc_RNA (1)...(19): siRNA sense strand
gaagaucuggcuccuaaaa

SEQ ID NO: 2019716 - RNA, 19 nt, Homo sapiens
  misc_RNA (1)...(19): siRNA sense strand
cgaaauuauugugccuaaa

SEQ ID NO: 2019717 - RNA, 19 nt, Homo sapiens
  misc_RNA (1)...(19): siRNA sense strand
acgaaauuauugugccuaa

SEQ ID NO: 2019718 - RNA, 19 nt, Homo sapiens
  misc_RNA (1)...(19): siRNA sense strand
caacaaaacacagaauuga

SEQ ID NO: 2019719 - RNA, 19 nt, Homo sapiens
  misc_RNA (1)...(19): siRNA sense strand
cuaaagcacaccaggaaga

SEQ ID NO: 2019720 - RNA, 19 nt, Homo sapiens
  misc_RNA (1)...(19): siRNA sense strand
auuggaaccuggaguuuga

SEQ ID NO: 2019721 - RNA, 19 nt, Homo sapiens
  misc_RNA (1)...(19): siRNA sense strand
ccaagaaauaucuguacuu

SEQ ID NO: 2019722 - RNA, 19 nt, Homo sapiens
  misc_RNA (1)...(19): siRNA sense strand
gagaaagcacuggcaccua

SEQ ID NO: 2019723 - RNA, 19 nt, Homo sapiens
  misc_RNA (1)...(19): siRNA sense strand
gcagaaagagacaacaaaa

SEQ ID NO: 2019724 - RNA, 19 nt, Homo sapiens
  misc_RNA (1)...(19): siRNA sense strand
ccaaagaagagccaggaau

SEQ ID NO: 2019725 - RNA, 19 nt, Homo sapiens
  misc_RNA (1)...(19): siRNA sense strand
aagaaucagcugaaccuaa

SEQ ID NO: 2019726 - RNA, 19 nt, Homo sapiens
  misc_RNA (1)...(19): siRNA sense strand
caccugacccucaucaaga

SEQ ID NO: 2019727 - RNA, 19 nt, Homo sapiens
  misc_RNA (1)...(19): siRNA sense strand
aaggaccaaucucauuuga

SEQ ID NO: 2019728 - RNA, 19 nt, Homo sapiens
  misc_RNA (1)...(19): siRNA sense strand
gcagagaacaggaaaagga

SEQ ID NO: 2019729 - RNA, 19 nt, Homo sapiens
  misc_RNA (1)...(19): siRNA sense strand
aaucagcugaaccuaaaua

SEQ ID NO: 2019730 - RNA, 19 nt, Homo sapiens
  misc_RNA (1)...(19): siRNA sense strand
gcuauuuggagaacagaaa

SEQ ID NO: 2019731 - RNA, 19 nt, Homo sapiens
  misc_RNA (1)...(19): siRNA sense strand
gaaccagaggaauacaaug

SEQ ID NO: 2019732 - RNA, 19 nt, Homo sapiens
  misc_RNA (1)...(19): siRNA sense strand
uccaacaucugaagacaca

SEQ ID NO: 2019733 - RNA, 19 nt, Homo sapiens
  misc_RNA (1)...(19): siRNA sense strand
ccaagaaauagcaguacaa

SEQ ID NO: 2019734 - RNA, 19 nt, Homo sapiens
  misc_RNA (1)...(19): siRNA sense strand
ggcagaaagagacaacaaa

SEQ ID NO: 2019735 - RNA, 19 nt, Homo sapiens
  misc_RNA (1)...(19): siRNA sense strand
aaucgaagaggcagaaaga

SEQ ID NO: 2019736 - RNA, 19 nt, Homo sapiens
  misc_RNA (1)...(19): siRNA sense strand
gaagaggcagaaagagaca

SEQ ID NO: 2019737 - RNA, 19 nt, Homo sapiens
  misc_RNA (1)...(19): siRNA sense strand
ccucaagaaaugaaagaaa

SEQ ID NO: 2019738 - RNA, 19 nt, Homo sapiens
  misc_RNA (1)...(19): siRNA sense strand
ccagaaccacaccaagaaa

SEQ ID NO: 2019739 - RNA, 19 nt, Homo sapiens
  misc_RNA (1)...(19): siRNA sense strand
gaaaaggaaacaucacaau

SEQ ID NO: 2019740 - RNA, 19 nt, Homo sapiens
  misc_RNA (1)...(19): siRNA sense strand
gaaauaccugggcuugaag

SEQ ID NO: 2019741 - RNA, 19 nt, Homo sapiens
  misc_RNA (1)...(19): siRNA sense strand
gcuaaagaugcuuauacuu

SEQ ID NO: 2019742 - RNA, 19 nt, Homo sapiens
  misc_RNA (1)...(19): siRNA sense strand
gagaagagauuuacaagga

SEQ ID NO: 2019743 - RNA, 19 nt, Homo sapiens
  misc_RNA (1)...(19): siRNA sense strand
ugacggagguauccaguua

SEQ ID NO: 2019744 - RNA, 19 nt, Homo sapiens
  misc_RNA (1)...(19): siRNA sense strand
ggaagaacaaugugacuuu

SEQ ID NO: 2019745 - RNA, 19 nt, Homo sapiens
  misc_RNA (1)...(19): siRNA sense strand
gaagaacaaugugacuuug

SEQ ID NO: 2019746 - RNA, 19 nt, Homo sapiens
  misc_RNA (1)...(19): siRNA sense strand
cuaagcagaugccacagua

SEQ ID NO: 2019747 - RNA, 19 nt, Homo sapiens
  misc_RNA (1)...(19): siRNA sense strand
gcacggacaggcagaauug

SEQ ID NO: 2019748 - RNA, 19 nt, Homo sapiens
  misc_RNA (1)...(19): siRNA sense strand
gaccagucccuuauuuaua

SEQ ID NO: 2019749 - RNA, 19 nt, Homo sapiens
  misc_RNA (1)...(19): siRNA sense strand
gcgccuggcuucuauuuua

SEQ ID NO: 2019750 - RNA, 19 nt, Homo sapiens
  misc_RNA (1)...(19): siRNA sense strand
caaaugaccagucccuuau

SEQ ID NO: 2019751 - RNA, 19 nt, Homo sapiens
  misc_RNA (1)...(19): siRNA sense strand
acaaaugaccagucccuua

SEQ ID NO: 2019752 - RNA, 19 nt, Homo sapiens
  misc_RNA (1)...(19): siRNA sense strand
guucccagauuuacgauga

SEQ ID NO: 2019753 - RNA, 19 nt, Homo sapiens
  misc_RNA (1)...(19): siRNA sense strand
gaccaucuccuucuucaau

SEQ ID NO: 2019754 - RNA, 19 nt, Homo sapiens
  misc_RNA (1)...(19): siRNA sense strand
gggaagacugggaaucuaa

SEQ ID NO: 2019755 - RNA, 19 nt, Homo sapiens
  misc_RNA (1)...(19): siRNA sense strand
aaugaccagucccuuauuu

SEQ ID NO: 2019756 - RNA, 19 nt, Homo sapiens
  misc_RNA (1)...(19): siRNA sense strand
gggcucacuuccucucauu

SEQ ID NO: 2019757 - RNA, 19 nt, Homo sapiens
  misc_RNA (1)...(19): siRNA sense strand
ucauuuccaucgugggaua

SEQ ID NO: 2019758 - RNA, 19 nt, Homo sapiens
  misc_RNA (1)...(19): siRNA sense strand
agaagagauuuacaaggaa

SEQ ID NO: 2019759 - RNA, 19 nt, Homo sapiens
  misc_RNA (1)...(19): siRNA sense strand
ggagguauccaguuacucu

SEQ ID NO: 2019760 - RNA, 19 nt, Homo sapiens
  misc_RNA (1)...(19): siRNA sense strand
gggaccaucuccuucuuca

SEQ ID NO: 2019761 - RNA, 19 nt, Homo sapiens
  misc_RNA (1)...(19): siRNA sense strand
gguauuggguccucagacu

SEQ ID NO: 2019762 - RNA, 19 nt, Homo sapiens
  misc_RNA (1)...(19): siRNA sense strand
uaugggugcugguucaguu

SEQ ID NO: 2019763 - RNA, 19 nt, Homo sapiens
  misc_RNA (1)...(19): siRNA sense strand
ugaccagucccuuauuuau

SEQ ID NO: 2019764 - RNA, 19 nt, Homo sapiens
  misc_RNA (1)...(19): siRNA sense strand
gugcagaggcuauggaagu

SEQ ID NO: 2019765 - RNA, 19 nt, Homo sapiens
  misc_RNA (1)...(19): siRNA sense strand
ucaggacaguggcaaguca

SEQ ID NO: 2019766 - RNA, 19 nt, Homo sapiens
  misc_RNA (1)...(19): siRNA sense strand
gcucugcguuucugaucug

SEQ ID NO: 2019767 - RNA, 19 nt, Homo sapiens
  misc_RNA (1)...(19): siRNA sense strand
aaacuguaacccauagaaa

SEQ ID NO: 2019768 - RNA, 19 nt, Homo sapiens
  misc_RNA (1)...(19): siRNA sense strand
gggucuuccuggacuauga

SEQ ID NO: 2019769 - RNA, 19 nt, Homo sapiens
  misc_RNA (1)...(19): siRNA sense strand
cuucaaauccaaagggaaa

SEQ ID NO: 2019770 - RNA, 19 nt, Homo sapiens
  misc_RNA (1)...(19): siRNA sense strand
uuuauacccugcugacaug

SEQ ID NO: 2019771 - RNA, 19 nt, Homo sapiens
  misc_RNA (1)...(19): siRNA sense strand
ggaggugacucuggaucca

SEQ ID NO: 2019772 - RNA, 19 nt, Homo sapiens
  misc_RNA (1)...(19): siRNA sense strand
ggacgugggacaaaaugua

SEQ ID NO: 2019773 - RNA, 19 nt, Homo sapiens
  misc_RNA (1)...(19): siRNA sense strand
gugcgguucuucaggaauc

SEQ ID NO: 2019774 - RNA, 19 nt, Homo sapiens
  misc_RNA (1)...(19): siRNA sense strand
gcucacuuccucucauuuc

SEQ ID NO: 2019775 - RNA, 19 nt, Homo sapiens
  misc_RNA (1)...(19): siRNA sense strand
ccucggacaucggccugua

SEQ ID NO: 2019776 - RNA, 19 nt, Homo sapiens
  misc_RNA (1)...(19): siRNA sense strand
gacaaaauguaggguggua

SEQ ID NO: 2019777 - RNA, 19 nt, Homo sapiens
  misc_RNA (1)...(19): siRNA sense strand
uccaagcagggaaacauua

SEQ ID NO: 2019778 - RNA, 19 nt, Homo sapiens
  misc_RNA (1)...(19): siRNA sense strand
ugguucaguucccagauuu

SEQ ID NO: 2019779 - RNA, 19 nt, Homo sapiens
  misc_RNA (1)...(19): siRNA sense strand
agagugugguggcuucuca

SEQ ID NO: 2019780 - RNA, 19 nt, Homo sapiens
  misc_RNA (1)...(19): siRNA sense strand
accagucccuuauuuauac

SEQ ID NO: 2019781 - RNA, 19 nt, Homo sapiens
  misc_RNA (1)...(19): siRNA sense strand
ggaagacugggaaucuaag

SEQ ID NO: 2019782 - RNA, 19 nt, Homo sapiens
  misc_RNA (1)...(19): siRNA sense strand
accaucuccuucuucaaua

SEQ ID NO: 2019783 - RNA, 19 nt, Homo sapiens
  misc_RNA (1)...(19): siRNA sense strand
ucacuggaccgggcaaguu

SEQ ID NO: 2019784 - RNA, 19 nt, Homo sapiens
  misc_RNA (1)...(19): siRNA sense strand
gggaagaacaaugugacuu

SEQ ID NO: 2019785 - RNA, 19 nt, Homo sapiens
  misc_RNA (1)...(19): siRNA sense strand
gaagcucugcguuucugau

SEQ ID NO: 2019786 - RNA, 19 nt, Homo sapiens
  misc_RNA (1)...(19): siRNA sense strand
gcagaugccacaguaucga

SEQ ID NO: 2019787 - RNA, 19 nt, Homo sapiens
  misc_RNA (1)...(19): siRNA sense strand
cacauucaauccccauuuu

SEQ ID NO: 2019788 - RNA, 19 nt, Homo sapiens
  misc_RNA (1)...(19): siRNA sense strand
gagguggacgugggacaaa

SEQ ID NO: 2019789 - RNA, 19 nt, Homo sapiens
  misc_RNA (1)...(19): siRNA sense strand
ggagguggacgugggacaa

SEQ ID NO: 2019790 - RNA, 19 nt, Homo sapiens
  misc_RNA (1)...(19): siRNA sense strand
ccugugugguguugucaug

SEQ ID NO: 2019791 - RNA, 19 nt, Homo sapiens
  misc_RNA (1)...(19): siRNA sense strand
gguucaguucccagauuua

SEQ ID NO: 2019792 - RNA, 19 nt, Homo sapiens
  misc_RNA (1)...(19): siRNA sense strand
gugggaccaucuccuucuu

SEQ ID NO: 2019793 - RNA, 19 nt, Homo sapiens
  misc_RNA (1)...(19): siRNA sense strand
guucuccugcucccucuuu

SEQ ID NO: 2019794 - RNA, 19 nt, Homo sapiens
  misc_RNA (1)...(19): siRNA sense strand
cagaacauuuguauuucac

SEQ ID NO: 2019795 - RNA, 19 nt, Homo sapiens
  misc_RNA (1)...(19): siRNA sense strand
gacugacaacagaacauuu

SEQ ID NO: 2019796 - RNA, 19 nt, Homo sapiens
  misc_RNA (1)...(19): siRNA sense strand
agacugacaacagaacauu

SEQ ID NO: 2019797 - RNA, 19 nt, Homo sapiens
  misc_RNA (1)...(19): siRNA sense strand
ccgaagcucugcguuucug

SEQ ID NO: 2019798 - RNA, 19 nt, Homo sapiens
  misc_RNA (1)...(19): siRNA sense strand
ucugagaagagauuuacaa

SEQ ID NO: 2019799 - RNA, 19 nt, Homo sapiens
  misc_RNA (1)...(19): siRNA sense strand
ugcgauguaugacgaggaa

SEQ ID NO: 2019800 - RNA, 19 nt, Homo sapiens
  misc_RNA (1)...(19): siRNA sense strand
ucaguucccagauuuacga

SEQ ID NO: 2019801 - RNA, 19 nt, Homo sapiens
  misc_RNA (1)...(19): siRNA sense strand
uauccagcaugcgauguau

SEQ ID NO: 2019802 - RNA, 19 nt, Homo sapiens
  misc_RNA (1)...(19): siRNA sense strand
ggggaagacugggaaucua

SEQ ID NO: 2019803 - RNA, 19 nt, Homo sapiens
  misc_RNA (1)...(19): siRNA sense strand
ucaguuugaaggcuuguug

SEQ ID NO: 2019804 - RNA, 19 nt, Homo sapiens
  misc_RNA (1)...(19): siRNA sense strand
ucauuuugguucucaguuu

SEQ ID NO: 2019805 - RNA, 19 nt, Homo sapiens
  misc_RNA (1)...(19): siRNA sense strand
acugacaacagaacauuug

SEQ ID NO: 2019806 - RNA, 19 nt, Homo sapiens
  misc_RNA (1)...(19): siRNA sense strand
ugaaaacuguaacccauag

SEQ ID NO: 2019807 - RNA, 19 nt, Homo sapiens
  misc_RNA (1)...(19): siRNA sense strand
gagaagagauuuacaagga

SEQ ID NO: 2019808 - RNA, 19 nt, Homo sapiens
  misc_RNA (1)...(19): siRNA sense strand
ugacggagguauccaguua

SEQ ID NO: 2019809 - RNA, 19 nt, Homo sapiens
  misc_RNA (1)...(19): siRNA sense strand
ggaagaacaaugugacuuu

SEQ ID NO: 2019810 - RNA, 19 nt, Homo sapiens
  misc_RNA (1)...(19): siRNA sense strand
gaagaacaaugugacuuug

SEQ ID NO: 2019811 - RNA, 19 nt, Homo sapiens
  misc_RNA (1)...(19): siRNA sense strand
cuaagcagaugccacagua

SEQ ID NO: 2019812 - RNA, 19 nt, Homo sapiens
  misc_RNA (1)...(19): siRNA sense strand
gcacggacaggcagaauug

SEQ ID NO: 2019813 - RNA, 19 nt, Homo sapiens
  misc_RNA (1)...(19): siRNA sense strand
gaccagucccuuauuuaua

SEQ ID NO: 2019814 - RNA, 19 nt, Homo sapiens
  misc_RNA (1)...(19): siRNA sense strand
gcgccuggcuucuauuuua

SEQ ID NO: 2019815 - RNA, 19 nt, Homo sapiens
  misc_RNA (1)...(19): siRNA sense strand
caaaugaccagucccuuau

SEQ ID NO: 2019816 - RNA, 19 nt, Homo sapiens
  misc_RNA (1)...(19): siRNA sense strand
acaaaugaccagucccuua

SEQ ID NO: 2019817 - RNA, 19 nt, Homo sapiens
  misc_RNA (1)...(19): siRNA sense strand
guucccagauuuacgauga

SEQ ID NO: 2019818 - RNA, 19 nt, Homo sapiens
  misc_RNA (1)...(19): siRNA sense strand
gaccaucuccuucuucaau

SEQ ID NO: 2019819 - RNA, 19 nt, Homo sapiens
  misc_RNA (1)...(19): siRNA sense strand
gggaagacugggaaucuaa

SEQ ID NO: 2019820 - RNA, 19 nt, Homo sapiens
  misc_RNA (1)...(19): siRNA sense strand
aaugaccagucccuuauuu

SEQ ID NO: 2019821 - RNA, 19 nt, Homo sapiens
  misc_RNA (1)...(19): siRNA sense strand
gggcucacuuccucucauu

SEQ ID NO: 2019822 - RNA, 19 nt, Homo sapiens
  misc_RNA (1)...(19): siRNA sense strand
ucauuuccaucgugggaua

SEQ ID NO: 2019823 - RNA, 19 nt, Homo sapiens
  misc_RNA (1)...(19): siRNA sense strand
agaagagauuuacaaggaa

SEQ ID NO: 2019824 - RNA, 19 nt, Homo sapiens
  misc_RNA (1)...(19): siRNA sense strand
ggagguauccaguuacucu

SEQ ID NO: 2019825 - RNA, 19 nt, Homo sapiens
  misc_RNA (1)...(19): siRNA sense strand
gggaccaucuccuucuuca

SEQ ID NO: 2019826 - RNA, 19 nt, Homo sapiens
  misc_RNA (1)...(19): siRNA sense strand
gguauuggguccucagacu

SEQ ID NO: 2019827 - RNA, 19 nt, Homo sapiens
  misc_RNA (1)...(19): siRNA sense strand
uaugggugcugguucaguu

SEQ ID NO: 2019828 - RNA, 19 nt, Homo sapiens
  misc_RNA (1)...(19): siRNA sense strand
ugaccagucccuuauuuau

SEQ ID NO: 2019829 - RNA, 19 nt, Homo sapiens
  misc_RNA (1)...(19): siRNA sense strand
gugcagaggcuauggaagu

SEQ ID NO: 2019830 - RNA, 19 nt, Homo sapiens
  misc_RNA (1)...(19): siRNA sense strand
ucaggacaguggcaaguca

SEQ ID NO: 2019831 - RNA, 19 nt, Homo sapiens
  misc_RNA (1)...(19): siRNA sense strand
gcucugcguuucugaucug

SEQ ID NO: 2019832 - RNA, 19 nt, Homo sapiens
  misc_RNA (1)...(19): siRNA sense strand
aaacuguaacccauagaaa

SEQ ID NO: 2019833 - RNA, 19 nt, Homo sapiens
  misc_RNA (1)...(19): siRNA sense strand
gggucuuccuggacuauga

SEQ ID NO: 2019834 - RNA, 19 nt, Homo sapiens
  misc_RNA (1)...(19): siRNA sense strand
cuucaaauccaaagggaaa

SEQ ID NO: 2019835 - RNA, 19 nt, Homo sapiens
  misc_RNA (1)...(19): siRNA sense strand
uuuauacccugcugacaug

SEQ ID NO: 2019836 - RNA, 19 nt, Homo sapiens
  misc_RNA (1)...(19): siRNA sense strand
ggaggugacucuggaucca

SEQ ID NO: 2019837 - RNA, 19 nt, Homo sapiens
  misc_RNA (1)...(19): siRNA sense strand
ggacgugggacaaaaugua

SEQ ID NO: 2019838 - RNA, 19 nt, Homo sapiens
  misc_RNA (1)...(19): siRNA sense strand
gugcgguucuucaggaauc

SEQ ID NO: 2019839 - RNA, 19 nt, Homo sapiens
  misc_RNA (1)...(19): siRNA sense strand
gcucacuuccucucauuuc

SEQ ID NO: 2019840 - RNA, 19 nt, Homo sapiens
  misc_RNA (1)...(19): siRNA sense strand
ccucggacaucggccugua

SEQ ID NO: 2019841 - RNA, 19 nt, Homo sapiens
  misc_RNA (1)...(19): siRNA sense strand
gacaaaauguaggguggua

SEQ ID NO: 2019842 - RNA, 19 nt, Homo sapiens
  misc_RNA (1)...(19): siRNA sense strand
uccaagcagggaaacauua

SEQ ID NO: 2019843 - RNA, 19 nt, Homo sapiens
  misc_RNA (1)...(19): siRNA sense strand
ugguucaguucccagauuu

SEQ ID NO: 2019844 - RNA, 19 nt, Homo sapiens
  misc_RNA (1)...(19): siRNA sense strand
agagugugguggcuucuca

SEQ ID NO: 2019845 - RNA, 19 nt, Homo sapiens
  misc_RNA (1)...(19): siRNA sense strand
accagucccuuauuuauac

SEQ ID NO: 2019846 - RNA, 19 nt, Homo sapiens
  misc_RNA (1)...(19): siRNA sense strand
ggaagacugggaaucuaag

SEQ ID NO: 2019847 - RNA, 19 nt, Homo sapiens
  misc_RNA (1)...(19): siRNA sense strand
accaucuccuucuucaaua

SEQ ID NO: 2019848 - RNA, 19 nt, Homo sapiens
  misc_RNA (1)...(19): siRNA sense strand
ucacuggaccgggcaaguu

SEQ ID NO: 2019849 - RNA, 19 nt, Homo sapiens
  misc_RNA (1)...(19): siRNA sense strand
gggaagaacaaugugacuu

SEQ ID NO: 2019850 - RNA, 19 nt, Homo sapiens
  misc_RNA (1)...(19): siRNA sense strand
gaagcucugcguuucugau

SEQ ID NO: 2019851 - RNA, 19 nt, Homo sapiens
  misc_RNA (1)...(19): siRNA sense strand
gcagaugccacaguaucga

SEQ ID NO: 2019852 - RNA, 19 nt, Homo sapiens
  misc_RNA (1)...(19): siRNA sense strand
cacauucaauccccauuuu

SEQ ID NO: 2019853 - RNA, 19 nt, Homo sapiens
  misc_RNA (1)...(19): siRNA sense strand
gagguggacgugggacaaa

SEQ ID NO: 2019854 - RNA, 19 nt, Homo sapiens
  misc_RNA (1)...(19): siRNA sense strand
ggagguggacgugggacaa

SEQ ID NO: 2019855 - RNA, 19 nt, Homo sapiens
  misc_RNA (1)...(19): siRNA sense strand
ccugugugguguugucaug

SEQ ID NO: 2019856 - RNA, 19 nt, Homo sapiens
  misc_RNA (1)...(19): siRNA sense strand
gguucaguucccagauuua

SEQ ID NO: 2019857 - RNA, 19 nt, Homo sapiens
  misc_RNA (1)...(19): siRNA sense strand
gugggaccaucuccuucuu

SEQ ID NO: 2019858 - RNA, 19 nt, Homo sapiens
  misc_RNA (1)...(19): siRNA sense strand
guucuccugcucccucuuu

SEQ ID NO: 2019859 - RNA, 19 nt, Homo sapiens
  misc_RNA (1)...(19): siRNA sense strand
cagaacauuuguauuucac

SEQ ID NO: 2019860 - RNA, 19 nt, Homo sapiens
  misc_RNA (1)...(19): siRNA sense strand
gacugacaacagaacauuu

SEQ ID NO: 2019861 - RNA, 19 nt, Homo sapiens
  misc_RNA (1)...(19): siRNA sense strand
agacugacaacagaacauu

SEQ ID NO: 2019862 - RNA, 19 nt, Homo sapiens
  misc_RNA (1)...(19): siRNA sense strand
ccgaagcucugcguuucug

SEQ ID NO: 2019863 - RNA, 19 nt, Homo sapiens
  misc_RNA (1)...(19): siRNA sense strand
ucugagaagagauuuacaa

SEQ ID NO: 2019864 - RNA, 19 nt, Homo sapiens
  misc_RNA (1)...(19): siRNA sense strand
ugcgauguaugacgaggaa

SEQ ID NO: 2019865 - RNA, 19 nt, Homo sapiens
  misc_RNA (1)...(19): siRNA sense strand
ucaguucccagauuuacga

SEQ ID NO: 2019866 - RNA, 19 nt, Homo sapiens
  misc_RNA (1)...(19): siRNA sense strand
uauccagcaugcgauguau

SEQ ID NO: 2019867 - RNA, 19 nt, Homo sapiens
  misc_RNA (1)...(19): siRNA sense strand
ggggaagacugggaaucua

SEQ ID NO: 2019868 - RNA, 19 nt, Homo sapiens
  misc_RNA (1)...(19): siRNA sense strand
ucaguuugaaggcuuguug

SEQ ID NO: 2019869 - RNA, 19 nt, Homo sapiens
  misc_RNA (1)...(19): siRNA sense strand
ucauuuugguucucaguuu

SEQ ID NO: 2019870 - RNA, 19 nt, Homo sapiens
  misc_RNA (1)...(19): siRNA sense strand
acugacaacagaacauuug

SEQ ID NO: 2019871 - RNA, 19 nt, Homo sapiens
  misc_RNA (1)...(19): siRNA sense strand
ugaaaacuguaacccauag

SEQ ID NO: 2019872 - RNA, 19 nt, Homo sapiens
  misc_RNA (1)...(19): siRNA sense strand
gcaagaagauggagaaaug

SEQ ID NO: 2019873 - RNA, 19 nt, Homo sapiens
  misc_RNA (1)...(19): siRNA sense strand
agacugagcuggcuucuuu

SEQ ID NO: 2019874 - RNA, 19 nt, Homo sapiens
  misc_RNA (1)...(19): siRNA sense strand
gaacuacuguggagaaaca

SEQ ID NO: 2019875 - RNA, 19 nt, Homo sapiens
  misc_RNA (1)...(19): siRNA sense strand
ggacaauacuggugccauu

SEQ ID NO: 2019876 - RNA, 19 nt, Homo sapiens
  misc_RNA (1)...(19): siRNA sense strand
gagagcagauggcagagua

SEQ ID NO: 2019877 - RNA, 19 nt, Homo sapiens
  misc_RNA (1)...(19): siRNA sense strand
cagagaaacuccagacuga

SEQ ID NO: 2019878 - RNA, 19 nt, Homo sapiens
  misc_RNA (1)...(19): siRNA sense strand
gaaagacgauaccaucauc

SEQ ID NO: 2019879 - RNA, 19 nt, Homo sapiens
  misc_RNA (1)...(19): siRNA sense strand
ggagggacauggaaggaaa

SEQ ID NO: 2019880 - RNA, 19 nt, Homo sapiens
  misc_RNA (1)...(19): siRNA sense strand
gggagaagauauacagcua

SEQ ID NO: 2019881 - RNA, 19 nt, Homo sapiens
  misc_RNA (1)...(19): siRNA sense strand
ugacugagaugcagaugga

SEQ ID NO: 2019882 - RNA, 19 nt, Homo sapiens
  misc_RNA (1)...(19): siRNA sense strand
gcagucgccuccuuccuau

SEQ ID NO: 2019883 - RNA, 19 nt, Homo sapiens
  misc_RNA (1)...(19): siRNA sense strand
ggaaauguggcacugaaga

SEQ ID NO: 2019884 - RNA, 19 nt, Homo sapiens
  misc_RNA (1)...(19): siRNA sense strand
caaugaagcagucagaaga

SEQ ID NO: 2019885 - RNA, 19 nt, Homo sapiens
  misc_RNA (1)...(19): siRNA sense strand
gagaagauauacagcuaac

SEQ ID NO: 2019886 - RNA, 19 nt, Homo sapiens
  misc_RNA (1)...(19): siRNA sense strand
caagcuugcugcucaaagu

SEQ ID NO: 2019887 - RNA, 19 nt, Homo sapiens
  misc_RNA (1)...(19): siRNA sense strand
gaguggaggugacugagau

SEQ ID NO: 2019888 - RNA, 19 nt, Homo sapiens
  misc_RNA (1)...(19): siRNA sense strand
gcacugaagauacacaaca

SEQ ID NO: 2019889 - RNA, 19 nt, Homo sapiens
  misc_RNA (1)...(19): siRNA sense strand
ggagaagauauacagcuaa

SEQ ID NO: 2019890 - RNA, 19 nt, Homo sapiens
  misc_RNA (1)...(19): siRNA sense strand
gcagauggcagaguacaga

SEQ ID NO: 2019891 - RNA, 19 nt, Homo sapiens
  misc_RNA (1)...(19): siRNA sense strand
gaaauguggcacugaagau

SEQ ID NO: 2019892 - RNA, 19 nt, Homo sapiens
  misc_RNA (1)...(19): siRNA sense strand
ggaaagacgauaccaucau

SEQ ID NO: 2019893 - RNA, 19 nt, Homo sapiens
  misc_RNA (1)...(19): siRNA sense strand
ggagaaaugcagccgaugu

SEQ ID NO: 2019894 - RNA, 19 nt, Homo sapiens
  misc_RNA (1)...(19): siRNA sense strand
cagagugggagaagauaua

SEQ ID NO: 2019895 - RNA, 19 nt, Homo sapiens
  misc_RNA (1)...(19): siRNA sense strand
gaagaugcccuguuaaccu

SEQ ID NO: 2019896 - RNA, 19 nt, Homo sapiens
  misc_RNA (1)...(19): siRNA sense strand
agaugcagauggaggagua

SEQ ID NO: 2019897 - RNA, 19 nt, Homo sapiens
  misc_RNA (1)...(19): siRNA sense strand
gggaacuacuguggagaaa

SEQ ID NO: 2019898 - RNA, 19 nt, Homo sapiens
  misc_RNA (1)...(19): siRNA sense strand
ccgaugugcucuucagaug

SEQ ID NO: 2019899 - RNA, 19 nt, Homo sapiens
  misc_RNA (1)...(19): siRNA sense strand
aaacaagcuugcugcucaa

SEQ ID NO: 2019900 - RNA, 19 nt, Homo sapiens
  misc_RNA (1)...(19): siRNA sense strand
gaagauauacagcuaaccu

SEQ ID NO: 2019901 - RNA, 19 nt, Homo sapiens
  misc_RNA (1)...(19): siRNA sense strand
ugagcuggcuucuuuaaaa

SEQ ID NO: 2019902 - RNA, 19 nt, Homo sapiens
  misc_RNA (1)...(19): siRNA sense strand
gagaaaugcagccgaugug

SEQ ID NO: 2019903 - RNA, 19 nt, Homo sapiens
  misc_RNA (1)...(19): siRNA sense strand
gaaggaaagacgauaccau

SEQ ID NO: 2019904 - RNA, 19 nt, Homo sapiens
  misc_RNA (1)...(19): siRNA sense strand
guacagaggcuggguagag

SEQ ID NO: 2019905 - RNA, 19 nt, Homo sapiens
  misc_RNA (1)...(19): siRNA sense strand
uagaguggauagagaaugg

SEQ ID NO: 2019906 - RNA, 19 nt, Homo sapiens
  misc_RNA (1)...(19): siRNA sense strand
gcagauggaggaguacaga

SEQ ID NO: 2019907 - RNA, 19 nt, Homo sapiens
  misc_RNA (1)...(19): siRNA sense strand
ggaccgaucccaccguuac

SEQ ID NO: 2019908 - RNA, 19 nt, Homo sapiens
  misc_RNA (1)...(19): siRNA sense strand
gacaauacuggugccauuu

SEQ ID NO: 2019909 - RNA, 19 nt, Homo sapiens
  misc_RNA (1)...(19): siRNA sense strand
aaauguggcacugaagaua

SEQ ID NO: 2019910 - RNA, 19 nt, Homo sapiens
  misc_RNA (1)...(19): siRNA sense strand
gaggccaguuuggaucuga

SEQ ID NO: 2019911 - RNA, 19 nt, Homo sapiens
  misc_RNA (1)...(19): siRNA sense strand
aagauggccuguucuaugc

SEQ ID NO: 2019912 - RNA, 19 nt, Homo sapiens
  misc_RNA (1)...(19): siRNA sense strand
uggggaagaugcccuguua

SEQ ID NO: 2019913 - RNA, 19 nt, Homo sapiens
  misc_RNA (1)...(19): siRNA sense strand
gacgucacuuguuccauca

SEQ ID NO: 2019914 - RNA, 19 nt, Homo sapiens
  misc_RNA (1)...(19): siRNA sense strand
ccuguuaaccugccagcua

SEQ ID NO: 2019915 - RNA, 19 nt, Homo sapiens
  misc_RNA (1)...(19): siRNA sense strand
agacugacccugcagauac

SEQ ID NO: 2019916 - RNA, 19 nt, Homo sapiens
  misc_RNA (1)...(19): siRNA sense strand
ggaguggaggugacugaga

SEQ ID NO: 2019917 - RNA, 19 nt, Homo sapiens
  misc_RNA (1)...(19): siRNA sense strand
gggaagaugcccuguuaac

SEQ ID NO: 2019918 - RNA, 19 nt, Homo sapiens
  misc_RNA (1)...(19): siRNA sense strand
ucaucagccucccagagaa

SEQ ID NO: 2019919 - RNA, 19 nt, Homo sapiens
  misc_RNA (1)...(19): siRNA sense strand
caucagccucccagagaaa

SEQ ID NO: 2019920 - RNA, 19 nt, Homo sapiens
  misc_RNA (1)...(19): siRNA sense strand
agggaaauguggcacugaa

SEQ ID NO: 2019921 - RNA, 19 nt, Homo sapiens
  misc_RNA (1)...(19): siRNA sense strand
gucaucagccucccagaga

SEQ ID NO: 2019922 - RNA, 19 nt, Homo sapiens
  misc_RNA (1)...(19): siRNA sense strand
cagacugacccugcagaua

SEQ ID NO: 2019923 - RNA, 19 nt, Homo sapiens
  misc_RNA (1)...(19): siRNA sense strand
ccaagaggaccacaaugca

SEQ ID NO: 2019924 - RNA, 19 nt, Homo sapiens
  misc_RNA (1)...(19): siRNA sense strand
ggguagaguggauagagaa

SEQ ID NO: 2019925 - RNA, 19 nt, Homo sapiens
  misc_RNA (1)...(19): siRNA sense strand
gagaaggggucggucauca

SEQ ID NO: 2019926 - RNA, 19 nt, Homo sapiens
  misc_RNA (1)...(19): siRNA sense strand
gaggcuggguagaguggau

SEQ ID NO: 2019927 - RNA, 19 nt, Homo sapiens
  misc_RNA (1)...(19): siRNA sense strand
gcuaagggucacaaacauc

SEQ ID NO: 2019928 - RNA, 19 nt, Homo sapiens
  misc_RNA (1)...(19): siRNA sense strand
gcuguggacgucacuuguu

SEQ ID NO: 2019929 - RNA, 19 nt, Homo sapiens
  misc_RNA (1)...(19): siRNA sense strand
uggguagaguggauagaga

SEQ ID NO: 2019930 - RNA, 19 nt, Homo sapiens
  misc_RNA (1)...(19): siRNA sense strand
aggagaaaaucgcaacuuu

SEQ ID NO: 2019931 - RNA, 19 nt, Homo sapiens
  misc_RNA (1)...(19): siRNA sense strand
ccaggaggccaguuuggau

SEQ ID NO: 2019932 - RNA, 19 nt, Homo sapiens
  misc_RNA (1)...(19): siRNA sense strand
gaucugaaggugguaaguc

SEQ ID NO: 2019933 - RNA, 19 nt, Homo sapiens
  misc_RNA (1)...(19): siRNA sense strand
uacagaggcuggguagagu

SEQ ID NO: 2019934 - RNA, 19 nt, Homo sapiens
  misc_RNA (1)...(19): siRNA sense strand
gacaaugaagcagucagaa

SEQ ID NO: 2019935 - RNA, 19 nt, Homo sapiens
  misc_RNA (1)...(19): siRNA sense strand
cgucagagugggagaagau

SEQ ID NO: 2019936 - RNA, 19 nt, Homo sapiens
  misc_RNA (1)...(19): siRNA sense strand
gaagacauccggggagaga

SEQ ID NO: 2019937 - RNA, 19 nt, Homo sapiens
  misc_RNA (1)...(19): siRNA sense strand
cacugaagauacacaacau

SEQ ID NO: 2019938 - RNA, 19 nt, Homo sapiens
  misc_RNA (1)...(19): siRNA sense strand
gacugacccugcagauacu

SEQ ID NO: 2019939 - RNA, 19 nt, Homo sapiens
  misc_RNA (1)...(19): siRNA sense strand
uuuccaggcuacaaucugu

SEQ ID NO: 2019940 - RNA, 19 nt, Homo sapiens
  misc_RNA (1)...(19): siRNA sense strand
ccacgugcagacauugcua

SEQ ID NO: 2019941 - RNA, 19 nt, Homo sapiens
  misc_RNA (1)...(19): siRNA sense strand
ugcagucgccuccuuccua

SEQ ID NO: 2019942 - RNA, 19 nt, Homo sapiens
  misc_RNA (1)...(19): siRNA sense strand
gagcagauggcagaguaca

SEQ ID NO: 2019943 - RNA, 19 nt, Homo sapiens
  misc_RNA (1)...(19): siRNA sense strand
gagaagagauuuacaagga

SEQ ID NO: 2019944 - RNA, 19 nt, Homo sapiens
  misc_RNA (1)...(19): siRNA sense strand
ugacggagguauccaguua

SEQ ID NO: 2019945 - RNA, 19 nt, Homo sapiens
  misc_RNA (1)...(19): siRNA sense strand
ggaagaacaaugugacuuu

SEQ ID NO: 2019946 - RNA, 19 nt, Homo sapiens
  misc_RNA (1)...(19): siRNA sense strand
gaagaacaaugugacuuug

SEQ ID NO: 2019947 - RNA, 19 nt, Homo sapiens
  misc_RNA (1)...(19): siRNA sense strand
cuaagcagaugccacagua

SEQ ID NO: 2019948 - RNA, 19 nt, Homo sapiens
  misc_RNA (1)...(19): siRNA sense strand
gcacggacaggcagaauug

SEQ ID NO: 2019949 - RNA, 19 nt, Homo sapiens
  misc_RNA (1)...(19): siRNA sense strand
gaccagucccuuauuuaua

SEQ ID NO: 2019950 - RNA, 19 nt, Homo sapiens
  misc_RNA (1)...(19): siRNA sense strand
gcgccuggcuucuauuuua

SEQ ID NO: 2019951 - RNA, 19 nt, Homo sapiens
  misc_RNA (1)...(19): siRNA sense strand
caaaugaccagucccuuau

SEQ ID NO: 2019952 - RNA, 19 nt, Homo sapiens
  misc_RNA (1)...(19): siRNA sense strand
acaaaugaccagucccuua

SEQ ID NO: 2019953 - RNA, 19 nt, Homo sapiens
  misc_RNA (1)...(19): siRNA sense strand
guucccagauuuacgauga

SEQ ID NO: 2019954 - RNA, 19 nt, Homo sapiens
  misc_RNA (1)...(19): siRNA sense strand
gaccaucuccuucuucaau

SEQ ID NO: 2019955 - RNA, 19 nt, Homo sapiens
  misc_RNA (1)...(19): siRNA sense strand
gggaagacugggaaucuaa

SEQ ID NO: 2019956 - RNA, 19 nt, Homo sapiens
  misc_RNA (1)...(19): siRNA sense strand
aaugaccagucccuuauuu

SEQ ID NO: 2019957 - RNA, 19 nt, Homo sapiens
  misc_RNA (1)...(19): siRNA sense strand
gggcucacuuccucucauu

SEQ ID NO: 2019958 - RNA, 19 nt, Homo sapiens
  misc_RNA (1)...(19): siRNA sense strand
ucauuuccaucgugggaua

SEQ ID NO: 2019959 - RNA, 19 nt, Homo sapiens
  misc_RNA (1)...(19): siRNA sense strand
agaagagauuuacaaggaa

SEQ ID NO: 2019960 - RNA, 19 nt, Homo sapiens
  misc_RNA (1)...(19): siRNA sense strand
ggagguauccaguuacucu

SEQ ID NO: 2019961 - RNA, 19 nt, Homo sapiens
  misc_RNA (1)...(19): siRNA sense strand
gggaccaucuccuucuuca

SEQ ID NO: 2019962 - RNA, 19 nt, Homo sapiens
  misc_RNA (1)...(19): siRNA sense strand
gguauuggguccucagacu

SEQ ID NO: 2019963 - RNA, 19 nt, Homo sapiens
  misc_RNA (1)...(19): siRNA sense strand
uaugggugcugguucaguu

SEQ ID NO: 2019964 - RNA, 19 nt, Homo sapiens
  misc_RNA (1)...(19): siRNA sense strand
ugaccagucccuuauuuau

SEQ ID NO: 2019965 - RNA, 19 nt, Homo sapiens
  misc_RNA (1)...(19): siRNA sense strand
gugcagaggcuauggaagu

SEQ ID NO: 2019966 - RNA, 19 nt, Homo sapiens
  misc_RNA (1)...(19): siRNA sense strand
ucaggacaguggcaaguca

SEQ ID NO: 2019967 - RNA, 19 nt, Homo sapiens
  misc_RNA (1)...(19): siRNA sense strand
gcucugcguuucugaucug

SEQ ID NO: 2019968 - RNA, 19 nt, Homo sapiens
  misc_RNA (1)...(19): siRNA sense strand
aaacuguaacccauagaaa

SEQ ID NO: 2019969 - RNA, 19 nt, Homo sapiens
  misc_RNA (1)...(19): siRNA sense strand
gggucuuccuggacuauga

SEQ ID NO: 2019970 - RNA, 19 nt, Homo sapiens
  misc_RNA (1)...(19): siRNA sense strand
cuucaaauccaaagggaaa

SEQ ID NO: 2019971 - RNA, 19 nt, Homo sapiens
  misc_RNA (1)...(19): siRNA sense strand
uuuauacccugcugacaug

SEQ ID NO: 2019972 - RNA, 19 nt, Homo sapiens
  misc_RNA (1)...(19): siRNA sense strand
ggaggugacucuggaucca

SEQ ID NO: 2019973 - RNA, 19 nt, Homo sapiens
  misc_RNA (1)...(19): siRNA sense strand
ggacgugggacaaaaugua

SEQ ID NO: 2019974 - RNA, 19 nt, Homo sapiens
  misc_RNA (1)...(19): siRNA sense strand
gugcgguucuucaggaauc

SEQ ID NO: 2019975 - RNA, 19 nt, Homo sapiens
  misc_RNA (1)...(19): siRNA sense strand
gcucacuuccucucauuuc

SEQ ID NO: 2019976 - RNA, 19 nt, Homo sapiens
  misc_RNA (1)...(19): siRNA sense strand
ccucggacaucggccugua

SEQ ID NO: 2019977 - RNA, 19 nt, Homo sapiens
  misc_RNA (1)...(19): siRNA sense strand
gacaaaauguaggguggua

SEQ ID NO: 2019978 - RNA, 19 nt, Homo sapiens
  misc_RNA (1)...(19): siRNA sense strand
uccaagcagggaaacauua

SEQ ID NO: 2019979 - RNA, 19 nt, Homo sapiens
  misc_RNA (1)...(19): siRNA sense strand
ugguucaguucccagauuu

SEQ ID NO: 2019980 - RNA, 19 nt, Homo sapiens
  misc_RNA (1)...(19): siRNA sense strand
agagugugguggcuucuca

SEQ ID NO: 2019981 - RNA, 19 nt, Homo sapiens
  misc_RNA (1)...(19): siRNA sense strand
accagucccuuauuuauac

SEQ ID NO: 2019982 - RNA, 19 nt, Homo sapiens
  misc_RNA (1)...(19): siRNA sense strand
ggaagacugggaaucuaag

SEQ ID NO: 2019983 - RNA, 19 nt, Homo sapiens
  misc_RNA (1)...(19): siRNA sense strand
accaucuccuucuucaaua

SEQ ID NO: 2019984 - RNA, 19 nt, Homo sapiens
  misc_RNA (1)...(19): siRNA sense strand
ucacuggaccgggcaaguu

SEQ ID NO: 2019985 - RNA, 19 nt, Homo sapiens
  misc_RNA (1)...(19): siRNA sense strand
gggaagaacaaugugacuu

SEQ ID NO: 2019986 - RNA, 19 nt, Homo sapiens
  misc_RNA (1)...(19): siRNA sense strand
gaagcucugcguuucugau

SEQ ID NO: 2019987 - RNA, 19 nt, Homo sapiens
  misc_RNA (1)...(19): siRNA sense strand
gcagaugccacaguaucga

SEQ ID NO: 2019988 - RNA, 19 nt, Homo sapiens
  misc_RNA (1)...(19): siRNA sense strand
cacauucaauccccauuuu

SEQ ID NO: 2019989 - RNA, 19 nt, Homo sapiens
  misc_RNA (1)...(19): siRNA sense strand
gagguggacgugggacaaa

SEQ ID NO: 2019990 - RNA, 19 nt, Homo sapiens
  misc_RNA (1)...(19): siRNA sense strand
ggagguggacgugggacaa

SEQ ID NO: 2019991 - RNA, 19 nt, Homo sapiens
  misc_RNA (1)...(19): siRNA sense strand
ccugugugguguugucaug

SEQ ID NO: 2019992 - RNA, 19 nt, Homo sapiens
  misc_RNA (1)...(19): siRNA sense strand
gguucaguucccagauuua

SEQ ID NO: 2019993 - RNA, 19 nt, Homo sapiens
  misc_RNA (1)...(19): siRNA sense strand
gugggaccaucuccuucuu

SEQ ID NO: 2019994 - RNA, 19 nt, Homo sapiens
  misc_RNA (1)...(19): siRNA sense strand
guucuccugcucccucuuu

SEQ ID NO: 2019995 - RNA, 19 nt, Homo sapiens
  misc_RNA (1)...(19): siRNA sense strand
cagaacauuuguauuucac

SEQ ID NO: 2019996 - RNA, 19 nt, Homo sapiens
  misc_RNA (1)...(19): siRNA sense strand
gacugacaacagaacauuu

SEQ ID NO: 2019997 - RNA, 19 nt, Homo sapiens
  misc_RNA (1)...(19): siRNA sense strand
agacugacaacagaacauu

SEQ ID NO: 2019998 - RNA, 19 nt, Homo sapiens
  misc_RNA (1)...(19): siRNA sense strand
ccgaagcucugcguuucug

SEQ ID NO: 2019999 - RNA, 19 nt, Homo sapiens
  misc_RNA (1)...(19): siRNA sense strand
ucugagaagagauuuacaa

SEQ ID NO: 2020000 - RNA, 19 nt, Homo sapiens
  misc_RNA (1)...(19): siRNA sense strand
ugcgauguaugacgaggaa

SEQ ID NO: 2020001 - RNA, 19 nt, Homo sapiens
  misc_RNA (1)...(19): siRNA sense strand
ucaguucccagauuuacga

SEQ ID NO: 2020002 - RNA, 19 nt, Homo sapiens
  misc_RNA (1)...(19): siRNA sense strand
uauccagcaugcgauguau

SEQ ID NO: 2020003 - RNA, 19 nt, Homo sapiens
  misc_RNA (1)...(19): siRNA sense strand
ggggaagacugggaaucua

SEQ ID NO: 2020004 - RNA, 19 nt, Homo sapiens
  misc_RNA (1)...(19): siRNA sense strand
ucaguuugaaggcuuguug

SEQ ID NO: 2020005 - RNA, 19 nt, Homo sapiens
  misc_RNA (1)...(19): siRNA sense strand
ucauuuugguucucaguuu

SEQ ID NO: 2020006 - RNA, 19 nt, Homo sapiens
  misc_RNA (1)...(19): siRNA sense strand
acugacaacagaacauuug

SEQ ID NO: 2020007 - RNA, 19 nt, Homo sapiens
  misc_RNA (1)...(19): siRNA sense strand
ugaaaacuguaacccauag

SEQ ID NO: 2020008 - RNA, 19 nt, Homo sapiens
  misc_RNA (1)...(19): siRNA sense strand
gagaagagauuuacaagga

SEQ ID NO: 2020009 - RNA, 19 nt, Homo sapiens
  misc_RNA (1)...(19): siRNA sense strand
ugacggagguauccaguua

SEQ ID NO: 2020010 - RNA, 19 nt, Homo sapiens
  misc_RNA (1)...(19): siRNA sense strand
ggaagaacaaugugacuuu

SEQ ID NO: 2020011 - RNA, 19 nt, Homo sapiens
  misc_RNA (1)...(19): siRNA sense strand
gaagaacaaugugacuuug

SEQ ID NO: 2020012 - RNA, 19 nt, Homo sapiens
  misc_RNA (1)...(19): siRNA sense strand
cuaagcagaugccacagua

SEQ ID NO: 2020013 - RNA, 19 nt, Homo sapiens
  misc_RNA (1)...(19): siRNA sense strand
gcacggacaggcagaauug

SEQ ID NO: 2020014 - RNA, 19 nt, Homo sapiens
  misc_RNA (1)...(19): siRNA sense strand
gaccagucccuuauuuaua

SEQ ID NO: 2020015 - RNA, 19 nt, Homo sapiens
  misc_RNA (1)...(19): siRNA sense strand
gcgccuggcuucuauuuua

SEQ ID NO: 2020016 - RNA, 19 nt, Homo sapiens
  misc_RNA (1)...(19): siRNA sense strand
caaaugaccagucccuuau

SEQ ID NO: 2020017 - RNA, 19 nt, Homo sapiens
  misc_RNA (1)...(19): siRNA sense strand
acaaaugaccagucccuua

SEQ ID NO: 2020018 - RNA, 19 nt, Homo sapiens
  misc_RNA (1)...(19): siRNA sense strand
guucccagauuuacgauga

SEQ ID NO: 2020019 - RNA, 19 nt, Homo sapiens
  misc_RNA (1)...(19): siRNA sense strand
gaccaucuccuucuucaau

SEQ ID NO: 2020020 - RNA, 19 nt, Homo sapiens
  misc_RNA (1)...(19): siRNA sense strand
gggaagacugggaaucuaa

SEQ ID NO: 2020021 - RNA, 19 nt, Homo sapiens
  misc_RNA (1)...(19): siRNA sense strand
aaugaccagucccuuauuu

SEQ ID NO: 2020022 - RNA, 19 nt, Homo sapiens
  misc_RNA (1)...(19): siRNA sense strand
gggcucacuuccucucauu

SEQ ID NO: 2020023 - RNA, 19 nt, Homo sapiens
  misc_RNA (1)...(19): siRNA sense strand
ucauuuccaucgugggaua

SEQ ID NO: 2020024 - RNA, 19 nt, Homo sapiens
  misc_RNA (1)...(19): siRNA sense strand
agaagagauuuacaaggaa

SEQ ID NO: 2020025 - RNA, 19 nt, Homo sapiens
  misc_RNA (1)...(19): siRNA sense strand
ggagguauccaguuacucu

SEQ ID NO: 2020026 - RNA, 19 nt, Homo sapiens
  misc_RNA (1)...(19): siRNA sense strand
gggaccaucuccuucuuca

SEQ ID NO: 2020027 - RNA, 19 nt, Homo sapiens
  misc_RNA (1)...(19): siRNA sense strand
gguauuggguccucagacu

SEQ ID NO: 2020028 - RNA, 19 nt, Homo sapiens
  misc_RNA (1)...(19): siRNA sense strand
uaugggugcugguucaguu

SEQ ID NO: 2020029 - RNA, 19 nt, Homo sapiens
  misc_RNA (1)...(19): siRNA sense strand
ugaccagucccuuauuuau

SEQ ID NO: 2020030 - RNA, 19 nt, Homo sapiens
  misc_RNA (1)...(19): siRNA sense strand
gugcagaggcuauggaagu

SEQ ID NO: 2020031 - RNA, 19 nt, Homo sapiens
  misc_RNA (1)...(19): siRNA sense strand
ucaggacaguggcaaguca

SEQ ID NO: 2020032 - RNA, 19 nt, Homo sapiens
  misc_RNA (1)...(19): siRNA sense strand
gcucugcguuucugaucug

SEQ ID NO: 2020033 - RNA, 19 nt, Homo sapiens
  misc_RNA (1)...(19): siRNA sense strand
aaacuguaacccauagaaa

SEQ ID NO: 2020034 - RNA, 19 nt, Homo sapiens
  misc_RNA (1)...(19): siRNA sense strand
gggucuuccuggacuauga

SEQ ID NO: 2020035 - RNA, 19 nt, Homo sapiens
  misc_RNA (1)...(19): siRNA sense strand
cuucaaauccaaagggaaa

SEQ ID NO: 2020036 - RNA, 19 nt, Homo sapiens
  misc_RNA (1)...(19): siRNA sense strand
uuuauacccugcugacaug

SEQ ID NO: 2020037 - RNA, 19 nt, Homo sapiens
  misc_RNA (1)...(19): siRNA sense strand
ggaggugacucuggaucca

SEQ ID NO: 2020038 - RNA, 19 nt, Homo sapiens
  misc_RNA (1)...(19): siRNA sense strand
ggacgugggacaaaaugua

SEQ ID NO: 2020039 - RNA, 19 nt, Homo sapiens
  misc_RNA (1)...(19): siRNA sense strand
gugcgguucuucaggaauc

SEQ ID NO: 2020040 - RNA, 19 nt, Homo sapiens
  misc_RNA (1)...(19): siRNA sense strand
gcucacuuccucucauuuc

SEQ ID NO: 2020041 - RNA, 19 nt, Homo sapiens
  misc_RNA (1)...(19): siRNA sense strand
ccucggacaucggccugua

SEQ ID NO: 2020042 - RNA, 19 nt, Homo sapiens
  misc_RNA (1)...(19): siRNA sense strand
gacaaaauguaggguggua

SEQ ID NO: 2020043 - RNA, 19 nt, Homo sapiens
  misc_RNA (1)...(19): siRNA sense strand
uccaagcagggaaacauua

SEQ ID NO: 2020044 - RNA, 19 nt, Homo sapiens
  misc_RNA (1)...(19): siRNA sense strand
ugguucaguucccagauuu

SEQ ID NO: 2020045 - RNA, 19 nt, Homo sapiens
  misc_RNA (1)...(19): siRNA sense strand
agagugugguggcuucuca

SEQ ID NO: 2020046 - RNA, 19 nt, Homo sapiens
  misc_RNA (1)...(19): siRNA sense strand
accagucccuuauuuauac

SEQ ID NO: 2020047 - RNA, 19 nt, Homo sapiens
  misc_RNA (1)...(19): siRNA sense strand
ggaagacugggaaucuaag

SEQ ID NO: 2020048 - RNA, 19 nt, Homo sapiens
  misc_RNA (1)...(19): siRNA sense strand
accaucuccuucuucaaua

SEQ ID NO: 2020049 - RNA, 19 nt, Homo sapiens
  misc_RNA (1)...(19): siRNA sense strand
ucacuggaccgggcaaguu

SEQ ID NO: 2020050 - RNA, 19 nt, Homo sapiens
  misc_RNA (1)...(19): siRNA sense strand
gggaagaacaaugugacuu

SEQ ID NO: 2020051 - RNA, 19 nt, Homo sapiens
  misc_RNA (1)...(19): siRNA sense strand
gaagcucugcguuucugau

SEQ ID NO: 2020052 - RNA, 19 nt, Homo sapiens
  misc_RNA (1)...(19): siRNA sense strand
gcagaugccacaguaucga

SEQ ID NO: 2020053 - RNA, 19 nt, Homo sapiens
  misc_RNA (1)...(19): siRNA sense strand
cacauucaauccccauuuu

SEQ ID NO: 2020054 - RNA, 19 nt, Homo sapiens
  misc_RNA (1)...(19): siRNA sense strand
gagguggacgugggacaaa

SEQ ID NO: 2020055 - RNA, 19 nt, Homo sapiens
  misc_RNA (1)...(19): siRNA sense strand
ggagguggacgugggacaa

SEQ ID NO: 2020056 - RNA, 19 nt, Homo sapiens
  misc_RNA (1)...(19): siRNA sense strand
ccugugugguguugucaug

SEQ ID NO: 2020057 - RNA, 19 nt, Homo sapiens
  misc_RNA (1)...(19): siRNA sense strand
gguucaguucccagauuua

SEQ ID NO: 2020058 - RNA, 19 nt, Homo sapiens
  misc_RNA (1)...(19): siRNA sense strand
gugggaccaucuccuucuu

SEQ ID NO: 2020059 - RNA, 19 nt, Homo sapiens
  misc_RNA (1)...(19): siRNA sense strand
guucuccugcucccucuuu

SEQ ID NO: 2020060 - RNA, 19 nt, Homo sapiens
  misc_RNA (1)...(19): siRNA sense strand
cagaacauuuguauuucac

SEQ ID NO: 2020061 - RNA, 19 nt, Homo sapiens
  misc_RNA (1)...(19): siRNA sense strand
gacugacaacagaacauuu

SEQ ID NO: 2020062 - RNA, 19 nt, Homo sapiens
  misc_RNA (1)...(19): siRNA sense strand
agacugacaacagaacauu

SEQ ID NO: 2020063 - RNA, 19 nt, Homo sapiens
  misc_RNA (1)...(19): siRNA sense strand
ccgaagcucugcguuucug

SEQ ID NO: 2020064 - RNA, 19 nt, Homo sapiens
  misc_RNA (1)...(19): siRNA sense strand
ucugagaagagauuuacaa

SEQ ID NO: 2020065 - RNA, 19 nt, Homo sapiens
  misc_RNA (1)...(19): siRNA sense strand
ugcgauguaugacgaggaa

SEQ ID NO: 2020066 - RNA, 19 nt, Homo sapiens
  misc_RNA (1)...(19): siRNA sense strand
ucaguucccagauuuacga

SEQ ID NO: 2020067 - RNA, 19 nt, Homo sapiens
  misc_RNA (1)...(19): siRNA sense strand
uauccagcaugcgauguau

SEQ ID NO: 2020068 - RNA, 19 nt, Homo sapiens
  misc_RNA (1)...(19): siRNA sense strand
ggggaagacugggaaucua

SEQ ID NO: 2020069 - RNA, 19 nt, Homo sapiens
  misc_RNA (1)...(19): siRNA sense strand
ucaguuugaaggcuuguug

SEQ ID NO: 2020070 - RNA, 19 nt, Homo sapiens
  misc_RNA (1)...(19): siRNA sense strand
ucauuuugguucucaguuu

SEQ ID NO: 2020071 - RNA, 19 nt, Homo sapiens
  misc_RNA (1)...(19): siRNA sense strand
acugacaacagaacauuug

SEQ ID NO: 2020072 - RNA, 19 nt, Homo sapiens
  misc_RNA (1)...(19): siRNA sense strand
ugaaaacuguaacccauag

SEQ ID NO: 2020073 - RNA, 19 nt, Homo sapiens
  misc_RNA (1)...(19): siRNA sense strand
gaaauaagccuaagagaga

SEQ ID NO: 2020074 - RNA, 19 nt, Homo sapiens
  misc_RNA (1)...(19): siRNA sense strand
ggaaaguacuuguguuauu

SEQ ID NO: 2020075 - RNA, 19 nt, Homo sapiens
  misc_RNA (1)...(19): siRNA sense strand
gaaggcugcucuccgaaua

SEQ ID NO: 2020076 - RNA, 19 nt, Homo sapiens
  misc_RNA (1)...(19): siRNA sense strand
guucugaucuucacauuga

SEQ ID NO: 2020077 - RNA, 19 nt, Homo sapiens
  misc_RNA (1)...(19): siRNA sense strand
gaacguguaugcagaugga

SEQ ID NO: 2020078 - RNA, 19 nt, Homo sapiens
  misc_RNA (1)...(19): siRNA sense strand
gggcuuagcuaaugaaagu

SEQ ID NO: 2020079 - RNA, 19 nt, Homo sapiens
  misc_RNA (1)...(19): siRNA sense strand
guaagaacguggagaggaa

SEQ ID NO: 2020080 - RNA, 19 nt, Homo sapiens
  misc_RNA (1)...(19): siRNA sense strand
gauggugacuucuacgaaa

SEQ ID NO: 2020081 - RNA, 19 nt, Homo sapiens
  misc_RNA (1)...(19): siRNA sense strand
gaaaauggcccucuucaaa

SEQ ID NO: 2020082 - RNA, 19 nt, Homo sapiens
  misc_RNA (1)...(19): siRNA sense strand
ccacugcccugaccauuug

SEQ ID NO: 2020083 - RNA, 19 nt, Homo sapiens
  misc_RNA (1)...(19): siRNA sense strand
caaccaaucagaaccauaa

SEQ ID NO: 2020084 - RNA, 19 nt, Homo sapiens
  misc_RNA (1)...(19): siRNA sense strand
gaacaucccggcuguggaa

SEQ ID NO: 2020085 - RNA, 19 nt, Homo sapiens
  misc_RNA (1)...(19): siRNA sense strand
agacaacccugagagauuu

SEQ ID NO: 2020086 - RNA, 19 nt, Homo sapiens
  misc_RNA (1)...(19): siRNA sense strand
guacuuguguuauuuccaa

SEQ ID NO: 2020087 - RNA, 19 nt, Homo sapiens
  misc_RNA (1)...(19): siRNA sense strand
gagaacggauacuggacua

SEQ ID NO: 2020088 - RNA, 19 nt, Homo sapiens
  misc_RNA (1)...(19): siRNA sense strand
gagcugaggugggugaguu

SEQ ID NO: 2020089 - RNA, 19 nt, Homo sapiens
  misc_RNA (1)...(19): siRNA sense strand
gaucucauaucuacaccuu

SEQ ID NO: 2020090 - RNA, 19 nt, Homo sapiens
  misc_RNA (1)...(19): siRNA sense strand
acauugaagugaaggguua

SEQ ID NO: 2020091 - RNA, 19 nt, Homo sapiens
  misc_RNA (1)...(19): siRNA sense strand
gaacucaaguggaggaaaa

SEQ ID NO: 2020092 - RNA, 19 nt, Homo sapiens
  misc_RNA (1)...(19): siRNA sense strand
caacagagcaagaaauaag

SEQ ID NO: 2020093 - RNA, 19 nt, Homo sapiens
  misc_RNA (1)...(19): siRNA sense strand
gaaaugggauacgcugcaa

SEQ ID NO: 2020094 - RNA, 19 nt, Homo sapiens
  misc_RNA (1)...(19): siRNA sense strand
gagccucuauauccuguuu

SEQ ID NO: 2020095 - RNA, 19 nt, Homo sapiens
  misc_RNA (1)...(19): siRNA sense strand
ggaucuuccuggacuauga

SEQ ID NO: 2020096 - RNA, 19 nt, Homo sapiens
  misc_RNA (1)...(19): siRNA sense strand
guaugcagauggaaaggaa

SEQ ID NO: 2020097 - RNA, 19 nt, Homo sapiens
  misc_RNA (1)...(19): siRNA sense strand
ugacugaugggaauaagua

SEQ ID NO: 2020098 - RNA, 19 nt, Homo sapiens
  misc_RNA (1)...(19): siRNA sense strand
gagcaagaaauaagccuaa

SEQ ID NO: 2020099 - RNA, 19 nt, Homo sapiens
  misc_RNA (1)...(19): siRNA sense strand
guggaaaguacuuguguua

SEQ ID NO: 2020100 - RNA, 19 nt, Homo sapiens
  misc_RNA (1)...(19): siRNA sense strand
gaaagagagcgagagauga

SEQ ID NO: 2020101 - RNA, 19 nt, Homo sapiens
  misc_RNA (1)...(19): siRNA sense strand
gagaucucguucuauaaug

SEQ ID NO: 2020102 - RNA, 19 nt, Homo sapiens
  misc_RNA (1)...(19): siRNA sense strand
gaacggauacuggacuaug

SEQ ID NO: 2020103 - RNA, 19 nt, Homo sapiens
  misc_RNA (1)...(19): siRNA sense strand
ucucauaucuacaccuuuc

SEQ ID NO: 2020104 - RNA, 19 nt, Homo sapiens
  misc_RNA (1)...(19): siRNA sense strand
caaaagaaguagagaguuc

SEQ ID NO: 2020105 - RNA, 19 nt, Homo sapiens
  misc_RNA (1)...(19): siRNA sense strand
ggaagcaccugugguugca

SEQ ID NO: 2020106 - RNA, 19 nt, Homo sapiens
  misc_RNA (1)...(19): siRNA sense strand
gcccagaaccaaccugaaa

SEQ ID NO: 2020107 - RNA, 19 nt, Homo sapiens
  misc_RNA (1)...(19): siRNA sense strand
gcaagaaauaagccuaaga

SEQ ID NO: 2020108 - RNA, 19 nt, Homo sapiens
  misc_RNA (1)...(19): siRNA sense strand
aaagagagcgagagaugaa

SEQ ID NO: 2020109 - RNA, 19 nt, Homo sapiens
  misc_RNA (1)...(19): siRNA sense strand
gaaaagacagccagcauau

SEQ ID NO: 2020110 - RNA, 19 nt, Homo sapiens
  misc_RNA (1)...(19): siRNA sense strand
gcacugaagcacuuuacug

SEQ ID NO: 2020111 - RNA, 19 nt, Homo sapiens
  misc_RNA (1)...(19): siRNA sense strand
gcaacagagcaagaaauaa

SEQ ID NO: 2020112 - RNA, 19 nt, Homo sapiens
  misc_RNA (1)...(19): siRNA sense strand
cagacaacccugagagauu

SEQ ID NO: 2020113 - RNA, 19 nt, Homo sapiens
  misc_RNA (1)...(19): siRNA sense strand
ccaagauggugacuucuac

SEQ ID NO: 2020114 - RNA, 19 nt, Homo sapiens
  misc_RNA (1)...(19): siRNA sense strand
ggacuaugggccugacuga

SEQ ID NO: 2020115 - RNA, 19 nt, Homo sapiens
  misc_RNA (1)...(19): siRNA sense strand
ucacaucagggagacauua

SEQ ID NO: 2020116 - RNA, 19 nt, Homo sapiens
  misc_RNA (1)...(19): siRNA sense strand
gagcgagagaugaaagaaa

SEQ ID NO: 2020117 - RNA, 19 nt, Homo sapiens
  misc_RNA (1)...(19): siRNA sense strand
agaaagagagcgagagaug

SEQ ID NO: 2020118 - RNA, 19 nt, Homo sapiens
  misc_RNA (1)...(19): siRNA sense strand
ggaaaagacagccagcaua

SEQ ID NO: 2020119 - RNA, 19 nt, Homo sapiens
  misc_RNA (1)...(19): siRNA sense strand
gguguauccugcaucauca

SEQ ID NO: 2020120 - RNA, 19 nt, Homo sapiens
  misc_RNA (1)...(19): siRNA sense strand
uauccugcaucaucagaaa

SEQ ID NO: 2020121 - RNA, 19 nt, Homo sapiens
  misc_RNA (1)...(19): siRNA sense strand
agaagucuuuggccuauca

SEQ ID NO: 2020122 - RNA, 19 nt, Homo sapiens
  misc_RNA (1)...(19): siRNA sense strand
caagaaauaagccuaagag

SEQ ID NO: 2020123 - RNA, 19 nt, Homo sapiens
  misc_RNA (1)...(19): siRNA sense strand
gcaguagcagcaucuguga

SEQ ID NO: 2020124 - RNA, 19 nt, Homo sapiens
  misc_RNA (1)...(19): siRNA sense strand
ugaaguaacaucucugcuu

SEQ ID NO: 2020125 - RNA, 19 nt, Homo sapiens
  misc_RNA (1)...(19): siRNA sense strand
caaacgccauccuccuugu

SEQ ID NO: 2020126 - RNA, 19 nt, Homo sapiens
  misc_RNA (1)...(19): siRNA sense strand
ugcaacagagcaagaaaua

SEQ ID NO: 2020127 - RNA, 19 nt, Homo sapiens
  misc_RNA (1)...(19): siRNA sense strand
agaaaagaguggcauauug

SEQ ID NO: 2020128 - RNA, 19 nt, Homo sapiens
  misc_RNA (1)...(19): siRNA sense strand
agagaagucuuuggccuau

SEQ ID NO: 2020129 - RNA, 19 nt, Homo sapiens
  misc_RNA (1)...(19): siRNA sense strand
gcauuggguucugaucuuc

SEQ ID NO: 2020130 - RNA, 19 nt, Homo sapiens
  misc_RNA (1)...(19): siRNA sense strand
acgcugaucugcccuguca

SEQ ID NO: 2020131 - RNA, 19 nt, Homo sapiens
  misc_RNA (1)...(19): siRNA sense strand
gaaggguuaugaggaugga

SEQ ID NO: 2020132 - RNA, 19 nt, Homo sapiens
  misc_RNA (1)...(19): siRNA sense strand
ugggugaguuccagccuaa

SEQ ID NO: 2020133 - RNA, 19 nt, Homo sapiens
  misc_RNA (1)...(19): siRNA sense strand
ggcagguggugaacgugua

SEQ ID NO: 2020134 - RNA, 19 nt, Homo sapiens
  misc_RNA (1)...(19): siRNA sense strand
uaaggcagguggugaacgu

SEQ ID NO: 2020135 - RNA, 19 nt, Homo sapiens
  misc_RNA (1)...(19): siRNA sense strand
gggccugacugaugggaau

SEQ ID NO: 2020136 - RNA, 19 nt, Homo sapiens
  misc_RNA (1)...(19): siRNA sense strand
aaauaagccuaagagagaa

SEQ ID NO: 2020137 - RNA, 19 nt, Homo sapiens
  misc_RNA (1)...(19): siRNA sense strand
cagcaucugugaucaugag

SEQ ID NO: 2020138 - RNA, 19 nt, Homo sapiens
  misc_RNA (1)...(19): siRNA sense strand
ucacugagcccagaaccaa

SEQ ID NO: 2020139 - RNA, 19 nt, Homo sapiens
  misc_RNA (1)...(19): siRNA sense strand
ccagggagacagaaagaga

SEQ ID NO: 2020140 - RNA, 19 nt, Homo sapiens
  misc_RNA (1)...(19): siRNA sense strand
ccugaccauuugcccaaua

SEQ ID NO: 2020141 - RNA, 19 nt, Homo sapiens
  misc_RNA (1)...(19): siRNA sense strand
cgagggagaacuucgauuc

SEQ ID NO: 2020142 - RNA, 19 nt, Homo sapiens
  misc_RNA (1)...(19): siRNA sense strand
ggaaggcugcucuccgaau

SEQ ID NO: 2020143 - RNA, 19 nt, Homo sapiens
  misc_RNA (1)...(19): siRNA sense strand
ugacaccggagaacggaua

SEQ ID NO: 2020144 - RNA, 19 nt, Homo sapiens
  misc_RNA (1)...(19): siRNA sense strand
agcgagagaugaaagaaau

SEQ ID NO: 2020145 - RNA, 19 nt, Homo sapiens
  misc_RNA (1)...(19): siRNA sense strand
ggaggaaaauccaguacau

SEQ ID NO: 2020146 - RNA, 19 nt, Homo sapiens
  misc_RNA (1)...(19): siRNA sense strand
ggccuaucaugaauggaaa

SEQ ID NO: 2020147 - RNA, 19 nt, Homo sapiens
  misc_RNA (1)...(19): siRNA sense strand
ggacccugccuaucucguu

SEQ ID NO: 2020148 - RNA, 19 nt, Homo sapiens
  misc_RNA (1)...(19): siRNA sense strand
ggagacaacagaaggaaaa

SEQ ID NO: 2020149 - RNA, 19 nt, Homo sapiens
  misc_RNA (1)...(19): siRNA sense strand
uaaaguggagcgacaccaa

SEQ ID NO: 2020150 - RNA, 19 nt, Homo sapiens
  misc_RNA (1)...(19): siRNA sense strand
gaaaagaguggcauauugg

SEQ ID NO: 2020151 - RNA, 19 nt, Homo sapiens
  misc_RNA (1)...(19): siRNA sense strand
ggagccaguuacuucuugu

SEQ ID NO: 2020152 - RNA, 19 nt, Homo sapiens
  misc_RNA (1)...(19): siRNA sense strand
uuuccaagauggugacuuc

SEQ ID NO: 2020153 - RNA, 19 nt, Homo sapiens
  misc_RNA (1)...(19): siRNA sense strand
caacaaccaaucagaacca

SEQ ID NO: 2020154 - RNA, 19 nt, Homo sapiens
  misc_RNA (1)...(19): siRNA sense strand
cuucaaaccugcggaugug

SEQ ID NO: 2020155 - RNA, 19 nt, Homo sapiens
  misc_RNA (1)...(19): siRNA sense strand
gcagguccacuggcuggua

SEQ ID NO: 2020156 - RNA, 19 nt, Homo sapiens
  misc_RNA (1)...(19): siRNA sense strand
ggguucugaucuucacauu

SEQ ID NO: 2020157 - RNA, 19 nt, Homo sapiens
  misc_RNA (1)...(19): siRNA sense strand
cacugaagcacuuuacuga

SEQ ID NO: 2020158 - RNA, 19 nt, Homo sapiens
  misc_RNA (1)...(19): siRNA sense strand
ggcacgcacugaagcacuu

SEQ ID NO: 2020159 - RNA, 19 nt, Homo sapiens
  misc_RNA (1)...(19): siRNA sense strand
agagaucucguucuauaau

SEQ ID NO: 2020160 - RNA, 19 nt, Homo sapiens
  misc_RNA (1)...(19): siRNA sense strand
cuaugagacuggagagauc

SEQ ID NO: 2020161 - RNA, 19 nt, Homo sapiens
  misc_RNA (1)...(19): siRNA sense strand
caaaccugcggaugugauu

SEQ ID NO: 2020162 - RNA, 19 nt, Homo sapiens
  misc_RNA (1)...(19): siRNA sense strand
cagauggagugggccugua

SEQ ID NO: 2020163 - RNA, 19 nt, Homo sapiens
  misc_RNA (1)...(19): siRNA sense strand
ggaaaggaaguggaagaca

SEQ ID NO: 2020164 - RNA, 19 nt, Homo sapiens
  misc_RNA (1)...(19): siRNA sense strand
gagagcgagagaugaaaga

SEQ ID NO: 2020165 - RNA, 19 nt, Homo sapiens
  misc_RNA (1)...(19): siRNA sense strand
gggccuguaugcaguagca

SEQ ID NO: 2020166 - RNA, 19 nt, Homo sapiens
  misc_RNA (1)...(19): siRNA sense strand
ggcaaacgccauccuccuu

SEQ ID NO: 2020167 - RNA, 19 nt, Homo sapiens
  misc_RNA (1)...(19): siRNA sense strand
agaaccaaccugaaacuuc

SEQ ID NO: 2020168 - RNA, 19 nt, Homo sapiens
  misc_RNA (1)...(19): siRNA sense strand
agugaaggguuaugaggau

SEQ ID NO: 2020169 - RNA, 19 nt, Homo sapiens
  misc_RNA (1)...(19): siRNA sense strand
caaucagaaccauaagcua

SEQ ID NO: 2020170 - RNA, 19 nt, Homo sapiens
  misc_RNA (1)...(19): siRNA sense strand
ggguguauccugcaucauc

SEQ ID NO: 2020171 - RNA, 19 nt, Homo sapiens
  misc_RNA (1)...(19): siRNA sense strand
guagcagcaucugugauca

SEQ ID NO: 2020172 - RNA, 19 nt, Homo sapiens
  misc_RNA (1)...(19): siRNA sense strand
guucuauaaugccacagau

SEQ ID NO: 2020173 - RNA, 19 nt, Homo sapiens
  misc_RNA (1)...(19): siRNA sense strand
gaaauaagccuaagagaga

SEQ ID NO: 2020174 - RNA, 19 nt, Homo sapiens
  misc_RNA (1)...(19): siRNA sense strand
ggaaaguacuuguguuauu

SEQ ID NO: 2020175 - RNA, 19 nt, Homo sapiens
  misc_RNA (1)...(19): siRNA sense strand
gaaggcugcucuccgaaua

SEQ ID NO: 2020176 - RNA, 19 nt, Homo sapiens
  misc_RNA (1)...(19): siRNA sense strand
guucugaucuucacauuga

SEQ ID NO: 2020177 - RNA, 19 nt, Homo sapiens
  misc_RNA (1)...(19): siRNA sense strand
gaacguguaugcagaugga

SEQ ID NO: 2020178 - RNA, 19 nt, Homo sapiens
  misc_RNA (1)...(19): siRNA sense strand
gggcuuagcuaaugaaagu

SEQ ID NO: 2020179 - RNA, 19 nt, Homo sapiens
  misc_RNA (1)...(19): siRNA sense strand
guaagaacguggagaggaa

SEQ ID NO: 2020180 - RNA, 19 nt, Homo sapiens
  misc_RNA (1)...(19): siRNA sense strand
gauggugacuucuacgaaa

SEQ ID NO: 2020181 - RNA, 19 nt, Homo sapiens
  misc_RNA (1)...(19): siRNA sense strand
gaaaauggcccucuucaaa

SEQ ID NO: 2020182 - RNA, 19 nt, Homo sapiens
  misc_RNA (1)...(19): siRNA sense strand
ccacugcccugaccauuug

SEQ ID NO: 2020183 - RNA, 19 nt, Homo sapiens
  misc_RNA (1)...(19): siRNA sense strand
caaccaaucagaaccauaa

SEQ ID NO: 2020184 - RNA, 19 nt, Homo sapiens
  misc_RNA (1)...(19): siRNA sense strand
gaacaucccggcuguggaa

SEQ ID NO: 2020185 - RNA, 19 nt, Homo sapiens
  misc_RNA (1)...(19): siRNA sense strand
agacaacccugagagauuu

SEQ ID NO: 2020186 - RNA, 19 nt, Homo sapiens
  misc_RNA (1)...(19): siRNA sense strand
guacuuguguuauuuccaa

SEQ ID NO: 2020187 - RNA, 19 nt, Homo sapiens
  misc_RNA (1)...(19): siRNA sense strand
gagaacggauacuggacua

SEQ ID NO: 2020188 - RNA, 19 nt, Homo sapiens
  misc_RNA (1)...(19): siRNA sense strand
gagcugaggugggugaguu

SEQ ID NO: 2020189 - RNA, 19 nt, Homo sapiens
  misc_RNA (1)...(19): siRNA sense strand
gaucucauaucuacaccuu

SEQ ID NO: 2020190 - RNA, 19 nt, Homo sapiens
  misc_RNA (1)...(19): siRNA sense strand
acauugaagugaaggguua

SEQ ID NO: 2020191 - RNA, 19 nt, Homo sapiens
  misc_RNA (1)...(19): siRNA sense strand
gaacucaaguggaggaaaa

SEQ ID NO: 2020192 - RNA, 19 nt, Homo sapiens
  misc_RNA (1)...(19): siRNA sense strand
caacagagcaagaaauaag

SEQ ID NO: 2020193 - RNA, 19 nt, Homo sapiens
  misc_RNA (1)...(19): siRNA sense strand
gaaaugggauacgcugcaa

SEQ ID NO: 2020194 - RNA, 19 nt, Homo sapiens
  misc_RNA (1)...(19): siRNA sense strand
gagccucuauauccuguuu

SEQ ID NO: 2020195 - RNA, 19 nt, Homo sapiens
  misc_RNA (1)...(19): siRNA sense strand
ggaucuuccuggacuauga

SEQ ID NO: 2020196 - RNA, 19 nt, Homo sapiens
  misc_RNA (1)...(19): siRNA sense strand
guaugcagauggaaaggaa

SEQ ID NO: 2020197 - RNA, 19 nt, Homo sapiens
  misc_RNA (1)...(19): siRNA sense strand
ugacugaugggaauaagua

SEQ ID NO: 2020198 - RNA, 19 nt, Homo sapiens
  misc_RNA (1)...(19): siRNA sense strand
gagcaagaaauaagccuaa

SEQ ID NO: 2020199 - RNA, 19 nt, Homo sapiens
  misc_RNA (1)...(19): siRNA sense strand
guggaaaguacuuguguua

SEQ ID NO: 2020200 - RNA, 19 nt, Homo sapiens
  misc_RNA (1)...(19): siRNA sense strand
gaaagagagcgagagauga

SEQ ID NO: 2020201 - RNA, 19 nt, Homo sapiens
  misc_RNA (1)...(19): siRNA sense strand
gagaucucguucuauaaug

SEQ ID NO: 2020202 - RNA, 19 nt, Homo sapiens
  misc_RNA (1)...(19): siRNA sense strand
gaacggauacuggacuaug

SEQ ID NO: 2020203 - RNA, 19 nt, Homo sapiens
  misc_RNA (1)...(19): siRNA sense strand
ucucauaucuacaccuuuc

SEQ ID NO: 2020204 - RNA, 19 nt, Homo sapiens
  misc_RNA (1)...(19): siRNA sense strand
caaaagaaguagagaguuc

SEQ ID NO: 2020205 - RNA, 19 nt, Homo sapiens
  misc_RNA (1)...(19): siRNA sense strand
ggaagcaccugugguugca

SEQ ID NO: 2020206 - RNA, 19 nt, Homo sapiens
  misc_RNA (1)...(19): siRNA sense strand
gcccagaaccaaccugaaa

SEQ ID NO: 2020207 - RNA, 19 nt, Homo sapiens
  misc_RNA (1)...(19): siRNA sense strand
gcaagaaauaagccuaaga

SEQ ID NO: 2020208 - RNA, 19 nt, Homo sapiens
  misc_RNA (1)...(19): siRNA sense strand
aaagagagcgagagaugaa

SEQ ID NO: 2020209 - RNA, 19 nt, Homo sapiens
  misc_RNA (1)...(19): siRNA sense strand
gaaaagacagccagcauau

SEQ ID NO: 2020210 - RNA, 19 nt, Homo sapiens
  misc_RNA (1)...(19): siRNA sense strand
gcacugaagcacuuuacug

SEQ ID NO: 2020211 - RNA, 19 nt, Homo sapiens
  misc_RNA (1)...(19): siRNA sense strand
gcaacagagcaagaaauaa

SEQ ID NO: 2020212 - RNA, 19 nt, Homo sapiens
  misc_RNA (1)...(19): siRNA sense strand
cagacaacccugagagauu

SEQ ID NO: 2020213 - RNA, 19 nt, Homo sapiens
  misc_RNA (1)...(19): siRNA sense strand
ccaagauggugacuucuac

SEQ ID NO: 2020214 - RNA, 19 nt, Homo sapiens
  misc_RNA (1)...(19): siRNA sense strand
ggacuaugggccugacuga

SEQ ID NO: 2020215 - RNA, 19 nt, Homo sapiens
  misc_RNA (1)...(19): siRNA sense strand
ucacaucagggagacauua

SEQ ID NO: 2020216 - RNA, 19 nt, Homo sapiens
  misc_RNA (1)...(19): siRNA sense strand
gagcgagagaugaaagaaa

SEQ ID NO: 2020217 - RNA, 19 nt, Homo sapiens
  misc_RNA (1)...(19): siRNA sense strand
agaaagagagcgagagaug

SEQ ID NO: 2020218 - RNA, 19 nt, Homo sapiens
  misc_RNA (1)...(19): siRNA sense strand
ggaaaagacagccagcaua

SEQ ID NO: 2020219 - RNA, 19 nt, Homo sapiens
  misc_RNA (1)...(19): siRNA sense strand
gguguauccugcaucauca

SEQ ID NO: 2020220 - RNA, 19 nt, Homo sapiens
  misc_RNA (1)...(19): siRNA sense strand
uauccugcaucaucagaaa

SEQ ID NO: 2020221 - RNA, 19 nt, Homo sapiens
  misc_RNA (1)...(19): siRNA sense strand
agaagucuuuggccuauca

SEQ ID NO: 2020222 - RNA, 19 nt, Homo sapiens
  misc_RNA (1)...(19): siRNA sense strand
caagaaauaagccuaagag

SEQ ID NO: 2020223 - RNA, 19 nt, Homo sapiens
  misc_RNA (1)...(19): siRNA sense strand
gcaguagcagcaucuguga

SEQ ID NO: 2020224 - RNA, 19 nt, Homo sapiens
  misc_RNA (1)...(19): siRNA sense strand
ugaaguaacaucucugcuu

SEQ ID NO: 2020225 - RNA, 19 nt, Homo sapiens
  misc_RNA (1)...(19): siRNA sense strand
caaacgccauccuccuugu

SEQ ID NO: 2020226 - RNA, 19 nt, Homo sapiens
  misc_RNA (1)...(19): siRNA sense strand
ugcaacagagcaagaaaua

SEQ ID NO: 2020227 - RNA, 19 nt, Homo sapiens
  misc_RNA (1)...(19): siRNA sense strand
agaaaagaguggcauauug

SEQ ID NO: 2020228 - RNA, 19 nt, Homo sapiens
  misc_RNA (1)...(19): siRNA sense strand
agagaagucuuuggccuau

SEQ ID NO: 2020229 - RNA, 19 nt, Homo sapiens
  misc_RNA (1)...(19): siRNA sense strand
gcauuggguucugaucuuc

SEQ ID NO: 2020230 - RNA, 19 nt, Homo sapiens
  misc_RNA (1)...(19): siRNA sense strand
acgcugaucugcccuguca

SEQ ID NO: 2020231 - RNA, 19 nt, Homo sapiens
  misc_RNA (1)...(19): siRNA sense strand
gaaggguuaugaggaugga

SEQ ID NO: 2020232 - RNA, 19 nt, Homo sapiens
  misc_RNA (1)...(19): siRNA sense strand
ugggugaguuccagccuaa

SEQ ID NO: 2020233 - RNA, 19 nt, Homo sapiens
  misc_RNA (1)...(19): siRNA sense strand
uaaggcagguggugaacgu

SEQ ID NO: 2020234 - RNA, 19 nt, Homo sapiens
  misc_RNA (1)...(19): siRNA sense strand
ggcagguggugaacgugua

SEQ ID NO: 2020235 - RNA, 19 nt, Homo sapiens
  misc_RNA (1)...(19): siRNA sense strand
gggccugacugaugggaau

SEQ ID NO: 2020236 - RNA, 19 nt, Homo sapiens
  misc_RNA (1)...(19): siRNA sense strand
aaauaagccuaagagagaa

SEQ ID NO: 2020237 - RNA, 19 nt, Homo sapiens
  misc_RNA (1)...(19): siRNA sense strand
cagcaucugugaucaugag

SEQ ID NO: 2020238 - RNA, 19 nt, Homo sapiens
  misc_RNA (1)...(19): siRNA sense strand
ucacugagcccagaaccaa

SEQ ID NO: 2020239 - RNA, 19 nt, Homo sapiens
  misc_RNA (1)...(19): siRNA sense strand
ccagggagacagaaagaga

SEQ ID NO: 2020240 - RNA, 19 nt, Homo sapiens
  misc_RNA (1)...(19): siRNA sense strand
ccugaccauuugcccaaua

SEQ ID NO: 2020241 - RNA, 19 nt, Homo sapiens
  misc_RNA (1)...(19): siRNA sense strand
ugacaccggagaacggaua

SEQ ID NO: 2020242 - RNA, 19 nt, Homo sapiens
  misc_RNA (1)...(19): siRNA sense strand
cgagggagaacuucgauuc

SEQ ID NO: 2020243 - RNA, 19 nt, Homo sapiens
  misc_RNA (1)...(19): siRNA sense strand
ggaaggcugcucuccgaau

SEQ ID NO: 2020244 - RNA, 19 nt, Homo sapiens
  misc_RNA (1)...(19): siRNA sense strand
agcgagagaugaaagaaau

SEQ ID NO: 2020245 - RNA, 19 nt, Homo sapiens
  misc_RNA (1)...(19): siRNA sense strand
ggaggaaaauccaguacau

SEQ ID NO: 2020246 - RNA, 19 nt, Homo sapiens
  misc_RNA (1)...(19): siRNA sense strand
ggccuaucaugaauggaaa

SEQ ID NO: 2020247 - RNA, 19 nt, Homo sapiens
  misc_RNA (1)...(19): siRNA sense strand
ggacccugccuaucucguu

SEQ ID NO: 2020248 - RNA, 19 nt, Homo sapiens
  misc_RNA (1)...(19): siRNA sense strand
ggagacaacagaaggaaaa

SEQ ID NO: 2020249 - RNA, 19 nt, Homo sapiens
  misc_RNA (1)...(19): siRNA sense strand
uaaaguggagcgacaccaa

SEQ ID NO: 2020250 - RNA, 19 nt, Homo sapiens
  misc_RNA (1)...(19): siRNA sense strand
gaaaagaguggcauauugg

SEQ ID NO: 2020251 - RNA, 19 nt, Homo sapiens
  misc_RNA (1)...(19): siRNA sense strand
ggagccaguuacuucuugu

SEQ ID NO: 2020252 - RNA, 19 nt, Homo sapiens
  misc_RNA (1)...(19): siRNA sense strand
uuuccaagauggugacuuc

SEQ ID NO: 2020253 - RNA, 19 nt, Homo sapiens
  misc_RNA (1)...(19): siRNA sense strand
caacaaccaaucagaacca

SEQ ID NO: 2020254 - RNA, 19 nt, Homo sapiens
  misc_RNA (1)...(19): siRNA sense strand
cuucaaaccugcggaugug

SEQ ID NO: 2020255 - RNA, 19 nt, Homo sapiens
  misc_RNA (1)...(19): siRNA sense strand
gcagguccacuggcuggua

SEQ ID NO: 2020256 - RNA, 19 nt, Homo sapiens
  misc_RNA (1)...(19): siRNA sense strand
ggguucugaucuucacauu

SEQ ID NO: 2020257 - RNA, 19 nt, Homo sapiens
  misc_RNA (1)...(19): siRNA sense strand
cacugaagcacuuuacuga

SEQ ID NO: 2020258 - RNA, 19 nt, Homo sapiens
  misc_RNA (1)...(19): siRNA sense strand
ggcacgcacugaagcacuu

SEQ ID NO: 2020259 - RNA, 19 nt, Homo sapiens
  misc_RNA (1)...(19): siRNA sense strand
agagaucucguucuauaau

SEQ ID NO: 2020260 - RNA, 19 nt, Homo sapiens
  misc_RNA (1)...(19): siRNA sense strand
cuaugagacuggagagauc

SEQ ID NO: 2020261 - RNA, 19 nt, Homo sapiens
  misc_RNA (1)...(19): siRNA sense strand
caaaccugcggaugugauu

SEQ ID NO: 2020262 - RNA, 19 nt, Homo sapiens
  misc_RNA (1)...(19): siRNA sense strand
cagauggagugggccugua

SEQ ID NO: 2020263 - RNA, 19 nt, Homo sapiens
  misc_RNA (1)...(19): siRNA sense strand
ggaaaggaaguggaagaca

SEQ ID NO: 2020264 - RNA, 19 nt, Homo sapiens
  misc_RNA (1)...(19): siRNA sense strand
gagagcgagagaugaaaga

SEQ ID NO: 2020265 - RNA, 19 nt, Homo sapiens
  misc_RNA (1)...(19): siRNA sense strand
gggccuguaugcaguagca

SEQ ID NO: 2020266 - RNA, 19 nt, Homo sapiens
  misc_RNA (1)...(19): siRNA sense strand
ggcaaacgccauccuccuu

SEQ ID NO: 2020267 - RNA, 19 nt, Homo sapiens
  misc_RNA (1)...(19): siRNA sense strand
agaaccaaccugaaacuuc

SEQ ID NO: 2020268 - RNA, 19 nt, Homo sapiens
  misc_RNA (1)...(19): siRNA sense strand
agugaaggguuaugaggau

SEQ ID NO: 2020269 - RNA, 19 nt, Homo sapiens
  misc_RNA (1)...(19): siRNA sense strand
caaucagaaccauaagcua

SEQ ID NO: 2020270 - RNA, 19 nt, Homo sapiens
  misc_RNA (1)...(19): siRNA sense strand
ggguguauccugcaucauc

SEQ ID NO: 2020271 - RNA, 19 nt, Homo sapiens
  misc_RNA (1)...(19): siRNA sense strand
guagcagcaucugugauca

SEQ ID NO: 2020272 - RNA, 19 nt, Homo sapiens
  misc_RNA (1)...(19): siRNA sense strand
guucuauaaugccacagau

SEQ ID NO: 2020273 - RNA, 19 nt, Homo sapiens
  misc_RNA (1)...(19): siRNA sense strand
gaaauaagccuaagagaga

SEQ ID NO: 2020274 - RNA, 19 nt, Homo sapiens
  misc_RNA (1)...(19): siRNA sense strand
ggaaaguacuuguguuauu

SEQ ID NO: 2020275 - RNA, 19 nt, Homo sapiens
  misc_RNA (1)...(19): siRNA sense strand
gaaggcugcucuccgaaua

SEQ ID NO: 2020276 - RNA, 19 nt, Homo sapiens
  misc_RNA (1)...(19): siRNA sense strand
guucugaucuucacauuga

SEQ ID NO: 2020277 - RNA, 19 nt, Homo sapiens
  misc_RNA (1)...(19): siRNA sense strand
gaacguguaugcagaugga

SEQ ID NO: 2020278 - RNA, 19 nt, Homo sapiens
  misc_RNA (1)...(19): siRNA sense strand
gggcuuagcuaaugaaagu

SEQ ID NO: 2020279 - RNA, 19 nt, Homo sapiens
  misc_RNA (1)...(19): siRNA sense strand
guaagaacguggagaggaa

SEQ ID NO: 2020280 - RNA, 19 nt, Homo sapiens
  misc_RNA (1)...(19): siRNA sense strand
gauggugacuucuacgaaa

SEQ ID NO: 2020281 - RNA, 19 nt, Homo sapiens
  misc_RNA (1)...(19): siRNA sense strand
gaaaauggcccucuucaaa

SEQ ID NO: 2020282 - RNA, 19 nt, Homo sapiens
  misc_RNA (1)...(19): siRNA sense strand
ccacugcccugaccauuug

SEQ ID NO: 2020283 - RNA, 19 nt, Homo sapiens
  misc_RNA (1)...(19): siRNA sense strand
caaccaaucagaaccauaa

SEQ ID NO: 2020284 - RNA, 19 nt, Homo sapiens
  misc_RNA (1)...(19): siRNA sense strand
gaacaucccggcuguggaa

SEQ ID NO: 2020285 - RNA, 19 nt, Homo sapiens
  misc_RNA (1)...(19): siRNA sense strand
agacaacccugagagauuu

SEQ ID NO: 2020286 - RNA, 19 nt, Homo sapiens
  misc_RNA (1)...(19): siRNA sense strand
guacuuguguuauuuccaa

SEQ ID NO: 2020287 - RNA, 19 nt, Homo sapiens
  misc_RNA (1)...(19): siRNA sense strand
gagaacggauacuggacua

SEQ ID NO: 2020288 - RNA, 19 nt, Homo sapiens
  misc_RNA (1)...(19): siRNA sense strand
gagcugaggugggugaguu

SEQ ID NO: 2020289 - RNA, 19 nt, Homo sapiens
  misc_RNA (1)...(19): siRNA sense strand
gaucucauaucuacaccuu

SEQ ID NO: 2020290 - RNA, 19 nt, Homo sapiens
  misc_RNA (1)...(19): siRNA sense strand
acauugaagugaaggguua

SEQ ID NO: 2020291 - RNA, 19 nt, Homo sapiens
  misc_RNA (1)...(19): siRNA sense strand
gaacucaaguggaggaaaa

SEQ ID NO: 2020292 - RNA, 19 nt, Homo sapiens
  misc_RNA (1)...(19): siRNA sense strand
caacagagcaagaaauaag

SEQ ID NO: 2020293 - RNA, 19 nt, Homo sapiens
  misc_RNA (1)...(19): siRNA sense strand
gaaaugggauacgcugcaa

SEQ ID NO: 2020294 - RNA, 19 nt, Homo sapiens
  misc_RNA (1)...(19): siRNA sense strand
gagccucuauauccuguuu

SEQ ID NO: 2020295 - RNA, 19 nt, Homo sapiens
  misc_RNA (1)...(19): siRNA sense strand
ggaucuuccuggacuauga

SEQ ID NO: 2020296 - RNA, 19 nt, Homo sapiens
  misc_RNA (1)...(19): siRNA sense strand
guaugcagauggaaaggaa

SEQ ID NO: 2020297 - RNA, 19 nt, Homo sapiens
  misc_RNA (1)...(19): siRNA sense strand
ugacugaugggaauaagua

SEQ ID NO: 2020298 - RNA, 19 nt, Homo sapiens
  misc_RNA (1)...(19): siRNA sense strand
gagcaagaaauaagccuaa

SEQ ID NO: 2020299 - RNA, 19 nt, Homo sapiens
  misc_RNA (1)...(19): siRNA sense strand
guggaaaguacuuguguua

SEQ ID NO: 2020300 - RNA, 19 nt, Homo sapiens
  misc_RNA (1)...(19): siRNA sense strand
gaaagagagcgagagauga

SEQ ID NO: 2020301 - RNA, 19 nt, Homo sapiens
  misc_RNA (1)...(19): siRNA sense strand
gagaucucguucuauaaug

SEQ ID NO: 2020302 - RNA, 19 nt, Homo sapiens
  misc_RNA (1)...(19): siRNA sense strand
gaacggauacuggacuaug

SEQ ID NO: 2020303 - RNA, 19 nt, Homo sapiens
  misc_RNA (1)...(19): siRNA sense strand
ucucauaucuacaccuuuc

SEQ ID NO: 2020304 - RNA, 19 nt, Homo sapiens
  misc_RNA (1)...(19): siRNA sense strand
caaaagaaguagagaguuc

SEQ ID NO: 2020305 - RNA, 19 nt, Homo sapiens
  misc_RNA (1)...(19): siRNA sense strand
ggaagcaccugugguugca

SEQ ID NO: 2020306 - RNA, 19 nt, Homo sapiens
  misc_RNA (1)...(19): siRNA sense strand
gcccagaaccaaccugaaa

SEQ ID NO: 2020307 - RNA, 19 nt, Homo sapiens
  misc_RNA (1)...(19): siRNA sense strand
gcaagaaauaagccuaaga

SEQ ID NO: 2020308 - RNA, 19 nt, Homo sapiens
  misc_RNA (1)...(19): siRNA sense strand
aaagagagcgagagaugaa

SEQ ID NO: 2020309 - RNA, 19 nt, Homo sapiens
  misc_RNA (1)...(19): siRNA sense strand
gaaaagacagccagcauau

SEQ ID NO: 2020310 - RNA, 19 nt, Homo sapiens
  misc_RNA (1)...(19): siRNA sense strand
gcacugaagcacuuuacug

SEQ ID NO: 2020311 - RNA, 19 nt, Homo sapiens
  misc_RNA (1)...(19): siRNA sense strand
gcaacagagcaagaaauaa

SEQ ID NO: 2020312 - RNA, 19 nt, Homo sapiens
  misc_RNA (1)...(19): siRNA sense strand
cagacaacccugagagauu

SEQ ID NO: 2020313 - RNA, 19 nt, Homo sapiens
  misc_RNA (1)...(19): siRNA sense strand
ccaagauggugacuucuac

SEQ ID NO: 2020314 - RNA, 19 nt, Homo sapiens
  misc_RNA (1)...(19): siRNA sense strand
ggacuaugggccugacuga

SEQ ID NO: 2020315 - RNA, 19 nt, Homo sapiens
  misc_RNA (1)...(19): siRNA sense strand
ucacaucagggagacauua

SEQ ID NO: 2020316 - RNA, 19 nt, Homo sapiens
  misc_RNA (1)...(19): siRNA sense strand
gagcgagagaugaaagaaa

SEQ ID NO: 2020317 - RNA, 19 nt, Homo sapiens
  misc_RNA (1)...(19): siRNA sense strand
agaaagagagcgagagaug

SEQ ID NO: 2020318 - RNA, 19 nt, Homo sapiens
  misc_RNA (1)...(19): siRNA sense strand
ggaaaagacagccagcaua

SEQ ID NO: 2020319 - RNA, 19 nt, Homo sapiens
  misc_RNA (1)...(19): siRNA sense strand
gguguauccugcaucauca

SEQ ID NO: 2020320 - RNA, 19 nt, Homo sapiens
  misc_RNA (1)...(19): siRNA sense strand
uauccugcaucaucagaaa

SEQ ID NO: 2020321 - RNA, 19 nt, Homo sapiens
  misc_RNA (1)...(19): siRNA sense strand
agaagucuuuggccuauca

SEQ ID NO: 2020322 - RNA, 19 nt, Homo sapiens
  misc_RNA (1)...(19): siRNA sense strand
caagaaauaagccuaagag

SEQ ID NO: 2020323 - RNA, 19 nt, Homo sapiens
  misc_RNA (1)...(19): siRNA sense strand
gcaguagcagcaucuguga

SEQ ID NO: 2020324 - RNA, 19 nt, Homo sapiens
  misc_RNA (1)...(19): siRNA sense strand
ugaaguaacaucucugcuu

SEQ ID NO: 2020325 - RNA, 19 nt, Homo sapiens
  misc_RNA (1)...(19): siRNA sense strand
caaacgccauccuccuugu

SEQ ID NO: 2020326 - RNA, 19 nt, Homo sapiens
  misc_RNA (1)...(19): siRNA sense strand
ugcaacagagcaagaaaua

SEQ ID NO: 2020327 - RNA, 19 nt, Homo sapiens
  misc_RNA (1)...(19): siRNA sense strand
agaaaagaguggcauauug

SEQ ID NO: 2020328 - RNA, 19 nt, Homo sapiens
  misc_RNA (1)...(19): siRNA sense strand
agagaagucuuuggccuau

SEQ ID NO: 2020329 - RNA, 19 nt, Homo sapiens
  misc_RNA (1)...(19): siRNA sense strand
gcauuggguucugaucuuc

SEQ ID NO: 2020330 - RNA, 19 nt, Homo sapiens
  misc_RNA (1)...(19): siRNA sense strand
acgcugaucugcccuguca

SEQ ID NO: 2020331 - RNA, 19 nt, Homo sapiens
  misc_RNA (1)...(19): siRNA sense strand
gaaggguuaugaggaugga

SEQ ID NO: 2020332 - RNA, 19 nt, Homo sapiens
  misc_RNA (1)...(19): siRNA sense strand
ugggugaguuccagccuaa

SEQ ID NO: 2020333 - RNA, 19 nt, Homo sapiens
  misc_RNA (1)...(19): siRNA sense strand
ggcagguggugaacgugua

SEQ ID NO: 2020334 - RNA, 19 nt, Homo sapiens
  misc_RNA (1)...(19): siRNA sense strand
uaaggcagguggugaacgu

SEQ ID NO: 2020335 - RNA, 19 nt, Homo sapiens
  misc_RNA (1)...(19): siRNA sense strand
gggccugacugaugggaau

SEQ ID NO: 2020336 - RNA, 19 nt, Homo sapiens
  misc_RNA (1)...(19): siRNA sense strand
aaauaagccuaagagagaa

SEQ ID NO: 2020337 - RNA, 19 nt, Homo sapiens
  misc_RNA (1)...(19): siRNA sense strand
cagcaucugugaucaugag

SEQ ID NO: 2020338 - RNA, 19 nt, Homo sapiens
  misc_RNA (1)...(19): siRNA sense strand
ucacugagcccagaaccaa

SEQ ID NO: 2020339 - RNA, 19 nt, Homo sapiens
  misc_RNA (1)...(19): siRNA sense strand
ccagggagacagaaagaga

SEQ ID NO: 2020340 - RNA, 19 nt, Homo sapiens
  misc_RNA (1)...(19): siRNA sense strand
ccugaccauuugcccaaua

SEQ ID NO: 2020341 - RNA, 19 nt, Homo sapiens
  misc_RNA (1)...(19): siRNA sense strand
cgagggagaacuucgauuc

SEQ ID NO: 2020342 - RNA, 19 nt, Homo sapiens
  misc_RNA (1)...(19): siRNA sense strand
ggaaggcugcucuccgaau

SEQ ID NO: 2020343 - RNA, 19 nt, Homo sapiens
  misc_RNA (1)...(19): siRNA sense strand
ugacaccggagaacggaua

SEQ ID NO: 2020344 - RNA, 19 nt, Homo sapiens
  misc_RNA (1)...(19): siRNA sense strand
agcgagagaugaaagaaau

SEQ ID NO: 2020345 - RNA, 19 nt, Homo sapiens
  misc_RNA (1)...(19): siRNA sense strand
ggaggaaaauccaguacau

SEQ ID NO: 2020346 - RNA, 19 nt, Homo sapiens
  misc_RNA (1)...(19): siRNA sense strand
ggccuaucaugaauggaaa

SEQ ID NO: 2020347 - RNA, 19 nt, Homo sapiens
  misc_RNA (1)...(19): siRNA sense strand
ggacccugccuaucucguu

SEQ ID NO: 2020348 - RNA, 19 nt, Homo sapiens
  misc_RNA (1)...(19): siRNA sense strand
ggagacaacagaaggaaaa

SEQ ID NO: 2020349 - RNA, 19 nt, Homo sapiens
  misc_RNA (1)...(19): siRNA sense strand
uaaaguggagcgacaccaa

SEQ ID NO: 2020350 - RNA, 19 nt, Homo sapiens
  misc_RNA (1)...(19): siRNA sense strand
gaaaagaguggcauauugg

SEQ ID NO: 2020351 - RNA, 19 nt, Homo sapiens
  misc_RNA (1)...(19): siRNA sense strand
ggagccaguuacuucuugu

SEQ ID NO: 2020352 - RNA, 19 nt, Homo sapiens
  misc_RNA (1)...(19): siRNA sense strand
uuuccaagauggugacuuc

SEQ ID NO: 2020353 - RNA, 19 nt, Homo sapiens
  misc_RNA (1)...(19): siRNA sense strand
caacaaccaaucagaacca

SEQ ID NO: 2020354 - RNA, 19 nt, Homo sapiens
  misc_RNA (1)...(19): siRNA sense strand
cuucaaaccugcggaugug

SEQ ID NO: 2020355 - RNA, 19 nt, Homo sapiens
  misc_RNA (1)...(19): siRNA sense strand
gcagguccacuggcuggua

SEQ ID NO: 2020356 - RNA, 19 nt, Homo sapiens
  misc_RNA (1)...(19): siRNA sense strand
ggguucugaucuucacauu

SEQ ID NO: 2020357 - RNA, 19 nt, Homo sapiens
  misc_RNA (1)...(19): siRNA sense strand
cacugaagcacuuuacuga

SEQ ID NO: 2020358 - RNA, 19 nt, Homo sapiens
  misc_RNA (1)...(19): siRNA sense strand
ggcacgcacugaagcacuu

SEQ ID NO: 2020359 - RNA, 19 nt, Homo sapiens
  misc_RNA (1)...(19): siRNA sense strand
agagaucucguucuauaau

SEQ ID NO: 2020360 - RNA, 19 nt, Homo sapiens
  misc_RNA (1)...(19): siRNA sense strand
cuaugagacuggagagauc

SEQ ID NO: 2020361 - RNA, 19 nt, Homo sapiens
  misc_RNA (1)...(19): siRNA sense strand
caaaccugcggaugugauu

SEQ ID NO: 2020362 - RNA, 19 nt, Homo sapiens
  misc_RNA (1)...(19): siRNA sense strand
cagauggagugggccugua

SEQ ID NO: 2020363 - RNA, 19 nt, Homo sapiens
  misc_RNA (1)...(19): siRNA sense strand
ggaaaggaaguggaagaca

SEQ ID NO: 2020364 - RNA, 19 nt, Homo sapiens
  misc_RNA (1)...(19): siRNA sense strand
gagagcgagagaugaaaga

SEQ ID NO: 2020365 - RNA, 19 nt, Homo sapiens
  misc_RNA (1)...(19): siRNA sense strand
gggccuguaugcaguagca

SEQ ID NO: 2020366 - RNA, 19 nt, Homo sapiens
  misc_RNA (1)...(19): siRNA sense strand
ggcaaacgccauccuccuu

SEQ ID NO: 2020367 - RNA, 19 nt, Homo sapiens
  misc_RNA (1)...(19): siRNA sense strand
agaaccaaccugaaacuuc

SEQ ID NO: 2020368 - RNA, 19 nt, Homo sapiens
  misc_RNA (1)...(19): siRNA sense strand
agugaaggguuaugaggau

SEQ ID NO: 2020369 - RNA, 19 nt, Homo sapiens
  misc_RNA (1)...(19): siRNA sense strand
caaucagaaccauaagcua

SEQ ID NO: 2020370 - RNA, 19 nt, Homo sapiens
  misc_RNA (1)...(19): siRNA sense strand
ggguguauccugcaucauc

SEQ ID NO: 2020371 - RNA, 19 nt, Homo sapiens
  misc_RNA (1)...(19): siRNA sense strand
guagcagcaucugugauca

SEQ ID NO: 2020372 - RNA, 19 nt, Homo sapiens
  misc_RNA (1)...(19): siRNA sense strand
guucuauaaugccacagau

SEQ ID NO: 2020373 - RNA, 19 nt, Homo sapiens
  misc_RNA (1)...(19): siRNA sense strand
gaaauaagccuaagagaga

SEQ ID NO: 2020374 - RNA, 19 nt, Homo sapiens
  misc_RNA (1)...(19): siRNA sense strand
ggaaaguacuuguguuauu

SEQ ID NO: 2020375 - RNA, 19 nt, Homo sapiens
  misc_RNA (1)...(19): siRNA sense strand
gaaggcugcucuccgaaua

SEQ ID NO: 2020376 - RNA, 19 nt, Homo sapiens
  misc_RNA (1)...(19): siRNA sense strand
guucugaucuucacauuga

SEQ ID NO: 2020377 - RNA, 19 nt, Homo sapiens
  misc_RNA (1)...(19): siRNA sense strand
gaacguguaugcagaugga

SEQ ID NO: 2020378 - RNA, 19 nt, Homo sapiens
  misc_RNA (1)...(19): siRNA sense strand
gggcuuagcuaaugaaagu

SEQ ID NO: 2020379 - RNA, 19 nt, Homo sapiens
  misc_RNA (1)...(19): siRNA sense strand
guaagaacguggagaggaa

SEQ ID NO: 2020380 - RNA, 19 nt, Homo sapiens
  misc_RNA (1)...(19): siRNA sense strand
gauggugacuucuacgaaa

SEQ ID NO: 2020381 - RNA, 19 nt, Homo sapiens
  misc_RNA (1)...(19): siRNA sense strand
gaaaauggcccucuucaaa

SEQ ID NO: 2020382 - RNA, 19 nt, Homo sapiens
  misc_RNA (1)...(19): siRNA sense strand
ccacugcccugaccauuug

SEQ ID NO: 2020383 - RNA, 19 nt, Homo sapiens
  misc_RNA (1)...(19): siRNA sense strand
caaccaaucagaaccauaa

SEQ ID NO: 2020384 - RNA, 19 nt, Homo sapiens
  misc_RNA (1)...(19): siRNA sense strand
gaacaucccggcuguggaa

SEQ ID NO: 2020385 - RNA, 19 nt, Homo sapiens
  misc_RNA (1)...(19): siRNA sense strand
agacaacccugagagauuu

SEQ ID NO: 2020386 - RNA, 19 nt, Homo sapiens
  misc_RNA (1)...(19): siRNA sense strand
guacuuguguuauuuccaa

SEQ ID NO: 2020387 - RNA, 19 nt, Homo sapiens
  misc_RNA (1)...(19): siRNA sense strand
gagaacggauacuggacua

SEQ ID NO: 2020388 - RNA, 19 nt, Homo sapiens
  misc_RNA (1)...(19): siRNA sense strand
gagcugaggugggugaguu

SEQ ID NO: 2020389 - RNA, 19 nt, Homo sapiens
  misc_RNA (1)...(19): siRNA sense strand
gaucucauaucuacaccuu

SEQ ID NO: 2020390 - RNA, 19 nt, Homo sapiens
  misc_RNA (1)...(19): siRNA sense strand
acauugaagugaaggguua

SEQ ID NO: 2020391 - RNA, 19 nt, Homo sapiens
  misc_RNA (1)...(19): siRNA sense strand
gaacucaaguggaggaaaa

SEQ ID NO: 2020392 - RNA, 19 nt, Homo sapiens
  misc_RNA (1)...(19): siRNA sense strand
caacagagcaagaaauaag

SEQ ID NO: 2020393 - RNA, 19 nt, Homo sapiens
  misc_RNA (1)...(19): siRNA sense strand
gaaaugggauacgcugcaa

SEQ ID NO: 2020394 - RNA, 19 nt, Homo sapiens
  misc_RNA (1)...(19): siRNA sense strand
gagccucuauauccuguuu

SEQ ID NO: 2020395 - RNA, 19 nt, Homo sapiens
  misc_RNA (1)...(19): siRNA sense strand
ggaucuuccuggacuauga

SEQ ID NO: 2020396 - RNA, 19 nt, Homo sapiens
  misc_RNA (1)...(19): siRNA sense strand
guaugcagauggaaaggaa

SEQ ID NO: 2020397 - RNA, 19 nt, Homo sapiens
  misc_RNA (1)...(19): siRNA sense strand
ugacugaugggaauaagua

SEQ ID NO: 2020398 - RNA, 19 nt, Homo sapiens
  misc_RNA (1)...(19): siRNA sense strand
gagcaagaaauaagccuaa

SEQ ID NO: 2020399 - RNA, 19 nt, Homo sapiens
  misc_RNA (1)...(19): siRNA sense strand
guggaaaguacuuguguua

SEQ ID NO: 2020400 - RNA, 19 nt, Homo sapiens
  misc_RNA (1)...(19): siRNA sense strand
gaaagagagcgagagauga

SEQ ID NO: 2020401 - RNA, 19 nt, Homo sapiens
  misc_RNA (1)...(19): siRNA sense strand
gagaucucguucuauaaug

SEQ ID NO: 2020402 - RNA, 19 nt, Homo sapiens
  misc_RNA (1)...(19): siRNA sense strand
gaacggauacuggacuaug

SEQ ID NO: 2020403 - RNA, 19 nt, Homo sapiens
  misc_RNA (1)...(19): siRNA sense strand
ucucauaucuacaccuuuc

SEQ ID NO: 2020404 - RNA, 19 nt, Homo sapiens
  misc_RNA (1)...(19): siRNA sense strand
caaaagaaguagagaguuc

SEQ ID NO: 2020405 - RNA, 19 nt, Homo sapiens
  misc_RNA (1)...(19): siRNA sense strand
ggaagcaccugugguugca

SEQ ID NO: 2020406 - RNA, 19 nt, Homo sapiens
  misc_RNA (1)...(19): siRNA sense strand
gcccagaaccaaccugaaa

SEQ ID NO: 2020407 - RNA, 19 nt, Homo sapiens
  misc_RNA (1)...(19): siRNA sense strand
gcaagaaauaagccuaaga

SEQ ID NO: 2020408 - RNA, 19 nt, Homo sapiens
  misc_RNA (1)...(19): siRNA sense strand
aaagagagcgagagaugaa

SEQ ID NO: 2020409 - RNA, 19 nt, Homo sapiens
  misc_RNA (1)...(19): siRNA sense strand
gaaaagacagccagcauau

SEQ ID NO: 2020410 - RNA, 19 nt, Homo sapiens
  misc_RNA (1)...(19): siRNA sense strand
gcacugaagcacuuuacug

SEQ ID NO: 2020411 - RNA, 19 nt, Homo sapiens
  misc_RNA (1)...(19): siRNA sense strand
gcaacagagcaagaaauaa

SEQ ID NO: 2020412 - RNA, 19 nt, Homo sapiens
  misc_RNA (1)...(19): siRNA sense strand
cagacaacccugagagauu

SEQ ID NO: 2020413 - RNA, 19 nt, Homo sapiens
  misc_RNA (1)...(19): siRNA sense strand
ccaagauggugacuucuac

SEQ ID NO: 2020414 - RNA, 19 nt, Homo sapiens
  misc_RNA (1)...(19): siRNA sense strand
ggacuaugggccugacuga

SEQ ID NO: 2020415 - RNA, 19 nt, Homo sapiens
  misc_RNA (1)...(19): siRNA sense strand
ucacaucagggagacauua

SEQ ID NO: 2020416 - RNA, 19 nt, Homo sapiens
  misc_RNA (1)...(19): siRNA sense strand
gagcgagagaugaaagaaa

SEQ ID NO: 2020417 - RNA, 19 nt, Homo sapiens
  misc_RNA (1)...(19): siRNA sense strand
agaaagagagcgagagaug

SEQ ID NO: 2020418 - RNA, 19 nt, Homo sapiens
  misc_RNA (1)...(19): siRNA sense strand
ggaaaagacagccagcaua

SEQ ID NO: 2020419 - RNA, 19 nt, Homo sapiens
  misc_RNA (1)...(19): siRNA sense strand
gguguauccugcaucauca

SEQ ID NO: 2020420 - RNA, 19 nt, Homo sapiens
  misc_RNA (1)...(19): siRNA sense strand
uauccugcaucaucagaaa

SEQ ID NO: 2020421 - RNA, 19 nt, Homo sapiens
  misc_RNA (1)...(19): siRNA sense strand
agaagucuuuggccuauca

SEQ ID NO: 2020422 - RNA, 19 nt, Homo sapiens
  misc_RNA (1)...(19): siRNA sense strand
caagaaauaagccuaagag

SEQ ID NO: 2020423 - RNA, 19 nt, Homo sapiens
  misc_RNA (1)...(19): siRNA sense strand
gcaguagcagcaucuguga

SEQ ID NO: 2020424 - RNA, 19 nt, Homo sapiens
  misc_RNA (1)...(19): siRNA sense strand
ugaaguaacaucucugcuu

SEQ ID NO: 2020425 - RNA, 19 nt, Homo sapiens
  misc_RNA (1)...(19): siRNA sense strand
caaacgccauccuccuugu

SEQ ID NO: 2020426 - RNA, 19 nt, Homo sapiens
  misc_RNA (1)...(19): siRNA sense strand
ugcaacagagcaagaaaua

SEQ ID NO: 2020427 - RNA, 19 nt, Homo sapiens
  misc_RNA (1)...(19): siRNA sense strand
agaaaagaguggcauauug

SEQ ID NO: 2020428 - RNA, 19 nt, Homo sapiens
  misc_RNA (1)...(19): siRNA sense strand
agagaagucuuuggccuau

SEQ ID NO: 2020429 - RNA, 19 nt, Homo sapiens
  misc_RNA (1)...(19): siRNA sense strand
gcauuggguucugaucuuc

SEQ ID NO: 2020430 - RNA, 19 nt, Homo sapiens
  misc_RNA (1)...(19): siRNA sense strand
acgcugaucugcccuguca

SEQ ID NO: 2020431 - RNA, 19 nt, Homo sapiens
  misc_RNA (1)...(19): siRNA sense strand
gaaggguuaugaggaugga

SEQ ID NO: 2020432 - RNA, 19 nt, Homo sapiens
  misc_RNA (1)...(19): siRNA sense strand
ugggugaguuccagccuaa

SEQ ID NO: 2020433 - RNA, 19 nt, Homo sapiens
  misc_RNA (1)...(19): siRNA sense strand
uaaggcagguggugaacgu

SEQ ID NO: 2020434 - RNA, 19 nt, Homo sapiens
  misc_RNA (1)...(19): siRNA sense strand
ggcagguggugaacgugua

SEQ ID NO: 2020435 - RNA, 19 nt, Homo sapiens
  misc_RNA (1)...(19): siRNA sense strand
gggccugacugaugggaau

SEQ ID NO: 2020436 - RNA, 19 nt, Homo sapiens
  misc_RNA (1)...(19): siRNA sense strand
aaauaagccuaagagagaa

SEQ ID NO: 2020437 - RNA, 19 nt, Homo sapiens
  misc_RNA (1)...(19): siRNA sense strand
cagcaucugugaucaugag

SEQ ID NO: 2020438 - RNA, 19 nt, Homo sapiens
  misc_RNA (1)...(19): siRNA sense strand
ucacugagcccagaaccaa

SEQ ID NO: 2020439 - RNA, 19 nt, Homo sapiens
  misc_RNA (1)...(19): siRNA sense strand
ccagggagacagaaagaga

SEQ ID NO: 2020440 - RNA, 19 nt, Homo sapiens
  misc_RNA (1)...(19): siRNA sense strand
ccugaccauuugcccaaua

SEQ ID NO: 2020441 - RNA, 19 nt, Homo sapiens
  misc_RNA (1)...(19): siRNA sense strand
ugacaccggagaacggaua

SEQ ID NO: 2020442 - RNA, 19 nt, Homo sapiens
  misc_RNA (1)...(19): siRNA sense strand
cgagggagaacuucgauuc

SEQ ID NO: 2020443 - RNA, 19 nt, Homo sapiens
  misc_RNA (1)...(19): siRNA sense strand
ggaaggcugcucuccgaau

SEQ ID NO: 2020444 - RNA, 19 nt, Homo sapiens
  misc_RNA (1)...(19): siRNA sense strand
agcgagagaugaaagaaau

SEQ ID NO: 2020445 - RNA, 19 nt, Homo sapiens
  misc_RNA (1)...(19): siRNA sense strand
ggaggaaaauccaguacau

SEQ ID NO: 2020446 - RNA, 19 nt, Homo sapiens
  misc_RNA (1)...(19): siRNA sense strand
ggccuaucaugaauggaaa

SEQ ID NO: 2020447 - RNA, 19 nt, Homo sapiens
  misc_RNA (1)...(19): siRNA sense strand
ggacccugccuaucucguu

SEQ ID NO: 2020448 - RNA, 19 nt, Homo sapiens
  misc_RNA (1)...(19): siRNA sense strand
ggagacaacagaaggaaaa

SEQ ID NO: 2020449 - RNA, 19 nt, Homo sapiens
  misc_RNA (1)...(19): siRNA sense strand
uaaaguggagcgacaccaa

SEQ ID NO: 2020450 - RNA, 19 nt, Homo sapiens
  misc_RNA (1)...(19): siRNA sense strand
gaaaagaguggcauauugg

SEQ ID NO: 2020451 - RNA, 19 nt, Homo sapiens
  misc_RNA (1)...(19): siRNA sense strand
ggagccaguuacuucuugu

SEQ ID NO: 2020452 - RNA, 19 nt, Homo sapiens
  misc_RNA (1)...(19): siRNA sense strand
uuuccaagauggugacuuc

SEQ ID NO: 2020453 - RNA, 19 nt, Homo sapiens
  misc_RNA (1)...(19): siRNA sense strand
caacaaccaaucagaacca

SEQ ID NO: 2020454 - RNA, 19 nt, Homo sapiens
  misc_RNA (1)...(19): siRNA sense strand
cuucaaaccugcggaugug

SEQ ID NO: 2020455 - RNA, 19 nt, Homo sapiens
  misc_RNA (1)...(19): siRNA sense strand
gcagguccacuggcuggua

SEQ ID NO: 2020456 - RNA, 19 nt, Homo sapiens
  misc_RNA (1)...(19): siRNA sense strand
ggguucugaucuucacauu

SEQ ID NO: 2020457 - RNA, 19 nt, Homo sapiens
  misc_RNA (1)...(19): siRNA sense strand
cacugaagcacuuuacuga

SEQ ID NO: 2020458 - RNA, 19 nt, Homo sapiens
  misc_RNA (1)...(19): siRNA sense strand
ggcacgcacugaagcacuu

SEQ ID NO: 2020459 - RNA, 19 nt, Homo sapiens
  misc_RNA (1)...(19): siRNA sense strand
agagaucucguucuauaau

SEQ ID NO: 2020460 - RNA, 19 nt, Homo sapiens
  misc_RNA (1)...(19): siRNA sense strand
cuaugagacuggagagauc

SEQ ID NO: 2020461 - RNA, 19 nt, Homo sapiens
  misc_RNA (1)...(19): siRNA sense strand
caaaccugcggaugugauu

SEQ ID NO: 2020462 - RNA, 19 nt, Homo sapiens
  misc_RNA (1)...(19): siRNA sense strand
cagauggagugggccugua

SEQ ID NO: 2020463 - RNA, 19 nt, Homo sapiens
  misc_RNA (1)...(19): siRNA sense strand
ggaaaggaaguggaagaca

SEQ ID NO: 2020464 - RNA, 19 nt, Homo sapiens
  misc_RNA (1)...(19): siRNA sense strand
gagagcgagagaugaaaga

SEQ ID NO: 2020465 - RNA, 19 nt, Homo sapiens
  misc_RNA (1)...(19): siRNA sense strand
gggccuguaugcaguagca

SEQ ID NO: 2020466 - RNA, 19 nt, Homo sapiens
  misc_RNA (1)...(19): siRNA sense strand
ggcaaacgccauccuccuu

SEQ ID NO: 2020467 - RNA, 19 nt, Homo sapiens
  misc_RNA (1)...(19): siRNA sense strand
agaaccaaccugaaacuuc

SEQ ID NO: 2020468 - RNA, 19 nt, Homo sapiens
  misc_RNA (1)...(19): siRNA sense strand
agugaaggguuaugaggau

SEQ ID NO: 2020469 - RNA, 19 nt, Homo sapiens
  misc_RNA (1)...(19): siRNA sense strand
caaucagaaccauaagcua

SEQ ID NO: 2020470 - RNA, 19 nt, Homo sapiens
  misc_RNA (1)...(19): siRNA sense strand
ggguguauccugcaucauc

SEQ ID NO: 2020471 - RNA, 19 nt, Homo sapiens
  misc_RNA (1)...(19): siRNA sense strand
guagcagcaucugugauca

SEQ ID NO: 2020472 - RNA, 19 nt, Homo sapiens
  misc_RNA (1)...(19): siRNA sense strand
guucuauaaugccacagau

SEQ ID NO: 2020473 - RNA, 19 nt, Homo sapiens
  misc_RNA (1)...(19): siRNA sense strand
gcucugugcuucaucuucu

SEQ ID NO: 2020474 - RNA, 19 nt, Homo sapiens
  misc_RNA (1)...(19): siRNA sense strand
ggagguuggagccugaaga

SEQ ID NO: 2020475 - RNA, 19 nt, Homo sapiens
  misc_RNA (1)...(19): siRNA sense strand
gaucacacaucuacacauu

SEQ ID NO: 2020476 - RNA, 19 nt, Homo sapiens
  misc_RNA (1)...(19): siRNA sense strand
gaacagaggagcagaagga

SEQ ID NO: 2020477 - RNA, 19 nt, Homo sapiens
  misc_RNA (1)...(19): siRNA sense strand
gaagaaagaaagugucauu

SEQ ID NO: 2020478 - RNA, 19 nt, Homo sapiens
  misc_RNA (1)...(19): siRNA sense strand
gaugauacccauugccaua

SEQ ID NO: 2020479 - RNA, 19 nt, Homo sapiens
  misc_RNA (1)...(19): siRNA sense strand
gagacaauguugagaggaa

SEQ ID NO: 2020480 - RNA, 19 nt, Homo sapiens
  misc_RNA (1)...(19): siRNA sense strand
ucacacaucuacacauuuc

SEQ ID NO: 2020481 - RNA, 19 nt, Homo sapiens
  misc_RNA (1)...(19): siRNA sense strand
gauccugccuguuaucaug

SEQ ID NO: 2020482 - RNA, 19 nt, Homo sapiens
  misc_RNA (1)...(19): siRNA sense strand
guggugauccugccuguua

SEQ ID NO: 2020483 - RNA, 19 nt, Homo sapiens
  misc_RNA (1)...(19): siRNA sense strand
gagcuucgccucagggaaa

SEQ ID NO: 2020484 - RNA, 19 nt, Homo sapiens
  misc_RNA (1)...(19): siRNA sense strand
gcaucuuccuggacuauga

SEQ ID NO: 2020485 - RNA, 19 nt, Homo sapiens
  misc_RNA (1)...(19): siRNA sense strand
gaaccaccuuugugagcaa

SEQ ID NO: 2020486 - RNA, 19 nt, Homo sapiens
  misc_RNA (1)...(19): siRNA sense strand
gcccugaccucccuuaagu

SEQ ID NO: 2020487 - RNA, 19 nt, Homo sapiens
  misc_RNA (1)...(19): siRNA sense strand
gaacguguccugcucuauc

SEQ ID NO: 2020488 - RNA, 19 nt, Homo sapiens
  misc_RNA (1)...(19): siRNA sense strand
uggcaggacuggacucuga

SEQ ID NO: 2020489 - RNA, 19 nt, Homo sapiens
  misc_RNA (1)...(19): siRNA sense strand
gggagaaccaccuuuguga

SEQ ID NO: 2020490 - RNA, 19 nt, Homo sapiens
  misc_RNA (1)...(19): siRNA sense strand
aaagaagugugacauugga

SEQ ID NO: 2020491 - RNA, 19 nt, Homo sapiens
  misc_RNA (1)...(19): siRNA sense strand
caaaagaagugugacauug

SEQ ID NO: 2020492 - RNA, 19 nt, Homo sapiens
  misc_RNA (1)...(19): siRNA sense strand
cugcaguguuuguguauaa

SEQ ID NO: 2020493 - RNA, 19 nt, Homo sapiens
  misc_RNA (1)...(19): siRNA sense strand
guaguuccuuugguuguaa

SEQ ID NO: 2020494 - RNA, 19 nt, Homo sapiens
  misc_RNA (1)...(19): siRNA sense strand
gaucauacacaaugucaca

SEQ ID NO: 2020495 - RNA, 19 nt, Homo sapiens
  misc_RNA (1)...(19): siRNA sense strand
ucacagccauggaaacaag

SEQ ID NO: 2020496 - RNA, 19 nt, Homo sapiens
  misc_RNA (1)...(19): siRNA sense strand
uaugacagccaaaucuuaa

SEQ ID NO: 2020497 - RNA, 19 nt, Homo sapiens
  misc_RNA (1)...(19): siRNA sense strand
ccuguucaccuccucauua

SEQ ID NO: 2020498 - RNA, 19 nt, Homo sapiens
  misc_RNA (1)...(19): siRNA sense strand
caaugccucugguggaaga

SEQ ID NO: 2020499 - RNA, 19 nt, Homo sapiens
  misc_RNA (1)...(19): siRNA sense strand
cagcguggcccugaucaua

SEQ ID NO: 2020500 - RNA, 19 nt, Homo sapiens
  misc_RNA (1)...(19): siRNA sense strand
gcauagggaacuaguuguu

SEQ ID NO: 2020501 - RNA, 19 nt, Homo sapiens
  misc_RNA (1)...(19): siRNA sense strand
caacaugagggacagauca

SEQ ID NO: 2020502 - RNA, 19 nt, Homo sapiens
  misc_RNA (1)...(19): siRNA sense strand
ggaccuuggagaugcauaa

SEQ ID NO: 2020503 - RNA, 19 nt, Homo sapiens
  misc_RNA (1)...(19): siRNA sense strand
ggaaaaugcugaggacaug

SEQ ID NO: 2020504 - RNA, 19 nt, Homo sapiens
  misc_RNA (1)...(19): siRNA sense strand
ggagguagauguggaaaau

SEQ ID NO: 2020505 - RNA, 19 nt, Homo sapiens
  misc_RNA (1)...(19): siRNA sense strand
cucauuagguguggcuuua

SEQ ID NO: 2020506 - RNA, 19 nt, Homo sapiens
  misc_RNA (1)...(19): siRNA sense strand
gaucaacaaucuccaaaag

SEQ ID NO: 2020507 - RNA, 19 nt, Homo sapiens
  misc_RNA (1)...(19): siRNA sense strand
uuaaguggauucucucucu

SEQ ID NO: 2020508 - RNA, 19 nt, Homo sapiens
  misc_RNA (1)...(19): siRNA sense strand
gaaacauuacuuggaggua

SEQ ID NO: 2020509 - RNA, 19 nt, Homo sapiens
  misc_RNA (1)...(19): siRNA sense strand
acucugagcccgucauuga

SEQ ID NO: 2020510 - RNA, 19 nt, Homo sapiens
  misc_RNA (1)...(19): siRNA sense strand
ugaccucccuuaaguggau

SEQ ID NO: 2020511 - RNA, 19 nt, Homo sapiens
  misc_RNA (1)...(19): siRNA sense strand
ccauaugcaucuacuggau

SEQ ID NO: 2020512 - RNA, 19 nt, Homo sapiens
  misc_RNA (1)...(19): siRNA sense strand
uuuaguaguuccuuugguu

SEQ ID NO: 2020513 - RNA, 19 nt, Homo sapiens
  misc_RNA (1)...(19): siRNA sense strand
cacaaugccucugguggaa

SEQ ID NO: 2020514 - RNA, 19 nt, Homo sapiens
  misc_RNA (1)...(19): siRNA sense strand
aaucugcucugcauucaca

SEQ ID NO: 2020515 - RNA, 19 nt, Homo sapiens
  misc_RNA (1)...(19): siRNA sense strand
ccuguuaucaugauuauuc

SEQ ID NO: 2020516 - RNA, 19 nt, Homo sapiens
  misc_RNA (1)...(19): siRNA sense strand
ggagaugcauaaaaggaaa

SEQ ID NO: 2020517 - RNA, 19 nt, Homo sapiens
  misc_RNA (1)...(19): siRNA sense strand
ucaacaaucuccaaaagga

SEQ ID NO: 2020518 - RNA, 19 nt, Homo sapiens
  misc_RNA (1)...(19): siRNA sense strand
gcccugaucauacacaaug

SEQ ID NO: 2020519 - RNA, 19 nt, Homo sapiens
  misc_RNA (1)...(19): siRNA sense strand
agguguggcuuuaguaguu

SEQ ID NO: 2020520 - RNA, 19 nt, Homo sapiens
  misc_RNA (1)...(19): siRNA sense strand
cagagagauucgacaguca

SEQ ID NO: 2020521 - RNA, 19 nt, Homo sapiens
  misc_RNA (1)...(19): siRNA sense strand
agacacuggucaucccuau

SEQ ID NO: 2020522 - RNA, 19 nt, Homo sapiens
  misc_RNA (1)...(19): siRNA sense strand
gagauucgacagucagcuu

SEQ ID NO: 2020523 - RNA, 19 nt, Homo sapiens
  misc_RNA (1)...(19): siRNA sense strand
uuaugacagccaaaucuua

SEQ ID NO: 2020524 - RNA, 19 nt, Homo sapiens
  misc_RNA (1)...(19): siRNA sense strand
cgagggagaaccaccuuug

SEQ ID NO: 2020525 - RNA, 19 nt, Homo sapiens
  misc_RNA (1)...(19): siRNA sense strand
cuaccaguguuacuuccaa

SEQ ID NO: 2020526 - RNA, 19 nt, Homo sapiens
  misc_RNA (1)...(19): siRNA sense strand
caccacagcccacagaauc

SEQ ID NO: 2020527 - RNA, 19 nt, Homo sapiens
  misc_RNA (1)...(19): siRNA sense strand
agacaauguugagaggaaa

SEQ ID NO: 2020528 - RNA, 19 nt, Homo sapiens
  misc_RNA (1)...(19): siRNA sense strand
cagaagaaagaaaguguca

SEQ ID NO: 2020529 - RNA, 19 nt, Homo sapiens
  misc_RNA (1)...(19): siRNA sense strand
gcguggcccugaucauaca

SEQ ID NO: 2020530 - RNA, 19 nt, Homo sapiens
  misc_RNA (1)...(19): siRNA sense strand
gggcuggacacuucacaga

SEQ ID NO: 2020531 - RNA, 19 nt, Homo sapiens
  misc_RNA (1)...(19): siRNA sense strand
ugauacccauugccauaug

SEQ ID NO: 2020532 - RNA, 19 nt, Homo sapiens
  misc_RNA (1)...(19): siRNA sense strand
ggacucugagcccgucauu

SEQ ID NO: 2020533 - RNA, 19 nt, Homo sapiens
  misc_RNA (1)...(19): siRNA sense strand
ucuacuggaucaacaaucu

SEQ ID NO: 2020534 - RNA, 19 nt, Homo sapiens
  misc_RNA (1)...(19): siRNA sense strand
cagcuggagugcauaucug

SEQ ID NO: 2020535 - RNA, 19 nt, Homo sapiens
  misc_RNA (1)...(19): siRNA sense strand
guaacuaugggauggaauc

SEQ ID NO: 2020536 - RNA, 19 nt, Homo sapiens
  misc_RNA (1)...(19): siRNA sense strand
cagggaaacauuacuugga

SEQ ID NO: 2020537 - RNA, 19 nt, Homo sapiens
  misc_RNA (1)...(19): siRNA sense strand
cauuagguguggcuuuagu

SEQ ID NO: 2020538 - RNA, 19 nt, Homo sapiens
  misc_RNA (1)...(19): siRNA sense strand
ccacuacuuccucagaaug

SEQ ID NO: 2020539 - RNA, 19 nt, Homo sapiens
  misc_RNA (1)...(19): siRNA sense strand
gagggagaaccaccuuugu

SEQ ID NO: 2020540 - RNA, 19 nt, Homo sapiens
  misc_RNA (1)...(19): siRNA sense strand
cagacagccucuucauggu

SEQ ID NO: 2020541 - RNA, 19 nt, Homo sapiens
  misc_RNA (1)...(19): siRNA sense strand
ccaguguuacuuccaagaa

SEQ ID NO: 2020542 - RNA, 19 nt, Homo sapiens
  misc_RNA (1)...(19): siRNA sense strand
uaacggcaucuaccagugu

SEQ ID NO: 2020543 - RNA, 19 nt, Homo sapiens
  misc_RNA (1)...(19): siRNA sense strand
aguaguuccuuugguugua

SEQ ID NO: 2020544 - RNA, 19 nt, Homo sapiens
  misc_RNA (1)...(19): siRNA sense strand
gggucacggugccugaaga

SEQ ID NO: 2020545 - RNA, 19 nt, Homo sapiens
  misc_RNA (1)...(19): siRNA sense strand
uuaaucugcucugcauuca

SEQ ID NO: 2020546 - RNA, 19 nt, Homo sapiens
  misc_RNA (1)...(19): siRNA sense strand
gaucuguagagacaauguu

SEQ ID NO: 2020547 - RNA, 19 nt, Homo sapiens
  misc_RNA (1)...(19): siRNA sense strand
gggagaaaacacuacguua

SEQ ID NO: 2020548 - RNA, 19 nt, Homo sapiens
  misc_RNA (1)...(19): siRNA sense strand
cuugcaggauggagaagaa

SEQ ID NO: 2020549 - RNA, 19 nt, Homo sapiens
  misc_RNA (1)...(19): siRNA sense strand
gcaucuaccaguguuacuu

SEQ ID NO: 2020550 - RNA, 19 nt, Homo sapiens
  misc_RNA (1)...(19): siRNA sense strand
acauggaggugcggugguu

SEQ ID NO: 2020551 - RNA, 19 nt, Homo sapiens
  misc_RNA (1)...(19): siRNA sense strand
ugacagccaaaucuuaauc

SEQ ID NO: 2020552 - RNA, 19 nt, Homo sapiens
  misc_RNA (1)...(19): siRNA sense strand
gacgucuccuucuacaaca

SEQ ID NO: 2020553 - RNA, 19 nt, Homo sapiens
  misc_RNA (1)...(19): siRNA sense strand
aacauuacuuggagguaga

SEQ ID NO: 2020554 - RNA, 19 nt, Homo sapiens
  misc_RNA (1)...(19): siRNA sense strand
gggcaacccagagagauuc

SEQ ID NO: 2020555 - RNA, 19 nt, Homo sapiens
  misc_RNA (1)...(19): siRNA sense strand
gccagaagaaagaaagugu

SEQ ID NO: 2020556 - RNA, 19 nt, Homo sapiens
  misc_RNA (1)...(19): siRNA sense strand
gagaacagaggagcagaag

SEQ ID NO: 2020557 - RNA, 19 nt, Homo sapiens
  misc_RNA (1)...(19): siRNA sense strand
ugacgcagacagccucuuc

SEQ ID NO: 2020558 - RNA, 19 nt, Homo sapiens
  misc_RNA (1)...(19): siRNA sense strand
guucuccccugcaguguuu

SEQ ID NO: 2020559 - RNA, 19 nt, Homo sapiens
  misc_RNA (1)...(19): siRNA sense strand
caucuaccaguguuacuuc

SEQ ID NO: 2020560 - RNA, 19 nt, Homo sapiens
  misc_RNA (1)...(19): siRNA sense strand
aggcauagggaacuaguug

SEQ ID NO: 2020561 - RNA, 19 nt, Homo sapiens
  misc_RNA (1)...(19): siRNA sense strand
uggcuuuaguaguuccuuu

SEQ ID NO: 2020562 - RNA, 19 nt, Homo sapiens
  misc_RNA (1)...(19): siRNA sense strand
gguguggcuuuaguaguuc

SEQ ID NO: 2020563 - RNA, 19 nt, Homo sapiens
  misc_RNA (1)...(19): siRNA sense strand
aaacaagcccuggccaucu

SEQ ID NO: 2020564 - RNA, 19 nt, Homo sapiens
  misc_RNA (1)...(19): siRNA sense strand
guuacgaugcugucuguca

SEQ ID NO: 2020565 - RNA, 19 nt, Homo sapiens
  misc_RNA (1)...(19): siRNA sense strand
ucccuuaaguggauucucu

SEQ ID NO: 2020566 - RNA, 19 nt, Homo sapiens
  misc_RNA (1)...(19): siRNA sense strand
gauacccauugccauaugc

SEQ ID NO: 2020567 - RNA, 19 nt, Homo sapiens
  misc_RNA (1)...(19): siRNA sense strand
gaggaguaccgagggagaa

SEQ ID NO: 2020568 - RNA, 19 nt, Homo sapiens
  misc_RNA (1)...(19): siRNA sense strand
ucugagcccgucauugaaa

SEQ ID NO: 2020569 - RNA, 19 nt, Homo sapiens
  misc_RNA (1)...(19): siRNA sense strand
cccagcaggucuccaugug

SEQ ID NO: 2020570 - RNA, 19 nt, Homo sapiens
  misc_RNA (1)...(19): siRNA sense strand
gcucccagccaggaagaaa

SEQ ID NO: 2020571 - RNA, 19 nt, Homo sapiens
  misc_RNA (1)...(19): siRNA sense strand
gcaggauggagaagaacau

SEQ ID NO: 2020572 - RNA, 19 nt, Homo sapiens
  misc_RNA (1)...(19): siRNA sense strand
gaggcccuucuucagcuua

SEQ ID NO: 2020573 - RNA, 19 nt, Homo sapiens
  misc_RNA (1)...(19): siRNA sense strand
ggagaaaacacuacguuac

SEQ ID NO: 2020574 - RNA, 19 nt, Homo sapiens
  misc_RNA (1)...(19): siRNA sense strand
ggucuuaugacagccaaau

SEQ ID NO: 2020575 - RNA, 19 nt, Homo sapiens
  misc_RNA (1)...(19): siRNA sense strand
gaagacaucauccggaaua

SEQ ID NO: 2020576 - RNA, 19 nt, Homo sapiens
  misc_RNA (1)...(19): siRNA sense strand
ccaagaagguggccaguca

SEQ ID NO: 2020577 - RNA, 19 nt, Homo sapiens
  misc_RNA (1)...(19): siRNA sense strand
ucacaaaccuacugguguu

SEQ ID NO: 2020578 - RNA, 19 nt, Homo sapiens
  misc_RNA (1)...(19): siRNA sense strand
acgaugagcugcagacuga

SEQ ID NO: 2020579 - RNA, 19 nt, Homo sapiens
  misc_RNA (1)...(19): siRNA sense strand
gacaucauccggaauauug

SEQ ID NO: 2020580 - RNA, 19 nt, Homo sapiens
  misc_RNA (1)...(19): siRNA sense strand
cuagagacauggagaagga

SEQ ID NO: 2020581 - RNA, 19 nt, Homo sapiens
  misc_RNA (1)...(19): siRNA sense strand
gugaggagcuuagccagaa

SEQ ID NO: 2020582 - RNA, 19 nt, Homo sapiens
  misc_RNA (1)...(19): siRNA sense strand
cuccaaagcuguucugaca

SEQ ID NO: 2020583 - RNA, 19 nt, Homo sapiens
  misc_RNA (1)...(19): siRNA sense strand
ccaaagcuguucugacaac

SEQ ID NO: 2020584 - RNA, 19 nt, Homo sapiens
  misc_RNA (1)...(19): siRNA sense strand
gcaccuacgugaggagcuu

SEQ ID NO: 2020585 - RNA, 19 nt, Homo sapiens
  misc_RNA (1)...(19): siRNA sense strand
ggaagaauagaggcagauu

SEQ ID NO: 2020586 - RNA, 19 nt, Homo sapiens
  misc_RNA (1)...(19): siRNA sense strand
ggccuacccuagagacaug

SEQ ID NO: 2020587 - RNA, 19 nt, Homo sapiens
  misc_RNA (1)...(19): siRNA sense strand
gaaagucaagaagacauca

SEQ ID NO: 2020588 - RNA, 19 nt, Homo sapiens
  misc_RNA (1)...(19): siRNA sense strand
guuccagccucagggauga

SEQ ID NO: 2020589 - RNA, 19 nt, Homo sapiens
  misc_RNA (1)...(19): siRNA sense strand
gaugagcugcagacugaug

SEQ ID NO: 2020590 - RNA, 19 nt, Homo sapiens
  misc_RNA (1)...(19): siRNA sense strand
ugaggagcuuagccagaaa

SEQ ID NO: 2020591 - RNA, 19 nt, Homo sapiens
  misc_RNA (1)...(19): siRNA sense strand
cuugcuccgugaugucuuu

SEQ ID NO: 2020592 - RNA, 19 nt, Homo sapiens
  misc_RNA (1)...(19): siRNA sense strand
gcugcaggccuacccuaga

SEQ ID NO: 2020593 - RNA, 19 nt, Homo sapiens
  misc_RNA (1)...(19): siRNA sense strand
gagacauggagaaggagaa

SEQ ID NO: 2020594 - RNA, 19 nt, Homo sapiens
  misc_RNA (1)...(19): siRNA sense strand
agacaucauccggaauauu

SEQ ID NO: 2020595 - RNA, 19 nt, Homo sapiens
  misc_RNA (1)...(19): siRNA sense strand
gaggagcuuagccagaaau

SEQ ID NO: 2020596 - RNA, 19 nt, Homo sapiens
  misc_RNA (1)...(19): siRNA sense strand
ugaugucuuucacacaaca

SEQ ID NO: 2020597 - RNA, 19 nt, Homo sapiens
  misc_RNA (1)...(19): siRNA sense strand
gaagacaucauccggaaua

SEQ ID NO: 2020598 - RNA, 19 nt, Homo sapiens
  misc_RNA (1)...(19): siRNA sense strand
ccaagaagguggccaguca

SEQ ID NO: 2020599 - RNA, 19 nt, Homo sapiens
  misc_RNA (1)...(19): siRNA sense strand
ucacaaaccuacugguguu

SEQ ID NO: 2020600 - RNA, 19 nt, Homo sapiens
  misc_RNA (1)...(19): siRNA sense strand
acgaugagcugcagacuga

SEQ ID NO: 2020601 - RNA, 19 nt, Homo sapiens
  misc_RNA (1)...(19): siRNA sense strand
gacaucauccggaauauug

SEQ ID NO: 2020602 - RNA, 19 nt, Homo sapiens
  misc_RNA (1)...(19): siRNA sense strand
cuagagacauggagaagga

SEQ ID NO: 2020603 - RNA, 19 nt, Homo sapiens
  misc_RNA (1)...(19): siRNA sense strand
gugaggagcuuagccagaa

SEQ ID NO: 2020604 - RNA, 19 nt, Homo sapiens
  misc_RNA (1)...(19): siRNA sense strand
cuccaaagcuguucugaca

SEQ ID NO: 2020605 - RNA, 19 nt, Homo sapiens
  misc_RNA (1)...(19): siRNA sense strand
ccaaagcuguucugacaac

SEQ ID NO: 2020606 - RNA, 19 nt, Homo sapiens
  misc_RNA (1)...(19): siRNA sense strand
gcaccuacgugaggagcuu

SEQ ID NO: 2020607 - RNA, 19 nt, Homo sapiens
  misc_RNA (1)...(19): siRNA sense strand
ggaagaauagaggcagauu

SEQ ID NO: 2020608 - RNA, 19 nt, Homo sapiens
  misc_RNA (1)...(19): siRNA sense strand
ggccuacccuagagacaug

SEQ ID NO: 2020609 - RNA, 19 nt, Homo sapiens
  misc_RNA (1)...(19): siRNA sense strand
gaaagucaagaagacauca

SEQ ID NO: 2020610 - RNA, 19 nt, Homo sapiens
  misc_RNA (1)...(19): siRNA sense strand
guuccagccucagggauga

SEQ ID NO: 2020611 - RNA, 19 nt, Homo sapiens
  misc_RNA (1)...(19): siRNA sense strand
gaugagcugcagacugaug

SEQ ID NO: 2020612 - RNA, 19 nt, Homo sapiens
  misc_RNA (1)...(19): siRNA sense strand
ugaggagcuuagccagaaa

SEQ ID NO: 2020613 - RNA, 19 nt, Homo sapiens
  misc_RNA (1)...(19): siRNA sense strand
cuugcuccgugaugucuuu

SEQ ID NO: 2020614 - RNA, 19 nt, Homo sapiens
  misc_RNA (1)...(19): siRNA sense strand
gcugcaggccuacccuaga

SEQ ID NO: 2020615 - RNA, 19 nt, Homo sapiens
  misc_RNA (1)...(19): siRNA sense strand
gagacauggagaaggagaa

SEQ ID NO: 2020616 - RNA, 19 nt, Homo sapiens
  misc_RNA (1)...(19): siRNA sense strand
agacaucauccggaauauu

SEQ ID NO: 2020617 - RNA, 19 nt, Homo sapiens
  misc_RNA (1)...(19): siRNA sense strand
gaggagcuuagccagaaau

SEQ ID NO: 2020618 - RNA, 19 nt, Homo sapiens
  misc_RNA (1)...(19): siRNA sense strand
ugaugucuuucacacaaca

SEQ ID NO: 2020619 - RNA, 19 nt, Homo sapiens
  misc_RNA (1)...(19): siRNA sense strand
ccaagaagguggccaguca

SEQ ID NO: 2020620 - RNA, 19 nt, Homo sapiens
  misc_RNA (1)...(19): siRNA sense strand
cuagagacauggagaagga

SEQ ID NO: 2020621 - RNA, 19 nt, Homo sapiens
  misc_RNA (1)...(19): siRNA sense strand
gugaggagcuuagccagaa

SEQ ID NO: 2020622 - RNA, 19 nt, Homo sapiens
  misc_RNA (1)...(19): siRNA sense strand
gcaccuacgugaggagcuu

SEQ ID NO: 2020623 - RNA, 19 nt, Homo sapiens
  misc_RNA (1)...(19): siRNA sense strand
ggccuacccuagagacaug

SEQ ID NO: 2020624 - RNA, 19 nt, Homo sapiens
  misc_RNA (1)...(19): siRNA sense strand
ugaggagcuuagccagaaa

SEQ ID NO: 2020625 - RNA, 19 nt, Homo sapiens
  misc_RNA (1)...(19): siRNA sense strand
cuugcuccgugaugucuuu

SEQ ID NO: 2020626 - RNA, 19 nt, Homo sapiens
  misc_RNA (1)...(19): siRNA sense strand
gagacauggagaaggagaa

SEQ ID NO: 2020627 - RNA, 19 nt, Homo sapiens
  misc_RNA (1)...(19): siRNA sense strand
gcugcaggccuacccuaga

SEQ ID NO: 2020628 - RNA, 19 nt, Homo sapiens
  misc_RNA (1)...(19): siRNA sense strand
ugaugucuuucacacaaca

SEQ ID NO: 2020629 - RNA, 19 nt, Homo sapiens
  misc_RNA (1)...(19): siRNA sense strand
gaggagcuuagccagaaau

SEQ ID NO: 2020630 - RNA, 19 nt, Homo sapiens
  misc_RNA (1)...(19): siRNA sense strand
gaagacaucauccggaaua

SEQ ID NO: 2020631 - RNA, 19 nt, Homo sapiens
  misc_RNA (1)...(19): siRNA sense strand
ccaagaagguggccaguca

SEQ ID NO: 2020632 - RNA, 19 nt, Homo sapiens
  misc_RNA (1)...(19): siRNA sense strand
ucacaaaccuacugguguu

SEQ ID NO: 2020633 - RNA, 19 nt, Homo sapiens
  misc_RNA (1)...(19): siRNA sense strand
acgaugagcugcagacuga

SEQ ID NO: 2020634 - RNA, 19 nt, Homo sapiens
  misc_RNA (1)...(19): siRNA sense strand
gacaucauccggaauauug

SEQ ID NO: 2020635 - RNA, 19 nt, Homo sapiens
  misc_RNA (1)...(19): siRNA sense strand
cuagagacauggagaagga

SEQ ID NO: 2020636 - RNA, 19 nt, Homo sapiens
  misc_RNA (1)...(19): siRNA sense strand
gugaggagcuuagccagaa

SEQ ID NO: 2020637 - RNA, 19 nt, Homo sapiens
  misc_RNA (1)...(19): siRNA sense strand
cuccaaagcuguucugaca

SEQ ID NO: 2020638 - RNA, 19 nt, Homo sapiens
  misc_RNA (1)...(19): siRNA sense strand
ccaaagcuguucugacaac

SEQ ID NO: 2020639 - RNA, 19 nt, Homo sapiens
  misc_RNA (1)...(19): siRNA sense strand
gcaccuacgugaggagcuu

SEQ ID NO: 2020640 - RNA, 19 nt, Homo sapiens
  misc_RNA (1)...(19): siRNA sense strand
ggaagaauagaggcagauu

SEQ ID NO: 2020641 - RNA, 19 nt, Homo sapiens
  misc_RNA (1)...(19): siRNA sense strand
ggccuacccuagagacaug

SEQ ID NO: 2020642 - RNA, 19 nt, Homo sapiens
  misc_RNA (1)...(19): siRNA sense strand
gaaagucaagaagacauca

SEQ ID NO: 2020643 - RNA, 19 nt, Homo sapiens
  misc_RNA (1)...(19): siRNA sense strand
guuccagccucagggauga

SEQ ID NO: 2020644 - RNA, 19 nt, Homo sapiens
  misc_RNA (1)...(19): siRNA sense strand
gaugagcugcagacugaug

SEQ ID NO: 2020645 - RNA, 19 nt, Homo sapiens
  misc_RNA (1)...(19): siRNA sense strand
ugaggagcuuagccagaaa

SEQ ID NO: 2020646 - RNA, 19 nt, Homo sapiens
  misc_RNA (1)...(19): siRNA sense strand
cuugcuccgugaugucuuu

SEQ ID NO: 2020647 - RNA, 19 nt, Homo sapiens
  misc_RNA (1)...(19): siRNA sense strand
gcugcaggccuacccuaga

SEQ ID NO: 2020648 - RNA, 19 nt, Homo sapiens
  misc_RNA (1)...(19): siRNA sense strand
gagacauggagaaggagaa

SEQ ID NO: 2020649 - RNA, 19 nt, Homo sapiens
  misc_RNA (1)...(19): siRNA sense strand
agacaucauccggaauauu

SEQ ID NO: 2020650 - RNA, 19 nt, Homo sapiens
  misc_RNA (1)...(19): siRNA sense strand
gaggagcuuagccagaaau

SEQ ID NO: 2020651 - RNA, 19 nt, Homo sapiens
  misc_RNA (1)...(19): siRNA sense strand
ugaugucuuucacacaaca

SEQ ID NO: 2020652 - RNA, 19 nt, Homo sapiens
  misc_RNA (1)...(19): siRNA sense strand
gaagacaucauccggaaua

SEQ ID NO: 2020653 - RNA, 19 nt, Homo sapiens
  misc_RNA (1)...(19): siRNA sense strand
ccaagaagguggccaguca

SEQ ID NO: 2020654 - RNA, 19 nt, Homo sapiens
  misc_RNA (1)...(19): siRNA sense strand
ucacaaaccuacugguguu

SEQ ID NO: 2020655 - RNA, 19 nt, Homo sapiens
  misc_RNA (1)...(19): siRNA sense strand
acgaugagcugcagacuga

SEQ ID NO: 2020656 - RNA, 19 nt, Homo sapiens
  misc_RNA (1)...(19): siRNA sense strand
gacaucauccggaauauug

SEQ ID NO: 2020657 - RNA, 19 nt, Homo sapiens
  misc_RNA (1)...(19): siRNA sense strand
cuagagacauggagaagga

SEQ ID NO: 2020658 - RNA, 19 nt, Homo sapiens
  misc_RNA (1)...(19): siRNA sense strand
gugaggagcuuagccagaa

SEQ ID NO: 2020659 - RNA, 19 nt, Homo sapiens
  misc_RNA (1)...(19): siRNA sense strand
cuccaaagcuguucugaca

SEQ ID NO: 2020660 - RNA, 19 nt, Homo sapiens
  misc_RNA (1)...(19): siRNA sense strand
ccaaagcuguucugacaac

SEQ ID NO: 2020661 - RNA, 19 nt, Homo sapiens
  misc_RNA (1)...(19): siRNA sense strand
gcaccuacgugaggagcuu

SEQ ID NO: 2020662 - RNA, 19 nt, Homo sapiens
  misc_RNA (1)...(19): siRNA sense strand
ggaagaauagaggcagauu

SEQ ID NO: 2020663 - RNA, 19 nt, Homo sapiens
  misc_RNA (1)...(19): siRNA sense strand
ggccuacccuagagacaug

SEQ ID NO: 2020664 - RNA, 19 nt, Homo sapiens
  misc_RNA (1)...(19): siRNA sense strand
gaaagucaagaagacauca

SEQ ID NO: 2020665 - RNA, 19 nt, Homo sapiens
  misc_RNA (1)...(19): siRNA sense strand
guuccagccucagggauga

SEQ ID NO: 2020666 - RNA, 19 nt, Homo sapiens
  misc_RNA (1)...(19): siRNA sense strand
gaugagcugcagacugaug

SEQ ID NO: 2020667 - RNA, 19 nt, Homo sapiens
  misc_RNA (1)...(19): siRNA sense strand
ugaggagcuuagccagaaa

SEQ ID NO: 2020668 - RNA, 19 nt, Homo sapiens
  misc_RNA (1)...(19): siRNA sense strand
cuugcuccgugaugucuuu

SEQ ID NO: 2020669 - RNA, 19 nt, Homo sapiens
  misc_RNA (1)...(19): siRNA sense strand
gcugcaggccuacccuaga

SEQ ID NO: 2020670 - RNA, 19 nt, Homo sapiens
  misc_RNA (1)...(19): siRNA sense strand
gagacauggagaaggagaa

SEQ ID NO: 2020671 - RNA, 19 nt, Homo sapiens
  misc_RNA (1)...(19): siRNA sense strand
agacaucauccggaauauu

SEQ ID NO: 2020672 - RNA, 19 nt, Homo sapiens
  misc_RNA (1)...(19): siRNA sense strand
gaggagcuuagccagaaau

SEQ ID NO: 2020673 - RNA, 19 nt, Homo sapiens
  misc_RNA (1)...(19): siRNA sense strand
ugaugucuuucacacaaca

SEQ ID NO: 2020674 - RNA, 19 nt, Homo sapiens
  misc_RNA (1)...(19): siRNA sense strand
ccaagaagguggccaguca

SEQ ID NO: 2020675 - RNA, 19 nt, Homo sapiens
  misc_RNA (1)...(19): siRNA sense strand
cuagagacauggagaagga

SEQ ID NO: 2020676 - RNA, 19 nt, Homo sapiens
  misc_RNA (1)...(19): siRNA sense strand
gugaggagcuuagccagaa

SEQ ID NO: 2020677 - RNA, 19 nt, Homo sapiens
  misc_RNA (1)...(19): siRNA sense strand
gcaccuacgugaggagcuu

SEQ ID NO: 2020678 - RNA, 19 nt, Homo sapiens
  misc_RNA (1)...(19): siRNA sense strand
ggccuacccuagagacaug

SEQ ID NO: 2020679 - RNA, 19 nt, Homo sapiens
  misc_RNA (1)...(19): siRNA sense strand
ugaggagcuuagccagaaa

SEQ ID NO: 2020680 - RNA, 19 nt, Homo sapiens
  misc_RNA (1)...(19): siRNA sense strand
cuugcuccgugaugucuuu

SEQ ID NO: 2020681 - RNA, 19 nt, Homo sapiens
  misc_RNA (1)...(19): siRNA sense strand
gagacauggagaaggagaa

SEQ ID NO: 2020682 - RNA, 19 nt, Homo sapiens
  misc_RNA (1)...(19): siRNA sense strand
gcugcaggccuacccuaga

SEQ ID NO: 2020683 - RNA, 19 nt, Homo sapiens
  misc_RNA (1)...(19): siRNA sense strand
ugaugucuuucacacaaca

SEQ ID NO: 2020684 - RNA, 19 nt, Homo sapiens
  misc_RNA (1)...(19): siRNA sense strand
gaggagcuuagccagaaau

SEQ ID NO: 2020685 - RNA, 19 nt, Homo sapiens
  misc_RNA (1)...(19): siRNA sense strand
gaagacaucauccggaaua

SEQ ID NO: 2020686 - RNA, 19 nt, Homo sapiens
  misc_RNA (1)...(19): siRNA sense strand
ccaagaagguggccaguca

SEQ ID NO: 2020687 - RNA, 19 nt, Homo sapiens
  misc_RNA (1)...(19): siRNA sense strand
ucacaaaccuacugguguu

SEQ ID NO: 2020688 - RNA, 19 nt, Homo sapiens
  misc_RNA (1)...(19): siRNA sense strand
acgaugagcugcagacuga

SEQ ID NO: 2020689 - RNA, 19 nt, Homo sapiens
  misc_RNA (1)...(19): siRNA sense strand
gacaucauccggaauauug

SEQ ID NO: 2020690 - RNA, 19 nt, Homo sapiens
  misc_RNA (1)...(19): siRNA sense strand
cuagagacauggagaagga

SEQ ID NO: 2020691 - RNA, 19 nt, Homo sapiens
  misc_RNA (1)...(19): siRNA sense strand
gugaggagcuuagccagaa

SEQ ID NO: 2020692 - RNA, 19 nt, Homo sapiens
  misc_RNA (1)...(19): siRNA sense strand
cuccaaagcuguucugaca

SEQ ID NO: 2020693 - RNA, 19 nt, Homo sapiens
  misc_RNA (1)...(19): siRNA sense strand
ccaaagcuguucugacaac

SEQ ID NO: 2020694 - RNA, 19 nt, Homo sapiens
  misc_RNA (1)...(19): siRNA sense strand
gcaccuacgugaggagcuu

SEQ ID NO: 2020695 - RNA, 19 nt, Homo sapiens
  misc_RNA (1)...(19): siRNA sense strand
ggaagaauagaggcagauu

SEQ ID NO: 2020696 - RNA, 19 nt, Homo sapiens
  misc_RNA (1)...(19): siRNA sense strand
ggccuacccuagagacaug

SEQ ID NO: 2020697 - RNA, 19 nt, Homo sapiens
  misc_RNA (1)...(19): siRNA sense strand
gaaagucaagaagacauca

SEQ ID NO: 2020698 - RNA, 19 nt, Homo sapiens
  misc_RNA (1)...(19): siRNA sense strand
guuccagccucagggauga

SEQ ID NO: 2020699 - RNA, 19 nt, Homo sapiens
  misc_RNA (1)...(19): siRNA sense strand
gaugagcugcagacugaug

SEQ ID NO: 2020700 - RNA, 19 nt, Homo sapiens
  misc_RNA (1)...(19): siRNA sense strand
ugaggagcuuagccagaaa

SEQ ID NO: 2020701 - RNA, 19 nt, Homo sapiens
  misc_RNA (1)...(19): siRNA sense strand
cuugcuccgugaugucuuu

SEQ ID NO: 2020702 - RNA, 19 nt, Homo sapiens
  misc_RNA (1)...(19): siRNA sense strand
gcugcaggccuacccuaga

SEQ ID NO: 2020703 - RNA, 19 nt, Homo sapiens
  misc_RNA (1)...(19): siRNA sense strand
gagacauggagaaggagaa

SEQ ID NO: 2020704 - RNA, 19 nt, Homo sapiens
  misc_RNA (1)...(19): siRNA sense strand
agacaucauccggaauauu

SEQ ID NO: 2020705 - RNA, 19 nt, Homo sapiens
  misc_RNA (1)...(19): siRNA sense strand
gaggagcuuagccagaaau

SEQ ID NO: 2020706 - RNA, 19 nt, Homo sapiens
  misc_RNA (1)...(19): siRNA sense strand
ugaugucuuucacacaaca

SEQ ID NO: 2020707 - RNA, 19 nt, Homo sapiens
  misc_RNA (1)...(19): siRNA sense strand
gaagacaucauccggaaua

SEQ ID NO: 2020708 - RNA, 19 nt, Homo sapiens
  misc_RNA (1)...(19): siRNA sense strand
ccaagaagguggccaguca

SEQ ID NO: 2020709 - RNA, 19 nt, Homo sapiens
  misc_RNA (1)...(19): siRNA sense strand
ucacaaaccuacugguguu

SEQ ID NO: 2020710 - RNA, 19 nt, Homo sapiens
  misc_RNA (1)...(19): siRNA sense strand
acgaugagcugcagacuga

SEQ ID NO: 2020711 - RNA, 19 nt, Homo sapiens
  misc_RNA (1)...(19): siRNA sense strand
gacaucauccggaauauug

SEQ ID NO: 2020712 - RNA, 19 nt, Homo sapiens
  misc_RNA (1)...(19): siRNA sense strand
cuagagacauggagaagga

SEQ ID NO: 2020713 - RNA, 19 nt, Homo sapiens
  misc_RNA (1)...(19): siRNA sense strand
gugaggagcuuagccagaa

SEQ ID NO: 2020714 - RNA, 19 nt, Homo sapiens
  misc_RNA (1)...(19): siRNA sense strand
cuccaaagcuguucugaca

SEQ ID NO: 2020715 - RNA, 19 nt, Homo sapiens
  misc_RNA (1)...(19): siRNA sense strand
ccaaagcuguucugacaac

SEQ ID NO: 2020716 - RNA, 19 nt, Homo sapiens
  misc_RNA (1)...(19): siRNA sense strand
gcaccuacgugaggagcuu

SEQ ID NO: 2020717 - RNA, 19 nt, Homo sapiens
  misc_RNA (1)...(19): siRNA sense strand
ggaagaauagaggcagauu

SEQ ID NO: 2020718 - RNA, 19 nt, Homo sapiens
  misc_RNA (1)...(19): siRNA sense strand
ggccuacccuagagacaug

SEQ ID NO: 2020719 - RNA, 19 nt, Homo sapiens
  misc_RNA (1)...(19): siRNA sense strand
gaaagucaagaagacauca

SEQ ID NO: 2020720 - RNA, 19 nt, Homo sapiens
  misc_RNA (1)...(19): siRNA sense strand
guuccagccucagggauga

SEQ ID NO: 2020721 - RNA, 19 nt, Homo sapiens
  misc_RNA (1)...(19): siRNA sense strand
gaugagcugcagacugaug

SEQ ID NO: 2020722 - RNA, 19 nt, Homo sapiens
  misc_RNA (1)...(19): siRNA sense strand
ugaggagcuuagccagaaa

SEQ ID NO: 2020723 - RNA, 19 nt, Homo sapiens
  misc_RNA (1)...(19): siRNA sense strand
cuugcuccgugaugucuuu

SEQ ID NO: 2020724 - RNA, 19 nt, Homo sapiens
  misc_RNA (1)...(19): siRNA sense strand
gcugcaggccuacccuaga

SEQ ID NO: 2020725 - RNA, 19 nt, Homo sapiens
  misc_RNA (1)...(19): siRNA sense strand
gagacauggagaaggagaa

SEQ ID NO: 2020726 - RNA, 19 nt, Homo sapiens
  misc_RNA (1)...(19): siRNA sense strand
agacaucauccggaauauu

SEQ ID NO: 2020727 - RNA, 19 nt, Homo sapiens
  misc_RNA (1)...(19): siRNA sense strand
gaggagcuuagccagaaau

SEQ ID NO: 2020728 - RNA, 19 nt, Homo sapiens
  misc_RNA (1)...(19): siRNA sense strand
ugaugucuuucacacaaca

SEQ ID NO: 2020729 - RNA, 19 nt, Homo sapiens
  misc_RNA (1)...(19): siRNA sense strand
ccaagaagguggccaguca

SEQ ID NO: 2020730 - RNA, 19 nt, Homo sapiens
  misc_RNA (1)...(19): siRNA sense strand
cuagagacauggagaagga

SEQ ID NO: 2020731 - RNA, 19 nt, Homo sapiens
  misc_RNA (1)...(19): siRNA sense strand
gugaggagcuuagccagaa

SEQ ID NO: 2020732 - RNA, 19 nt, Homo sapiens
  misc_RNA (1)...(19): siRNA sense strand
gcaccuacgugaggagcuu

SEQ ID NO: 2020733 - RNA, 19 nt, Homo sapiens
  misc_RNA (1)...(19): siRNA sense strand
ggccuacccuagagacaug

SEQ ID NO: 2020734 - RNA, 19 nt, Homo sapiens
  misc_RNA (1)...(19): siRNA sense strand
ugaggagcuuagccagaaa

SEQ ID NO: 2020735 - RNA, 19 nt, Homo sapiens
  misc_RNA (1)...(19): siRNA sense strand
cuugcuccgugaugucuuu

SEQ ID NO: 2020736 - RNA, 19 nt, Homo sapiens
  misc_RNA (1)...(19): siRNA sense strand
gagacauggagaaggagaa

SEQ ID NO: 2020737 - RNA, 19 nt, Homo sapiens
  misc_RNA (1)...(19): siRNA sense strand
gcugcaggccuacccuaga

SEQ ID NO: 2020738 - RNA, 19 nt, Homo sapiens
  misc_RNA (1)...(19): siRNA sense strand
ugaugucuuucacacaaca

SEQ ID NO: 2020739 - RNA, 19 nt, Homo sapiens
  misc_RNA (1)...(19): siRNA sense strand
gaggagcuuagccagaaau

SEQ ID NO: 2020740 - RNA, 19 nt, Homo sapiens
  misc_RNA (1)...(19): siRNA sense strand
caacauaucaccagguuua

SEQ ID NO: 2020741 - RNA, 19 nt, Homo sapiens
  misc_RNA (1)...(19): siRNA sense strand
gauaagaagcugaacauug

SEQ ID NO: 2020742 - RNA, 19 nt, Homo sapiens
  misc_RNA (1)...(19): siRNA sense strand
gaacagugaucccuaaucg

SEQ ID NO: 2020743 - RNA, 19 nt, Homo sapiens
  misc_RNA (1)...(19): siRNA sense strand
ugaaagaagugaagauugu

SEQ ID NO: 2020744 - RNA, 19 nt, Homo sapiens
  misc_RNA (1)...(19): siRNA sense strand
ggaacaauguaucuaacaa

SEQ ID NO: 2020745 - RNA, 19 nt, Homo sapiens
  misc_RNA (1)...(19): siRNA sense strand
caauguaucuaacaacuuc

SEQ ID NO: 2020746 - RNA, 19 nt, Homo sapiens
  misc_RNA (1)...(19): siRNA sense strand
ugacagagcuggaguaucc

SEQ ID NO: 2020747 - RNA, 19 nt, Homo sapiens
  misc_RNA (1)...(19): siRNA sense strand
ucaacuggauauccuuaua

SEQ ID NO: 2020748 - RNA, 19 nt, Homo sapiens
  misc_RNA (1)...(19): siRNA sense strand
gacaaacgaaagugauuua

SEQ ID NO: 2020749 - RNA, 19 nt, Homo sapiens
  misc_RNA (1)...(19): siRNA sense strand
uguggagcauucauuauua

SEQ ID NO: 2020750 - RNA, 19 nt, Homo sapiens
  misc_RNA (1)...(19): siRNA sense strand
cuggauauccuuauacuua

SEQ ID NO: 2020751 - RNA, 19 nt, Homo sapiens
  misc_RNA (1)...(19): siRNA sense strand
gguaugguuucgucacuuu

SEQ ID NO: 2020752 - RNA, 19 nt, Homo sapiens
  misc_RNA (1)...(19): siRNA sense strand
cuucugagguuauuuauca

SEQ ID NO: 2020753 - RNA, 19 nt, Homo sapiens
  misc_RNA (1)...(19): siRNA sense strand
auaagaagcugaacauugg

SEQ ID NO: 2020754 - RNA, 19 nt, Homo sapiens
  misc_RNA (1)...(19): siRNA sense strand
gaaagaagugaagauugua

SEQ ID NO: 2020755 - RNA, 19 nt, Homo sapiens
  misc_RNA (1)...(19): siRNA sense strand
guggagcauucauuauuaa

SEQ ID NO: 2020756 - RNA, 19 nt, Homo sapiens
  misc_RNA (1)...(19): siRNA sense strand
gaagugaagauuguaaaug

SEQ ID NO: 2020757 - RNA, 19 nt, Homo sapiens
  misc_RNA (1)...(19): siRNA sense strand
guaugggucugugaaagaa

SEQ ID NO: 2020758 - RNA, 19 nt, Homo sapiens
  misc_RNA (1)...(19): siRNA sense strand
caccugugccuuugaauaa

SEQ ID NO: 2020759 - RNA, 19 nt, Homo sapiens
  misc_RNA (1)...(19): siRNA sense strand
gaucauggaguucaagcaa

SEQ ID NO: 2020760 - RNA, 19 nt, Homo sapiens
  misc_RNA (1)...(19): siRNA sense strand
uagcucagcccauuuauca

SEQ ID NO: 2020761 - RNA, 19 nt, Homo sapiens
  misc_RNA (1)...(19): siRNA sense strand
gcuggaacaauguaucuaa

SEQ ID NO: 2020762 - RNA, 19 nt, Homo sapiens
  misc_RNA (1)...(19): siRNA sense strand
guauguagcuccccuguga

SEQ ID NO: 2020763 - RNA, 19 nt, Homo sapiens
  misc_RNA (1)...(19): siRNA sense strand
uaacaacuucaacuggaua

SEQ ID NO: 2020764 - RNA, 19 nt, Homo sapiens
  misc_RNA (1)...(19): siRNA sense strand
gaucccuaaucgcaucuuu

SEQ ID NO: 2020765 - RNA, 19 nt, Homo sapiens
  misc_RNA (1)...(19): siRNA sense strand
gaugcagccugagccaauu

SEQ ID NO: 2020766 - RNA, 19 nt, Homo sapiens
  misc_RNA (1)...(19): siRNA sense strand
gaucccucguucuaguaua

SEQ ID NO: 2020767 - RNA, 19 nt, Homo sapiens
  misc_RNA (1)...(19): siRNA sense strand
caacaagugccccaagaua

SEQ ID NO: 2020768 - RNA, 19 nt, Homo sapiens
  misc_RNA (1)...(19): siRNA sense strand
ucaccugugccuuugaaua

SEQ ID NO: 2020769 - RNA, 19 nt, Homo sapiens
  misc_RNA (1)...(19): siRNA sense strand
gaagauuguaaaugacaga

SEQ ID NO: 2020770 - RNA, 19 nt, Homo sapiens
  misc_RNA (1)...(19): siRNA sense strand
gaacaauguaucuaacaac

SEQ ID NO: 2020771 - RNA, 19 nt, Homo sapiens
  misc_RNA (1)...(19): siRNA sense strand
ccuaaucgcaucuuuguag

SEQ ID NO: 2020772 - RNA, 19 nt, Homo sapiens
  misc_RNA (1)...(19): siRNA sense strand
caguguggagcauucauua

SEQ ID NO: 2020773 - RNA, 19 nt, Homo sapiens
  misc_RNA (1)...(19): siRNA sense strand
guguggagcauucauuauu

SEQ ID NO: 2020774 - RNA, 19 nt, Homo sapiens
  misc_RNA (1)...(19): siRNA sense strand
gugaaagaagugaagauug

SEQ ID NO: 2020775 - RNA, 19 nt, Homo sapiens
  misc_RNA (1)...(19): siRNA sense strand
ucauggaguucaagcaaca

SEQ ID NO: 2020776 - RNA, 19 nt, Homo sapiens
  misc_RNA (1)...(19): siRNA sense strand
uugaauaacccaacaagug

SEQ ID NO: 2020777 - RNA, 19 nt, Homo sapiens
  misc_RNA (1)...(19): siRNA sense strand
caaacgaaagugauuuaag

SEQ ID NO: 2020778 - RNA, 19 nt, Homo sapiens
  misc_RNA (1)...(19): siRNA sense strand
ggccaccacacaguauuua

SEQ ID NO: 2020779 - RNA, 19 nt, Homo sapiens
  misc_RNA (1)...(19): siRNA sense strand
ggaacagugaucccuaauc

SEQ ID NO: 2020780 - RNA, 19 nt, Homo sapiens
  misc_RNA (1)...(19): siRNA sense strand
cuaacaacuucaacuggau

SEQ ID NO: 2020781 - RNA, 19 nt, Homo sapiens
  misc_RNA (1)...(19): siRNA sense strand
ggauaagaagcugaacauu

SEQ ID NO: 2020782 - RNA, 19 nt, Homo sapiens
  misc_RNA (1)...(19): siRNA sense strand
agacaaacgaaagugauuu

SEQ ID NO: 2020783 - RNA, 19 nt, Homo sapiens
  misc_RNA (1)...(19): siRNA sense strand
ggaguucaagcaacauauc

SEQ ID NO: 2020784 - RNA, 19 nt, Homo sapiens
  misc_RNA (1)...(19): siRNA sense strand
cuucugcuccauucuuaua

SEQ ID NO: 2020785 - RNA, 19 nt, Homo sapiens
  misc_RNA (1)...(19): siRNA sense strand
uaagacaaacgaaagugau

SEQ ID NO: 2020786 - RNA, 19 nt, Homo sapiens
  misc_RNA (1)...(19): siRNA sense strand
gggaucccucguucuagua

SEQ ID NO: 2020787 - RNA, 19 nt, Homo sapiens
  misc_RNA (1)...(19): siRNA sense strand
ugucaccugugccuuugaa

SEQ ID NO: 2020788 - RNA, 19 nt, Homo sapiens
  misc_RNA (1)...(19): siRNA sense strand
caacuggauauccuuauac

SEQ ID NO: 2020789 - RNA, 19 nt, Homo sapiens
  misc_RNA (1)...(19): siRNA sense strand
gccuucacguucuguaugu

SEQ ID NO: 2020790 - RNA, 19 nt, Homo sapiens
  misc_RNA (1)...(19): siRNA sense strand
ggaaauugcacaggauggu

SEQ ID NO: 2020791 - RNA, 19 nt, Homo sapiens
  misc_RNA (1)...(19): siRNA sense strand
uuaagacaaacgaaaguga

SEQ ID NO: 2020792 - RNA, 19 nt, Homo sapiens
  misc_RNA (1)...(19): siRNA sense strand
ugguagcucagcccauuua

SEQ ID NO: 2020793 - RNA, 19 nt, Homo sapiens
  misc_RNA (1)...(19): siRNA sense strand
agcaacauaucaccagguu

SEQ ID NO: 2020794 - RNA, 19 nt, Homo sapiens
  misc_RNA (1)...(19): siRNA sense strand
caagauauggaacagugau

SEQ ID NO: 2020795 - RNA, 19 nt, Homo sapiens
  misc_RNA (1)...(19): siRNA sense strand
ccagguuuaugcuccaagu

SEQ ID NO: 2020796 - RNA, 19 nt, Homo sapiens
  misc_RNA (1)...(19): siRNA sense strand
ccaguaugggucugugaaa

SEQ ID NO: 2020797 - RNA, 19 nt, Homo sapiens
  misc_RNA (1)...(19): siRNA sense strand
gaguucaagcaacauauca

SEQ ID NO: 2020798 - RNA, 19 nt, Homo sapiens
  misc_RNA (1)...(19): siRNA sense strand
auggaacagugaucccuaa

SEQ ID NO: 2020799 - RNA, 19 nt, Homo sapiens
  misc_RNA (1)...(19): siRNA sense strand
acaggaugguggauguguu

SEQ ID NO: 2020800 - RNA, 19 nt, Homo sapiens
  misc_RNA (1)...(19): siRNA sense strand
uaucaaccaguggaaauug

SEQ ID NO: 2020801 - RNA, 19 nt, Homo sapiens
  misc_RNA (1)...(19): siRNA sense strand
uauccaaaggguaugguuu

SEQ ID NO: 2020802 - RNA, 19 nt, Homo sapiens
  misc_RNA (1)...(19): siRNA sense strand
gugaagauuguaaaugaca

SEQ ID NO: 2020803 - RNA, 19 nt, Homo sapiens
  misc_RNA (1)...(19): siRNA sense strand
cucuucugcuccauucuua

SEQ ID NO: 2020804 - RNA, 19 nt, Homo sapiens
  misc_RNA (1)...(19): siRNA sense strand
ugugaaagaagugaagauu

SEQ ID NO: 2020805 - RNA, 19 nt, Homo sapiens
  misc_RNA (1)...(19): siRNA sense strand
cuucaguuccagagccuua

SEQ ID NO: 2020806 - RNA, 19 nt, Homo sapiens
  misc_RNA (1)...(19): siRNA sense strand
uaucuaacaacuucaacug

SEQ ID NO: 2020807 - RNA, 19 nt, Homo sapiens
  misc_RNA (1)...(19): siRNA sense strand
aagacaaacgaaagugauu

SEQ ID NO: 2020808 - RNA, 19 nt, Homo sapiens
  misc_RNA (1)...(19): siRNA sense strand
caguggcaguggaguguuc

SEQ ID NO: 2020809 - RNA, 19 nt, Homo sapiens
  misc_RNA (1)...(19): siRNA sense strand
gguguugcuuauuuucaua

SEQ ID NO: 2020810 - RNA, 19 nt, Homo sapiens
  misc_RNA (1)...(19): siRNA sense strand
uggauauccuuauacuuac

SEQ ID NO: 2020811 - RNA, 19 nt, Homo sapiens
  misc_RNA (1)...(19): siRNA sense strand
cuucaacuggauauccuua

SEQ ID NO: 2020812 - RNA, 19 nt, Homo sapiens
  misc_RNA (1)...(19): siRNA sense strand
ggguaugguuucgucacuu

SEQ ID NO: 2020813 - RNA, 19 nt, Homo sapiens
  misc_RNA (1)...(19): siRNA sense strand
gcaauaagaaaacaacaag

SEQ ID NO: 2020814 - RNA, 19 nt, Homo sapiens
  misc_RNA (1)...(19): siRNA sense strand
gcaacauaucaccagguuu

SEQ ID NO: 2020815 - RNA, 19 nt, Homo sapiens
  misc_RNA (1)...(19): siRNA sense strand
guaggaggaauugauuuua

SEQ ID NO: 2020816 - RNA, 19 nt, Homo sapiens
  misc_RNA (1)...(19): siRNA sense strand
gccuuauucugaucaugga

SEQ ID NO: 2020817 - RNA, 19 nt, Homo sapiens
  misc_RNA (1)...(19): siRNA sense strand
ugucucugauggaaacuuc

SEQ ID NO: 2020818 - RNA, 19 nt, Homo sapiens
  misc_RNA (1)...(19): siRNA sense strand
caguaugggucugugaaag

SEQ ID NO: 2020819 - RNA, 19 nt, Homo sapiens
  misc_RNA (1)...(19): siRNA sense strand
gcaaccugcauaucacuac

SEQ ID NO: 2020820 - RNA, 19 nt, Homo sapiens
  misc_RNA (1)...(19): siRNA sense strand
ucagcaaccugcauaucac

SEQ ID NO: 2020821 - RNA, 19 nt, Homo sapiens
  misc_RNA (1)...(19): siRNA sense strand
ugaaacacaagaagaugca

SEQ ID NO: 2020822 - RNA, 19 nt, Homo sapiens
  misc_RNA (1)...(19): siRNA sense strand
gacaguggcaguggagugu

SEQ ID NO: 2020823 - RNA, 19 nt, Homo sapiens
  misc_RNA (1)...(19): siRNA sense strand
gcagcuggaacaauguauc

SEQ ID NO: 2020824 - RNA, 19 nt, Homo sapiens
  misc_RNA (1)...(19): siRNA sense strand
aucccucguucuaguauaa

SEQ ID NO: 2020825 - RNA, 19 nt, Homo sapiens
  misc_RNA (1)...(19): siRNA sense strand
ggaucccucguucuaguau

SEQ ID NO: 2020826 - RNA, 19 nt, Homo sapiens
  misc_RNA (1)...(19): siRNA sense strand
caacauaucaccagguuua

SEQ ID NO: 2020827 - RNA, 19 nt, Homo sapiens
  misc_RNA (1)...(19): siRNA sense strand
gauaagaagcugaacauug

SEQ ID NO: 2020828 - RNA, 19 nt, Homo sapiens
  misc_RNA (1)...(19): siRNA sense strand
gaacagugaucccuaaucg

SEQ ID NO: 2020829 - RNA, 19 nt, Homo sapiens
  misc_RNA (1)...(19): siRNA sense strand
ugaaagaagugaagauugu

SEQ ID NO: 2020830 - RNA, 19 nt, Homo sapiens
  misc_RNA (1)...(19): siRNA sense strand
ggaacaauguaucuaacaa

SEQ ID NO: 2020831 - RNA, 19 nt, Homo sapiens
  misc_RNA (1)...(19): siRNA sense strand
gaugcaaacagauucauua

SEQ ID NO: 2020832 - RNA, 19 nt, Homo sapiens
  misc_RNA (1)...(19): siRNA sense strand
caaaccagaugcaaacaga

SEQ ID NO: 2020833 - RNA, 19 nt, Homo sapiens
  misc_RNA (1)...(19): siRNA sense strand
caauguaucuaacaacuuc

SEQ ID NO: 2020834 - RNA, 19 nt, Homo sapiens
  misc_RNA (1)...(19): siRNA sense strand
ugacagagcuggaguaucc

SEQ ID NO: 2020835 - RNA, 19 nt, Homo sapiens
  misc_RNA (1)...(19): siRNA sense strand
ucaacuggauauccuuaua

SEQ ID NO: 2020836 - RNA, 19 nt, Homo sapiens
  misc_RNA (1)...(19): siRNA sense strand
gacaaacgaaagugauuua

SEQ ID NO: 2020837 - RNA, 19 nt, Homo sapiens
  misc_RNA (1)...(19): siRNA sense strand
uguggagcauucauuauua

SEQ ID NO: 2020838 - RNA, 19 nt, Homo sapiens
  misc_RNA (1)...(19): siRNA sense strand
cuggauauccuuauacuua

SEQ ID NO: 2020839 - RNA, 19 nt, Homo sapiens
  misc_RNA (1)...(19): siRNA sense strand
gguaugguuucgucacuuu

SEQ ID NO: 2020840 - RNA, 19 nt, Homo sapiens
  misc_RNA (1)...(19): siRNA sense strand
cuucugagguuauuuauca

SEQ ID NO: 2020841 - RNA, 19 nt, Homo sapiens
  misc_RNA (1)...(19): siRNA sense strand
auaagaagcugaacauugg

SEQ ID NO: 2020842 - RNA, 19 nt, Homo sapiens
  misc_RNA (1)...(19): siRNA sense strand
gaaagaagugaagauugua

SEQ ID NO: 2020843 - RNA, 19 nt, Homo sapiens
  misc_RNA (1)...(19): siRNA sense strand
guggagcauucauuauuaa

SEQ ID NO: 2020844 - RNA, 19 nt, Homo sapiens
  misc_RNA (1)...(19): siRNA sense strand
gaagugaagauuguaaaug

SEQ ID NO: 2020845 - RNA, 19 nt, Homo sapiens
  misc_RNA (1)...(19): siRNA sense strand
guaugggucugugaaagaa

SEQ ID NO: 2020846 - RNA, 19 nt, Homo sapiens
  misc_RNA (1)...(19): siRNA sense strand
caccugugccuuugaauaa

SEQ ID NO: 2020847 - RNA, 19 nt, Homo sapiens
  misc_RNA (1)...(19): siRNA sense strand
gaucauggaguucaagcaa

SEQ ID NO: 2020848 - RNA, 19 nt, Homo sapiens
  misc_RNA (1)...(19): siRNA sense strand
uagcucagcccauuuauca

SEQ ID NO: 2020849 - RNA, 19 nt, Homo sapiens
  misc_RNA (1)...(19): siRNA sense strand
gcuggaacaauguaucuaa

SEQ ID NO: 2020850 - RNA, 19 nt, Homo sapiens
  misc_RNA (1)...(19): siRNA sense strand
guauguagcuccccuguga

SEQ ID NO: 2020851 - RNA, 19 nt, Homo sapiens
  misc_RNA (1)...(19): siRNA sense strand
uaacaacuucaacuggaua

SEQ ID NO: 2020852 - RNA, 19 nt, Homo sapiens
  misc_RNA (1)...(19): siRNA sense strand
gaucccuaaucgcaucuuu

SEQ ID NO: 2020853 - RNA, 19 nt, Homo sapiens
  misc_RNA (1)...(19): siRNA sense strand
gaugcagccugagccaauu

SEQ ID NO: 2020854 - RNA, 19 nt, Homo sapiens
  misc_RNA (1)...(19): siRNA sense strand
gaucccucguucuaguaua

SEQ ID NO: 2020855 - RNA, 19 nt, Homo sapiens
  misc_RNA (1)...(19): siRNA sense strand
caacaagugccccaagaua

SEQ ID NO: 2020856 - RNA, 19 nt, Homo sapiens
  misc_RNA (1)...(19): siRNA sense strand
ucaccugugccuuugaaua

SEQ ID NO: 2020857 - RNA, 19 nt, Homo sapiens
  misc_RNA (1)...(19): siRNA sense strand
gaagauuguaaaugacaga

SEQ ID NO: 2020858 - RNA, 19 nt, Homo sapiens
  misc_RNA (1)...(19): siRNA sense strand
gaacaauguaucuaacaac

SEQ ID NO: 2020859 - RNA, 19 nt, Homo sapiens
  misc_RNA (1)...(19): siRNA sense strand
ccuaaucgcaucuuuguag

SEQ ID NO: 2020860 - RNA, 19 nt, Homo sapiens
  misc_RNA (1)...(19): siRNA sense strand
caguguggagcauucauua

SEQ ID NO: 2020861 - RNA, 19 nt, Homo sapiens
  misc_RNA (1)...(19): siRNA sense strand
guguggagcauucauuauu

SEQ ID NO: 2020862 - RNA, 19 nt, Homo sapiens
  misc_RNA (1)...(19): siRNA sense strand
gugaaagaagugaagauug

SEQ ID NO: 2020863 - RNA, 19 nt, Homo sapiens
  misc_RNA (1)...(19): siRNA sense strand
ucauggaguucaagcaaca

SEQ ID NO: 2020864 - RNA, 19 nt, Homo sapiens
  misc_RNA (1)...(19): siRNA sense strand
uugaauaacccaacaagug

SEQ ID NO: 2020865 - RNA, 19 nt, Homo sapiens
  misc_RNA (1)...(19): siRNA sense strand
caaacgaaagugauuuaag

SEQ ID NO: 2020866 - RNA, 19 nt, Homo sapiens
  misc_RNA (1)...(19): siRNA sense strand
ggccaccacacaguauuua

SEQ ID NO: 2020867 - RNA, 19 nt, Homo sapiens
  misc_RNA (1)...(19): siRNA sense strand
ggaacagugaucccuaauc

SEQ ID NO: 2020868 - RNA, 19 nt, Homo sapiens
  misc_RNA (1)...(19): siRNA sense strand
cuaacaacuucaacuggau

SEQ ID NO: 2020869 - RNA, 19 nt, Homo sapiens
  misc_RNA (1)...(19): siRNA sense strand
ggauaagaagcugaacauu

SEQ ID NO: 2020870 - RNA, 19 nt, Homo sapiens
  misc_RNA (1)...(19): siRNA sense strand
agacaaacgaaagugauuu

SEQ ID NO: 2020871 - RNA, 19 nt, Homo sapiens
  misc_RNA (1)...(19): siRNA sense strand
ggaguucaagcaacauauc

SEQ ID NO: 2020872 - RNA, 19 nt, Homo sapiens
  misc_RNA (1)...(19): siRNA sense strand
cuucugcuccauucuuaua

SEQ ID NO: 2020873 - RNA, 19 nt, Homo sapiens
  misc_RNA (1)...(19): siRNA sense strand
uaagacaaacgaaagugau

SEQ ID NO: 2020874 - RNA, 19 nt, Homo sapiens
  misc_RNA (1)...(19): siRNA sense strand
gggaucccucguucuagua

SEQ ID NO: 2020875 - RNA, 19 nt, Homo sapiens
  misc_RNA (1)...(19): siRNA sense strand
ugucaccugugccuuugaa

SEQ ID NO: 2020876 - RNA, 19 nt, Homo sapiens
  misc_RNA (1)...(19): siRNA sense strand
caacuggauauccuuauac

SEQ ID NO: 2020877 - RNA, 19 nt, Homo sapiens
  misc_RNA (1)...(19): siRNA sense strand
gccuucacguucuguaugu

SEQ ID NO: 2020878 - RNA, 19 nt, Homo sapiens
  misc_RNA (1)...(19): siRNA sense strand
ggaaauugcacaggauggu

SEQ ID NO: 2020879 - RNA, 19 nt, Homo sapiens
  misc_RNA (1)...(19): siRNA sense strand
uuaagacaaacgaaaguga

SEQ ID NO: 2020880 - RNA, 19 nt, Homo sapiens
  misc_RNA (1)...(19): siRNA sense strand
ugguagcucagcccauuua

SEQ ID NO: 2020881 - RNA, 19 nt, Homo sapiens
  misc_RNA (1)...(19): siRNA sense strand
caagauauggaacagugau

SEQ ID NO: 2020882 - RNA, 19 nt, Homo sapiens
  misc_RNA (1)...(19): siRNA sense strand
ccagguuuaugcuccaagu

SEQ ID NO: 2020883 - RNA, 19 nt, Homo sapiens
  misc_RNA (1)...(19): siRNA sense strand
agcaacauaucaccagguu

SEQ ID NO: 2020884 - RNA, 19 nt, Homo sapiens
  misc_RNA (1)...(19): siRNA sense strand
auggaacagugaucccuaa

SEQ ID NO: 2020885 - RNA, 19 nt, Homo sapiens
  misc_RNA (1)...(19): siRNA sense strand
gaguucaagcaacauauca

SEQ ID NO: 2020886 - RNA, 19 nt, Homo sapiens
  misc_RNA (1)...(19): siRNA sense strand
acaggaugguggauguguu

SEQ ID NO: 2020887 - RNA, 19 nt, Homo sapiens
  misc_RNA (1)...(19): siRNA sense strand
uaucaaccaguggaaauug

SEQ ID NO: 2020888 - RNA, 19 nt, Homo sapiens
  misc_RNA (1)...(19): siRNA sense strand
uauccaaaggguaugguuu

SEQ ID NO: 2020889 - RNA, 19 nt, Homo sapiens
  misc_RNA (1)...(19): siRNA sense strand
gugaagauuguaaaugaca

SEQ ID NO: 2020890 - RNA, 19 nt, Homo sapiens
  misc_RNA (1)...(19): siRNA sense strand
ccaguaugggucugugaaa

SEQ ID NO: 2020891 - RNA, 19 nt, Homo sapiens
  misc_RNA (1)...(19): siRNA sense strand
cucuucugcuccauucuua

SEQ ID NO: 2020892 - RNA, 19 nt, Homo sapiens
  misc_RNA (1)...(19): siRNA sense strand
aaccagaugcaaacagauu

SEQ ID NO: 2020893 - RNA, 19 nt, Homo sapiens
  misc_RNA (1)...(19): siRNA sense strand
ugugaaagaagugaagauu

SEQ ID NO: 2020894 - RNA, 19 nt, Homo sapiens
  misc_RNA (1)...(19): siRNA sense strand
cuucaguuccagagccuua

SEQ ID NO: 2020895 - RNA, 19 nt, Homo sapiens
  misc_RNA (1)...(19): siRNA sense strand
uaucuaacaacuucaacug

SEQ ID NO: 2020896 - RNA, 19 nt, Homo sapiens
  misc_RNA (1)...(19): siRNA sense strand
aagacaaacgaaagugauu

SEQ ID NO: 2020897 - RNA, 19 nt, Homo sapiens
  misc_RNA (1)...(19): siRNA sense strand
caguggcaguggaguguuc

SEQ ID NO: 2020898 - RNA, 19 nt, Homo sapiens
  misc_RNA (1)...(19): siRNA sense strand
gguguugcuuauuuucaua

SEQ ID NO: 2020899 - RNA, 19 nt, Homo sapiens
  misc_RNA (1)...(19): siRNA sense strand
uggauauccuuauacuuac

SEQ ID NO: 2020900 - RNA, 19 nt, Homo sapiens
  misc_RNA (1)...(19): siRNA sense strand
cuucaacuggauauccuua

SEQ ID NO: 2020901 - RNA, 19 nt, Homo sapiens
  misc_RNA (1)...(19): siRNA sense strand
ggguaugguuucgucacuu

SEQ ID NO: 2020902 - RNA, 19 nt, Homo sapiens
  misc_RNA (1)...(19): siRNA sense strand
gcaauaagaaaacaacaag

SEQ ID NO: 2020903 - RNA, 19 nt, Homo sapiens
  misc_RNA (1)...(19): siRNA sense strand
gcaacauaucaccagguuu

SEQ ID NO: 2020904 - RNA, 19 nt, Homo sapiens
  misc_RNA (1)...(19): siRNA sense strand
gccuuauucugaucaugga

SEQ ID NO: 2020905 - RNA, 19 nt, Homo sapiens
  misc_RNA (1)...(19): siRNA sense strand
guaggaggaauugauuuua

SEQ ID NO: 2020906 - RNA, 19 nt, Homo sapiens
  misc_RNA (1)...(19): siRNA sense strand
ugucucugauggaaacuuc

SEQ ID NO: 2020907 - RNA, 19 nt, Homo sapiens
  misc_RNA (1)...(19): siRNA sense strand
caguaugggucugugaaag

SEQ ID NO: 2020908 - RNA, 19 nt, Homo sapiens
  misc_RNA (1)...(19): siRNA sense strand
gcaaccugcauaucacuac

SEQ ID NO: 2020909 - RNA, 19 nt, Homo sapiens
  misc_RNA (1)...(19): siRNA sense strand
ucagcaaccugcauaucac

SEQ ID NO: 2020910 - RNA, 19 nt, Homo sapiens
  misc_RNA (1)...(19): siRNA sense strand
ugaaacacaagaagaugca

SEQ ID NO: 2020911 - RNA, 19 nt, Homo sapiens
  misc_RNA (1)...(19): siRNA sense strand
gacaguggcaguggagugu

SEQ ID NO: 2020912 - RNA, 19 nt, Homo sapiens
  misc_RNA (1)...(19): siRNA sense strand
gcagcuggaacaauguauc

SEQ ID NO: 2020913 - RNA, 19 nt, Homo sapiens
  misc_RNA (1)...(19): siRNA sense strand
aucccucguucuaguauaa

SEQ ID NO: 2020914 - RNA, 19 nt, Homo sapiens
  misc_RNA (1)...(19): siRNA sense strand
ggaucccucguucuaguau

SEQ ID NO: 2020915 - RNA, 19 nt, Homo sapiens
  misc_RNA (1)...(19): siRNA sense strand
caacauaucaccagguuua

SEQ ID NO: 2020916 - RNA, 19 nt, Homo sapiens
  misc_RNA (1)...(19): siRNA sense strand
gauaagaagcugaacauug

SEQ ID NO: 2020917 - RNA, 19 nt, Homo sapiens
  misc_RNA (1)...(19): siRNA sense strand
gaacagugaucccuaaucg

SEQ ID NO: 2020918 - RNA, 19 nt, Homo sapiens
  misc_RNA (1)...(19): siRNA sense strand
ugaaagaagugaagauugu

SEQ ID NO: 2020919 - RNA, 19 nt, Homo sapiens
  misc_RNA (1)...(19): siRNA sense strand
ggaacaauguaucuaacaa

SEQ ID NO: 2020920 - RNA, 19 nt, Homo sapiens
  misc_RNA (1)...(19): siRNA sense strand
caauguaucuaacaacuuc

SEQ ID NO: 2020921 - RNA, 19 nt, Homo sapiens
  misc_RNA (1)...(19): siRNA sense strand
ugacagagcuggaguaucc

SEQ ID NO: 2020922 - RNA, 19 nt, Homo sapiens
  misc_RNA (1)...(19): siRNA sense strand
ucaacuggauauccuuaua

SEQ ID NO: 2020923 - RNA, 19 nt, Homo sapiens
  misc_RNA (1)...(19): siRNA sense strand
gacaaacgaaagugauuua

SEQ ID NO: 2020924 - RNA, 19 nt, Homo sapiens
  misc_RNA (1)...(19): siRNA sense strand
uguggagcauucauuauua

SEQ ID NO: 2020925 - RNA, 19 nt, Homo sapiens
  misc_RNA (1)...(19): siRNA sense strand
cuggauauccuuauacuua

SEQ ID NO: 2020926 - RNA, 19 nt, Homo sapiens
  misc_RNA (1)...(19): siRNA sense strand
gguaugguuucgucacuuu

SEQ ID NO: 2020927 - RNA, 19 nt, Homo sapiens
  misc_RNA (1)...(19): siRNA sense strand
cuucugagguuauuuauca

SEQ ID NO: 2020928 - RNA, 19 nt, Homo sapiens
  misc_RNA (1)...(19): siRNA sense strand
auaagaagcugaacauugg

SEQ ID NO: 2020929 - RNA, 19 nt, Homo sapiens
  misc_RNA (1)...(19): siRNA sense strand
gaaagaagugaagauugua

SEQ ID NO: 2020930 - RNA, 19 nt, Homo sapiens
  misc_RNA (1)...(19): siRNA sense strand
guggagcauucauuauuaa

SEQ ID NO: 2020931 - RNA, 19 nt, Homo sapiens
  misc_RNA (1)...(19): siRNA sense strand
gaagugaagauuguaaaug

SEQ ID NO: 2020932 - RNA, 19 nt, Homo sapiens
  misc_RNA (1)...(19): siRNA sense strand
guaugggucugugaaagaa

SEQ ID NO: 2020933 - RNA, 19 nt, Homo sapiens
  misc_RNA (1)...(19): siRNA sense strand
caccugugccuuugaauaa

SEQ ID NO: 2020934 - RNA, 19 nt, Homo sapiens
  misc_RNA (1)...(19): siRNA sense strand
gaucauggaguucaagcaa

SEQ ID NO: 2020935 - RNA, 19 nt, Homo sapiens
  misc_RNA (1)...(19): siRNA sense strand
uagcucagcccauuuauca

SEQ ID NO: 2020936 - RNA, 19 nt, Homo sapiens
  misc_RNA (1)...(19): siRNA sense strand
gcuggaacaauguaucuaa

SEQ ID NO: 2020937 - RNA, 19 nt, Homo sapiens
  misc_RNA (1)...(19): siRNA sense strand
guauguagcuccccuguga

SEQ ID NO: 2020938 - RNA, 19 nt, Homo sapiens
  misc_RNA (1)...(19): siRNA sense strand
uaacaacuucaacuggaua

SEQ ID NO: 2020939 - RNA, 19 nt, Homo sapiens
  misc_RNA (1)...(19): siRNA sense strand
gaucccuaaucgcaucuuu

SEQ ID NO: 2020940 - RNA, 19 nt, Homo sapiens
  misc_RNA (1)...(19): siRNA sense strand
gaugcagccugagccaauu

SEQ ID NO: 2020941 - RNA, 19 nt, Homo sapiens
  misc_RNA (1)...(19): siRNA sense strand
gaucccucguucuaguaua

SEQ ID NO: 2020942 - RNA, 19 nt, Homo sapiens
  misc_RNA (1)...(19): siRNA sense strand
caacaagugccccaagaua

SEQ ID NO: 2020943 - RNA, 19 nt, Homo sapiens
  misc_RNA (1)...(19): siRNA sense strand
ucaccugugccuuugaaua

SEQ ID NO: 2020944 - RNA, 19 nt, Homo sapiens
  misc_RNA (1)...(19): siRNA sense strand
gaagauuguaaaugacaga

SEQ ID NO: 2020945 - RNA, 19 nt, Homo sapiens
  misc_RNA (1)...(19): siRNA sense strand
gaacaauguaucuaacaac

SEQ ID NO: 2020946 - RNA, 19 nt, Homo sapiens
  misc_RNA (1)...(19): siRNA sense strand
ccuaaucgcaucuuuguag

SEQ ID NO: 2020947 - RNA, 19 nt, Homo sapiens
  misc_RNA (1)...(19): siRNA sense strand
caguguggagcauucauua

SEQ ID NO: 2020948 - RNA, 19 nt, Homo sapiens
  misc_RNA (1)...(19): siRNA sense strand
guguggagcauucauuauu

SEQ ID NO: 2020949 - RNA, 19 nt, Homo sapiens
  misc_RNA (1)...(19): siRNA sense strand
gugaaagaagugaagauug

SEQ ID NO: 2020950 - RNA, 19 nt, Homo sapiens
  misc_RNA (1)...(19): siRNA sense strand
ucauggaguucaagcaaca

SEQ ID NO: 2020951 - RNA, 19 nt, Homo sapiens
  misc_RNA (1)...(19): siRNA sense strand
uugaauaacccaacaagug

SEQ ID NO: 2020952 - RNA, 19 nt, Homo sapiens
  misc_RNA (1)...(19): siRNA sense strand
caaacgaaagugauuuaag

SEQ ID NO: 2020953 - RNA, 19 nt, Homo sapiens
  misc_RNA (1)...(19): siRNA sense strand
ggccaccacacaguauuua

SEQ ID NO: 2020954 - RNA, 19 nt, Homo sapiens
  misc_RNA (1)...(19): siRNA sense strand
ggaacagugaucccuaauc

SEQ ID NO: 2020955 - RNA, 19 nt, Homo sapiens
  misc_RNA (1)...(19): siRNA sense strand
cuaacaacuucaacuggau

SEQ ID NO: 2020956 - RNA, 19 nt, Homo sapiens
  misc_RNA (1)...(19): siRNA sense strand
ggauaagaagcugaacauu

SEQ ID NO: 2020957 - RNA, 19 nt, Homo sapiens
  misc_RNA (1)...(19): siRNA sense strand
agacaaacgaaagugauuu

SEQ ID NO: 2020958 - RNA, 19 nt, Homo sapiens
  misc_RNA (1)...(19): siRNA sense strand
ggaguucaagcaacauauc

SEQ ID NO: 2020959 - RNA, 19 nt, Homo sapiens
  misc_RNA (1)...(19): siRNA sense strand
cuucugcuccauucuuaua

SEQ ID NO: 2020960 - RNA, 19 nt, Homo sapiens
  misc_RNA (1)...(19): siRNA sense strand
uaagacaaacgaaagugau

SEQ ID NO: 2020961 - RNA, 19 nt, Homo sapiens
  misc_RNA (1)...(19): siRNA sense strand
gggaucccucguucuagua

SEQ ID NO: 2020962 - RNA, 19 nt, Homo sapiens
  misc_RNA (1)...(19): siRNA sense strand
ugucaccugugccuuugaa

SEQ ID NO: 2020963 - RNA, 19 nt, Homo sapiens
  misc_RNA (1)...(19): siRNA sense strand
caacuggauauccuuauac

SEQ ID NO: 2020964 - RNA, 19 nt, Homo sapiens
  misc_RNA (1)...(19): siRNA sense strand
gccuucacguucuguaugu

SEQ ID NO: 2020965 - RNA, 19 nt, Homo sapiens
  misc_RNA (1)...(19): siRNA sense strand
ggaaauugcacaggauggu

SEQ ID NO: 2020966 - RNA, 19 nt, Homo sapiens
  misc_RNA (1)...(19): siRNA sense strand
uuaagacaaacgaaaguga

SEQ ID NO: 2020967 - RNA, 19 nt, Homo sapiens
  misc_RNA (1)...(19): siRNA sense strand
ugguagcucagcccauuua

SEQ ID NO: 2020968 - RNA, 19 nt, Homo sapiens
  misc_RNA (1)...(19): siRNA sense strand
agcaacauaucaccagguu

SEQ ID NO: 2020969 - RNA, 19 nt, Homo sapiens
  misc_RNA (1)...(19): siRNA sense strand
caagauauggaacagugau

SEQ ID NO: 2020970 - RNA, 19 nt, Homo sapiens
  misc_RNA (1)...(19): siRNA sense strand
ccagguuuaugcuccaagu

SEQ ID NO: 2020971 - RNA, 19 nt, Homo sapiens
  misc_RNA (1)...(19): siRNA sense strand
ccaguaugggucugugaaa

SEQ ID NO: 2020972 - RNA, 19 nt, Homo sapiens
  misc_RNA (1)...(19): siRNA sense strand
gaguucaagcaacauauca

SEQ ID NO: 2020973 - RNA, 19 nt, Homo sapiens
  misc_RNA (1)...(19): siRNA sense strand
auggaacagugaucccuaa

SEQ ID NO: 2020974 - RNA, 19 nt, Homo sapiens
  misc_RNA (1)...(19): siRNA sense strand
acaggaugguggauguguu

SEQ ID NO: 2020975 - RNA, 19 nt, Homo sapiens
  misc_RNA (1)...(19): siRNA sense strand
uaucaaccaguggaaauug

SEQ ID NO: 2020976 - RNA, 19 nt, Homo sapiens
  misc_RNA (1)...(19): siRNA sense strand
uauccaaaggguaugguuu

SEQ ID NO: 2020977 - RNA, 19 nt, Homo sapiens
  misc_RNA (1)...(19): siRNA sense strand
gugaagauuguaaaugaca

SEQ ID NO: 2020978 - RNA, 19 nt, Homo sapiens
  misc_RNA (1)...(19): siRNA sense strand
cucuucugcuccauucuua

SEQ ID NO: 2020979 - RNA, 19 nt, Homo sapiens
  misc_RNA (1)...(19): siRNA sense strand
ugugaaagaagugaagauu

SEQ ID NO: 2020980 - RNA, 19 nt, Homo sapiens
  misc_RNA (1)...(19): siRNA sense strand
cuucaguuccagagccuua

SEQ ID NO: 2020981 - RNA, 19 nt, Homo sapiens
  misc_RNA (1)...(19): siRNA sense strand
uaucuaacaacuucaacug

SEQ ID NO: 2020982 - RNA, 19 nt, Homo sapiens
  misc_RNA (1)...(19): siRNA sense strand
aagacaaacgaaagugauu

SEQ ID NO: 2020983 - RNA, 19 nt, Homo sapiens
  misc_RNA (1)...(19): siRNA sense strand
caguggcaguggaguguuc

SEQ ID NO: 2020984 - RNA, 19 nt, Homo sapiens
  misc_RNA (1)...(19): siRNA sense strand
gguguugcuuauuuucaua

SEQ ID NO: 2020985 - RNA, 19 nt, Homo sapiens
  misc_RNA (1)...(19): siRNA sense strand
uggauauccuuauacuuac

SEQ ID NO: 2020986 - RNA, 19 nt, Homo sapiens
  misc_RNA (1)...(19): siRNA sense strand
cuucaacuggauauccuua

SEQ ID NO: 2020987 - RNA, 19 nt, Homo sapiens
  misc_RNA (1)...(19): siRNA sense strand
ggguaugguuucgucacuu

SEQ ID NO: 2020988 - RNA, 19 nt, Homo sapiens
  misc_RNA (1)...(19): siRNA sense strand
gcaauaagaaaacaacaag

SEQ ID NO: 2020989 - RNA, 19 nt, Homo sapiens
  misc_RNA (1)...(19): siRNA sense strand
gcaacauaucaccagguuu

SEQ ID NO: 2020990 - RNA, 19 nt, Homo sapiens
  misc_RNA (1)...(19): siRNA sense strand
guaggaggaauugauuuua

SEQ ID NO: 2020991 - RNA, 19 nt, Homo sapiens
  misc_RNA (1)...(19): siRNA sense strand
gccuuauucugaucaugga

SEQ ID NO: 2020992 - RNA, 19 nt, Homo sapiens
  misc_RNA (1)...(19): siRNA sense strand
ugucucugauggaaacuuc

SEQ ID NO: 2020993 - RNA, 19 nt, Homo sapiens
  misc_RNA (1)...(19): siRNA sense strand
caguaugggucugugaaag

SEQ ID NO: 2020994 - RNA, 19 nt, Homo sapiens
  misc_RNA (1)...(19): siRNA sense strand
gcaaccugcauaucacuac

SEQ ID NO: 2020995 - RNA, 19 nt, Homo sapiens
  misc_RNA (1)...(19): siRNA sense strand
ucagcaaccugcauaucac

SEQ ID NO: 2020996 - RNA, 19 nt, Homo sapiens
  misc_RNA (1)...(19): siRNA sense strand
ugaaacacaagaagaugca

SEQ ID NO: 2020997 - RNA, 19 nt, Homo sapiens
  misc_RNA (1)...(19): siRNA sense strand
gacaguggcaguggagugu

SEQ ID NO: 2020998 - RNA, 19 nt, Homo sapiens
  misc_RNA (1)...(19): siRNA sense strand
gcagcuggaacaauguauc

SEQ ID NO: 2020999 - RNA, 19 nt, Homo sapiens
  misc_RNA (1)...(19): siRNA sense strand
aucccucguucuaguauaa

SEQ ID NO: 2021000 - RNA, 19 nt, Homo sapiens
  misc_RNA (1)...(19): siRNA sense strand
ggaucccucguucuaguau

SEQ ID NO: 2021001 - RNA, 19 nt, Homo sapiens
  misc_RNA (1)...(19): siRNA sense strand
caacauaucaccagguuua

SEQ ID NO: 2021002 - RNA, 19 nt, Homo sapiens
  misc_RNA (1)...(19): siRNA sense strand
gauaagaagcugaacauug

SEQ ID NO: 2021003 - RNA, 19 nt, Homo sapiens
  misc_RNA (1)...(19): siRNA sense strand
gaacagugaucccuaaucg

SEQ ID NO: 2021004 - RNA, 19 nt, Homo sapiens
  misc_RNA (1)...(19): siRNA sense strand
ugaaagaagugaagauugu

SEQ ID NO: 2021005 - RNA, 19 nt, Homo sapiens
  misc_RNA (1)...(19): siRNA sense strand
ggaacaauguaucuaacaa

SEQ ID NO: 2021006 - RNA, 19 nt, Homo sapiens
  misc_RNA (1)...(19): siRNA sense strand
gaugcaaacagauucauua

SEQ ID NO: 2021007 - RNA, 19 nt, Homo sapiens
  misc_RNA (1)...(19): siRNA sense strand
caaaccagaugcaaacaga

SEQ ID NO: 2021008 - RNA, 19 nt, Homo sapiens
  misc_RNA (1)...(19): siRNA sense strand
caauguaucuaacaacuuc

SEQ ID NO: 2021009 - RNA, 19 nt, Homo sapiens
  misc_RNA (1)...(19): siRNA sense strand
ugacagagcuggaguaucc

SEQ ID NO: 2021010 - RNA, 19 nt, Homo sapiens
  misc_RNA (1)...(19): siRNA sense strand
ucaacuggauauccuuaua

SEQ ID NO: 2021011 - RNA, 19 nt, Homo sapiens
  misc_RNA (1)...(19): siRNA sense strand
gacaaacgaaagugauuua

SEQ ID NO: 2021012 - RNA, 19 nt, Homo sapiens
  misc_RNA (1)...(19): siRNA sense strand
uguggagcauucauuauua

SEQ ID NO: 2021013 - RNA, 19 nt, Homo sapiens
  misc_RNA (1)...(19): siRNA sense strand
cuggauauccuuauacuua

SEQ ID NO: 2021014 - RNA, 19 nt, Homo sapiens
  misc_RNA (1)...(19): siRNA sense strand
gguaugguuucgucacuuu

SEQ ID NO: 2021015 - RNA, 19 nt, Homo sapiens
  misc_RNA (1)...(19): siRNA sense strand
cuucugagguuauuuauca

SEQ ID NO: 2021016 - RNA, 19 nt, Homo sapiens
  misc_RNA (1)...(19): siRNA sense strand
auaagaagcugaacauugg

SEQ ID NO: 2021017 - RNA, 19 nt, Homo sapiens
  misc_RNA (1)...(19): siRNA sense strand
gaaagaagugaagauugua

SEQ ID NO: 2021018 - RNA, 19 nt, Homo sapiens
  misc_RNA (1)...(19): siRNA sense strand
guggagcauucauuauuaa

SEQ ID NO: 2021019 - RNA, 19 nt, Homo sapiens
  misc_RNA (1)...(19): siRNA sense strand
gaagugaagauuguaaaug

SEQ ID NO: 2021020 - RNA, 19 nt, Homo sapiens
  misc_RNA (1)...(19): siRNA sense strand
guaugggucugugaaagaa

SEQ ID NO: 2021021 - RNA, 19 nt, Homo sapiens
  misc_RNA (1)...(19): siRNA sense strand
caccugugccuuugaauaa

SEQ ID NO: 2021022 - RNA, 19 nt, Homo sapiens
  misc_RNA (1)...(19): siRNA sense strand
gaucauggaguucaagcaa

SEQ ID NO: 2021023 - RNA, 19 nt, Homo sapiens
  misc_RNA (1)...(19): siRNA sense strand
uagcucagcccauuuauca

SEQ ID NO: 2021024 - RNA, 19 nt, Homo sapiens
  misc_RNA (1)...(19): siRNA sense strand
gcuggaacaauguaucuaa

SEQ ID NO: 2021025 - RNA, 19 nt, Homo sapiens
  misc_RNA (1)...(19): siRNA sense strand
guauguagcuccccuguga

SEQ ID NO: 2021026 - RNA, 19 nt, Homo sapiens
  misc_RNA (1)...(19): siRNA sense strand
uaacaacuucaacuggaua

SEQ ID NO: 2021027 - RNA, 19 nt, Homo sapiens
  misc_RNA (1)...(19): siRNA sense strand
gaucccuaaucgcaucuuu

SEQ ID NO: 2021028 - RNA, 19 nt, Homo sapiens
  misc_RNA (1)...(19): siRNA sense strand
gaugcagccugagccaauu

SEQ ID NO: 2021029 - RNA, 19 nt, Homo sapiens
  misc_RNA (1)...(19): siRNA sense strand
gaucccucguucuaguaua

SEQ ID NO: 2021030 - RNA, 19 nt, Homo sapiens
  misc_RNA (1)...(19): siRNA sense strand
caacaagugccccaagaua

SEQ ID NO: 2021031 - RNA, 19 nt, Homo sapiens
  misc_RNA (1)...(19): siRNA sense strand
ucaccugugccuuugaaua

SEQ ID NO: 2021032 - RNA, 19 nt, Homo sapiens
  misc_RNA (1)...(19): siRNA sense strand
gaagauuguaaaugacaga

SEQ ID NO: 2021033 - RNA, 19 nt, Homo sapiens
  misc_RNA (1)...(19): siRNA sense strand
gaacaauguaucuaacaac

SEQ ID NO: 2021034 - RNA, 19 nt, Homo sapiens
  misc_RNA (1)...(19): siRNA sense strand
ccuaaucgcaucuuuguag

SEQ ID NO: 2021035 - RNA, 19 nt, Homo sapiens
  misc_RNA (1)...(19): siRNA sense strand
caguguggagcauucauua

SEQ ID NO: 2021036 - RNA, 19 nt, Homo sapiens
  misc_RNA (1)...(19): siRNA sense strand
guguggagcauucauuauu

SEQ ID NO: 2021037 - RNA, 19 nt, Homo sapiens
  misc_RNA (1)...(19): siRNA sense strand
gugaaagaagugaagauug

SEQ ID NO: 2021038 - RNA, 19 nt, Homo sapiens
  misc_RNA (1)...(19): siRNA sense strand
ucauggaguucaagcaaca

SEQ ID NO: 2021039 - RNA, 19 nt, Homo sapiens
  misc_RNA (1)...(19): siRNA sense strand
uugaauaacccaacaagug

SEQ ID NO: 2021040 - RNA, 19 nt, Homo sapiens
  misc_RNA (1)...(19): siRNA sense strand
caaacgaaagugauuuaag

SEQ ID NO: 2021041 - RNA, 19 nt, Homo sapiens
  misc_RNA (1)...(19): siRNA sense strand
ggccaccacacaguauuua

SEQ ID NO: 2021042 - RNA, 19 nt, Homo sapiens
  misc_RNA (1)...(19): siRNA sense strand
ggaacagugaucccuaauc

SEQ ID NO: 2021043 - RNA, 19 nt, Homo sapiens
  misc_RNA (1)...(19): siRNA sense strand
cuaacaacuucaacuggau

SEQ ID NO: 2021044 - RNA, 19 nt, Homo sapiens
  misc_RNA (1)...(19): siRNA sense strand
ggauaagaagcugaacauu

SEQ ID NO: 2021045 - RNA, 19 nt, Homo sapiens
  misc_RNA (1)...(19): siRNA sense strand
agacaaacgaaagugauuu

SEQ ID NO: 2021046 - RNA, 19 nt, Homo sapiens
  misc_RNA (1)...(19): siRNA sense strand
ggaguucaagcaacauauc

SEQ ID NO: 2021047 - RNA, 19 nt, Homo sapiens
  misc_RNA (1)...(19): siRNA sense strand
cuucugcuccauucuuaua

SEQ ID NO: 2021048 - RNA, 19 nt, Homo sapiens
  misc_RNA (1)...(19): siRNA sense strand
uaagacaaacgaaagugau

SEQ ID NO: 2021049 - RNA, 19 nt, Homo sapiens
  misc_RNA (1)...(19): siRNA sense strand
gggaucccucguucuagua

SEQ ID NO: 2021050 - RNA, 19 nt, Homo sapiens
  misc_RNA (1)...(19): siRNA sense strand
ugucaccugugccuuugaa

SEQ ID NO: 2021051 - RNA, 19 nt, Homo sapiens
  misc_RNA (1)...(19): siRNA sense strand
caacuggauauccuuauac

SEQ ID NO: 2021052 - RNA, 19 nt, Homo sapiens
  misc_RNA (1)...(19): siRNA sense strand
gccuucacguucuguaugu

SEQ ID NO: 2021053 - RNA, 19 nt, Homo sapiens
  misc_RNA (1)...(19): siRNA sense strand
ggaaauugcacaggauggu

SEQ ID NO: 2021054 - RNA, 19 nt, Homo sapiens
  misc_RNA (1)...(19): siRNA sense strand
uuaagacaaacgaaaguga

SEQ ID NO: 2021055 - RNA, 19 nt, Homo sapiens
  misc_RNA (1)...(19): siRNA sense strand
ugguagcucagcccauuua

SEQ ID NO: 2021056 - RNA, 19 nt, Homo sapiens
  misc_RNA (1)...(19): siRNA sense strand
caagauauggaacagugau

SEQ ID NO: 2021057 - RNA, 19 nt, Homo sapiens
  misc_RNA (1)...(19): siRNA sense strand
ccagguuuaugcuccaagu

SEQ ID NO: 2021058 - RNA, 19 nt, Homo sapiens
  misc_RNA (1)...(19): siRNA sense strand
agcaacauaucaccagguu

SEQ ID NO: 2021059 - RNA, 19 nt, Homo sapiens
  misc_RNA (1)...(19): siRNA sense strand
auggaacagugaucccuaa

SEQ ID NO: 2021060 - RNA, 19 nt, Homo sapiens
  misc_RNA (1)...(19): siRNA sense strand
gaguucaagcaacauauca

SEQ ID NO: 2021061 - RNA, 19 nt, Homo sapiens
  misc_RNA (1)...(19): siRNA sense strand
acaggaugguggauguguu

SEQ ID NO: 2021062 - RNA, 19 nt, Homo sapiens
  misc_RNA (1)...(19): siRNA sense strand
uaucaaccaguggaaauug

SEQ ID NO: 2021063 - RNA, 19 nt, Homo sapiens
  misc_RNA (1)...(19): siRNA sense strand
uauccaaaggguaugguuu

SEQ ID NO: 2021064 - RNA, 19 nt, Homo sapiens
  misc_RNA (1)...(19): siRNA sense strand
gugaagauuguaaaugaca

SEQ ID NO: 2021065 - RNA, 19 nt, Homo sapiens
  misc_RNA (1)...(19): siRNA sense strand
ccaguaugggucugugaaa

SEQ ID NO: 2021066 - RNA, 19 nt, Homo sapiens
  misc_RNA (1)...(19): siRNA sense strand
cucuucugcuccauucuua

SEQ ID NO: 2021067 - RNA, 19 nt, Homo sapiens
  misc_RNA (1)...(19): siRNA sense strand
aaccagaugcaaacagauu

SEQ ID NO: 2021068 - RNA, 19 nt, Homo sapiens
  misc_RNA (1)...(19): siRNA sense strand
ugugaaagaagugaagauu

SEQ ID NO: 2021069 - RNA, 19 nt, Homo sapiens
  misc_RNA (1)...(19): siRNA sense strand
cuucaguuccagagccuua

SEQ ID NO: 2021070 - RNA, 19 nt, Homo sapiens
  misc_RNA (1)...(19): siRNA sense strand
uaucuaacaacuucaacug

SEQ ID NO: 2021071 - RNA, 19 nt, Homo sapiens
  misc_RNA (1)...(19): siRNA sense strand
aagacaaacgaaagugauu

SEQ ID NO: 2021072 - RNA, 19 nt, Homo sapiens
  misc_RNA (1)...(19): siRNA sense strand
caguggcaguggaguguuc

SEQ ID NO: 2021073 - RNA, 19 nt, Homo sapiens
  misc_RNA (1)...(19): siRNA sense strand
gguguugcuuauuuucaua

SEQ ID NO: 2021074 - RNA, 19 nt, Homo sapiens
  misc_RNA (1)...(19): siRNA sense strand
uggauauccuuauacuuac

SEQ ID NO: 2021075 - RNA, 19 nt, Homo sapiens
  misc_RNA (1)...(19): siRNA sense strand
cuucaacuggauauccuua

SEQ ID NO: 2021076 - RNA, 19 nt, Homo sapiens
  misc_RNA (1)...(19): siRNA sense strand
ggguaugguuucgucacuu

SEQ ID NO: 2021077 - RNA, 19 nt, Homo sapiens
  misc_RNA (1)...(19): siRNA sense strand
gcaauaagaaaacaacaag

SEQ ID NO: 2021078 - RNA, 19 nt, Homo sapiens
  misc_RNA (1)...(19): siRNA sense strand
gcaacauaucaccagguuu

SEQ ID NO: 2021079 - RNA, 19 nt, Homo sapiens
  misc_RNA (1)...(19): siRNA sense strand
gccuuauucugaucaugga

SEQ ID NO: 2021080 - RNA, 19 nt, Homo sapiens
  misc_RNA (1)...(19): siRNA sense strand
guaggaggaauugauuuua

SEQ ID NO: 2021081 - RNA, 19 nt, Homo sapiens
  misc_RNA (1)...(19): siRNA sense strand
ugucucugauggaaacuuc

SEQ ID NO: 2021082 - RNA, 19 nt, Homo sapiens
  misc_RNA (1)...(19): siRNA sense strand
caguaugggucugugaaag

SEQ ID NO: 2021083 - RNA, 19 nt, Homo sapiens
  misc_RNA (1)...(19): siRNA sense strand
gcaaccugcauaucacuac

SEQ ID NO: 2021084 - RNA, 19 nt, Homo sapiens
  misc_RNA (1)...(19): siRNA sense strand
ucagcaaccugcauaucac

SEQ ID NO: 2021085 - RNA, 19 nt, Homo sapiens
  misc_RNA (1)...(19): siRNA sense strand
ugaaacacaagaagaugca

SEQ ID NO: 2021086 - RNA, 19 nt, Homo sapiens
  misc_RNA (1)...(19): siRNA sense strand
gacaguggcaguggagugu

SEQ ID NO: 2021087 - RNA, 19 nt, Homo sapiens
  misc_RNA (1)...(19): siRNA sense strand
gcagcuggaacaauguauc

SEQ ID NO: 2021088 - RNA, 19 nt, Homo sapiens
  misc_RNA (1)...(19): siRNA sense strand
aucccucguucuaguauaa

SEQ ID NO: 2021089 - RNA, 19 nt, Homo sapiens
  misc_RNA (1)...(19): siRNA sense strand
ggaucccucguucuaguau

SEQ ID NO: 2021090 - RNA, 19 nt, Homo sapiens
  misc_RNA (1)...(19): siRNA sense strand
gcagggaacuugccacuuu

SEQ ID NO: 2021091 - RNA, 19 nt, Homo sapiens
  misc_RNA (1)...(19): siRNA sense strand
ucagaaaggugacacaauu

SEQ ID NO: 2021092 - RNA, 19 nt, Homo sapiens
  misc_RNA (1)...(19): siRNA sense strand
agaaagaggugauaaagga

SEQ ID NO: 2021093 - RNA, 19 nt, Homo sapiens
  misc_RNA (1)...(19): siRNA sense strand
gcagcugccuggaagauuu

SEQ ID NO: 2021094 - RNA, 19 nt, Homo sapiens
  misc_RNA (1)...(19): siRNA sense strand
agagaaagcucacaaucaa

SEQ ID NO: 2021095 - RNA, 19 nt, Homo sapiens
  misc_RNA (1)...(19): siRNA sense strand
gaaagcagacuugcaguuu

SEQ ID NO: 2021096 - RNA, 19 nt, Homo sapiens
  misc_RNA (1)...(19): siRNA sense strand
uaagaggguucauugguuu

SEQ ID NO: 2021097 - RNA, 19 nt, Homo sapiens
  misc_RNA (1)...(19): siRNA sense strand
gcaaauaaguauagcuucu

SEQ ID NO: 2021098 - RNA, 19 nt, Homo sapiens
  misc_RNA (1)...(19): siRNA sense strand
uaaaggugcuucagguuug

SEQ ID NO: 2021099 - RNA, 19 nt, Homo sapiens
  misc_RNA (1)...(19): siRNA sense strand
gaaauacauugguccuugu

SEQ ID NO: 2021100 - RNA, 19 nt, Homo sapiens
  misc_RNA (1)...(19): siRNA sense strand
gcagggaccacauggauuu

SEQ ID NO: 2021101 - RNA, 19 nt, Homo sapiens
  misc_RNA (1)...(19): siRNA sense strand
caacugguguuccuggauu

SEQ ID NO: 2021102 - RNA, 19 nt, Homo sapiens
  misc_RNA (1)...(19): siRNA sense strand
ugacaugguuguaucaaga

SEQ ID NO: 2021103 - RNA, 19 nt, Homo sapiens
  misc_RNA (1)...(19): siRNA sense strand
gcaagaggaccuaaaggaa

SEQ ID NO: 2021104 - RNA, 19 nt, Homo sapiens
  misc_RNA (1)...(19): siRNA sense strand
ggauggacaugcuggagaa

SEQ ID NO: 2021105 - RNA, 19 nt, Homo sapiens
  misc_RNA (1)...(19): siRNA sense strand
ggagaaagagguccugaug

SEQ ID NO: 2021106 - RNA, 19 nt, Homo sapiens
  misc_RNA (1)...(19): siRNA sense strand
caagaggaccuaaaggaaa

SEQ ID NO: 2021107 - RNA, 19 nt, Homo sapiens
  misc_RNA (1)...(19): siRNA sense strand
cacaauuucuugcaacgua

SEQ ID NO: 2021108 - RNA, 19 nt, Homo sapiens
  misc_RNA (1)...(19): siRNA sense strand
gggagaaccuggagagaag

SEQ ID NO: 2021109 - RNA, 19 nt, Homo sapiens
  misc_RNA (1)...(19): siRNA sense strand
cuaagaggguucauugguu

SEQ ID NO: 2021110 - RNA, 19 nt, Homo sapiens
  misc_RNA (1)...(19): siRNA sense strand
cuaaugaggugcuccuuca

SEQ ID NO: 2021111 - RNA, 19 nt, Homo sapiens
  misc_RNA (1)...(19): siRNA sense strand
gugauauacuguaguguug

SEQ ID NO: 2021112 - RNA, 19 nt, Homo sapiens
  misc_RNA (1)...(19): siRNA sense strand
gggcuugccugguauucaa

SEQ ID NO: 2021113 - RNA, 19 nt, Homo sapiens
  misc_RNA (1)...(19): siRNA sense strand
ggucuaagaggguucauug

SEQ ID NO: 2021114 - RNA, 19 nt, Homo sapiens
  misc_RNA (1)...(19): siRNA sense strand
gggaauaccugggcuaaaa

SEQ ID NO: 2021115 - RNA, 19 nt, Homo sapiens
  misc_RNA (1)...(19): siRNA sense strand
ccagacaccuuaaaagaaa

SEQ ID NO: 2021116 - RNA, 19 nt, Homo sapiens
  misc_RNA (1)...(19): siRNA sense strand
caagggagaaucugguauu

SEQ ID NO: 2021117 - RNA, 19 nt, Homo sapiens
  misc_RNA (1)...(19): siRNA sense strand
gagcagcaccauuccuuga

SEQ ID NO: 2021118 - RNA, 19 nt, Homo sapiens
  misc_RNA (1)...(19): siRNA sense strand
gaggugcuccuucagauug

SEQ ID NO: 2021119 - RNA, 19 nt, Homo sapiens
  misc_RNA (1)...(19): siRNA sense strand
gaaagaggugauaaaggaa

SEQ ID NO: 2021120 - RNA, 19 nt, Homo sapiens
  misc_RNA (1)...(19): siRNA sense strand
aagaggugcuccagggaua

SEQ ID NO: 2021121 - RNA, 19 nt, Homo sapiens
  misc_RNA (1)...(19): siRNA sense strand
agagggacaugcuggguuu

SEQ ID NO: 2021122 - RNA, 19 nt, Homo sapiens
  misc_RNA (1)...(19): siRNA sense strand
ggagaaagaggugauaaag

SEQ ID NO: 2021123 - RNA, 19 nt, Homo sapiens
  misc_RNA (1)...(19): siRNA sense strand
gaacggcuugcauggauug

SEQ ID NO: 2021124 - RNA, 19 nt, Homo sapiens
  misc_RNA (1)...(19): siRNA sense strand
gguagagccaccugacuuu

SEQ ID NO: 2021125 - RNA, 19 nt, Homo sapiens
  misc_RNA (1)...(19): siRNA sense strand
ggcgaagggugacaugguu

SEQ ID NO: 2021126 - RNA, 19 nt, Homo sapiens
  misc_RNA (1)...(19): siRNA sense strand
caagugugauauacuguag

SEQ ID NO: 2021127 - RNA, 19 nt, Homo sapiens
  misc_RNA (1)...(19): siRNA sense strand
cggcuugcauggauugaaa

SEQ ID NO: 2021128 - RNA, 19 nt, Homo sapiens
  misc_RNA (1)...(19): siRNA sense strand
ggagauaaggguccaacug

SEQ ID NO: 2021129 - RNA, 19 nt, Homo sapiens
  misc_RNA (1)...(19): siRNA sense strand
cuaaaggugcuucagguuu

SEQ ID NO: 2021130 - RNA, 19 nt, Homo sapiens
  misc_RNA (1)...(19): siRNA sense strand
aggcaaaccugguaugagu

SEQ ID NO: 2021131 - RNA, 19 nt, Homo sapiens
  misc_RNA (1)...(19): siRNA sense strand
cagcuggcauuccuggauu

SEQ ID NO: 2021132 - RNA, 19 nt, Homo sapiens
  misc_RNA (1)...(19): siRNA sense strand
caagagaaagcucacaauc

SEQ ID NO: 2021133 - RNA, 19 nt, Homo sapiens
  misc_RNA (1)...(19): siRNA sense strand
ggucagaaaggaacuaaag

SEQ ID NO: 2021134 - RNA, 19 nt, Homo sapiens
  misc_RNA (1)...(19): siRNA sense strand
aggcucaacuggucuaaga

SEQ ID NO: 2021135 - RNA, 19 nt, Homo sapiens
  misc_RNA (1)...(19): siRNA sense strand
cagaaaggugacacaauuu

SEQ ID NO: 2021136 - RNA, 19 nt, Homo sapiens
  misc_RNA (1)...(19): siRNA sense strand
gcaagagaaagcucacaau

SEQ ID NO: 2021137 - RNA, 19 nt, Homo sapiens
  misc_RNA (1)...(19): siRNA sense strand
uggcauuccuggauuccua

SEQ ID NO: 2021138 - RNA, 19 nt, Homo sapiens
  misc_RNA (1)...(19): siRNA sense strand
gggagacccugcauuuggu

SEQ ID NO: 2021139 - RNA, 19 nt, Homo sapiens
  misc_RNA (1)...(19): siRNA sense strand
agaaagcucacaaucaaga

SEQ ID NO: 2021140 - RNA, 19 nt, Homo sapiens
  misc_RNA (1)...(19): siRNA sense strand
cgggccagcuggaaugaaa

SEQ ID NO: 2021141 - RNA, 19 nt, Homo sapiens
  misc_RNA (1)...(19): siRNA sense strand
aaaaggaaauucaguguuc

SEQ ID NO: 2021142 - RNA, 19 nt, Homo sapiens
  misc_RNA (1)...(19): siRNA sense strand
gacccacccuguugguaga

SEQ ID NO: 2021143 - RNA, 19 nt, Homo sapiens
  misc_RNA (1)...(19): siRNA sense strand
cggcaggucccacaggaua

SEQ ID NO: 2021144 - RNA, 19 nt, Homo sapiens
  misc_RNA (1)...(19): siRNA sense strand
gaaaaggguauaaaaggaa

SEQ ID NO: 2021145 - RNA, 19 nt, Homo sapiens
  misc_RNA (1)...(19): siRNA sense strand
ccaggucccuuuggagaug

SEQ ID NO: 2021146 - RNA, 19 nt, Homo sapiens
  misc_RNA (1)...(19): siRNA sense strand
acaauuucuugcaacguaa

SEQ ID NO: 2021147 - RNA, 19 nt, Homo sapiens
  misc_RNA (1)...(19): siRNA sense strand
augguuguaucaagaguua

SEQ ID NO: 2021148 - RNA, 19 nt, Homo sapiens
  misc_RNA (1)...(19): siRNA sense strand
ggagauccugggcuauuug

SEQ ID NO: 2021149 - RNA, 19 nt, Homo sapiens
  misc_RNA (1)...(19): siRNA sense strand
uggaaaagauggccagaaa

SEQ ID NO: 2021150 - RNA, 19 nt, Homo sapiens
  misc_RNA (1)...(19): siRNA sense strand
caccaggcccuccaggaua

SEQ ID NO: 2021151 - RNA, 19 nt, Homo sapiens
  misc_RNA (1)...(19): siRNA sense strand
ggagcaagaggaccuaaag

SEQ ID NO: 2021152 - RNA, 19 nt, Homo sapiens
  misc_RNA (1)...(19): siRNA sense strand
auacggaccaccuggauuu

SEQ ID NO: 2021153 - RNA, 19 nt, Homo sapiens
  misc_RNA (1)...(19): siRNA sense strand
ucccggagaugaaggagaa

SEQ ID NO: 2021154 - RNA, 19 nt, Homo sapiens
  misc_RNA (1)...(19): siRNA sense strand
ggaauaaaaggcaaaguug

SEQ ID NO: 2021155 - RNA, 19 nt, Homo sapiens
  misc_RNA (1)...(19): siRNA sense strand
ggaccuaaaggaaacaaag

SEQ ID NO: 2021156 - RNA, 19 nt, Homo sapiens
  misc_RNA (1)...(19): siRNA sense strand
ucacuuauacucauucucu

SEQ ID NO: 2021157 - RNA, 19 nt, Homo sapiens
  misc_RNA (1)...(19): siRNA sense strand
gaaggagaaauggcuauca

SEQ ID NO: 2021158 - RNA, 19 nt, Homo sapiens
  misc_RNA (1)...(19): siRNA sense strand
ggccaaaggagccauagga

SEQ ID NO: 2021159 - RNA, 19 nt, Homo sapiens
  misc_RNA (1)...(19): siRNA sense strand
uggaccaccuggcaacaaa

SEQ ID NO: 2021160 - RNA, 19 nt, Homo sapiens
  misc_RNA (1)...(19): siRNA sense strand
gcucuggacuggguauagu

SEQ ID NO: 2021161 - RNA, 19 nt, Homo sapiens
  misc_RNA (1)...(19): siRNA sense strand
uggagauccugggcuauuu

SEQ ID NO: 2021162 - RNA, 19 nt, Homo sapiens
  misc_RNA (1)...(19): siRNA sense strand
gaaacgacagauccuacug

SEQ ID NO: 2021163 - RNA, 19 nt, Homo sapiens
  misc_RNA (1)...(19): siRNA sense strand
aagagaaagcucacaauca

SEQ ID NO: 2021164 - RNA, 19 nt, Homo sapiens
  misc_RNA (1)...(19): siRNA sense strand
caugagaggaccagaagga

SEQ ID NO: 2021165 - RNA, 19 nt, Homo sapiens
  misc_RNA (1)...(19): siRNA sense strand
gagaaagaggugauaaagg

SEQ ID NO: 2021166 - RNA, 19 nt, Homo sapiens
  misc_RNA (1)...(19): siRNA sense strand
aggagugaauggucagaaa

SEQ ID NO: 2021167 - RNA, 19 nt, Homo sapiens
  misc_RNA (1)...(19): siRNA sense strand
gaagggugacaugguugua

SEQ ID NO: 2021168 - RNA, 19 nt, Homo sapiens
  misc_RNA (1)...(19): siRNA sense strand
ugggcuauuuggauuaauu

SEQ ID NO: 2021169 - RNA, 19 nt, Homo sapiens
  misc_RNA (1)...(19): siRNA sense strand
ucaagugugauauacugua

SEQ ID NO: 2021170 - RNA, 19 nt, Homo sapiens
  misc_RNA (1)...(19): siRNA sense strand
aggaauugauggagcaaga

SEQ ID NO: 2021171 - RNA, 19 nt, Homo sapiens
  misc_RNA (1)...(19): siRNA sense strand
gcauggcccuccagguuuu

SEQ ID NO: 2021172 - RNA, 19 nt, Homo sapiens
  misc_RNA (1)...(19): siRNA sense strand
gguaugaguggccacaaug

SEQ ID NO: 2021173 - RNA, 19 nt, Homo sapiens
  misc_RNA (1)...(19): siRNA sense strand
ugaugccacucucugaaga

SEQ ID NO: 2021174 - RNA, 19 nt, Homo sapiens
  misc_RNA (1)...(19): siRNA sense strand
gggauguccuggcgcaaag

SEQ ID NO: 2021175 - RNA, 19 nt, Homo sapiens
  misc_RNA (1)...(19): siRNA sense strand
ggcauggcccuccagguuu

SEQ ID NO: 2021176 - RNA, 19 nt, Homo sapiens
  misc_RNA (1)...(19): siRNA sense strand
gguuguaucaagaguuaaa

SEQ ID NO: 2021177 - RNA, 19 nt, Homo sapiens
  misc_RNA (1)...(19): siRNA sense strand
cuccaccucuuccacuuaa

SEQ ID NO: 2021178 - RNA, 19 nt, Homo sapiens
  misc_RNA (1)...(19): siRNA sense strand
guccagguuugaagggaaa

SEQ ID NO: 2021179 - RNA, 19 nt, Homo sapiens
  misc_RNA (1)...(19): siRNA sense strand
ugaaagcagacuugcaguu

SEQ ID NO: 2021180 - RNA, 19 nt, Homo sapiens
  misc_RNA (1)...(19): siRNA sense strand
gguauucauuccugaugca

SEQ ID NO: 2021181 - RNA, 19 nt, Homo sapiens
  misc_RNA (1)...(19): siRNA sense strand
cugaacggcuugcauggau

SEQ ID NO: 2021182 - RNA, 19 nt, Homo sapiens
  misc_RNA (1)...(19): siRNA sense strand
ccaaagggugagccaggua

SEQ ID NO: 2021183 - RNA, 19 nt, Homo sapiens
  misc_RNA (1)...(19): siRNA sense strand
gaaaggacagccgggagau

SEQ ID NO: 2021184 - RNA, 19 nt, Homo sapiens
  misc_RNA (1)...(19): siRNA sense strand
gugacacaauuucuugcaa

SEQ ID NO: 2021185 - RNA, 19 nt, Homo sapiens
  misc_RNA (1)...(19): siRNA sense strand
uaaagggcacaaaggagaa

SEQ ID NO: 2021186 - RNA, 19 nt, Homo sapiens
  misc_RNA (1)...(19): siRNA sense strand
ccugggcuauuuggauuaa

SEQ ID NO: 2021187 - RNA, 19 nt, Homo sapiens
  misc_RNA (1)...(19): siRNA sense strand
uaggugccguuaaagguau

SEQ ID NO: 2021188 - RNA, 19 nt, Homo sapiens
  misc_RNA (1)...(19): siRNA sense strand
aaggagaaauggcuaucau

SEQ ID NO: 2021189 - RNA, 19 nt, Homo sapiens
  misc_RNA (1)...(19): siRNA sense strand
gaguggaaagaaauacauu

SEQ ID NO: 2021190 - RNA, 19 nt, Homo sapiens
  misc_RNA (1)...(19): siRNA sense strand
ggaaugcccugacagauaa

SEQ ID NO: 2021191 - RNA, 19 nt, Homo sapiens
  misc_RNA (1)...(19): siRNA sense strand
uaaaugaaauccuggaaga

SEQ ID NO: 2021192 - RNA, 19 nt, Homo sapiens
  misc_RNA (1)...(19): siRNA sense strand
gcacauauuugacuacagu

SEQ ID NO: 2021193 - RNA, 19 nt, Homo sapiens
  misc_RNA (1)...(19): siRNA sense strand
gagaacagcuggauaugca

SEQ ID NO: 2021194 - RNA, 19 nt, Homo sapiens
  misc_RNA (1)...(19): siRNA sense strand
gcaguuggcuuuacgagau

SEQ ID NO: 2021195 - RNA, 19 nt, Homo sapiens
  misc_RNA (1)...(19): siRNA sense strand
gaaauugagacugccauua

SEQ ID NO: 2021196 - RNA, 19 nt, Homo sapiens
  misc_RNA (1)...(19): siRNA sense strand
ggaaugugaugccuguaga

SEQ ID NO: 2021197 - RNA, 19 nt, Homo sapiens
  misc_RNA (1)...(19): siRNA sense strand
gaucggcuuucaaugcuuu

SEQ ID NO: 2021198 - RNA, 19 nt, Homo sapiens
  misc_RNA (1)...(19): siRNA sense strand
gaaauucaaacucucaaga

SEQ ID NO: 2021199 - RNA, 19 nt, Homo sapiens
  misc_RNA (1)...(19): siRNA sense strand
gaagaaaugaugcaggaau

SEQ ID NO: 2021200 - RNA, 19 nt, Homo sapiens
  misc_RNA (1)...(19): siRNA sense strand
agacugccauuaaggagua

SEQ ID NO: 2021201 - RNA, 19 nt, Homo sapiens
  misc_RNA (1)...(19): siRNA sense strand
aaauugagacugccauuaa

SEQ ID NO: 2021202 - RNA, 19 nt, Homo sapiens
  misc_RNA (1)...(19): siRNA sense strand
guuccgagcuuguuaacug

SEQ ID NO: 2021203 - RNA, 19 nt, Homo sapiens
  misc_RNA (1)...(19): siRNA sense strand
gaaagagcacaaagaaaca

SEQ ID NO: 2021204 - RNA, 19 nt, Homo sapiens
  misc_RNA (1)...(19): siRNA sense strand
ggaaucaccggacccagaa

SEQ ID NO: 2021205 - RNA, 19 nt, Homo sapiens
  misc_RNA (1)...(19): siRNA sense strand
cagaccagguuauugaaga

SEQ ID NO: 2021206 - RNA, 19 nt, Homo sapiens
  misc_RNA (1)...(19): siRNA sense strand
ugagagaacagcuggauau

SEQ ID NO: 2021207 - RNA, 19 nt, Homo sapiens
  misc_RNA (1)...(19): siRNA sense strand
uggaaugcccugacagaua

SEQ ID NO: 2021208 - RNA, 19 nt, Homo sapiens
  misc_RNA (1)...(19): siRNA sense strand
acagaaagagcacaaagaa

SEQ ID NO: 2021209 - RNA, 19 nt, Homo sapiens
  misc_RNA (1)...(19): siRNA sense strand
ccagguuauugaagaaauu

SEQ ID NO: 2021210 - RNA, 19 nt, Homo sapiens
  misc_RNA (1)...(19): siRNA sense strand
cgagcuuguuaacugauua

SEQ ID NO: 2021211 - RNA, 19 nt, Homo sapiens
  misc_RNA (1)...(19): siRNA sense strand
aauggcagcucucagaaug

SEQ ID NO: 2021212 - RNA, 19 nt, Homo sapiens
  misc_RNA (1)...(19): siRNA sense strand
gacaguuugcucuuugaua

SEQ ID NO: 2021213 - RNA, 19 nt, Homo sapiens
  misc_RNA (1)...(19): siRNA sense strand
gcacaaagaaacagcaaaa

SEQ ID NO: 2021214 - RNA, 19 nt, Homo sapiens
  misc_RNA (1)...(19): siRNA sense strand
cggcagaccagguuauuga

SEQ ID NO: 2021215 - RNA, 19 nt, Homo sapiens
  misc_RNA (1)...(19): siRNA sense strand
ggacccagaagaugaugaa

SEQ ID NO: 2021216 - RNA, 19 nt, Homo sapiens
  misc_RNA (1)...(19): siRNA sense strand
agaaagagcacaaagaaac

SEQ ID NO: 2021217 - RNA, 19 nt, Homo sapiens
  misc_RNA (1)...(19): siRNA sense strand
ugaaauccuggaagaaauu

SEQ ID NO: 2021218 - RNA, 19 nt, Homo sapiens
  misc_RNA (1)...(19): siRNA sense strand
ggucuaguaccggcaguua

SEQ ID NO: 2021219 - RNA, 19 nt, Homo sapiens
  misc_RNA (1)...(19): siRNA sense strand
ggaagaaugagagaaguca

SEQ ID NO: 2021220 - RNA, 19 nt, Homo sapiens
  misc_RNA (1)...(19): siRNA sense strand
uggaagucaucgcauacua

SEQ ID NO: 2021221 - RNA, 19 nt, Homo sapiens
  misc_RNA (1)...(19): siRNA sense strand
ccauuaaggaguacucuga

SEQ ID NO: 2021222 - RNA, 19 nt, Homo sapiens
  misc_RNA (1)...(19): siRNA sense strand
ggaagucaucgcauacuag

SEQ ID NO: 2021223 - RNA, 19 nt, Homo sapiens
  misc_RNA (1)...(19): siRNA sense strand
acaguuugcucuuugauac

SEQ ID NO: 2021224 - RNA, 19 nt, Homo sapiens
  misc_RNA (1)...(19): siRNA sense strand
gacagauaauuaugggaau

SEQ ID NO: 2021225 - RNA, 19 nt, Homo sapiens
  misc_RNA (1)...(19): siRNA sense strand
aaaguucuguguccuacau

SEQ ID NO: 2021226 - RNA, 19 nt, Homo sapiens
  misc_RNA (1)...(19): siRNA sense strand
cagaaagagcacaaagaaa

SEQ ID NO: 2021227 - RNA, 19 nt, Homo sapiens
  misc_RNA (1)...(19): siRNA sense strand
gauaauuaugggaauguga

SEQ ID NO: 2021228 - RNA, 19 nt, Homo sapiens
  misc_RNA (1)...(19): siRNA sense strand
ggauaugcacucaaucauc

SEQ ID NO: 2021229 - RNA, 19 nt, Homo sapiens
  misc_RNA (1)...(19): siRNA sense strand
aagaaaugaugcaggaauc

SEQ ID NO: 2021230 - RNA, 19 nt, Homo sapiens
  misc_RNA (1)...(19): siRNA sense strand
gaaauccuggaagaaauug

SEQ ID NO: 2021231 - RNA, 19 nt, Homo sapiens
  misc_RNA (1)...(19): siRNA sense strand
aaugaaauccuggaagaaa

SEQ ID NO: 2021232 - RNA, 19 nt, Homo sapiens
  misc_RNA (1)...(19): siRNA sense strand
caucgucuccuguguuaau

SEQ ID NO: 2021233 - RNA, 19 nt, Homo sapiens
  misc_RNA (1)...(19): siRNA sense strand
agaccagguuauugaagaa

SEQ ID NO: 2021234 - RNA, 19 nt, Homo sapiens
  misc_RNA (1)...(19): siRNA sense strand
gcacuugcuuacucugaac

SEQ ID NO: 2021235 - RNA, 19 nt, Homo sapiens
  misc_RNA (1)...(19): siRNA sense strand
cggcaguuaugaagagaga

SEQ ID NO: 2021236 - RNA, 19 nt, Homo sapiens
  misc_RNA (1)...(19): siRNA sense strand
gauuuggaaugcccugaca

SEQ ID NO: 2021237 - RNA, 19 nt, Homo sapiens
  misc_RNA (1)...(19): siRNA sense strand
gggacgagauuuggaaugc

SEQ ID NO: 2021238 - RNA, 19 nt, Homo sapiens
  misc_RNA (1)...(19): siRNA sense strand
ucuccuguguuaaugauga

SEQ ID NO: 2021239 - RNA, 19 nt, Homo sapiens
  misc_RNA (1)...(19): siRNA sense strand
ccaugaaggaggacaguga

SEQ ID NO: 2021240 - RNA, 19 nt, Homo sapiens
  misc_RNA (1)...(19): siRNA sense strand
gugacaguuugcucuuuga

SEQ ID NO: 2021241 - RNA, 19 nt, Homo sapiens
  misc_RNA (1)...(19): siRNA sense strand
augaagagcugagagaaca

SEQ ID NO: 2021242 - RNA, 19 nt, Homo sapiens
  misc_RNA (1)...(19): siRNA sense strand
aucaucgucuccuguguua

SEQ ID NO: 2021243 - RNA, 19 nt, Homo sapiens
  misc_RNA (1)...(19): siRNA sense strand
ggaccaccgucuguugaag

SEQ ID NO: 2021244 - RNA, 19 nt, Homo sapiens
  misc_RNA (1)...(19): siRNA sense strand
caccggacccagaagauga

SEQ ID NO: 2021245 - RNA, 19 nt, Homo sapiens
  misc_RNA (1)...(19): siRNA sense strand
gugucugaguuaaaugaaa

SEQ ID NO: 2021246 - RNA, 19 nt, Homo sapiens
  misc_RNA (1)...(19): siRNA sense strand
cagaucggcuuucaaugcu

SEQ ID NO: 2021247 - RNA, 19 nt, Homo sapiens
  misc_RNA (1)...(19): siRNA sense strand
gagagaacagcuggauaug

SEQ ID NO: 2021248 - RNA, 19 nt, Homo sapiens
  misc_RNA (1)...(19): siRNA sense strand
acagauaauuaugggaaug

SEQ ID NO: 2021249 - RNA, 19 nt, Homo sapiens
  misc_RNA (1)...(19): siRNA sense strand
cagaaugggaagaaugaga

SEQ ID NO: 2021250 - RNA, 19 nt, Homo sapiens
  misc_RNA (1)...(19): siRNA sense strand
gagcacaaagaaacagcaa

SEQ ID NO: 2021251 - RNA, 19 nt, Homo sapiens
  misc_RNA (1)...(19): siRNA sense strand
cccaggaaauucaaacucu

SEQ ID NO: 2021252 - RNA, 19 nt, Homo sapiens
  misc_RNA (1)...(19): siRNA sense strand
ucagaucggcuuucaaugc

SEQ ID NO: 2021253 - RNA, 19 nt, Homo sapiens
  misc_RNA (1)...(19): siRNA sense strand
acagucagaucggcuuuca

SEQ ID NO: 2021254 - RNA, 19 nt, Homo sapiens
  misc_RNA (1)...(19): siRNA sense strand
aaaguuccgagcuuguuaa

SEQ ID NO: 2021255 - RNA, 19 nt, Homo sapiens
  misc_RNA (1)...(19): siRNA sense strand
gaccaccgucuguugaaga

SEQ ID NO: 2021256 - RNA, 19 nt, Homo sapiens
  misc_RNA (1)...(19): siRNA sense strand
gaaugggaagaaugagaga

SEQ ID NO: 2021257 - RNA, 19 nt, Homo sapiens
  misc_RNA (1)...(19): siRNA sense strand
aaacagaaagagcacaaag

SEQ ID NO: 2021258 - RNA, 19 nt, Homo sapiens
  misc_RNA (1)...(19): siRNA sense strand
gcaguuaugaagagagagu

SEQ ID NO: 2021259 - RNA, 19 nt, Homo sapiens
  misc_RNA (1)...(19): siRNA sense strand
agugacaguuugcucuuug

SEQ ID NO: 2021260 - RNA, 19 nt, Homo sapiens
  misc_RNA (1)...(19): siRNA sense strand
gggaaugugaugccuguag

SEQ ID NO: 2021261 - RNA, 19 nt, Homo sapiens
  misc_RNA (1)...(19): siRNA sense strand
gcucucagaaugggaagaa

SEQ ID NO: 2021262 - RNA, 19 nt, Homo sapiens
  misc_RNA (1)...(19): siRNA sense strand
agucagaucggcuuucaau

SEQ ID NO: 2021263 - RNA, 19 nt, Homo sapiens
  misc_RNA (1)...(19): siRNA sense strand
cagcuuuauuucuguucuu

SEQ ID NO: 2021264 - RNA, 19 nt, Homo sapiens
  misc_RNA (1)...(19): siRNA sense strand
augaaauccuggaagaaau

SEQ ID NO: 2021265 - RNA, 19 nt, Homo sapiens
  misc_RNA (1)...(19): siRNA sense strand
ggaaauucaaacucucaag

SEQ ID NO: 2021266 - RNA, 19 nt, Homo sapiens
  misc_RNA (1)...(19): siRNA sense strand
gagcuuguuaacugauuau

SEQ ID NO: 2021267 - RNA, 19 nt, Homo sapiens
  misc_RNA (1)...(19): siRNA sense strand
ccgagcuuguuaacugauu

SEQ ID NO: 2021268 - RNA, 19 nt, Homo sapiens
  misc_RNA (1)...(19): siRNA sense strand
caaacagaaagagcacaaa

SEQ ID NO: 2021269 - RNA, 19 nt, Homo sapiens
  misc_RNA (1)...(19): siRNA sense strand
gaugaagagcugagagaac

SEQ ID NO: 2021270 - RNA, 19 nt, Homo sapiens
  misc_RNA (1)...(19): siRNA sense strand
gcagaccagguuauugaag

SEQ ID NO: 2021271 - RNA, 19 nt, Homo sapiens
  misc_RNA (1)...(19): siRNA sense strand
caccgucuguugaagaucu

SEQ ID NO: 2021272 - RNA, 19 nt, Homo sapiens
  misc_RNA (1)...(19): siRNA sense strand
uaagugacaguuugcucuu

SEQ ID NO: 2021273 - RNA, 19 nt, Homo sapiens
  misc_RNA (1)...(19): siRNA sense strand
guaccggcaguuaugaaga

SEQ ID NO: 2021274 - RNA, 19 nt, Homo sapiens
  misc_RNA (1)...(19): siRNA sense strand
ucuaguaccggcaguuaug

SEQ ID NO: 2021275 - RNA, 19 nt, Homo sapiens
  misc_RNA (1)...(19): siRNA sense strand
gaugaaaccccuacacagu

SEQ ID NO: 2021276 - RNA, 19 nt, Homo sapiens
  misc_RNA (1)...(19): siRNA sense strand
caggaaauucaaacucuca

SEQ ID NO: 2021277 - RNA, 19 nt, Homo sapiens
  misc_RNA (1)...(19): siRNA sense strand
gugcagcaguuggcuuuac

SEQ ID NO: 2021278 - RNA, 19 nt, Homo sapiens
  misc_RNA (1)...(19): siRNA sense strand
caugaaggaggacagugaa

SEQ ID NO: 2021279 - RNA, 19 nt, Homo sapiens
  misc_RNA (1)...(19): siRNA sense strand
acaaacagaaagagcacaa

SEQ ID NO: 2021280 - RNA, 19 nt, Homo sapiens
  misc_RNA (1)...(19): siRNA sense strand
gaccagguuauugaagaaa

SEQ ID NO: 2021281 - RNA, 19 nt, Homo sapiens
  misc_RNA (1)...(19): siRNA sense strand
caaucaucgucuccugugu

SEQ ID NO: 2021282 - RNA, 19 nt, Homo sapiens
  misc_RNA (1)...(19): siRNA sense strand
aauugagacugccauuaag

SEQ ID NO: 2021283 - RNA, 19 nt, Homo sapiens
  misc_RNA (1)...(19): siRNA sense strand
gcugcagcuuggaggagaa

SEQ ID NO: 2021284 - RNA, 19 nt, Homo sapiens
  misc_RNA (1)...(19): siRNA sense strand
ggaccuugcacuugcuuac

SEQ ID NO: 2021285 - RNA, 19 nt, Homo sapiens
  misc_RNA (1)...(19): siRNA sense strand
cccagaagaugaugaaacc

SEQ ID NO: 2021286 - RNA, 19 nt, Homo sapiens
  misc_RNA (1)...(19): siRNA sense strand
cgucuccuguguuaaugau

SEQ ID NO: 2021287 - RNA, 19 nt, Homo sapiens
  misc_RNA (1)...(19): siRNA sense strand
cggcacauauuugacuaca

SEQ ID NO: 2021288 - RNA, 19 nt, Homo sapiens
  misc_RNA (1)...(19): siRNA sense strand
cagugucugaguuaaauga

SEQ ID NO: 2021289 - RNA, 19 nt, Homo sapiens
  misc_RNA (1)...(19): siRNA sense strand
aagugacaguuugcucuuu

SEQ ID NO: 2021290 - RNA, 19 nt, Homo sapiens
  misc_RNA (1)...(19): siRNA sense strand
ucagagacguggcauauca

SEQ ID NO: 2021291 - RNA, 19 nt, Homo sapiens
  misc_RNA (1)...(19): siRNA sense strand
ugagacagguggaaggaaa

SEQ ID NO: 2021292 - RNA, 19 nt, Homo sapiens
  misc_RNA (1)...(19): siRNA sense strand
acagguacuucgucaguuu

SEQ ID NO: 2021293 - RNA, 19 nt, Homo sapiens
  misc_RNA (1)...(19): siRNA sense strand
gacaacauggcacagaaua

SEQ ID NO: 2021294 - RNA, 19 nt, Homo sapiens
  misc_RNA (1)...(19): siRNA sense strand
guacuucgucaguuuguaa

SEQ ID NO: 2021295 - RNA, 19 nt, Homo sapiens
  misc_RNA (1)...(19): siRNA sense strand
agacuauggugaauacaug

SEQ ID NO: 2021296 - RNA, 19 nt, Homo sapiens
  misc_RNA (1)...(19): siRNA sense strand
caacauggcacagaauauc

SEQ ID NO: 2021297 - RNA, 19 nt, Homo sapiens
  misc_RNA (1)...(19): siRNA sense strand
cgacaagcaacaacaauca

SEQ ID NO: 2021298 - RNA, 19 nt, Homo sapiens
  misc_RNA (1)...(19): siRNA sense strand
ggucucgaauuuauuugga

SEQ ID NO: 2021299 - RNA, 19 nt, Homo sapiens
  misc_RNA (1)...(19): siRNA sense strand
acaagcaacaacaaucaua

SEQ ID NO: 2021300 - RNA, 19 nt, Homo sapiens
  misc_RNA (1)...(19): siRNA sense strand
uauggugaauacauggaua

SEQ ID NO: 2021301 - RNA, 19 nt, Homo sapiens
  misc_RNA (1)...(19): siRNA sense strand
ugagugaccagacgaaaga

SEQ ID NO: 2021302 - RNA, 19 nt, Homo sapiens
  misc_RNA (1)...(19): siRNA sense strand
agacaugaguccgaaacaa

SEQ ID NO: 2021303 - RNA, 19 nt, Homo sapiens
  misc_RNA (1)...(19): siRNA sense strand
gagacguggcauaucaaua

SEQ ID NO: 2021304 - RNA, 19 nt, Homo sapiens
  misc_RNA (1)...(19): siRNA sense strand
agacgaaagagaaggagua

SEQ ID NO: 2021305 - RNA, 19 nt, Homo sapiens
  misc_RNA (1)...(19): siRNA sense strand
ccaguuugguucuugaaag

SEQ ID NO: 2021306 - RNA, 19 nt, Homo sapiens
  misc_RNA (1)...(19): siRNA sense strand
ucuagcaacuaaugagaug

SEQ ID NO: 2021307 - RNA, 19 nt, Homo sapiens
  misc_RNA (1)...(19): siRNA sense strand
aagacaacauggcacagaa

SEQ ID NO: 2021308 - RNA, 19 nt, Homo sapiens
  misc_RNA (1)...(19): siRNA sense strand
ccugaaucgugugcacuua

SEQ ID NO: 2021309 - RNA, 19 nt, Homo sapiens
  misc_RNA (1)...(19): siRNA sense strand
ccucagagacguggcauau

SEQ ID NO: 2021310 - RNA, 19 nt, Homo sapiens
  misc_RNA (1)...(19): siRNA sense strand
aaaggggucucgaauuuau

SEQ ID NO: 2021311 - RNA, 19 nt, Homo sapiens
  misc_RNA (1)...(19): siRNA sense strand
guuucgaagaccuguauua

SEQ ID NO: 2021312 - RNA, 19 nt, Homo sapiens
  misc_RNA (1)...(19): siRNA sense strand
caagcaacaacaaucauag

SEQ ID NO: 2021313 - RNA, 19 nt, Homo sapiens
  misc_RNA (1)...(19): siRNA sense strand
ggauagugaaguuuaccaa

SEQ ID NO: 2021314 - RNA, 19 nt, Homo sapiens
  misc_RNA (1)...(19): siRNA sense strand
gguacuucgucaguuugua

SEQ ID NO: 2021315 - RNA, 19 nt, Homo sapiens
  misc_RNA (1)...(19): siRNA sense strand
uggcacagaauaucaguau

SEQ ID NO: 2021316 - RNA, 19 nt, Homo sapiens
  misc_RNA (1)...(19): siRNA sense strand
gcgacaagcaacaacaauc

SEQ ID NO: 2021317 - RNA, 19 nt, Homo sapiens
  misc_RNA (1)...(19): siRNA sense strand
gacaugaguccgaaacaac

SEQ ID NO: 2021318 - RNA, 19 nt, Homo sapiens
  misc_RNA (1)...(19): siRNA sense strand
aaagacaacauggcacaga

SEQ ID NO: 2021319 - RNA, 19 nt, Homo sapiens
  misc_RNA (1)...(19): siRNA sense strand
gugaccagacgaaagagaa

SEQ ID NO: 2021320 - RNA, 19 nt, Homo sapiens
  misc_RNA (1)...(19): siRNA sense strand
ugaaucgugugcacuuacu

SEQ ID NO: 2021321 - RNA, 19 nt, Homo sapiens
  misc_RNA (1)...(19): siRNA sense strand
caugaguccgaaacaacua

SEQ ID NO: 2021322 - RNA, 19 nt, Homo sapiens
  misc_RNA (1)...(19): siRNA sense strand
uuacagguacuucgucagu

SEQ ID NO: 2021323 - RNA, 19 nt, Homo sapiens
  misc_RNA (1)...(19): siRNA sense strand
gcaaacaccugaucaagga

SEQ ID NO: 2021324 - RNA, 19 nt, Homo sapiens
  misc_RNA (1)...(19): siRNA sense strand
gaaggacggucuacagcuu

SEQ ID NO: 2021325 - RNA, 19 nt, Homo sapiens
  misc_RNA (1)...(19): siRNA sense strand
aaccagagguggauacuaa

SEQ ID NO: 2021326 - RNA, 19 nt, Homo sapiens
  misc_RNA (1)...(19): siRNA sense strand
gaacuacaccuaucucauc

SEQ ID NO: 2021327 - RNA, 19 nt, Homo sapiens
  misc_RNA (1)...(19): siRNA sense strand
gaccugacauucuuuaaca

SEQ ID NO: 2021328 - RNA, 19 nt, Homo sapiens
  misc_RNA (1)...(19): siRNA sense strand
gagacucgcucgacuguuc

SEQ ID NO: 2021329 - RNA, 19 nt, Homo sapiens
  misc_RNA (1)...(19): siRNA sense strand
ucacagacaugaagaaguc

SEQ ID NO: 2021330 - RNA, 19 nt, Homo sapiens
  misc_RNA (1)...(19): siRNA sense strand
ugaaggacaugaagcagaa

SEQ ID NO: 2021331 - RNA, 19 nt, Homo sapiens
  misc_RNA (1)...(19): siRNA sense strand
ggaaccggagcccaaauua

SEQ ID NO: 2021332 - RNA, 19 nt, Homo sapiens
  misc_RNA (1)...(19): siRNA sense strand
ccaguacccucccaccuuu

SEQ ID NO: 2021333 - RNA, 19 nt, Homo sapiens
  misc_RNA (1)...(19): siRNA sense strand
ucaaggaaaucauccacaa

SEQ ID NO: 2021334 - RNA, 19 nt, Homo sapiens
  misc_RNA (1)...(19): siRNA sense strand
cagaggagaccuucaguuu

SEQ ID NO: 2021335 - RNA, 19 nt, Homo sapiens
  misc_RNA (1)...(19): siRNA sense strand
uuaacacgcuggugagaaa

SEQ ID NO: 2021336 - RNA, 19 nt, Homo sapiens
  misc_RNA (1)...(19): siRNA sense strand
gcgcagaccuuaggaugug

SEQ ID NO: 2021337 - RNA, 19 nt, Homo sapiens
  misc_RNA (1)...(19): siRNA sense strand
ggaugugccucgauguguu

SEQ ID NO: 2021338 - RNA, 19 nt, Homo sapiens
  misc_RNA (1)...(19): siRNA sense strand
gaggagaccuucaguuucc

SEQ ID NO: 2021339 - RNA, 19 nt, Homo sapiens
  misc_RNA (1)...(19): siRNA sense strand
gaaccggagcccaaauuau

SEQ ID NO: 2021340 - RNA, 19 nt, Homo sapiens
  misc_RNA (1)...(19): siRNA sense strand
acaccuaccuggagaagau

SEQ ID NO: 2021341 - RNA, 19 nt, Homo sapiens
  misc_RNA (1)...(19): siRNA sense strand
gacccucucugacaaauac

SEQ ID NO: 2021342 - RNA, 19 nt, Homo sapiens
  misc_RNA (1)...(19): siRNA sense strand
gaacggagagaugagcaaa

SEQ ID NO: 2021343 - RNA, 19 nt, Homo sapiens
  misc_RNA (1)...(19): siRNA sense strand
ggagagaugagcaaaugga

SEQ ID NO: 2021344 - RNA, 19 nt, Homo sapiens
  misc_RNA (1)...(19): siRNA sense strand
acaguggucuccuuuggaa

SEQ ID NO: 2021345 - RNA, 19 nt, Homo sapiens
  misc_RNA (1)...(19): siRNA sense strand
gcaaauccgcagcccaguu

SEQ ID NO: 2021346 - RNA, 19 nt, Homo sapiens
  misc_RNA (1)...(19): siRNA sense strand
aaacuucgagcucaacuug

SEQ ID NO: 2021347 - RNA, 19 nt, Homo sapiens
  misc_RNA (1)...(19): siRNA sense strand
gucuacagcuucucacaga

SEQ ID NO: 2021348 - RNA, 19 nt, Homo sapiens
  misc_RNA (1)...(19): siRNA sense strand
agaggcagaugcugaagga

SEQ ID NO: 2021349 - RNA, 19 nt, Homo sapiens
  misc_RNA (1)...(19): siRNA sense strand
gaagcugaacuacaccuau

SEQ ID NO: 2021350 - RNA, 19 nt, Homo sapiens
  misc_RNA (1)...(19): siRNA sense strand
caaggaaaucauccacaaa

SEQ ID NO: 2021351 - RNA, 19 nt, Homo sapiens
  misc_RNA (1)...(19): siRNA sense strand
ggaggcugaugacggaugu

SEQ ID NO: 2021352 - RNA, 19 nt, Homo sapiens
  misc_RNA (1)...(19): siRNA sense strand
caaauccgcagcccaguuc

SEQ ID NO: 2021353 - RNA, 19 nt, Homo sapiens
  misc_RNA (1)...(19): siRNA sense strand
acaccuaucucaucagcau

SEQ ID NO: 2021354 - RNA, 19 nt, Homo sapiens
  misc_RNA (1)...(19): siRNA sense strand
caacuacacggugcugauu

SEQ ID NO: 2021355 - RNA, 19 nt, Homo sapiens
  misc_RNA (1)...(19): siRNA sense strand
gaaacaccccguacuggua

SEQ ID NO: 2021356 - RNA, 19 nt, Homo sapiens
  misc_RNA (1)...(19): siRNA sense strand
gcucaugggcugcauccaa

SEQ ID NO: 2021357 - RNA, 19 nt, Homo sapiens
  misc_RNA (1)...(19): siRNA sense strand
gggcugaugcggccaaugu

SEQ ID NO: 2021358 - RNA, 19 nt, Homo sapiens
  misc_RNA (1)...(19): siRNA sense strand
ccgcagcccaguuccauaa

SEQ ID NO: 2021359 - RNA, 19 nt, Homo sapiens
  misc_RNA (1)...(19): siRNA sense strand
gguagaggccgaccugaca

SEQ ID NO: 2021360 - RNA, 19 nt, Homo sapiens
  misc_RNA (1)...(19): siRNA sense strand
cuacaguggucuccuuugg

SEQ ID NO: 2021361 - RNA, 19 nt, Homo sapiens
  misc_RNA (1)...(19): siRNA sense strand
acggagagaugagcaaaug

SEQ ID NO: 2021362 - RNA, 19 nt, Homo sapiens
  misc_RNA (1)...(19): siRNA sense strand
caucuacagugcccucauc

SEQ ID NO: 2021363 - RNA, 19 nt, Homo sapiens
  misc_RNA (1)...(19): siRNA sense strand
gagagaugagcaaauggaa

SEQ ID NO: 2021364 - RNA, 19 nt, Homo sapiens
  misc_RNA (1)...(19): siRNA sense strand
cggguuggcuaccugaaga

SEQ ID NO: 2021365 - RNA, 19 nt, Homo sapiens
  misc_RNA (1)...(19): siRNA sense strand
gaagggaagcugguugaag

SEQ ID NO: 2021366 - RNA, 19 nt, Homo sapiens
  misc_RNA (1)...(19): siRNA sense strand
ggacccucucugacaaaua

SEQ ID NO: 2021367 - RNA, 19 nt, Homo sapiens
  misc_RNA (1)...(19): siRNA sense strand
ggaagcugaacuacaccua

SEQ ID NO: 2021368 - RNA, 19 nt, Homo sapiens
  misc_RNA (1)...(19): siRNA sense strand
gaaggacucagcucuacag

SEQ ID NO: 2021369 - RNA, 19 nt, Homo sapiens
  misc_RNA (1)...(19): siRNA sense strand
aaccggagcccaaauuaug

SEQ ID NO: 2021370 - RNA, 19 nt, Homo sapiens
  misc_RNA (1)...(19): siRNA sense strand
aagcugaacuacaccuauc

SEQ ID NO: 2021371 - RNA, 19 nt, Homo sapiens
  misc_RNA (1)...(19): siRNA sense strand
gcaacuacacggugcugau

SEQ ID NO: 2021372 - RNA, 19 nt, Homo sapiens
  misc_RNA (1)...(19): siRNA sense strand
acacggcccuguucaacgu

SEQ ID NO: 2021373 - RNA, 19 nt, Homo sapiens
  misc_RNA (1)...(19): siRNA sense strand
gaacaccuaccuggagaag

SEQ ID NO: 2021374 - RNA, 19 nt, Homo sapiens
  misc_RNA (1)...(19): siRNA sense strand
ccguggagcuggaagucaa

SEQ ID NO: 2021375 - RNA, 19 nt, Homo sapiens
  misc_RNA (1)...(19): siRNA sense strand
gcccuggaccuguuugaga

SEQ ID NO: 2021376 - RNA, 19 nt, Homo sapiens
  misc_RNA (1)...(19): siRNA sense strand
agaacagggucccggugaa

SEQ ID NO: 2021377 - RNA, 19 nt, Homo sapiens
  misc_RNA (1)...(19): siRNA sense strand
caaggcaggcaaccucaug

SEQ ID NO: 2021378 - RNA, 19 nt, Homo sapiens
  misc_RNA (1)...(19): siRNA sense strand
ggaggaggcgacugugcuu

SEQ ID NO: 2021379 - RNA, 19 nt, Homo sapiens
  misc_RNA (1)...(19): siRNA sense strand
gccaagugcgcagaccuua

SEQ ID NO: 2021380 - RNA, 19 nt, Homo sapiens
  misc_RNA (1)...(19): siRNA sense strand
uugaagcccuggaccuguu

SEQ ID NO: 2021381 - RNA, 19 nt, Homo sapiens
  misc_RNA (1)...(19): siRNA sense strand
uaucucaucagcaucuuga

SEQ ID NO: 2021382 - RNA, 19 nt, Homo sapiens
  misc_RNA (1)...(19): siRNA sense strand
gaacagggucccggugaac

SEQ ID NO: 2021383 - RNA, 19 nt, Homo sapiens
  misc_RNA (1)...(19): siRNA sense strand
ggaagggaagcugguugaa

SEQ ID NO: 2021384 - RNA, 19 nt, Homo sapiens
  misc_RNA (1)...(19): siRNA sense strand
ggcagaaguuccggaccaa

SEQ ID NO: 2021385 - RNA, 19 nt, Homo sapiens
  misc_RNA (1)...(19): siRNA sense strand
ggaguuugcagcccaguac

SEQ ID NO: 2021386 - RNA, 19 nt, Homo sapiens
  misc_RNA (1)...(19): siRNA sense strand
aggaggaggaggagaguuu

SEQ ID NO: 2021387 - RNA, 19 nt, Homo sapiens
  misc_RNA (1)...(19): siRNA sense strand
ggaaccuucucaggcacuu

SEQ ID NO: 2021388 - RNA, 19 nt, Homo sapiens
  misc_RNA (1)...(19): siRNA sense strand
gcagugcaaacaccugauc

SEQ ID NO: 2021389 - RNA, 19 nt, Homo sapiens
  misc_RNA (1)...(19): siRNA sense strand
ucaucagcaucuugaagga

SEQ ID NO: 2021390 - RNA, 19 nt, Homo sapiens
  misc_RNA (1)...(19): siRNA sense strand
aggccgaccugacauucuu

SEQ ID NO: 2021391 - RNA, 19 nt, Homo sapiens
  misc_RNA (1)...(19): siRNA sense strand
caagugcgcagaccuuagg

SEQ ID NO: 2021392 - RNA, 19 nt, Homo sapiens
  misc_RNA (1)...(19): siRNA sense strand
ggagacuauuccgcaaauc

SEQ ID NO: 2021393 - RNA, 19 nt, Homo sapiens
  misc_RNA (1)...(19): siRNA sense strand
ggaaggacucagcucuaca

SEQ ID NO: 2021394 - RNA, 19 nt, Homo sapiens
  misc_RNA (1)...(19): siRNA sense strand
caaccucuacaaccagaug

SEQ ID NO: 2021395 - RNA, 19 nt, Homo sapiens
  misc_RNA (1)...(19): siRNA sense strand
ggccaggagcgucaggaaa

SEQ ID NO: 2021396 - RNA, 19 nt, Homo sapiens
  misc_RNA (1)...(19): siRNA sense strand
ggaacggagagaugagcaa

SEQ ID NO: 2021397 - RNA, 19 nt, Homo sapiens
  misc_RNA (1)...(19): siRNA sense strand
aagcaguggcugacaguga

SEQ ID NO: 2021398 - RNA, 19 nt, Homo sapiens
  misc_RNA (1)...(19): siRNA sense strand
uggaugagcaccagguaga

SEQ ID NO: 2021399 - RNA, 19 nt, Homo sapiens
  misc_RNA (1)...(19): siRNA sense strand
ucaccgcaguggcccugaa

SEQ ID NO: 2021400 - RNA, 19 nt, Homo sapiens
  misc_RNA (1)...(19): siRNA sense strand
uggaaggacucagcucuac

SEQ ID NO: 2021401 - RNA, 19 nt, Homo sapiens
  misc_RNA (1)...(19): siRNA sense strand
cagcuucucacagacauga

SEQ ID NO: 2021402 - RNA, 19 nt, Homo sapiens
  misc_RNA (1)...(19): siRNA sense strand
acacgcuggugagaaagaa

SEQ ID NO: 2021403 - RNA, 19 nt, Homo sapiens
  misc_RNA (1)...(19): siRNA sense strand
caaccagagguggauacua

SEQ ID NO: 2021404 - RNA, 19 nt, Homo sapiens
  misc_RNA (1)...(19): siRNA sense strand
gggacccucucugacaaau

SEQ ID NO: 2021405 - RNA, 19 nt, Homo sapiens
  misc_RNA (1)...(19): siRNA sense strand
gccucgauguguucaagga

SEQ ID NO: 2021406 - RNA, 19 nt, Homo sapiens
  misc_RNA (1)...(19): siRNA sense strand
gcugaaggaggagcgauug

SEQ ID NO: 2021407 - RNA, 19 nt, Homo sapiens
  misc_RNA (1)...(19): siRNA sense strand
cuacagugcccucaucaac

SEQ ID NO: 2021408 - RNA, 19 nt, Homo sapiens
  misc_RNA (1)...(19): siRNA sense strand
gccgaccugacauucuuua

SEQ ID NO: 2021409 - RNA, 19 nt, Homo sapiens
  misc_RNA (1)...(19): siRNA sense strand
aaggaaaucauccacaaag

SEQ ID NO: 2021410 - RNA, 19 nt, Homo sapiens
  misc_RNA (1)...(19): siRNA sense strand
gaugugccucgauguguuc

SEQ ID NO: 2021411 - RNA, 19 nt, Homo sapiens
  misc_RNA (1)...(19): siRNA sense strand
ccaccuacacggcccuguu

SEQ ID NO: 2021412 - RNA, 19 nt, Homo sapiens
  misc_RNA (1)...(19): siRNA sense strand
uggcgaggccggagaaaca

SEQ ID NO: 2021413 - RNA, 19 nt, Homo sapiens
  misc_RNA (1)...(19): siRNA sense strand
caaggaagggaagcugguu

SEQ ID NO: 2021414 - RNA, 19 nt, Homo sapiens
  misc_RNA (1)...(19): siRNA sense strand
ucacagaggagaccuucag

SEQ ID NO: 2021415 - RNA, 19 nt, Homo sapiens
  misc_RNA (1)...(19): siRNA sense strand
ucgauguguucaaggaaau

SEQ ID NO: 2021416 - RNA, 19 nt, Homo sapiens
  misc_RNA (1)...(19): siRNA sense strand
cucgauguguucaaggaaa

SEQ ID NO: 2021417 - RNA, 19 nt, Homo sapiens
  misc_RNA (1)...(19): siRNA sense strand
aagggcacguggucacaga

SEQ ID NO: 2021418 - RNA, 19 nt, Homo sapiens
  misc_RNA (1)...(19): siRNA sense strand
ucaggacccucacgcuacu

SEQ ID NO: 2021419 - RNA, 19 nt, Homo sapiens
  misc_RNA (1)...(19): siRNA sense strand
cggcugaugcugagucuag

SEQ ID NO: 2021420 - RNA, 19 nt, Homo sapiens
  misc_RNA (1)...(19): siRNA sense strand
agaggagaccuucaguuuc

SEQ ID NO: 2021421 - RNA, 19 nt, Homo sapiens
  misc_RNA (1)...(19): siRNA sense strand
gaucucaccugaauuauuu

SEQ ID NO: 2021422 - RNA, 19 nt, Homo sapiens
  misc_RNA (1)...(19): siRNA sense strand
ucagaaggcugguauauuu

SEQ ID NO: 2021423 - RNA, 19 nt, Homo sapiens
  misc_RNA (1)...(19): siRNA sense strand
gaucauagaugucauagau

SEQ ID NO: 2021424 - RNA, 19 nt, Homo sapiens
  misc_RNA (1)...(19): siRNA sense strand
gaacagggcuauuacuuag

SEQ ID NO: 2021425 - RNA, 19 nt, Homo sapiens
  misc_RNA (1)...(19): siRNA sense strand
ggaagaagaugccagauca

SEQ ID NO: 2021426 - RNA, 19 nt, Homo sapiens
  misc_RNA (1)...(19): siRNA sense strand
caauagagcagcagucuua

SEQ ID NO: 2021427 - RNA, 19 nt, Homo sapiens
  misc_RNA (1)...(19): siRNA sense strand
ccaaggaaguggaacauuu

SEQ ID NO: 2021428 - RNA, 19 nt, Homo sapiens
  misc_RNA (1)...(19): siRNA sense strand
gaaaggagacucacuuaug

SEQ ID NO: 2021429 - RNA, 19 nt, Homo sapiens
  misc_RNA (1)...(19): siRNA sense strand
gaucuaauauccaaguuga

SEQ ID NO: 2021430 - RNA, 19 nt, Homo sapiens
  misc_RNA (1)...(19): siRNA sense strand
ucacuuaugugcacaauga

SEQ ID NO: 2021431 - RNA, 19 nt, Homo sapiens
  misc_RNA (1)...(19): siRNA sense strand
ggaaagaaauauccuacug

SEQ ID NO: 2021432 - RNA, 19 nt, Homo sapiens
  misc_RNA (1)...(19): siRNA sense strand
cuacugugcuguucauaua

SEQ ID NO: 2021433 - RNA, 19 nt, Homo sapiens
  misc_RNA (1)...(19): siRNA sense strand
gaagaggaaugauccagau

SEQ ID NO: 2021434 - RNA, 19 nt, Homo sapiens
  misc_RNA (1)...(19): siRNA sense strand
gcacugugacuucuuuaua

SEQ ID NO: 2021435 - RNA, 19 nt, Homo sapiens
  misc_RNA (1)...(19): siRNA sense strand
cuacaagccucaugaucua

SEQ ID NO: 2021436 - RNA, 19 nt, Homo sapiens
  misc_RNA (1)...(19): siRNA sense strand
ggaauugcuucuuacgauu

SEQ ID NO: 2021437 - RNA, 19 nt, Homo sapiens
  misc_RNA (1)...(19): siRNA sense strand
gaauugcuucuuacgauua

SEQ ID NO: 2021438 - RNA, 19 nt, Homo sapiens
  misc_RNA (1)...(19): siRNA sense strand
gaagaaaggagacucacuu

SEQ ID NO: 2021439 - RNA, 19 nt, Homo sapiens
  misc_RNA (1)...(19): siRNA sense strand
uagcaacgauauuuggaua

SEQ ID NO: 2021440 - RNA, 19 nt, Homo sapiens
  misc_RNA (1)...(19): siRNA sense strand
gaaggaaggaucauagaug

SEQ ID NO: 2021441 - RNA, 19 nt, Homo sapiens
  misc_RNA (1)...(19): siRNA sense strand
gaccguggcuacucacauu

SEQ ID NO: 2021442 - RNA, 19 nt, Homo sapiens
  misc_RNA (1)...(19): siRNA sense strand
aaaggagacucacuuaugu

SEQ ID NO: 2021443 - RNA, 19 nt, Homo sapiens
  misc_RNA (1)...(19): siRNA sense strand
gaagaggaaauugaguuua

SEQ ID NO: 2021444 - RNA, 19 nt, Homo sapiens
  misc_RNA (1)...(19): siRNA sense strand
aaucugagguggaaauuau

SEQ ID NO: 2021445 - RNA, 19 nt, Homo sapiens
  misc_RNA (1)...(19): siRNA sense strand
ucgagaagaagaacuauua

SEQ ID NO: 2021446 - RNA, 19 nt, Homo sapiens
  misc_RNA (1)...(19): siRNA sense strand
guugaucucaccugaauua

SEQ ID NO: 2021447 - RNA, 19 nt, Homo sapiens
  misc_RNA (1)...(19): siRNA sense strand
gaagaagaacuauuaagag

SEQ ID NO: 2021448 - RNA, 19 nt, Homo sapiens
  misc_RNA (1)...(19): siRNA sense strand
gggagaacauuaugaacug

SEQ ID NO: 2021449 - RNA, 19 nt, Homo sapiens
  misc_RNA (1)...(19): siRNA sense strand
ggagagacacagcauaaga

SEQ ID NO: 2021450 - RNA, 19 nt, Homo sapiens
  misc_RNA (1)...(19): siRNA sense strand
ugaacagggcuauuacuua

SEQ ID NO: 2021451 - RNA, 19 nt, Homo sapiens
  misc_RNA (1)...(19): siRNA sense strand
gaaaggcagagacucauug

SEQ ID NO: 2021452 - RNA, 19 nt, Homo sapiens
  misc_RNA (1)...(19): siRNA sense strand
agaaugaacagggcuauua

SEQ ID NO: 2021453 - RNA, 19 nt, Homo sapiens
  misc_RNA (1)...(19): siRNA sense strand
gaaagaaauauccuacugu

SEQ ID NO: 2021454 - RNA, 19 nt, Homo sapiens
  misc_RNA (1)...(19): siRNA sense strand
cacugugacuucuuuauaa

SEQ ID NO: 2021455 - RNA, 19 nt, Homo sapiens
  misc_RNA (1)...(19): siRNA sense strand
ccaaguugaugaagucaga

SEQ ID NO: 2021456 - RNA, 19 nt, Homo sapiens
  misc_RNA (1)...(19): siRNA sense strand
gcauaagaguuccugaauc

SEQ ID NO: 2021457 - RNA, 19 nt, Homo sapiens
  misc_RNA (1)...(19): siRNA sense strand
ccaagaagaauuugauaga

SEQ ID NO: 2021458 - RNA, 19 nt, Homo sapiens
  misc_RNA (1)...(19): siRNA sense strand
gaagaugacccaacuugca

SEQ ID NO: 2021459 - RNA, 19 nt, Homo sapiens
  misc_RNA (1)...(19): siRNA sense strand
acaaugagcuagccaacau

SEQ ID NO: 2021460 - RNA, 19 nt, Homo sapiens
  misc_RNA (1)...(19): siRNA sense strand
cauaagaguuccugaaucg

SEQ ID NO: 2021461 - RNA, 19 nt, Homo sapiens
  misc_RNA (1)...(19): siRNA sense strand
uuacugcucuuacaugguu

SEQ ID NO: 2021462 - RNA, 19 nt, Homo sapiens
  misc_RNA (1)...(19): siRNA sense strand
caggauacacggaacguua

SEQ ID NO: 2021463 - RNA, 19 nt, Homo sapiens
  misc_RNA (1)...(19): siRNA sense strand
cagcagcaauggaaacaga

SEQ ID NO: 2021464 - RNA, 19 nt, Homo sapiens
  misc_RNA (1)...(19): siRNA sense strand
gcagauucauuccguuauc

SEQ ID NO: 2021465 - RNA, 19 nt, Homo sapiens
  misc_RNA (1)...(19): siRNA sense strand
uggaaagccauaugauuua

SEQ ID NO: 2021466 - RNA, 19 nt, Homo sapiens
  misc_RNA (1)...(19): siRNA sense strand
ucaaguguccuaucaaaga

SEQ ID NO: 2021467 - RNA, 19 nt, Homo sapiens
  misc_RNA (1)...(19): siRNA sense strand
gauuucaaguguccuauca

SEQ ID NO: 2021468 - RNA, 19 nt, Homo sapiens
  misc_RNA (1)...(19): siRNA sense strand
ggaaagcaaauauaaacga

SEQ ID NO: 2021469 - RNA, 19 nt, Homo sapiens
  misc_RNA (1)...(19): siRNA sense strand
ugucauagauaaggaacua

SEQ ID NO: 2021470 - RNA, 19 nt, Homo sapiens
  misc_RNA (1)...(19): siRNA sense strand
cuguggaucuucuaugaua

SEQ ID NO: 2021471 - RNA, 19 nt, Homo sapiens
  misc_RNA (1)...(19): siRNA sense strand
uaucaaguccugaagauga

SEQ ID NO: 2021472 - RNA, 19 nt, Homo sapiens
  misc_RNA (1)...(19): siRNA sense strand
ccagaagaauccacacugu

SEQ ID NO: 2021473 - RNA, 19 nt, Homo sapiens
  misc_RNA (1)...(19): siRNA sense strand
guaaguauaguaaccagaa

SEQ ID NO: 2021474 - RNA, 19 nt, Homo sapiens
  misc_RNA (1)...(19): siRNA sense strand
gaagaugauguuauggaaa

SEQ ID NO: 2021475 - RNA, 19 nt, Homo sapiens
  misc_RNA (1)...(19): siRNA sense strand
ggaaguggaacauuucugu

SEQ ID NO: 2021476 - RNA, 19 nt, Homo sapiens
  misc_RNA (1)...(19): siRNA sense strand
ugacuauacuccuccagaa

SEQ ID NO: 2021477 - RNA, 19 nt, Homo sapiens
  misc_RNA (1)...(19): siRNA sense strand
gcuaucaaguccugaagau

SEQ ID NO: 2021478 - RNA, 19 nt, Homo sapiens
  misc_RNA (1)...(19): siRNA sense strand
aguagaagaugauguuaug

SEQ ID NO: 2021479 - RNA, 19 nt, Homo sapiens
  misc_RNA (1)...(19): siRNA sense strand
ggaaggaucauagauguca

SEQ ID NO: 2021480 - RNA, 19 nt, Homo sapiens
  misc_RNA (1)...(19): siRNA sense strand
gaaacaaggagggcagauu

SEQ ID NO: 2021481 - RNA, 19 nt, Homo sapiens
  misc_RNA (1)...(19): siRNA sense strand
uuggauaucuaacaucgua

SEQ ID NO: 2021482 - RNA, 19 nt, Homo sapiens
  misc_RNA (1)...(19): siRNA sense strand
ggccuaaauuggagccuuu

SEQ ID NO: 2021483 - RNA, 19 nt, Homo sapiens
  misc_RNA (1)...(19): siRNA sense strand
acagcuggguguugagaua

SEQ ID NO: 2021484 - RNA, 19 nt, Homo sapiens
  misc_RNA (1)...(19): siRNA sense strand
gggcagauucauuccguua

SEQ ID NO: 2021485 - RNA, 19 nt, Homo sapiens
  misc_RNA (1)...(19): siRNA sense strand
agaagaugauguuauggaa

SEQ ID NO: 2021486 - RNA, 19 nt, Homo sapiens
  misc_RNA (1)...(19): siRNA sense strand
caggagagacacagcauaa

SEQ ID NO: 2021487 - RNA, 19 nt, Homo sapiens
  misc_RNA (1)...(19): siRNA sense strand
ggaaagccauaugauuuac

SEQ ID NO: 2021488 - RNA, 19 nt, Homo sapiens
  misc_RNA (1)...(19): siRNA sense strand
ugacgccacuaauuaucua

SEQ ID NO: 2021489 - RNA, 19 nt, Homo sapiens
  misc_RNA (1)...(19): siRNA sense strand
gaagucagaaggcugguau

SEQ ID NO: 2021490 - RNA, 19 nt, Homo sapiens
  misc_RNA (1)...(19): siRNA sense strand
caucguaaccagagaagaa

SEQ ID NO: 2021491 - RNA, 19 nt, Homo sapiens
  misc_RNA (1)...(19): siRNA sense strand
aaccuuggaucacguauug

SEQ ID NO: 2021492 - RNA, 19 nt, Homo sapiens
  misc_RNA (1)...(19): siRNA sense strand
gcuaaggcaccacaugauu

SEQ ID NO: 2021493 - RNA, 19 nt, Homo sapiens
  misc_RNA (1)...(19): siRNA sense strand
aaagaggagauagcaauua

SEQ ID NO: 2021494 - RNA, 19 nt, Homo sapiens
  misc_RNA (1)...(19): siRNA sense strand
caaagaggagauagcaauu

SEQ ID NO: 2021495 - RNA, 19 nt, Homo sapiens
  misc_RNA (1)...(19): siRNA sense strand
ggaaaggcagagacucauu

SEQ ID NO: 2021496 - RNA, 19 nt, Homo sapiens
  misc_RNA (1)...(19): siRNA sense strand
gaaagaaaacgcauuggaa

SEQ ID NO: 2021497 - RNA, 19 nt, Homo sapiens
  misc_RNA (1)...(19): siRNA sense strand
cuggaaagccauaugauuu

SEQ ID NO: 2021498 - RNA, 19 nt, Homo sapiens
  misc_RNA (1)...(19): siRNA sense strand
ucagcacugugacuucuuu

SEQ ID NO: 2021499 - RNA, 19 nt, Homo sapiens
  misc_RNA (1)...(19): siRNA sense strand
ucugugacgccacuaauua

SEQ ID NO: 2021500 - RNA, 19 nt, Homo sapiens
  misc_RNA (1)...(19): siRNA sense strand
gaaggaguugaauauauug

SEQ ID NO: 2021501 - RNA, 19 nt, Homo sapiens
  misc_RNA (1)...(19): siRNA sense strand
ggaacuaauucaaccuuuu

SEQ ID NO: 2021502 - RNA, 19 nt, Homo sapiens
  misc_RNA (1)...(19): siRNA sense strand
cggaauugcuucuuacgau

SEQ ID NO: 2021503 - RNA, 19 nt, Homo sapiens
  misc_RNA (1)...(19): siRNA sense strand
gaaucugagguggaaauua

SEQ ID NO: 2021504 - RNA, 19 nt, Homo sapiens
  misc_RNA (1)...(19): siRNA sense strand
agacacagcauaagaguuc

SEQ ID NO: 2021505 - RNA, 19 nt, Homo sapiens
  misc_RNA (1)...(19): siRNA sense strand
cgaagaggaaauugaguuu

SEQ ID NO: 2021506 - RNA, 19 nt, Homo sapiens
  misc_RNA (1)...(19): siRNA sense strand
ugaggagaauauugaauca

SEQ ID NO: 2021507 - RNA, 19 nt, Homo sapiens
  misc_RNA (1)...(19): siRNA sense strand
gcuggaaagccauaugauu

SEQ ID NO: 2021508 - RNA, 19 nt, Homo sapiens
  misc_RNA (1)...(19): siRNA sense strand
aaggaaggaucauagaugu

SEQ ID NO: 2021509 - RNA, 19 nt, Homo sapiens
  misc_RNA (1)...(19): siRNA sense strand
cagucggaauugcuucuua

SEQ ID NO: 2021510 - RNA, 19 nt, Homo sapiens
  misc_RNA (1)...(19): siRNA sense strand
ucaagccgguaguggaauu

SEQ ID NO: 2021511 - RNA, 19 nt, Homo sapiens
  misc_RNA (1)...(19): siRNA sense strand
ucaaagaggagauagcaau

SEQ ID NO: 2021512 - RNA, 19 nt, Homo sapiens
  misc_RNA (1)...(19): siRNA sense strand
uuucaaguguccuaucaaa

SEQ ID NO: 2021513 - RNA, 19 nt, Homo sapiens
  misc_RNA (1)...(19): siRNA sense strand
guguugaucucaccugaau

SEQ ID NO: 2021514 - RNA, 19 nt, Homo sapiens
  misc_RNA (1)...(19): siRNA sense strand
gguggaaauuauucauguu

SEQ ID NO: 2021515 - RNA, 19 nt, Homo sapiens
  misc_RNA (1)...(19): siRNA sense strand
aagaaaggagacucacuua

SEQ ID NO: 2021516 - RNA, 19 nt, Homo sapiens
  misc_RNA (1)...(19): siRNA sense strand
ggauacacggaacguuaua

SEQ ID NO: 2021517 - RNA, 19 nt, Homo sapiens
  misc_RNA (1)...(19): siRNA sense strand
cuaaggcaccacaugauuu

SEQ ID NO: 2021518 - RNA, 19 nt, Homo sapiens
  misc_RNA (1)...(19): siRNA sense strand
gauggacuccugagggaaa

SEQ ID NO: 2021519 - RNA, 19 nt, Homo sapiens
  misc_RNA (1)...(19): siRNA sense strand
gauucuauuugaaggaguu

SEQ ID NO: 2021520 - RNA, 19 nt, Homo sapiens
  misc_RNA (1)...(19): siRNA sense strand
uagccaacauggaagaaga

SEQ ID NO: 2021521 - RNA, 19 nt, Homo sapiens
  misc_RNA (1)...(19): siRNA sense strand
gaucucaccugaauuauuu

SEQ ID NO: 2021522 - RNA, 19 nt, Homo sapiens
  misc_RNA (1)...(19): siRNA sense strand
ucagaaggcugguauauuu

SEQ ID NO: 2021523 - RNA, 19 nt, Homo sapiens
  misc_RNA (1)...(19): siRNA sense strand
gaucauagaugucauagau

SEQ ID NO: 2021524 - RNA, 19 nt, Homo sapiens
  misc_RNA (1)...(19): siRNA sense strand
gaacagggcuauuacuuag

SEQ ID NO: 2021525 - RNA, 19 nt, Homo sapiens
  misc_RNA (1)...(19): siRNA sense strand
ggaagaagaugccagauca

SEQ ID NO: 2021526 - RNA, 19 nt, Homo sapiens
  misc_RNA (1)...(19): siRNA sense strand
caauagagcagcagucuua

SEQ ID NO: 2021527 - RNA, 19 nt, Homo sapiens
  misc_RNA (1)...(19): siRNA sense strand
ccaaggaaguggaacauuu

SEQ ID NO: 2021528 - RNA, 19 nt, Homo sapiens
  misc_RNA (1)...(19): siRNA sense strand
gaaaggagacucacuuaug

SEQ ID NO: 2021529 - RNA, 19 nt, Homo sapiens
  misc_RNA (1)...(19): siRNA sense strand
gaucuaauauccaaguuga

SEQ ID NO: 2021530 - RNA, 19 nt, Homo sapiens
  misc_RNA (1)...(19): siRNA sense strand
ucacuuaugugcacaauga

SEQ ID NO: 2021531 - RNA, 19 nt, Homo sapiens
  misc_RNA (1)...(19): siRNA sense strand
ggaaagaaauauccuacug

SEQ ID NO: 2021532 - RNA, 19 nt, Homo sapiens
  misc_RNA (1)...(19): siRNA sense strand
cuacugugcuguucauaua

SEQ ID NO: 2021533 - RNA, 19 nt, Homo sapiens
  misc_RNA (1)...(19): siRNA sense strand
gaagaggaaugauccagau

SEQ ID NO: 2021534 - RNA, 19 nt, Homo sapiens
  misc_RNA (1)...(19): siRNA sense strand
gcacugugacuucuuuaua

SEQ ID NO: 2021535 - RNA, 19 nt, Homo sapiens
  misc_RNA (1)...(19): siRNA sense strand
cuacaagccucaugaucua

SEQ ID NO: 2021536 - RNA, 19 nt, Homo sapiens
  misc_RNA (1)...(19): siRNA sense strand
ggaauugcuucuuacgauu

SEQ ID NO: 2021537 - RNA, 19 nt, Homo sapiens
  misc_RNA (1)...(19): siRNA sense strand
gaauugcuucuuacgauua

SEQ ID NO: 2021538 - RNA, 19 nt, Homo sapiens
  misc_RNA (1)...(19): siRNA sense strand
gaagaaaggagacucacuu

SEQ ID NO: 2021539 - RNA, 19 nt, Homo sapiens
  misc_RNA (1)...(19): siRNA sense strand
uagcaacgauauuuggaua

SEQ ID NO: 2021540 - RNA, 19 nt, Homo sapiens
  misc_RNA (1)...(19): siRNA sense strand
gaaggaaggaucauagaug

SEQ ID NO: 2021541 - RNA, 19 nt, Homo sapiens
  misc_RNA (1)...(19): siRNA sense strand
gaccguggcuacucacauu

SEQ ID NO: 2021542 - RNA, 19 nt, Homo sapiens
  misc_RNA (1)...(19): siRNA sense strand
aaaggagacucacuuaugu

SEQ ID NO: 2021543 - RNA, 19 nt, Homo sapiens
  misc_RNA (1)...(19): siRNA sense strand
gaagaggaaauugaguuua

SEQ ID NO: 2021544 - RNA, 19 nt, Homo sapiens
  misc_RNA (1)...(19): siRNA sense strand
aaucugagguggaaauuau

SEQ ID NO: 2021545 - RNA, 19 nt, Homo sapiens
  misc_RNA (1)...(19): siRNA sense strand
ucgagaagaagaacuauua

SEQ ID NO: 2021546 - RNA, 19 nt, Homo sapiens
  misc_RNA (1)...(19): siRNA sense strand
guugaucucaccugaauua

SEQ ID NO: 2021547 - RNA, 19 nt, Homo sapiens
  misc_RNA (1)...(19): siRNA sense strand
gaagaagaacuauuaagag

SEQ ID NO: 2021548 - RNA, 19 nt, Homo sapiens
  misc_RNA (1)...(19): siRNA sense strand
gggagaacauuaugaacug

SEQ ID NO: 2021549 - RNA, 19 nt, Homo sapiens
  misc_RNA (1)...(19): siRNA sense strand
ggagagacacagcauaaga

SEQ ID NO: 2021550 - RNA, 19 nt, Homo sapiens
  misc_RNA (1)...(19): siRNA sense strand
ugaacagggcuauuacuua

SEQ ID NO: 2021551 - RNA, 19 nt, Homo sapiens
  misc_RNA (1)...(19): siRNA sense strand
gaaaggcagagacucauug

SEQ ID NO: 2021552 - RNA, 19 nt, Homo sapiens
  misc_RNA (1)...(19): siRNA sense strand
agaaugaacagggcuauua

SEQ ID NO: 2021553 - RNA, 19 nt, Homo sapiens
  misc_RNA (1)...(19): siRNA sense strand
gaaagaaauauccuacugu

SEQ ID NO: 2021554 - RNA, 19 nt, Homo sapiens
  misc_RNA (1)...(19): siRNA sense strand
cacugugacuucuuuauaa

SEQ ID NO: 2021555 - RNA, 19 nt, Homo sapiens
  misc_RNA (1)...(19): siRNA sense strand
ccaaguugaugaagucaga

SEQ ID NO: 2021556 - RNA, 19 nt, Homo sapiens
  misc_RNA (1)...(19): siRNA sense strand
gcauaagaguuccugaauc

SEQ ID NO: 2021557 - RNA, 19 nt, Homo sapiens
  misc_RNA (1)...(19): siRNA sense strand
ccaagaagaauuugauaga

SEQ ID NO: 2021558 - RNA, 19 nt, Homo sapiens
  misc_RNA (1)...(19): siRNA sense strand
gaagaugacccaacuugca

SEQ ID NO: 2021559 - RNA, 19 nt, Homo sapiens
  misc_RNA (1)...(19): siRNA sense strand
acaaugagcuagccaacau

SEQ ID NO: 2021560 - RNA, 19 nt, Homo sapiens
  misc_RNA (1)...(19): siRNA sense strand
cauaagaguuccugaaucg

SEQ ID NO: 2021561 - RNA, 19 nt, Homo sapiens
  misc_RNA (1)...(19): siRNA sense strand
uuacugcucuuacaugguu

SEQ ID NO: 2021562 - RNA, 19 nt, Homo sapiens
  misc_RNA (1)...(19): siRNA sense strand
caggauacacggaacguua

SEQ ID NO: 2021563 - RNA, 19 nt, Homo sapiens
  misc_RNA (1)...(19): siRNA sense strand
cagcagcaauggaaacaga

SEQ ID NO: 2021564 - RNA, 19 nt, Homo sapiens
  misc_RNA (1)...(19): siRNA sense strand
gcagauucauuccguuauc

SEQ ID NO: 2021565 - RNA, 19 nt, Homo sapiens
  misc_RNA (1)...(19): siRNA sense strand
uggaaagccauaugauuua

SEQ ID NO: 2021566 - RNA, 19 nt, Homo sapiens
  misc_RNA (1)...(19): siRNA sense strand
ucaaguguccuaucaaaga

SEQ ID NO: 2021567 - RNA, 19 nt, Homo sapiens
  misc_RNA (1)...(19): siRNA sense strand
gauuucaaguguccuauca

SEQ ID NO: 2021568 - RNA, 19 nt, Homo sapiens
  misc_RNA (1)...(19): siRNA sense strand
ggaaagcaaauauaaacga

SEQ ID NO: 2021569 - RNA, 19 nt, Homo sapiens
  misc_RNA (1)...(19): siRNA sense strand
ugucauagauaaggaacua

SEQ ID NO: 2021570 - RNA, 19 nt, Homo sapiens
  misc_RNA (1)...(19): siRNA sense strand
cuguggaucuucuaugaua

SEQ ID NO: 2021571 - RNA, 19 nt, Homo sapiens
  misc_RNA (1)...(19): siRNA sense strand
uaucaaguccugaagauga

SEQ ID NO: 2021572 - RNA, 19 nt, Homo sapiens
  misc_RNA (1)...(19): siRNA sense strand
ccagaagaauccacacugu

SEQ ID NO: 2021573 - RNA, 19 nt, Homo sapiens
  misc_RNA (1)...(19): siRNA sense strand
guaaguauaguaaccagaa

SEQ ID NO: 2021574 - RNA, 19 nt, Homo sapiens
  misc_RNA (1)...(19): siRNA sense strand
gaagaugauguuauggaaa

SEQ ID NO: 2021575 - RNA, 19 nt, Homo sapiens
  misc_RNA (1)...(19): siRNA sense strand
ggaaguggaacauuucugu

SEQ ID NO: 2021576 - RNA, 19 nt, Homo sapiens
  misc_RNA (1)...(19): siRNA sense strand
ugacuauacuccuccagaa

SEQ ID NO: 2021577 - RNA, 19 nt, Homo sapiens
  misc_RNA (1)...(19): siRNA sense strand
gcuaucaaguccugaagau

SEQ ID NO: 2021578 - RNA, 19 nt, Homo sapiens
  misc_RNA (1)...(19): siRNA sense strand
aguagaagaugauguuaug

SEQ ID NO: 2021579 - RNA, 19 nt, Homo sapiens
  misc_RNA (1)...(19): siRNA sense strand
ggaaggaucauagauguca

SEQ ID NO: 2021580 - RNA, 19 nt, Homo sapiens
  misc_RNA (1)...(19): siRNA sense strand
gaaacaaggagggcagauu

SEQ ID NO: 2021581 - RNA, 19 nt, Homo sapiens
  misc_RNA (1)...(19): siRNA sense strand
uuggauaucuaacaucgua

SEQ ID NO: 2021582 - RNA, 19 nt, Homo sapiens
  misc_RNA (1)...(19): siRNA sense strand
ggccuaaauuggagccuuu

SEQ ID NO: 2021583 - RNA, 19 nt, Homo sapiens
  misc_RNA (1)...(19): siRNA sense strand
acagcuggguguugagaua

SEQ ID NO: 2021584 - RNA, 19 nt, Homo sapiens
  misc_RNA (1)...(19): siRNA sense strand
gggcagauucauuccguua

SEQ ID NO: 2021585 - RNA, 19 nt, Homo sapiens
  misc_RNA (1)...(19): siRNA sense strand
agaagaugauguuauggaa

SEQ ID NO: 2021586 - RNA, 19 nt, Homo sapiens
  misc_RNA (1)...(19): siRNA sense strand
caggagagacacagcauaa

SEQ ID NO: 2021587 - RNA, 19 nt, Homo sapiens
  misc_RNA (1)...(19): siRNA sense strand
ggaaagccauaugauuuac

SEQ ID NO: 2021588 - RNA, 19 nt, Homo sapiens
  misc_RNA (1)...(19): siRNA sense strand
ugacgccacuaauuaucua

SEQ ID NO: 2021589 - RNA, 19 nt, Homo sapiens
  misc_RNA (1)...(19): siRNA sense strand
gaagucagaaggcugguau

SEQ ID NO: 2021590 - RNA, 19 nt, Homo sapiens
  misc_RNA (1)...(19): siRNA sense strand
caucguaaccagagaagaa

SEQ ID NO: 2021591 - RNA, 19 nt, Homo sapiens
  misc_RNA (1)...(19): siRNA sense strand
aaccuuggaucacguauug

SEQ ID NO: 2021592 - RNA, 19 nt, Homo sapiens
  misc_RNA (1)...(19): siRNA sense strand
gcuaaggcaccacaugauu

SEQ ID NO: 2021593 - RNA, 19 nt, Homo sapiens
  misc_RNA (1)...(19): siRNA sense strand
aaagaggagauagcaauua

SEQ ID NO: 2021594 - RNA, 19 nt, Homo sapiens
  misc_RNA (1)...(19): siRNA sense strand
caaagaggagauagcaauu

SEQ ID NO: 2021595 - RNA, 19 nt, Homo sapiens
  misc_RNA (1)...(19): siRNA sense strand
ggaaaggcagagacucauu

SEQ ID NO: 2021596 - RNA, 19 nt, Homo sapiens
  misc_RNA (1)...(19): siRNA sense strand
gaaagaaaacgcauuggaa

SEQ ID NO: 2021597 - RNA, 19 nt, Homo sapiens
  misc_RNA (1)...(19): siRNA sense strand
cuggaaagccauaugauuu

SEQ ID NO: 2021598 - RNA, 19 nt, Homo sapiens
  misc_RNA (1)...(19): siRNA sense strand
ucagcacugugacuucuuu

SEQ ID NO: 2021599 - RNA, 19 nt, Homo sapiens
  misc_RNA (1)...(19): siRNA sense strand
ucugugacgccacuaauua

SEQ ID NO: 2021600 - RNA, 19 nt, Homo sapiens
  misc_RNA (1)...(19): siRNA sense strand
gaaggaguugaauauauug

SEQ ID NO: 2021601 - RNA, 19 nt, Homo sapiens
  misc_RNA (1)...(19): siRNA sense strand
ggaacuaauucaaccuuuu

SEQ ID NO: 2021602 - RNA, 19 nt, Homo sapiens
  misc_RNA (1)...(19): siRNA sense strand
cggaauugcuucuuacgau

SEQ ID NO: 2021603 - RNA, 19 nt, Homo sapiens
  misc_RNA (1)...(19): siRNA sense strand
gaaucugagguggaaauua

SEQ ID NO: 2021604 - RNA, 19 nt, Homo sapiens
  misc_RNA (1)...(19): siRNA sense strand
agacacagcauaagaguuc

SEQ ID NO: 2021605 - RNA, 19 nt, Homo sapiens
  misc_RNA (1)...(19): siRNA sense strand
cgaagaggaaauugaguuu

SEQ ID NO: 2021606 - RNA, 19 nt, Homo sapiens
  misc_RNA (1)...(19): siRNA sense strand
ugaggagaauauugaauca

SEQ ID NO: 2021607 - RNA, 19 nt, Homo sapiens
  misc_RNA (1)...(19): siRNA sense strand
gcuggaaagccauaugauu

SEQ ID NO: 2021608 - RNA, 19 nt, Homo sapiens
  misc_RNA (1)...(19): siRNA sense strand
aaggaaggaucauagaugu

SEQ ID NO: 2021609 - RNA, 19 nt, Homo sapiens
  misc_RNA (1)...(19): siRNA sense strand
cagucggaauugcuucuua

SEQ ID NO: 2021610 - RNA, 19 nt, Homo sapiens
  misc_RNA (1)...(19): siRNA sense strand
ucaagccgguaguggaauu

SEQ ID NO: 2021611 - RNA, 19 nt, Homo sapiens
  misc_RNA (1)...(19): siRNA sense strand
ucaaagaggagauagcaau

SEQ ID NO: 2021612 - RNA, 19 nt, Homo sapiens
  misc_RNA (1)...(19): siRNA sense strand
uuucaaguguccuaucaaa

SEQ ID NO: 2021613 - RNA, 19 nt, Homo sapiens
  misc_RNA (1)...(19): siRNA sense strand
guguugaucucaccugaau

SEQ ID NO: 2021614 - RNA, 19 nt, Homo sapiens
  misc_RNA (1)...(19): siRNA sense strand
gguggaaauuauucauguu

SEQ ID NO: 2021615 - RNA, 19 nt, Homo sapiens
  misc_RNA (1)...(19): siRNA sense strand
aagaaaggagacucacuua

SEQ ID NO: 2021616 - RNA, 19 nt, Homo sapiens
  misc_RNA (1)...(19): siRNA sense strand
ggauacacggaacguuaua

SEQ ID NO: 2021617 - RNA, 19 nt, Homo sapiens
  misc_RNA (1)...(19): siRNA sense strand
cuaaggcaccacaugauuu

SEQ ID NO: 2021618 - RNA, 19 nt, Homo sapiens
  misc_RNA (1)...(19): siRNA sense strand
gauggacuccugagggaaa

SEQ ID NO: 2021619 - RNA, 19 nt, Homo sapiens
  misc_RNA (1)...(19): siRNA sense strand
gauucuauuugaaggaguu

SEQ ID NO: 2021620 - RNA, 19 nt, Homo sapiens
  misc_RNA (1)...(19): siRNA sense strand
uagccaacauggaagaaga

SEQ ID NO: 2021621 - RNA, 19 nt, Homo sapiens
  misc_RNA (1)...(19): siRNA sense strand
gaucucaccugaauuauuu

SEQ ID NO: 2021622 - RNA, 19 nt, Homo sapiens
  misc_RNA (1)...(19): siRNA sense strand
ucagaaggcugguauauuu

SEQ ID NO: 2021623 - RNA, 19 nt, Homo sapiens
  misc_RNA (1)...(19): siRNA sense strand
gaucauagaugucauagau

SEQ ID NO: 2021624 - RNA, 19 nt, Homo sapiens
  misc_RNA (1)...(19): siRNA sense strand
gaacagggcuauuacuuag

SEQ ID NO: 2021625 - RNA, 19 nt, Homo sapiens
  misc_RNA (1)...(19): siRNA sense strand
ggaagaagaugccagauca

SEQ ID NO: 2021626 - RNA, 19 nt, Homo sapiens
  misc_RNA (1)...(19): siRNA sense strand
caauagagcagcagucuua

SEQ ID NO: 2021627 - RNA, 19 nt, Homo sapiens
  misc_RNA (1)...(19): siRNA sense strand
ccaaggaaguggaacauuu

SEQ ID NO: 2021628 - RNA, 19 nt, Homo sapiens
  misc_RNA (1)...(19): siRNA sense strand
gaaaggagacucacuuaug

SEQ ID NO: 2021629 - RNA, 19 nt, Homo sapiens
  misc_RNA (1)...(19): siRNA sense strand
gaucuaauauccaaguuga

SEQ ID NO: 2021630 - RNA, 19 nt, Homo sapiens
  misc_RNA (1)...(19): siRNA sense strand
ucacuuaugugcacaauga

SEQ ID NO: 2021631 - RNA, 19 nt, Homo sapiens
  misc_RNA (1)...(19): siRNA sense strand
ggaaagaaauauccuacug

SEQ ID NO: 2021632 - RNA, 19 nt, Homo sapiens
  misc_RNA (1)...(19): siRNA sense strand
cuacugugcuguucauaua

SEQ ID NO: 2021633 - RNA, 19 nt, Homo sapiens
  misc_RNA (1)...(19): siRNA sense strand
gaagaggaaugauccagau

SEQ ID NO: 2021634 - RNA, 19 nt, Homo sapiens
  misc_RNA (1)...(19): siRNA sense strand
gcacugugacuucuuuaua

SEQ ID NO: 2021635 - RNA, 19 nt, Homo sapiens
  misc_RNA (1)...(19): siRNA sense strand
cuacaagccucaugaucua

SEQ ID NO: 2021636 - RNA, 19 nt, Homo sapiens
  misc_RNA (1)...(19): siRNA sense strand
ggaauugcuucuuacgauu

SEQ ID NO: 2021637 - RNA, 19 nt, Homo sapiens
  misc_RNA (1)...(19): siRNA sense strand
gaauugcuucuuacgauua

SEQ ID NO: 2021638 - RNA, 19 nt, Homo sapiens
  misc_RNA (1)...(19): siRNA sense strand
gaagaaaggagacucacuu

SEQ ID NO: 2021639 - RNA, 19 nt, Homo sapiens
  misc_RNA (1)...(19): siRNA sense strand
uagcaacgauauuuggaua

SEQ ID NO: 2021640 - RNA, 19 nt, Homo sapiens
  misc_RNA (1)...(19): siRNA sense strand
gaaggaaggaucauagaug

SEQ ID NO: 2021641 - RNA, 19 nt, Homo sapiens
  misc_RNA (1)...(19): siRNA sense strand
gaccguggcuacucacauu

SEQ ID NO: 2021642 - RNA, 19 nt, Homo sapiens
  misc_RNA (1)...(19): siRNA sense strand
aaaggagacucacuuaugu

SEQ ID NO: 2021643 - RNA, 19 nt, Homo sapiens
  misc_RNA (1)...(19): siRNA sense strand
gaagaggaaauugaguuua

SEQ ID NO: 2021644 - RNA, 19 nt, Homo sapiens
  misc_RNA (1)...(19): siRNA sense strand
aaucugagguggaaauuau

SEQ ID NO: 2021645 - RNA, 19 nt, Homo sapiens
  misc_RNA (1)...(19): siRNA sense strand
ucgagaagaagaacuauua

SEQ ID NO: 2021646 - RNA, 19 nt, Homo sapiens
  misc_RNA (1)...(19): siRNA sense strand
guugaucucaccugaauua

SEQ ID NO: 2021647 - RNA, 19 nt, Homo sapiens
  misc_RNA (1)...(19): siRNA sense strand
caacauggcagcagcaaug

SEQ ID NO: 2021648 - RNA, 19 nt, Homo sapiens
  misc_RNA (1)...(19): siRNA sense strand
gaagaagaacuauuaagag

SEQ ID NO: 2021649 - RNA, 19 nt, Homo sapiens
  misc_RNA (1)...(19): siRNA sense strand
gggagaacauuaugaacug

SEQ ID NO: 2021650 - RNA, 19 nt, Homo sapiens
  misc_RNA (1)...(19): siRNA sense strand
ggagagacacagcauaaga

SEQ ID NO: 2021651 - RNA, 19 nt, Homo sapiens
  misc_RNA (1)...(19): siRNA sense strand
ugaacagggcuauuacuua

SEQ ID NO: 2021652 - RNA, 19 nt, Homo sapiens
  misc_RNA (1)...(19): siRNA sense strand
gaaaggcagagacucauug

SEQ ID NO: 2021653 - RNA, 19 nt, Homo sapiens
  misc_RNA (1)...(19): siRNA sense strand
agaaugaacagggcuauua

SEQ ID NO: 2021654 - RNA, 19 nt, Homo sapiens
  misc_RNA (1)...(19): siRNA sense strand
gaaagaaauauccuacugu

SEQ ID NO: 2021655 - RNA, 19 nt, Homo sapiens
  misc_RNA (1)...(19): siRNA sense strand
cacugugacuucuuuauaa

SEQ ID NO: 2021656 - RNA, 19 nt, Homo sapiens
  misc_RNA (1)...(19): siRNA sense strand
ccaaguugaugaagucaga

SEQ ID NO: 2021657 - RNA, 19 nt, Homo sapiens
  misc_RNA (1)...(19): siRNA sense strand
gcauaagaguuccugaauc

SEQ ID NO: 2021658 - RNA, 19 nt, Homo sapiens
  misc_RNA (1)...(19): siRNA sense strand
ccaagaagaauuugauaga

SEQ ID NO: 2021659 - RNA, 19 nt, Homo sapiens
  misc_RNA (1)...(19): siRNA sense strand
gaagaugacccaacuugca

SEQ ID NO: 2021660 - RNA, 19 nt, Homo sapiens
  misc_RNA (1)...(19): siRNA sense strand
acaaugagcuagccaacau

SEQ ID NO: 2021661 - RNA, 19 nt, Homo sapiens
  misc_RNA (1)...(19): siRNA sense strand
cauaagaguuccugaaucg

SEQ ID NO: 2021662 - RNA, 19 nt, Homo sapiens
  misc_RNA (1)...(19): siRNA sense strand
uuacugcucuuacaugguu

SEQ ID NO: 2021663 - RNA, 19 nt, Homo sapiens
  misc_RNA (1)...(19): siRNA sense strand
caggauacacggaacguua

SEQ ID NO: 2021664 - RNA, 19 nt, Homo sapiens
  misc_RNA (1)...(19): siRNA sense strand
cagcagcaauggaaacaga

SEQ ID NO: 2021665 - RNA, 19 nt, Homo sapiens
  misc_RNA (1)...(19): siRNA sense strand
gcagauucauuccguuauc

SEQ ID NO: 2021666 - RNA, 19 nt, Homo sapiens
  misc_RNA (1)...(19): siRNA sense strand
uggaaagccauaugauuua

SEQ ID NO: 2021667 - RNA, 19 nt, Homo sapiens
  misc_RNA (1)...(19): siRNA sense strand
ucaaguguccuaucaaaga

SEQ ID NO: 2021668 - RNA, 19 nt, Homo sapiens
  misc_RNA (1)...(19): siRNA sense strand
gauuucaaguguccuauca

SEQ ID NO: 2021669 - RNA, 19 nt, Homo sapiens
  misc_RNA (1)...(19): siRNA sense strand
ggaaagcaaauauaaacga

SEQ ID NO: 2021670 - RNA, 19 nt, Homo sapiens
  misc_RNA (1)...(19): siRNA sense strand
ugucauagauaaggaacua

SEQ ID NO: 2021671 - RNA, 19 nt, Homo sapiens
  misc_RNA (1)...(19): siRNA sense strand
cuguggaucuucuaugaua

SEQ ID NO: 2021672 - RNA, 19 nt, Homo sapiens
  misc_RNA (1)...(19): siRNA sense strand
uaucaaguccugaagauga

SEQ ID NO: 2021673 - RNA, 19 nt, Homo sapiens
  misc_RNA (1)...(19): siRNA sense strand
ccagaagaauccacacugu

SEQ ID NO: 2021674 - RNA, 19 nt, Homo sapiens
  misc_RNA (1)...(19): siRNA sense strand
guaaguauaguaaccagaa

SEQ ID NO: 2021675 - RNA, 19 nt, Homo sapiens
  misc_RNA (1)...(19): siRNA sense strand
gaagaugauguuauggaaa

SEQ ID NO: 2021676 - RNA, 19 nt, Homo sapiens
  misc_RNA (1)...(19): siRNA sense strand
ggaaguggaacauuucugu

SEQ ID NO: 2021677 - RNA, 19 nt, Homo sapiens
  misc_RNA (1)...(19): siRNA sense strand
ugacuauacuccuccagaa

SEQ ID NO: 2021678 - RNA, 19 nt, Homo sapiens
  misc_RNA (1)...(19): siRNA sense strand
gcuaucaaguccugaagau

SEQ ID NO: 2021679 - RNA, 19 nt, Homo sapiens
  misc_RNA (1)...(19): siRNA sense strand
aguagaagaugauguuaug

SEQ ID NO: 2021680 - RNA, 19 nt, Homo sapiens
  misc_RNA (1)...(19): siRNA sense strand
ggaaggaucauagauguca

SEQ ID NO: 2021681 - RNA, 19 nt, Homo sapiens
  misc_RNA (1)...(19): siRNA sense strand
gaaacaaggagggcagauu

SEQ ID NO: 2021682 - RNA, 19 nt, Homo sapiens
  misc_RNA (1)...(19): siRNA sense strand
acagcuggguguugagaua

SEQ ID NO: 2021683 - RNA, 19 nt, Homo sapiens
  misc_RNA (1)...(19): siRNA sense strand
ggccuaaauuggagccuuu

SEQ ID NO: 2021684 - RNA, 19 nt, Homo sapiens
  misc_RNA (1)...(19): siRNA sense strand
gggcagauucauuccguua

SEQ ID NO: 2021685 - RNA, 19 nt, Homo sapiens
  misc_RNA (1)...(19): siRNA sense strand
uuggauaucuaacaucgua

SEQ ID NO: 2021686 - RNA, 19 nt, Homo sapiens
  misc_RNA (1)...(19): siRNA sense strand
agaagaugauguuauggaa

SEQ ID NO: 2021687 - RNA, 19 nt, Homo sapiens
  misc_RNA (1)...(19): siRNA sense strand
caggagagacacagcauaa

SEQ ID NO: 2021688 - RNA, 19 nt, Homo sapiens
  misc_RNA (1)...(19): siRNA sense strand
ggaaagccauaugauuuac

SEQ ID NO: 2021689 - RNA, 19 nt, Homo sapiens
  misc_RNA (1)...(19): siRNA sense strand
ugacgccacuaauuaucua

SEQ ID NO: 2021690 - RNA, 19 nt, Homo sapiens
  misc_RNA (1)...(19): siRNA sense strand
gaagucagaaggcugguau

SEQ ID NO: 2021691 - RNA, 19 nt, Homo sapiens
  misc_RNA (1)...(19): siRNA sense strand
gcuaaggcaccacaugauu

SEQ ID NO: 2021692 - RNA, 19 nt, Homo sapiens
  misc_RNA (1)...(19): siRNA sense strand
aaccuuggaucacguauug

SEQ ID NO: 2021693 - RNA, 19 nt, Homo sapiens
  misc_RNA (1)...(19): siRNA sense strand
aaagaggagauagcaauua

SEQ ID NO: 2021694 - RNA, 19 nt, Homo sapiens
  misc_RNA (1)...(19): siRNA sense strand
caaagaggagauagcaauu

SEQ ID NO: 2021695 - RNA, 19 nt, Homo sapiens
  misc_RNA (1)...(19): siRNA sense strand
ggaaaggcagagacucauu

SEQ ID NO: 2021696 - RNA, 19 nt, Homo sapiens
  misc_RNA (1)...(19): siRNA sense strand
caucguaaccagagaagaa

SEQ ID NO: 2021697 - RNA, 19 nt, Homo sapiens
  misc_RNA (1)...(19): siRNA sense strand
gaaagaaaacgcauuggaa

SEQ ID NO: 2021698 - RNA, 19 nt, Homo sapiens
  misc_RNA (1)...(19): siRNA sense strand
cuggaaagccauaugauuu

SEQ ID NO: 2021699 - RNA, 19 nt, Homo sapiens
  misc_RNA (1)...(19): siRNA sense strand
ucagcacugugacuucuuu

SEQ ID NO: 2021700 - RNA, 19 nt, Homo sapiens
  misc_RNA (1)...(19): siRNA sense strand
ucugugacgccacuaauua

SEQ ID NO: 2021701 - RNA, 19 nt, Homo sapiens
  misc_RNA (1)...(19): siRNA sense strand
gaaggaguugaauauauug

SEQ ID NO: 2021702 - RNA, 19 nt, Homo sapiens
  misc_RNA (1)...(19): siRNA sense strand
ggaacuaauucaaccuuuu

SEQ ID NO: 2021703 - RNA, 19 nt, Homo sapiens
  misc_RNA (1)...(19): siRNA sense strand
cggaauugcuucuuacgau

SEQ ID NO: 2021704 - RNA, 19 nt, Homo sapiens
  misc_RNA (1)...(19): siRNA sense strand
gaaucugagguggaaauua

SEQ ID NO: 2021705 - RNA, 19 nt, Homo sapiens
  misc_RNA (1)...(19): siRNA sense strand
agacacagcauaagaguuc

SEQ ID NO: 2021706 - RNA, 19 nt, Homo sapiens
  misc_RNA (1)...(19): siRNA sense strand
cgaagaggaaauugaguuu

SEQ ID NO: 2021707 - RNA, 19 nt, Homo sapiens
  misc_RNA (1)...(19): siRNA sense strand
cagucggaauugcuucuua

SEQ ID NO: 2021708 - RNA, 19 nt, Homo sapiens
  misc_RNA (1)...(19): siRNA sense strand
gcuggaaagccauaugauu

SEQ ID NO: 2021709 - RNA, 19 nt, Homo sapiens
  misc_RNA (1)...(19): siRNA sense strand
ugaggagaauauugaauca

SEQ ID NO: 2021710 - RNA, 19 nt, Homo sapiens
  misc_RNA (1)...(19): siRNA sense strand
aaggaaggaucauagaugu

SEQ ID NO: 2021711 - RNA, 19 nt, Homo sapiens
  misc_RNA (1)...(19): siRNA sense strand
ucaagccgguaguggaauu

SEQ ID NO: 2021712 - RNA, 19 nt, Homo sapiens
  misc_RNA (1)...(19): siRNA sense strand
ucaaagaggagauagcaau

SEQ ID NO: 2021713 - RNA, 19 nt, Homo sapiens
  misc_RNA (1)...(19): siRNA sense strand
uuucaaguguccuaucaaa

SEQ ID NO: 2021714 - RNA, 19 nt, Homo sapiens
  misc_RNA (1)...(19): siRNA sense strand
guguugaucucaccugaau

SEQ ID NO: 2021715 - RNA, 19 nt, Homo sapiens
  misc_RNA (1)...(19): siRNA sense strand
gguggaaauuauucauguu

SEQ ID NO: 2021716 - RNA, 19 nt, Homo sapiens
  misc_RNA (1)...(19): siRNA sense strand
uagccaacauggaagaaga

SEQ ID NO: 2021717 - RNA, 19 nt, Homo sapiens
  misc_RNA (1)...(19): siRNA sense strand
cuaaggcaccacaugauuu

SEQ ID NO: 2021718 - RNA, 19 nt, Homo sapiens
  misc_RNA (1)...(19): siRNA sense strand
ggauacacggaacguuaua

SEQ ID NO: 2021719 - RNA, 19 nt, Homo sapiens
  misc_RNA (1)...(19): siRNA sense strand
gauggacuccugagggaaa

SEQ ID NO: 2021720 - RNA, 19 nt, Homo sapiens
  misc_RNA (1)...(19): siRNA sense strand
gauucuauuugaaggaguu

SEQ ID NO: 2021721 - RNA, 19 nt, Homo sapiens
  misc_RNA (1)...(19): siRNA sense strand
gaucucaccugaauuauuu

SEQ ID NO: 2021722 - RNA, 19 nt, Homo sapiens
  misc_RNA (1)...(19): siRNA sense strand
ucagaaggcugguauauuu

SEQ ID NO: 2021723 - RNA, 19 nt, Homo sapiens
  misc_RNA (1)...(19): siRNA sense strand
gaucauagaugucauagau

SEQ ID NO: 2021724 - RNA, 19 nt, Homo sapiens
  misc_RNA (1)...(19): siRNA sense strand
gaacagggcuauuacuuag

SEQ ID NO: 2021725 - RNA, 19 nt, Homo sapiens
  misc_RNA (1)...(19): siRNA sense strand
ggaagaagaugccagauca

SEQ ID NO: 2021726 - RNA, 19 nt, Homo sapiens
  misc_RNA (1)...(19): siRNA sense strand
caauagagcagcagucuua

SEQ ID NO: 2021727 - RNA, 19 nt, Homo sapiens
  misc_RNA (1)...(19): siRNA sense strand
ccaaggaaguggaacauuu

SEQ ID NO: 2021728 - RNA, 19 nt, Homo sapiens
  misc_RNA (1)...(19): siRNA sense strand
gaaaggagacucacuuaug

SEQ ID NO: 2021729 - RNA, 19 nt, Homo sapiens
  misc_RNA (1)...(19): siRNA sense strand
gaucuaauauccaaguuga

SEQ ID NO: 2021730 - RNA, 19 nt, Homo sapiens
  misc_RNA (1)...(19): siRNA sense strand
ucacuuaugugcacaauga

SEQ ID NO: 2021731 - RNA, 19 nt, Homo sapiens
  misc_RNA (1)...(19): siRNA sense strand
ggaaagaaauauccuacug

SEQ ID NO: 2021732 - RNA, 19 nt, Homo sapiens
  misc_RNA (1)...(19): siRNA sense strand
cuacugugcuguucauaua

SEQ ID NO: 2021733 - RNA, 19 nt, Homo sapiens
  misc_RNA (1)...(19): siRNA sense strand
gaagaggaaugauccagau

SEQ ID NO: 2021734 - RNA, 19 nt, Homo sapiens
  misc_RNA (1)...(19): siRNA sense strand
gcacugugacuucuuuaua

SEQ ID NO: 2021735 - RNA, 19 nt, Homo sapiens
  misc_RNA (1)...(19): siRNA sense strand
cuacaagccucaugaucua

SEQ ID NO: 2021736 - RNA, 19 nt, Homo sapiens
  misc_RNA (1)...(19): siRNA sense strand
ggaauugcuucuuacgauu

SEQ ID NO: 2021737 - RNA, 19 nt, Homo sapiens
  misc_RNA (1)...(19): siRNA sense strand
gaauugcuucuuacgauua

SEQ ID NO: 2021738 - RNA, 19 nt, Homo sapiens
  misc_RNA (1)...(19): siRNA sense strand
gaagaaaggagacucacuu

SEQ ID NO: 2021739 - RNA, 19 nt, Homo sapiens
  misc_RNA (1)...(19): siRNA sense strand
uagcaacgauauuuggaua

SEQ ID NO: 2021740 - RNA, 19 nt, Homo sapiens
  misc_RNA (1)...(19): siRNA sense strand
gaaggaaggaucauagaug

SEQ ID NO: 2021741 - RNA, 19 nt, Homo sapiens
  misc_RNA (1)...(19): siRNA sense strand
gaccguggcuacucacauu

SEQ ID NO: 2021742 - RNA, 19 nt, Homo sapiens
  misc_RNA (1)...(19): siRNA sense strand
aaaggagacucacuuaugu

SEQ ID NO: 2021743 - RNA, 19 nt, Homo sapiens
  misc_RNA (1)...(19): siRNA sense strand
gaagaggaaauugaguuua

SEQ ID NO: 2021744 - RNA, 19 nt, Homo sapiens
  misc_RNA (1)...(19): siRNA sense strand
aaucugagguggaaauuau

SEQ ID NO: 2021745 - RNA, 19 nt, Homo sapiens
  misc_RNA (1)...(19): siRNA sense strand
ucgagaagaagaacuauua

SEQ ID NO: 2021746 - RNA, 19 nt, Homo sapiens
  misc_RNA (1)...(19): siRNA sense strand
guugaucucaccugaauua

SEQ ID NO: 2021747 - RNA, 19 nt, Homo sapiens
  misc_RNA (1)...(19): siRNA sense strand
caacauggcagcagcaaug

SEQ ID NO: 2021748 - RNA, 19 nt, Homo sapiens
  misc_RNA (1)...(19): siRNA sense strand
gaagaagaacuauuaagag

SEQ ID NO: 2021749 - RNA, 19 nt, Homo sapiens
  misc_RNA (1)...(19): siRNA sense strand
gggagaacauuaugaacug

SEQ ID NO: 2021750 - RNA, 19 nt, Homo sapiens
  misc_RNA (1)...(19): siRNA sense strand
ggagagacacagcauaaga

SEQ ID NO: 2021751 - RNA, 19 nt, Homo sapiens
  misc_RNA (1)...(19): siRNA sense strand
ugaacagggcuauuacuua

SEQ ID NO: 2021752 - RNA, 19 nt, Homo sapiens
  misc_RNA (1)...(19): siRNA sense strand
gaaaggcagagacucauug

SEQ ID NO: 2021753 - RNA, 19 nt, Homo sapiens
  misc_RNA (1)...(19): siRNA sense strand
agaaugaacagggcuauua

SEQ ID NO: 2021754 - RNA, 19 nt, Homo sapiens
  misc_RNA (1)...(19): siRNA sense strand
gaaagaaauauccuacugu

SEQ ID NO: 2021755 - RNA, 19 nt, Homo sapiens
  misc_RNA (1)...(19): siRNA sense strand
cacugugacuucuuuauaa

SEQ ID NO: 2021756 - RNA, 19 nt, Homo sapiens
  misc_RNA (1)...(19): siRNA sense strand
ccaaguugaugaagucaga

SEQ ID NO: 2021757 - RNA, 19 nt, Homo sapiens
  misc_RNA (1)...(19): siRNA sense strand
gcauaagaguuccugaauc

SEQ ID NO: 2021758 - RNA, 19 nt, Homo sapiens
  misc_RNA (1)...(19): siRNA sense strand
ccaagaagaauuugauaga

SEQ ID NO: 2021759 - RNA, 19 nt, Homo sapiens
  misc_RNA (1)...(19): siRNA sense strand
gaagaugacccaacuugca

SEQ ID NO: 2021760 - RNA, 19 nt, Homo sapiens
  misc_RNA (1)...(19): siRNA sense strand
acaaugagcuagccaacau

SEQ ID NO: 2021761 - RNA, 19 nt, Homo sapiens
  misc_RNA (1)...(19): siRNA sense strand
cauaagaguuccugaaucg

SEQ ID NO: 2021762 - RNA, 19 nt, Homo sapiens
  misc_RNA (1)...(19): siRNA sense strand
uuacugcucuuacaugguu

SEQ ID NO: 2021763 - RNA, 19 nt, Homo sapiens
  misc_RNA (1)...(19): siRNA sense strand
caggauacacggaacguua

SEQ ID NO: 2021764 - RNA, 19 nt, Homo sapiens
  misc_RNA (1)...(19): siRNA sense strand
cagcagcaauggaaacaga

SEQ ID NO: 2021765 - RNA, 19 nt, Homo sapiens
  misc_RNA (1)...(19): siRNA sense strand
gcagauucauuccguuauc

SEQ ID NO: 2021766 - RNA, 19 nt, Homo sapiens
  misc_RNA (1)...(19): siRNA sense strand
uggaaagccauaugauuua

SEQ ID NO: 2021767 - RNA, 19 nt, Homo sapiens
  misc_RNA (1)...(19): siRNA sense strand
ucaaguguccuaucaaaga

SEQ ID NO: 2021768 - RNA, 19 nt, Homo sapiens
  misc_RNA (1)...(19): siRNA sense strand
gauuucaaguguccuauca

SEQ ID NO: 2021769 - RNA, 19 nt, Homo sapiens
  misc_RNA (1)...(19): siRNA sense strand
ggaaagcaaauauaaacga

SEQ ID NO: 2021770 - RNA, 19 nt, Homo sapiens
  misc_RNA (1)...(19): siRNA sense strand
ugucauagauaaggaacua

SEQ ID NO: 2021771 - RNA, 19 nt, Homo sapiens
  misc_RNA (1)...(19): siRNA sense strand
cuguggaucuucuaugaua

SEQ ID NO: 2021772 - RNA, 19 nt, Homo sapiens
  misc_RNA (1)...(19): siRNA sense strand
uaucaaguccugaagauga

SEQ ID NO: 2021773 - RNA, 19 nt, Homo sapiens
  misc_RNA (1)...(19): siRNA sense strand
ccagaagaauccacacugu

SEQ ID NO: 2021774 - RNA, 19 nt, Homo sapiens
  misc_RNA (1)...(19): siRNA sense strand
guaaguauaguaaccagaa

SEQ ID NO: 2021775 - RNA, 19 nt, Homo sapiens
  misc_RNA (1)...(19): siRNA sense strand
gaagaugauguuauggaaa

SEQ ID NO: 2021776 - RNA, 19 nt, Homo sapiens
  misc_RNA (1)...(19): siRNA sense strand
ggaaguggaacauuucugu

SEQ ID NO: 2021777 - RNA, 19 nt, Homo sapiens
  misc_RNA (1)...(19): siRNA sense strand
ugacuauacuccuccagaa

SEQ ID NO: 2021778 - RNA, 19 nt, Homo sapiens
  misc_RNA (1)...(19): siRNA sense strand
gcuaucaaguccugaagau

SEQ ID NO: 2021779 - RNA, 19 nt, Homo sapiens
  misc_RNA (1)...(19): siRNA sense strand
aguagaagaugauguuaug

SEQ ID NO: 2021780 - RNA, 19 nt, Homo sapiens
  misc_RNA (1)...(19): siRNA sense strand
ggaaggaucauagauguca

SEQ ID NO: 2021781 - RNA, 19 nt, Homo sapiens
  misc_RNA (1)...(19): siRNA sense strand
gaaacaaggagggcagauu

SEQ ID NO: 2021782 - RNA, 19 nt, Homo sapiens
  misc_RNA (1)...(19): siRNA sense strand
acagcuggguguugagaua

SEQ ID NO: 2021783 - RNA, 19 nt, Homo sapiens
  misc_RNA (1)...(19): siRNA sense strand
ggccuaaauuggagccuuu

SEQ ID NO: 2021784 - RNA, 19 nt, Homo sapiens
  misc_RNA (1)...(19): siRNA sense strand
gggcagauucauuccguua

SEQ ID NO: 2021785 - RNA, 19 nt, Homo sapiens
  misc_RNA (1)...(19): siRNA sense strand
uuggauaucuaacaucgua

SEQ ID NO: 2021786 - RNA, 19 nt, Homo sapiens
  misc_RNA (1)...(19): siRNA sense strand
agaagaugauguuauggaa

SEQ ID NO: 2021787 - RNA, 19 nt, Homo sapiens
  misc_RNA (1)...(19): siRNA sense strand
caggagagacacagcauaa

SEQ ID NO: 2021788 - RNA, 19 nt, Homo sapiens
  misc_RNA (1)...(19): siRNA sense strand
ggaaagccauaugauuuac

SEQ ID NO: 2021789 - RNA, 19 nt, Homo sapiens
  misc_RNA (1)...(19): siRNA sense strand
ugacgccacuaauuaucua

SEQ ID NO: 2021790 - RNA, 19 nt, Homo sapiens
  misc_RNA (1)...(19): siRNA sense strand
gaagucagaaggcugguau

SEQ ID NO: 2021791 - RNA, 19 nt, Homo sapiens
  misc_RNA (1)...(19): siRNA sense strand
gcuaaggcaccacaugauu

SEQ ID NO: 2021792 - RNA, 19 nt, Homo sapiens
  misc_RNA (1)...(19): siRNA sense strand
aaccuuggaucacguauug

SEQ ID NO: 2021793 - RNA, 19 nt, Homo sapiens
  misc_RNA (1)...(19): siRNA sense strand
aaagaggagauagcaauua

SEQ ID NO: 2021794 - RNA, 19 nt, Homo sapiens
  misc_RNA (1)...(19): siRNA sense strand
caaagaggagauagcaauu

SEQ ID NO: 2021795 - RNA, 19 nt, Homo sapiens
  misc_RNA (1)...(19): siRNA sense strand
ggaaaggcagagacucauu

SEQ ID NO: 2021796 - RNA, 19 nt, Homo sapiens
  misc_RNA (1)...(19): siRNA sense strand
caucguaaccagagaagaa

SEQ ID NO: 2021797 - RNA, 19 nt, Homo sapiens
  misc_RNA (1)...(19): siRNA sense strand
gaaagaaaacgcauuggaa

SEQ ID NO: 2021798 - RNA, 19 nt, Homo sapiens
  misc_RNA (1)...(19): siRNA sense strand
cuggaaagccauaugauuu

SEQ ID NO: 2021799 - RNA, 19 nt, Homo sapiens
  misc_RNA (1)...(19): siRNA sense strand
ucagcacugugacuucuuu

SEQ ID NO: 2021800 - RNA, 19 nt, Homo sapiens
  misc_RNA (1)...(19): siRNA sense strand
ucugugacgccacuaauua

SEQ ID NO: 2021801 - RNA, 19 nt, Homo sapiens
  misc_RNA (1)...(19): siRNA sense strand
gaaggaguugaauauauug

SEQ ID NO: 2021802 - RNA, 19 nt, Homo sapiens
  misc_RNA (1)...(19): siRNA sense strand
ggaacuaauucaaccuuuu

SEQ ID NO: 2021803 - RNA, 19 nt, Homo sapiens
  misc_RNA (1)...(19): siRNA sense strand
cggaauugcuucuuacgau

SEQ ID NO: 2021804 - RNA, 19 nt, Homo sapiens
  misc_RNA (1)...(19): siRNA sense strand
gaaucugagguggaaauua

SEQ ID NO: 2021805 - RNA, 19 nt, Homo sapiens
  misc_RNA (1)...(19): siRNA sense strand
agacacagcauaagaguuc

SEQ ID NO: 2021806 - RNA, 19 nt, Homo sapiens
  misc_RNA (1)...(19): siRNA sense strand
cgaagaggaaauugaguuu

SEQ ID NO: 2021807 - RNA, 19 nt, Homo sapiens
  misc_RNA (1)...(19): siRNA sense strand
cagucggaauugcuucuua

SEQ ID NO: 2021808 - RNA, 19 nt, Homo sapiens
  misc_RNA (1)...(19): siRNA sense strand
gcuggaaagccauaugauu

SEQ ID NO: 2021809 - RNA, 19 nt, Homo sapiens
  misc_RNA (1)...(19): siRNA sense strand
ugaggagaauauugaauca

SEQ ID NO: 2021810 - RNA, 19 nt, Homo sapiens
  misc_RNA (1)...(19): siRNA sense strand
aaggaaggaucauagaugu

SEQ ID NO: 2021811 - RNA, 19 nt, Homo sapiens
  misc_RNA (1)...(19): siRNA sense strand
ucaagccgguaguggaauu

SEQ ID NO: 2021812 - RNA, 19 nt, Homo sapiens
  misc_RNA (1)...(19): siRNA sense strand
ucaaagaggagauagcaau

SEQ ID NO: 2021813 - RNA, 19 nt, Homo sapiens
  misc_RNA (1)...(19): siRNA sense strand
uuucaaguguccuaucaaa

SEQ ID NO: 2021814 - RNA, 19 nt, Homo sapiens
  misc_RNA (1)...(19): siRNA sense strand
guguugaucucaccugaau

SEQ ID NO: 2021815 - RNA, 19 nt, Homo sapiens
  misc_RNA (1)...(19): siRNA sense strand
gguggaaauuauucauguu

SEQ ID NO: 2021816 - RNA, 19 nt, Homo sapiens
  misc_RNA (1)...(19): siRNA sense strand
uagccaacauggaagaaga

SEQ ID NO: 2021817 - RNA, 19 nt, Homo sapiens
  misc_RNA (1)...(19): siRNA sense strand
cuaaggcaccacaugauuu

SEQ ID NO: 2021818 - RNA, 19 nt, Homo sapiens
  misc_RNA (1)...(19): siRNA sense strand
ggauacacggaacguuaua

SEQ ID NO: 2021819 - RNA, 19 nt, Homo sapiens
  misc_RNA (1)...(19): siRNA sense strand
gauggacuccugagggaaa

SEQ ID NO: 2021820 - RNA, 19 nt, Homo sapiens
  misc_RNA (1)...(19): siRNA sense strand
gauucuauuugaaggaguu

SEQ ID NO: 2021821 - RNA, 19 nt, Homo sapiens
  misc_RNA (1)...(19): siRNA sense strand
gaucucaccugaauuauuu

SEQ ID NO: 2021822 - RNA, 19 nt, Homo sapiens
  misc_RNA (1)...(19): siRNA sense strand
ucagaaggcugguauauuu

SEQ ID NO: 2021823 - RNA, 19 nt, Homo sapiens
  misc_RNA (1)...(19): siRNA sense strand
gaucauagaugucauagau

SEQ ID NO: 2021824 - RNA, 19 nt, Homo sapiens
  misc_RNA (1)...(19): siRNA sense strand
gaacagggcuauuacuuag

SEQ ID NO: 2021825 - RNA, 19 nt, Homo sapiens
  misc_RNA (1)...(19): siRNA sense strand
ggaagaagaugccagauca

SEQ ID NO: 2021826 - RNA, 19 nt, Homo sapiens
  misc_RNA (1)...(19): siRNA sense strand
caauagagcagcagucuua

SEQ ID NO: 2021827 - RNA, 19 nt, Homo sapiens
  misc_RNA (1)...(19): siRNA sense strand
ccaaggaaguggaacauuu

SEQ ID NO: 2021828 - RNA, 19 nt, Homo sapiens
  misc_RNA (1)...(19): siRNA sense strand
gaaaggagacucacuuaug

SEQ ID NO: 2021829 - RNA, 19 nt, Homo sapiens
  misc_RNA (1)...(19): siRNA sense strand
gaucuaauauccaaguuga

SEQ ID NO: 2021830 - RNA, 19 nt, Homo sapiens
  misc_RNA (1)...(19): siRNA sense strand
ucacuuaugugcacaauga

SEQ ID NO: 2021831 - RNA, 19 nt, Homo sapiens
  misc_RNA (1)...(19): siRNA sense strand
ggaaagaaauauccuacug

SEQ ID NO: 2021832 - RNA, 19 nt, Homo sapiens
  misc_RNA (1)...(19): siRNA sense strand
cuacugugcuguucauaua

SEQ ID NO: 2021833 - RNA, 19 nt, Homo sapiens
  misc_RNA (1)...(19): siRNA sense strand
gaagaggaaugauccagau

SEQ ID NO: 2021834 - RNA, 19 nt, Homo sapiens
  misc_RNA (1)...(19): siRNA sense strand
gcacugugacuucuuuaua

SEQ ID NO: 2021835 - RNA, 19 nt, Homo sapiens
  misc_RNA (1)...(19): siRNA sense strand
cuacaagccucaugaucua

SEQ ID NO: 2021836 - RNA, 19 nt, Homo sapiens
  misc_RNA (1)...(19): siRNA sense strand
ggaauugcuucuuacgauu

SEQ ID NO: 2021837 - RNA, 19 nt, Homo sapiens
  misc_RNA (1)...(19): siRNA sense strand
gaauugcuucuuacgauua

SEQ ID NO: 2021838 - RNA, 19 nt, Homo sapiens
  misc_RNA (1)...(19): siRNA sense strand
gaagaaaggagacucacuu

SEQ ID NO: 2021839 - RNA, 19 nt, Homo sapiens
  misc_RNA (1)...(19): siRNA sense strand
uagcaacgauauuuggaua

SEQ ID NO: 2021840 - RNA, 19 nt, Homo sapiens
  misc_RNA (1)...(19): siRNA sense strand
gaaggaaggaucauagaug

SEQ ID NO: 2021841 - RNA, 19 nt, Homo sapiens
  misc_RNA (1)...(19): siRNA sense strand
gaccguggcuacucacauu

SEQ ID NO: 2021842 - RNA, 19 nt, Homo sapiens
  misc_RNA (1)...(19): siRNA sense strand
aaaggagacucacuuaugu

SEQ ID NO: 2021843 - RNA, 19 nt, Homo sapiens
  misc_RNA (1)...(19): siRNA sense strand
gaagaggaaauugaguuua

SEQ ID NO: 2021844 - RNA, 19 nt, Homo sapiens
  misc_RNA (1)...(19): siRNA sense strand
aaucugagguggaaauuau

SEQ ID NO: 2021845 - RNA, 19 nt, Homo sapiens
  misc_RNA (1)...(19): siRNA sense strand
ucgagaagaagaacuauua

SEQ ID NO: 2021846 - RNA, 19 nt, Homo sapiens
  misc_RNA (1)...(19): siRNA sense strand
guugaucucaccugaauua

SEQ ID NO: 2021847 - RNA, 19 nt, Homo sapiens
  misc_RNA (1)...(19): siRNA sense strand
gaagaagaacuauuaagag

SEQ ID NO: 2021848 - RNA, 19 nt, Homo sapiens
  misc_RNA (1)...(19): siRNA sense strand
gggagaacauuaugaacug

SEQ ID NO: 2021849 - RNA, 19 nt, Homo sapiens
  misc_RNA (1)...(19): siRNA sense strand
ggagagacacagcauaaga

SEQ ID NO: 2021850 - RNA, 19 nt, Homo sapiens
  misc_RNA (1)...(19): siRNA sense strand
ugaacagggcuauuacuua

SEQ ID NO: 2021851 - RNA, 19 nt, Homo sapiens
  misc_RNA (1)...(19): siRNA sense strand
gaaaggcagagacucauug

SEQ ID NO: 2021852 - RNA, 19 nt, Homo sapiens
  misc_RNA (1)...(19): siRNA sense strand
agaaugaacagggcuauua

SEQ ID NO: 2021853 - RNA, 19 nt, Homo sapiens
  misc_RNA (1)...(19): siRNA sense strand
gaaagaaauauccuacugu

SEQ ID NO: 2021854 - RNA, 19 nt, Homo sapiens
  misc_RNA (1)...(19): siRNA sense strand
cacugugacuucuuuauaa

SEQ ID NO: 2021855 - RNA, 19 nt, Homo sapiens
  misc_RNA (1)...(19): siRNA sense strand
ccaaguugaugaagucaga

SEQ ID NO: 2021856 - RNA, 19 nt, Homo sapiens
  misc_RNA (1)...(19): siRNA sense strand
gcauaagaguuccugaauc

SEQ ID NO: 2021857 - RNA, 19 nt, Homo sapiens
  misc_RNA (1)...(19): siRNA sense strand
ccaagaagaauuugauaga

SEQ ID NO: 2021858 - RNA, 19 nt, Homo sapiens
  misc_RNA (1)...(19): siRNA sense strand
gaagaugacccaacuugca

SEQ ID NO: 2021859 - RNA, 19 nt, Homo sapiens
  misc_RNA (1)...(19): siRNA sense strand
acaaugagcuagccaacau

SEQ ID NO: 2021860 - RNA, 19 nt, Homo sapiens
  misc_RNA (1)...(19): siRNA sense strand
cauaagaguuccugaaucg

SEQ ID NO: 2021861 - RNA, 19 nt, Homo sapiens
  misc_RNA (1)...(19): siRNA sense strand
uuacugcucuuacaugguu

SEQ ID NO: 2021862 - RNA, 19 nt, Homo sapiens
  misc_RNA (1)...(19): siRNA sense strand
caggauacacggaacguua

SEQ ID NO: 2021863 - RNA, 19 nt, Homo sapiens
  misc_RNA (1)...(19): siRNA sense strand
cagcagcaauggaaacaga

SEQ ID NO: 2021864 - RNA, 19 nt, Homo sapiens
  misc_RNA (1)...(19): siRNA sense strand
gcagauucauuccguuauc

SEQ ID NO: 2021865 - RNA, 19 nt, Homo sapiens
  misc_RNA (1)...(19): siRNA sense strand
uggaaagccauaugauuua

SEQ ID NO: 2021866 - RNA, 19 nt, Homo sapiens
  misc_RNA (1)...(19): siRNA sense strand
ucaaguguccuaucaaaga

SEQ ID NO: 2021867 - RNA, 19 nt, Homo sapiens
  misc_RNA (1)...(19): siRNA sense strand
gauuucaaguguccuauca

SEQ ID NO: 2021868 - RNA, 19 nt, Homo sapiens
  misc_RNA (1)...(19): siRNA sense strand
ggaaagcaaauauaaacga

SEQ ID NO: 2021869 - RNA, 19 nt, Homo sapiens
  misc_RNA (1)...(19): siRNA sense strand
ugucauagauaaggaacua

SEQ ID NO: 2021870 - RNA, 19 nt, Homo sapiens
  misc_RNA (1)...(19): siRNA sense strand
cuguggaucuucuaugaua

SEQ ID NO: 2021871 - RNA, 19 nt, Homo sapiens
  misc_RNA (1)...(19): siRNA sense strand
uaucaaguccugaagauga

SEQ ID NO: 2021872 - RNA, 19 nt, Homo sapiens
  misc_RNA (1)...(19): siRNA sense strand
ccagaagaauccacacugu

SEQ ID NO: 2021873 - RNA, 19 nt, Homo sapiens
  misc_RNA (1)...(19): siRNA sense strand
guaaguauaguaaccagaa

SEQ ID NO: 2021874 - RNA, 19 nt, Homo sapiens
  misc_RNA (1)...(19): siRNA sense strand
gaagaugauguuauggaaa

SEQ ID NO: 2021875 - RNA, 19 nt, Homo sapiens
  misc_RNA (1)...(19): siRNA sense strand
ggaaguggaacauuucugu

SEQ ID NO: 2021876 - RNA, 19 nt, Homo sapiens
  misc_RNA (1)...(19): siRNA sense strand
ugacuauacuccuccagaa

SEQ ID NO: 2021877 - RNA, 19 nt, Homo sapiens
  misc_RNA (1)...(19): siRNA sense strand
gcuaucaaguccugaagau

SEQ ID NO: 2021878 - RNA, 19 nt, Homo sapiens
  misc_RNA (1)...(19): siRNA sense strand
aguagaagaugauguuaug

SEQ ID NO: 2021879 - RNA, 19 nt, Homo sapiens
  misc_RNA (1)...(19): siRNA sense strand
ggaaggaucauagauguca

SEQ ID NO: 2021880 - RNA, 19 nt, Homo sapiens
  misc_RNA (1)...(19): siRNA sense strand
gaaacaaggagggcagauu

SEQ ID NO: 2021881 - RNA, 19 nt, Homo sapiens
  misc_RNA (1)...(19): siRNA sense strand
uuggauaucuaacaucgua

SEQ ID NO: 2021882 - RNA, 19 nt, Homo sapiens
  misc_RNA (1)...(19): siRNA sense strand
ggccuaaauuggagccuuu

SEQ ID NO: 2021883 - RNA, 19 nt, Homo sapiens
  misc_RNA (1)...(19): siRNA sense strand
acagcuggguguugagaua

SEQ ID NO: 2021884 - RNA, 19 nt, Homo sapiens
  misc_RNA (1)...(19): siRNA sense strand
gggcagauucauuccguua

SEQ ID NO: 2021885 - RNA, 19 nt, Homo sapiens
  misc_RNA (1)...(19): siRNA sense strand
agaagaugauguuauggaa

SEQ ID NO: 2021886 - RNA, 19 nt, Homo sapiens
  misc_RNA (1)...(19): siRNA sense strand
caggagagacacagcauaa

SEQ ID NO: 2021887 - RNA, 19 nt, Homo sapiens
  misc_RNA (1)...(19): siRNA sense strand
ggaaagccauaugauuuac

SEQ ID NO: 2021888 - RNA, 19 nt, Homo sapiens
  misc_RNA (1)...(19): siRNA sense strand
ugacgccacuaauuaucua

SEQ ID NO: 2021889 - RNA, 19 nt, Homo sapiens
  misc_RNA (1)...(19): siRNA sense strand
gaagucagaaggcugguau

SEQ ID NO: 2021890 - RNA, 19 nt, Homo sapiens
  misc_RNA (1)...(19): siRNA sense strand
caucguaaccagagaagaa

SEQ ID NO: 2021891 - RNA, 19 nt, Homo sapiens
  misc_RNA (1)...(19): siRNA sense strand
aaccuuggaucacguauug

SEQ ID NO: 2021892 - RNA, 19 nt, Homo sapiens
  misc_RNA (1)...(19): siRNA sense strand
gcuaaggcaccacaugauu

SEQ ID NO: 2021893 - RNA, 19 nt, Homo sapiens
  misc_RNA (1)...(19): siRNA sense strand
aaagaggagauagcaauua

SEQ ID NO: 2021894 - RNA, 19 nt, Homo sapiens
  misc_RNA (1)...(19): siRNA sense strand
caaagaggagauagcaauu

SEQ ID NO: 2021895 - RNA, 19 nt, Homo sapiens
  misc_RNA (1)...(19): siRNA sense strand
ggaaaggcagagacucauu

SEQ ID NO: 2021896 - RNA, 19 nt, Homo sapiens
  misc_RNA (1)...(19): siRNA sense strand
gaaagaaaacgcauuggaa

SEQ ID NO: 2021897 - RNA, 19 nt, Homo sapiens
  misc_RNA (1)...(19): siRNA sense strand
cuggaaagccauaugauuu

SEQ ID NO: 2021898 - RNA, 19 nt, Homo sapiens
  misc_RNA (1)...(19): siRNA sense strand
ucagcacugugacuucuuu

SEQ ID NO: 2021899 - RNA, 19 nt, Homo sapiens
  misc_RNA (1)...(19): siRNA sense strand
ucugugacgccacuaauua

SEQ ID NO: 2021900 - RNA, 19 nt, Homo sapiens
  misc_RNA (1)...(19): siRNA sense strand
gaaggaguugaauauauug

SEQ ID NO: 2021901 - RNA, 19 nt, Homo sapiens
  misc_RNA (1)...(19): siRNA sense strand
ggaacuaauucaaccuuuu

SEQ ID NO: 2021902 - RNA, 19 nt, Homo sapiens
  misc_RNA (1)...(19): siRNA sense strand
cggaauugcuucuuacgau

SEQ ID NO: 2021903 - RNA, 19 nt, Homo sapiens
  misc_RNA (1)...(19): siRNA sense strand
gaaucugagguggaaauua

SEQ ID NO: 2021904 - RNA, 19 nt, Homo sapiens
  misc_RNA (1)...(19): siRNA sense strand
agacacagcauaagaguuc

SEQ ID NO: 2021905 - RNA, 19 nt, Homo sapiens
  misc_RNA (1)...(19): siRNA sense strand
cgaagaggaaauugaguuu

SEQ ID NO: 2021906 - RNA, 19 nt, Homo sapiens
  misc_RNA (1)...(19): siRNA sense strand
ugaggagaauauugaauca

SEQ ID NO: 2021907 - RNA, 19 nt, Homo sapiens
  misc_RNA (1)...(19): siRNA sense strand
gcuggaaagccauaugauu

SEQ ID NO: 2021908 - RNA, 19 nt, Homo sapiens
  misc_RNA (1)...(19): siRNA sense strand
aaggaaggaucauagaugu

SEQ ID NO: 2021909 - RNA, 19 nt, Homo sapiens
  misc_RNA (1)...(19): siRNA sense strand
cagucggaauugcuucuua

SEQ ID NO: 2021910 - RNA, 19 nt, Homo sapiens
  misc_RNA (1)...(19): siRNA sense strand
ucaagccgguaguggaauu

SEQ ID NO: 2021911 - RNA, 19 nt, Homo sapiens
  misc_RNA (1)...(19): siRNA sense strand
ucaaagaggagauagcaau

SEQ ID NO: 2021912 - RNA, 19 nt, Homo sapiens
  misc_RNA (1)...(19): siRNA sense strand
uuucaaguguccuaucaaa

SEQ ID NO: 2021913 - RNA, 19 nt, Homo sapiens
  misc_RNA (1)...(19): siRNA sense strand
guguugaucucaccugaau

SEQ ID NO: 2021914 - RNA, 19 nt, Homo sapiens
  misc_RNA (1)...(19): siRNA sense strand
gguggaaauuauucauguu

SEQ ID NO: 2021915 - RNA, 19 nt, Homo sapiens
  misc_RNA (1)...(19): siRNA sense strand
aagaaaggagacucacuua

SEQ ID NO: 2021916 - RNA, 19 nt, Homo sapiens
  misc_RNA (1)...(19): siRNA sense strand
ggauacacggaacguuaua

SEQ ID NO: 2021917 - RNA, 19 nt, Homo sapiens
  misc_RNA (1)...(19): siRNA sense strand
cuaaggcaccacaugauuu

SEQ ID NO: 2021918 - RNA, 19 nt, Homo sapiens
  misc_RNA (1)...(19): siRNA sense strand
gauggacuccugagggaaa

SEQ ID NO: 2021919 - RNA, 19 nt, Homo sapiens
  misc_RNA (1)...(19): siRNA sense strand
gauucuauuugaaggaguu

SEQ ID NO: 2021920 - RNA, 19 nt, Homo sapiens
  misc_RNA (1)...(19): siRNA sense strand
uagccaacauggaagaaga

SEQ ID NO: 2021921 - RNA, 19 nt, Homo sapiens
  misc_RNA (1)...(19): siRNA sense strand
gaucucaccugaauuauuu

SEQ ID NO: 2021922 - RNA, 19 nt, Homo sapiens
  misc_RNA (1)...(19): siRNA sense strand
ucagaaggcugguauauuu

SEQ ID NO: 2021923 - RNA, 19 nt, Homo sapiens
  misc_RNA (1)...(19): siRNA sense strand
gaucauagaugucauagau

SEQ ID NO: 2021924 - RNA, 19 nt, Homo sapiens
  misc_RNA (1)...(19): siRNA sense strand
gaacagggcuauuacuuag

SEQ ID NO: 2021925 - RNA, 19 nt, Homo sapiens
  misc_RNA (1)...(19): siRNA sense strand
ggaagaagaugccagauca

SEQ ID NO: 2021926 - RNA, 19 nt, Homo sapiens
  misc_RNA (1)...(19): siRNA sense strand
caauagagcagcagucuua

SEQ ID NO: 2021927 - RNA, 19 nt, Homo sapiens
  misc_RNA (1)...(19): siRNA sense strand
ccaaggaaguggaacauuu

SEQ ID NO: 2021928 - RNA, 19 nt, Homo sapiens
  misc_RNA (1)...(19): siRNA sense strand
gaaaggagacucacuuaug

SEQ ID NO: 2021929 - RNA, 19 nt, Homo sapiens
  misc_RNA (1)...(19): siRNA sense strand
gaucuaauauccaaguuga

SEQ ID NO: 2021930 - RNA, 19 nt, Homo sapiens
  misc_RNA (1)...(19): siRNA sense strand
ucacuuaugugcacaauga

SEQ ID NO: 2021931 - RNA, 19 nt, Homo sapiens
  misc_RNA (1)...(19): siRNA sense strand
ggaaagaaauauccuacug

SEQ ID NO: 2021932 - RNA, 19 nt, Homo sapiens
  misc_RNA (1)...(19): siRNA sense strand
cuacugugcuguucauaua

SEQ ID NO: 2021933 - RNA, 19 nt, Homo sapiens
  misc_RNA (1)...(19): siRNA sense strand
gaagaggaaugauccagau

SEQ ID NO: 2021934 - RNA, 19 nt, Homo sapiens
  misc_RNA (1)...(19): siRNA sense strand
gcacugugacuucuuuaua

SEQ ID NO: 2021935 - RNA, 19 nt, Homo sapiens
  misc_RNA (1)...(19): siRNA sense strand
cuacaagccucaugaucua

SEQ ID NO: 2021936 - RNA, 19 nt, Homo sapiens
  misc_RNA (1)...(19): siRNA sense strand
ggaauugcuucuuacgauu

SEQ ID NO: 2021937 - RNA, 19 nt, Homo sapiens
  misc_RNA (1)...(19): siRNA sense strand
gaauugcuucuuacgauua

SEQ ID NO: 2021938 - RNA, 19 nt, Homo sapiens
  misc_RNA (1)...(19): siRNA sense strand
gaagaaaggagacucacuu

SEQ ID NO: 2021939 - RNA, 19 nt, Homo sapiens
  misc_RNA (1)...(19): siRNA sense strand
uagcaacgauauuuggaua

SEQ ID NO: 2021940 - RNA, 19 nt, Homo sapiens
  misc_RNA (1)...(19): siRNA sense strand
gaaggaaggaucauagaug

SEQ ID NO: 2021941 - RNA, 19 nt, Homo sapiens
  misc_RNA (1)...(19): siRNA sense strand
gaccguggcuacucacauu

SEQ ID NO: 2021942 - RNA, 19 nt, Homo sapiens
  misc_RNA (1)...(19): siRNA sense strand
aaaggagacucacuuaugu

SEQ ID NO: 2021943 - RNA, 19 nt, Homo sapiens
  misc_RNA (1)...(19): siRNA sense strand
gaagaggaaauugaguuua

SEQ ID NO: 2021944 - RNA, 19 nt, Homo sapiens
  misc_RNA (1)...(19): siRNA sense strand
aaucugagguggaaauuau

SEQ ID NO: 2021945 - RNA, 19 nt, Homo sapiens
  misc_RNA (1)...(19): siRNA sense strand
ucgagaagaagaacuauua

SEQ ID NO: 2021946 - RNA, 19 nt, Homo sapiens
  misc_RNA (1)...(19): siRNA sense strand
guugaucucaccugaauua

SEQ ID NO: 2021947 - RNA, 19 nt, Homo sapiens
  misc_RNA (1)...(19): siRNA sense strand
gaagaagaacuauuaagag

SEQ ID NO: 2021948 - RNA, 19 nt, Homo sapiens
  misc_RNA (1)...(19): siRNA sense strand
gggagaacauuaugaacug

SEQ ID NO: 2021949 - RNA, 19 nt, Homo sapiens
  misc_RNA (1)...(19): siRNA sense strand
ggagagacacagcauaaga

SEQ ID NO: 2021950 - RNA, 19 nt, Homo sapiens
  misc_RNA (1)...(19): siRNA sense strand
ugaacagggcuauuacuua

SEQ ID NO: 2021951 - RNA, 19 nt, Homo sapiens
  misc_RNA (1)...(19): siRNA sense strand
gaaaggcagagacucauug

SEQ ID NO: 2021952 - RNA, 19 nt, Homo sapiens
  misc_RNA (1)...(19): siRNA sense strand
agaaugaacagggcuauua

SEQ ID NO: 2021953 - RNA, 19 nt, Homo sapiens
  misc_RNA (1)...(19): siRNA sense strand
gaaagaaauauccuacugu

SEQ ID NO: 2021954 - RNA, 19 nt, Homo sapiens
  misc_RNA (1)...(19): siRNA sense strand
cacugugacuucuuuauaa

SEQ ID NO: 2021955 - RNA, 19 nt, Homo sapiens
  misc_RNA (1)...(19): siRNA sense strand
ccaaguugaugaagucaga

SEQ ID NO: 2021956 - RNA, 19 nt, Homo sapiens
  misc_RNA (1)...(19): siRNA sense strand
gcauaagaguuccugaauc

SEQ ID NO: 2021957 - RNA, 19 nt, Homo sapiens
  misc_RNA (1)...(19): siRNA sense strand
ccaagaagaauuugauaga

SEQ ID NO: 2021958 - RNA, 19 nt, Homo sapiens
  misc_RNA (1)...(19): siRNA sense strand
gaagaugacccaacuugca

SEQ ID NO: 2021959 - RNA, 19 nt, Homo sapiens
  misc_RNA (1)...(19): siRNA sense strand
acaaugagcuagccaacau

SEQ ID NO: 2021960 - RNA, 19 nt, Homo sapiens
  misc_RNA (1)...(19): siRNA sense strand
cauaagaguuccugaaucg

SEQ ID NO: 2021961 - RNA, 19 nt, Homo sapiens
  misc_RNA (1)...(19): siRNA sense strand
uuacugcucuuacaugguu

SEQ ID NO: 2021962 - RNA, 19 nt, Homo sapiens
  misc_RNA (1)...(19): siRNA sense strand
caggauacacggaacguua

SEQ ID NO: 2021963 - RNA, 19 nt, Homo sapiens
  misc_RNA (1)...(19): siRNA sense strand
cagcagcaauggaaacaga

SEQ ID NO: 2021964 - RNA, 19 nt, Homo sapiens
  misc_RNA (1)...(19): siRNA sense strand
gcagauucauuccguuauc

SEQ ID NO: 2021965 - RNA, 19 nt, Homo sapiens
  misc_RNA (1)...(19): siRNA sense strand
uggaaagccauaugauuua

SEQ ID NO: 2021966 - RNA, 19 nt, Homo sapiens
  misc_RNA (1)...(19): siRNA sense strand
ucaaguguccuaucaaaga

SEQ ID NO: 2021967 - RNA, 19 nt, Homo sapiens
  misc_RNA (1)...(19): siRNA sense strand
gauuucaaguguccuauca

SEQ ID NO: 2021968 - RNA, 19 nt, Homo sapiens
  misc_RNA (1)...(19): siRNA sense strand
ggaaagcaaauauaaacga

SEQ ID NO: 2021969 - RNA, 19 nt, Homo sapiens
  misc_RNA (1)...(19): siRNA sense strand
ugucauagauaaggaacua

SEQ ID NO: 2021970 - RNA, 19 nt, Homo sapiens
  misc_RNA (1)...(19): siRNA sense strand
cuguggaucuucuaugaua

SEQ ID NO: 2021971 - RNA, 19 nt, Homo sapiens
  misc_RNA (1)...(19): siRNA sense strand
uaucaaguccugaagauga

SEQ ID NO: 2021972 - RNA, 19 nt, Homo sapiens
  misc_RNA (1)...(19): siRNA sense strand
ccagaagaauccacacugu

SEQ ID NO: 2021973 - RNA, 19 nt, Homo sapiens
  misc_RNA (1)...(19): siRNA sense strand
guaaguauaguaaccagaa

SEQ ID NO: 2021974 - RNA, 19 nt, Homo sapiens
  misc_RNA (1)...(19): siRNA sense strand
gaagaugauguuauggaaa

SEQ ID NO: 2021975 - RNA, 19 nt, Homo sapiens
  misc_RNA (1)...(19): siRNA sense strand
ggaaguggaacauuucugu

SEQ ID NO: 2021976 - RNA, 19 nt, Homo sapiens
  misc_RNA (1)...(19): siRNA sense strand
ugacuauacuccuccagaa

SEQ ID NO: 2021977 - RNA, 19 nt, Homo sapiens
  misc_RNA (1)...(19): siRNA sense strand
gcuaucaaguccugaagau

SEQ ID NO: 2021978 - RNA, 19 nt, Homo sapiens
  misc_RNA (1)...(19): siRNA sense strand
aguagaagaugauguuaug

SEQ ID NO: 2021979 - RNA, 19 nt, Homo sapiens
  misc_RNA (1)...(19): siRNA sense strand
ggaaggaucauagauguca

SEQ ID NO: 2021980 - RNA, 19 nt, Homo sapiens
  misc_RNA (1)...(19): siRNA sense strand
gaaacaaggagggcagauu

SEQ ID NO: 2021981 - RNA, 19 nt, Homo sapiens
  misc_RNA (1)...(19): siRNA sense strand
uuggauaucuaacaucgua

SEQ ID NO: 2021982 - RNA, 19 nt, Homo sapiens
  misc_RNA (1)...(19): siRNA sense strand
ggccuaaauuggagccuuu

SEQ ID NO: 2021983 - RNA, 19 nt, Homo sapiens
  misc_RNA (1)...(19): siRNA sense strand
acagcuggguguugagaua

SEQ ID NO: 2021984 - RNA, 19 nt, Homo sapiens
  misc_RNA (1)...(19): siRNA sense strand
gggcagauucauuccguua

SEQ ID NO: 2021985 - RNA, 19 nt, Homo sapiens
  misc_RNA (1)...(19): siRNA sense strand
agaagaugauguuauggaa

SEQ ID NO: 2021986 - RNA, 19 nt, Homo sapiens
  misc_RNA (1)...(19): siRNA sense strand
caggagagacacagcauaa

SEQ ID NO: 2021987 - RNA, 19 nt, Homo sapiens
  misc_RNA (1)...(19): siRNA sense strand
ggaaagccauaugauuuac

SEQ ID NO: 2021988 - RNA, 19 nt, Homo sapiens
  misc_RNA (1)...(19): siRNA sense strand
ugacgccacuaauuaucua

SEQ ID NO: 2021989 - RNA, 19 nt, Homo sapiens
  misc_RNA (1)...(19): siRNA sense strand
gaagucagaaggcugguau

SEQ ID NO: 2021990 - RNA, 19 nt, Homo sapiens
  misc_RNA (1)...(19): siRNA sense strand
caucguaaccagagaagaa

SEQ ID NO: 2021991 - RNA, 19 nt, Homo sapiens
  misc_RNA (1)...(19): siRNA sense strand
aaccuuggaucacguauug

SEQ ID NO: 2021992 - RNA, 19 nt, Homo sapiens
  misc_RNA (1)...(19): siRNA sense strand
gcuaaggcaccacaugauu

SEQ ID NO: 2021993 - RNA, 19 nt, Homo sapiens
  misc_RNA (1)...(19): siRNA sense strand
aaagaggagauagcaauua

SEQ ID NO: 2021994 - RNA, 19 nt, Homo sapiens
  misc_RNA (1)...(19): siRNA sense strand
caaagaggagauagcaauu

SEQ ID NO: 2021995 - RNA, 19 nt, Homo sapiens
  misc_RNA (1)...(19): siRNA sense strand
ggaaaggcagagacucauu

SEQ ID NO: 2021996 - RNA, 19 nt, Homo sapiens
  misc_RNA (1)...(19): siRNA sense strand
gaaagaaaacgcauuggaa

SEQ ID NO: 2021997 - RNA, 19 nt, Homo sapiens
  misc_RNA (1)...(19): siRNA sense strand
cuggaaagccauaugauuu

SEQ ID NO: 2021998 - RNA, 19 nt, Homo sapiens
  misc_RNA (1)...(19): siRNA sense strand
ucagcacugugacuucuuu

SEQ ID NO: 2021999 - RNA, 19 nt, Homo sapiens
  misc_RNA (1)...(19): siRNA sense strand
ucugugacgccacuaauua

SEQ ID NO: 2022000 - RNA, 19 nt, Homo sapiens
  misc_RNA (1)...(19): siRNA sense strand
gaaggaguugaauauauug

SEQ ID NO: 2022001 - RNA, 19 nt, Homo sapiens
  misc_RNA (1)...(19): siRNA sense strand
ggaacuaauucaaccuuuu

SEQ ID NO: 2022002 - RNA, 19 nt, Homo sapiens
  misc_RNA (1)...(19): siRNA sense strand
cggaauugcuucuuacgau

SEQ ID NO: 2022003 - RNA, 19 nt, Homo sapiens
  misc_RNA (1)...(19): siRNA sense strand
gaaucugagguggaaauua

SEQ ID NO: 2022004 - RNA, 19 nt, Homo sapiens
  misc_RNA (1)...(19): siRNA sense strand
agacacagcauaagaguuc

SEQ ID NO: 2022005 - RNA, 19 nt, Homo sapiens
  misc_RNA (1)...(19): siRNA sense strand
cgaagaggaaauugaguuu

SEQ ID NO: 2022006 - RNA, 19 nt, Homo sapiens
  misc_RNA (1)...(19): siRNA sense strand
ugaggagaauauugaauca

SEQ ID NO: 2022007 - RNA, 19 nt, Homo sapiens
  misc_RNA (1)...(19): siRNA sense strand
gcuggaaagccauaugauu

SEQ ID NO: 2022008 - RNA, 19 nt, Homo sapiens
  misc_RNA (1)...(19): siRNA sense strand
aaggaaggaucauagaugu

SEQ ID NO: 2022009 - RNA, 19 nt, Homo sapiens
  misc_RNA (1)...(19): siRNA sense strand
cagucggaauugcuucuua

SEQ ID NO: 2022010 - RNA, 19 nt, Homo sapiens
  misc_RNA (1)...(19): siRNA sense strand
ucaagccgguaguggaauu

SEQ ID NO: 2022011 - RNA, 19 nt, Homo sapiens
  misc_RNA (1)...(19): siRNA sense strand
ucaaagaggagauagcaau

SEQ ID NO: 2022012 - RNA, 19 nt, Homo sapiens
  misc_RNA (1)...(19): siRNA sense strand
uuucaaguguccuaucaaa

SEQ ID NO: 2022013 - RNA, 19 nt, Homo sapiens
  misc_RNA (1)...(19): siRNA sense strand
guguugaucucaccugaau

SEQ ID NO: 2022014 - RNA, 19 nt, Homo sapiens
  misc_RNA (1)...(19): siRNA sense strand
gguggaaauuauucauguu

SEQ ID NO: 2022015 - RNA, 19 nt, Homo sapiens
  misc_RNA (1)...(19): siRNA sense strand
aagaaaggagacucacuua

SEQ ID NO: 2022016 - RNA, 19 nt, Homo sapiens
  misc_RNA (1)...(19): siRNA sense strand
ggauacacggaacguuaua

SEQ ID NO: 2022017 - RNA, 19 nt, Homo sapiens
  misc_RNA (1)...(19): siRNA sense strand
cuaaggcaccacaugauuu

SEQ ID NO: 2022018 - RNA, 19 nt, Homo sapiens
  misc_RNA (1)...(19): siRNA sense strand
gauggacuccugagggaaa

SEQ ID NO: 2022019 - RNA, 19 nt, Homo sapiens
  misc_RNA (1)...(19): siRNA sense strand
gauucuauuugaaggaguu

SEQ ID NO: 2022020 - RNA, 19 nt, Homo sapiens
  misc_RNA (1)...(19): siRNA sense strand
uagccaacauggaagaaga

SEQ ID NO: 2022021 - RNA, 19 nt, Homo sapiens
  misc_RNA (1)...(19): siRNA sense strand
gaucucaccugaauuauuu

SEQ ID NO: 2022022 - RNA, 19 nt, Homo sapiens
  misc_RNA (1)...(19): siRNA sense strand
ucagaaggcugguauauuu

SEQ ID NO: 2022023 - RNA, 19 nt, Homo sapiens
  misc_RNA (1)...(19): siRNA sense strand
gaucauagaugucauagau

SEQ ID NO: 2022024 - RNA, 19 nt, Homo sapiens
  misc_RNA (1)...(19): siRNA sense strand
gaacagggcuauuacuuag

SEQ ID NO: 2022025 - RNA, 19 nt, Homo sapiens
  misc_RNA (1)...(19): siRNA sense strand
ggaagaagaugccagauca

SEQ ID NO: 2022026 - RNA, 19 nt, Homo sapiens
  misc_RNA (1)...(19): siRNA sense strand
caauagagcagcagucuua

SEQ ID NO: 2022027 - RNA, 19 nt, Homo sapiens
  misc_RNA (1)...(19): siRNA sense strand
ccaaggaaguggaacauuu

SEQ ID NO: 2022028 - RNA, 19 nt, Homo sapiens
  misc_RNA (1)...(19): siRNA sense strand
gaaaggagacucacuuaug

SEQ ID NO: 2022029 - RNA, 19 nt, Homo sapiens
  misc_RNA (1)...(19): siRNA sense strand
gaucuaauauccaaguuga

SEQ ID NO: 2022030 - RNA, 19 nt, Homo sapiens
  misc_RNA (1)...(19): siRNA sense strand
ucacuuaugugcacaauga

SEQ ID NO: 2022031 - RNA, 19 nt, Homo sapiens
  misc_RNA (1)...(19): siRNA sense strand
ggaaagaaauauccuacug

SEQ ID NO: 2022032 - RNA, 19 nt, Homo sapiens
  misc_RNA (1)...(19): siRNA sense strand
cuacugugcuguucauaua

SEQ ID NO: 2022033 - RNA, 19 nt, Homo sapiens
  misc_RNA (1)...(19): siRNA sense strand
gaagaggaaugauccagau

SEQ ID NO: 2022034 - RNA, 19 nt, Homo sapiens
  misc_RNA (1)...(19): siRNA sense strand
gcacugugacuucuuuaua

SEQ ID NO: 2022035 - RNA, 19 nt, Homo sapiens
  misc_RNA (1)...(19): siRNA sense strand
cuacaagccucaugaucua

SEQ ID NO: 2022036 - RNA, 19 nt, Homo sapiens
  misc_RNA (1)...(19): siRNA sense strand
ggaauugcuucuuacgauu

SEQ ID NO: 2022037 - RNA, 19 nt, Homo sapiens
  misc_RNA (1)...(19): siRNA sense strand
gaauugcuucuuacgauua

SEQ ID NO: 2022038 - RNA, 19 nt, Homo sapiens
  misc_RNA (1)...(19): siRNA sense strand
gaagaaaggagacucacuu

SEQ ID NO: 2022039 - RNA, 19 nt, Homo sapiens
  misc_RNA (1)...(19): siRNA sense strand
uagcaacgauauuuggaua

SEQ ID NO: 2022040 - RNA, 19 nt, Homo sapiens
  misc_RNA (1)...(19): siRNA sense strand
gaaggaaggaucauagaug

SEQ ID NO: 2022041 - RNA, 19 nt, Homo sapiens
  misc_RNA (1)...(19): siRNA sense strand
gaccguggcuacucacauu

SEQ ID NO: 2022042 - RNA, 19 nt, Homo sapiens
  misc_RNA (1)...(19): siRNA sense strand
aaaggagacucacuuaugu

SEQ ID NO: 2022043 - RNA, 19 nt, Homo sapiens
  misc_RNA (1)...(19): siRNA sense strand
gaagaggaaauugaguuua

SEQ ID NO: 2022044 - RNA, 19 nt, Homo sapiens
  misc_RNA (1)...(19): siRNA sense strand
aaucugagguggaaauuau

SEQ ID NO: 2022045 - RNA, 19 nt, Homo sapiens
  misc_RNA (1)...(19): siRNA sense strand
ucgagaagaagaacuauua

SEQ ID NO: 2022046 - RNA, 19 nt, Homo sapiens
  misc_RNA (1)...(19): siRNA sense strand
guugaucucaccugaauua

SEQ ID NO: 2022047 - RNA, 19 nt, Homo sapiens
  misc_RNA (1)...(19): siRNA sense strand
caacauggcagcagcaaug

SEQ ID NO: 2022048 - RNA, 19 nt, Homo sapiens
  misc_RNA (1)...(19): siRNA sense strand
gaagaagaacuauuaagag

SEQ ID NO: 2022049 - RNA, 19 nt, Homo sapiens
  misc_RNA (1)...(19): siRNA sense strand
gggagaacauuaugaacug

SEQ ID NO: 2022050 - RNA, 19 nt, Homo sapiens
  misc_RNA (1)...(19): siRNA sense strand
ggagagacacagcauaaga

SEQ ID NO: 2022051 - RNA, 19 nt, Homo sapiens
  misc_RNA (1)...(19): siRNA sense strand
ugaacagggcuauuacuua

SEQ ID NO: 2022052 - RNA, 19 nt, Homo sapiens
  misc_RNA (1)...(19): siRNA sense strand
gaaaggcagagacucauug

SEQ ID NO: 2022053 - RNA, 19 nt, Homo sapiens
  misc_RNA (1)...(19): siRNA sense strand
agaaugaacagggcuauua

SEQ ID NO: 2022054 - RNA, 19 nt, Homo sapiens
  misc_RNA (1)...(19): siRNA sense strand
gaaagaaauauccuacugu

SEQ ID NO: 2022055 - RNA, 19 nt, Homo sapiens
  misc_RNA (1)...(19): siRNA sense strand
cacugugacuucuuuauaa

SEQ ID NO: 2022056 - RNA, 19 nt, Homo sapiens
  misc_RNA (1)...(19): siRNA sense strand
ccaaguugaugaagucaga

SEQ ID NO: 2022057 - RNA, 19 nt, Homo sapiens
  misc_RNA (1)...(19): siRNA sense strand
gcauaagaguuccugaauc

SEQ ID NO: 2022058 - RNA, 19 nt, Homo sapiens
  misc_RNA (1)...(19): siRNA sense strand
ccaagaagaauuugauaga

SEQ ID NO: 2022059 - RNA, 19 nt, Homo sapiens
  misc_RNA (1)...(19): siRNA sense strand
gaagaugacccaacuugca

SEQ ID NO: 2022060 - RNA, 19 nt, Homo sapiens
  misc_RNA (1)...(19): siRNA sense strand
acaaugagcuagccaacau

SEQ ID NO: 2022061 - RNA, 19 nt, Homo sapiens
  misc_RNA (1)...(19): siRNA sense strand
cauaagaguuccugaaucg

SEQ ID NO: 2022062 - RNA, 19 nt, Homo sapiens
  misc_RNA (1)...(19): siRNA sense strand
uuacugcucuuacaugguu

SEQ ID NO: 2022063 - RNA, 19 nt, Homo sapiens
  misc_RNA (1)...(19): siRNA sense strand
caggauacacggaacguua

SEQ ID NO: 2022064 - RNA, 19 nt, Homo sapiens
  misc_RNA (1)...(19): siRNA sense strand
cagcagcaauggaaacaga

SEQ ID NO: 2022065 - RNA, 19 nt, Homo sapiens
  misc_RNA (1)...(19): siRNA sense strand
gcagauucauuccguuauc

SEQ ID NO: 2022066 - RNA, 19 nt, Homo sapiens
  misc_RNA (1)...(19): siRNA sense strand
uggaaagccauaugauuua

SEQ ID NO: 2022067 - RNA, 19 nt, Homo sapiens
  misc_RNA (1)...(19): siRNA sense strand
ucaaguguccuaucaaaga

SEQ ID NO: 2022068 - RNA, 19 nt, Homo sapiens
  misc_RNA (1)...(19): siRNA sense strand
gauuucaaguguccuauca

SEQ ID NO: 2022069 - RNA, 19 nt, Homo sapiens
  misc_RNA (1)...(19): siRNA sense strand
ggaaagcaaauauaaacga

SEQ ID NO: 2022070 - RNA, 19 nt, Homo sapiens
  misc_RNA (1)...(19): siRNA sense strand
ugucauagauaaggaacua

SEQ ID NO: 2022071 - RNA, 19 nt, Homo sapiens
  misc_RNA (1)...(19): siRNA sense strand
cuguggaucuucuaugaua

SEQ ID NO: 2022072 - RNA, 19 nt, Homo sapiens
  misc_RNA (1)...(19): siRNA sense strand
uaucaaguccugaagauga

SEQ ID NO: 2022073 - RNA, 19 nt, Homo sapiens
  misc_RNA (1)...(19): siRNA sense strand
ccagaagaauccacacugu

SEQ ID NO: 2022074 - RNA, 19 nt, Homo sapiens
  misc_RNA (1)...(19): siRNA sense strand
guaaguauaguaaccagaa

SEQ ID NO: 2022075 - RNA, 19 nt, Homo sapiens
  misc_RNA (1)...(19): siRNA sense strand
gaagaugauguuauggaaa

SEQ ID NO: 2022076 - RNA, 19 nt, Homo sapiens
  misc_RNA (1)...(19): siRNA sense strand
ggaaguggaacauuucugu

SEQ ID NO: 2022077 - RNA, 19 nt, Homo sapiens
  misc_RNA (1)...(19): siRNA sense strand
ugacuauacuccuccagaa

SEQ ID NO: 2022078 - RNA, 19 nt, Homo sapiens
  misc_RNA (1)...(19): siRNA sense strand
gcuaucaaguccugaagau

SEQ ID NO: 2022079 - RNA, 19 nt, Homo sapiens
  misc_RNA (1)...(19): siRNA sense strand
aguagaagaugauguuaug

SEQ ID NO: 2022080 - RNA, 19 nt, Homo sapiens
  misc_RNA (1)...(19): siRNA sense strand
ggaaggaucauagauguca

SEQ ID NO: 2022081 - RNA, 19 nt, Homo sapiens
  misc_RNA (1)...(19): siRNA sense strand
gaaacaaggagggcagauu

SEQ ID NO: 2022082 - RNA, 19 nt, Homo sapiens
  misc_RNA (1)...(19): siRNA sense strand
acagcuggguguugagaua

SEQ ID NO: 2022083 - RNA, 19 nt, Homo sapiens
  misc_RNA (1)...(19): siRNA sense strand
ggccuaaauuggagccuuu

SEQ ID NO: 2022084 - RNA, 19 nt, Homo sapiens
  misc_RNA (1)...(19): siRNA sense strand
gggcagauucauuccguua

SEQ ID NO: 2022085 - RNA, 19 nt, Homo sapiens
  misc_RNA (1)...(19): siRNA sense strand
uuggauaucuaacaucgua

SEQ ID NO: 2022086 - RNA, 19 nt, Homo sapiens
  misc_RNA (1)...(19): siRNA sense strand
agaagaugauguuauggaa

SEQ ID NO: 2022087 - RNA, 19 nt, Homo sapiens
  misc_RNA (1)...(19): siRNA sense strand
caggagagacacagcauaa

SEQ ID NO: 2022088 - RNA, 19 nt, Homo sapiens
  misc_RNA (1)...(19): siRNA sense strand
ggaaagccauaugauuuac

SEQ ID NO: 2022089 - RNA, 19 nt, Homo sapiens
  misc_RNA (1)...(19): siRNA sense strand
ugacgccacuaauuaucua

SEQ ID NO: 2022090 - RNA, 19 nt, Homo sapiens
  misc_RNA (1)...(19): siRNA sense strand
gaagucagaaggcugguau

SEQ ID NO: 2022091 - RNA, 19 nt, Homo sapiens
  misc_RNA (1)...(19): siRNA sense strand
gcuaaggcaccacaugauu

SEQ ID NO: 2022092 - RNA, 19 nt, Homo sapiens
  misc_RNA (1)...(19): siRNA sense strand
aaccuuggaucacguauug

SEQ ID NO: 2022093 - RNA, 19 nt, Homo sapiens
  misc_RNA (1)...(19): siRNA sense strand
aaagaggagauagcaauua

SEQ ID NO: 2022094 - RNA, 19 nt, Homo sapiens
  misc_RNA (1)...(19): siRNA sense strand
caaagaggagauagcaauu

SEQ ID NO: 2022095 - RNA, 19 nt, Homo sapiens
  misc_RNA (1)...(19): siRNA sense strand
ggaaaggcagagacucauu

SEQ ID NO: 2022096 - RNA, 19 nt, Homo sapiens
  misc_RNA (1)...(19): siRNA sense strand
caucguaaccagagaagaa

SEQ ID NO: 2022097 - RNA, 19 nt, Homo sapiens
  misc_RNA (1)...(19): siRNA sense strand
gaaagaaaacgcauuggaa

SEQ ID NO: 2022098 - RNA, 19 nt, Homo sapiens
  misc_RNA (1)...(19): siRNA sense strand
cuggaaagccauaugauuu

SEQ ID NO: 2022099 - RNA, 19 nt, Homo sapiens
  misc_RNA (1)...(19): siRNA sense strand
ucagcacugugacuucuuu

SEQ ID NO: 2022100 - RNA, 19 nt, Homo sapiens
  misc_RNA (1)...(19): siRNA sense strand
ucugugacgccacuaauua

SEQ ID NO: 2022101 - RNA, 19 nt, Homo sapiens
  misc_RNA (1)...(19): siRNA sense strand
gaaggaguugaauauauug

SEQ ID NO: 2022102 - RNA, 19 nt, Homo sapiens
  misc_RNA (1)...(19): siRNA sense strand
ggaacuaauucaaccuuuu

SEQ ID NO: 2022103 - RNA, 19 nt, Homo sapiens
  misc_RNA (1)...(19): siRNA sense strand
cggaauugcuucuuacgau

SEQ ID NO: 2022104 - RNA, 19 nt, Homo sapiens
  misc_RNA (1)...(19): siRNA sense strand
gaaucugagguggaaauua

SEQ ID NO: 2022105 - RNA, 19 nt, Homo sapiens
  misc_RNA (1)...(19): siRNA sense strand
agacacagcauaagaguuc

SEQ ID NO: 2022106 - RNA, 19 nt, Homo sapiens
  misc_RNA (1)...(19): siRNA sense strand
cgaagaggaaauugaguuu

SEQ ID NO: 2022107 - RNA, 19 nt, Homo sapiens
  misc_RNA (1)...(19): siRNA sense strand
cagucggaauugcuucuua

SEQ ID NO: 2022108 - RNA, 19 nt, Homo sapiens
  misc_RNA (1)...(19): siRNA sense strand
gcuggaaagccauaugauu

SEQ ID NO: 2022109 - RNA, 19 nt, Homo sapiens
  misc_RNA (1)...(19): siRNA sense strand
ugaggagaauauugaauca

SEQ ID NO: 2022110 - RNA, 19 nt, Homo sapiens
  misc_RNA (1)...(19): siRNA sense strand
aaggaaggaucauagaugu

SEQ ID NO: 2022111 - RNA, 19 nt, Homo sapiens
  misc_RNA (1)...(19): siRNA sense strand
ucaagccgguaguggaauu

SEQ ID NO: 2022112 - RNA, 19 nt, Homo sapiens
  misc_RNA (1)...(19): siRNA sense strand
ucaaagaggagauagcaau

SEQ ID NO: 2022113 - RNA, 19 nt, Homo sapiens
  misc_RNA (1)...(19): siRNA sense strand
uuucaaguguccuaucaaa

SEQ ID NO: 2022114 - RNA, 19 nt, Homo sapiens
  misc_RNA (1)...(19): siRNA sense strand
guguugaucucaccugaau

SEQ ID NO: 2022115 - RNA, 19 nt, Homo sapiens
  misc_RNA (1)...(19): siRNA sense strand
gguggaaauuauucauguu

SEQ ID NO: 2022116 - RNA, 19 nt, Homo sapiens
  misc_RNA (1)...(19): siRNA sense strand
uagccaacauggaagaaga

SEQ ID NO: 2022117 - RNA, 19 nt, Homo sapiens
  misc_RNA (1)...(19): siRNA sense strand
cuaaggcaccacaugauuu

SEQ ID NO: 2022118 - RNA, 19 nt, Homo sapiens
  misc_RNA (1)...(19): siRNA sense strand
ggauacacggaacguuaua

SEQ ID NO: 2022119 - RNA, 19 nt, Homo sapiens
  misc_RNA (1)...(19): siRNA sense strand
gauggacuccugagggaaa

SEQ ID NO: 2022120 - RNA, 19 nt, Homo sapiens
  misc_RNA (1)...(19): siRNA sense strand
gauucuauuugaaggaguu

SEQ ID NO: 2022121 - RNA, 19 nt, Homo sapiens
  misc_RNA (1)...(19): siRNA sense strand
gaucucaccugaauuauuu

SEQ ID NO: 2022122 - RNA, 19 nt, Homo sapiens
  misc_RNA (1)...(19): siRNA sense strand
ucagaaggcugguauauuu

SEQ ID NO: 2022123 - RNA, 19 nt, Homo sapiens
  misc_RNA (1)...(19): siRNA sense strand
gaucauagaugucauagau

SEQ ID NO: 2022124 - RNA, 19 nt, Homo sapiens
  misc_RNA (1)...(19): siRNA sense strand
gaacagggcuauuacuuag

SEQ ID NO: 2022125 - RNA, 19 nt, Homo sapiens
  misc_RNA (1)...(19): siRNA sense strand
ggaagaagaugccagauca

SEQ ID NO: 2022126 - RNA, 19 nt, Homo sapiens
  misc_RNA (1)...(19): siRNA sense strand
caauagagcagcagucuua

SEQ ID NO: 2022127 - RNA, 19 nt, Homo sapiens
  misc_RNA (1)...(19): siRNA sense strand
ccaaggaaguggaacauuu

SEQ ID NO: 2022128 - RNA, 19 nt, Homo sapiens
  misc_RNA (1)...(19): siRNA sense strand
gaaaggagacucacuuaug

SEQ ID NO: 2022129 - RNA, 19 nt, Homo sapiens
  misc_RNA (1)...(19): siRNA sense strand
gaucuaauauccaaguuga

SEQ ID NO: 2022130 - RNA, 19 nt, Homo sapiens
  misc_RNA (1)...(19): siRNA sense strand
ucacuuaugugcacaauga

SEQ ID NO: 2022131 - RNA, 19 nt, Homo sapiens
  misc_RNA (1)...(19): siRNA sense strand
ggaaagaaauauccuacug

SEQ ID NO: 2022132 - RNA, 19 nt, Homo sapiens
  misc_RNA (1)...(19): siRNA sense strand
cuacugugcuguucauaua

SEQ ID NO: 2022133 - RNA, 19 nt, Homo sapiens
  misc_RNA (1)...(19): siRNA sense strand
gaagaggaaugauccagau

SEQ ID NO: 2022134 - RNA, 19 nt, Homo sapiens
  misc_RNA (1)...(19): siRNA sense strand
gcacugugacuucuuuaua

SEQ ID NO: 2022135 - RNA, 19 nt, Homo sapiens
  misc_RNA (1)...(19): siRNA sense strand
cuacaagccucaugaucua

SEQ ID NO: 2022136 - RNA, 19 nt, Homo sapiens
  misc_RNA (1)...(19): siRNA sense strand
ggaauugcuucuuacgauu

SEQ ID NO: 2022137 - RNA, 19 nt, Homo sapiens
  misc_RNA (1)...(19): siRNA sense strand
gaauugcuucuuacgauua

SEQ ID NO: 2022138 - RNA, 19 nt, Homo sapiens
  misc_RNA (1)...(19): siRNA sense strand
gaagaaaggagacucacuu

SEQ ID NO: 2022139 - RNA, 19 nt, Homo sapiens
  misc_RNA (1)...(19): siRNA sense strand
uagcaacgauauuuggaua

SEQ ID NO: 2022140 - RNA, 19 nt, Homo sapiens
  misc_RNA (1)...(19): siRNA sense strand
gaaggaaggaucauagaug

SEQ ID NO: 2022141 - RNA, 19 nt, Homo sapiens
  misc_RNA (1)...(19): siRNA sense strand
gaccguggcuacucacauu

SEQ ID NO: 2022142 - RNA, 19 nt, Homo sapiens
  misc_RNA (1)...(19): siRNA sense strand
aaaggagacucacuuaugu

SEQ ID NO: 2022143 - RNA, 19 nt, Homo sapiens
  misc_RNA (1)...(19): siRNA sense strand
gaagaggaaauugaguuua

SEQ ID NO: 2022144 - RNA, 19 nt, Homo sapiens
  misc_RNA (1)...(19): siRNA sense strand
aaucugagguggaaauuau

SEQ ID NO: 2022145 - RNA, 19 nt, Homo sapiens
  misc_RNA (1)...(19): siRNA sense strand
ucgagaagaagaacuauua

SEQ ID NO: 2022146 - RNA, 19 nt, Homo sapiens
  misc_RNA (1)...(19): siRNA sense strand
guugaucucaccugaauua

SEQ ID NO: 2022147 - RNA, 19 nt, Homo sapiens
  misc_RNA (1)...(19): siRNA sense strand
caacauggcagcagcaaug

SEQ ID NO: 2022148 - RNA, 19 nt, Homo sapiens
  misc_RNA (1)...(19): siRNA sense strand
gaagaagaacuauuaagag

SEQ ID NO: 2022149 - RNA, 19 nt, Homo sapiens
  misc_RNA (1)...(19): siRNA sense strand
gggagaacauuaugaacug

SEQ ID NO: 2022150 - RNA, 19 nt, Homo sapiens
  misc_RNA (1)...(19): siRNA sense strand
ggagagacacagcauaaga

SEQ ID NO: 2022151 - RNA, 19 nt, Homo sapiens
  misc_RNA (1)...(19): siRNA sense strand
ugaacagggcuauuacuua

SEQ ID NO: 2022152 - RNA, 19 nt, Homo sapiens
  misc_RNA (1)...(19): siRNA sense strand
gaaaggcagagacucauug

SEQ ID NO: 2022153 - RNA, 19 nt, Homo sapiens
  misc_RNA (1)...(19): siRNA sense strand
agaaugaacagggcuauua

SEQ ID NO: 2022154 - RNA, 19 nt, Homo sapiens
  misc_RNA (1)...(19): siRNA sense strand
gaaagaaauauccuacugu

SEQ ID NO: 2022155 - RNA, 19 nt, Homo sapiens
  misc_RNA (1)...(19): siRNA sense strand
cacugugacuucuuuauaa

SEQ ID NO: 2022156 - RNA, 19 nt, Homo sapiens
  misc_RNA (1)...(19): siRNA sense strand
ccaaguugaugaagucaga

SEQ ID NO: 2022157 - RNA, 19 nt, Homo sapiens
  misc_RNA (1)...(19): siRNA sense strand
gcauaagaguuccugaauc

SEQ ID NO: 2022158 - RNA, 19 nt, Homo sapiens
  misc_RNA (1)...(19): siRNA sense strand
ccaagaagaauuugauaga

SEQ ID NO: 2022159 - RNA, 19 nt, Homo sapiens
  misc_RNA (1)...(19): siRNA sense strand
gaagaugacccaacuugca

SEQ ID NO: 2022160 - RNA, 19 nt, Homo sapiens
  misc_RNA (1)...(19): siRNA sense strand
acaaugagcuagccaacau

SEQ ID NO: 2022161 - RNA, 19 nt, Homo sapiens
  misc_RNA (1)...(19): siRNA sense strand
cauaagaguuccugaaucg

SEQ ID NO: 2022162 - RNA, 19 nt, Homo sapiens
  misc_RNA (1)...(19): siRNA sense strand
uuacugcucuuacaugguu

SEQ ID NO: 2022163 - RNA, 19 nt, Homo sapiens
  misc_RNA (1)...(19): siRNA sense strand
caggauacacggaacguua

SEQ ID NO: 2022164 - RNA, 19 nt, Homo sapiens
  misc_RNA (1)...(19): siRNA sense strand
cagcagcaauggaaacaga

SEQ ID NO: 2022165 - RNA, 19 nt, Homo sapiens
  misc_RNA (1)...(19): siRNA sense strand
gcagauucauuccguuauc

SEQ ID NO: 2022166 - RNA, 19 nt, Homo sapiens
  misc_RNA (1)...(19): siRNA sense strand
uggaaagccauaugauuua

SEQ ID NO: 2022167 - RNA, 19 nt, Homo sapiens
  misc_RNA (1)...(19): siRNA sense strand
ucaaguguccuaucaaaga

SEQ ID NO: 2022168 - RNA, 19 nt, Homo sapiens
  misc_RNA (1)...(19): siRNA sense strand
gauuucaaguguccuauca

SEQ ID NO: 2022169 - RNA, 19 nt, Homo sapiens
  misc_RNA (1)...(19): siRNA sense strand
ggaaagcaaauauaaacga

SEQ ID NO: 2022170 - RNA, 19 nt, Homo sapiens
  misc_RNA (1)...(19): siRNA sense strand
ugucauagauaaggaacua

SEQ ID NO: 2022171 - RNA, 19 nt, Homo sapiens
  misc_RNA (1)...(19): siRNA sense strand
cuguggaucuucuaugaua

SEQ ID NO: 2022172 - RNA, 19 nt, Homo sapiens
  misc_RNA (1)...(19): siRNA sense strand
uaucaaguccugaagauga

SEQ ID NO: 2022173 - RNA, 19 nt, Homo sapiens
  misc_RNA (1)...(19): siRNA sense strand
ccagaagaauccacacugu

SEQ ID NO: 2022174 - RNA, 19 nt, Homo sapiens
  misc_RNA (1)...(19): siRNA sense strand
guaaguauaguaaccagaa

SEQ ID NO: 2022175 - RNA, 19 nt, Homo sapiens
  misc_RNA (1)...(19): siRNA sense strand
gaagaugauguuauggaaa

SEQ ID NO: 2022176 - RNA, 19 nt, Homo sapiens
  misc_RNA (1)...(19): siRNA sense strand
ggaaguggaacauuucugu

SEQ ID NO: 2022177 - RNA, 19 nt, Homo sapiens
  misc_RNA (1)...(19): siRNA sense strand
ugacuauacuccuccagaa

SEQ ID NO: 2022178 - RNA, 19 nt, Homo sapiens
  misc_RNA (1)...(19): siRNA sense strand
gcuaucaaguccugaagau

SEQ ID NO: 2022179 - RNA, 19 nt, Homo sapiens
  misc_RNA (1)...(19): siRNA sense strand
aguagaagaugauguuaug

SEQ ID NO: 2022180 - RNA, 19 nt, Homo sapiens
  misc_RNA (1)...(19): siRNA sense strand
ggaaggaucauagauguca

SEQ ID NO: 2022181 - RNA, 19 nt, Homo sapiens
  misc_RNA (1)...(19): siRNA sense strand
gaaacaaggagggcagauu

SEQ ID NO: 2022182 - RNA, 19 nt, Homo sapiens
  misc_RNA (1)...(19): siRNA sense strand
acagcuggguguugagaua

SEQ ID NO: 2022183 - RNA, 19 nt, Homo sapiens
  misc_RNA (1)...(19): siRNA sense strand
ggccuaaauuggagccuuu

SEQ ID NO: 2022184 - RNA, 19 nt, Homo sapiens
  misc_RNA (1)...(19): siRNA sense strand
gggcagauucauuccguua

SEQ ID NO: 2022185 - RNA, 19 nt, Homo sapiens
  misc_RNA (1)...(19): siRNA sense strand
uuggauaucuaacaucgua

SEQ ID NO: 2022186 - RNA, 19 nt, Homo sapiens
  misc_RNA (1)...(19): siRNA sense strand
agaagaugauguuauggaa

SEQ ID NO: 2022187 - RNA, 19 nt, Homo sapiens
  misc_RNA (1)...(19): siRNA sense strand
caggagagacacagcauaa

SEQ ID NO: 2022188 - RNA, 19 nt, Homo sapiens
  misc_RNA (1)...(19): siRNA sense strand
ggaaagccauaugauuuac

SEQ ID NO: 2022189 - RNA, 19 nt, Homo sapiens
  misc_RNA (1)...(19): siRNA sense strand
ugacgccacuaauuaucua

SEQ ID NO: 2022190 - RNA, 19 nt, Homo sapiens
  misc_RNA (1)...(19): siRNA sense strand
gaagucagaaggcugguau

SEQ ID NO: 2022191 - RNA, 19 nt, Homo sapiens
  misc_RNA (1)...(19): siRNA sense strand
gcuaaggcaccacaugauu

SEQ ID NO: 2022192 - RNA, 19 nt, Homo sapiens
  misc_RNA (1)...(19): siRNA sense strand
aaccuuggaucacguauug

SEQ ID NO: 2022193 - RNA, 19 nt, Homo sapiens
  misc_RNA (1)...(19): siRNA sense strand
aaagaggagauagcaauua

SEQ ID NO: 2022194 - RNA, 19 nt, Homo sapiens
  misc_RNA (1)...(19): siRNA sense strand
caaagaggagauagcaauu

SEQ ID NO: 2022195 - RNA, 19 nt, Homo sapiens
  misc_RNA (1)...(19): siRNA sense strand
ggaaaggcagagacucauu

SEQ ID NO: 2022196 - RNA, 19 nt, Homo sapiens
  misc_RNA (1)...(19): siRNA sense strand
caucguaaccagagaagaa

SEQ ID NO: 2022197 - RNA, 19 nt, Homo sapiens
  misc_RNA (1)...(19): siRNA sense strand
gaaagaaaacgcauuggaa

SEQ ID NO: 2022198 - RNA, 19 nt, Homo sapiens
  misc_RNA (1)...(19): siRNA sense strand
cuggaaagccauaugauuu

SEQ ID NO: 2022199 - RNA, 19 nt, Homo sapiens
  misc_RNA (1)...(19): siRNA sense strand
ucagcacugugacuucuuu

SEQ ID NO: 2022200 - RNA, 19 nt, Homo sapiens
  misc_RNA (1)...(19): siRNA sense strand
ucugugacgccacuaauua

SEQ ID NO: 2022201 - RNA, 19 nt, Homo sapiens
  misc_RNA (1)...(19): siRNA sense strand
gaaggaguugaauauauug

SEQ ID NO: 2022202 - RNA, 19 nt, Homo sapiens
  misc_RNA (1)...(19): siRNA sense strand
ggaacuaauucaaccuuuu

SEQ ID NO: 2022203 - RNA, 19 nt, Homo sapiens
  misc_RNA (1)...(19): siRNA sense strand
cggaauugcuucuuacgau

SEQ ID NO: 2022204 - RNA, 19 nt, Homo sapiens
  misc_RNA (1)...(19): siRNA sense strand
gaaucugagguggaaauua

SEQ ID NO: 2022205 - RNA, 19 nt, Homo sapiens
  misc_RNA (1)...(19): siRNA sense strand
agacacagcauaagaguuc

SEQ ID NO: 2022206 - RNA, 19 nt, Homo sapiens
  misc_RNA (1)...(19): siRNA sense strand
cgaagaggaaauugaguuu

SEQ ID NO: 2022207 - RNA, 19 nt, Homo sapiens
  misc_RNA (1)...(19): siRNA sense strand
cagucggaauugcuucuua

SEQ ID NO: 2022208 - RNA, 19 nt, Homo sapiens
  misc_RNA (1)...(19): siRNA sense strand
gcuggaaagccauaugauu

SEQ ID NO: 2022209 - RNA, 19 nt, Homo sapiens
  misc_RNA (1)...(19): siRNA sense strand
ugaggagaauauugaauca

SEQ ID NO: 2022210 - RNA, 19 nt, Homo sapiens
  misc_RNA (1)...(19): siRNA sense strand
aaggaaggaucauagaugu

SEQ ID NO: 2022211 - RNA, 19 nt, Homo sapiens
  misc_RNA (1)...(19): siRNA sense strand
ucaagccgguaguggaauu

SEQ ID NO: 2022212 - RNA, 19 nt, Homo sapiens
  misc_RNA (1)...(19): siRNA sense strand
ucaaagaggagauagcaau

SEQ ID NO: 2022213 - RNA, 19 nt, Homo sapiens
  misc_RNA (1)...(19): siRNA sense strand
uuucaaguguccuaucaaa

SEQ ID NO: 2022214 - RNA, 19 nt, Homo sapiens
  misc_RNA (1)...(19): siRNA sense strand
guguugaucucaccugaau

SEQ ID NO: 2022215 - RNA, 19 nt, Homo sapiens
  misc_RNA (1)...(19): siRNA sense strand
gguggaaauuauucauguu

SEQ ID NO: 2022216 - RNA, 19 nt, Homo sapiens
  misc_RNA (1)...(19): siRNA sense strand
uagccaacauggaagaaga

SEQ ID NO: 2022217 - RNA, 19 nt, Homo sapiens
  misc_RNA (1)...(19): siRNA sense strand
cuaaggcaccacaugauuu

SEQ ID NO: 2022218 - RNA, 19 nt, Homo sapiens
  misc_RNA (1)...(19): siRNA sense strand
ggauacacggaacguuaua

SEQ ID NO: 2022219 - RNA, 19 nt, Homo sapiens
  misc_RNA (1)...(19): siRNA sense strand
gauggacuccugagggaaa

SEQ ID NO: 2022220 - RNA, 19 nt, Homo sapiens
  misc_RNA (1)...(19): siRNA sense strand
gauucuauuugaaggaguu

SEQ ID NO: 2022221 - RNA, 19 nt, Homo sapiens
  misc_RNA (1)...(19): siRNA sense strand
gaucucaccugaauuauuu

SEQ ID NO: 2022222 - RNA, 19 nt, Homo sapiens
  misc_RNA (1)...(19): siRNA sense strand
ucagaaggcugguauauuu

SEQ ID NO: 2022223 - RNA, 19 nt, Homo sapiens
  misc_RNA (1)...(19): siRNA sense strand
gaucauagaugucauagau

SEQ ID NO: 2022224 - RNA, 19 nt, Homo sapiens
  misc_RNA (1)...(19): siRNA sense strand
gaacagggcuauuacuuag

SEQ ID NO: 2022225 - RNA, 19 nt, Homo sapiens
  misc_RNA (1)...(19): siRNA sense strand
ggaagaagaugccagauca

SEQ ID NO: 2022226 - RNA, 19 nt, Homo sapiens
  misc_RNA (1)...(19): siRNA sense strand
caauagagcagcagucuua

SEQ ID NO: 2022227 - RNA, 19 nt, Homo sapiens
  misc_RNA (1)...(19): siRNA sense strand
ccaaggaaguggaacauuu

SEQ ID NO: 2022228 - RNA, 19 nt, Homo sapiens
  misc_RNA (1)...(19): siRNA sense strand
gaaaggagacucacuuaug

SEQ ID NO: 2022229 - RNA, 19 nt, Homo sapiens
  misc_RNA (1)...(19): siRNA sense strand
gaucuaauauccaaguuga

SEQ ID NO: 2022230 - RNA, 19 nt, Homo sapiens
  misc_RNA (1)...(19): siRNA sense strand
ucacuuaugugcacaauga

SEQ ID NO: 2022231 - RNA, 19 nt, Homo sapiens
  misc_RNA (1)...(19): siRNA sense strand
ggaaagaaauauccuacug

SEQ ID NO: 2022232 - RNA, 19 nt, Homo sapiens
  misc_RNA (1)...(19): siRNA sense strand
cuacugugcuguucauaua

SEQ ID NO: 2022233 - RNA, 19 nt, Homo sapiens
  misc_RNA (1)...(19): siRNA sense strand
gaagaggaaugauccagau

SEQ ID NO: 2022234 - RNA, 19 nt, Homo sapiens
  misc_RNA (1)...(19): siRNA sense strand
gcacugugacuucuuuaua

SEQ ID NO: 2022235 - RNA, 19 nt, Homo sapiens
  misc_RNA (1)...(19): siRNA sense strand
cuacaagccucaugaucua

SEQ ID NO: 2022236 - RNA, 19 nt, Homo sapiens
  misc_RNA (1)...(19): siRNA sense strand
ggaauugcuucuuacgauu

SEQ ID NO: 2022237 - RNA, 19 nt, Homo sapiens
  misc_RNA (1)...(19): siRNA sense strand
gaauugcuucuuacgauua

SEQ ID NO: 2022238 - RNA, 19 nt, Homo sapiens
  misc_RNA (1)...(19): siRNA sense strand
gaagaaaggagacucacuu

SEQ ID NO: 2022239 - RNA, 19 nt, Homo sapiens
  misc_RNA (1)...(19): siRNA sense strand
uagcaacgauauuuggaua

SEQ ID NO: 2022240 - RNA, 19 nt, Homo sapiens
  misc_RNA (1)...(19): siRNA sense strand
gaaggaaggaucauagaug

SEQ ID NO: 2022241 - RNA, 19 nt, Homo sapiens
  misc_RNA (1)...(19): siRNA sense strand
gaccguggcuacucacauu

SEQ ID NO: 2022242 - RNA, 19 nt, Homo sapiens
  misc_RNA (1)...(19): siRNA sense strand
aaaggagacucacuuaugu

SEQ ID NO: 2022243 - RNA, 19 nt, Homo sapiens
  misc_RNA (1)...(19): siRNA sense strand
gaagaggaaauugaguuua

SEQ ID NO: 2022244 - RNA, 19 nt, Homo sapiens
  misc_RNA (1)...(19): siRNA sense strand
aaucugagguggaaauuau

SEQ ID NO: 2022245 - RNA, 19 nt, Homo sapiens
  misc_RNA (1)...(19): siRNA sense strand
ucgagaagaagaacuauua

SEQ ID NO: 2022246 - RNA, 19 nt, Homo sapiens
  misc_RNA (1)...(19): siRNA sense strand
guugaucucaccugaauua

SEQ ID NO: 2022247 - RNA, 19 nt, Homo sapiens
  misc_RNA (1)...(19): siRNA sense strand
gaagaagaacuauuaagag

SEQ ID NO: 2022248 - RNA, 19 nt, Homo sapiens
  misc_RNA (1)...(19): siRNA sense strand
gggagaacauuaugaacug

SEQ ID NO: 2022249 - RNA, 19 nt, Homo sapiens
  misc_RNA (1)...(19): siRNA sense strand
ggagagacacagcauaaga

SEQ ID NO: 2022250 - RNA, 19 nt, Homo sapiens
  misc_RNA (1)...(19): siRNA sense strand
ugaacagggcuauuacuua

SEQ ID NO: 2022251 - RNA, 19 nt, Homo sapiens
  misc_RNA (1)...(19): siRNA sense strand
gaaaggcagagacucauug

SEQ ID NO: 2022252 - RNA, 19 nt, Homo sapiens
  misc_RNA (1)...(19): siRNA sense strand
agaaugaacagggcuauua

SEQ ID NO: 2022253 - RNA, 19 nt, Homo sapiens
  misc_RNA (1)...(19): siRNA sense strand
gaaagaaauauccuacugu

SEQ ID NO: 2022254 - RNA, 19 nt, Homo sapiens
  misc_RNA (1)...(19): siRNA sense strand
cacugugacuucuuuauaa

SEQ ID NO: 2022255 - RNA, 19 nt, Homo sapiens
  misc_RNA (1)...(19): siRNA sense strand
ccaaguugaugaagucaga

SEQ ID NO: 2022256 - RNA, 19 nt, Homo sapiens
  misc_RNA (1)...(19): siRNA sense strand
gcauaagaguuccugaauc

SEQ ID NO: 2022257 - RNA, 19 nt, Homo sapiens
  misc_RNA (1)...(19): siRNA sense strand
ccaagaagaauuugauaga

SEQ ID NO: 2022258 - RNA, 19 nt, Homo sapiens
  misc_RNA (1)...(19): siRNA sense strand
gaagaugacccaacuugca

SEQ ID NO: 2022259 - RNA, 19 nt, Homo sapiens
  misc_RNA (1)...(19): siRNA sense strand
acaaugagcuagccaacau

SEQ ID NO: 2022260 - RNA, 19 nt, Homo sapiens
  misc_RNA (1)...(19): siRNA sense strand
cauaagaguuccugaaucg

SEQ ID NO: 2022261 - RNA, 19 nt, Homo sapiens
  misc_RNA (1)...(19): siRNA sense strand
uuacugcucuuacaugguu

SEQ ID NO: 2022262 - RNA, 19 nt, Homo sapiens
  misc_RNA (1)...(19): siRNA sense strand
caggauacacggaacguua

SEQ ID NO: 2022263 - RNA, 19 nt, Homo sapiens
  misc_RNA (1)...(19): siRNA sense strand
cagcagcaauggaaacaga

SEQ ID NO: 2022264 - RNA, 19 nt, Homo sapiens
  misc_RNA (1)...(19): siRNA sense strand
gcagauucauuccguuauc

SEQ ID NO: 2022265 - RNA, 19 nt, Homo sapiens
  misc_RNA (1)...(19): siRNA sense strand
uggaaagccauaugauuua

SEQ ID NO: 2022266 - RNA, 19 nt, Homo sapiens
  misc_RNA (1)...(19): siRNA sense strand
ucaaguguccuaucaaaga

SEQ ID NO: 2022267 - RNA, 19 nt, Homo sapiens
  misc_RNA (1)...(19): siRNA sense strand
gauuucaaguguccuauca

SEQ ID NO: 2022268 - RNA, 19 nt, Homo sapiens
  misc_RNA (1)...(19): siRNA sense strand
ggaaagcaaauauaaacga

SEQ ID NO: 2022269 - RNA, 19 nt, Homo sapiens
  misc_RNA (1)...(19): siRNA sense strand
ugucauagauaaggaacua

SEQ ID NO: 2022270 - RNA, 19 nt, Homo sapiens
  misc_RNA (1)...(19): siRNA sense strand
cuguggaucuucuaugaua

SEQ ID NO: 2022271 - RNA, 19 nt, Homo sapiens
  misc_RNA (1)...(19): siRNA sense strand
uaucaaguccugaagauga

SEQ ID NO: 2022272 - RNA, 19 nt, Homo sapiens
  misc_RNA (1)...(19): siRNA sense strand
ccagaagaauccacacugu

SEQ ID NO: 2022273 - RNA, 19 nt, Homo sapiens
  misc_RNA (1)...(19): siRNA sense strand
guaaguauaguaaccagaa

SEQ ID NO: 2022274 - RNA, 19 nt, Homo sapiens
  misc_RNA (1)...(19): siRNA sense strand
gaagaugauguuauggaaa

SEQ ID NO: 2022275 - RNA, 19 nt, Homo sapiens
  misc_RNA (1)...(19): siRNA sense strand
ggaaguggaacauuucugu

SEQ ID NO: 2022276 - RNA, 19 nt, Homo sapiens
  misc_RNA (1)...(19): siRNA sense strand
ugacuauacuccuccagaa

SEQ ID NO: 2022277 - RNA, 19 nt, Homo sapiens
  misc_RNA (1)...(19): siRNA sense strand
gcuaucaaguccugaagau

SEQ ID NO: 2022278 - RNA, 19 nt, Homo sapiens
  misc_RNA (1)...(19): siRNA sense strand
aguagaagaugauguuaug

SEQ ID NO: 2022279 - RNA, 19 nt, Homo sapiens
  misc_RNA (1)...(19): siRNA sense strand
ggaaggaucauagauguca

SEQ ID NO: 2022280 - RNA, 19 nt, Homo sapiens
  misc_RNA (1)...(19): siRNA sense strand
gaaacaaggagggcagauu

SEQ ID NO: 2022281 - RNA, 19 nt, Homo sapiens
  misc_RNA (1)...(19): siRNA sense strand
uuggauaucuaacaucgua

SEQ ID NO: 2022282 - RNA, 19 nt, Homo sapiens
  misc_RNA (1)...(19): siRNA sense strand
ggccuaaauuggagccuuu

SEQ ID NO: 2022283 - RNA, 19 nt, Homo sapiens
  misc_RNA (1)...(19): siRNA sense strand
acagcuggguguugagaua

SEQ ID NO: 2022284 - RNA, 19 nt, Homo sapiens
  misc_RNA (1)...(19): siRNA sense strand
gggcagauucauuccguua

SEQ ID NO: 2022285 - RNA, 19 nt, Homo sapiens
  misc_RNA (1)...(19): siRNA sense strand
agaagaugauguuauggaa

SEQ ID NO: 2022286 - RNA, 19 nt, Homo sapiens
  misc_RNA (1)...(19): siRNA sense strand
caggagagacacagcauaa

SEQ ID NO: 2022287 - RNA, 19 nt, Homo sapiens
  misc_RNA (1)...(19): siRNA sense strand
ggaaagccauaugauuuac

SEQ ID NO: 2022288 - RNA, 19 nt, Homo sapiens
  misc_RNA (1)...(19): siRNA sense strand
ugacgccacuaauuaucua

SEQ ID NO: 2022289 - RNA, 19 nt, Homo sapiens
  misc_RNA (1)...(19): siRNA sense strand
gaagucagaaggcugguau

SEQ ID NO: 2022290 - RNA, 19 nt, Homo sapiens
  misc_RNA (1)...(19): siRNA sense strand
caucguaaccagagaagaa

SEQ ID NO: 2022291 - RNA, 19 nt, Homo sapiens
  misc_RNA (1)...(19): siRNA sense strand
aaccuuggaucacguauug

SEQ ID NO: 2022292 - RNA, 19 nt, Homo sapiens
  misc_RNA (1)...(19): siRNA sense strand
gcuaaggcaccacaugauu

SEQ ID NO: 2022293 - RNA, 19 nt, Homo sapiens
  misc_RNA (1)...(19): siRNA sense strand
aaagaggagauagcaauua

SEQ ID NO: 2022294 - RNA, 19 nt, Homo sapiens
  misc_RNA (1)...(19): siRNA sense strand
caaagaggagauagcaauu

SEQ ID NO: 2022295 - RNA, 19 nt, Homo sapiens
  misc_RNA (1)...(19): siRNA sense strand
ggaaaggcagagacucauu

SEQ ID NO: 2022296 - RNA, 19 nt, Homo sapiens
  misc_RNA (1)...(19): siRNA sense strand
gaaagaaaacgcauuggaa

SEQ ID NO: 2022297 - RNA, 19 nt, Homo sapiens
  misc_RNA (1)...(19): siRNA sense strand
cuggaaagccauaugauuu

SEQ ID NO: 2022298 - RNA, 19 nt, Homo sapiens
  misc_RNA (1)...(19): siRNA sense strand
ucagcacugugacuucuuu

SEQ ID NO: 2022299 - RNA, 19 nt, Homo sapiens
  misc_RNA (1)...(19): siRNA sense strand
ucugugacgccacuaauua

SEQ ID NO: 2022300 - RNA, 19 nt, Homo sapiens
  misc_RNA (1)...(19): siRNA sense strand
gaaggaguugaauauauug

SEQ ID NO: 2022301 - RNA, 19 nt, Homo sapiens
  misc_RNA (1)...(19): siRNA sense strand
ggaacuaauucaaccuuuu

SEQ ID NO: 2022302 - RNA, 19 nt, Homo sapiens
  misc_RNA (1)...(19): siRNA sense strand
cggaauugcuucuuacgau

SEQ ID NO: 2022303 - RNA, 19 nt, Homo sapiens
  misc_RNA (1)...(19): siRNA sense strand
gaaucugagguggaaauua

SEQ ID NO: 2022304 - RNA, 19 nt, Homo sapiens
  misc_RNA (1)...(19): siRNA sense strand
agacacagcauaagaguuc

SEQ ID NO: 2022305 - RNA, 19 nt, Homo sapiens
  misc_RNA (1)...(19): siRNA sense strand
cgaagaggaaauugaguuu

SEQ ID NO: 2022306 - RNA, 19 nt, Homo sapiens
  misc_RNA (1)...(19): siRNA sense strand
ugaggagaauauugaauca

SEQ ID NO: 2022307 - RNA, 19 nt, Homo sapiens
  misc_RNA (1)...(19): siRNA sense strand
gcuggaaagccauaugauu

SEQ ID NO: 2022308 - RNA, 19 nt, Homo sapiens
  misc_RNA (1)...(19): siRNA sense strand
aaggaaggaucauagaugu

SEQ ID NO: 2022309 - RNA, 19 nt, Homo sapiens
  misc_RNA (1)...(19): siRNA sense strand
cagucggaauugcuucuua

SEQ ID NO: 2022310 - RNA, 19 nt, Homo sapiens
  misc_RNA (1)...(19): siRNA sense strand
ucaagccgguaguggaauu

SEQ ID NO: 2022311 - RNA, 19 nt, Homo sapiens
  misc_RNA (1)...(19): siRNA sense strand
ucaaagaggagauagcaau

SEQ ID NO: 2022312 - RNA, 19 nt, Homo sapiens
  misc_RNA (1)...(19): siRNA sense strand
uuucaaguguccuaucaaa

SEQ ID NO: 2022313 - RNA, 19 nt, Homo sapiens
  misc_RNA (1)...(19): siRNA sense strand
guguugaucucaccugaau

SEQ ID NO: 2022314 - RNA, 19 nt, Homo sapiens
  misc_RNA (1)...(19): siRNA sense strand
gguggaaauuauucauguu

SEQ ID NO: 2022315 - RNA, 19 nt, Homo sapiens
  misc_RNA (1)...(19): siRNA sense strand
aagaaaggagacucacuua

SEQ ID NO: 2022316 - RNA, 19 nt, Homo sapiens
  misc_RNA (1)...(19): siRNA sense strand
ggauacacggaacguuaua

SEQ ID NO: 2022317 - RNA, 19 nt, Homo sapiens
  misc_RNA (1)...(19): siRNA sense strand
cuaaggcaccacaugauuu

SEQ ID NO: 2022318 - RNA, 19 nt, Homo sapiens
  misc_RNA (1)...(19): siRNA sense strand
gauggacuccugagggaaa

SEQ ID NO: 2022319 - RNA, 19 nt, Homo sapiens
  misc_RNA (1)...(19): siRNA sense strand
gauucuauuugaaggaguu

SEQ ID NO: 2022320 - RNA, 19 nt, Homo sapiens
  misc_RNA (1)...(19): siRNA sense strand
uagccaacauggaagaaga

SEQ ID NO: 2022321 - RNA, 19 nt, Homo sapiens
  misc_RNA (1)...(19): siRNA sense strand
gaucucaccugaauuauuu

SEQ ID NO: 2022322 - RNA, 19 nt, Homo sapiens
  misc_RNA (1)...(19): siRNA sense strand
ucagaaggcugguauauuu

SEQ ID NO: 2022323 - RNA, 19 nt, Homo sapiens
  misc_RNA (1)...(19): siRNA sense strand
gaucauagaugucauagau

SEQ ID NO: 2022324 - RNA, 19 nt, Homo sapiens
  misc_RNA (1)...(19): siRNA sense strand
gaacagggcuauuacuuag

SEQ ID NO: 2022325 - RNA, 19 nt, Homo sapiens
  misc_RNA (1)...(19): siRNA sense strand
ggaagaagaugccagauca

SEQ ID NO: 2022326 - RNA, 19 nt, Homo sapiens
  misc_RNA (1)...(19): siRNA sense strand
caauagagcagcagucuua

SEQ ID NO: 2022327 - RNA, 19 nt, Homo sapiens
  misc_RNA (1)...(19): siRNA sense strand
ccaaggaaguggaacauuu

SEQ ID NO: 2022328 - RNA, 19 nt, Homo sapiens
  misc_RNA (1)...(19): siRNA sense strand
gaaaggagacucacuuaug

SEQ ID NO: 2022329 - RNA, 19 nt, Homo sapiens
  misc_RNA (1)...(19): siRNA sense strand
gaucuaauauccaaguuga

SEQ ID NO: 2022330 - RNA, 19 nt, Homo sapiens
  misc_RNA (1)...(19): siRNA sense strand
ucacuuaugugcacaauga

SEQ ID NO: 2022331 - RNA, 19 nt, Homo sapiens
  misc_RNA (1)...(19): siRNA sense strand
ggaaagaaauauccuacug

SEQ ID NO: 2022332 - RNA, 19 nt, Homo sapiens
  misc_RNA (1)...(19): siRNA sense strand
cuacugugcuguucauaua

SEQ ID NO: 2022333 - RNA, 19 nt, Homo sapiens
  misc_RNA (1)...(19): siRNA sense strand
gaagaggaaugauccagau

SEQ ID NO: 2022334 - RNA, 19 nt, Homo sapiens
  misc_RNA (1)...(19): siRNA sense strand
gcacugugacuucuuuaua

SEQ ID NO: 2022335 - RNA, 19 nt, Homo sapiens
  misc_RNA (1)...(19): siRNA sense strand
cuacaagccucaugaucua

SEQ ID NO: 2022336 - RNA, 19 nt, Homo sapiens
  misc_RNA (1)...(19): siRNA sense strand
ggaauugcuucuuacgauu

SEQ ID NO: 2022337 - RNA, 19 nt, Homo sapiens
  misc_RNA (1)...(19): siRNA sense strand
gaauugcuucuuacgauua

SEQ ID NO: 2022338 - RNA, 19 nt, Homo sapiens
  misc_RNA (1)...(19): siRNA sense strand
gaagaaaggagacucacuu

SEQ ID NO: 2022339 - RNA, 19 nt, Homo sapiens
  misc_RNA (1)...(19): siRNA sense strand
uagcaacgauauuuggaua

SEQ ID NO: 2022340 - RNA, 19 nt, Homo sapiens
  misc_RNA (1)...(19): siRNA sense strand
gaaggaaggaucauagaug

SEQ ID NO: 2022341 - RNA, 19 nt, Homo sapiens
  misc_RNA (1)...(19): siRNA sense strand
gaccguggcuacucacauu

SEQ ID NO: 2022342 - RNA, 19 nt, Homo sapiens
  misc_RNA (1)...(19): siRNA sense strand
aaaggagacucacuuaugu

SEQ ID NO: 2022343 - RNA, 19 nt, Homo sapiens
  misc_RNA (1)...(19): siRNA sense strand
gaagaggaaauugaguuua

SEQ ID NO: 2022344 - RNA, 19 nt, Homo sapiens
  misc_RNA (1)...(19): siRNA sense strand
aaucugagguggaaauuau

SEQ ID NO: 2022345 - RNA, 19 nt, Homo sapiens
  misc_RNA (1)...(19): siRNA sense strand
ucgagaagaagaacuauua

SEQ ID NO: 2022346 - RNA, 19 nt, Homo sapiens
  misc_RNA (1)...(19): siRNA sense strand
guugaucucaccugaauua

SEQ ID NO: 2022347 - RNA, 19 nt, Homo sapiens
  misc_RNA (1)...(19): siRNA sense strand
gaagaagaacuauuaagag

SEQ ID NO: 2022348 - RNA, 19 nt, Homo sapiens
  misc_RNA (1)...(19): siRNA sense strand
gggagaacauuaugaacug

SEQ ID NO: 2022349 - RNA, 19 nt, Homo sapiens
  misc_RNA (1)...(19): siRNA sense strand
ggagagacacagcauaaga

SEQ ID NO: 2022350 - RNA, 19 nt, Homo sapiens
  misc_RNA (1)...(19): siRNA sense strand
ugaacagggcuauuacuua

SEQ ID NO: 2022351 - RNA, 19 nt, Homo sapiens
  misc_RNA (1)...(19): siRNA sense strand
gaaaggcagagacucauug

SEQ ID NO: 2022352 - RNA, 19 nt, Homo sapiens
  misc_RNA (1)...(19): siRNA sense strand
agaaugaacagggcuauua

SEQ ID NO: 2022353 - RNA, 19 nt, Homo sapiens
  misc_RNA (1)...(19): siRNA sense strand
gaaagaaauauccuacugu

SEQ ID NO: 2022354 - RNA, 19 nt, Homo sapiens
  misc_RNA (1)...(19): siRNA sense strand
cacugugacuucuuuauaa

SEQ ID NO: 2022355 - RNA, 19 nt, Homo sapiens
  misc_RNA (1)...(19): siRNA sense strand
ccaaguugaugaagucaga

SEQ ID NO: 2022356 - RNA, 19 nt, Homo sapiens
  misc_RNA (1)...(19): siRNA sense strand
gcauaagaguuccugaauc

SEQ ID NO: 2022357 - RNA, 19 nt, Homo sapiens
  misc_RNA (1)...(19): siRNA sense strand
ccaagaagaauuugauaga

SEQ ID NO: 2022358 - RNA, 19 nt, Homo sapiens
  misc_RNA (1)...(19): siRNA sense strand
gaagaugacccaacuugca

SEQ ID NO: 2022359 - RNA, 19 nt, Homo sapiens
  misc_RNA (1)...(19): siRNA sense strand
acaaugagcuagccaacau

SEQ ID NO: 2022360 - RNA, 19 nt, Homo sapiens
  misc_RNA (1)...(19): siRNA sense strand
cauaagaguuccugaaucg

SEQ ID NO: 2022361 - RNA, 19 nt, Homo sapiens
  misc_RNA (1)...(19): siRNA sense strand
uuacugcucuuacaugguu

SEQ ID NO: 2022362 - RNA, 19 nt, Homo sapiens
  misc_RNA (1)...(19): siRNA sense strand
caggauacacggaacguua

SEQ ID NO: 2022363 - RNA, 19 nt, Homo sapiens
  misc_RNA (1)...(19): siRNA sense strand
cagcagcaauggaaacaga

SEQ ID NO: 2022364 - RNA, 19 nt, Homo sapiens
  misc_RNA (1)...(19): siRNA sense strand
gcagauucauuccguuauc

SEQ ID NO: 2022365 - RNA, 19 nt, Homo sapiens
  misc_RNA (1)...(19): siRNA sense strand
uggaaagccauaugauuua

SEQ ID NO: 2022366 - RNA, 19 nt, Homo sapiens
  misc_RNA (1)...(19): siRNA sense strand
ucaaguguccuaucaaaga

SEQ ID NO: 2022367 - RNA, 19 nt, Homo sapiens
  misc_RNA (1)...(19): siRNA sense strand
gauuucaaguguccuauca

SEQ ID NO: 2022368 - RNA, 19 nt, Homo sapiens
  misc_RNA (1)...(19): siRNA sense strand
ggaaagcaaauauaaacga

SEQ ID NO: 2022369 - RNA, 19 nt, Homo sapiens
  misc_RNA (1)...(19): siRNA sense strand
ugucauagauaaggaacua

SEQ ID NO: 2022370 - RNA, 19 nt, Homo sapiens
  misc_RNA (1)...(19): siRNA sense strand
cuguggaucuucuaugaua

SEQ ID NO: 2022371 - RNA, 19 nt, Homo sapiens
  misc_RNA (1)...(19): siRNA sense strand
uaucaaguccugaagauga

SEQ ID NO: 2022372 - RNA, 19 nt, Homo sapiens
  misc_RNA (1)...(19): siRNA sense strand
ccagaagaauccacacugu

SEQ ID NO: 2022373 - RNA, 19 nt, Homo sapiens
  misc_RNA (1)...(19): siRNA sense strand
guaaguauaguaaccagaa

SEQ ID NO: 2022374 - RNA, 19 nt, Homo sapiens
  misc_RNA (1)...(19): siRNA sense strand
gaagaugauguuauggaaa

SEQ ID NO: 2022375 - RNA, 19 nt, Homo sapiens
  misc_RNA (1)...(19): siRNA sense strand
ggaaguggaacauuucugu

SEQ ID NO: 2022376 - RNA, 19 nt, Homo sapiens
  misc_RNA (1)...(19): siRNA sense strand
ugacuauacuccuccagaa

SEQ ID NO: 2022377 - RNA, 19 nt, Homo sapiens
  misc_RNA (1)...(19): siRNA sense strand
gcuaucaaguccugaagau

SEQ ID NO: 2022378 - RNA, 19 nt, Homo sapiens
  misc_RNA (1)...(19): siRNA sense strand
aguagaagaugauguuaug

SEQ ID NO: 2022379 - RNA, 19 nt, Homo sapiens
  misc_RNA (1)...(19): siRNA sense strand
ggaaggaucauagauguca

SEQ ID NO: 2022380 - RNA, 19 nt, Homo sapiens
  misc_RNA (1)...(19): siRNA sense strand
gaaacaaggagggcagauu

SEQ ID NO: 2022381 - RNA, 19 nt, Homo sapiens
  misc_RNA (1)...(19): siRNA sense strand
uuggauaucuaacaucgua

SEQ ID NO: 2022382 - RNA, 19 nt, Homo sapiens
  misc_RNA (1)...(19): siRNA sense strand
ggccuaaauuggagccuuu

SEQ ID NO: 2022383 - RNA, 19 nt, Homo sapiens
  misc_RNA (1)...(19): siRNA sense strand
acagcuggguguugagaua

SEQ ID NO: 2022384 - RNA, 19 nt, Homo sapiens
  misc_RNA (1)...(19): siRNA sense strand
gggcagauucauuccguua

SEQ ID NO: 2022385 - RNA, 19 nt, Homo sapiens
  misc_RNA (1)...(19): siRNA sense strand
agaagaugauguuauggaa

SEQ ID NO: 2022386 - RNA, 19 nt, Homo sapiens
  misc_RNA (1)...(19): siRNA sense strand
caggagagacacagcauaa

SEQ ID NO: 2022387 - RNA, 19 nt, Homo sapiens
  misc_RNA (1)...(19): siRNA sense strand
ggaaagccauaugauuuac

SEQ ID NO: 2022388 - RNA, 19 nt, Homo sapiens
  misc_RNA (1)...(19): siRNA sense strand
ugacgccacuaauuaucua

SEQ ID NO: 2022389 - RNA, 19 nt, Homo sapiens
  misc_RNA (1)...(19): siRNA sense strand
gaagucagaaggcugguau

SEQ ID NO: 2022390 - RNA, 19 nt, Homo sapiens
  misc_RNA (1)...(19): siRNA sense strand
caucguaaccagagaagaa

SEQ ID NO: 2022391 - RNA, 19 nt, Homo sapiens
  misc_RNA (1)...(19): siRNA sense strand
aaccuuggaucacguauug

SEQ ID NO: 2022392 - RNA, 19 nt, Homo sapiens
  misc_RNA (1)...(19): siRNA sense strand
gcuaaggcaccacaugauu

SEQ ID NO: 2022393 - RNA, 19 nt, Homo sapiens
  misc_RNA (1)...(19): siRNA sense strand
aaagaggagauagcaauua

SEQ ID NO: 2022394 - RNA, 19 nt, Homo sapiens
  misc_RNA (1)...(19): siRNA sense strand
caaagaggagauagcaauu

SEQ ID NO: 2022395 - RNA, 19 nt, Homo sapiens
  misc_RNA (1)...(19): siRNA sense strand
ggaaaggcagagacucauu

SEQ ID NO: 2022396 - RNA, 19 nt, Homo sapiens
  misc_RNA (1)...(19): siRNA sense strand
gaaagaaaacgcauuggaa

SEQ ID NO: 2022397 - RNA, 19 nt, Homo sapiens
  misc_RNA (1)...(19): siRNA sense strand
cuggaaagccauaugauuu

SEQ ID NO: 2022398 - RNA, 19 nt, Homo sapiens
  misc_RNA (1)...(19): siRNA sense strand
ucagcacugugacuucuuu

SEQ ID NO: 2022399 - RNA, 19 nt, Homo sapiens
  misc_RNA (1)...(19): siRNA sense strand
ucugugacgccacuaauua

SEQ ID NO: 2022400 - RNA, 19 nt, Homo sapiens
  misc_RNA (1)...(19): siRNA sense strand
gaaggaguugaauauauug

SEQ ID NO: 2022401 - RNA, 19 nt, Homo sapiens
  misc_RNA (1)...(19): siRNA sense strand
ggaacuaauucaaccuuuu

SEQ ID NO: 2022402 - RNA, 19 nt, Homo sapiens
  misc_RNA (1)...(19): siRNA sense strand
cggaauugcuucuuacgau

SEQ ID NO: 2022403 - RNA, 19 nt, Homo sapiens
  misc_RNA (1)...(19): siRNA sense strand
gaaucugagguggaaauua

SEQ ID NO: 2022404 - RNA, 19 nt, Homo sapiens
  misc_RNA (1)...(19): siRNA sense strand
agacacagcauaagaguuc

SEQ ID NO: 2022405 - RNA, 19 nt, Homo sapiens
  misc_RNA (1)...(19): siRNA sense strand
cgaagaggaaauugaguuu

SEQ ID NO: 2022406 - RNA, 19 nt, Homo sapiens
  misc_RNA (1)...(19): siRNA sense strand
ugaggagaauauugaauca

SEQ ID NO: 2022407 - RNA, 19 nt, Homo sapiens
  misc_RNA (1)...(19): siRNA sense strand
gcuggaaagccauaugauu

SEQ ID NO: 2022408 - RNA, 19 nt, Homo sapiens
  misc_RNA (1)...(19): siRNA sense strand
aaggaaggaucauagaugu

SEQ ID NO: 2022409 - RNA, 19 nt, Homo sapiens
  misc_RNA (1)...(19): siRNA sense strand
cagucggaauugcuucuua

SEQ ID NO: 2022410 - RNA, 19 nt, Homo sapiens
  misc_RNA (1)...(19): siRNA sense strand
ucaagccgguaguggaauu

SEQ ID NO: 2022411 - RNA, 19 nt, Homo sapiens
  misc_RNA (1)...(19): siRNA sense strand
ucaaagaggagauagcaau

SEQ ID NO: 2022412 - RNA, 19 nt, Homo sapiens
  misc_RNA (1)...(19): siRNA sense strand
uuucaaguguccuaucaaa

SEQ ID NO: 2022413 - RNA, 19 nt, Homo sapiens
  misc_RNA (1)...(19): siRNA sense strand
guguugaucucaccugaau

SEQ ID NO: 2022414 - RNA, 19 nt, Homo sapiens
  misc_RNA (1)...(19): siRNA sense strand
gguggaaauuauucauguu

SEQ ID NO: 2022415 - RNA, 19 nt, Homo sapiens
  misc_RNA (1)...(19): siRNA sense strand
aagaaaggagacucacuua

SEQ ID NO: 2022416 - RNA, 19 nt, Homo sapiens
  misc_RNA (1)...(19): siRNA sense strand
ggauacacggaacguuaua

SEQ ID NO: 2022417 - RNA, 19 nt, Homo sapiens
  misc_RNA (1)...(19): siRNA sense strand
cuaaggcaccacaugauuu

SEQ ID NO: 2022418 - RNA, 19 nt, Homo sapiens
  misc_RNA (1)...(19): siRNA sense strand
gauggacuccugagggaaa

SEQ ID NO: 2022419 - RNA, 19 nt, Homo sapiens
  misc_RNA (1)...(19): siRNA sense strand
gauucuauuugaaggaguu

SEQ ID NO: 2022420 - RNA, 19 nt, Homo sapiens
  misc_RNA (1)...(19): siRNA sense strand
uagccaacauggaagaaga

SEQ ID NO: 2022421 - RNA, 19 nt, Homo sapiens
  misc_RNA (1)...(19): siRNA sense strand
gaucucaccugaauuauuu

SEQ ID NO: 2022422 - RNA, 19 nt, Homo sapiens
  misc_RNA (1)...(19): siRNA sense strand
ucagaaggcugguauauuu

SEQ ID NO: 2022423 - RNA, 19 nt, Homo sapiens
  misc_RNA (1)...(19): siRNA sense strand
gaucauagaugucauagau

SEQ ID NO: 2022424 - RNA, 19 nt, Homo sapiens
  misc_RNA (1)...(19): siRNA sense strand
gaacagggcuauuacuuag

SEQ ID NO: 2022425 - RNA, 19 nt, Homo sapiens
  misc_RNA (1)...(19): siRNA sense strand
ggaagaagaugccagauca

SEQ ID NO: 2022426 - RNA, 19 nt, Homo sapiens
  misc_RNA (1)...(19): siRNA sense strand
caauagagcagcagucuua

SEQ ID NO: 2022427 - RNA, 19 nt, Homo sapiens
  misc_RNA (1)...(19): siRNA sense strand
ccaaggaaguggaacauuu

SEQ ID NO: 2022428 - RNA, 19 nt, Homo sapiens
  misc_RNA (1)...(19): siRNA sense strand
gaaaggagacucacuuaug

SEQ ID NO: 2022429 - RNA, 19 nt, Homo sapiens
  misc_RNA (1)...(19): siRNA sense strand
gaucuaauauccaaguuga

SEQ ID NO: 2022430 - RNA, 19 nt, Homo sapiens
  misc_RNA (1)...(19): siRNA sense strand
ucacuuaugugcacaauga

SEQ ID NO: 2022431 - RNA, 19 nt, Homo sapiens
  misc_RNA (1)...(19): siRNA sense strand
ggaaagaaauauccuacug

SEQ ID NO: 2022432 - RNA, 19 nt, Homo sapiens
  misc_RNA (1)...(19): siRNA sense strand
cuacugugcuguucauaua

SEQ ID NO: 2022433 - RNA, 19 nt, Homo sapiens
  misc_RNA (1)...(19): siRNA sense strand
gaagaggaaugauccagau

SEQ ID NO: 2022434 - RNA, 19 nt, Homo sapiens
  misc_RNA (1)...(19): siRNA sense strand
gcacugugacuucuuuaua

SEQ ID NO: 2022435 - RNA, 19 nt, Homo sapiens
  misc_RNA (1)...(19): siRNA sense strand
cuacaagccucaugaucua

SEQ ID NO: 2022436 - RNA, 19 nt, Homo sapiens
  misc_RNA (1)...(19): siRNA sense strand
ggaauugcuucuuacgauu

SEQ ID NO: 2022437 - RNA, 19 nt, Homo sapiens
  misc_RNA (1)...(19): siRNA sense strand
gaauugcuucuuacgauua

SEQ ID NO: 2022438 - RNA, 19 nt, Homo sapiens
  misc_RNA (1)...(19): siRNA sense strand
gaagaaaggagacucacuu

SEQ ID NO: 2022439 - RNA, 19 nt, Homo sapiens
  misc_RNA (1)...(19): siRNA sense strand
uagcaacgauauuuggaua

SEQ ID NO: 2022440 - RNA, 19 nt, Homo sapiens
  misc_RNA (1)...(19): siRNA sense strand
gaaggaaggaucauagaug

SEQ ID NO: 2022441 - RNA, 19 nt, Homo sapiens
  misc_RNA (1)...(19): siRNA sense strand
gaccguggcuacucacauu

SEQ ID NO: 2022442 - RNA, 19 nt, Homo sapiens
  misc_RNA (1)...(19): siRNA sense strand
aaaggagacucacuuaugu

SEQ ID NO: 2022443 - RNA, 19 nt, Homo sapiens
  misc_RNA (1)...(19): siRNA sense strand
gaagaggaaauugaguuua

SEQ ID NO: 2022444 - RNA, 19 nt, Homo sapiens
  misc_RNA (1)...(19): siRNA sense strand
aaucugagguggaaauuau

SEQ ID NO: 2022445 - RNA, 19 nt, Homo sapiens
  misc_RNA (1)...(19): siRNA sense strand
ucgagaagaagaacuauua

SEQ ID NO: 2022446 - RNA, 19 nt, Homo sapiens
  misc_RNA (1)...(19): siRNA sense strand
guugaucucaccugaauua

SEQ ID NO: 2022447 - RNA, 19 nt, Homo sapiens
  misc_RNA (1)...(19): siRNA sense strand
caacauggcagcagcaaug

SEQ ID NO: 2022448 - RNA, 19 nt, Homo sapiens
  misc_RNA (1)...(19): siRNA sense strand
gaagaagaacuauuaagag

SEQ ID NO: 2022449 - RNA, 19 nt, Homo sapiens
  misc_RNA (1)...(19): siRNA sense strand
gggagaacauuaugaacug

SEQ ID NO: 2022450 - RNA, 19 nt, Homo sapiens
  misc_RNA (1)...(19): siRNA sense strand
ggagagacacagcauaaga

SEQ ID NO: 2022451 - RNA, 19 nt, Homo sapiens
  misc_RNA (1)...(19): siRNA sense strand
ugaacagggcuauuacuua

SEQ ID NO: 2022452 - RNA, 19 nt, Homo sapiens
  misc_RNA (1)...(19): siRNA sense strand
gaaaggcagagacucauug

SEQ ID NO: 2022453 - RNA, 19 nt, Homo sapiens
  misc_RNA (1)...(19): siRNA sense strand
agaaugaacagggcuauua

SEQ ID NO: 2022454 - RNA, 19 nt, Homo sapiens
  misc_RNA (1)...(19): siRNA sense strand
gaaagaaauauccuacugu

SEQ ID NO: 2022455 - RNA, 19 nt, Homo sapiens
  misc_RNA (1)...(19): siRNA sense strand
cacugugacuucuuuauaa

SEQ ID NO: 2022456 - RNA, 19 nt, Homo sapiens
  misc_RNA (1)...(19): siRNA sense strand
ccaaguugaugaagucaga

SEQ ID NO: 2022457 - RNA, 19 nt, Homo sapiens
  misc_RNA (1)...(19): siRNA sense strand
gcauaagaguuccugaauc

SEQ ID NO: 2022458 - RNA, 19 nt, Homo sapiens
  misc_RNA (1)...(19): siRNA sense strand
ccaagaagaauuugauaga

SEQ ID NO: 2022459 - RNA, 19 nt, Homo sapiens
  misc_RNA (1)...(19): siRNA sense strand
gaagaugacccaacuugca

SEQ ID NO: 2022460 - RNA, 19 nt, Homo sapiens
  misc_RNA (1)...(19): siRNA sense strand
acaaugagcuagccaacau

SEQ ID NO: 2022461 - RNA, 19 nt, Homo sapiens
  misc_RNA (1)...(19): siRNA sense strand
cauaagaguuccugaaucg

SEQ ID NO: 2022462 - RNA, 19 nt, Homo sapiens
  misc_RNA (1)...(19): siRNA sense strand
uuacugcucuuacaugguu

SEQ ID NO: 2022463 - RNA, 19 nt, Homo sapiens
  misc_RNA (1)...(19): siRNA sense strand
caggauacacggaacguua

SEQ ID NO: 2022464 - RNA, 19 nt, Homo sapiens
  misc_RNA (1)...(19): siRNA sense strand
cagcagcaauggaaacaga

SEQ ID NO: 2022465 - RNA, 19 nt, Homo sapiens
  misc_RNA (1)...(19): siRNA sense strand
gcagauucauuccguuauc

SEQ ID NO: 2022466 - RNA, 19 nt, Homo sapiens
  misc_RNA (1)...(19): siRNA sense strand
uggaaagccauaugauuua

SEQ ID NO: 2022467 - RNA, 19 nt, Homo sapiens
  misc_RNA (1)...(19): siRNA sense strand
ucaaguguccuaucaaaga

SEQ ID NO: 2022468 - RNA, 19 nt, Homo sapiens
  misc_RNA (1)...(19): siRNA sense strand
gauuucaaguguccuauca

SEQ ID NO: 2022469 - RNA, 19 nt, Homo sapiens
  misc_RNA (1)...(19): siRNA sense strand
ggaaagcaaauauaaacga

SEQ ID NO: 2022470 - RNA, 19 nt, Homo sapiens
  misc_RNA (1)...(19): siRNA sense strand
ugucauagauaaggaacua

SEQ ID NO: 2022471 - RNA, 19 nt, Homo sapiens
  misc_RNA (1)...(19): siRNA sense strand
cuguggaucuucuaugaua

SEQ ID NO: 2022472 - RNA, 19 nt, Homo sapiens
  misc_RNA (1)...(19): siRNA sense strand
uaucaaguccugaagauga

SEQ ID NO: 2022473 - RNA, 19 nt, Homo sapiens
  misc_RNA (1)...(19): siRNA sense strand
ccagaagaauccacacugu

SEQ ID NO: 2022474 - RNA, 19 nt, Homo sapiens
  misc_RNA (1)...(19): siRNA sense strand
guaaguauaguaaccagaa

SEQ ID NO: 2022475 - RNA, 19 nt, Homo sapiens
  misc_RNA (1)...(19): siRNA sense strand
gaagaugauguuauggaaa

SEQ ID NO: 2022476 - RNA, 19 nt, Homo sapiens
  misc_RNA (1)...(19): siRNA sense strand
ggaaguggaacauuucugu

SEQ ID NO: 2022477 - RNA, 19 nt, Homo sapiens
  misc_RNA (1)...(19): siRNA sense strand
ugacuauacuccuccagaa

SEQ ID NO: 2022478 - RNA, 19 nt, Homo sapiens
  misc_RNA (1)...(19): siRNA sense strand
gcuaucaaguccugaagau

SEQ ID NO: 2022479 - RNA, 19 nt, Homo sapiens
  misc_RNA (1)...(19): siRNA sense strand
aguagaagaugauguuaug

SEQ ID NO: 2022480 - RNA, 19 nt, Homo sapiens
  misc_RNA (1)...(19): siRNA sense strand
ggaaggaucauagauguca

SEQ ID NO: 2022481 - RNA, 19 nt, Homo sapiens
  misc_RNA (1)...(19): siRNA sense strand
gaaacaaggagggcagauu

SEQ ID NO: 2022482 - RNA, 19 nt, Homo sapiens
  misc_RNA (1)...(19): siRNA sense strand
acagcuggguguugagaua

SEQ ID NO: 2022483 - RNA, 19 nt, Homo sapiens
  misc_RNA (1)...(19): siRNA sense strand
ggccuaaauuggagccuuu

SEQ ID NO: 2022484 - RNA, 19 nt, Homo sapiens
  misc_RNA (1)...(19): siRNA sense strand
gggcagauucauuccguua

SEQ ID NO: 2022485 - RNA, 19 nt, Homo sapiens
  misc_RNA (1)...(19): siRNA sense strand
uuggauaucuaacaucgua

SEQ ID NO: 2022486 - RNA, 19 nt, Homo sapiens
  misc_RNA (1)...(19): siRNA sense strand
agaagaugauguuauggaa

SEQ ID NO: 2022487 - RNA, 19 nt, Homo sapiens
  misc_RNA (1)...(19): siRNA sense strand
caggagagacacagcauaa

SEQ ID NO: 2022488 - RNA, 19 nt, Homo sapiens
  misc_RNA (1)...(19): siRNA sense strand
ggaaagccauaugauuuac

SEQ ID NO: 2022489 - RNA, 19 nt, Homo sapiens
  misc_RNA (1)...(19): siRNA sense strand
ugacgccacuaauuaucua

SEQ ID NO: 2022490 - RNA, 19 nt, Homo sapiens
  misc_RNA (1)...(19): siRNA sense strand
gaagucagaaggcugguau

SEQ ID NO: 2022491 - RNA, 19 nt, Homo sapiens
  misc_RNA (1)...(19): siRNA sense strand
gcuaaggcaccacaugauu

SEQ ID NO: 2022492 - RNA, 19 nt, Homo sapiens
  misc_RNA (1)...(19): siRNA sense strand
aaccuuggaucacguauug

SEQ ID NO: 2022493 - RNA, 19 nt, Homo sapiens
  misc_RNA (1)...(19): siRNA sense strand
aaagaggagauagcaauua

SEQ ID NO: 2022494 - RNA, 19 nt, Homo sapiens
  misc_RNA (1)...(19): siRNA sense strand
caaagaggagauagcaauu

SEQ ID NO: 2022495 - RNA, 19 nt, Homo sapiens
  misc_RNA (1)...(19): siRNA sense strand
ggaaaggcagagacucauu

SEQ ID NO: 2022496 - RNA, 19 nt, Homo sapiens
  misc_RNA (1)...(19): siRNA sense strand
caucguaaccagagaagaa

SEQ ID NO: 2022497 - RNA, 19 nt, Homo sapiens
  misc_RNA (1)...(19): siRNA sense strand
gaaagaaaacgcauuggaa

SEQ ID NO: 2022498 - RNA, 19 nt, Homo sapiens
  misc_RNA (1)...(19): siRNA sense strand
cuggaaagccauaugauuu

SEQ ID NO: 2022499 - RNA, 19 nt, Homo sapiens
  misc_RNA (1)...(19): siRNA sense strand
ucagcacugugacuucuuu

SEQ ID NO: 2022500 - RNA, 19 nt, Homo sapiens
  misc_RNA (1)...(19): siRNA sense strand
ucugugacgccacuaauua

SEQ ID NO: 2022501 - RNA, 19 nt, Homo sapiens
  misc_RNA (1)...(19): siRNA sense strand
gaaggaguugaauauauug

SEQ ID NO: 2022502 - RNA, 19 nt, Homo sapiens
  misc_RNA (1)...(19): siRNA sense strand
ggaacuaauucaaccuuuu

SEQ ID NO: 2022503 - RNA, 19 nt, Homo sapiens
  misc_RNA (1)...(19): siRNA sense strand
cggaauugcuucuuacgau

SEQ ID NO: 2022504 - RNA, 19 nt, Homo sapiens
  misc_RNA (1)...(19): siRNA sense strand
gaaucugagguggaaauua

SEQ ID NO: 2022505 - RNA, 19 nt, Homo sapiens
  misc_RNA (1)...(19): siRNA sense strand
agacacagcauaagaguuc

SEQ ID NO: 2022506 - RNA, 19 nt, Homo sapiens
  misc_RNA (1)...(19): siRNA sense strand
cgaagaggaaauugaguuu

SEQ ID NO: 2022507 - RNA, 19 nt, Homo sapiens
  misc_RNA (1)...(19): siRNA sense strand
cagucggaauugcuucuua

SEQ ID NO: 2022508 - RNA, 19 nt, Homo sapiens
  misc_RNA (1)...(19): siRNA sense strand
gcuggaaagccauaugauu

SEQ ID NO: 2022509 - RNA, 19 nt, Homo sapiens
  misc_RNA (1)...(19): siRNA sense strand
ugaggagaauauugaauca

SEQ ID NO: 2022510 - RNA, 19 nt, Homo sapiens
  misc_RNA (1)...(19): siRNA sense strand
aaggaaggaucauagaugu

SEQ ID NO: 2022511 - RNA, 19 nt, Homo sapiens
  misc_RNA (1)...(19): siRNA sense strand
ucaagccgguaguggaauu

SEQ ID NO: 2022512 - RNA, 19 nt, Homo sapiens
  misc_RNA (1)...(19): siRNA sense strand
ucaaagaggagauagcaau

SEQ ID NO: 2022513 - RNA, 19 nt, Homo sapiens
  misc_RNA (1)...(19): siRNA sense strand
uuucaaguguccuaucaaa

SEQ ID NO: 2022514 - RNA, 19 nt, Homo sapiens
  misc_RNA (1)...(19): siRNA sense strand
guguugaucucaccugaau

SEQ ID NO: 2022515 - RNA, 19 nt, Homo sapiens
  misc_RNA (1)...(19): siRNA sense strand
gguggaaauuauucauguu

SEQ ID NO: 2022516 - RNA, 19 nt, Homo sapiens
  misc_RNA (1)...(19): siRNA sense strand
uagccaacauggaagaaga

SEQ ID NO: 2022517 - RNA, 19 nt, Homo sapiens
  misc_RNA (1)...(19): siRNA sense strand
cuaaggcaccacaugauuu

SEQ ID NO: 2022518 - RNA, 19 nt, Homo sapiens
  misc_RNA (1)...(19): siRNA sense strand
ggauacacggaacguuaua

SEQ ID NO: 2022519 - RNA, 19 nt, Homo sapiens
  misc_RNA (1)...(19): siRNA sense strand
gauggacuccugagggaaa

SEQ ID NO: 2022520 - RNA, 19 nt, Homo sapiens
  misc_RNA (1)...(19): siRNA sense strand
gauucuauuugaaggaguu

SEQ ID NO: 2022521 - RNA, 19 nt, Homo sapiens
  misc_RNA (1)...(19): siRNA sense strand
gaucucaccugaauuauuu

SEQ ID NO: 2022522 - RNA, 19 nt, Homo sapiens
  misc_RNA (1)...(19): siRNA sense strand
ucagaaggcugguauauuu

SEQ ID NO: 2022523 - RNA, 19 nt, Homo sapiens
  misc_RNA (1)...(19): siRNA sense strand
gaucauagaugucauagau

SEQ ID NO: 2022524 - RNA, 19 nt, Homo sapiens
  misc_RNA (1)...(19): siRNA sense strand
gaacagggcuauuacuuag

SEQ ID NO: 2022525 - RNA, 19 nt, Homo sapiens
  misc_RNA (1)...(19): siRNA sense strand
ggaagaagaugccagauca

SEQ ID NO: 2022526 - RNA, 19 nt, Homo sapiens
  misc_RNA (1)...(19): siRNA sense strand
caauagagcagcagucuua

SEQ ID NO: 2022527 - RNA, 19 nt, Homo sapiens
  misc_RNA (1)...(19): siRNA sense strand
ccaaggaaguggaacauuu

SEQ ID NO: 2022528 - RNA, 19 nt, Homo sapiens
  misc_RNA (1)...(19): siRNA sense strand
gaaaggagacucacuuaug

SEQ ID NO: 2022529 - RNA, 19 nt, Homo sapiens
  misc_RNA (1)...(19): siRNA sense strand
gaucuaauauccaaguuga

SEQ ID NO: 2022530 - RNA, 19 nt, Homo sapiens
  misc_RNA (1)...(19): siRNA sense strand
ucacuuaugugcacaauga

SEQ ID NO: 2022531 - RNA, 19 nt, Homo sapiens
  misc_RNA (1)...(19): siRNA sense strand
ggaaagaaauauccuacug

SEQ ID NO: 2022532 - RNA, 19 nt, Homo sapiens
  misc_RNA (1)...(19): siRNA sense strand
cuacugugcuguucauaua

SEQ ID NO: 2022533 - RNA, 19 nt, Homo sapiens
  misc_RNA (1)...(19): siRNA sense strand
gaagaggaaugauccagau

SEQ ID NO: 2022534 - RNA, 19 nt, Homo sapiens
  misc_RNA (1)...(19): siRNA sense strand
gcacugugacuucuuuaua

SEQ ID NO: 2022535 - RNA, 19 nt, Homo sapiens
  misc_RNA (1)...(19): siRNA sense strand
cuacaagccucaugaucua

SEQ ID NO: 2022536 - RNA, 19 nt, Homo sapiens
  misc_RNA (1)...(19): siRNA sense strand
ggaauugcuucuuacgauu

SEQ ID NO: 2022537 - RNA, 19 nt, Homo sapiens
  misc_RNA (1)...(19): siRNA sense strand
gaauugcuucuuacgauua

SEQ ID NO: 2022538 - RNA, 19 nt, Homo sapiens
  misc_RNA (1)...(19): siRNA sense strand
gaagaaaggagacucacuu

SEQ ID NO: 2022539 - RNA, 19 nt, Homo sapiens
  misc_RNA (1)...(19): siRNA sense strand
uagcaacgauauuuggaua

SEQ ID NO: 2022540 - RNA, 19 nt, Homo sapiens
  misc_RNA (1)...(19): siRNA sense strand
gaaggaaggaucauagaug

SEQ ID NO: 2022541 - RNA, 19 nt, Homo sapiens
  misc_RNA (1)...(19): siRNA sense strand
gaccguggcuacucacauu

SEQ ID NO: 2022542 - RNA, 19 nt, Homo sapiens
  misc_RNA (1)...(19): siRNA sense strand
aaaggagacucacuuaugu

SEQ ID NO: 2022543 - RNA, 19 nt, Homo sapiens
  misc_RNA (1)...(19): siRNA sense strand
gaagaggaaauugaguuua

SEQ ID NO: 2022544 - RNA, 19 nt, Homo sapiens
  misc_RNA (1)...(19): siRNA sense strand
aaucugagguggaaauuau

SEQ ID NO: 2022545 - RNA, 19 nt, Homo sapiens
  misc_RNA (1)...(19): siRNA sense strand
ucgagaagaagaacuauua

SEQ ID NO: 2022546 - RNA, 19 nt, Homo sapiens
  misc_RNA (1)...(19): siRNA sense strand
guugaucucaccugaauua

SEQ ID NO: 2022547 - RNA, 19 nt, Homo sapiens
  misc_RNA (1)...(19): siRNA sense strand
caacauggcagcagcaaug

SEQ ID NO: 2022548 - RNA, 19 nt, Homo sapiens
  misc_RNA (1)...(19): siRNA sense strand
gaagaagaacuauuaagag

SEQ ID NO: 2022549 - RNA, 19 nt, Homo sapiens
  misc_RNA (1)...(19): siRNA sense strand
gggagaacauuaugaacug

SEQ ID NO: 2022550 - RNA, 19 nt, Homo sapiens
  misc_RNA (1)...(19): siRNA sense strand
ggagagacacagcauaaga

SEQ ID NO: 2022551 - RNA, 19 nt, Homo sapiens
  misc_RNA (1)...(19): siRNA sense strand
ugaacagggcuauuacuua

SEQ ID NO: 2022552 - RNA, 19 nt, Homo sapiens
  misc_RNA (1)...(19): siRNA sense strand
gaaaggcagagacucauug

SEQ ID NO: 2022553 - RNA, 19 nt, Homo sapiens
  misc_RNA (1)...(19): siRNA sense strand
agaaugaacagggcuauua

SEQ ID NO: 2022554 - RNA, 19 nt, Homo sapiens
  misc_RNA (1)...(19): siRNA sense strand
gaaagaaauauccuacugu

SEQ ID NO: 2022555 - RNA, 19 nt, Homo sapiens
  misc_RNA (1)...(19): siRNA sense strand
cacugugacuucuuuauaa

SEQ ID NO: 2022556 - RNA, 19 nt, Homo sapiens
  misc_RNA (1)...(19): siRNA sense strand
ccaaguugaugaagucaga

SEQ ID NO: 2022557 - RNA, 19 nt, Homo sapiens
  misc_RNA (1)...(19): siRNA sense strand
gcauaagaguuccugaauc

SEQ ID NO: 2022558 - RNA, 19 nt, Homo sapiens
  misc_RNA (1)...(19): siRNA sense strand
ccaagaagaauuugauaga

SEQ ID NO: 2022559 - RNA, 19 nt, Homo sapiens
  misc_RNA (1)...(19): siRNA sense strand
gaagaugacccaacuugca

SEQ ID NO: 2022560 - RNA, 19 nt, Homo sapiens
  misc_RNA (1)...(19): siRNA sense strand
acaaugagcuagccaacau

SEQ ID NO: 2022561 - RNA, 19 nt, Homo sapiens
  misc_RNA (1)...(19): siRNA sense strand
cauaagaguuccugaaucg

SEQ ID NO: 2022562 - RNA, 19 nt, Homo sapiens
  misc_RNA (1)...(19): siRNA sense strand
uuacugcucuuacaugguu

SEQ ID NO: 2022563 - RNA, 19 nt, Homo sapiens
  misc_RNA (1)...(19): siRNA sense strand
caggauacacggaacguua

SEQ ID NO: 2022564 - RNA, 19 nt, Homo sapiens
  misc_RNA (1)...(19): siRNA sense strand
cagcagcaauggaaacaga

SEQ ID NO: 2022565 - RNA, 19 nt, Homo sapiens
  misc_RNA (1)...(19): siRNA sense strand
gcagauucauuccguuauc

SEQ ID NO: 2022566 - RNA, 19 nt, Homo sapiens
  misc_RNA (1)...(19): siRNA sense strand
uggaaagccauaugauuua

SEQ ID NO: 2022567 - RNA, 19 nt, Homo sapiens
  misc_RNA (1)...(19): siRNA sense strand
ucaaguguccuaucaaaga

SEQ ID NO: 2022568 - RNA, 19 nt, Homo sapiens
  misc_RNA (1)...(19): siRNA sense strand
gauuucaaguguccuauca

SEQ ID NO: 2022569 - RNA, 19 nt, Homo sapiens
  misc_RNA (1)...(19): siRNA sense strand
ggaaagcaaauauaaacga

SEQ ID NO: 2022570 - RNA, 19 nt, Homo sapiens
  misc_RNA (1)...(19): siRNA sense strand
ugucauagauaaggaacua

SEQ ID NO: 2022571 - RNA, 19 nt, Homo sapiens
  misc_RNA (1)...(19): siRNA sense strand
cuguggaucuucuaugaua

SEQ ID NO: 2022572 - RNA, 19 nt, Homo sapiens
  misc_RNA (1)...(19): siRNA sense strand
uaucaaguccugaagauga

SEQ ID NO: 2022573 - RNA, 19 nt, Homo sapiens
  misc_RNA (1)...(19): siRNA sense strand
ccagaagaauccacacugu

SEQ ID NO: 2022574 - RNA, 19 nt, Homo sapiens
  misc_RNA (1)...(19): siRNA sense strand
guaaguauaguaaccagaa

SEQ ID NO: 2022575 - RNA, 19 nt, Homo sapiens
  misc_RNA (1)...(19): siRNA sense strand
gaagaugauguuauggaaa

SEQ ID NO: 2022576 - RNA, 19 nt, Homo sapiens
  misc_RNA (1)...(19): siRNA sense strand
ggaaguggaacauuucugu

SEQ ID NO: 2022577 - RNA, 19 nt, Homo sapiens
  misc_RNA (1)...(19): siRNA sense strand
ugacuauacuccuccagaa

SEQ ID NO: 2022578 - RNA, 19 nt, Homo sapiens
  misc_RNA (1)...(19): siRNA sense strand
gcuaucaaguccugaagau

SEQ ID NO: 2022579 - RNA, 19 nt, Homo sapiens
  misc_RNA (1)...(19): siRNA sense strand
aguagaagaugauguuaug

SEQ ID NO: 2022580 - RNA, 19 nt, Homo sapiens
  misc_RNA (1)...(19): siRNA sense strand
ggaaggaucauagauguca

SEQ ID NO: 2022581 - RNA, 19 nt, Homo sapiens
  misc_RNA (1)...(19): siRNA sense strand
gaaacaaggagggcagauu

SEQ ID NO: 2022582 - RNA, 19 nt, Homo sapiens
  misc_RNA (1)...(19): siRNA sense strand
acagcuggguguugagaua

SEQ ID NO: 2022583 - RNA, 19 nt, Homo sapiens
  misc_RNA (1)...(19): siRNA sense strand
ggccuaaauuggagccuuu

SEQ ID NO: 2022584 - RNA, 19 nt, Homo sapiens
  misc_RNA (1)...(19): siRNA sense strand
gggcagauucauuccguua

SEQ ID NO: 2022585 - RNA, 19 nt, Homo sapiens
  misc_RNA (1)...(19): siRNA sense strand
uuggauaucuaacaucgua

SEQ ID NO: 2022586 - RNA, 19 nt, Homo sapiens
  misc_RNA (1)...(19): siRNA sense strand
agaagaugauguuauggaa

SEQ ID NO: 2022587 - RNA, 19 nt, Homo sapiens
  misc_RNA (1)...(19): siRNA sense strand
caggagagacacagcauaa

SEQ ID NO: 2022588 - RNA, 19 nt, Homo sapiens
  misc_RNA (1)...(19): siRNA sense strand
ggaaagccauaugauuuac

SEQ ID NO: 2022589 - RNA, 19 nt, Homo sapiens
  misc_RNA (1)...(19): siRNA sense strand
ugacgccacuaauuaucua

SEQ ID NO: 2022590 - RNA, 19 nt, Homo sapiens
  misc_RNA (1)...(19): siRNA sense strand
gaagucagaaggcugguau

SEQ ID NO: 2022591 - RNA, 19 nt, Homo sapiens
  misc_RNA (1)...(19): siRNA sense strand
gcuaaggcaccacaugauu

SEQ ID NO: 2022592 - RNA, 19 nt, Homo sapiens
  misc_RNA (1)...(19): siRNA sense strand
aaccuuggaucacguauug

SEQ ID NO: 2022593 - RNA, 19 nt, Homo sapiens
  misc_RNA (1)...(19): siRNA sense strand
aaagaggagauagcaauua

SEQ ID NO: 2022594 - RNA, 19 nt, Homo sapiens
  misc_RNA (1)...(19): siRNA sense strand
caaagaggagauagcaauu

SEQ ID NO: 2022595 - RNA, 19 nt, Homo sapiens
  misc_RNA (1)...(19): siRNA sense strand
ggaaaggcagagacucauu

SEQ ID NO: 2022596 - RNA, 19 nt, Homo sapiens
  misc_RNA (1)...(19): siRNA sense strand
caucguaaccagagaagaa

SEQ ID NO: 2022597 - RNA, 19 nt, Homo sapiens
  misc_RNA (1)...(19): siRNA sense strand
gaaagaaaacgcauuggaa

SEQ ID NO: 2022598 - RNA, 19 nt, Homo sapiens
  misc_RNA (1)...(19): siRNA sense strand
cuggaaagccauaugauuu

SEQ ID NO: 2022599 - RNA, 19 nt, Homo sapiens
  misc_RNA (1)...(19): siRNA sense strand
ucagcacugugacuucuuu

SEQ ID NO: 2022600 - RNA, 19 nt, Homo sapiens
  misc_RNA (1)...(19): siRNA sense strand
ucugugacgccacuaauua

SEQ ID NO: 2022601 - RNA, 19 nt, Homo sapiens
  misc_RNA (1)...(19): siRNA sense strand
gaaggaguugaauauauug

SEQ ID NO: 2022602 - RNA, 19 nt, Homo sapiens
  misc_RNA (1)...(19): siRNA sense strand
ggaacuaauucaaccuuuu

SEQ ID NO: 2022603 - RNA, 19 nt, Homo sapiens
  misc_RNA (1)...(19): siRNA sense strand
cggaauugcuucuuacgau

SEQ ID NO: 2022604 - RNA, 19 nt, Homo sapiens
  misc_RNA (1)...(19): siRNA sense strand
gaaucugagguggaaauua

SEQ ID NO: 2022605 - RNA, 19 nt, Homo sapiens
  misc_RNA (1)...(19): siRNA sense strand
agacacagcauaagaguuc

SEQ ID NO: 2022606 - RNA, 19 nt, Homo sapiens
  misc_RNA (1)...(19): siRNA sense strand
cgaagaggaaauugaguuu

SEQ ID NO: 2022607 - RNA, 19 nt, Homo sapiens
  misc_RNA (1)...(19): siRNA sense strand
cagucggaauugcuucuua

SEQ ID NO: 2022608 - RNA, 19 nt, Homo sapiens
  misc_RNA (1)...(19): siRNA sense strand
gcuggaaagccauaugauu

SEQ ID NO: 2022609 - RNA, 19 nt, Homo sapiens
  misc_RNA (1)...(19): siRNA sense strand
ugaggagaauauugaauca

SEQ ID NO: 2022610 - RNA, 19 nt, Homo sapiens
  misc_RNA (1)...(19): siRNA sense strand
aaggaaggaucauagaugu

SEQ ID NO: 2022611 - RNA, 19 nt, Homo sapiens
  misc_RNA (1)...(19): siRNA sense strand
ucaagccgguaguggaauu

SEQ ID NO: 2022612 - RNA, 19 nt, Homo sapiens
  misc_RNA (1)...(19): siRNA sense strand
ucaaagaggagauagcaau

SEQ ID NO: 2022613 - RNA, 19 nt, Homo sapiens
  misc_RNA (1)...(19): siRNA sense strand
uuucaaguguccuaucaaa

SEQ ID NO: 2022614 - RNA, 19 nt, Homo sapiens
  misc_RNA (1)...(19): siRNA sense strand
guguugaucucaccugaau

SEQ ID NO: 2022615 - RNA, 19 nt, Homo sapiens
  misc_RNA (1)...(19): siRNA sense strand
gguggaaauuauucauguu

SEQ ID NO: 2022616 - RNA, 19 nt, Homo sapiens
  misc_RNA (1)...(19): siRNA sense strand
uagccaacauggaagaaga

SEQ ID NO: 2022617 - RNA, 19 nt, Homo sapiens
  misc_RNA (1)...(19): siRNA sense strand
cuaaggcaccacaugauuu

SEQ ID NO: 2022618 - RNA, 19 nt, Homo sapiens
  misc_RNA (1)...(19): siRNA sense strand
ggauacacggaacguuaua

SEQ ID NO: 2022619 - RNA, 19 nt, Homo sapiens
  misc_RNA (1)...(19): siRNA sense strand
gauggacuccugagggaaa

SEQ ID NO: 2022620 - RNA, 19 nt, Homo sapiens
  misc_RNA (1)...(19): siRNA sense strand
gauucuauuugaaggaguu

SEQ ID NO: 2022621 - RNA, 19 nt, Homo sapiens
  misc_RNA (1)...(19): siRNA sense strand
gaucucaccugaauuauuu

SEQ ID NO: 2022622 - RNA, 19 nt, Homo sapiens
  misc_RNA (1)...(19): siRNA sense strand
ucagaaggcugguauauuu

SEQ ID NO: 2022623 - RNA, 19 nt, Homo sapiens
  misc_RNA (1)...(19): siRNA sense strand
gaucauagaugucauagau

SEQ ID NO: 2022624 - RNA, 19 nt, Homo sapiens
  misc_RNA (1)...(19): siRNA sense strand
gaacagggcuauuacuuag

SEQ ID NO: 2022625 - RNA, 19 nt, Homo sapiens
  misc_RNA (1)...(19): siRNA sense strand
ggaagaagaugccagauca

SEQ ID NO: 2022626 - RNA, 19 nt, Homo sapiens
  misc_RNA (1)...(19): siRNA sense strand
caauagagcagcagucuua

SEQ ID NO: 2022627 - RNA, 19 nt, Homo sapiens
  misc_RNA (1)...(19): siRNA sense strand
ccaaggaaguggaacauuu

SEQ ID NO: 2022628 - RNA, 19 nt, Homo sapiens
  misc_RNA (1)...(19): siRNA sense strand
gaaaggagacucacuuaug

SEQ ID NO: 2022629 - RNA, 19 nt, Homo sapiens
  misc_RNA (1)...(19): siRNA sense strand
gaucuaauauccaaguuga

SEQ ID NO: 2022630 - RNA, 19 nt, Homo sapiens
  misc_RNA (1)...(19): siRNA sense strand
ucacuuaugugcacaauga

SEQ ID NO: 2022631 - RNA, 19 nt, Homo sapiens
  misc_RNA (1)...(19): siRNA sense strand
ggaaagaaauauccuacug

SEQ ID NO: 2022632 - RNA, 19 nt, Homo sapiens
  misc_RNA (1)...(19): siRNA sense strand
cuacugugcuguucauaua

SEQ ID NO: 2022633 - RNA, 19 nt, Homo sapiens
  misc_RNA (1)...(19): siRNA sense strand
gaagaggaaugauccagau

SEQ ID NO: 2022634 - RNA, 19 nt, Homo sapiens
  misc_RNA (1)...(19): siRNA sense strand
gcacugugacuucuuuaua

SEQ ID NO: 2022635 - RNA, 19 nt, Homo sapiens
  misc_RNA (1)...(19): siRNA sense strand
cuacaagccucaugaucua

SEQ ID NO: 2022636 - RNA, 19 nt, Homo sapiens
  misc_RNA (1)...(19): siRNA sense strand
ggaauugcuucuuacgauu

SEQ ID NO: 2022637 - RNA, 19 nt, Homo sapiens
  misc_RNA (1)...(19): siRNA sense strand
gaauugcuucuuacgauua

SEQ ID NO: 2022638 - RNA, 19 nt, Homo sapiens
  misc_RNA (1)...(19): siRNA sense strand
gaagaaaggagacucacuu

SEQ ID NO: 2022639 - RNA, 19 nt, Homo sapiens
  misc_RNA (1)...(19): siRNA sense strand
uagcaacgauauuuggaua

SEQ ID NO: 2022640 - RNA, 19 nt, Homo sapiens
  misc_RNA (1)...(19): siRNA sense strand
gaaggaaggaucauagaug

SEQ ID NO: 2022641 - RNA, 19 nt, Homo sapiens
  misc_RNA (1)...(19): siRNA sense strand
gaccguggcuacucacauu

SEQ ID NO: 2022642 - RNA, 19 nt, Homo sapiens
  misc_RNA (1)...(19): siRNA sense strand
aaaggagacucacuuaugu

SEQ ID NO: 2022643 - RNA, 19 nt, Homo sapiens
  misc_RNA (1)...(19): siRNA sense strand
gaagaggaaauugaguuua

SEQ ID NO: 2022644 - RNA, 19 nt, Homo sapiens
  misc_RNA (1)...(19): siRNA sense strand
aaucugagguggaaauuau

SEQ ID NO: 2022645 - RNA, 19 nt, Homo sapiens
  misc_RNA (1)...(19): siRNA sense strand
ucgagaagaagaacuauua

SEQ ID NO: 2022646 - RNA, 19 nt, Homo sapiens
  misc_RNA (1)...(19): siRNA sense strand
guugaucucaccugaauua

SEQ ID NO: 2022647 - RNA, 19 nt, Homo sapiens
  misc_RNA (1)...(19): siRNA sense strand
gaagaagaacuauuaagag

SEQ ID NO: 2022648 - RNA, 19 nt, Homo sapiens
  misc_RNA (1)...(19): siRNA sense strand
gggagaacauuaugaacug

SEQ ID NO: 2022649 - RNA, 19 nt, Homo sapiens
  misc_RNA (1)...(19): siRNA sense strand
ggagagacacagcauaaga

SEQ ID NO: 2022650 - RNA, 19 nt, Homo sapiens
  misc_RNA (1)...(19): siRNA sense strand
ugaacagggcuauuacuua

SEQ ID NO: 2022651 - RNA, 19 nt, Homo sapiens
  misc_RNA (1)...(19): siRNA sense strand
gaaaggcagagacucauug

SEQ ID NO: 2022652 - RNA, 19 nt, Homo sapiens
  misc_RNA (1)...(19): siRNA sense strand
agaaugaacagggcuauua

SEQ ID NO: 2022653 - RNA, 19 nt, Homo sapiens
  misc_RNA (1)...(19): siRNA sense strand
gaaagaaauauccuacugu

SEQ ID NO: 2022654 - RNA, 19 nt, Homo sapiens
  misc_RNA (1)...(19): siRNA sense strand
cacugugacuucuuuauaa

SEQ ID NO: 2022655 - RNA, 19 nt, Homo sapiens
  misc_RNA (1)...(19): siRNA sense strand
ccaaguugaugaagucaga

SEQ ID NO: 2022656 - RNA, 19 nt, Homo sapiens
  misc_RNA (1)...(19): siRNA sense strand
gcauaagaguuccugaauc

SEQ ID NO: 2022657 - RNA, 19 nt, Homo sapiens
  misc_RNA (1)...(19): siRNA sense strand
ccaagaagaauuugauaga

SEQ ID NO: 2022658 - RNA, 19 nt, Homo sapiens
  misc_RNA (1)...(19): siRNA sense strand
gaagaugacccaacuugca

SEQ ID NO: 2022659 - RNA, 19 nt, Homo sapiens
  misc_RNA (1)...(19): siRNA sense strand
acaaugagcuagccaacau

SEQ ID NO: 2022660 - RNA, 19 nt, Homo sapiens
  misc_RNA (1)...(19): siRNA sense strand
cauaagaguuccugaaucg

SEQ ID NO: 2022661 - RNA, 19 nt, Homo sapiens
  misc_RNA (1)...(19): siRNA sense strand
uuacugcucuuacaugguu

SEQ ID NO: 2022662 - RNA, 19 nt, Homo sapiens
  misc_RNA (1)...(19): siRNA sense strand
caggauacacggaacguua

SEQ ID NO: 2022663 - RNA, 19 nt, Homo sapiens
  misc_RNA (1)...(19): siRNA sense strand
cagcagcaauggaaacaga

SEQ ID NO: 2022664 - RNA, 19 nt, Homo sapiens
  misc_RNA (1)...(19): siRNA sense strand
gcagauucauuccguuauc

SEQ ID NO: 2022665 - RNA, 19 nt, Homo sapiens
  misc_RNA (1)...(19): siRNA sense strand
uggaaagccauaugauuua

SEQ ID NO: 2022666 - RNA, 19 nt, Homo sapiens
  misc_RNA (1)...(19): siRNA sense strand
ucaaguguccuaucaaaga

SEQ ID NO: 2022667 - RNA, 19 nt, Homo sapiens
  misc_RNA (1)...(19): siRNA sense strand
gauuucaaguguccuauca

SEQ ID NO: 2022668 - RNA, 19 nt, Homo sapiens
  misc_RNA (1)...(19): siRNA sense strand
ggaaagcaaauauaaacga

SEQ ID NO: 2022669 - RNA, 19 nt, Homo sapiens
  misc_RNA (1)...(19): siRNA sense strand
ugucauagauaaggaacua

SEQ ID NO: 2022670 - RNA, 19 nt, Homo sapiens
  misc_RNA (1)...(19): siRNA sense strand
cuguggaucuucuaugaua

SEQ ID NO: 2022671 - RNA, 19 nt, Homo sapiens
  misc_RNA (1)...(19): siRNA sense strand
uaucaaguccugaagauga

SEQ ID NO: 2022672 - RNA, 19 nt, Homo sapiens
  misc_RNA (1)...(19): siRNA sense strand
ccagaagaauccacacugu

SEQ ID NO: 2022673 - RNA, 19 nt, Homo sapiens
  misc_RNA (1)...(19): siRNA sense strand
guaaguauaguaaccagaa

SEQ ID NO: 2022674 - RNA, 19 nt, Homo sapiens
  misc_RNA (1)...(19): siRNA sense strand
gaagaugauguuauggaaa

SEQ ID NO: 2022675 - RNA, 19 nt, Homo sapiens
  misc_RNA (1)...(19): siRNA sense strand
ggaaguggaacauuucugu

SEQ ID NO: 2022676 - RNA, 19 nt, Homo sapiens
  misc_RNA (1)...(19): siRNA sense strand
ugacuauacuccuccagaa

SEQ ID NO: 2022677 - RNA, 19 nt, Homo sapiens
  misc_RNA (1)...(19): siRNA sense strand
gcuaucaaguccugaagau

SEQ ID NO: 2022678 - RNA, 19 nt, Homo sapiens
  misc_RNA (1)...(19): siRNA sense strand
aguagaagaugauguuaug

SEQ ID NO: 2022679 - RNA, 19 nt, Homo sapiens
  misc_RNA (1)...(19): siRNA sense strand
ggaaggaucauagauguca

SEQ ID NO: 2022680 - RNA, 19 nt, Homo sapiens
  misc_RNA (1)...(19): siRNA sense strand
gaaacaaggagggcagauu

SEQ ID NO: 2022681 - RNA, 19 nt, Homo sapiens
  misc_RNA (1)...(19): siRNA sense strand
uuggauaucuaacaucgua

SEQ ID NO: 2022682 - RNA, 19 nt, Homo sapiens
  misc_RNA (1)...(19): siRNA sense strand
ggccuaaauuggagccuuu

SEQ ID NO: 2022683 - RNA, 19 nt, Homo sapiens
  misc_RNA (1)...(19): siRNA sense strand
acagcuggguguugagaua

SEQ ID NO: 2022684 - RNA, 19 nt, Homo sapiens
  misc_RNA (1)...(19): siRNA sense strand
gggcagauucauuccguua

SEQ ID NO: 2022685 - RNA, 19 nt, Homo sapiens
  misc_RNA (1)...(19): siRNA sense strand
agaagaugauguuauggaa

SEQ ID NO: 2022686 - RNA, 19 nt, Homo sapiens
  misc_RNA (1)...(19): siRNA sense strand
caggagagacacagcauaa

SEQ ID NO: 2022687 - RNA, 19 nt, Homo sapiens
  misc_RNA (1)...(19): siRNA sense strand
ggaaagccauaugauuuac

SEQ ID NO: 2022688 - RNA, 19 nt, Homo sapiens
  misc_RNA (1)...(19): siRNA sense strand
ugacgccacuaauuaucua

SEQ ID NO: 2022689 - RNA, 19 nt, Homo sapiens
  misc_RNA (1)...(19): siRNA sense strand
gaagucagaaggcugguau

SEQ ID NO: 2022690 - RNA, 19 nt, Homo sapiens
  misc_RNA (1)...(19): siRNA sense strand
caucguaaccagagaagaa

SEQ ID NO: 2022691 - RNA, 19 nt, Homo sapiens
  misc_RNA (1)...(19): siRNA sense strand
aaccuuggaucacguauug

SEQ ID NO: 2022692 - RNA, 19 nt, Homo sapiens
  misc_RNA (1)...(19): siRNA sense strand
gcuaaggcaccacaugauu

SEQ ID NO: 2022693 - RNA, 19 nt, Homo sapiens
  misc_RNA (1)...(19): siRNA sense strand
aaagaggagauagcaauua

SEQ ID NO: 2022694 - RNA, 19 nt, Homo sapiens
  misc_RNA (1)...(19): siRNA sense strand
caaagaggagauagcaauu

SEQ ID NO: 2022695 - RNA, 19 nt, Homo sapiens
  misc_RNA (1)...(19): siRNA sense strand
ggaaaggcagagacucauu

SEQ ID NO: 2022696 - RNA, 19 nt, Homo sapiens
  misc_RNA (1)...(19): siRNA sense strand
gaaagaaaacgcauuggaa

SEQ ID NO: 2022697 - RNA, 19 nt, Homo sapiens
  misc_RNA (1)...(19): siRNA sense strand
cuggaaagccauaugauuu

SEQ ID NO: 2022698 - RNA, 19 nt, Homo sapiens
  misc_RNA (1)...(19): siRNA sense strand
ucagcacugugacuucuuu

SEQ ID NO: 2022699 - RNA, 19 nt, Homo sapiens
  misc_RNA (1)...(19): siRNA sense strand
ucugugacgccacuaauua

SEQ ID NO: 2022700 - RNA, 19 nt, Homo sapiens
  misc_RNA (1)...(19): siRNA sense strand
gaaggaguugaauauauug

SEQ ID NO: 2022701 - RNA, 19 nt, Homo sapiens
  misc_RNA (1)...(19): siRNA sense strand
ggaacuaauucaaccuuuu

SEQ ID NO: 2022702 - RNA, 19 nt, Homo sapiens
  misc_RNA (1)...(19): siRNA sense strand
cggaauugcuucuuacgau

SEQ ID NO: 2022703 - RNA, 19 nt, Homo sapiens
  misc_RNA (1)...(19): siRNA sense strand
gaaucugagguggaaauua

SEQ ID NO: 2022704 - RNA, 19 nt, Homo sapiens
  misc_RNA (1)...(19): siRNA sense strand
agacacagcauaagaguuc

SEQ ID NO: 2022705 - RNA, 19 nt, Homo sapiens
  misc_RNA (1)...(19): siRNA sense strand
cgaagaggaaauugaguuu

SEQ ID NO: 2022706 - RNA, 19 nt, Homo sapiens
  misc_RNA (1)...(19): siRNA sense strand
ugaggagaauauugaauca

SEQ ID NO: 2022707 - RNA, 19 nt, Homo sapiens
  misc_RNA (1)...(19): siRNA sense strand
gcuggaaagccauaugauu

SEQ ID NO: 2022708 - RNA, 19 nt, Homo sapiens
  misc_RNA (1)...(19): siRNA sense strand
aaggaaggaucauagaugu

SEQ ID NO: 2022709 - RNA, 19 nt, Homo sapiens
  misc_RNA (1)...(19): siRNA sense strand
cagucggaauugcuucuua

SEQ ID NO: 2022710 - RNA, 19 nt, Homo sapiens
  misc_RNA (1)...(19): siRNA sense strand
ucaagccgguaguggaauu

SEQ ID NO: 2022711 - RNA, 19 nt, Homo sapiens
  misc_RNA (1)...(19): siRNA sense strand
ucaaagaggagauagcaau

SEQ ID NO: 2022712 - RNA, 19 nt, Homo sapiens
  misc_RNA (1)...(19): siRNA sense strand
uuucaaguguccuaucaaa

SEQ ID NO: 2022713 - RNA, 19 nt, Homo sapiens
  misc_RNA (1)...(19): siRNA sense strand
guguugaucucaccugaau

SEQ ID NO: 2022714 - RNA, 19 nt, Homo sapiens
  misc_RNA (1)...(19): siRNA sense strand
gguggaaauuauucauguu

SEQ ID NO: 2022715 - RNA, 19 nt, Homo sapiens
  misc_RNA (1)...(19): siRNA sense strand
aagaaaggagacucacuua

SEQ ID NO: 2022716 - RNA, 19 nt, Homo sapiens
  misc_RNA (1)...(19): siRNA sense strand
ggauacacggaacguuaua

SEQ ID NO: 2022717 - RNA, 19 nt, Homo sapiens
  misc_RNA (1)...(19): siRNA sense strand
cuaaggcaccacaugauuu

SEQ ID NO: 2022718 - RNA, 19 nt, Homo sapiens
  misc_RNA (1)...(19): siRNA sense strand
gauggacuccugagggaaa

SEQ ID NO: 2022719 - RNA, 19 nt, Homo sapiens
  misc_RNA (1)...(19): siRNA sense strand
gauucuauuugaaggaguu

SEQ ID NO: 2022720 - RNA, 19 nt, Homo sapiens
  misc_RNA (1)...(19): siRNA sense strand
uagccaacauggaagaaga

SEQ ID NO: 2022721 - RNA, 19 nt, Homo sapiens
  misc_RNA (1)...(19): siRNA sense strand
gaucucaccugaauuauuu

SEQ ID NO: 2022722 - RNA, 19 nt, Homo sapiens
  misc_RNA (1)...(19): siRNA sense strand
ucagaaggcugguauauuu

SEQ ID NO: 2022723 - RNA, 19 nt, Homo sapiens
  misc_RNA (1)...(19): siRNA sense strand
gaucauagaugucauagau

SEQ ID NO: 2022724 - RNA, 19 nt, Homo sapiens
  misc_RNA (1)...(19): siRNA sense strand
gaacagggcuauuacuuag

SEQ ID NO: 2022725 - RNA, 19 nt, Homo sapiens
  misc_RNA (1)...(19): siRNA sense strand
ggaagaagaugccagauca

SEQ ID NO: 2022726 - RNA, 19 nt, Homo sapiens
  misc_RNA (1)...(19): siRNA sense strand
caauagagcagcagucuua

SEQ ID NO: 2022727 - RNA, 19 nt, Homo sapiens
  misc_RNA (1)...(19): siRNA sense strand
ccaaggaaguggaacauuu

SEQ ID NO: 2022728 - RNA, 19 nt, Homo sapiens
  misc_RNA (1)...(19): siRNA sense strand
gaaaggagacucacuuaug

SEQ ID NO: 2022729 - RNA, 19 nt, Homo sapiens
  misc_RNA (1)...(19): siRNA sense strand
gaucuaauauccaaguuga

SEQ ID NO: 2022730 - RNA, 19 nt, Homo sapiens
  misc_RNA (1)...(19): siRNA sense strand
ucacuuaugugcacaauga

SEQ ID NO: 2022731 - RNA, 19 nt, Homo sapiens
  misc_RNA (1)...(19): siRNA sense strand
ggaaagaaauauccuacug

SEQ ID NO: 2022732 - RNA, 19 nt, Homo sapiens
  misc_RNA (1)...(19): siRNA sense strand
cuacugugcuguucauaua

SEQ ID NO: 2022733 - RNA, 19 nt, Homo sapiens
  misc_RNA (1)...(19): siRNA sense strand
gaagaggaaugauccagau

SEQ ID NO: 2022734 - RNA, 19 nt, Homo sapiens
  misc_RNA (1)...(19): siRNA sense strand
gcacugugacuucuuuaua

SEQ ID NO: 2022735 - RNA, 19 nt, Homo sapiens
  misc_RNA (1)...(19): siRNA sense strand
cuacaagccucaugaucua

SEQ ID NO: 2022736 - RNA, 19 nt, Homo sapiens
  misc_RNA (1)...(19): siRNA sense strand
ggaauugcuucuuacgauu

SEQ ID NO: 2022737 - RNA, 19 nt, Homo sapiens
  misc_RNA (1)...(19): siRNA sense strand
gaauugcuucuuacgauua

SEQ ID NO: 2022738 - RNA, 19 nt, Homo sapiens
  misc_RNA (1)...(19): siRNA sense strand
gaagaaaggagacucacuu

SEQ ID NO: 2022739 - RNA, 19 nt, Homo sapiens
  misc_RNA (1)...(19): siRNA sense strand
uagcaacgauauuuggaua

SEQ ID NO: 2022740 - RNA, 19 nt, Homo sapiens
  misc_RNA (1)...(19): siRNA sense strand
gaaggaaggaucauagaug

SEQ ID NO: 2022741 - RNA, 19 nt, Homo sapiens
  misc_RNA (1)...(19): siRNA sense strand
gaccguggcuacucacauu

SEQ ID NO: 2022742 - RNA, 19 nt, Homo sapiens
  misc_RNA (1)...(19): siRNA sense strand
aaaggagacucacuuaugu

SEQ ID NO: 2022743 - RNA, 19 nt, Homo sapiens
  misc_RNA (1)...(19): siRNA sense strand
gaagaggaaauugaguuua

SEQ ID NO: 2022744 - RNA, 19 nt, Homo sapiens
  misc_RNA (1)...(19): siRNA sense strand
aaucugagguggaaauuau

SEQ ID NO: 2022745 - RNA, 19 nt, Homo sapiens
  misc_RNA (1)...(19): siRNA sense strand
ucgagaagaagaacuauua

SEQ ID NO: 2022746 - RNA, 19 nt, Homo sapiens
  misc_RNA (1)...(19): siRNA sense strand
guugaucucaccugaauua

SEQ ID NO: 2022747 - RNA, 19 nt, Homo sapiens
  misc_RNA (1)...(19): siRNA sense strand
gaagaagaacuauuaagag

SEQ ID NO: 2022748 - RNA, 19 nt, Homo sapiens
  misc_RNA (1)...(19): siRNA sense strand
gggagaacauuaugaacug

SEQ ID NO: 2022749 - RNA, 19 nt, Homo sapiens
  misc_RNA (1)...(19): siRNA sense strand
ggagagacacagcauaaga

SEQ ID NO: 2022750 - RNA, 19 nt, Homo sapiens
  misc_RNA (1)...(19): siRNA sense strand
ugaacagggcuauuacuua

SEQ ID NO: 2022751 - RNA, 19 nt, Homo sapiens
  misc_RNA (1)...(19): siRNA sense strand
gaaaggcagagacucauug

SEQ ID NO: 2022752 - RNA, 19 nt, Homo sapiens
  misc_RNA (1)...(19): siRNA sense strand
agaaugaacagggcuauua

SEQ ID NO: 2022753 - RNA, 19 nt, Homo sapiens
  misc_RNA (1)...(19): siRNA sense strand
gaaagaaauauccuacugu

SEQ ID NO: 2022754 - RNA, 19 nt, Homo sapiens
  misc_RNA (1)...(19): siRNA sense strand
cacugugacuucuuuauaa

SEQ ID NO: 2022755 - RNA, 19 nt, Homo sapiens
  misc_RNA (1)...(19): siRNA sense strand
ccaaguugaugaagucaga

SEQ ID NO: 2022756 - RNA, 19 nt, Homo sapiens
  misc_RNA (1)...(19): siRNA sense strand
gcauaagaguuccugaauc

SEQ ID NO: 2022757 - RNA, 19 nt, Homo sapiens
  misc_RNA (1)...(19): siRNA sense strand
ccaagaagaauuugauaga

SEQ ID NO: 2022758 - RNA, 19 nt, Homo sapiens
  misc_RNA (1)...(19): siRNA sense strand
gaagaugacccaacuugca

SEQ ID NO: 2022759 - RNA, 19 nt, Homo sapiens
  misc_RNA (1)...(19): siRNA sense strand
acaaugagcuagccaacau

SEQ ID NO: 2022760 - RNA, 19 nt, Homo sapiens
  misc_RNA (1)...(19): siRNA sense strand
cauaagaguuccugaaucg

SEQ ID NO: 2022761 - RNA, 19 nt, Homo sapiens
  misc_RNA (1)...(19): siRNA sense strand
uuacugcucuuacaugguu

SEQ ID NO: 2022762 - RNA, 19 nt, Homo sapiens
  misc_RNA (1)...(19): siRNA sense strand
caggauacacggaacguua

SEQ ID NO: 2022763 - RNA, 19 nt, Homo sapiens
  misc_RNA (1)...(19): siRNA sense strand
cagcagcaauggaaacaga

SEQ ID NO: 2022764 - RNA, 19 nt, Homo sapiens
  misc_RNA (1)...(19): siRNA sense strand
gcagauucauuccguuauc

SEQ ID NO: 2022765 - RNA, 19 nt, Homo sapiens
  misc_RNA (1)...(19): siRNA sense strand
uggaaagccauaugauuua

SEQ ID NO: 2022766 - RNA, 19 nt, Homo sapiens
  misc_RNA (1)...(19): siRNA sense strand
ucaaguguccuaucaaaga

SEQ ID NO: 2022767 - RNA, 19 nt, Homo sapiens
  misc_RNA (1)...(19): siRNA sense strand
gauuucaaguguccuauca

SEQ ID NO: 2022768 - RNA, 19 nt, Homo sapiens
  misc_RNA (1)...(19): siRNA sense strand
ggaaagcaaauauaaacga

SEQ ID NO: 2022769 - RNA, 19 nt, Homo sapiens
  misc_RNA (1)...(19): siRNA sense strand
ugucauagauaaggaacua

SEQ ID NO: 2022770 - RNA, 19 nt, Homo sapiens
  misc_RNA (1)...(19): siRNA sense strand
cuguggaucuucuaugaua

SEQ ID NO: 2022771 - RNA, 19 nt, Homo sapiens
  misc_RNA (1)...(19): siRNA sense strand
uaucaaguccugaagauga

SEQ ID NO: 2022772 - RNA, 19 nt, Homo sapiens
  misc_RNA (1)...(19): siRNA sense strand
ccagaagaauccacacugu

SEQ ID NO: 2022773 - RNA, 19 nt, Homo sapiens
  misc_RNA (1)...(19): siRNA sense strand
guaaguauaguaaccagaa

SEQ ID NO: 2022774 - RNA, 19 nt, Homo sapiens
  misc_RNA (1)...(19): siRNA sense strand
gaagaugauguuauggaaa

SEQ ID NO: 2022775 - RNA, 19 nt, Homo sapiens
  misc_RNA (1)...(19): siRNA sense strand
ggaaguggaacauuucugu

SEQ ID NO: 2022776 - RNA, 19 nt, Homo sapiens
  misc_RNA (1)...(19): siRNA sense strand
ugacuauacuccuccagaa

SEQ ID NO: 2022777 - RNA, 19 nt, Homo sapiens
  misc_RNA (1)...(19): siRNA sense strand
gcuaucaaguccugaagau

SEQ ID NO: 2022778 - RNA, 19 nt, Homo sapiens
  misc_RNA (1)...(19): siRNA sense strand
aguagaagaugauguuaug

SEQ ID NO: 2022779 - RNA, 19 nt, Homo sapiens
  misc_RNA (1)...(19): siRNA sense strand
ggaaggaucauagauguca

SEQ ID NO: 2022780 - RNA, 19 nt, Homo sapiens
  misc_RNA (1)...(19): siRNA sense strand
gaaacaaggagggcagauu

SEQ ID NO: 2022781 - RNA, 19 nt, Homo sapiens
  misc_RNA (1)...(19): siRNA sense strand
uuggauaucuaacaucgua

SEQ ID NO: 2022782 - RNA, 19 nt, Homo sapiens
  misc_RNA (1)...(19): siRNA sense strand
ggccuaaauuggagccuuu

SEQ ID NO: 2022783 - RNA, 19 nt, Homo sapiens
  misc_RNA (1)...(19): siRNA sense strand
acagcuggguguugagaua

SEQ ID NO: 2022784 - RNA, 19 nt, Homo sapiens
  misc_RNA (1)...(19): siRNA sense strand
gggcagauucauuccguua

SEQ ID NO: 2022785 - RNA, 19 nt, Homo sapiens
  misc_RNA (1)...(19): siRNA sense strand
agaagaugauguuauggaa

SEQ ID NO: 2022786 - RNA, 19 nt, Homo sapiens
  misc_RNA (1)...(19): siRNA sense strand
caggagagacacagcauaa

SEQ ID NO: 2022787 - RNA, 19 nt, Homo sapiens
  misc_RNA (1)...(19): siRNA sense strand
ggaaagccauaugauuuac

SEQ ID NO: 2022788 - RNA, 19 nt, Homo sapiens
  misc_RNA (1)...(19): siRNA sense strand
ugacgccacuaauuaucua

SEQ ID NO: 2022789 - RNA, 19 nt, Homo sapiens
  misc_RNA (1)...(19): siRNA sense strand
gaagucagaaggcugguau

SEQ ID NO: 2022790 - RNA, 19 nt, Homo sapiens
  misc_RNA (1)...(19): siRNA sense strand
caucguaaccagagaagaa

SEQ ID NO: 2022791 - RNA, 19 nt, Homo sapiens
  misc_RNA (1)...(19): siRNA sense strand
aaccuuggaucacguauug

SEQ ID NO: 2022792 - RNA, 19 nt, Homo sapiens
  misc_RNA (1)...(19): siRNA sense strand
gcuaaggcaccacaugauu

SEQ ID NO: 2022793 - RNA, 19 nt, Homo sapiens
  misc_RNA (1)...(19): siRNA sense strand
aaagaggagauagcaauua

SEQ ID NO: 2022794 - RNA, 19 nt, Homo sapiens
  misc_RNA (1)...(19): siRNA sense strand
caaagaggagauagcaauu

SEQ ID NO: 2022795 - RNA, 19 nt, Homo sapiens
  misc_RNA (1)...(19): siRNA sense strand
ggaaaggcagagacucauu

SEQ ID NO: 2022796 - RNA, 19 nt, Homo sapiens
  misc_RNA (1)...(19): siRNA sense strand
gaaagaaaacgcauuggaa

SEQ ID NO: 2022797 - RNA, 19 nt, Homo sapiens
  misc_RNA (1)...(19): siRNA sense strand
cuggaaagccauaugauuu

SEQ ID NO: 2022798 - RNA, 19 nt, Homo sapiens
  misc_RNA (1)...(19): siRNA sense strand
ucagcacugugacuucuuu

SEQ ID NO: 2022799 - RNA, 19 nt, Homo sapiens
  misc_RNA (1)...(19): siRNA sense strand
ucugugacgccacuaauua

SEQ ID NO: 2022800 - RNA, 19 nt, Homo sapiens
  misc_RNA (1)...(19): siRNA sense strand
gaaggaguugaauauauug

SEQ ID NO: 2022801 - RNA, 19 nt, Homo sapiens
  misc_RNA (1)...(19): siRNA sense strand
ggaacuaauucaaccuuuu

SEQ ID NO: 2022802 - RNA, 19 nt, Homo sapiens
  misc_RNA (1)...(19): siRNA sense strand
cggaauugcuucuuacgau

SEQ ID NO: 2022803 - RNA, 19 nt, Homo sapiens
  misc_RNA (1)...(19): siRNA sense strand
gaaucugagguggaaauua

SEQ ID NO: 2022804 - RNA, 19 nt, Homo sapiens
  misc_RNA (1)...(19): siRNA sense strand
agacacagcauaagaguuc

SEQ ID NO: 2022805 - RNA, 19 nt, Homo sapiens
  misc_RNA (1)...(19): siRNA sense strand
cgaagaggaaauugaguuu

SEQ ID NO: 2022806 - RNA, 19 nt, Homo sapiens
  misc_RNA (1)...(19): siRNA sense strand
ugaggagaauauugaauca

SEQ ID NO: 2022807 - RNA, 19 nt, Homo sapiens
  misc_RNA (1)...(19): siRNA sense strand
gcuggaaagccauaugauu

SEQ ID NO: 2022808 - RNA, 19 nt, Homo sapiens
  misc_RNA (1)...(19): siRNA sense strand
aaggaaggaucauagaugu

SEQ ID NO: 2022809 - RNA, 19 nt, Homo sapiens
  misc_RNA (1)...(19): siRNA sense strand
cagucggaauugcuucuua

SEQ ID NO: 2022810 - RNA, 19 nt, Homo sapiens
  misc_RNA (1)...(19): siRNA sense strand
ucaagccgguaguggaauu

SEQ ID NO: 2022811 - RNA, 19 nt, Homo sapiens
  misc_RNA (1)...(19): siRNA sense strand
ucaaagaggagauagcaau

SEQ ID NO: 2022812 - RNA, 19 nt, Homo sapiens
  misc_RNA (1)...(19): siRNA sense strand
uuucaaguguccuaucaaa

SEQ ID NO: 2022813 - RNA, 19 nt, Homo sapiens
  misc_RNA (1)...(19): siRNA sense strand
guguugaucucaccugaau

SEQ ID NO: 2022814 - RNA, 19 nt, Homo sapiens
  misc_RNA (1)...(19): siRNA sense strand
gguggaaauuauucauguu

SEQ ID NO: 2022815 - RNA, 19 nt, Homo sapiens
  misc_RNA (1)...(19): siRNA sense strand
aagaaaggagacucacuua

SEQ ID NO: 2022816 - RNA, 19 nt, Homo sapiens
  misc_RNA (1)...(19): siRNA sense strand
ggauacacggaacguuaua

SEQ ID NO: 2022817 - RNA, 19 nt, Homo sapiens
  misc_RNA (1)...(19): siRNA sense strand
cuaaggcaccacaugauuu

SEQ ID NO: 2022818 - RNA, 19 nt, Homo sapiens
  misc_RNA (1)...(19): siRNA sense strand
gauggacuccugagggaaa

SEQ ID NO: 2022819 - RNA, 19 nt, Homo sapiens
  misc_RNA (1)...(19): siRNA sense strand
gauucuauuugaaggaguu

SEQ ID NO: 2022820 - RNA, 19 nt, Homo sapiens
  misc_RNA (1)...(19): siRNA sense strand
uagccaacauggaagaaga

SEQ ID NO: 2022821 - RNA, 19 nt, Homo sapiens
  misc_RNA (1)...(19): siRNA sense strand
gaucucaccugaauuauuu

SEQ ID NO: 2022822 - RNA, 19 nt, Homo sapiens
  misc_RNA (1)...(19): siRNA sense strand
ucagaaggcugguauauuu

SEQ ID NO: 2022823 - RNA, 19 nt, Homo sapiens
  misc_RNA (1)...(19): siRNA sense strand
gaucauagaugucauagau

SEQ ID NO: 2022824 - RNA, 19 nt, Homo sapiens
  misc_RNA (1)...(19): siRNA sense strand
gaacagggcuauuacuuag

SEQ ID NO: 2022825 - RNA, 19 nt, Homo sapiens
  misc_RNA (1)...(19): siRNA sense strand
ggaagaagaugccagauca

SEQ ID NO: 2022826 - RNA, 19 nt, Homo sapiens
  misc_RNA (1)...(19): siRNA sense strand
caauagagcagcagucuua

SEQ ID NO: 2022827 - RNA, 19 nt, Homo sapiens
  misc_RNA (1)...(19): siRNA sense strand
ccaaggaaguggaacauuu

SEQ ID NO: 2022828 - RNA, 19 nt, Homo sapiens
  misc_RNA (1)...(19): siRNA sense strand
gaaaggagacucacuuaug

SEQ ID NO: 2022829 - RNA, 19 nt, Homo sapiens
  misc_RNA (1)...(19): siRNA sense strand
gaucuaauauccaaguuga

SEQ ID NO: 2022830 - RNA, 19 nt, Homo sapiens
  misc_RNA (1)...(19): siRNA sense strand
ucacuuaugugcacaauga

SEQ ID NO: 2022831 - RNA, 19 nt, Homo sapiens
  misc_RNA (1)...(19): siRNA sense strand
ggaaagaaauauccuacug

SEQ ID NO: 2022832 - RNA, 19 nt, Homo sapiens
  misc_RNA (1)...(19): siRNA sense strand
cuacugugcuguucauaua

SEQ ID NO: 2022833 - RNA, 19 nt, Homo sapiens
  misc_RNA (1)...(19): siRNA sense strand
gaagaggaaugauccagau

SEQ ID NO: 2022834 - RNA, 19 nt, Homo sapiens
  misc_RNA (1)...(19): siRNA sense strand
gcacugugacuucuuuaua

SEQ ID NO: 2022835 - RNA, 19 nt, Homo sapiens
  misc_RNA (1)...(19): siRNA sense strand
cuacaagccucaugaucua

SEQ ID NO: 2022836 - RNA, 19 nt, Homo sapiens
  misc_RNA (1)...(19): siRNA sense strand
ggaauugcuucuuacgauu

SEQ ID NO: 2022837 - RNA, 19 nt, Homo sapiens
  misc_RNA (1)...(19): siRNA sense strand
gaauugcuucuuacgauua

SEQ ID NO: 2022838 - RNA, 19 nt, Homo sapiens
  misc_RNA (1)...(19): siRNA sense strand
gaagaaaggagacucacuu

SEQ ID NO: 2022839 - RNA, 19 nt, Homo sapiens
  misc_RNA (1)...(19): siRNA sense strand
uagcaacgauauuuggaua

SEQ ID NO: 2022840 - RNA, 19 nt, Homo sapiens
  misc_RNA (1)...(19): siRNA sense strand
gaaggaaggaucauagaug

SEQ ID NO: 2022841 - RNA, 19 nt, Homo sapiens
  misc_RNA (1)...(19): siRNA sense strand
gaccguggcuacucacauu

SEQ ID NO: 2022842 - RNA, 19 nt, Homo sapiens
  misc_RNA (1)...(19): siRNA sense strand
aaaggagacucacuuaugu

SEQ ID NO: 2022843 - RNA, 19 nt, Homo sapiens
  misc_RNA (1)...(19): siRNA sense strand
gaagaggaaauugaguuua

SEQ ID NO: 2022844 - RNA, 19 nt, Homo sapiens
  misc_RNA (1)...(19): siRNA sense strand
aaucugagguggaaauuau

SEQ ID NO: 2022845 - RNA, 19 nt, Homo sapiens
  misc_RNA (1)...(19): siRNA sense strand
ucgagaagaagaacuauua

SEQ ID NO: 2022846 - RNA, 19 nt, Homo sapiens
  misc_RNA (1)...(19): siRNA sense strand
guugaucucaccugaauua

SEQ ID NO: 2022847 - RNA, 19 nt, Homo sapiens
  misc_RNA (1)...(19): siRNA sense strand
caacauggcagcagcaaug

SEQ ID NO: 2022848 - RNA, 19 nt, Homo sapiens
  misc_RNA (1)...(19): siRNA sense strand
gaagaagaacuauuaagag

SEQ ID NO: 2022849 - RNA, 19 nt, Homo sapiens
  misc_RNA (1)...(19): siRNA sense strand
gggagaacauuaugaacug

SEQ ID NO: 2022850 - RNA, 19 nt, Homo sapiens
  misc_RNA (1)...(19): siRNA sense strand
ggagagacacagcauaaga

SEQ ID NO: 2022851 - RNA, 19 nt, Homo sapiens
  misc_RNA (1)...(19): siRNA sense strand
ugaacagggcuauuacuua

SEQ ID NO: 2022852 - RNA, 19 nt, Homo sapiens
  misc_RNA (1)...(19): siRNA sense strand
gaaaggcagagacucauug

SEQ ID NO: 2022853 - RNA, 19 nt, Homo sapiens
  misc_RNA (1)...(19): siRNA sense strand
agaaugaacagggcuauua

SEQ ID NO: 2022854 - RNA, 19 nt, Homo sapiens
  misc_RNA (1)...(19): siRNA sense strand
gaaagaaauauccuacugu

SEQ ID NO: 2022855 - RNA, 19 nt, Homo sapiens
  misc_RNA (1)...(19): siRNA sense strand
cacugugacuucuuuauaa

SEQ ID NO: 2022856 - RNA, 19 nt, Homo sapiens
  misc_RNA (1)...(19): siRNA sense strand
ccaaguugaugaagucaga

SEQ ID NO: 2022857 - RNA, 19 nt, Homo sapiens
  misc_RNA (1)...(19): siRNA sense strand
gcauaagaguuccugaauc

SEQ ID NO: 2022858 - RNA, 19 nt, Homo sapiens
  misc_RNA (1)...(19): siRNA sense strand
ccaagaagaauuugauaga

SEQ ID NO: 2022859 - RNA, 19 nt, Homo sapiens
  misc_RNA (1)...(19): siRNA sense strand
gaagaugacccaacuugca

SEQ ID NO: 2022860 - RNA, 19 nt, Homo sapiens
  misc_RNA (1)...(19): siRNA sense strand
acaaugagcuagccaacau

SEQ ID NO: 2022861 - RNA, 19 nt, Homo sapiens
  misc_RNA (1)...(19): siRNA sense strand
cauaagaguuccugaaucg

SEQ ID NO: 2022862 - RNA, 19 nt, Homo sapiens
  misc_RNA (1)...(19): siRNA sense strand
uuacugcucuuacaugguu

SEQ ID NO: 2022863 - RNA, 19 nt, Homo sapiens
  misc_RNA (1)...(19): siRNA sense strand
caggauacacggaacguua

SEQ ID NO: 2022864 - RNA, 19 nt, Homo sapiens
  misc_RNA (1)...(19): siRNA sense strand
cagcagcaauggaaacaga

SEQ ID NO: 2022865 - RNA, 19 nt, Homo sapiens
  misc_RNA (1)...(19): siRNA sense strand
gcagauucauuccguuauc

SEQ ID NO: 2022866 - RNA, 19 nt, Homo sapiens
  misc_RNA (1)...(19): siRNA sense strand
uggaaagccauaugauuua

SEQ ID NO: 2022867 - RNA, 19 nt, Homo sapiens
  misc_RNA (1)...(19): siRNA sense strand
ucaaguguccuaucaaaga

SEQ ID NO: 2022868 - RNA, 19 nt, Homo sapiens
  misc_RNA (1)...(19): siRNA sense strand
gauuucaaguguccuauca

SEQ ID NO: 2022869 - RNA, 19 nt, Homo sapiens
  misc_RNA (1)...(19): siRNA sense strand
ggaaagcaaauauaaacga

SEQ ID NO: 2022870 - RNA, 19 nt, Homo sapiens
  misc_RNA (1)...(19): siRNA sense strand
ugucauagauaaggaacua

SEQ ID NO: 2022871 - RNA, 19 nt, Homo sapiens
  misc_RNA (1)...(19): siRNA sense strand
cuguggaucuucuaugaua

SEQ ID NO: 2022872 - RNA, 19 nt, Homo sapiens
  misc_RNA (1)...(19): siRNA sense strand
uaucaaguccugaagauga

SEQ ID NO: 2022873 - RNA, 19 nt, Homo sapiens
  misc_RNA (1)...(19): siRNA sense strand
ccagaagaauccacacugu

SEQ ID NO: 2022874 - RNA, 19 nt, Homo sapiens
  misc_RNA (1)...(19): siRNA sense strand
guaaguauaguaaccagaa

SEQ ID NO: 2022875 - RNA, 19 nt, Homo sapiens
  misc_RNA (1)...(19): siRNA sense strand
gaagaugauguuauggaaa

SEQ ID NO: 2022876 - RNA, 19 nt, Homo sapiens
  misc_RNA (1)...(19): siRNA sense strand
ggaaguggaacauuucugu

SEQ ID NO: 2022877 - RNA, 19 nt, Homo sapiens
  misc_RNA (1)...(19): siRNA sense strand
ugacuauacuccuccagaa

SEQ ID NO: 2022878 - RNA, 19 nt, Homo sapiens
  misc_RNA (1)...(19): siRNA sense strand
gcuaucaaguccugaagau

SEQ ID NO: 2022879 - RNA, 19 nt, Homo sapiens
  misc_RNA (1)...(19): siRNA sense strand
aguagaagaugauguuaug

SEQ ID NO: 2022880 - RNA, 19 nt, Homo sapiens
  misc_RNA (1)...(19): siRNA sense strand
ggaaggaucauagauguca

SEQ ID NO: 2022881 - RNA, 19 nt, Homo sapiens
  misc_RNA (1)...(19): siRNA sense strand
gaaacaaggagggcagauu

SEQ ID NO: 2022882 - RNA, 19 nt, Homo sapiens
  misc_RNA (1)...(19): siRNA sense strand
acagcuggguguugagaua

SEQ ID NO: 2022883 - RNA, 19 nt, Homo sapiens
  misc_RNA (1)...(19): siRNA sense strand
ggccuaaauuggagccuuu

SEQ ID NO: 2022884 - RNA, 19 nt, Homo sapiens
  misc_RNA (1)...(19): siRNA sense strand
gggcagauucauuccguua

SEQ ID NO: 2022885 - RNA, 19 nt, Homo sapiens
  misc_RNA (1)...(19): siRNA sense strand
uuggauaucuaacaucgua

SEQ ID NO: 2022886 - RNA, 19 nt, Homo sapiens
  misc_RNA (1)...(19): siRNA sense strand
agaagaugauguuauggaa

SEQ ID NO: 2022887 - RNA, 19 nt, Homo sapiens
  misc_RNA (1)...(19): siRNA sense strand
caggagagacacagcauaa

SEQ ID NO: 2022888 - RNA, 19 nt, Homo sapiens
  misc_RNA (1)...(19): siRNA sense strand
ggaaagccauaugauuuac

SEQ ID NO: 2022889 - RNA, 19 nt, Homo sapiens
  misc_RNA (1)...(19): siRNA sense strand
ugacgccacuaauuaucua

SEQ ID NO: 2022890 - RNA, 19 nt, Homo sapiens
  misc_RNA (1)...(19): siRNA sense strand
gaagucagaaggcugguau

SEQ ID NO: 2022891 - RNA, 19 nt, Homo sapiens
  misc_RNA (1)...(19): siRNA sense strand
gcuaaggcaccacaugauu

SEQ ID NO: 2022892 - RNA, 19 nt, Homo sapiens
  misc_RNA (1)...(19): siRNA sense strand
aaccuuggaucacguauug

SEQ ID NO: 2022893 - RNA, 19 nt, Homo sapiens
  misc_RNA (1)...(19): siRNA sense strand
aaagaggagauagcaauua

SEQ ID NO: 2022894 - RNA, 19 nt, Homo sapiens
  misc_RNA (1)...(19): siRNA sense strand
caaagaggagauagcaauu

SEQ ID NO: 2022895 - RNA, 19 nt, Homo sapiens
  misc_RNA (1)...(19): siRNA sense strand
ggaaaggcagagacucauu

SEQ ID NO: 2022896 - RNA, 19 nt, Homo sapiens
  misc_RNA (1)...(19): siRNA sense strand
caucguaaccagagaagaa

SEQ ID NO: 2022897 - RNA, 19 nt, Homo sapiens
  misc_RNA (1)...(19): siRNA sense strand
gaaagaaaacgcauuggaa

SEQ ID NO: 2022898 - RNA, 19 nt, Homo sapiens
  misc_RNA (1)...(19): siRNA sense strand
cuggaaagccauaugauuu

SEQ ID NO: 2022899 - RNA, 19 nt, Homo sapiens
  misc_RNA (1)...(19): siRNA sense strand
ucagcacugugacuucuuu

SEQ ID NO: 2022900 - RNA, 19 nt, Homo sapiens
  misc_RNA (1)...(19): siRNA sense strand
ucugugacgccacuaauua

SEQ ID NO: 2022901 - RNA, 19 nt, Homo sapiens
  misc_RNA (1)...(19): siRNA sense strand
gaaggaguugaauauauug

SEQ ID NO: 2022902 - RNA, 19 nt, Homo sapiens
  misc_RNA (1)...(19): siRNA sense strand
ggaacuaauucaaccuuuu

SEQ ID NO: 2022903 - RNA, 19 nt, Homo sapiens
  misc_RNA (1)...(19): siRNA sense strand
cggaauugcuucuuacgau

SEQ ID NO: 2022904 - RNA, 19 nt, Homo sapiens
  misc_RNA (1)...(19): siRNA sense strand
gaaucugagguggaaauua

SEQ ID NO: 2022905 - RNA, 19 nt, Homo sapiens
  misc_RNA (1)...(19): siRNA sense strand
agacacagcauaagaguuc

SEQ ID NO: 2022906 - RNA, 19 nt, Homo sapiens
  misc_RNA (1)...(19): siRNA sense strand
cgaagaggaaauugaguuu

SEQ ID NO: 2022907 - RNA, 19 nt, Homo sapiens
  misc_RNA (1)...(19): siRNA sense strand
cagucggaauugcuucuua

SEQ ID NO: 2022908 - RNA, 19 nt, Homo sapiens
  misc_RNA (1)...(19): siRNA sense strand
gcuggaaagccauaugauu

SEQ ID NO: 2022909 - RNA, 19 nt, Homo sapiens
  misc_RNA (1)...(19): siRNA sense strand
ugaggagaauauugaauca

SEQ ID NO: 2022910 - RNA, 19 nt, Homo sapiens
  misc_RNA (1)...(19): siRNA sense strand
aaggaaggaucauagaugu

SEQ ID NO: 2022911 - RNA, 19 nt, Homo sapiens
  misc_RNA (1)...(19): siRNA sense strand
ucaagccgguaguggaauu

SEQ ID NO: 2022912 - RNA, 19 nt, Homo sapiens
  misc_RNA (1)...(19): siRNA sense strand
ucaaagaggagauagcaau

SEQ ID NO: 2022913 - RNA, 19 nt, Homo sapiens
  misc_RNA (1)...(19): siRNA sense strand
uuucaaguguccuaucaaa

SEQ ID NO: 2022914 - RNA, 19 nt, Homo sapiens
  misc_RNA (1)...(19): siRNA sense strand
guguugaucucaccugaau

SEQ ID NO: 2022915 - RNA, 19 nt, Homo sapiens
  misc_RNA (1)...(19): siRNA sense strand
gguggaaauuauucauguu

SEQ ID NO: 2022916 - RNA, 19 nt, Homo sapiens
  misc_RNA (1)...(19): siRNA sense strand
uagccaacauggaagaaga

SEQ ID NO: 2022917 - RNA, 19 nt, Homo sapiens
  misc_RNA (1)...(19): siRNA sense strand
cuaaggcaccacaugauuu

SEQ ID NO: 2022918 - RNA, 19 nt, Homo sapiens
  misc_RNA (1)...(19): siRNA sense strand
ggauacacggaacguuaua

SEQ ID NO: 2022919 - RNA, 19 nt, Homo sapiens
  misc_RNA (1)...(19): siRNA sense strand
gauggacuccugagggaaa

SEQ ID NO: 2022920 - RNA, 19 nt, Homo sapiens
  misc_RNA (1)...(19): siRNA sense strand
gauucuauuugaaggaguu

SEQ ID NO: 2022921 - RNA, 19 nt, Homo sapiens
  misc_RNA (1)...(19): siRNA sense strand
gaucucaccugaauuauuu

SEQ ID NO: 2022922 - RNA, 19 nt, Homo sapiens
  misc_RNA (1)...(19): siRNA sense strand
ucagaaggcugguauauuu

SEQ ID NO: 2022923 - RNA, 19 nt, Homo sapiens
  misc_RNA (1)...(19): siRNA sense strand
gaucauagaugucauagau

SEQ ID NO: 2022924 - RNA, 19 nt, Homo sapiens
  misc_RNA (1)...(19): siRNA sense strand
gaacagggcuauuacuuag

SEQ ID NO: 2022925 - RNA, 19 nt, Homo sapiens
  misc_RNA (1)...(19): siRNA sense strand
ggaagaagaugccagauca

SEQ ID NO: 2022926 - RNA, 19 nt, Homo sapiens
  misc_RNA (1)...(19): siRNA sense strand
caauagagcagcagucuua

SEQ ID NO: 2022927 - RNA, 19 nt, Homo sapiens
  misc_RNA (1)...(19): siRNA sense strand
ccaaggaaguggaacauuu

SEQ ID NO: 2022928 - RNA, 19 nt, Homo sapiens
  misc_RNA (1)...(19): siRNA sense strand
gaaaggagacucacuuaug

SEQ ID NO: 2022929 - RNA, 19 nt, Homo sapiens
  misc_RNA (1)...(19): siRNA sense strand
gaucuaauauccaaguuga

SEQ ID NO: 2022930 - RNA, 19 nt, Homo sapiens
  misc_RNA (1)...(19): siRNA sense strand
ucacuuaugugcacaauga

SEQ ID NO: 2022931 - RNA, 19 nt, Homo sapiens
  misc_RNA (1)...(19): siRNA sense strand
ggaaagaaauauccuacug

SEQ ID NO: 2022932 - RNA, 19 nt, Homo sapiens
  misc_RNA (1)...(19): siRNA sense strand
cuacugugcuguucauaua

SEQ ID NO: 2022933 - RNA, 19 nt, Homo sapiens
  misc_RNA (1)...(19): siRNA sense strand
gaagaggaaugauccagau

SEQ ID NO: 2022934 - RNA, 19 nt, Homo sapiens
  misc_RNA (1)...(19): siRNA sense strand
gcacugugacuucuuuaua

SEQ ID NO: 2022935 - RNA, 19 nt, Homo sapiens
  misc_RNA (1)...(19): siRNA sense strand
cuacaagccucaugaucua

SEQ ID NO: 2022936 - RNA, 19 nt, Homo sapiens
  misc_RNA (1)...(19): siRNA sense strand
ggaauugcuucuuacgauu

SEQ ID NO: 2022937 - RNA, 19 nt, Homo sapiens
  misc_RNA (1)...(19): siRNA sense strand
gaauugcuucuuacgauua

SEQ ID NO: 2022938 - RNA, 19 nt, Homo sapiens
  misc_RNA (1)...(19): siRNA sense strand
gaagaaaggagacucacuu

SEQ ID NO: 2022939 - RNA, 19 nt, Homo sapiens
  misc_RNA (1)...(19): siRNA sense strand
uagcaacgauauuuggaua

SEQ ID NO: 2022940 - RNA, 19 nt, Homo sapiens
  misc_RNA (1)...(19): siRNA sense strand
gaaggaaggaucauagaug

SEQ ID NO: 2022941 - RNA, 19 nt, Homo sapiens
  misc_RNA (1)...(19): siRNA sense strand
gaccguggcuacucacauu

SEQ ID NO: 2022942 - RNA, 19 nt, Homo sapiens
  misc_RNA (1)...(19): siRNA sense strand
aaaggagacucacuuaugu

SEQ ID NO: 2022943 - RNA, 19 nt, Homo sapiens
  misc_RNA (1)...(19): siRNA sense strand
gaagaggaaauugaguuua

SEQ ID NO: 2022944 - RNA, 19 nt, Homo sapiens
  misc_RNA (1)...(19): siRNA sense strand
aaucugagguggaaauuau

SEQ ID NO: 2022945 - RNA, 19 nt, Homo sapiens
  misc_RNA (1)...(19): siRNA sense strand
ucgagaagaagaacuauua

SEQ ID NO: 2022946 - RNA, 19 nt, Homo sapiens
  misc_RNA (1)...(19): siRNA sense strand
guugaucucaccugaauua

SEQ ID NO: 2022947 - RNA, 19 nt, Homo sapiens
  misc_RNA (1)...(19): siRNA sense strand
caacauggcagcagcaaug

SEQ ID NO: 2022948 - RNA, 19 nt, Homo sapiens
  misc_RNA (1)...(19): siRNA sense strand
gaagaagaacuauuaagag

SEQ ID NO: 2022949 - RNA, 19 nt, Homo sapiens
  misc_RNA (1)...(19): siRNA sense strand
gggagaacauuaugaacug

SEQ ID NO: 2022950 - RNA, 19 nt, Homo sapiens
  misc_RNA (1)...(19): siRNA sense strand
ggagagacacagcauaaga

SEQ ID NO: 2022951 - RNA, 19 nt, Homo sapiens
  misc_RNA (1)...(19): siRNA sense strand
ugaacagggcuauuacuua

SEQ ID NO: 2022952 - RNA, 19 nt, Homo sapiens
  misc_RNA (1)...(19): siRNA sense strand
gaaaggcagagacucauug

SEQ ID NO: 2022953 - RNA, 19 nt, Homo sapiens
  misc_RNA (1)...(19): siRNA sense strand
agaaugaacagggcuauua

SEQ ID NO: 2022954 - RNA, 19 nt, Homo sapiens
  misc_RNA (1)...(19): siRNA sense strand
gaaagaaauauccuacugu

SEQ ID NO: 2022955 - RNA, 19 nt, Homo sapiens
  misc_RNA (1)...(19): siRNA sense strand
cacugugacuucuuuauaa

SEQ ID NO: 2022956 - RNA, 19 nt, Homo sapiens
  misc_RNA (1)...(19): siRNA sense strand
ccaaguugaugaagucaga

SEQ ID NO: 2022957 - RNA, 19 nt, Homo sapiens
  misc_RNA (1)...(19): siRNA sense strand
gcauaagaguuccugaauc

SEQ ID NO: 2022958 - RNA, 19 nt, Homo sapiens
  misc_RNA (1)...(19): siRNA sense strand
ccaagaagaauuugauaga

SEQ ID NO: 2022959 - RNA, 19 nt, Homo sapiens
  misc_RNA (1)...(19): siRNA sense strand
gaagaugacccaacuugca

SEQ ID NO: 2022960 - RNA, 19 nt, Homo sapiens
  misc_RNA (1)...(19): siRNA sense strand
acaaugagcuagccaacau

SEQ ID NO: 2022961 - RNA, 19 nt, Homo sapiens
  misc_RNA (1)...(19): siRNA sense strand
cauaagaguuccugaaucg

SEQ ID NO: 2022962 - RNA, 19 nt, Homo sapiens
  misc_RNA (1)...(19): siRNA sense strand
uuacugcucuuacaugguu

SEQ ID NO: 2022963 - RNA, 19 nt, Homo sapiens
  misc_RNA (1)...(19): siRNA sense strand
caggauacacggaacguua

SEQ ID NO: 2022964 - RNA, 19 nt, Homo sapiens
  misc_RNA (1)...(19): siRNA sense strand
cagcagcaauggaaacaga

SEQ ID NO: 2022965 - RNA, 19 nt, Homo sapiens
  misc_RNA (1)...(19): siRNA sense strand
gcagauucauuccguuauc

SEQ ID NO: 2022966 - RNA, 19 nt, Homo sapiens
  misc_RNA (1)...(19): siRNA sense strand
uggaaagccauaugauuua

SEQ ID NO: 2022967 - RNA, 19 nt, Homo sapiens
  misc_RNA (1)...(19): siRNA sense strand
ucaaguguccuaucaaaga

SEQ ID NO: 2022968 - RNA, 19 nt, Homo sapiens
  misc_RNA (1)...(19): siRNA sense strand
gauuucaaguguccuauca

SEQ ID NO: 2022969 - RNA, 19 nt, Homo sapiens
  misc_RNA (1)...(19): siRNA sense strand
ggaaagcaaauauaaacga

SEQ ID NO: 2022970 - RNA, 19 nt, Homo sapiens
  misc_RNA (1)...(19): siRNA sense strand
ugucauagauaaggaacua

SEQ ID NO: 2022971 - RNA, 19 nt, Homo sapiens
  misc_RNA (1)...(19): siRNA sense strand
cuguggaucuucuaugaua

SEQ ID NO: 2022972 - RNA, 19 nt, Homo sapiens
  misc_RNA (1)...(19): siRNA sense strand
uaucaaguccugaagauga

SEQ ID NO: 2022973 - RNA, 19 nt, Homo sapiens
  misc_RNA (1)...(19): siRNA sense strand
ccagaagaauccacacugu

SEQ ID NO: 2022974 - RNA, 19 nt, Homo sapiens
  misc_RNA (1)...(19): siRNA sense strand
guaaguauaguaaccagaa

SEQ ID NO: 2022975 - RNA, 19 nt, Homo sapiens
  misc_RNA (1)...(19): siRNA sense strand
gaagaugauguuauggaaa

SEQ ID NO: 2022976 - RNA, 19 nt, Homo sapiens
  misc_RNA (1)...(19): siRNA sense strand
ggaaguggaacauuucugu

SEQ ID NO: 2022977 - RNA, 19 nt, Homo sapiens
  misc_RNA (1)...(19): siRNA sense strand
ugacuauacuccuccagaa

SEQ ID NO: 2022978 - RNA, 19 nt, Homo sapiens
  misc_RNA (1)...(19): siRNA sense strand
gcuaucaaguccugaagau

SEQ ID NO: 2022979 - RNA, 19 nt, Homo sapiens
  misc_RNA (1)...(19): siRNA sense strand
aguagaagaugauguuaug

SEQ ID NO: 2022980 - RNA, 19 nt, Homo sapiens
  misc_RNA (1)...(19): siRNA sense strand
ggaaggaucauagauguca

SEQ ID NO: 2022981 - RNA, 19 nt, Homo sapiens
  misc_RNA (1)...(19): siRNA sense strand
gaaacaaggagggcagauu

SEQ ID NO: 2022982 - RNA, 19 nt, Homo sapiens
  misc_RNA (1)...(19): siRNA sense strand
acagcuggguguugagaua

SEQ ID NO: 2022983 - RNA, 19 nt, Homo sapiens
  misc_RNA (1)...(19): siRNA sense strand
ggccuaaauuggagccuuu

SEQ ID NO: 2022984 - RNA, 19 nt, Homo sapiens
  misc_RNA (1)...(19): siRNA sense strand
gggcagauucauuccguua

SEQ ID NO: 2022985 - RNA, 19 nt, Homo sapiens
  misc_RNA (1)...(19): siRNA sense strand
uuggauaucuaacaucgua

SEQ ID NO: 2022986 - RNA, 19 nt, Homo sapiens
  misc_RNA (1)...(19): siRNA sense strand
agaagaugauguuauggaa

SEQ ID NO: 2022987 - RNA, 19 nt, Homo sapiens
  misc_RNA (1)...(19): siRNA sense strand
caggagagacacagcauaa

SEQ ID NO: 2022988 - RNA, 19 nt, Homo sapiens
  misc_RNA (1)...(19): siRNA sense strand
ggaaagccauaugauuuac

SEQ ID NO: 2022989 - RNA, 19 nt, Homo sapiens
  misc_RNA (1)...(19): siRNA sense strand
ugacgccacuaauuaucua

SEQ ID NO: 2022990 - RNA, 19 nt, Homo sapiens
  misc_RNA (1)...(19): siRNA sense strand
gaagucagaaggcugguau

SEQ ID NO: 2022991 - RNA, 19 nt, Homo sapiens
  misc_RNA (1)...(19): siRNA sense strand
gcuaaggcaccacaugauu

SEQ ID NO: 2022992 - RNA, 19 nt, Homo sapiens
  misc_RNA (1)...(19): siRNA sense strand
aaccuuggaucacguauug

SEQ ID NO: 2022993 - RNA, 19 nt, Homo sapiens
  misc_RNA (1)...(19): siRNA sense strand
aaagaggagauagcaauua

SEQ ID NO: 2022994 - RNA, 19 nt, Homo sapiens
  misc_RNA (1)...(19): siRNA sense strand
caaagaggagauagcaauu

SEQ ID NO: 2022995 - RNA, 19 nt, Homo sapiens
  misc_RNA (1)...(19): siRNA sense strand
ggaaaggcagagacucauu

SEQ ID NO: 2022996 - RNA, 19 nt, Homo sapiens
  misc_RNA (1)...(19): siRNA sense strand
caucguaaccagagaagaa

SEQ ID NO: 2022997 - RNA, 19 nt, Homo sapiens
  misc_RNA (1)...(19): siRNA sense strand
gaaagaaaacgcauuggaa

SEQ ID NO: 2022998 - RNA, 19 nt, Homo sapiens
  misc_RNA (1)...(19): siRNA sense strand
cuggaaagccauaugauuu

SEQ ID NO: 2022999 - RNA, 19 nt, Homo sapiens
  misc_RNA (1)...(19): siRNA sense strand
ucagcacugugacuucuuu

SEQ ID NO: 2023000 - RNA, 19 nt, Homo sapiens
  misc_RNA (1)...(19): siRNA sense strand
ucugugacgccacuaauua

SEQ ID NO: 2023001 - RNA, 19 nt, Homo sapiens
  misc_RNA (1)...(19): siRNA sense strand
gaaggaguugaauauauug

SEQ ID NO: 2023002 - RNA, 19 nt, Homo sapiens
  misc_RNA (1)...(19): siRNA sense strand
ggaacuaauucaaccuuuu

SEQ ID NO: 2023003 - RNA, 19 nt, Homo sapiens
  misc_RNA (1)...(19): siRNA sense strand
cggaauugcuucuuacgau

SEQ ID NO: 2023004 - RNA, 19 nt, Homo sapiens
  misc_RNA (1)...(19): siRNA sense strand
gaaucugagguggaaauua

SEQ ID NO: 2023005 - RNA, 19 nt, Homo sapiens
  misc_RNA (1)...(19): siRNA sense strand
agacacagcauaagaguuc

SEQ ID NO: 2023006 - RNA, 19 nt, Homo sapiens
  misc_RNA (1)...(19): siRNA sense strand
cgaagaggaaauugaguuu

SEQ ID NO: 2023007 - RNA, 19 nt, Homo sapiens
  misc_RNA (1)...(19): siRNA sense strand
cagucggaauugcuucuua

SEQ ID NO: 2023008 - RNA, 19 nt, Homo sapiens
  misc_RNA (1)...(19): siRNA sense strand
gcuggaaagccauaugauu

SEQ ID NO: 2023009 - RNA, 19 nt, Homo sapiens
  misc_RNA (1)...(19): siRNA sense strand
ugaggagaauauugaauca

SEQ ID NO: 2023010 - RNA, 19 nt, Homo sapiens
  misc_RNA (1)...(19): siRNA sense strand
aaggaaggaucauagaugu

SEQ ID NO: 2023011 - RNA, 19 nt, Homo sapiens
  misc_RNA (1)...(19): siRNA sense strand
ucaagccgguaguggaauu

SEQ ID NO: 2023012 - RNA, 19 nt, Homo sapiens
  misc_RNA (1)...(19): siRNA sense strand
ucaaagaggagauagcaau

SEQ ID NO: 2023013 - RNA, 19 nt, Homo sapiens
  misc_RNA (1)...(19): siRNA sense strand
uuucaaguguccuaucaaa

SEQ ID NO: 2023014 - RNA, 19 nt, Homo sapiens
  misc_RNA (1)...(19): siRNA sense strand
guguugaucucaccugaau

SEQ ID NO: 2023015 - RNA, 19 nt, Homo sapiens
  misc_RNA (1)...(19): siRNA sense strand
gguggaaauuauucauguu

SEQ ID NO: 2023016 - RNA, 19 nt, Homo sapiens
  misc_RNA (1)...(19): siRNA sense strand
uagccaacauggaagaaga

SEQ ID NO: 2023017 - RNA, 19 nt, Homo sapiens
  misc_RNA (1)...(19): siRNA sense strand
cuaaggcaccacaugauuu

SEQ ID NO: 2023018 - RNA, 19 nt, Homo sapiens
  misc_RNA (1)...(19): siRNA sense strand
ggauacacggaacguuaua

SEQ ID NO: 2023019 - RNA, 19 nt, Homo sapiens
  misc_RNA (1)...(19): siRNA sense strand
gauggacuccugagggaaa

SEQ ID NO: 2023020 - RNA, 19 nt, Homo sapiens
  misc_RNA (1)...(19): siRNA sense strand
gauucuauuugaaggaguu

SEQ ID NO: 2023021 - RNA, 19 nt, Homo sapiens
  misc_RNA (1)...(19): siRNA sense strand
cagaacagccugcaaauua

SEQ ID NO: 2023022 - RNA, 19 nt, Homo sapiens
  misc_RNA (1)...(19): siRNA sense strand
ggaaaucuccugcaaagaa

SEQ ID NO: 2023023 - RNA, 19 nt, Homo sapiens
  misc_RNA (1)...(19): siRNA sense strand
caacaaagacagcuuauug

SEQ ID NO: 2023024 - RNA, 19 nt, Homo sapiens
  misc_RNA (1)...(19): siRNA sense strand
uggaagagcugaugaaguu

SEQ ID NO: 2023025 - RNA, 19 nt, Homo sapiens
  misc_RNA (1)...(19): siRNA sense strand
guugauaucuggaacauga

SEQ ID NO: 2023026 - RNA, 19 nt, Homo sapiens
  misc_RNA (1)...(19): siRNA sense strand
ggaagaccauggcagagaa

SEQ ID NO: 2023027 - RNA, 19 nt, Homo sapiens
  misc_RNA (1)...(19): siRNA sense strand
gacuugagcuuuaacuuug

SEQ ID NO: 2023028 - RNA, 19 nt, Homo sapiens
  misc_RNA (1)...(19): siRNA sense strand
ucauacgacuaucaacuua

SEQ ID NO: 2023029 - RNA, 19 nt, Homo sapiens
  misc_RNA (1)...(19): siRNA sense strand
gcacaggcuugcccauguu

SEQ ID NO: 2023030 - RNA, 19 nt, Homo sapiens
  misc_RNA (1)...(19): siRNA sense strand
gaaaugcgugcucagaauu

SEQ ID NO: 2023031 - RNA, 19 nt, Homo sapiens
  misc_RNA (1)...(19): siRNA sense strand
gaaaucuccugcaaagaag

SEQ ID NO: 2023032 - RNA, 19 nt, Homo sapiens
  misc_RNA (1)...(19): siRNA sense strand
uccaauggcuuaaugauau

SEQ ID NO: 2023033 - RNA, 19 nt, Homo sapiens
  misc_RNA (1)...(19): siRNA sense strand
ccacugacuugagcuuuaa

SEQ ID NO: 2023034 - RNA, 19 nt, Homo sapiens
  misc_RNA (1)...(19): siRNA sense strand
aaacaacaaagacagcuua

SEQ ID NO: 2023035 - RNA, 19 nt, Homo sapiens
  misc_RNA (1)...(19): siRNA sense strand
uagcaaguuugaccaguuu

SEQ ID NO: 2023036 - RNA, 19 nt, Homo sapiens
  misc_RNA (1)...(19): siRNA sense strand
cccaacagcugucuuugaa

SEQ ID NO: 2023037 - RNA, 19 nt, Homo sapiens
  misc_RNA (1)...(19): siRNA sense strand
gaggaacaccgucuuauag

SEQ ID NO: 2023038 - RNA, 19 nt, Homo sapiens
  misc_RNA (1)...(19): siRNA sense strand
gaugaggaacaccgucuua

SEQ ID NO: 2023039 - RNA, 19 nt, Homo sapiens
  misc_RNA (1)...(19): siRNA sense strand
agaggcagcuguucauaga

SEQ ID NO: 2023040 - RNA, 19 nt, Homo sapiens
  misc_RNA (1)...(19): siRNA sense strand
gaagaggcagcuguucaua

SEQ ID NO: 2023041 - RNA, 19 nt, Homo sapiens
  misc_RNA (1)...(19): siRNA sense strand
gcagagaaagauaaugcua

SEQ ID NO: 2023042 - RNA, 19 nt, Homo sapiens
  misc_RNA (1)...(19): siRNA sense strand
ccacagcagagaaagauaa

SEQ ID NO: 2023043 - RNA, 19 nt, Homo sapiens
  misc_RNA (1)...(19): siRNA sense strand
gccacagggucaccacaua

SEQ ID NO: 2023044 - RNA, 19 nt, Homo sapiens
  misc_RNA (1)...(19): siRNA sense strand
aagcugagccaugcaauua

SEQ ID NO: 2023045 - RNA, 19 nt, Homo sapiens
  misc_RNA (1)...(19): siRNA sense strand
gaggcaaguugacgguauu

SEQ ID NO: 2023046 - RNA, 19 nt, Homo sapiens
  misc_RNA (1)...(19): siRNA sense strand
ugacuugagcuuuaacuuu

SEQ ID NO: 2023047 - RNA, 19 nt, Homo sapiens
  misc_RNA (1)...(19): siRNA sense strand
gugagaguaugauggguuu

SEQ ID NO: 2023048 - RNA, 19 nt, Homo sapiens
  misc_RNA (1)...(19): siRNA sense strand
ggacaaauugagauauguu

SEQ ID NO: 2023049 - RNA, 19 nt, Homo sapiens
  misc_RNA (1)...(19): siRNA sense strand
ugaggaacaccgucuuaua

SEQ ID NO: 2023050 - RNA, 19 nt, Homo sapiens
  misc_RNA (1)...(19): siRNA sense strand
ccacuugaccuugcacaua

SEQ ID NO: 2023051 - RNA, 19 nt, Homo sapiens
  misc_RNA (1)...(19): siRNA sense strand
ccaauggcuuaaugauauu

SEQ ID NO: 2023052 - RNA, 19 nt, Homo sapiens
  misc_RNA (1)...(19): siRNA sense strand
agaaaugcgugcucagaau

SEQ ID NO: 2023053 - RNA, 19 nt, Homo sapiens
  misc_RNA (1)...(19): siRNA sense strand
gcaaccagcaccagaugaa

SEQ ID NO: 2023054 - RNA, 19 nt, Homo sapiens
  misc_RNA (1)...(19): siRNA sense strand
gcaggaggccuucgcacaa

SEQ ID NO: 2023055 - RNA, 19 nt, Homo sapiens
  misc_RNA (1)...(19): siRNA sense strand
gaagcugagccaugcaauu

SEQ ID NO: 2023056 - RNA, 19 nt, Homo sapiens
  misc_RNA (1)...(19): siRNA sense strand
gagaagaggcagcuguuca

SEQ ID NO: 2023057 - RNA, 19 nt, Homo sapiens
  misc_RNA (1)...(19): siRNA sense strand
cgagacaauggccuuaaua

SEQ ID NO: 2023058 - RNA, 19 nt, Homo sapiens
  misc_RNA (1)...(19): siRNA sense strand
cccacugacuugagcuuua

SEQ ID NO: 2023059 - RNA, 19 nt, Homo sapiens
  misc_RNA (1)...(19): siRNA sense strand
gaacaagcgccuuccuucu

SEQ ID NO: 2023060 - RNA, 19 nt, Homo sapiens
  misc_RNA (1)...(19): siRNA sense strand
uuaauacacuggaccauac

SEQ ID NO: 2023061 - RNA, 19 nt, Homo sapiens
  misc_RNA (1)...(19): siRNA sense strand
gcaaaggaaggaugaacug

SEQ ID NO: 2023062 - RNA, 19 nt, Homo sapiens
  misc_RNA (1)...(19): siRNA sense strand
cacuugaccuugcacauau

SEQ ID NO: 2023063 - RNA, 19 nt, Homo sapiens
  misc_RNA (1)...(19): siRNA sense strand
gaaaccacuugaccuugca

SEQ ID NO: 2023064 - RNA, 19 nt, Homo sapiens
  misc_RNA (1)...(19): siRNA sense strand
cagagaaagauaaugcuaa

SEQ ID NO: 2023065 - RNA, 19 nt, Homo sapiens
  misc_RNA (1)...(19): siRNA sense strand
ccaaauuaguguggaacaa

SEQ ID NO: 2023066 - RNA, 19 nt, Homo sapiens
  misc_RNA (1)...(19): siRNA sense strand
gaacuggagcagaggaugu

SEQ ID NO: 2023067 - RNA, 19 nt, Homo sapiens
  misc_RNA (1)...(19): siRNA sense strand
ggaacaagcggaagaccau

SEQ ID NO: 2023068 - RNA, 19 nt, Homo sapiens
  misc_RNA (1)...(19): siRNA sense strand
uuacagaacagccugcaaa

SEQ ID NO: 2023069 - RNA, 19 nt, Homo sapiens
  misc_RNA (1)...(19): siRNA sense strand
aggcagcuguucauagaaa

SEQ ID NO: 2023070 - RNA, 19 nt, Homo sapiens
  misc_RNA (1)...(19): siRNA sense strand
ugaaggaaguucugaagcu

SEQ ID NO: 2023071 - RNA, 19 nt, Homo sapiens
  misc_RNA (1)...(19): siRNA sense strand
cgaggcaaguugacgguau

SEQ ID NO: 2023072 - RNA, 19 nt, Homo sapiens
  misc_RNA (1)...(19): siRNA sense strand
ggaacaccgucuuauagcu

SEQ ID NO: 2023073 - RNA, 19 nt, Homo sapiens
  misc_RNA (1)...(19): siRNA sense strand
gcaauuaguaaaucuuugg

SEQ ID NO: 2023074 - RNA, 19 nt, Homo sapiens
  misc_RNA (1)...(19): siRNA sense strand
gcugagccaugcaauuagu

SEQ ID NO: 2023075 - RNA, 19 nt, Homo sapiens
  misc_RNA (1)...(19): siRNA sense strand
acaauggccuuaauacacu

SEQ ID NO: 2023076 - RNA, 19 nt, Homo sapiens
  misc_RNA (1)...(19): siRNA sense strand
gaagggccaucuuuugguu

SEQ ID NO: 2023077 - RNA, 19 nt, Homo sapiens
  misc_RNA (1)...(19): siRNA sense strand
cuccucaacuuuaugauug

SEQ ID NO: 2023078 - RNA, 19 nt, Homo sapiens
  misc_RNA (1)...(19): siRNA sense strand
gacaauggccuuaauacac

SEQ ID NO: 2023079 - RNA, 19 nt, Homo sapiens
  misc_RNA (1)...(19): siRNA sense strand
caaauuaguguggaacaau

SEQ ID NO: 2023080 - RNA, 19 nt, Homo sapiens
  misc_RNA (1)...(19): siRNA sense strand
ucaccaaauuaguguggaa

SEQ ID NO: 2023081 - RNA, 19 nt, Homo sapiens
  misc_RNA (1)...(19): siRNA sense strand
acuaucaacuuacagaaca

SEQ ID NO: 2023082 - RNA, 19 nt, Homo sapiens
  misc_RNA (1)...(19): siRNA sense strand
agaacagccugcaaauuac

SEQ ID NO: 2023083 - RNA, 19 nt, Homo sapiens
  misc_RNA (1)...(19): siRNA sense strand
gcucccaacagcugucuuu

SEQ ID NO: 2023084 - RNA, 19 nt, Homo sapiens
  misc_RNA (1)...(19): siRNA sense strand
uuagcaaguuugaccaguu

SEQ ID NO: 2023085 - RNA, 19 nt, Homo sapiens
  misc_RNA (1)...(19): siRNA sense strand
aacaagcgccuuccuucua

SEQ ID NO: 2023086 - RNA, 19 nt, Homo sapiens
  misc_RNA (1)...(19): siRNA sense strand
aaauuaguguggaacaauc

SEQ ID NO: 2023087 - RNA, 19 nt, Homo sapiens
  misc_RNA (1)...(19): siRNA sense strand
gaccauaccaccgagauca

SEQ ID NO: 2023088 - RNA, 19 nt, Homo sapiens
  misc_RNA (1)...(19): siRNA sense strand
gccaugcaauuaguaaauc

SEQ ID NO: 2023089 - RNA, 19 nt, Homo sapiens
  misc_RNA (1)...(19): siRNA sense strand
uuggaaaucuccugcaaag

SEQ ID NO: 2023090 - RNA, 19 nt, Homo sapiens
  misc_RNA (1)...(19): siRNA sense strand
ccgagacaauggccuuaau

SEQ ID NO: 2023091 - RNA, 19 nt, Homo sapiens
  misc_RNA (1)...(19): siRNA sense strand
ugacucguccucccacuga

SEQ ID NO: 2023092 - RNA, 19 nt, Homo sapiens
  misc_RNA (1)...(19): siRNA sense strand
ugaaugacaccaugguuag

SEQ ID NO: 2023093 - RNA, 19 nt, Homo sapiens
  misc_RNA (1)...(19): siRNA sense strand
gaugucauacgacuaucaa

SEQ ID NO: 2023094 - RNA, 19 nt, Homo sapiens
  misc_RNA (1)...(19): siRNA sense strand
gagacaauggccuuaauac

SEQ ID NO: 2023095 - RNA, 19 nt, Homo sapiens
  misc_RNA (1)...(19): siRNA sense strand
cuggacaaauugagauaug

SEQ ID NO: 2023096 - RNA, 19 nt, Homo sapiens
  misc_RNA (1)...(19): siRNA sense strand
uagaaaugcgugcucagaa

SEQ ID NO: 2023097 - RNA, 19 nt, Homo sapiens
  misc_RNA (1)...(19): siRNA sense strand
agagaaaccacuugaccuu

SEQ ID NO: 2023098 - RNA, 19 nt, Homo sapiens
  misc_RNA (1)...(19): siRNA sense strand
auacgacuaucaacuuaca

SEQ ID NO: 2023099 - RNA, 19 nt, Homo sapiens
  misc_RNA (1)...(19): siRNA sense strand
ccagaugucagauuccaau

SEQ ID NO: 2023100 - RNA, 19 nt, Homo sapiens
  misc_RNA (1)...(19): siRNA sense strand
gaauuuugaugucauacga

SEQ ID NO: 2023101 - RNA, 19 nt, Homo sapiens
  misc_RNA (1)...(19): siRNA sense strand
ugaccuugcacauauaguu

SEQ ID NO: 2023102 - RNA, 19 nt, Homo sapiens
  misc_RNA (1)...(19): siRNA sense strand
acaagcgccuuccuucuac

SEQ ID NO: 2023103 - RNA, 19 nt, Homo sapiens
  misc_RNA (1)...(19): siRNA sense strand
ucucccagaugucagauuc

SEQ ID NO: 2023104 - RNA, 19 nt, Homo sapiens
  misc_RNA (1)...(19): siRNA sense strand
cuuaauacacuggaccaua

SEQ ID NO: 2023105 - RNA, 19 nt, Homo sapiens
  misc_RNA (1)...(19): siRNA sense strand
gaugccaacaaacaacaaa

SEQ ID NO: 2023106 - RNA, 19 nt, Homo sapiens
  misc_RNA (1)...(19): siRNA sense strand
augaaugacaccaugguua

SEQ ID NO: 2023107 - RNA, 19 nt, Homo sapiens
  misc_RNA (1)...(19): siRNA sense strand
gacgguauuuucaguuaaa

SEQ ID NO: 2023108 - RNA, 19 nt, Homo sapiens
  misc_RNA (1)...(19): siRNA sense strand
ucuccuccaucuacuauca

SEQ ID NO: 2023109 - RNA, 19 nt, Homo sapiens
  misc_RNA (1)...(19): siRNA sense strand
cagagaagaggcagcuguu

SEQ ID NO: 2023110 - RNA, 19 nt, Homo sapiens
  misc_RNA (1)...(19): siRNA sense strand
cagcagagaaagauaaugc

SEQ ID NO: 2023111 - RNA, 19 nt, Homo sapiens
  misc_RNA (1)...(19): siRNA sense strand
agauuccaauggcuuaaug

SEQ ID NO: 2023112 - RNA, 19 nt, Homo sapiens
  misc_RNA (1)...(19): siRNA sense strand
gcuuauugcagaacuggaa

SEQ ID NO: 2023113 - RNA, 19 nt, Homo sapiens
  misc_RNA (1)...(19): siRNA sense strand
ccaacaaacaacaaagaca

SEQ ID NO: 2023114 - RNA, 19 nt, Homo sapiens
  misc_RNA (1)...(19): siRNA sense strand
gucauacgacuaucaacuu

SEQ ID NO: 2023115 - RNA, 19 nt, Homo sapiens
  misc_RNA (1)...(19): siRNA sense strand
gagccaugcaauuaguaaa

SEQ ID NO: 2023116 - RNA, 19 nt, Homo sapiens
  misc_RNA (1)...(19): siRNA sense strand
ugaggaaagugggaacaag

SEQ ID NO: 2023117 - RNA, 19 nt, Homo sapiens
  misc_RNA (1)...(19): siRNA sense strand
agacaauggccuuaauaca

SEQ ID NO: 2023118 - RNA, 19 nt, Homo sapiens
  misc_RNA (1)...(19): siRNA sense strand
gcaaccagagaaaccacuu

SEQ ID NO: 2023119 - RNA, 19 nt, Homo sapiens
  misc_RNA (1)...(19): siRNA sense strand
uauguuagcaaccaugugu

SEQ ID NO: 2023120 - RNA, 19 nt, Homo sapiens
  misc_RNA (1)...(19): siRNA sense strand
uugcagaacuggaaaacaa

SEQ ID NO: 2023121 - RNA, 19 nt, Homo sapiens
  misc_RNA (1)...(19): siRNA sense strand
cagaacagccugcaaauua

SEQ ID NO: 2023122 - RNA, 19 nt, Homo sapiens
  misc_RNA (1)...(19): siRNA sense strand
ggaaaucuccugcaaagaa

SEQ ID NO: 2023123 - RNA, 19 nt, Homo sapiens
  misc_RNA (1)...(19): siRNA sense strand
caacaaagacagcuuauug

SEQ ID NO: 2023124 - RNA, 19 nt, Homo sapiens
  misc_RNA (1)...(19): siRNA sense strand
uggaagagcugaugaaguu

SEQ ID NO: 2023125 - RNA, 19 nt, Homo sapiens
  misc_RNA (1)...(19): siRNA sense strand
guugauaucuggaacauga

SEQ ID NO: 2023126 - RNA, 19 nt, Homo sapiens
  misc_RNA (1)...(19): siRNA sense strand
ggaagaccauggcagagaa

SEQ ID NO: 2023127 - RNA, 19 nt, Homo sapiens
  misc_RNA (1)...(19): siRNA sense strand
gacuugagcuuuaacuuug

SEQ ID NO: 2023128 - RNA, 19 nt, Homo sapiens
  misc_RNA (1)...(19): siRNA sense strand
ucauacgacuaucaacuua

SEQ ID NO: 2023129 - RNA, 19 nt, Homo sapiens
  misc_RNA (1)...(19): siRNA sense strand
gcacaggcuugcccauguu

SEQ ID NO: 2023130 - RNA, 19 nt, Homo sapiens
  misc_RNA (1)...(19): siRNA sense strand
gaaaugcgugcucagaauu

SEQ ID NO: 2023131 - RNA, 19 nt, Homo sapiens
  misc_RNA (1)...(19): siRNA sense strand
gaaaucuccugcaaagaag

SEQ ID NO: 2023132 - RNA, 19 nt, Homo sapiens
  misc_RNA (1)...(19): siRNA sense strand
uccaauggcuuaaugauau

SEQ ID NO: 2023133 - RNA, 19 nt, Homo sapiens
  misc_RNA (1)...(19): siRNA sense strand
ccacugacuugagcuuuaa

SEQ ID NO: 2023134 - RNA, 19 nt, Homo sapiens
  misc_RNA (1)...(19): siRNA sense strand
aaacaacaaagacagcuua

SEQ ID NO: 2023135 - RNA, 19 nt, Homo sapiens
  misc_RNA (1)...(19): siRNA sense strand
uagcaaguuugaccaguuu

SEQ ID NO: 2023136 - RNA, 19 nt, Homo sapiens
  misc_RNA (1)...(19): siRNA sense strand
cccaacagcugucuuugaa

SEQ ID NO: 2023137 - RNA, 19 nt, Homo sapiens
  misc_RNA (1)...(19): siRNA sense strand
gaggaacaccgucuuauag

SEQ ID NO: 2023138 - RNA, 19 nt, Homo sapiens
  misc_RNA (1)...(19): siRNA sense strand
gaugaggaacaccgucuua

SEQ ID NO: 2023139 - RNA, 19 nt, Homo sapiens
  misc_RNA (1)...(19): siRNA sense strand
agaggcagcuguucauaga

SEQ ID NO: 2023140 - RNA, 19 nt, Homo sapiens
  misc_RNA (1)...(19): siRNA sense strand
gaagaggcagcuguucaua

SEQ ID NO: 2023141 - RNA, 19 nt, Homo sapiens
  misc_RNA (1)...(19): siRNA sense strand
gcagagaaagauaaugcua

SEQ ID NO: 2023142 - RNA, 19 nt, Homo sapiens
  misc_RNA (1)...(19): siRNA sense strand
ccacagcagagaaagauaa

SEQ ID NO: 2023143 - RNA, 19 nt, Homo sapiens
  misc_RNA (1)...(19): siRNA sense strand
gccacagggucaccacaua

SEQ ID NO: 2023144 - RNA, 19 nt, Homo sapiens
  misc_RNA (1)...(19): siRNA sense strand
aagcugagccaugcaauua

SEQ ID NO: 2023145 - RNA, 19 nt, Homo sapiens
  misc_RNA (1)...(19): siRNA sense strand
gaggcaaguugacgguauu

SEQ ID NO: 2023146 - RNA, 19 nt, Homo sapiens
  misc_RNA (1)...(19): siRNA sense strand
ugacuugagcuuuaacuuu

SEQ ID NO: 2023147 - RNA, 19 nt, Homo sapiens
  misc_RNA (1)...(19): siRNA sense strand
gugagaguaugauggguuu

SEQ ID NO: 2023148 - RNA, 19 nt, Homo sapiens
  misc_RNA (1)...(19): siRNA sense strand
ggacaaauugagauauguu

SEQ ID NO: 2023149 - RNA, 19 nt, Homo sapiens
  misc_RNA (1)...(19): siRNA sense strand
ugaggaacaccgucuuaua

SEQ ID NO: 2023150 - RNA, 19 nt, Homo sapiens
  misc_RNA (1)...(19): siRNA sense strand
ccacuugaccuugcacaua

SEQ ID NO: 2023151 - RNA, 19 nt, Homo sapiens
  misc_RNA (1)...(19): siRNA sense strand
ccaauggcuuaaugauauu

SEQ ID NO: 2023152 - RNA, 19 nt, Homo sapiens
  misc_RNA (1)...(19): siRNA sense strand
agaaaugcgugcucagaau

SEQ ID NO: 2023153 - RNA, 19 nt, Homo sapiens
  misc_RNA (1)...(19): siRNA sense strand
gcaaccagcaccagaugaa

SEQ ID NO: 2023154 - RNA, 19 nt, Homo sapiens
  misc_RNA (1)...(19): siRNA sense strand
gcaggaggccuucgcacaa

SEQ ID NO: 2023155 - RNA, 19 nt, Homo sapiens
  misc_RNA (1)...(19): siRNA sense strand
gaagcugagccaugcaauu

SEQ ID NO: 2023156 - RNA, 19 nt, Homo sapiens
  misc_RNA (1)...(19): siRNA sense strand
gagaagaggcagcuguuca

SEQ ID NO: 2023157 - RNA, 19 nt, Homo sapiens
  misc_RNA (1)...(19): siRNA sense strand
cgagacaauggccuuaaua

SEQ ID NO: 2023158 - RNA, 19 nt, Homo sapiens
  misc_RNA (1)...(19): siRNA sense strand
cccacugacuugagcuuua

SEQ ID NO: 2023159 - RNA, 19 nt, Homo sapiens
  misc_RNA (1)...(19): siRNA sense strand
gaacaagcgccuuccuucu

SEQ ID NO: 2023160 - RNA, 19 nt, Homo sapiens
  misc_RNA (1)...(19): siRNA sense strand
uuaauacacuggaccauac

SEQ ID NO: 2023161 - RNA, 19 nt, Homo sapiens
  misc_RNA (1)...(19): siRNA sense strand
gcaaaggaaggaugaacug

SEQ ID NO: 2023162 - RNA, 19 nt, Homo sapiens
  misc_RNA (1)...(19): siRNA sense strand
cacuugaccuugcacauau

SEQ ID NO: 2023163 - RNA, 19 nt, Homo sapiens
  misc_RNA (1)...(19): siRNA sense strand
gaaaccacuugaccuugca

SEQ ID NO: 2023164 - RNA, 19 nt, Homo sapiens
  misc_RNA (1)...(19): siRNA sense strand
cagagaaagauaaugcuaa

SEQ ID NO: 2023165 - RNA, 19 nt, Homo sapiens
  misc_RNA (1)...(19): siRNA sense strand
ccaaauuaguguggaacaa

SEQ ID NO: 2023166 - RNA, 19 nt, Homo sapiens
  misc_RNA (1)...(19): siRNA sense strand
gaacuggagcagaggaugu

SEQ ID NO: 2023167 - RNA, 19 nt, Homo sapiens
  misc_RNA (1)...(19): siRNA sense strand
ggaacaagcggaagaccau

SEQ ID NO: 2023168 - RNA, 19 nt, Homo sapiens
  misc_RNA (1)...(19): siRNA sense strand
uuacagaacagccugcaaa

SEQ ID NO: 2023169 - RNA, 19 nt, Homo sapiens
  misc_RNA (1)...(19): siRNA sense strand
aggcagcuguucauagaaa

SEQ ID NO: 2023170 - RNA, 19 nt, Homo sapiens
  misc_RNA (1)...(19): siRNA sense strand
ugaaggaaguucugaagcu

SEQ ID NO: 2023171 - RNA, 19 nt, Homo sapiens
  misc_RNA (1)...(19): siRNA sense strand
cgaggcaaguugacgguau

SEQ ID NO: 2023172 - RNA, 19 nt, Homo sapiens
  misc_RNA (1)...(19): siRNA sense strand
ggaacaccgucuuauagcu

SEQ ID NO: 2023173 - RNA, 19 nt, Homo sapiens
  misc_RNA (1)...(19): siRNA sense strand
gcaauuaguaaaucuuugg

SEQ ID NO: 2023174 - RNA, 19 nt, Homo sapiens
  misc_RNA (1)...(19): siRNA sense strand
gcugagccaugcaauuagu

SEQ ID NO: 2023175 - RNA, 19 nt, Homo sapiens
  misc_RNA (1)...(19): siRNA sense strand
acaauggccuuaauacacu

SEQ ID NO: 2023176 - RNA, 19 nt, Homo sapiens
  misc_RNA (1)...(19): siRNA sense strand
gaagggccaucuuuugguu

SEQ ID NO: 2023177 - RNA, 19 nt, Homo sapiens
  misc_RNA (1)...(19): siRNA sense strand
cuccucaacuuuaugauug

SEQ ID NO: 2023178 - RNA, 19 nt, Homo sapiens
  misc_RNA (1)...(19): siRNA sense strand
gacaauggccuuaauacac

SEQ ID NO: 2023179 - RNA, 19 nt, Homo sapiens
  misc_RNA (1)...(19): siRNA sense strand
caaauuaguguggaacaau

SEQ ID NO: 2023180 - RNA, 19 nt, Homo sapiens
  misc_RNA (1)...(19): siRNA sense strand
ucaccaaauuaguguggaa

SEQ ID NO: 2023181 - RNA, 19 nt, Homo sapiens
  misc_RNA (1)...(19): siRNA sense strand
acuaucaacuuacagaaca

SEQ ID NO: 2023182 - RNA, 19 nt, Homo sapiens
  misc_RNA (1)...(19): siRNA sense strand
agaacagccugcaaauuac

SEQ ID NO: 2023183 - RNA, 19 nt, Homo sapiens
  misc_RNA (1)...(19): siRNA sense strand
gcucccaacagcugucuuu

SEQ ID NO: 2023184 - RNA, 19 nt, Homo sapiens
  misc_RNA (1)...(19): siRNA sense strand
uuagcaaguuugaccaguu

SEQ ID NO: 2023185 - RNA, 19 nt, Homo sapiens
  misc_RNA (1)...(19): siRNA sense strand
aacaagcgccuuccuucua

SEQ ID NO: 2023186 - RNA, 19 nt, Homo sapiens
  misc_RNA (1)...(19): siRNA sense strand
aaauuaguguggaacaauc

SEQ ID NO: 2023187 - RNA, 19 nt, Homo sapiens
  misc_RNA (1)...(19): siRNA sense strand
gaccauaccaccgagauca

SEQ ID NO: 2023188 - RNA, 19 nt, Homo sapiens
  misc_RNA (1)...(19): siRNA sense strand
gccaugcaauuaguaaauc

SEQ ID NO: 2023189 - RNA, 19 nt, Homo sapiens
  misc_RNA (1)...(19): siRNA sense strand
uuggaaaucuccugcaaag

SEQ ID NO: 2023190 - RNA, 19 nt, Homo sapiens
  misc_RNA (1)...(19): siRNA sense strand
ccgagacaauggccuuaau

SEQ ID NO: 2023191 - RNA, 19 nt, Homo sapiens
  misc_RNA (1)...(19): siRNA sense strand
ugacucguccucccacuga

SEQ ID NO: 2023192 - RNA, 19 nt, Homo sapiens
  misc_RNA (1)...(19): siRNA sense strand
ugaaugacaccaugguuag

SEQ ID NO: 2023193 - RNA, 19 nt, Homo sapiens
  misc_RNA (1)...(19): siRNA sense strand
gaugucauacgacuaucaa

SEQ ID NO: 2023194 - RNA, 19 nt, Homo sapiens
  misc_RNA (1)...(19): siRNA sense strand
gagacaauggccuuaauac

SEQ ID NO: 2023195 - RNA, 19 nt, Homo sapiens
  misc_RNA (1)...(19): siRNA sense strand
cuggacaaauugagauaug

SEQ ID NO: 2023196 - RNA, 19 nt, Homo sapiens
  misc_RNA (1)...(19): siRNA sense strand
uagaaaugcgugcucagaa

SEQ ID NO: 2023197 - RNA, 19 nt, Homo sapiens
  misc_RNA (1)...(19): siRNA sense strand
agagaaaccacuugaccuu

SEQ ID NO: 2023198 - RNA, 19 nt, Homo sapiens
  misc_RNA (1)...(19): siRNA sense strand
auacgacuaucaacuuaca

SEQ ID NO: 2023199 - RNA, 19 nt, Homo sapiens
  misc_RNA (1)...(19): siRNA sense strand
ccagaugucagauuccaau

SEQ ID NO: 2023200 - RNA, 19 nt, Homo sapiens
  misc_RNA (1)...(19): siRNA sense strand
gaauuuugaugucauacga

SEQ ID NO: 2023201 - RNA, 19 nt, Homo sapiens
  misc_RNA (1)...(19): siRNA sense strand
ugaccuugcacauauaguu

SEQ ID NO: 2023202 - RNA, 19 nt, Homo sapiens
  misc_RNA (1)...(19): siRNA sense strand
acaagcgccuuccuucuac

SEQ ID NO: 2023203 - RNA, 19 nt, Homo sapiens
  misc_RNA (1)...(19): siRNA sense strand
ucucccagaugucagauuc

SEQ ID NO: 2023204 - RNA, 19 nt, Homo sapiens
  misc_RNA (1)...(19): siRNA sense strand
cuuaauacacuggaccaua

SEQ ID NO: 2023205 - RNA, 19 nt, Homo sapiens
  misc_RNA (1)...(19): siRNA sense strand
gaugccaacaaacaacaaa

SEQ ID NO: 2023206 - RNA, 19 nt, Homo sapiens
  misc_RNA (1)...(19): siRNA sense strand
augaaugacaccaugguua

SEQ ID NO: 2023207 - RNA, 19 nt, Homo sapiens
  misc_RNA (1)...(19): siRNA sense strand
gacgguauuuucaguuaaa

SEQ ID NO: 2023208 - RNA, 19 nt, Homo sapiens
  misc_RNA (1)...(19): siRNA sense strand
ucuccuccaucuacuauca

SEQ ID NO: 2023209 - RNA, 19 nt, Homo sapiens
  misc_RNA (1)...(19): siRNA sense strand
cagagaagaggcagcuguu

SEQ ID NO: 2023210 - RNA, 19 nt, Homo sapiens
  misc_RNA (1)...(19): siRNA sense strand
cagcagagaaagauaaugc

SEQ ID NO: 2023211 - RNA, 19 nt, Homo sapiens
  misc_RNA (1)...(19): siRNA sense strand
agauuccaauggcuuaaug

SEQ ID NO: 2023212 - RNA, 19 nt, Homo sapiens
  misc_RNA (1)...(19): siRNA sense strand
gcuuauugcagaacuggaa

SEQ ID NO: 2023213 - RNA, 19 nt, Homo sapiens
  misc_RNA (1)...(19): siRNA sense strand
ccaacaaacaacaaagaca

SEQ ID NO: 2023214 - RNA, 19 nt, Homo sapiens
  misc_RNA (1)...(19): siRNA sense strand
gucauacgacuaucaacuu

SEQ ID NO: 2023215 - RNA, 19 nt, Homo sapiens
  misc_RNA (1)...(19): siRNA sense strand
gagccaugcaauuaguaaa

SEQ ID NO: 2023216 - RNA, 19 nt, Homo sapiens
  misc_RNA (1)...(19): siRNA sense strand
ugaggaaagugggaacaag

SEQ ID NO: 2023217 - RNA, 19 nt, Homo sapiens
  misc_RNA (1)...(19): siRNA sense strand
agacaauggccuuaauaca

SEQ ID NO: 2023218 - RNA, 19 nt, Homo sapiens
  misc_RNA (1)...(19): siRNA sense strand
gcaaccagagaaaccacuu

SEQ ID NO: 2023219 - RNA, 19 nt, Homo sapiens
  misc_RNA (1)...(19): siRNA sense strand
uauguuagcaaccaugugu

SEQ ID NO: 2023220 - RNA, 19 nt, Homo sapiens
  misc_RNA (1)...(19): siRNA sense strand
uugcagaacuggaaaacaa

SEQ ID NO: 2023221 - RNA, 19 nt, Homo sapiens
  misc_RNA (1)...(19): siRNA sense strand
cagaacagccugcaaauua

SEQ ID NO: 2023222 - RNA, 19 nt, Homo sapiens
  misc_RNA (1)...(19): siRNA sense strand
ggaaaucuccugcaaagaa

SEQ ID NO: 2023223 - RNA, 19 nt, Homo sapiens
  misc_RNA (1)...(19): siRNA sense strand
caacaaagacagcuuauug

SEQ ID NO: 2023224 - RNA, 19 nt, Homo sapiens
  misc_RNA (1)...(19): siRNA sense strand
uggaagagcugaugaaguu

SEQ ID NO: 2023225 - RNA, 19 nt, Homo sapiens
  misc_RNA (1)...(19): siRNA sense strand
guugauaucuggaacauga

SEQ ID NO: 2023226 - RNA, 19 nt, Homo sapiens
  misc_RNA (1)...(19): siRNA sense strand
ggaagaccauggcagagaa

SEQ ID NO: 2023227 - RNA, 19 nt, Homo sapiens
  misc_RNA (1)...(19): siRNA sense strand
gacuugagcuuuaacuuug

SEQ ID NO: 2023228 - RNA, 19 nt, Homo sapiens
  misc_RNA (1)...(19): siRNA sense strand
ucauacgacuaucaacuua

SEQ ID NO: 2023229 - RNA, 19 nt, Homo sapiens
  misc_RNA (1)...(19): siRNA sense strand
gcacaggcuugcccauguu

SEQ ID NO: 2023230 - RNA, 19 nt, Homo sapiens
  misc_RNA (1)...(19): siRNA sense strand
gaaaugcgugcucagaauu

SEQ ID NO: 2023231 - RNA, 19 nt, Homo sapiens
  misc_RNA (1)...(19): siRNA sense strand
gaaaucuccugcaaagaag

SEQ ID NO: 2023232 - RNA, 19 nt, Homo sapiens
  misc_RNA (1)...(19): siRNA sense strand
uccaauggcuuaaugauau

SEQ ID NO: 2023233 - RNA, 19 nt, Homo sapiens
  misc_RNA (1)...(19): siRNA sense strand
ccacugacuugagcuuuaa

SEQ ID NO: 2023234 - RNA, 19 nt, Homo sapiens
  misc_RNA (1)...(19): siRNA sense strand
aaacaacaaagacagcuua

SEQ ID NO: 2023235 - RNA, 19 nt, Homo sapiens
  misc_RNA (1)...(19): siRNA sense strand
uagcaaguuugaccaguuu

SEQ ID NO: 2023236 - RNA, 19 nt, Homo sapiens
  misc_RNA (1)...(19): siRNA sense strand
cccaacagcugucuuugaa

SEQ ID NO: 2023237 - RNA, 19 nt, Homo sapiens
  misc_RNA (1)...(19): siRNA sense strand
gaggaacaccgucuuauag

SEQ ID NO: 2023238 - RNA, 19 nt, Homo sapiens
  misc_RNA (1)...(19): siRNA sense strand
gaugaggaacaccgucuua

SEQ ID NO: 2023239 - RNA, 19 nt, Homo sapiens
  misc_RNA (1)...(19): siRNA sense strand
agaggcagcuguucauaga

SEQ ID NO: 2023240 - RNA, 19 nt, Homo sapiens
  misc_RNA (1)...(19): siRNA sense strand
gaagaggcagcuguucaua

SEQ ID NO: 2023241 - RNA, 19 nt, Homo sapiens
  misc_RNA (1)...(19): siRNA sense strand
gcagagaaagauaaugcua

SEQ ID NO: 2023242 - RNA, 19 nt, Homo sapiens
  misc_RNA (1)...(19): siRNA sense strand
ccacagcagagaaagauaa

SEQ ID NO: 2023243 - RNA, 19 nt, Homo sapiens
  misc_RNA (1)...(19): siRNA sense strand
gccacagggucaccacaua

SEQ ID NO: 2023244 - RNA, 19 nt, Homo sapiens
  misc_RNA (1)...(19): siRNA sense strand
aagcugagccaugcaauua

SEQ ID NO: 2023245 - RNA, 19 nt, Homo sapiens
  misc_RNA (1)...(19): siRNA sense strand
gaggcaaguugacgguauu

SEQ ID NO: 2023246 - RNA, 19 nt, Homo sapiens
  misc_RNA (1)...(19): siRNA sense strand
ugacuugagcuuuaacuuu

SEQ ID NO: 2023247 - RNA, 19 nt, Homo sapiens
  misc_RNA (1)...(19): siRNA sense strand
gugagaguaugauggguuu

SEQ ID NO: 2023248 - RNA, 19 nt, Homo sapiens
  misc_RNA (1)...(19): siRNA sense strand
ggacaaauugagauauguu

SEQ ID NO: 2023249 - RNA, 19 nt, Homo sapiens
  misc_RNA (1)...(19): siRNA sense strand
ugaggaacaccgucuuaua

SEQ ID NO: 2023250 - RNA, 19 nt, Homo sapiens
  misc_RNA (1)...(19): siRNA sense strand
ccacuugaccuugcacaua

SEQ ID NO: 2023251 - RNA, 19 nt, Homo sapiens
  misc_RNA (1)...(19): siRNA sense strand
ccaauggcuuaaugauauu

SEQ ID NO: 2023252 - RNA, 19 nt, Homo sapiens
  misc_RNA (1)...(19): siRNA sense strand
agaaaugcgugcucagaau

SEQ ID NO: 2023253 - RNA, 19 nt, Homo sapiens
  misc_RNA (1)...(19): siRNA sense strand
gcaaccagcaccagaugaa

SEQ ID NO: 2023254 - RNA, 19 nt, Homo sapiens
  misc_RNA (1)...(19): siRNA sense strand
gcaggaggccuucgcacaa

SEQ ID NO: 2023255 - RNA, 19 nt, Homo sapiens
  misc_RNA (1)...(19): siRNA sense strand
gaagcugagccaugcaauu

SEQ ID NO: 2023256 - RNA, 19 nt, Homo sapiens
  misc_RNA (1)...(19): siRNA sense strand
gagaagaggcagcuguuca

SEQ ID NO: 2023257 - RNA, 19 nt, Homo sapiens
  misc_RNA (1)...(19): siRNA sense strand
cgagacaauggccuuaaua

SEQ ID NO: 2023258 - RNA, 19 nt, Homo sapiens
  misc_RNA (1)...(19): siRNA sense strand
cccacugacuugagcuuua

SEQ ID NO: 2023259 - RNA, 19 nt, Homo sapiens
  misc_RNA (1)...(19): siRNA sense strand
gaacaagcgccuuccuucu

SEQ ID NO: 2023260 - RNA, 19 nt, Homo sapiens
  misc_RNA (1)...(19): siRNA sense strand
uuaauacacuggaccauac

SEQ ID NO: 2023261 - RNA, 19 nt, Homo sapiens
  misc_RNA (1)...(19): siRNA sense strand
gcaaaggaaggaugaacug

SEQ ID NO: 2023262 - RNA, 19 nt, Homo sapiens
  misc_RNA (1)...(19): siRNA sense strand
cacuugaccuugcacauau

SEQ ID NO: 2023263 - RNA, 19 nt, Homo sapiens
  misc_RNA (1)...(19): siRNA sense strand
gaaaccacuugaccuugca

SEQ ID NO: 2023264 - RNA, 19 nt, Homo sapiens
  misc_RNA (1)...(19): siRNA sense strand
cagagaaagauaaugcuaa

SEQ ID NO: 2023265 - RNA, 19 nt, Homo sapiens
  misc_RNA (1)...(19): siRNA sense strand
ccaaauuaguguggaacaa

SEQ ID NO: 2023266 - RNA, 19 nt, Homo sapiens
  misc_RNA (1)...(19): siRNA sense strand
gaacuggagcagaggaugu

SEQ ID NO: 2023267 - RNA, 19 nt, Homo sapiens
  misc_RNA (1)...(19): siRNA sense strand
ggaacaagcggaagaccau

SEQ ID NO: 2023268 - RNA, 19 nt, Homo sapiens
  misc_RNA (1)...(19): siRNA sense strand
uuacagaacagccugcaaa

SEQ ID NO: 2023269 - RNA, 19 nt, Homo sapiens
  misc_RNA (1)...(19): siRNA sense strand
aggcagcuguucauagaaa

SEQ ID NO: 2023270 - RNA, 19 nt, Homo sapiens
  misc_RNA (1)...(19): siRNA sense strand
ugaaggaaguucugaagcu

SEQ ID NO: 2023271 - RNA, 19 nt, Homo sapiens
  misc_RNA (1)...(19): siRNA sense strand
cgaggcaaguugacgguau

SEQ ID NO: 2023272 - RNA, 19 nt, Homo sapiens
  misc_RNA (1)...(19): siRNA sense strand
ggaacaccgucuuauagcu

SEQ ID NO: 2023273 - RNA, 19 nt, Homo sapiens
  misc_RNA (1)...(19): siRNA sense strand
gcaauuaguaaaucuuugg

SEQ ID NO: 2023274 - RNA, 19 nt, Homo sapiens
  misc_RNA (1)...(19): siRNA sense strand
gcugagccaugcaauuagu

SEQ ID NO: 2023275 - RNA, 19 nt, Homo sapiens
  misc_RNA (1)...(19): siRNA sense strand
acaauggccuuaauacacu

SEQ ID NO: 2023276 - RNA, 19 nt, Homo sapiens
  misc_RNA (1)...(19): siRNA sense strand
gaagggccaucuuuugguu

SEQ ID NO: 2023277 - RNA, 19 nt, Homo sapiens
  misc_RNA (1)...(19): siRNA sense strand
cuccucaacuuuaugauug

SEQ ID NO: 2023278 - RNA, 19 nt, Homo sapiens
  misc_RNA (1)...(19): siRNA sense strand
gacaauggccuuaauacac

SEQ ID NO: 2023279 - RNA, 19 nt, Homo sapiens
  misc_RNA (1)...(19): siRNA sense strand
caaauuaguguggaacaau

SEQ ID NO: 2023280 - RNA, 19 nt, Homo sapiens
  misc_RNA (1)...(19): siRNA sense strand
ucaccaaauuaguguggaa

SEQ ID NO: 2023281 - RNA, 19 nt, Homo sapiens
  misc_RNA (1)...(19): siRNA sense strand
acuaucaacuuacagaaca

SEQ ID NO: 2023282 - RNA, 19 nt, Homo sapiens
  misc_RNA (1)...(19): siRNA sense strand
agaacagccugcaaauuac

SEQ ID NO: 2023283 - RNA, 19 nt, Homo sapiens
  misc_RNA (1)...(19): siRNA sense strand
gcucccaacagcugucuuu

SEQ ID NO: 2023284 - RNA, 19 nt, Homo sapiens
  misc_RNA (1)...(19): siRNA sense strand
uuagcaaguuugaccaguu

SEQ ID NO: 2023285 - RNA, 19 nt, Homo sapiens
  misc_RNA (1)...(19): siRNA sense strand
aacaagcgccuuccuucua

SEQ ID NO: 2023286 - RNA, 19 nt, Homo sapiens
  misc_RNA (1)...(19): siRNA sense strand
aaauuaguguggaacaauc

SEQ ID NO: 2023287 - RNA, 19 nt, Homo sapiens
  misc_RNA (1)...(19): siRNA sense strand
gaccauaccaccgagauca

SEQ ID NO: 2023288 - RNA, 19 nt, Homo sapiens
  misc_RNA (1)...(19): siRNA sense strand
gccaugcaauuaguaaauc

SEQ ID NO: 2023289 - RNA, 19 nt, Homo sapiens
  misc_RNA (1)...(19): siRNA sense strand
uuggaaaucuccugcaaag

SEQ ID NO: 2023290 - RNA, 19 nt, Homo sapiens
  misc_RNA (1)...(19): siRNA sense strand
ccgagacaauggccuuaau

SEQ ID NO: 2023291 - RNA, 19 nt, Homo sapiens
  misc_RNA (1)...(19): siRNA sense strand
ugacucguccucccacuga

SEQ ID NO: 2023292 - RNA, 19 nt, Homo sapiens
  misc_RNA (1)...(19): siRNA sense strand
ugaaugacaccaugguuag

SEQ ID NO: 2023293 - RNA, 19 nt, Homo sapiens
  misc_RNA (1)...(19): siRNA sense strand
gaugucauacgacuaucaa

SEQ ID NO: 2023294 - RNA, 19 nt, Homo sapiens
  misc_RNA (1)...(19): siRNA sense strand
gagacaauggccuuaauac

SEQ ID NO: 2023295 - RNA, 19 nt, Homo sapiens
  misc_RNA (1)...(19): siRNA sense strand
cuggacaaauugagauaug

SEQ ID NO: 2023296 - RNA, 19 nt, Homo sapiens
  misc_RNA (1)...(19): siRNA sense strand
uagaaaugcgugcucagaa

SEQ ID NO: 2023297 - RNA, 19 nt, Homo sapiens
  misc_RNA (1)...(19): siRNA sense strand
agagaaaccacuugaccuu

SEQ ID NO: 2023298 - RNA, 19 nt, Homo sapiens
  misc_RNA (1)...(19): siRNA sense strand
auacgacuaucaacuuaca

SEQ ID NO: 2023299 - RNA, 19 nt, Homo sapiens
  misc_RNA (1)...(19): siRNA sense strand
ccagaugucagauuccaau

SEQ ID NO: 2023300 - RNA, 19 nt, Homo sapiens
  misc_RNA (1)...(19): siRNA sense strand
gaauuuugaugucauacga

SEQ ID NO: 2023301 - RNA, 19 nt, Homo sapiens
  misc_RNA (1)...(19): siRNA sense strand
ugaccuugcacauauaguu

SEQ ID NO: 2023302 - RNA, 19 nt, Homo sapiens
  misc_RNA (1)...(19): siRNA sense strand
acaagcgccuuccuucuac

SEQ ID NO: 2023303 - RNA, 19 nt, Homo sapiens
  misc_RNA (1)...(19): siRNA sense strand
ucucccagaugucagauuc

SEQ ID NO: 2023304 - RNA, 19 nt, Homo sapiens
  misc_RNA (1)...(19): siRNA sense strand
cuuaauacacuggaccaua

SEQ ID NO: 2023305 - RNA, 19 nt, Homo sapiens
  misc_RNA (1)...(19): siRNA sense strand
gaugccaacaaacaacaaa

SEQ ID NO: 2023306 - RNA, 19 nt, Homo sapiens
  misc_RNA (1)...(19): siRNA sense strand
augaaugacaccaugguua

SEQ ID NO: 2023307 - RNA, 19 nt, Homo sapiens
  misc_RNA (1)...(19): siRNA sense strand
gacgguauuuucaguuaaa

SEQ ID NO: 2023308 - RNA, 19 nt, Homo sapiens
  misc_RNA (1)...(19): siRNA sense strand
ucuccuccaucuacuauca

SEQ ID NO: 2023309 - RNA, 19 nt, Homo sapiens
  misc_RNA (1)...(19): siRNA sense strand
cagagaagaggcagcuguu

SEQ ID NO: 2023310 - RNA, 19 nt, Homo sapiens
  misc_RNA (1)...(19): siRNA sense strand
cagcagagaaagauaaugc

SEQ ID NO: 2023311 - RNA, 19 nt, Homo sapiens
  misc_RNA (1)...(19): siRNA sense strand
agauuccaauggcuuaaug

SEQ ID NO: 2023312 - RNA, 19 nt, Homo sapiens
  misc_RNA (1)...(19): siRNA sense strand
gcuuauugcagaacuggaa

SEQ ID NO: 2023313 - RNA, 19 nt, Homo sapiens
  misc_RNA (1)...(19): siRNA sense strand
ccaacaaacaacaaagaca

SEQ ID NO: 2023314 - RNA, 19 nt, Homo sapiens
  misc_RNA (1)...(19): siRNA sense strand
gucauacgacuaucaacuu

SEQ ID NO: 2023315 - RNA, 19 nt, Homo sapiens
  misc_RNA (1)...(19): siRNA sense strand
gagccaugcaauuaguaaa

SEQ ID NO: 2023316 - RNA, 19 nt, Homo sapiens
  misc_RNA (1)...(19): siRNA sense strand
ugaggaaagugggaacaag

SEQ ID NO: 2023317 - RNA, 19 nt, Homo sapiens
  misc_RNA (1)...(19): siRNA sense strand
agacaauggccuuaauaca

SEQ ID NO: 2023318 - RNA, 19 nt, Homo sapiens
  misc_RNA (1)...(19): siRNA sense strand
gcaaccagagaaaccacuu

SEQ ID NO: 2023319 - RNA, 19 nt, Homo sapiens
  misc_RNA (1)...(19): siRNA sense strand
uauguuagcaaccaugugu

SEQ ID NO: 2023320 - RNA, 19 nt, Homo sapiens
  misc_RNA (1)...(19): siRNA sense strand
uugcagaacuggaaaacaa

SEQ ID NO: 2023321 - RNA, 19 nt, Homo sapiens
  misc_RNA (1)...(19): siRNA sense strand
cagaacagccugcaaauua

SEQ ID NO: 2023322 - RNA, 19 nt, Homo sapiens
  misc_RNA (1)...(19): siRNA sense strand
ggaaaucuccugcaaagaa

SEQ ID NO: 2023323 - RNA, 19 nt, Homo sapiens
  misc_RNA (1)...(19): siRNA sense strand
caacaaagacagcuuauug

SEQ ID NO: 2023324 - RNA, 19 nt, Homo sapiens
  misc_RNA (1)...(19): siRNA sense strand
uggaagagcugaugaaguu

SEQ ID NO: 2023325 - RNA, 19 nt, Homo sapiens
  misc_RNA (1)...(19): siRNA sense strand
guugauaucuggaacauga

SEQ ID NO: 2023326 - RNA, 19 nt, Homo sapiens
  misc_RNA (1)...(19): siRNA sense strand
ggaagaccauggcagagaa

SEQ ID NO: 2023327 - RNA, 19 nt, Homo sapiens
  misc_RNA (1)...(19): siRNA sense strand
gacuugagcuuuaacuuug

SEQ ID NO: 2023328 - RNA, 19 nt, Homo sapiens
  misc_RNA (1)...(19): siRNA sense strand
ucauacgacuaucaacuua

SEQ ID NO: 2023329 - RNA, 19 nt, Homo sapiens
  misc_RNA (1)...(19): siRNA sense strand
gcacaggcuugcccauguu

SEQ ID NO: 2023330 - RNA, 19 nt, Homo sapiens
  misc_RNA (1)...(19): siRNA sense strand
gaaaugcgugcucagaauu

SEQ ID NO: 2023331 - RNA, 19 nt, Homo sapiens
  misc_RNA (1)...(19): siRNA sense strand
gaaaucuccugcaaagaag

SEQ ID NO: 2023332 - RNA, 19 nt, Homo sapiens
  misc_RNA (1)...(19): siRNA sense strand
uccaauggcuuaaugauau

SEQ ID NO: 2023333 - RNA, 19 nt, Homo sapiens
  misc_RNA (1)...(19): siRNA sense strand
ccacugacuugagcuuuaa

SEQ ID NO: 2023334 - RNA, 19 nt, Homo sapiens
  misc_RNA (1)...(19): siRNA sense strand
aaacaacaaagacagcuua

SEQ ID NO: 2023335 - RNA, 19 nt, Homo sapiens
  misc_RNA (1)...(19): siRNA sense strand
uagcaaguuugaccaguuu

SEQ ID NO: 2023336 - RNA, 19 nt, Homo sapiens
  misc_RNA (1)...(19): siRNA sense strand
cccaacagcugucuuugaa

SEQ ID NO: 2023337 - RNA, 19 nt, Homo sapiens
  misc_RNA (1)...(19): siRNA sense strand
gaggaacaccgucuuauag

SEQ ID NO: 2023338 - RNA, 19 nt, Homo sapiens
  misc_RNA (1)...(19): siRNA sense strand
gaugaggaacaccgucuua

SEQ ID NO: 2023339 - RNA, 19 nt, Homo sapiens
  misc_RNA (1)...(19): siRNA sense strand
agaggcagcuguucauaga

SEQ ID NO: 2023340 - RNA, 19 nt, Homo sapiens
  misc_RNA (1)...(19): siRNA sense strand
gaagaggcagcuguucaua

SEQ ID NO: 2023341 - RNA, 19 nt, Homo sapiens
  misc_RNA (1)...(19): siRNA sense strand
gcagagaaagauaaugcua

SEQ ID NO: 2023342 - RNA, 19 nt, Homo sapiens
  misc_RNA (1)...(19): siRNA sense strand
ccacagcagagaaagauaa

SEQ ID NO: 2023343 - RNA, 19 nt, Homo sapiens
  misc_RNA (1)...(19): siRNA sense strand
gccacagggucaccacaua

SEQ ID NO: 2023344 - RNA, 19 nt, Homo sapiens
  misc_RNA (1)...(19): siRNA sense strand
aagcugagccaugcaauua

SEQ ID NO: 2023345 - RNA, 19 nt, Homo sapiens
  misc_RNA (1)...(19): siRNA sense strand
gaggcaaguugacgguauu

SEQ ID NO: 2023346 - RNA, 19 nt, Homo sapiens
  misc_RNA (1)...(19): siRNA sense strand
ugacuugagcuuuaacuuu

SEQ ID NO: 2023347 - RNA, 19 nt, Homo sapiens
  misc_RNA (1)...(19): siRNA sense strand
gugagaguaugauggguuu

SEQ ID NO: 2023348 - RNA, 19 nt, Homo sapiens
  misc_RNA (1)...(19): siRNA sense strand
ggacaaauugagauauguu

SEQ ID NO: 2023349 - RNA, 19 nt, Homo sapiens
  misc_RNA (1)...(19): siRNA sense strand
ugaggaacaccgucuuaua

SEQ ID NO: 2023350 - RNA, 19 nt, Homo sapiens
  misc_RNA (1)...(19): siRNA sense strand
ccacuugaccuugcacaua

SEQ ID NO: 2023351 - RNA, 19 nt, Homo sapiens
  misc_RNA (1)...(19): siRNA sense strand
ccaauggcuuaaugauauu

SEQ ID NO: 2023352 - RNA, 19 nt, Homo sapiens
  misc_RNA (1)...(19): siRNA sense strand
agaaaugcgugcucagaau

SEQ ID NO: 2023353 - RNA, 19 nt, Homo sapiens
  misc_RNA (1)...(19): siRNA sense strand
gcaaccagcaccagaugaa

SEQ ID NO: 2023354 - RNA, 19 nt, Homo sapiens
  misc_RNA (1)...(19): siRNA sense strand
gcaggaggccuucgcacaa

SEQ ID NO: 2023355 - RNA, 19 nt, Homo sapiens
  misc_RNA (1)...(19): siRNA sense strand
gaagcugagccaugcaauu

SEQ ID NO: 2023356 - RNA, 19 nt, Homo sapiens
  misc_RNA (1)...(19): siRNA sense strand
gagaagaggcagcuguuca

SEQ ID NO: 2023357 - RNA, 19 nt, Homo sapiens
  misc_RNA (1)...(19): siRNA sense strand
cgagacaauggccuuaaua

SEQ ID NO: 2023358 - RNA, 19 nt, Homo sapiens
  misc_RNA (1)...(19): siRNA sense strand
cccacugacuugagcuuua

SEQ ID NO: 2023359 - RNA, 19 nt, Homo sapiens
  misc_RNA (1)...(19): siRNA sense strand
gaacaagcgccuuccuucu

SEQ ID NO: 2023360 - RNA, 19 nt, Homo sapiens
  misc_RNA (1)...(19): siRNA sense strand
uuaauacacuggaccauac

SEQ ID NO: 2023361 - RNA, 19 nt, Homo sapiens
  misc_RNA (1)...(19): siRNA sense strand
gcaaaggaaggaugaacug

SEQ ID NO: 2023362 - RNA, 19 nt, Homo sapiens
  misc_RNA (1)...(19): siRNA sense strand
cacuugaccuugcacauau

SEQ ID NO: 2023363 - RNA, 19 nt, Homo sapiens
  misc_RNA (1)...(19): siRNA sense strand
gaaaccacuugaccuugca

SEQ ID NO: 2023364 - RNA, 19 nt, Homo sapiens
  misc_RNA (1)...(19): siRNA sense strand
cagagaaagauaaugcuaa

SEQ ID NO: 2023365 - RNA, 19 nt, Homo sapiens
  misc_RNA (1)...(19): siRNA sense strand
ccaaauuaguguggaacaa

SEQ ID NO: 2023366 - RNA, 19 nt, Homo sapiens
  misc_RNA (1)...(19): siRNA sense strand
gaacuggagcagaggaugu

SEQ ID NO: 2023367 - RNA, 19 nt, Homo sapiens
  misc_RNA (1)...(19): siRNA sense strand
ggaacaagcggaagaccau

SEQ ID NO: 2023368 - RNA, 19 nt, Homo sapiens
  misc_RNA (1)...(19): siRNA sense strand
uuacagaacagccugcaaa

SEQ ID NO: 2023369 - RNA, 19 nt, Homo sapiens
  misc_RNA (1)...(19): siRNA sense strand
aggcagcuguucauagaaa

SEQ ID NO: 2023370 - RNA, 19 nt, Homo sapiens
  misc_RNA (1)...(19): siRNA sense strand
ugaaggaaguucugaagcu

SEQ ID NO: 2023371 - RNA, 19 nt, Homo sapiens
  misc_RNA (1)...(19): siRNA sense strand
cgaggcaaguugacgguau

SEQ ID NO: 2023372 - RNA, 19 nt, Homo sapiens
  misc_RNA (1)...(19): siRNA sense strand
ggaacaccgucuuauagcu

SEQ ID NO: 2023373 - RNA, 19 nt, Homo sapiens
  misc_RNA (1)...(19): siRNA sense strand
gcaauuaguaaaucuuugg

SEQ ID NO: 2023374 - RNA, 19 nt, Homo sapiens
  misc_RNA (1)...(19): siRNA sense strand
gcugagccaugcaauuagu

SEQ ID NO: 2023375 - RNA, 19 nt, Homo sapiens
  misc_RNA (1)...(19): siRNA sense strand
acaauggccuuaauacacu

SEQ ID NO: 2023376 - RNA, 19 nt, Homo sapiens
  misc_RNA (1)...(19): siRNA sense strand
gaagggccaucuuuugguu

SEQ ID NO: 2023377 - RNA, 19 nt, Homo sapiens
  misc_RNA (1)...(19): siRNA sense strand
cuccucaacuuuaugauug

SEQ ID NO: 2023378 - RNA, 19 nt, Homo sapiens
  misc_RNA (1)...(19): siRNA sense strand
gacaauggccuuaauacac

SEQ ID NO: 2023379 - RNA, 19 nt, Homo sapiens
  misc_RNA (1)...(19): siRNA sense strand
caaauuaguguggaacaau

SEQ ID NO: 2023380 - RNA, 19 nt, Homo sapiens
  misc_RNA (1)...(19): siRNA sense strand
ucaccaaauuaguguggaa

SEQ ID NO: 2023381 - RNA, 19 nt, Homo sapiens
  misc_RNA (1)...(19): siRNA sense strand
acuaucaacuuacagaaca

SEQ ID NO: 2023382 - RNA, 19 nt, Homo sapiens
  misc_RNA (1)...(19): siRNA sense strand
agaacagccugcaaauuac

SEQ ID NO: 2023383 - RNA, 19 nt, Homo sapiens
  misc_RNA (1)...(19): siRNA sense strand
gcucccaacagcugucuuu

SEQ ID NO: 2023384 - RNA, 19 nt, Homo sapiens
  misc_RNA (1)...(19): siRNA sense strand
uuagcaaguuugaccaguu

SEQ ID NO: 2023385 - RNA, 19 nt, Homo sapiens
  misc_RNA (1)...(19): siRNA sense strand
aacaagcgccuuccuucua

SEQ ID NO: 2023386 - RNA, 19 nt, Homo sapiens
  misc_RNA (1)...(19): siRNA sense strand
aaauuaguguggaacaauc

SEQ ID NO: 2023387 - RNA, 19 nt, Homo sapiens
  misc_RNA (1)...(19): siRNA sense strand
gaccauaccaccgagauca

SEQ ID NO: 2023388 - RNA, 19 nt, Homo sapiens
  misc_RNA (1)...(19): siRNA sense strand
gccaugcaauuaguaaauc

SEQ ID NO: 2023389 - RNA, 19 nt, Homo sapiens
  misc_RNA (1)...(19): siRNA sense strand
uuggaaaucuccugcaaag

SEQ ID NO: 2023390 - RNA, 19 nt, Homo sapiens
  misc_RNA (1)...(19): siRNA sense strand
ccgagacaauggccuuaau

SEQ ID NO: 2023391 - RNA, 19 nt, Homo sapiens
  misc_RNA (1)...(19): siRNA sense strand
ugacucguccucccacuga

SEQ ID NO: 2023392 - RNA, 19 nt, Homo sapiens
  misc_RNA (1)...(19): siRNA sense strand
ugaaugacaccaugguuag

SEQ ID NO: 2023393 - RNA, 19 nt, Homo sapiens
  misc_RNA (1)...(19): siRNA sense strand
gaugucauacgacuaucaa

SEQ ID NO: 2023394 - RNA, 19 nt, Homo sapiens
  misc_RNA (1)...(19): siRNA sense strand
gagacaauggccuuaauac

SEQ ID NO: 2023395 - RNA, 19 nt, Homo sapiens
  misc_RNA (1)...(19): siRNA sense strand
cuggacaaauugagauaug

SEQ ID NO: 2023396 - RNA, 19 nt, Homo sapiens
  misc_RNA (1)...(19): siRNA sense strand
uagaaaugcgugcucagaa

SEQ ID NO: 2023397 - RNA, 19 nt, Homo sapiens
  misc_RNA (1)...(19): siRNA sense strand
agagaaaccacuugaccuu

SEQ ID NO: 2023398 - RNA, 19 nt, Homo sapiens
  misc_RNA (1)...(19): siRNA sense strand
auacgacuaucaacuuaca

SEQ ID NO: 2023399 - RNA, 19 nt, Homo sapiens
  misc_RNA (1)...(19): siRNA sense strand
ccagaugucagauuccaau

SEQ ID NO: 2023400 - RNA, 19 nt, Homo sapiens
  misc_RNA (1)...(19): siRNA sense strand
gaauuuugaugucauacga

SEQ ID NO: 2023401 - RNA, 19 nt, Homo sapiens
  misc_RNA (1)...(19): siRNA sense strand
ugaccuugcacauauaguu

SEQ ID NO: 2023402 - RNA, 19 nt, Homo sapiens
  misc_RNA (1)...(19): siRNA sense strand
acaagcgccuuccuucuac

SEQ ID NO: 2023403 - RNA, 19 nt, Homo sapiens
  misc_RNA (1)...(19): siRNA sense strand
ucucccagaugucagauuc

SEQ ID NO: 2023404 - RNA, 19 nt, Homo sapiens
  misc_RNA (1)...(19): siRNA sense strand
cuuaauacacuggaccaua

SEQ ID NO: 2023405 - RNA, 19 nt, Homo sapiens
  misc_RNA (1)...(19): siRNA sense strand
gaugccaacaaacaacaaa

SEQ ID NO: 2023406 - RNA, 19 nt, Homo sapiens
  misc_RNA (1)...(19): siRNA sense strand
augaaugacaccaugguua

SEQ ID NO: 2023407 - RNA, 19 nt, Homo sapiens
  misc_RNA (1)...(19): siRNA sense strand
gacgguauuuucaguuaaa

SEQ ID NO: 2023408 - RNA, 19 nt, Homo sapiens
  misc_RNA (1)...(19): siRNA sense strand
ucuccuccaucuacuauca

SEQ ID NO: 2023409 - RNA, 19 nt, Homo sapiens
  misc_RNA (1)...(19): siRNA sense strand
cagagaagaggcagcuguu

SEQ ID NO: 2023410 - RNA, 19 nt, Homo sapiens
  misc_RNA (1)...(19): siRNA sense strand
cagcagagaaagauaaugc

SEQ ID NO: 2023411 - RNA, 19 nt, Homo sapiens
  misc_RNA (1)...(19): siRNA sense strand
agauuccaauggcuuaaug

SEQ ID NO: 2023412 - RNA, 19 nt, Homo sapiens
  misc_RNA (1)...(19): siRNA sense strand
gcuuauugcagaacuggaa

SEQ ID NO: 2023413 - RNA, 19 nt, Homo sapiens
  misc_RNA (1)...(19): siRNA sense strand
ccaacaaacaacaaagaca

SEQ ID NO: 2023414 - RNA, 19 nt, Homo sapiens
  misc_RNA (1)...(19): siRNA sense strand
gucauacgacuaucaacuu

SEQ ID NO: 2023415 - RNA, 19 nt, Homo sapiens
  misc_RNA (1)...(19): siRNA sense strand
gagccaugcaauuaguaaa

SEQ ID NO: 2023416 - RNA, 19 nt, Homo sapiens
  misc_RNA (1)...(19): siRNA sense strand
ugaggaaagugggaacaag

SEQ ID NO: 2023417 - RNA, 19 nt, Homo sapiens
  misc_RNA (1)...(19): siRNA sense strand
agacaauggccuuaauaca

SEQ ID NO: 2023418 - RNA, 19 nt, Homo sapiens
  misc_RNA (1)...(19): siRNA sense strand
gcaaccagagaaaccacuu

SEQ ID NO: 2023419 - RNA, 19 nt, Homo sapiens
  misc_RNA (1)...(19): siRNA sense strand
uauguuagcaaccaugugu

SEQ ID NO: 2023420 - RNA, 19 nt, Homo sapiens
  misc_RNA (1)...(19): siRNA sense strand
uugcagaacuggaaaacaa

SEQ ID NO: 2023421 - RNA, 19 nt, Homo sapiens
  misc_RNA (1)...(19): siRNA sense strand
cagaacagccugcaaauua

SEQ ID NO: 2023422 - RNA, 19 nt, Homo sapiens
  misc_RNA (1)...(19): siRNA sense strand
ggaaaucuccugcaaagaa

SEQ ID NO: 2023423 - RNA, 19 nt, Homo sapiens
  misc_RNA (1)...(19): siRNA sense strand
caacaaagacagcuuauug

SEQ ID NO: 2023424 - RNA, 19 nt, Homo sapiens
  misc_RNA (1)...(19): siRNA sense strand
uggaagagcugaugaaguu

SEQ ID NO: 2023425 - RNA, 19 nt, Homo sapiens
  misc_RNA (1)...(19): siRNA sense strand
guugauaucuggaacauga

SEQ ID NO: 2023426 - RNA, 19 nt, Homo sapiens
  misc_RNA (1)...(19): siRNA sense strand
ggaagaccauggcagagaa

SEQ ID NO: 2023427 - RNA, 19 nt, Homo sapiens
  misc_RNA (1)...(19): siRNA sense strand
gacuugagcuuuaacuuug

SEQ ID NO: 2023428 - RNA, 19 nt, Homo sapiens
  misc_RNA (1)...(19): siRNA sense strand
ucauacgacuaucaacuua

SEQ ID NO: 2023429 - RNA, 19 nt, Homo sapiens
  misc_RNA (1)...(19): siRNA sense strand
gcacaggcuugcccauguu

SEQ ID NO: 2023430 - RNA, 19 nt, Homo sapiens
  misc_RNA (1)...(19): siRNA sense strand
gaaaugcgugcucagaauu

SEQ ID NO: 2023431 - RNA, 19 nt, Homo sapiens
  misc_RNA (1)...(19): siRNA sense strand
gaaaucuccugcaaagaag

SEQ ID NO: 2023432 - RNA, 19 nt, Homo sapiens
  misc_RNA (1)...(19): siRNA sense strand
uccaauggcuuaaugauau

SEQ ID NO: 2023433 - RNA, 19 nt, Homo sapiens
  misc_RNA (1)...(19): siRNA sense strand
ccacugacuugagcuuuaa

SEQ ID NO: 2023434 - RNA, 19 nt, Homo sapiens
  misc_RNA (1)...(19): siRNA sense strand
aaacaacaaagacagcuua

SEQ ID NO: 2023435 - RNA, 19 nt, Homo sapiens
  misc_RNA (1)...(19): siRNA sense strand
uagcaaguuugaccaguuu

SEQ ID NO: 2023436 - RNA, 19 nt, Homo sapiens
  misc_RNA (1)...(19): siRNA sense strand
cccaacagcugucuuugaa

SEQ ID NO: 2023437 - RNA, 19 nt, Homo sapiens
  misc_RNA (1)...(19): siRNA sense strand
gaggaacaccgucuuauag

SEQ ID NO: 2023438 - RNA, 19 nt, Homo sapiens
  misc_RNA (1)...(19): siRNA sense strand
gaugaggaacaccgucuua

SEQ ID NO: 2023439 - RNA, 19 nt, Homo sapiens
  misc_RNA (1)...(19): siRNA sense strand
agaggcagcuguucauaga

SEQ ID NO: 2023440 - RNA, 19 nt, Homo sapiens
  misc_RNA (1)...(19): siRNA sense strand
gaagaggcagcuguucaua

SEQ ID NO: 2023441 - RNA, 19 nt, Homo sapiens
  misc_RNA (1)...(19): siRNA sense strand
gcagagaaagauaaugcua

SEQ ID NO: 2023442 - RNA, 19 nt, Homo sapiens
  misc_RNA (1)...(19): siRNA sense strand
ccacagcagagaaagauaa

SEQ ID NO: 2023443 - RNA, 19 nt, Homo sapiens
  misc_RNA (1)...(19): siRNA sense strand
gccacagggucaccacaua

SEQ ID NO: 2023444 - RNA, 19 nt, Homo sapiens
  misc_RNA (1)...(19): siRNA sense strand
aagcugagccaugcaauua

SEQ ID NO: 2023445 - RNA, 19 nt, Homo sapiens
  misc_RNA (1)...(19): siRNA sense strand
gaggcaaguugacgguauu

SEQ ID NO: 2023446 - RNA, 19 nt, Homo sapiens
  misc_RNA (1)...(19): siRNA sense strand
ugacuugagcuuuaacuuu

SEQ ID NO: 2023447 - RNA, 19 nt, Homo sapiens
  misc_RNA (1)...(19): siRNA sense strand
gugagaguaugauggguuu

SEQ ID NO: 2023448 - RNA, 19 nt, Homo sapiens
  misc_RNA (1)...(19): siRNA sense strand
ggacaaauugagauauguu

SEQ ID NO: 2023449 - RNA, 19 nt, Homo sapiens
  misc_RNA (1)...(19): siRNA sense strand
ugaggaacaccgucuuaua

SEQ ID NO: 2023450 - RNA, 19 nt, Homo sapiens
  misc_RNA (1)...(19): siRNA sense strand
ccacuugaccuugcacaua

SEQ ID NO: 2023451 - RNA, 19 nt, Homo sapiens
  misc_RNA (1)...(19): siRNA sense strand
ccaauggcuuaaugauauu

SEQ ID NO: 2023452 - RNA, 19 nt, Homo sapiens
  misc_RNA (1)...(19): siRNA sense strand
agaaaugcgugcucagaau

SEQ ID NO: 2023453 - RNA, 19 nt, Homo sapiens
  misc_RNA (1)...(19): siRNA sense strand
gcaaccagcaccagaugaa

SEQ ID NO: 2023454 - RNA, 19 nt, Homo sapiens
  misc_RNA (1)...(19): siRNA sense strand
gcaggaggccuucgcacaa

SEQ ID NO: 2023455 - RNA, 19 nt, Homo sapiens
  misc_RNA (1)...(19): siRNA sense strand
gaagcugagccaugcaauu

SEQ ID NO: 2023456 - RNA, 19 nt, Homo sapiens
  misc_RNA (1)...(19): siRNA sense strand
gagaagaggcagcuguuca

SEQ ID NO: 2023457 - RNA, 19 nt, Homo sapiens
  misc_RNA (1)...(19): siRNA sense strand
cgagacaauggccuuaaua

SEQ ID NO: 2023458 - RNA, 19 nt, Homo sapiens
  misc_RNA (1)...(19): siRNA sense strand
cccacugacuugagcuuua

SEQ ID NO: 2023459 - RNA, 19 nt, Homo sapiens
  misc_RNA (1)...(19): siRNA sense strand
gaacaagcgccuuccuucu

SEQ ID NO: 2023460 - RNA, 19 nt, Homo sapiens
  misc_RNA (1)...(19): siRNA sense strand
uuaauacacuggaccauac

SEQ ID NO: 2023461 - RNA, 19 nt, Homo sapiens
  misc_RNA (1)...(19): siRNA sense strand
gcaaaggaaggaugaacug

SEQ ID NO: 2023462 - RNA, 19 nt, Homo sapiens
  misc_RNA (1)...(19): siRNA sense strand
cacuugaccuugcacauau

SEQ ID NO: 2023463 - RNA, 19 nt, Homo sapiens
  misc_RNA (1)...(19): siRNA sense strand
gaaaccacuugaccuugca

SEQ ID NO: 2023464 - RNA, 19 nt, Homo sapiens
  misc_RNA (1)...(19): siRNA sense strand
cagagaaagauaaugcuaa

SEQ ID NO: 2023465 - RNA, 19 nt, Homo sapiens
  misc_RNA (1)...(19): siRNA sense strand
ccaaauuaguguggaacaa

SEQ ID NO: 2023466 - RNA, 19 nt, Homo sapiens
  misc_RNA (1)...(19): siRNA sense strand
gaacuggagcagaggaugu

SEQ ID NO: 2023467 - RNA, 19 nt, Homo sapiens
  misc_RNA (1)...(19): siRNA sense strand
ggaacaagcggaagaccau

SEQ ID NO: 2023468 - RNA, 19 nt, Homo sapiens
  misc_RNA (1)...(19): siRNA sense strand
uuacagaacagccugcaaa

SEQ ID NO: 2023469 - RNA, 19 nt, Homo sapiens
  misc_RNA (1)...(19): siRNA sense strand
aggcagcuguucauagaaa

SEQ ID NO: 2023470 - RNA, 19 nt, Homo sapiens
  misc_RNA (1)...(19): siRNA sense strand
ugaaggaaguucugaagcu

SEQ ID NO: 2023471 - RNA, 19 nt, Homo sapiens
  misc_RNA (1)...(19): siRNA sense strand
cgaggcaaguugacgguau

SEQ ID NO: 2023472 - RNA, 19 nt, Homo sapiens
  misc_RNA (1)...(19): siRNA sense strand
ggaacaccgucuuauagcu

SEQ ID NO: 2023473 - RNA, 19 nt, Homo sapiens
  misc_RNA (1)...(19): siRNA sense strand
gcaauuaguaaaucuuugg

SEQ ID NO: 2023474 - RNA, 19 nt, Homo sapiens
  misc_RNA (1)...(19): siRNA sense strand
gcugagccaugcaauuagu

SEQ ID NO: 2023475 - RNA, 19 nt, Homo sapiens
  misc_RNA (1)...(19): siRNA sense strand
acaauggccuuaauacacu

SEQ ID NO: 2023476 - RNA, 19 nt, Homo sapiens
  misc_RNA (1)...(19): siRNA sense strand
gaagggccaucuuuugguu

SEQ ID NO: 2023477 - RNA, 19 nt, Homo sapiens
  misc_RNA (1)...(19): siRNA sense strand
cuccucaacuuuaugauug

SEQ ID NO: 2023478 - RNA, 19 nt, Homo sapiens
  misc_RNA (1)...(19): siRNA sense strand
gacaauggccuuaauacac

SEQ ID NO: 2023479 - RNA, 19 nt, Homo sapiens
  misc_RNA (1)...(19): siRNA sense strand
caaauuaguguggaacaau

SEQ ID NO: 2023480 - RNA, 19 nt, Homo sapiens
  misc_RNA (1)...(19): siRNA sense strand
ucaccaaauuaguguggaa

SEQ ID NO: 2023481 - RNA, 19 nt, Homo sapiens
  misc_RNA (1)...(19): siRNA sense strand
acuaucaacuuacagaaca

SEQ ID NO: 2023482 - RNA, 19 nt, Homo sapiens
  misc_RNA (1)...(19): siRNA sense strand
agaacagccugcaaauuac

SEQ ID NO: 2023483 - RNA, 19 nt, Homo sapiens
  misc_RNA (1)...(19): siRNA sense strand
gcucccaacagcugucuuu

SEQ ID NO: 2023484 - RNA, 19 nt, Homo sapiens
  misc_RNA (1)...(19): siRNA sense strand
uuagcaaguuugaccaguu

SEQ ID NO: 2023485 - RNA, 19 nt, Homo sapiens
  misc_RNA (1)...(19): siRNA sense strand
aacaagcgccuuccuucua

SEQ ID NO: 2023486 - RNA, 19 nt, Homo sapiens
  misc_RNA (1)...(19): siRNA sense strand
aaauuaguguggaacaauc

SEQ ID NO: 2023487 - RNA, 19 nt, Homo sapiens
  misc_RNA (1)...(19): siRNA sense strand
gaccauaccaccgagauca

SEQ ID NO: 2023488 - RNA, 19 nt, Homo sapiens
  misc_RNA (1)...(19): siRNA sense strand
gccaugcaauuaguaaauc

SEQ ID NO: 2023489 - RNA, 19 nt, Homo sapiens
  misc_RNA (1)...(19): siRNA sense strand
uuggaaaucuccugcaaag

SEQ ID NO: 2023490 - RNA, 19 nt, Homo sapiens
  misc_RNA (1)...(19): siRNA sense strand
ccgagacaauggccuuaau

SEQ ID NO: 2023491 - RNA, 19 nt, Homo sapiens
  misc_RNA (1)...(19): siRNA sense strand
ugacucguccucccacuga

SEQ ID NO: 2023492 - RNA, 19 nt, Homo sapiens
  misc_RNA (1)...(19): siRNA sense strand
ugaaugacaccaugguuag

SEQ ID NO: 2023493 - RNA, 19 nt, Homo sapiens
  misc_RNA (1)...(19): siRNA sense strand
gaugucauacgacuaucaa

SEQ ID NO: 2023494 - RNA, 19 nt, Homo sapiens
  misc_RNA (1)...(19): siRNA sense strand
gagacaauggccuuaauac

SEQ ID NO: 2023495 - RNA, 19 nt, Homo sapiens
  misc_RNA (1)...(19): siRNA sense strand
cuggacaaauugagauaug

SEQ ID NO: 2023496 - RNA, 19 nt, Homo sapiens
  misc_RNA (1)...(19): siRNA sense strand
uagaaaugcgugcucagaa

SEQ ID NO: 2023497 - RNA, 19 nt, Homo sapiens
  misc_RNA (1)...(19): siRNA sense strand
agagaaaccacuugaccuu

SEQ ID NO: 2023498 - RNA, 19 nt, Homo sapiens
  misc_RNA (1)...(19): siRNA sense strand
auacgacuaucaacuuaca

SEQ ID NO: 2023499 - RNA, 19 nt, Homo sapiens
  misc_RNA (1)...(19): siRNA sense strand
ccagaugucagauuccaau

SEQ ID NO: 2023500 - RNA, 19 nt, Homo sapiens
  misc_RNA (1)...(19): siRNA sense strand
gaauuuugaugucauacga

SEQ ID NO: 2023501 - RNA, 19 nt, Homo sapiens
  misc_RNA (1)...(19): siRNA sense strand
ugaccuugcacauauaguu

SEQ ID NO: 2023502 - RNA, 19 nt, Homo sapiens
  misc_RNA (1)...(19): siRNA sense strand
acaagcgccuuccuucuac

SEQ ID NO: 2023503 - RNA, 19 nt, Homo sapiens
  misc_RNA (1)...(19): siRNA sense strand
ucucccagaugucagauuc

SEQ ID NO: 2023504 - RNA, 19 nt, Homo sapiens
  misc_RNA (1)...(19): siRNA sense strand
cuuaauacacuggaccaua

SEQ ID NO: 2023505 - RNA, 19 nt, Homo sapiens
  misc_RNA (1)...(19): siRNA sense strand
gaugccaacaaacaacaaa

SEQ ID NO: 2023506 - RNA, 19 nt, Homo sapiens
  misc_RNA (1)...(19): siRNA sense strand
augaaugacaccaugguua

SEQ ID NO: 2023507 - RNA, 19 nt, Homo sapiens
  misc_RNA (1)...(19): siRNA sense strand
gacgguauuuucaguuaaa

SEQ ID NO: 2023508 - RNA, 19 nt, Homo sapiens
  misc_RNA (1)...(19): siRNA sense strand
ucuccuccaucuacuauca

SEQ ID NO: 2023509 - RNA, 19 nt, Homo sapiens
  misc_RNA (1)...(19): siRNA sense strand
cagagaagaggcagcuguu

SEQ ID NO: 2023510 - RNA, 19 nt, Homo sapiens
  misc_RNA (1)...(19): siRNA sense strand
cagcagagaaagauaaugc

SEQ ID NO: 2023511 - RNA, 19 nt, Homo sapiens
  misc_RNA (1)...(19): siRNA sense strand
agauuccaauggcuuaaug

SEQ ID NO: 2023512 - RNA, 19 nt, Homo sapiens
  misc_RNA (1)...(19): siRNA sense strand
gcuuauugcagaacuggaa

SEQ ID NO: 2023513 - RNA, 19 nt, Homo sapiens
  misc_RNA (1)...(19): siRNA sense strand
ccaacaaacaacaaagaca

SEQ ID NO: 2023514 - RNA, 19 nt, Homo sapiens
  misc_RNA (1)...(19): siRNA sense strand
gucauacgacuaucaacuu

SEQ ID NO: 2023515 - RNA, 19 nt, Homo sapiens
  misc_RNA (1)...(19): siRNA sense strand
gagccaugcaauuaguaaa

SEQ ID NO: 2023516 - RNA, 19 nt, Homo sapiens
  misc_RNA (1)...(19): siRNA sense strand
ugaggaaagugggaacaag

SEQ ID NO: 2023517 - RNA, 19 nt, Homo sapiens
  misc_RNA (1)...(19): siRNA sense strand
agacaauggccuuaauaca

SEQ ID NO: 2023518 - RNA, 19 nt, Homo sapiens
  misc_RNA (1)...(19): siRNA sense strand
gcaaccagagaaaccacuu

SEQ ID NO: 2023519 - RNA, 19 nt, Homo sapiens
  misc_RNA (1)...(19): siRNA sense strand
uauguuagcaaccaugugu

SEQ ID NO: 2023520 - RNA, 19 nt, Homo sapiens
  misc_RNA (1)...(19): siRNA sense strand
uugcagaacuggaaaacaa

SEQ ID NO: 2023521 - RNA, 19 nt, Homo sapiens
  misc_RNA (1)...(19): siRNA sense strand
cagaacagccugcaaauua

SEQ ID NO: 2023522 - RNA, 19 nt, Homo sapiens
  misc_RNA (1)...(19): siRNA sense strand
ggaaaucuccugcaaagaa

SEQ ID NO: 2023523 - RNA, 19 nt, Homo sapiens
  misc_RNA (1)...(19): siRNA sense strand
caacaaagacagcuuauug

SEQ ID NO: 2023524 - RNA, 19 nt, Homo sapiens
  misc_RNA (1)...(19): siRNA sense strand
uggaagagcugaugaaguu

SEQ ID NO: 2023525 - RNA, 19 nt, Homo sapiens
  misc_RNA (1)...(19): siRNA sense strand
guugauaucuggaacauga

SEQ ID NO: 2023526 - RNA, 19 nt, Homo sapiens
  misc_RNA (1)...(19): siRNA sense strand
ggaagaccauggcagagaa

SEQ ID NO: 2023527 - RNA, 19 nt, Homo sapiens
  misc_RNA (1)...(19): siRNA sense strand
gacuugagcuuuaacuuug

SEQ ID NO: 2023528 - RNA, 19 nt, Homo sapiens
  misc_RNA (1)...(19): siRNA sense strand
ucauacgacuaucaacuua

SEQ ID NO: 2023529 - RNA, 19 nt, Homo sapiens
  misc_RNA (1)...(19): siRNA sense strand
gcacaggcuugcccauguu

SEQ ID NO: 2023530 - RNA, 19 nt, Homo sapiens
  misc_RNA (1)...(19): siRNA sense strand
gaaaugcgugcucagaauu

SEQ ID NO: 2023531 - RNA, 19 nt, Homo sapiens
  misc_RNA (1)...(19): siRNA sense strand
gaaaucuccugcaaagaag

SEQ ID NO: 2023532 - RNA, 19 nt, Homo sapiens
  misc_RNA (1)...(19): siRNA sense strand
uccaauggcuuaaugauau

SEQ ID NO: 2023533 - RNA, 19 nt, Homo sapiens
  misc_RNA (1)...(19): siRNA sense strand
ccacugacuugagcuuuaa

SEQ ID NO: 2023534 - RNA, 19 nt, Homo sapiens
  misc_RNA (1)...(19): siRNA sense strand
aaacaacaaagacagcuua

SEQ ID NO: 2023535 - RNA, 19 nt, Homo sapiens
  misc_RNA (1)...(19): siRNA sense strand
uagcaaguuugaccaguuu

SEQ ID NO: 2023536 - RNA, 19 nt, Homo sapiens
  misc_RNA (1)...(19): siRNA sense strand
cccaacagcugucuuugaa

SEQ ID NO: 2023537 - RNA, 19 nt, Homo sapiens
  misc_RNA (1)...(19): siRNA sense strand
gaggaacaccgucuuauag

SEQ ID NO: 2023538 - RNA, 19 nt, Homo sapiens
  misc_RNA (1)...(19): siRNA sense strand
gaugaggaacaccgucuua

SEQ ID NO: 2023539 - RNA, 19 nt, Homo sapiens
  misc_RNA (1)...(19): siRNA sense strand
agaggcagcuguucauaga

SEQ ID NO: 2023540 - RNA, 19 nt, Homo sapiens
  misc_RNA (1)...(19): siRNA sense strand
gaagaggcagcuguucaua

SEQ ID NO: 2023541 - RNA, 19 nt, Homo sapiens
  misc_RNA (1)...(19): siRNA sense strand
gcagagaaagauaaugcua

SEQ ID NO: 2023542 - RNA, 19 nt, Homo sapiens
  misc_RNA (1)...(19): siRNA sense strand
ccacagcagagaaagauaa

SEQ ID NO: 2023543 - RNA, 19 nt, Homo sapiens
  misc_RNA (1)...(19): siRNA sense strand
gccacagggucaccacaua

SEQ ID NO: 2023544 - RNA, 19 nt, Homo sapiens
  misc_RNA (1)...(19): siRNA sense strand
aagcugagccaugcaauua

SEQ ID NO: 2023545 - RNA, 19 nt, Homo sapiens
  misc_RNA (1)...(19): siRNA sense strand
gaggcaaguugacgguauu

SEQ ID NO: 2023546 - RNA, 19 nt, Homo sapiens
  misc_RNA (1)...(19): siRNA sense strand
ugacuugagcuuuaacuuu

SEQ ID NO: 2023547 - RNA, 19 nt, Homo sapiens
  misc_RNA (1)...(19): siRNA sense strand
gugagaguaugauggguuu

SEQ ID NO: 2023548 - RNA, 19 nt, Homo sapiens
  misc_RNA (1)...(19): siRNA sense strand
ggacaaauugagauauguu

SEQ ID NO: 2023549 - RNA, 19 nt, Homo sapiens
  misc_RNA (1)...(19): siRNA sense strand
ugaggaacaccgucuuaua

SEQ ID NO: 2023550 - RNA, 19 nt, Homo sapiens
  misc_RNA (1)...(19): siRNA sense strand
ccacuugaccuugcacaua

SEQ ID NO: 2023551 - RNA, 19 nt, Homo sapiens
  misc_RNA (1)...(19): siRNA sense strand
ccaauggcuuaaugauauu

SEQ ID NO: 2023552 - RNA, 19 nt, Homo sapiens
  misc_RNA (1)...(19): siRNA sense strand
agaaaugcgugcucagaau

SEQ ID NO: 2023553 - RNA, 19 nt, Homo sapiens
  misc_RNA (1)...(19): siRNA sense strand
gcaaccagcaccagaugaa

SEQ ID NO: 2023554 - RNA, 19 nt, Homo sapiens
  misc_RNA (1)...(19): siRNA sense strand
gcaggaggccuucgcacaa

SEQ ID NO: 2023555 - RNA, 19 nt, Homo sapiens
  misc_RNA (1)...(19): siRNA sense strand
gaagcugagccaugcaauu

SEQ ID NO: 2023556 - RNA, 19 nt, Homo sapiens
  misc_RNA (1)...(19): siRNA sense strand
gagaagaggcagcuguuca

SEQ ID NO: 2023557 - RNA, 19 nt, Homo sapiens
  misc_RNA (1)...(19): siRNA sense strand
cgagacaauggccuuaaua

SEQ ID NO: 2023558 - RNA, 19 nt, Homo sapiens
  misc_RNA (1)...(19): siRNA sense strand
cccacugacuugagcuuua

SEQ ID NO: 2023559 - RNA, 19 nt, Homo sapiens
  misc_RNA (1)...(19): siRNA sense strand
gaacaagcgccuuccuucu

SEQ ID NO: 2023560 - RNA, 19 nt, Homo sapiens
  misc_RNA (1)...(19): siRNA sense strand
uuaauacacuggaccauac

SEQ ID NO: 2023561 - RNA, 19 nt, Homo sapiens
  misc_RNA (1)...(19): siRNA sense strand
gcaaaggaaggaugaacug

SEQ ID NO: 2023562 - RNA, 19 nt, Homo sapiens
  misc_RNA (1)...(19): siRNA sense strand
cacuugaccuugcacauau

SEQ ID NO: 2023563 - RNA, 19 nt, Homo sapiens
  misc_RNA (1)...(19): siRNA sense strand
gaaaccacuugaccuugca

SEQ ID NO: 2023564 - RNA, 19 nt, Homo sapiens
  misc_RNA (1)...(19): siRNA sense strand
cagagaaagauaaugcuaa

SEQ ID NO: 2023565 - RNA, 19 nt, Homo sapiens
  misc_RNA (1)...(19): siRNA sense strand
ccaaauuaguguggaacaa

SEQ ID NO: 2023566 - RNA, 19 nt, Homo sapiens
  misc_RNA (1)...(19): siRNA sense strand
gaacuggagcagaggaugu

SEQ ID NO: 2023567 - RNA, 19 nt, Homo sapiens
  misc_RNA (1)...(19): siRNA sense strand
ggaacaagcggaagaccau

SEQ ID NO: 2023568 - RNA, 19 nt, Homo sapiens
  misc_RNA (1)...(19): siRNA sense strand
uuacagaacagccugcaaa

SEQ ID NO: 2023569 - RNA, 19 nt, Homo sapiens
  misc_RNA (1)...(19): siRNA sense strand
aggcagcuguucauagaaa

SEQ ID NO: 2023570 - RNA, 19 nt, Homo sapiens
  misc_RNA (1)...(19): siRNA sense strand
ugaaggaaguucugaagcu

SEQ ID NO: 2023571 - RNA, 19 nt, Homo sapiens
  misc_RNA (1)...(19): siRNA sense strand
cgaggcaaguugacgguau

SEQ ID NO: 2023572 - RNA, 19 nt, Homo sapiens
  misc_RNA (1)...(19): siRNA sense strand
ggaacaccgucuuauagcu

SEQ ID NO: 2023573 - RNA, 19 nt, Homo sapiens
  misc_RNA (1)...(19): siRNA sense strand
gcaauuaguaaaucuuugg

SEQ ID NO: 2023574 - RNA, 19 nt, Homo sapiens
  misc_RNA (1)...(19): siRNA sense strand
gcugagccaugcaauuagu

SEQ ID NO: 2023575 - RNA, 19 nt, Homo sapiens
  misc_RNA (1)...(19): siRNA sense strand
acaauggccuuaauacacu

SEQ ID NO: 2023576 - RNA, 19 nt, Homo sapiens
  misc_RNA (1)...(19): siRNA sense strand
gaagggccaucuuuugguu

SEQ ID NO: 2023577 - RNA, 19 nt, Homo sapiens
  misc_RNA (1)...(19): siRNA sense strand
cuccucaacuuuaugauug

SEQ ID NO: 2023578 - RNA, 19 nt, Homo sapiens
  misc_RNA (1)...(19): siRNA sense strand
gacaauggccuuaauacac

SEQ ID NO: 2023579 - RNA, 19 nt, Homo sapiens
  misc_RNA (1)...(19): siRNA sense strand
caaauuaguguggaacaau

SEQ ID NO: 2023580 - RNA, 19 nt, Homo sapiens
  misc_RNA (1)...(19): siRNA sense strand
ucaccaaauuaguguggaa

SEQ ID NO: 2023581 - RNA, 19 nt, Homo sapiens
  misc_RNA (1)...(19): siRNA sense strand
acuaucaacuuacagaaca

SEQ ID NO: 2023582 - RNA, 19 nt, Homo sapiens
  misc_RNA (1)...(19): siRNA sense strand
agaacagccugcaaauuac

SEQ ID NO: 2023583 - RNA, 19 nt, Homo sapiens
  misc_RNA (1)...(19): siRNA sense strand
gcucccaacagcugucuuu

SEQ ID NO: 2023584 - RNA, 19 nt, Homo sapiens
  misc_RNA (1)...(19): siRNA sense strand
uuagcaaguuugaccaguu

SEQ ID NO: 2023585 - RNA, 19 nt, Homo sapiens
  misc_RNA (1)...(19): siRNA sense strand
aacaagcgccuuccuucua

SEQ ID NO: 2023586 - RNA, 19 nt, Homo sapiens
  misc_RNA (1)...(19): siRNA sense strand
aaauuaguguggaacaauc

SEQ ID NO: 2023587 - RNA, 19 nt, Homo sapiens
  misc_RNA (1)...(19): siRNA sense strand
gaccauaccaccgagauca

SEQ ID NO: 2023588 - RNA, 19 nt, Homo sapiens
  misc_RNA (1)...(19): siRNA sense strand
gccaugcaauuaguaaauc

SEQ ID NO: 2023589 - RNA, 19 nt, Homo sapiens
  misc_RNA (1)...(19): siRNA sense strand
uuggaaaucuccugcaaag

SEQ ID NO: 2023590 - RNA, 19 nt, Homo sapiens
  misc_RNA (1)...(19): siRNA sense strand
ccgagacaauggccuuaau

SEQ ID NO: 2023591 - RNA, 19 nt, Homo sapiens
  misc_RNA (1)...(19): siRNA sense strand
ugacucguccucccacuga

SEQ ID NO: 2023592 - RNA, 19 nt, Homo sapiens
  misc_RNA (1)...(19): siRNA sense strand
ugaaugacaccaugguuag

SEQ ID NO: 2023593 - RNA, 19 nt, Homo sapiens
  misc_RNA (1)...(19): siRNA sense strand
gaugucauacgacuaucaa

SEQ ID NO: 2023594 - RNA, 19 nt, Homo sapiens
  misc_RNA (1)...(19): siRNA sense strand
gagacaauggccuuaauac

SEQ ID NO: 2023595 - RNA, 19 nt, Homo sapiens
  misc_RNA (1)...(19): siRNA sense strand
cuggacaaauugagauaug

SEQ ID NO: 2023596 - RNA, 19 nt, Homo sapiens
  misc_RNA (1)...(19): siRNA sense strand
uagaaaugcgugcucagaa

SEQ ID NO: 2023597 - RNA, 19 nt, Homo sapiens
  misc_RNA (1)...(19): siRNA sense strand
agagaaaccacuugaccuu

SEQ ID NO: 2023598 - RNA, 19 nt, Homo sapiens
  misc_RNA (1)...(19): siRNA sense strand
auacgacuaucaacuuaca

SEQ ID NO: 2023599 - RNA, 19 nt, Homo sapiens
  misc_RNA (1)...(19): siRNA sense strand
ccagaugucagauuccaau

SEQ ID NO: 2023600 - RNA, 19 nt, Homo sapiens
  misc_RNA (1)...(19): siRNA sense strand
gaauuuugaugucauacga

SEQ ID NO: 2023601 - RNA, 19 nt, Homo sapiens
  misc_RNA (1)...(19): siRNA sense strand
ugaccuugcacauauaguu

SEQ ID NO: 2023602 - RNA, 19 nt, Homo sapiens
  misc_RNA (1)...(19): siRNA sense strand
acaagcgccuuccuucuac

SEQ ID NO: 2023603 - RNA, 19 nt, Homo sapiens
  misc_RNA (1)...(19): siRNA sense strand
ucucccagaugucagauuc

SEQ ID NO: 2023604 - RNA, 19 nt, Homo sapiens
  misc_RNA (1)...(19): siRNA sense strand
cuuaauacacuggaccaua

SEQ ID NO: 2023605 - RNA, 19 nt, Homo sapiens
  misc_RNA (1)...(19): siRNA sense strand
gaugccaacaaacaacaaa

SEQ ID NO: 2023606 - RNA, 19 nt, Homo sapiens
  misc_RNA (1)...(19): siRNA sense strand
augaaugacaccaugguua

SEQ ID NO: 2023607 - RNA, 19 nt, Homo sapiens
  misc_RNA (1)...(19): siRNA sense strand
gacgguauuuucaguuaaa

SEQ ID NO: 2023608 - RNA, 19 nt, Homo sapiens
  misc_RNA (1)...(19): siRNA sense strand
ucuccuccaucuacuauca

SEQ ID NO: 2023609 - RNA, 19 nt, Homo sapiens
  misc_RNA (1)...(19): siRNA sense strand
cagagaagaggcagcuguu

SEQ ID NO: 2023610 - RNA, 19 nt, Homo sapiens
  misc_RNA (1)...(19): siRNA sense strand
cagcagagaaagauaaugc

SEQ ID NO: 2023611 - RNA, 19 nt, Homo sapiens
  misc_RNA (1)...(19): siRNA sense strand
agauuccaauggcuuaaug

SEQ ID NO: 2023612 - RNA, 19 nt, Homo sapiens
  misc_RNA (1)...(19): siRNA sense strand
gcuuauugcagaacuggaa

SEQ ID NO: 2023613 - RNA, 19 nt, Homo sapiens
  misc_RNA (1)...(19): siRNA sense strand
ccaacaaacaacaaagaca

SEQ ID NO: 2023614 - RNA, 19 nt, Homo sapiens
  misc_RNA (1)...(19): siRNA sense strand
gucauacgacuaucaacuu

SEQ ID NO: 2023615 - RNA, 19 nt, Homo sapiens
  misc_RNA (1)...(19): siRNA sense strand
gagccaugcaauuaguaaa

SEQ ID NO: 2023616 - RNA, 19 nt, Homo sapiens
  misc_RNA (1)...(19): siRNA sense strand
ugaggaaagugggaacaag

SEQ ID NO: 2023617 - RNA, 19 nt, Homo sapiens
  misc_RNA (1)...(19): siRNA sense strand
agacaauggccuuaauaca

SEQ ID NO: 2023618 - RNA, 19 nt, Homo sapiens
  misc_RNA (1)...(19): siRNA sense strand
gcaaccagagaaaccacuu

SEQ ID NO: 2023619 - RNA, 19 nt, Homo sapiens
  misc_RNA (1)...(19): siRNA sense strand
uauguuagcaaccaugugu

SEQ ID NO: 2023620 - RNA, 19 nt, Homo sapiens
  misc_RNA (1)...(19): siRNA sense strand
uugcagaacuggaaaacaa

SEQ ID NO: 2023621 - RNA, 19 nt, Homo sapiens
  misc_RNA (1)...(19): siRNA sense strand
cagaacagccugcaaauua

SEQ ID NO: 2023622 - RNA, 19 nt, Homo sapiens
  misc_RNA (1)...(19): siRNA sense strand
ggaaaucuccugcaaagaa

SEQ ID NO: 2023623 - RNA, 19 nt, Homo sapiens
  misc_RNA (1)...(19): siRNA sense strand
caacaaagacagcuuauug

SEQ ID NO: 2023624 - RNA, 19 nt, Homo sapiens
  misc_RNA (1)...(19): siRNA sense strand
uggaagagcugaugaaguu

SEQ ID NO: 2023625 - RNA, 19 nt, Homo sapiens
  misc_RNA (1)...(19): siRNA sense strand
guugauaucuggaacauga

SEQ ID NO: 2023626 - RNA, 19 nt, Homo sapiens
  misc_RNA (1)...(19): siRNA sense strand
ggaagaccauggcagagaa

SEQ ID NO: 2023627 - RNA, 19 nt, Homo sapiens
  misc_RNA (1)...(19): siRNA sense strand
gacuugagcuuuaacuuug

SEQ ID NO: 2023628 - RNA, 19 nt, Homo sapiens
  misc_RNA (1)...(19): siRNA sense strand
ucauacgacuaucaacuua

SEQ ID NO: 2023629 - RNA, 19 nt, Homo sapiens
  misc_RNA (1)...(19): siRNA sense strand
gcacaggcuugcccauguu

SEQ ID NO: 2023630 - RNA, 19 nt, Homo sapiens
  misc_RNA (1)...(19): siRNA sense strand
gaaaugcgugcucagaauu

SEQ ID NO: 2023631 - RNA, 19 nt, Homo sapiens
  misc_RNA (1)...(19): siRNA sense strand
gaaaucuccugcaaagaag

SEQ ID NO: 2023632 - RNA, 19 nt, Homo sapiens
  misc_RNA (1)...(19): siRNA sense strand
uccaauggcuuaaugauau

SEQ ID NO: 2023633 - RNA, 19 nt, Homo sapiens
  misc_RNA (1)...(19): siRNA sense strand
ccacugacuugagcuuuaa

SEQ ID NO: 2023634 - RNA, 19 nt, Homo sapiens
  misc_RNA (1)...(19): siRNA sense strand
aaacaacaaagacagcuua

SEQ ID NO: 2023635 - RNA, 19 nt, Homo sapiens
  misc_RNA (1)...(19): siRNA sense strand
uagcaaguuugaccaguuu

SEQ ID NO: 2023636 - RNA, 19 nt, Homo sapiens
  misc_RNA (1)...(19): siRNA sense strand
cccaacagcugucuuugaa

SEQ ID NO: 2023637 - RNA, 19 nt, Homo sapiens
  misc_RNA (1)...(19): siRNA sense strand
gaggaacaccgucuuauag

SEQ ID NO: 2023638 - RNA, 19 nt, Homo sapiens
  misc_RNA (1)...(19): siRNA sense strand
gaugaggaacaccgucuua

SEQ ID NO: 2023639 - RNA, 19 nt, Homo sapiens
  misc_RNA (1)...(19): siRNA sense strand
agaggcagcuguucauaga

SEQ ID NO: 2023640 - RNA, 19 nt, Homo sapiens
  misc_RNA (1)...(19): siRNA sense strand
gaagaggcagcuguucaua

SEQ ID NO: 2023641 - RNA, 19 nt, Homo sapiens
  misc_RNA (1)...(19): siRNA sense strand
gcagagaaagauaaugcua

SEQ ID NO: 2023642 - RNA, 19 nt, Homo sapiens
  misc_RNA (1)...(19): siRNA sense strand
ccacagcagagaaagauaa

SEQ ID NO: 2023643 - RNA, 19 nt, Homo sapiens
  misc_RNA (1)...(19): siRNA sense strand
gccacagggucaccacaua

SEQ ID NO: 2023644 - RNA, 19 nt, Homo sapiens
  misc_RNA (1)...(19): siRNA sense strand
aagcugagccaugcaauua

SEQ ID NO: 2023645 - RNA, 19 nt, Homo sapiens
  misc_RNA (1)...(19): siRNA sense strand
gaggcaaguugacgguauu

SEQ ID NO: 2023646 - RNA, 19 nt, Homo sapiens
  misc_RNA (1)...(19): siRNA sense strand
ugacuugagcuuuaacuuu

SEQ ID NO: 2023647 - RNA, 19 nt, Homo sapiens
  misc_RNA (1)...(19): siRNA sense strand
gugagaguaugauggguuu

SEQ ID NO: 2023648 - RNA, 19 nt, Homo sapiens
  misc_RNA (1)...(19): siRNA sense strand
ggacaaauugagauauguu

SEQ ID NO: 2023649 - RNA, 19 nt, Homo sapiens
  misc_RNA (1)...(19): siRNA sense strand
ugaggaacaccgucuuaua

SEQ ID NO: 2023650 - RNA, 19 nt, Homo sapiens
  misc_RNA (1)...(19): siRNA sense strand
ccacuugaccuugcacaua

SEQ ID NO: 2023651 - RNA, 19 nt, Homo sapiens
  misc_RNA (1)...(19): siRNA sense strand
ccaauggcuuaaugauauu

SEQ ID NO: 2023652 - RNA, 19 nt, Homo sapiens
  misc_RNA (1)...(19): siRNA sense strand
agaaaugcgugcucagaau

SEQ ID NO: 2023653 - RNA, 19 nt, Homo sapiens
  misc_RNA (1)...(19): siRNA sense strand
gcaaccagcaccagaugaa

SEQ ID NO: 2023654 - RNA, 19 nt, Homo sapiens
  misc_RNA (1)...(19): siRNA sense strand
gcaggaggccuucgcacaa

SEQ ID NO: 2023655 - RNA, 19 nt, Homo sapiens
  misc_RNA (1)...(19): siRNA sense strand
gaagcugagccaugcaauu

SEQ ID NO: 2023656 - RNA, 19 nt, Homo sapiens
  misc_RNA (1)...(19): siRNA sense strand
gagaagaggcagcuguuca

SEQ ID NO: 2023657 - RNA, 19 nt, Homo sapiens
  misc_RNA (1)...(19): siRNA sense strand
cgagacaauggccuuaaua

SEQ ID NO: 2023658 - RNA, 19 nt, Homo sapiens
  misc_RNA (1)...(19): siRNA sense strand
cccacugacuugagcuuua

SEQ ID NO: 2023659 - RNA, 19 nt, Homo sapiens
  misc_RNA (1)...(19): siRNA sense strand
gaacaagcgccuuccuucu

SEQ ID NO: 2023660 - RNA, 19 nt, Homo sapiens
  misc_RNA (1)...(19): siRNA sense strand
uuaauacacuggaccauac

SEQ ID NO: 2023661 - RNA, 19 nt, Homo sapiens
  misc_RNA (1)...(19): siRNA sense strand
gcaaaggaaggaugaacug

SEQ ID NO: 2023662 - RNA, 19 nt, Homo sapiens
  misc_RNA (1)...(19): siRNA sense strand
cacuugaccuugcacauau

SEQ ID NO: 2023663 - RNA, 19 nt, Homo sapiens
  misc_RNA (1)...(19): siRNA sense strand
gaaaccacuugaccuugca

SEQ ID NO: 2023664 - RNA, 19 nt, Homo sapiens
  misc_RNA (1)...(19): siRNA sense strand
cagagaaagauaaugcuaa

SEQ ID NO: 2023665 - RNA, 19 nt, Homo sapiens
  misc_RNA (1)...(19): siRNA sense strand
ccaaauuaguguggaacaa

SEQ ID NO: 2023666 - RNA, 19 nt, Homo sapiens
  misc_RNA (1)...(19): siRNA sense strand
gaacuggagcagaggaugu

SEQ ID NO: 2023667 - RNA, 19 nt, Homo sapiens
  misc_RNA (1)...(19): siRNA sense strand
ggaacaagcggaagaccau

SEQ ID NO: 2023668 - RNA, 19 nt, Homo sapiens
  misc_RNA (1)...(19): siRNA sense strand
uuacagaacagccugcaaa

SEQ ID NO: 2023669 - RNA, 19 nt, Homo sapiens
  misc_RNA (1)...(19): siRNA sense strand
aggcagcuguucauagaaa

SEQ ID NO: 2023670 - RNA, 19 nt, Homo sapiens
  misc_RNA (1)...(19): siRNA sense strand
ugaaggaaguucugaagcu

SEQ ID NO: 2023671 - RNA, 19 nt, Homo sapiens
  misc_RNA (1)...(19): siRNA sense strand
cgaggcaaguugacgguau

SEQ ID NO: 2023672 - RNA, 19 nt, Homo sapiens
  misc_RNA (1)...(19): siRNA sense strand
ggaacaccgucuuauagcu

SEQ ID NO: 2023673 - RNA, 19 nt, Homo sapiens
  misc_RNA (1)...(19): siRNA sense strand
gcaauuaguaaaucuuugg

SEQ ID NO: 2023674 - RNA, 19 nt, Homo sapiens
  misc_RNA (1)...(19): siRNA sense strand
gcugagccaugcaauuagu

SEQ ID NO: 2023675 - RNA, 19 nt, Homo sapiens
  misc_RNA (1)...(19): siRNA sense strand
acaauggccuuaauacacu

SEQ ID NO: 2023676 - RNA, 19 nt, Homo sapiens
  misc_RNA (1)...(19): siRNA sense strand
gaagggccaucuuuugguu

SEQ ID NO: 2023677 - RNA, 19 nt, Homo sapiens
  misc_RNA (1)...(19): siRNA sense strand
cuccucaacuuuaugauug

SEQ ID NO: 2023678 - RNA, 19 nt, Homo sapiens
  misc_RNA (1)...(19): siRNA sense strand
gacaauggccuuaauacac

SEQ ID NO: 2023679 - RNA, 19 nt, Homo sapiens
  misc_RNA (1)...(19): siRNA sense strand
caaauuaguguggaacaau

SEQ ID NO: 2023680 - RNA, 19 nt, Homo sapiens
  misc_RNA (1)...(19): siRNA sense strand
ucaccaaauuaguguggaa

SEQ ID NO: 2023681 - RNA, 19 nt, Homo sapiens
  misc_RNA (1)...(19): siRNA sense strand
acuaucaacuuacagaaca

SEQ ID NO: 2023682 - RNA, 19 nt, Homo sapiens
  misc_RNA (1)...(19): siRNA sense strand
agaacagccugcaaauuac

SEQ ID NO: 2023683 - RNA, 19 nt, Homo sapiens
  misc_RNA (1)...(19): siRNA sense strand
gcucccaacagcugucuuu

SEQ ID NO: 2023684 - RNA, 19 nt, Homo sapiens
  misc_RNA (1)...(19): siRNA sense strand
uuagcaaguuugaccaguu

SEQ ID NO: 2023685 - RNA, 19 nt, Homo sapiens
  misc_RNA (1)...(19): siRNA sense strand
aacaagcgccuuccuucua

SEQ ID NO: 2023686 - RNA, 19 nt, Homo sapiens
  misc_RNA (1)...(19): siRNA sense strand
aaauuaguguggaacaauc

SEQ ID NO: 2023687 - RNA, 19 nt, Homo sapiens
  misc_RNA (1)...(19): siRNA sense strand
gaccauaccaccgagauca

SEQ ID NO: 2023688 - RNA, 19 nt, Homo sapiens
  misc_RNA (1)...(19): siRNA sense strand
gccaugcaauuaguaaauc

SEQ ID NO: 2023689 - RNA, 19 nt, Homo sapiens
  misc_RNA (1)...(19): siRNA sense strand
uuggaaaucuccugcaaag

SEQ ID NO: 2023690 - RNA, 19 nt, Homo sapiens
  misc_RNA (1)...(19): siRNA sense strand
ccgagacaauggccuuaau

SEQ ID NO: 2023691 - RNA, 19 nt, Homo sapiens
  misc_RNA (1)...(19): siRNA sense strand
ugacucguccucccacuga

SEQ ID NO: 2023692 - RNA, 19 nt, Homo sapiens
  misc_RNA (1)...(19): siRNA sense strand
ugaaugacaccaugguuag

SEQ ID NO: 2023693 - RNA, 19 nt, Homo sapiens
  misc_RNA (1)...(19): siRNA sense strand
gaugucauacgacuaucaa

SEQ ID NO: 2023694 - RNA, 19 nt, Homo sapiens
  misc_RNA (1)...(19): siRNA sense strand
gagacaauggccuuaauac

SEQ ID NO: 2023695 - RNA, 19 nt, Homo sapiens
  misc_RNA (1)...(19): siRNA sense strand
cuggacaaauugagauaug

SEQ ID NO: 2023696 - RNA, 19 nt, Homo sapiens
  misc_RNA (1)...(19): siRNA sense strand
uagaaaugcgugcucagaa

SEQ ID NO: 2023697 - RNA, 19 nt, Homo sapiens
  misc_RNA (1)...(19): siRNA sense strand
agagaaaccacuugaccuu

SEQ ID NO: 2023698 - RNA, 19 nt, Homo sapiens
  misc_RNA (1)...(19): siRNA sense strand
auacgacuaucaacuuaca

SEQ ID NO: 2023699 - RNA, 19 nt, Homo sapiens
  misc_RNA (1)...(19): siRNA sense strand
ccagaugucagauuccaau

SEQ ID NO: 2023700 - RNA, 19 nt, Homo sapiens
  misc_RNA (1)...(19): siRNA sense strand
gaauuuugaugucauacga

SEQ ID NO: 2023701 - RNA, 19 nt, Homo sapiens
  misc_RNA (1)...(19): siRNA sense strand
ugaccuugcacauauaguu

SEQ ID NO: 2023702 - RNA, 19 nt, Homo sapiens
  misc_RNA (1)...(19): siRNA sense strand
acaagcgccuuccuucuac

SEQ ID NO: 2023703 - RNA, 19 nt, Homo sapiens
  misc_RNA (1)...(19): siRNA sense strand
ucucccagaugucagauuc

SEQ ID NO: 2023704 - RNA, 19 nt, Homo sapiens
  misc_RNA (1)...(19): siRNA sense strand
cuuaauacacuggaccaua

SEQ ID NO: 2023705 - RNA, 19 nt, Homo sapiens
  misc_RNA (1)...(19): siRNA sense strand
gaugccaacaaacaacaaa

SEQ ID NO: 2023706 - RNA, 19 nt, Homo sapiens
  misc_RNA (1)...(19): siRNA sense strand
augaaugacaccaugguua

SEQ ID NO: 2023707 - RNA, 19 nt, Homo sapiens
  misc_RNA (1)...(19): siRNA sense strand
gacgguauuuucaguuaaa

SEQ ID NO: 2023708 - RNA, 19 nt, Homo sapiens
  misc_RNA (1)...(19): siRNA sense strand
ucuccuccaucuacuauca

SEQ ID NO: 2023709 - RNA, 19 nt, Homo sapiens
  misc_RNA (1)...(19): siRNA sense strand
cagagaagaggcagcuguu

SEQ ID NO: 2023710 - RNA, 19 nt, Homo sapiens
  misc_RNA (1)...(19): siRNA sense strand
cagcagagaaagauaaugc

SEQ ID NO: 2023711 - RNA, 19 nt, Homo sapiens
  misc_RNA (1)...(19): siRNA sense strand
agauuccaauggcuuaaug

SEQ ID NO: 2023712 - RNA, 19 nt, Homo sapiens
  misc_RNA (1)...(19): siRNA sense strand
gcuuauugcagaacuggaa

SEQ ID NO: 2023713 - RNA, 19 nt, Homo sapiens
  misc_RNA (1)...(19): siRNA sense strand
ccaacaaacaacaaagaca

SEQ ID NO: 2023714 - RNA, 19 nt, Homo sapiens
  misc_RNA (1)...(19): siRNA sense strand
gucauacgacuaucaacuu

SEQ ID NO: 2023715 - RNA, 19 nt, Homo sapiens
  misc_RNA (1)...(19): siRNA sense strand
gagccaugcaauuaguaaa

SEQ ID NO: 2023716 - RNA, 19 nt, Homo sapiens
  misc_RNA (1)...(19): siRNA sense strand
ugaggaaagugggaacaag

SEQ ID NO: 2023717 - RNA, 19 nt, Homo sapiens
  misc_RNA (1)...(19): siRNA sense strand
agacaauggccuuaauaca

SEQ ID NO: 2023718 - RNA, 19 nt, Homo sapiens
  misc_RNA (1)...(19): siRNA sense strand
gcaaccagagaaaccacuu

SEQ ID NO: 2023719 - RNA, 19 nt, Homo sapiens
  misc_RNA (1)...(19): siRNA sense strand
uauguuagcaaccaugugu

SEQ ID NO: 2023720 - RNA, 19 nt, Homo sapiens
  misc_RNA (1)...(19): siRNA sense strand
uugcagaacuggaaaacaa

SEQ ID NO: 2023721 - RNA, 19 nt, Homo sapiens
  misc_RNA (1)...(19): siRNA sense strand
cagaacagccugcaaauua

SEQ ID NO: 2023722 - RNA, 19 nt, Homo sapiens
  misc_RNA (1)...(19): siRNA sense strand
ggaaaucuccugcaaagaa

SEQ ID NO: 2023723 - RNA, 19 nt, Homo sapiens
  misc_RNA (1)...(19): siRNA sense strand
caacaaagacagcuuauug

SEQ ID NO: 2023724 - RNA, 19 nt, Homo sapiens
  misc_RNA (1)...(19): siRNA sense strand
uggaagagcugaugaaguu

SEQ ID NO: 2023725 - RNA, 19 nt, Homo sapiens
  misc_RNA (1)...(19): siRNA sense strand
guugauaucuggaacauga

SEQ ID NO: 2023726 - RNA, 19 nt, Homo sapiens
  misc_RNA (1)...(19): siRNA sense strand
ggaagaccauggcagagaa

SEQ ID NO: 2023727 - RNA, 19 nt, Homo sapiens
  misc_RNA (1)...(19): siRNA sense strand
gacuugagcuuuaacuuug

SEQ ID NO: 2023728 - RNA, 19 nt, Homo sapiens
  misc_RNA (1)...(19): siRNA sense strand
ucauacgacuaucaacuua

SEQ ID NO: 2023729 - RNA, 19 nt, Homo sapiens
  misc_RNA (1)...(19): siRNA sense strand
gcacaggcuugcccauguu

SEQ ID NO: 2023730 - RNA, 19 nt, Homo sapiens
  misc_RNA (1)...(19): siRNA sense strand
gaaaugcgugcucagaauu

SEQ ID NO: 2023731 - RNA, 19 nt, Homo sapiens
  misc_RNA (1)...(19): siRNA sense strand
gaaaucuccugcaaagaag

SEQ ID NO: 2023732 - RNA, 19 nt, Homo sapiens
  misc_RNA (1)...(19): siRNA sense strand
uccaauggcuuaaugauau

SEQ ID NO: 2023733 - RNA, 19 nt, Homo sapiens
  misc_RNA (1)...(19): siRNA sense strand
ccacugacuugagcuuuaa

SEQ ID NO: 2023734 - RNA, 19 nt, Homo sapiens
  misc_RNA (1)...(19): siRNA sense strand
aaacaacaaagacagcuua

SEQ ID NO: 2023735 - RNA, 19 nt, Homo sapiens
  misc_RNA (1)...(19): siRNA sense strand
uagcaaguuugaccaguuu

SEQ ID NO: 2023736 - RNA, 19 nt, Homo sapiens
  misc_RNA (1)...(19): siRNA sense strand
cccaacagcugucuuugaa

SEQ ID NO: 2023737 - RNA, 19 nt, Homo sapiens
  misc_RNA (1)...(19): siRNA sense strand
gaggaacaccgucuuauag

SEQ ID NO: 2023738 - RNA, 19 nt, Homo sapiens
  misc_RNA (1)...(19): siRNA sense strand
gaugaggaacaccgucuua

SEQ ID NO: 2023739 - RNA, 19 nt, Homo sapiens
  misc_RNA (1)...(19): siRNA sense strand
agaggcagcuguucauaga

SEQ ID NO: 2023740 - RNA, 19 nt, Homo sapiens
  misc_RNA (1)...(19): siRNA sense strand
gaagaggcagcuguucaua

SEQ ID NO: 2023741 - RNA, 19 nt, Homo sapiens
  misc_RNA (1)...(19): siRNA sense strand
gcagagaaagauaaugcua

SEQ ID NO: 2023742 - RNA, 19 nt, Homo sapiens
  misc_RNA (1)...(19): siRNA sense strand
ccacagcagagaaagauaa

SEQ ID NO: 2023743 - RNA, 19 nt, Homo sapiens
  misc_RNA (1)...(19): siRNA sense strand
gccacagggucaccacaua

SEQ ID NO: 2023744 - RNA, 19 nt, Homo sapiens
  misc_RNA (1)...(19): siRNA sense strand
aagcugagccaugcaauua

SEQ ID NO: 2023745 - RNA, 19 nt, Homo sapiens
  misc_RNA (1)...(19): siRNA sense strand
gaggcaaguugacgguauu

SEQ ID NO: 2023746 - RNA, 19 nt, Homo sapiens
  misc_RNA (1)...(19): siRNA sense strand
ugacuugagcuuuaacuuu

SEQ ID NO: 2023747 - RNA, 19 nt, Homo sapiens
  misc_RNA (1)...(19): siRNA sense strand
gugagaguaugauggguuu

SEQ ID NO: 2023748 - RNA, 19 nt, Homo sapiens
  misc_RNA (1)...(19): siRNA sense strand
ggacaaauugagauauguu

SEQ ID NO: 2023749 - RNA, 19 nt, Homo sapiens
  misc_RNA (1)...(19): siRNA sense strand
ugaggaacaccgucuuaua

SEQ ID NO: 2023750 - RNA, 19 nt, Homo sapiens
  misc_RNA (1)...(19): siRNA sense strand
ccacuugaccuugcacaua

SEQ ID NO: 2023751 - RNA, 19 nt, Homo sapiens
  misc_RNA (1)...(19): siRNA sense strand
ccaauggcuuaaugauauu

SEQ ID NO: 2023752 - RNA, 19 nt, Homo sapiens
  misc_RNA (1)...(19): siRNA sense strand
agaaaugcgugcucagaau

SEQ ID NO: 2023753 - RNA, 19 nt, Homo sapiens
  misc_RNA (1)...(19): siRNA sense strand
gcaaccagcaccagaugaa

SEQ ID NO: 2023754 - RNA, 19 nt, Homo sapiens
  misc_RNA (1)...(19): siRNA sense strand
gcaggaggccuucgcacaa

SEQ ID NO: 2023755 - RNA, 19 nt, Homo sapiens
  misc_RNA (1)...(19): siRNA sense strand
gaagcugagccaugcaauu

SEQ ID NO: 2023756 - RNA, 19 nt, Homo sapiens
  misc_RNA (1)...(19): siRNA sense strand
gagaagaggcagcuguuca

SEQ ID NO: 2023757 - RNA, 19 nt, Homo sapiens
  misc_RNA (1)...(19): siRNA sense strand
cgagacaauggccuuaaua

SEQ ID NO: 2023758 - RNA, 19 nt, Homo sapiens
  misc_RNA (1)...(19): siRNA sense strand
cccacugacuugagcuuua

SEQ ID NO: 2023759 - RNA, 19 nt, Homo sapiens
  misc_RNA (1)...(19): siRNA sense strand
gaacaagcgccuuccuucu

SEQ ID NO: 2023760 - RNA, 19 nt, Homo sapiens
  misc_RNA (1)...(19): siRNA sense strand
uuaauacacuggaccauac

SEQ ID NO: 2023761 - RNA, 19 nt, Homo sapiens
  misc_RNA (1)...(19): siRNA sense strand
gcaaaggaaggaugaacug

SEQ ID NO: 2023762 - RNA, 19 nt, Homo sapiens
  misc_RNA (1)...(19): siRNA sense strand
cacuugaccuugcacauau

SEQ ID NO: 2023763 - RNA, 19 nt, Homo sapiens
  misc_RNA (1)...(19): siRNA sense strand
gaaaccacuugaccuugca

SEQ ID NO: 2023764 - RNA, 19 nt, Homo sapiens
  misc_RNA (1)...(19): siRNA sense strand
cagagaaagauaaugcuaa

SEQ ID NO: 2023765 - RNA, 19 nt, Homo sapiens
  misc_RNA (1)...(19): siRNA sense strand
ccaaauuaguguggaacaa

SEQ ID NO: 2023766 - RNA, 19 nt, Homo sapiens
  misc_RNA (1)...(19): siRNA sense strand
gaacuggagcagaggaugu

SEQ ID NO: 2023767 - RNA, 19 nt, Homo sapiens
  misc_RNA (1)...(19): siRNA sense strand
ggaacaagcggaagaccau

SEQ ID NO: 2023768 - RNA, 19 nt, Homo sapiens
  misc_RNA (1)...(19): siRNA sense strand
uuacagaacagccugcaaa

SEQ ID NO: 2023769 - RNA, 19 nt, Homo sapiens
  misc_RNA (1)...(19): siRNA sense strand
aggcagcuguucauagaaa

SEQ ID NO: 2023770 - RNA, 19 nt, Homo sapiens
  misc_RNA (1)...(19): siRNA sense strand
ugaaggaaguucugaagcu

SEQ ID NO: 2023771 - RNA, 19 nt, Homo sapiens
  misc_RNA (1)...(19): siRNA sense strand
cgaggcaaguugacgguau

SEQ ID NO: 2023772 - RNA, 19 nt, Homo sapiens
  misc_RNA (1)...(19): siRNA sense strand
ggaacaccgucuuauagcu

SEQ ID NO: 2023773 - RNA, 19 nt, Homo sapiens
  misc_RNA (1)...(19): siRNA sense strand
gcaauuaguaaaucuuugg

SEQ ID NO: 2023774 - RNA, 19 nt, Homo sapiens
  misc_RNA (1)...(19): siRNA sense strand
gcugagccaugcaauuagu

SEQ ID NO: 2023775 - RNA, 19 nt, Homo sapiens
  misc_RNA (1)...(19): siRNA sense strand
acaauggccuuaauacacu

SEQ ID NO: 2023776 - RNA, 19 nt, Homo sapiens
  misc_RNA (1)...(19): siRNA sense strand
gaagggccaucuuuugguu

SEQ ID NO: 2023777 - RNA, 19 nt, Homo sapiens
  misc_RNA (1)...(19): siRNA sense strand
cuccucaacuuuaugauug

SEQ ID NO: 2023778 - RNA, 19 nt, Homo sapiens
  misc_RNA (1)...(19): siRNA sense strand
gacaauggccuuaauacac

SEQ ID NO: 2023779 - RNA, 19 nt, Homo sapiens
  misc_RNA (1)...(19): siRNA sense strand
caaauuaguguggaacaau

SEQ ID NO: 2023780 - RNA, 19 nt, Homo sapiens
  misc_RNA (1)...(19): siRNA sense strand
ucaccaaauuaguguggaa

SEQ ID NO: 2023781 - RNA, 19 nt, Homo sapiens
  misc_RNA (1)...(19): siRNA sense strand
acuaucaacuuacagaaca

SEQ ID NO: 2023782 - RNA, 19 nt, Homo sapiens
  misc_RNA (1)...(19): siRNA sense strand
agaacagccugcaaauuac

SEQ ID NO: 2023783 - RNA, 19 nt, Homo sapiens
  misc_RNA (1)...(19): siRNA sense strand
gcucccaacagcugucuuu

SEQ ID NO: 2023784 - RNA, 19 nt, Homo sapiens
  misc_RNA (1)...(19): siRNA sense strand
uuagcaaguuugaccaguu

SEQ ID NO: 2023785 - RNA, 19 nt, Homo sapiens
  misc_RNA (1)...(19): siRNA sense strand
aacaagcgccuuccuucua

SEQ ID NO: 2023786 - RNA, 19 nt, Homo sapiens
  misc_RNA (1)...(19): siRNA sense strand
aaauuaguguggaacaauc

SEQ ID NO: 2023787 - RNA, 19 nt, Homo sapiens
  misc_RNA (1)...(19): siRNA sense strand
gaccauaccaccgagauca

SEQ ID NO: 2023788 - RNA, 19 nt, Homo sapiens
  misc_RNA (1)...(19): siRNA sense strand
gccaugcaauuaguaaauc

SEQ ID NO: 2023789 - RNA, 19 nt, Homo sapiens
  misc_RNA (1)...(19): siRNA sense strand
uuggaaaucuccugcaaag

SEQ ID NO: 2023790 - RNA, 19 nt, Homo sapiens
  misc_RNA (1)...(19): siRNA sense strand
ccgagacaauggccuuaau

SEQ ID NO: 2023791 - RNA, 19 nt, Homo sapiens
  misc_RNA (1)...(19): siRNA sense strand
ugacucguccucccacuga

SEQ ID NO: 2023792 - RNA, 19 nt, Homo sapiens
  misc_RNA (1)...(19): siRNA sense strand
ugaaugacaccaugguuag

SEQ ID NO: 2023793 - RNA, 19 nt, Homo sapiens
  misc_RNA (1)...(19): siRNA sense strand
gaugucauacgacuaucaa

SEQ ID NO: 2023794 - RNA, 19 nt, Homo sapiens
  misc_RNA (1)...(19): siRNA sense strand
gagacaauggccuuaauac

SEQ ID NO: 2023795 - RNA, 19 nt, Homo sapiens
  misc_RNA (1)...(19): siRNA sense strand
cuggacaaauugagauaug

SEQ ID NO: 2023796 - RNA, 19 nt, Homo sapiens
  misc_RNA (1)...(19): siRNA sense strand
uagaaaugcgugcucagaa

SEQ ID NO: 2023797 - RNA, 19 nt, Homo sapiens
  misc_RNA (1)...(19): siRNA sense strand
agagaaaccacuugaccuu

SEQ ID NO: 2023798 - RNA, 19 nt, Homo sapiens
  misc_RNA (1)...(19): siRNA sense strand
auacgacuaucaacuuaca

SEQ ID NO: 2023799 - RNA, 19 nt, Homo sapiens
  misc_RNA (1)...(19): siRNA sense strand
ccagaugucagauuccaau

SEQ ID NO: 2023800 - RNA, 19 nt, Homo sapiens
  misc_RNA (1)...(19): siRNA sense strand
gaauuuugaugucauacga

SEQ ID NO: 2023801 - RNA, 19 nt, Homo sapiens
  misc_RNA (1)...(19): siRNA sense strand
ugaccuugcacauauaguu

SEQ ID NO: 2023802 - RNA, 19 nt, Homo sapiens
  misc_RNA (1)...(19): siRNA sense strand
acaagcgccuuccuucuac

SEQ ID NO: 2023803 - RNA, 19 nt, Homo sapiens
  misc_RNA (1)...(19): siRNA sense strand
ucucccagaugucagauuc

SEQ ID NO: 2023804 - RNA, 19 nt, Homo sapiens
  misc_RNA (1)...(19): siRNA sense strand
cuuaauacacuggaccaua

SEQ ID NO: 2023805 - RNA, 19 nt, Homo sapiens
  misc_RNA (1)...(19): siRNA sense strand
gaugccaacaaacaacaaa

SEQ ID NO: 2023806 - RNA, 19 nt, Homo sapiens
  misc_RNA (1)...(19): siRNA sense strand
augaaugacaccaugguua

SEQ ID NO: 2023807 - RNA, 19 nt, Homo sapiens
  misc_RNA (1)...(19): siRNA sense strand
gacgguauuuucaguuaaa

SEQ ID NO: 2023808 - RNA, 19 nt, Homo sapiens
  misc_RNA (1)...(19): siRNA sense strand
ucuccuccaucuacuauca

SEQ ID NO: 2023809 - RNA, 19 nt, Homo sapiens
  misc_RNA (1)...(19): siRNA sense strand
cagagaagaggcagcuguu

SEQ ID NO: 2023810 - RNA, 19 nt, Homo sapiens
  misc_RNA (1)...(19): siRNA sense strand
cagcagagaaagauaaugc

SEQ ID NO: 2023811 - RNA, 19 nt, Homo sapiens
  misc_RNA (1)...(19): siRNA sense strand
agauuccaauggcuuaaug

SEQ ID NO: 2023812 - RNA, 19 nt, Homo sapiens
  misc_RNA (1)...(19): siRNA sense strand
gcuuauugcagaacuggaa

SEQ ID NO: 2023813 - RNA, 19 nt, Homo sapiens
  misc_RNA (1)...(19): siRNA sense strand
ccaacaaacaacaaagaca

SEQ ID NO: 2023814 - RNA, 19 nt, Homo sapiens
  misc_RNA (1)...(19): siRNA sense strand
gucauacgacuaucaacuu

SEQ ID NO: 2023815 - RNA, 19 nt, Homo sapiens
  misc_RNA (1)...(19): siRNA sense strand
gagccaugcaauuaguaaa

SEQ ID NO: 2023816 - RNA, 19 nt, Homo sapiens
  misc_RNA (1)...(19): siRNA sense strand
ugaggaaagugggaacaag

SEQ ID NO: 2023817 - RNA, 19 nt, Homo sapiens
  misc_RNA (1)...(19): siRNA sense strand
agacaauggccuuaauaca

SEQ ID NO: 2023818 - RNA, 19 nt, Homo sapiens
  misc_RNA (1)...(19): siRNA sense strand
gcaaccagagaaaccacuu

SEQ ID NO: 2023819 - RNA, 19 nt, Homo sapiens
  misc_RNA (1)...(19): siRNA sense strand
uauguuagcaaccaugugu

SEQ ID NO: 2023820 - RNA, 19 nt, Homo sapiens
  misc_RNA (1)...(19): siRNA sense strand
uugcagaacuggaaaacaa

SEQ ID NO: 2023821 - RNA, 19 nt, Homo sapiens
  misc_RNA (1)...(19): siRNA sense strand
cagaacagccugcaaauua

SEQ ID NO: 2023822 - RNA, 19 nt, Homo sapiens
  misc_RNA (1)...(19): siRNA sense strand
ggaaaucuccugcaaagaa

SEQ ID NO: 2023823 - RNA, 19 nt, Homo sapiens
  misc_RNA (1)...(19): siRNA sense strand
caacaaagacagcuuauug

SEQ ID NO: 2023824 - RNA, 19 nt, Homo sapiens
  misc_RNA (1)...(19): siRNA sense strand
uggaagagcugaugaaguu

SEQ ID NO: 2023825 - RNA, 19 nt, Homo sapiens
  misc_RNA (1)...(19): siRNA sense strand
guugauaucuggaacauga

SEQ ID NO: 2023826 - RNA, 19 nt, Homo sapiens
  misc_RNA (1)...(19): siRNA sense strand
ggaagaccauggcagagaa

SEQ ID NO: 2023827 - RNA, 19 nt, Homo sapiens
  misc_RNA (1)...(19): siRNA sense strand
gacuugagcuuuaacuuug

SEQ ID NO: 2023828 - RNA, 19 nt, Homo sapiens
  misc_RNA (1)...(19): siRNA sense strand
ucauacgacuaucaacuua

SEQ ID NO: 2023829 - RNA, 19 nt, Homo sapiens
  misc_RNA (1)...(19): siRNA sense strand
gcacaggcuugcccauguu

SEQ ID NO: 2023830 - RNA, 19 nt, Homo sapiens
  misc_RNA (1)...(19): siRNA sense strand
gaaaugcgugcucagaauu

SEQ ID NO: 2023831 - RNA, 19 nt, Homo sapiens
  misc_RNA (1)...(19): siRNA sense strand
gaaaucuccugcaaagaag

SEQ ID NO: 2023832 - RNA, 19 nt, Homo sapiens
  misc_RNA (1)...(19): siRNA sense strand
uccaauggcuuaaugauau

SEQ ID NO: 2023833 - RNA, 19 nt, Homo sapiens
  misc_RNA (1)...(19): siRNA sense strand
ccacugacuugagcuuuaa

SEQ ID NO: 2023834 - RNA, 19 nt, Homo sapiens
  misc_RNA (1)...(19): siRNA sense strand
aaacaacaaagacagcuua

SEQ ID NO: 2023835 - RNA, 19 nt, Homo sapiens
  misc_RNA (1)...(19): siRNA sense strand
uagcaaguuugaccaguuu

SEQ ID NO: 2023836 - RNA, 19 nt, Homo sapiens
  misc_RNA (1)...(19): siRNA sense strand
cccaacagcugucuuugaa

SEQ ID NO: 2023837 - RNA, 19 nt, Homo sapiens
  misc_RNA (1)...(19): siRNA sense strand
gaggaacaccgucuuauag

SEQ ID NO: 2023838 - RNA, 19 nt, Homo sapiens
  misc_RNA (1)...(19): siRNA sense strand
gaugaggaacaccgucuua

SEQ ID NO: 2023839 - RNA, 19 nt, Homo sapiens
  misc_RNA (1)...(19): siRNA sense strand
agaggcagcuguucauaga

SEQ ID NO: 2023840 - RNA, 19 nt, Homo sapiens
  misc_RNA (1)...(19): siRNA sense strand
gaagaggcagcuguucaua

SEQ ID NO: 2023841 - RNA, 19 nt, Homo sapiens
  misc_RNA (1)...(19): siRNA sense strand
gcagagaaagauaaugcua

SEQ ID NO: 2023842 - RNA, 19 nt, Homo sapiens
  misc_RNA (1)...(19): siRNA sense strand
ccacagcagagaaagauaa

SEQ ID NO: 2023843 - RNA, 19 nt, Homo sapiens
  misc_RNA (1)...(19): siRNA sense strand
gccacagggucaccacaua

SEQ ID NO: 2023844 - RNA, 19 nt, Homo sapiens
  misc_RNA (1)...(19): siRNA sense strand
aagcugagccaugcaauua

SEQ ID NO: 2023845 - RNA, 19 nt, Homo sapiens
  misc_RNA (1)...(19): siRNA sense strand
gaggcaaguugacgguauu

SEQ ID NO: 2023846 - RNA, 19 nt, Homo sapiens
  misc_RNA (1)...(19): siRNA sense strand
ugacuugagcuuuaacuuu

SEQ ID NO: 2023847 - RNA, 19 nt, Homo sapiens
  misc_RNA (1)...(19): siRNA sense strand
gugagaguaugauggguuu

SEQ ID NO: 2023848 - RNA, 19 nt, Homo sapiens
  misc_RNA (1)...(19): siRNA sense strand
ggacaaauugagauauguu

SEQ ID NO: 2023849 - RNA, 19 nt, Homo sapiens
  misc_RNA (1)...(19): siRNA sense strand
ugaggaacaccgucuuaua

SEQ ID NO: 2023850 - RNA, 19 nt, Homo sapiens
  misc_RNA (1)...(19): siRNA sense strand
ccacuugaccuugcacaua

SEQ ID NO: 2023851 - RNA, 19 nt, Homo sapiens
  misc_RNA (1)...(19): siRNA sense strand
ccaauggcuuaaugauauu

SEQ ID NO: 2023852 - RNA, 19 nt, Homo sapiens
  misc_RNA (1)...(19): siRNA sense strand
agaaaugcgugcucagaau

SEQ ID NO: 2023853 - RNA, 19 nt, Homo sapiens
  misc_RNA (1)...(19): siRNA sense strand
gcaaccagcaccagaugaa

SEQ ID NO: 2023854 - RNA, 19 nt, Homo sapiens
  misc_RNA (1)...(19): siRNA sense strand
gcaggaggccuucgcacaa

SEQ ID NO: 2023855 - RNA, 19 nt, Homo sapiens
  misc_RNA (1)...(19): siRNA sense strand
gaagcugagccaugcaauu

SEQ ID NO: 2023856 - RNA, 19 nt, Homo sapiens
  misc_RNA (1)...(19): siRNA sense strand
gagaagaggcagcuguuca

SEQ ID NO: 2023857 - RNA, 19 nt, Homo sapiens
  misc_RNA (1)...(19): siRNA sense strand
cgagacaauggccuuaaua

SEQ ID NO: 2023858 - RNA, 19 nt, Homo sapiens
  misc_RNA (1)...(19): siRNA sense strand
cccacugacuugagcuuua

SEQ ID NO: 2023859 - RNA, 19 nt, Homo sapiens
  misc_RNA (1)...(19): siRNA sense strand
gaacaagcgccuuccuucu

SEQ ID NO: 2023860 - RNA, 19 nt, Homo sapiens
  misc_RNA (1)...(19): siRNA sense strand
uuaauacacuggaccauac

SEQ ID NO: 2023861 - RNA, 19 nt, Homo sapiens
  misc_RNA (1)...(19): siRNA sense strand
gcaaaggaaggaugaacug

SEQ ID NO: 2023862 - RNA, 19 nt, Homo sapiens
  misc_RNA (1)...(19): siRNA sense strand
cacuugaccuugcacauau

SEQ ID NO: 2023863 - RNA, 19 nt, Homo sapiens
  misc_RNA (1)...(19): siRNA sense strand
gaaaccacuugaccuugca

SEQ ID NO: 2023864 - RNA, 19 nt, Homo sapiens
  misc_RNA (1)...(19): siRNA sense strand
cagagaaagauaaugcuaa

SEQ ID NO: 2023865 - RNA, 19 nt, Homo sapiens
  misc_RNA (1)...(19): siRNA sense strand
ccaaauuaguguggaacaa

SEQ ID NO: 2023866 - RNA, 19 nt, Homo sapiens
  misc_RNA (1)...(19): siRNA sense strand
gaacuggagcagaggaugu

SEQ ID NO: 2023867 - RNA, 19 nt, Homo sapiens
  misc_RNA (1)...(19): siRNA sense strand
ggaacaagcggaagaccau

SEQ ID NO: 2023868 - RNA, 19 nt, Homo sapiens
  misc_RNA (1)...(19): siRNA sense strand
uuacagaacagccugcaaa

SEQ ID NO: 2023869 - RNA, 19 nt, Homo sapiens
  misc_RNA (1)...(19): siRNA sense strand
aggcagcuguucauagaaa

SEQ ID NO: 2023870 - RNA, 19 nt, Homo sapiens
  misc_RNA (1)...(19): siRNA sense strand
ugaaggaaguucugaagcu

SEQ ID NO: 2023871 - RNA, 19 nt, Homo sapiens
  misc_RNA (1)...(19): siRNA sense strand
cgaggcaaguugacgguau

SEQ ID NO: 2023872 - RNA, 19 nt, Homo sapiens
  misc_RNA (1)...(19): siRNA sense strand
ggaacaccgucuuauagcu

SEQ ID NO: 2023873 - RNA, 19 nt, Homo sapiens
  misc_RNA (1)...(19): siRNA sense strand
gcaauuaguaaaucuuugg

SEQ ID NO: 2023874 - RNA, 19 nt, Homo sapiens
  misc_RNA (1)...(19): siRNA sense strand
gcugagccaugcaauuagu

SEQ ID NO: 2023875 - RNA, 19 nt, Homo sapiens
  misc_RNA (1)...(19): siRNA sense strand
acaauggccuuaauacacu

SEQ ID NO: 2023876 - RNA, 19 nt, Homo sapiens
  misc_RNA (1)...(19): siRNA sense strand
gaagggccaucuuuugguu

SEQ ID NO: 2023877 - RNA, 19 nt, Homo sapiens
  misc_RNA (1)...(19): siRNA sense strand
cuccucaacuuuaugauug

SEQ ID NO: 2023878 - RNA, 19 nt, Homo sapiens
  misc_RNA (1)...(19): siRNA sense strand
gacaauggccuuaauacac

SEQ ID NO: 2023879 - RNA, 19 nt, Homo sapiens
  misc_RNA (1)...(19): siRNA sense strand
caaauuaguguggaacaau

SEQ ID NO: 2023880 - RNA, 19 nt, Homo sapiens
  misc_RNA (1)...(19): siRNA sense strand
ucaccaaauuaguguggaa

SEQ ID NO: 2023881 - RNA, 19 nt, Homo sapiens
  misc_RNA (1)...(19): siRNA sense strand
acuaucaacuuacagaaca

SEQ ID NO: 2023882 - RNA, 19 nt, Homo sapiens
  misc_RNA (1)...(19): siRNA sense strand
agaacagccugcaaauuac

SEQ ID NO: 2023883 - RNA, 19 nt, Homo sapiens
  misc_RNA (1)...(19): siRNA sense strand
gcucccaacagcugucuuu

SEQ ID NO: 2023884 - RNA, 19 nt, Homo sapiens
  misc_RNA (1)...(19): siRNA sense strand
uuagcaaguuugaccaguu

SEQ ID NO: 2023885 - RNA, 19 nt, Homo sapiens
  misc_RNA (1)...(19): siRNA sense strand
aacaagcgccuuccuucua

SEQ ID NO: 2023886 - RNA, 19 nt, Homo sapiens
  misc_RNA (1)...(19): siRNA sense strand
aaauuaguguggaacaauc

SEQ ID NO: 2023887 - RNA, 19 nt, Homo sapiens
  misc_RNA (1)...(19): siRNA sense strand
gaccauaccaccgagauca

SEQ ID NO: 2023888 - RNA, 19 nt, Homo sapiens
  misc_RNA (1)...(19): siRNA sense strand
gccaugcaauuaguaaauc

SEQ ID NO: 2023889 - RNA, 19 nt, Homo sapiens
  misc_RNA (1)...(19): siRNA sense strand
uuggaaaucuccugcaaag

SEQ ID NO: 2023890 - RNA, 19 nt, Homo sapiens
  misc_RNA (1)...(19): siRNA sense strand
ccgagacaauggccuuaau

SEQ ID NO: 2023891 - RNA, 19 nt, Homo sapiens
  misc_RNA (1)...(19): siRNA sense strand
ugacucguccucccacuga

SEQ ID NO: 2023892 - RNA, 19 nt, Homo sapiens
  misc_RNA (1)...(19): siRNA sense strand
ugaaugacaccaugguuag

SEQ ID NO: 2023893 - RNA, 19 nt, Homo sapiens
  misc_RNA (1)...(19): siRNA sense strand
gaugucauacgacuaucaa

SEQ ID NO: 2023894 - RNA, 19 nt, Homo sapiens
  misc_RNA (1)...(19): siRNA sense strand
gagacaauggccuuaauac

SEQ ID NO: 2023895 - RNA, 19 nt, Homo sapiens
  misc_RNA (1)...(19): siRNA sense strand
cuggacaaauugagauaug

SEQ ID NO: 2023896 - RNA, 19 nt, Homo sapiens
  misc_RNA (1)...(19): siRNA sense strand
uagaaaugcgugcucagaa

SEQ ID NO: 2023897 - RNA, 19 nt, Homo sapiens
  misc_RNA (1)...(19): siRNA sense strand
agagaaaccacuugaccuu

SEQ ID NO: 2023898 - RNA, 19 nt, Homo sapiens
  misc_RNA (1)...(19): siRNA sense strand
auacgacuaucaacuuaca

SEQ ID NO: 2023899 - RNA, 19 nt, Homo sapiens
  misc_RNA (1)...(19): siRNA sense strand
ccagaugucagauuccaau

SEQ ID NO: 2023900 - RNA, 19 nt, Homo sapiens
  misc_RNA (1)...(19): siRNA sense strand
gaauuuugaugucauacga

SEQ ID NO: 2023901 - RNA, 19 nt, Homo sapiens
  misc_RNA (1)...(19): siRNA sense strand
ugaccuugcacauauaguu

SEQ ID NO: 2023902 - RNA, 19 nt, Homo sapiens
  misc_RNA (1)...(19): siRNA sense strand
acaagcgccuuccuucuac

SEQ ID NO: 2023903 - RNA, 19 nt, Homo sapiens
  misc_RNA (1)...(19): siRNA sense strand
ucucccagaugucagauuc

SEQ ID NO: 2023904 - RNA, 19 nt, Homo sapiens
  misc_RNA (1)...(19): siRNA sense strand
cuuaauacacuggaccaua

SEQ ID NO: 2023905 - RNA, 19 nt, Homo sapiens
  misc_RNA (1)...(19): siRNA sense strand
gaugccaacaaacaacaaa

SEQ ID NO: 2023906 - RNA, 19 nt, Homo sapiens
  misc_RNA (1)...(19): siRNA sense strand
augaaugacaccaugguua

SEQ ID NO: 2023907 - RNA, 19 nt, Homo sapiens
  misc_RNA (1)...(19): siRNA sense strand
gacgguauuuucaguuaaa

SEQ ID NO: 2023908 - RNA, 19 nt, Homo sapiens
  misc_RNA (1)...(19): siRNA sense strand
ucuccuccaucuacuauca

SEQ ID NO: 2023909 - RNA, 19 nt, Homo sapiens
  misc_RNA (1)...(19): siRNA sense strand
cagagaagaggcagcuguu

SEQ ID NO: 2023910 - RNA, 19 nt, Homo sapiens
  misc_RNA (1)...(19): siRNA sense strand
cagcagagaaagauaaugc

SEQ ID NO: 2023911 - RNA, 19 nt, Homo sapiens
  misc_RNA (1)...(19): siRNA sense strand
agauuccaauggcuuaaug

SEQ ID NO: 2023912 - RNA, 19 nt, Homo sapiens
  misc_RNA (1)...(19): siRNA sense strand
gcuuauugcagaacuggaa

SEQ ID NO: 2023913 - RNA, 19 nt, Homo sapiens
  misc_RNA (1)...(19): siRNA sense strand
ccaacaaacaacaaagaca

SEQ ID NO: 2023914 - RNA, 19 nt, Homo sapiens
  misc_RNA (1)...(19): siRNA sense strand
gucauacgacuaucaacuu

SEQ ID NO: 2023915 - RNA, 19 nt, Homo sapiens
  misc_RNA (1)...(19): siRNA sense strand
gagccaugcaauuaguaaa

SEQ ID NO: 2023916 - RNA, 19 nt, Homo sapiens
  misc_RNA (1)...(19): siRNA sense strand
ugaggaaagugggaacaag

SEQ ID NO: 2023917 - RNA, 19 nt, Homo sapiens
  misc_RNA (1)...(19): siRNA sense strand
agacaauggccuuaauaca

SEQ ID NO: 2023918 - RNA, 19 nt, Homo sapiens
  misc_RNA (1)...(19): siRNA sense strand
gcaaccagagaaaccacuu

SEQ ID NO: 2023919 - RNA, 19 nt, Homo sapiens
  misc_RNA (1)...(19): siRNA sense strand
uauguuagcaaccaugugu

SEQ ID NO: 2023920 - RNA, 19 nt, Homo sapiens
  misc_RNA (1)...(19): siRNA sense strand
uugcagaacuggaaaacaa

SEQ ID NO: 2023921 - RNA, 19 nt, Homo sapiens
  misc_RNA (1)...(19): siRNA sense strand
cagaacagccugcaaauua

SEQ ID NO: 2023922 - RNA, 19 nt, Homo sapiens
  misc_RNA (1)...(19): siRNA sense strand
ggaaaucuccugcaaagaa

SEQ ID NO: 2023923 - RNA, 19 nt, Homo sapiens
  misc_RNA (1)...(19): siRNA sense strand
caacaaagacagcuuauug

SEQ ID NO: 2023924 - RNA, 19 nt, Homo sapiens
  misc_RNA (1)...(19): siRNA sense strand
uggaagagcugaugaaguu

SEQ ID NO: 2023925 - RNA, 19 nt, Homo sapiens
  misc_RNA (1)...(19): siRNA sense strand
guugauaucuggaacauga

SEQ ID NO: 2023926 - RNA, 19 nt, Homo sapiens
  misc_RNA (1)...(19): siRNA sense strand
ggaagaccauggcagagaa

SEQ ID NO: 2023927 - RNA, 19 nt, Homo sapiens
  misc_RNA (1)...(19): siRNA sense strand
gacuugagcuuuaacuuug

SEQ ID NO: 2023928 - RNA, 19 nt, Homo sapiens
  misc_RNA (1)...(19): siRNA sense strand
ucauacgacuaucaacuua

SEQ ID NO: 2023929 - RNA, 19 nt, Homo sapiens
  misc_RNA (1)...(19): siRNA sense strand
gcacaggcuugcccauguu

SEQ ID NO: 2023930 - RNA, 19 nt, Homo sapiens
  misc_RNA (1)...(19): siRNA sense strand
gaaaugcgugcucagaauu

SEQ ID NO: 2023931 - RNA, 19 nt, Homo sapiens
  misc_RNA (1)...(19): siRNA sense strand
gaaaucuccugcaaagaag

SEQ ID NO: 2023932 - RNA, 19 nt, Homo sapiens
  misc_RNA (1)...(19): siRNA sense strand
uccaauggcuuaaugauau

SEQ ID NO: 2023933 - RNA, 19 nt, Homo sapiens
  misc_RNA (1)...(19): siRNA sense strand
ccacugacuugagcuuuaa

SEQ ID NO: 2023934 - RNA, 19 nt, Homo sapiens
  misc_RNA (1)...(19): siRNA sense strand
aaacaacaaagacagcuua

SEQ ID NO: 2023935 - RNA, 19 nt, Homo sapiens
  misc_RNA (1)...(19): siRNA sense strand
uagcaaguuugaccaguuu

SEQ ID NO: 2023936 - RNA, 19 nt, Homo sapiens
  misc_RNA (1)...(19): siRNA sense strand
cccaacagcugucuuugaa

SEQ ID NO: 2023937 - RNA, 19 nt, Homo sapiens
  misc_RNA (1)...(19): siRNA sense strand
gaggaacaccgucuuauag

SEQ ID NO: 2023938 - RNA, 19 nt, Homo sapiens
  misc_RNA (1)...(19): siRNA sense strand
gaugaggaacaccgucuua

SEQ ID NO: 2023939 - RNA, 19 nt, Homo sapiens
  misc_RNA (1)...(19): siRNA sense strand
agaggcagcuguucauaga

SEQ ID NO: 2023940 - RNA, 19 nt, Homo sapiens
  misc_RNA (1)...(19): siRNA sense strand
gaagaggcagcuguucaua

SEQ ID NO: 2023941 - RNA, 19 nt, Homo sapiens
  misc_RNA (1)...(19): siRNA sense strand
gcagagaaagauaaugcua

SEQ ID NO: 2023942 - RNA, 19 nt, Homo sapiens
  misc_RNA (1)...(19): siRNA sense strand
ccacagcagagaaagauaa

SEQ ID NO: 2023943 - RNA, 19 nt, Homo sapiens
  misc_RNA (1)...(19): siRNA sense strand
gccacagggucaccacaua

SEQ ID NO: 2023944 - RNA, 19 nt, Homo sapiens
  misc_RNA (1)...(19): siRNA sense strand
aagcugagccaugcaauua

SEQ ID NO: 2023945 - RNA, 19 nt, Homo sapiens
  misc_RNA (1)...(19): siRNA sense strand
gaggcaaguugacgguauu

SEQ ID NO: 2023946 - RNA, 19 nt, Homo sapiens
  misc_RNA (1)...(19): siRNA sense strand
ugacuugagcuuuaacuuu

SEQ ID NO: 2023947 - RNA, 19 nt, Homo sapiens
  misc_RNA (1)...(19): siRNA sense strand
gugagaguaugauggguuu

SEQ ID NO: 2023948 - RNA, 19 nt, Homo sapiens
  misc_RNA (1)...(19): siRNA sense strand
ggacaaauugagauauguu

SEQ ID NO: 2023949 - RNA, 19 nt, Homo sapiens
  misc_RNA (1)...(19): siRNA sense strand
ugaggaacaccgucuuaua

SEQ ID NO: 2023950 - RNA, 19 nt, Homo sapiens
  misc_RNA (1)...(19): siRNA sense strand
ccacuugaccuugcacaua

SEQ ID NO: 2023951 - RNA, 19 nt, Homo sapiens
  misc_RNA (1)...(19): siRNA sense strand
ccaauggcuuaaugauauu

SEQ ID NO: 2023952 - RNA, 19 nt, Homo sapiens
  misc_RNA (1)...(19): siRNA sense strand
agaaaugcgugcucagaau

SEQ ID NO: 2023953 - RNA, 19 nt, Homo sapiens
  misc_RNA (1)...(19): siRNA sense strand
gcaaccagcaccagaugaa

SEQ ID NO: 2023954 - RNA, 19 nt, Homo sapiens
  misc_RNA (1)...(19): siRNA sense strand
gcaggaggccuucgcacaa

SEQ ID NO: 2023955 - RNA, 19 nt, Homo sapiens
  misc_RNA (1)...(19): siRNA sense strand
gaagcugagccaugcaauu

SEQ ID NO: 2023956 - RNA, 19 nt, Homo sapiens
  misc_RNA (1)...(19): siRNA sense strand
gagaagaggcagcuguuca

SEQ ID NO: 2023957 - RNA, 19 nt, Homo sapiens
  misc_RNA (1)...(19): siRNA sense strand
cgagacaauggccuuaaua

SEQ ID NO: 2023958 - RNA, 19 nt, Homo sapiens
  misc_RNA (1)...(19): siRNA sense strand
cccacugacuugagcuuua

SEQ ID NO: 2023959 - RNA, 19 nt, Homo sapiens
  misc_RNA (1)...(19): siRNA sense strand
gaacaagcgccuuccuucu

SEQ ID NO: 2023960 - RNA, 19 nt, Homo sapiens
  misc_RNA (1)...(19): siRNA sense strand
uuaauacacuggaccauac

SEQ ID NO: 2023961 - RNA, 19 nt, Homo sapiens
  misc_RNA (1)...(19): siRNA sense strand
gcaaaggaaggaugaacug

SEQ ID NO: 2023962 - RNA, 19 nt, Homo sapiens
  misc_RNA (1)...(19): siRNA sense strand
cacuugaccuugcacauau

SEQ ID NO: 2023963 - RNA, 19 nt, Homo sapiens
  misc_RNA (1)...(19): siRNA sense strand
gaaaccacuugaccuugca

SEQ ID NO: 2023964 - RNA, 19 nt, Homo sapiens
  misc_RNA (1)...(19): siRNA sense strand
cagagaaagauaaugcuaa

SEQ ID NO: 2023965 - RNA, 19 nt, Homo sapiens
  misc_RNA (1)...(19): siRNA sense strand
ccaaauuaguguggaacaa

SEQ ID NO: 2023966 - RNA, 19 nt, Homo sapiens
  misc_RNA (1)...(19): siRNA sense strand
gaacuggagcagaggaugu

SEQ ID NO: 2023967 - RNA, 19 nt, Homo sapiens
  misc_RNA (1)...(19): siRNA sense strand
ggaacaagcggaagaccau

SEQ ID NO: 2023968 - RNA, 19 nt, Homo sapiens
  misc_RNA (1)...(19): siRNA sense strand
uuacagaacagccugcaaa

SEQ ID NO: 2023969 - RNA, 19 nt, Homo sapiens
  misc_RNA (1)...(19): siRNA sense strand
aggcagcuguucauagaaa

SEQ ID NO: 2023970 - RNA, 19 nt, Homo sapiens
  misc_RNA (1)...(19): siRNA sense strand
ugaaggaaguucugaagcu

SEQ ID NO: 2023971 - RNA, 19 nt, Homo sapiens
  misc_RNA (1)...(19): siRNA sense strand
cgaggcaaguugacgguau

SEQ ID NO: 2023972 - RNA, 19 nt, Homo sapiens
  misc_RNA (1)...(19): siRNA sense strand
ggaacaccgucuuauagcu

SEQ ID NO: 2023973 - RNA, 19 nt, Homo sapiens
  misc_RNA (1)...(19): siRNA sense strand
gcaauuaguaaaucuuugg

SEQ ID NO: 2023974 - RNA, 19 nt, Homo sapiens
  misc_RNA (1)...(19): siRNA sense strand
gcugagccaugcaauuagu

SEQ ID NO: 2023975 - RNA, 19 nt, Homo sapiens
  misc_RNA (1)...(19): siRNA sense strand
acaauggccuuaauacacu

SEQ ID NO: 2023976 - RNA, 19 nt, Homo sapiens
  misc_RNA (1)...(19): siRNA sense strand
gaagggccaucuuuugguu

SEQ ID NO: 2023977 - RNA, 19 nt, Homo sapiens
  misc_RNA (1)...(19): siRNA sense strand
cuccucaacuuuaugauug

SEQ ID NO: 2023978 - RNA, 19 nt, Homo sapiens
  misc_RNA (1)...(19): siRNA sense strand
gacaauggccuuaauacac

SEQ ID NO: 2023979 - RNA, 19 nt, Homo sapiens
  misc_RNA (1)...(19): siRNA sense strand
caaauuaguguggaacaau

SEQ ID NO: 2023980 - RNA, 19 nt, Homo sapiens
  misc_RNA (1)...(19): siRNA sense strand
ucaccaaauuaguguggaa

SEQ ID NO: 2023981 - RNA, 19 nt, Homo sapiens
  misc_RNA (1)...(19): siRNA sense strand
acuaucaacuuacagaaca

SEQ ID NO: 2023982 - RNA, 19 nt, Homo sapiens
  misc_RNA (1)...(19): siRNA sense strand
agaacagccugcaaauuac

SEQ ID NO: 2023983 - RNA, 19 nt, Homo sapiens
  misc_RNA (1)...(19): siRNA sense strand
gcucccaacagcugucuuu

SEQ ID NO: 2023984 - RNA, 19 nt, Homo sapiens
  misc_RNA (1)...(19): siRNA sense strand
uuagcaaguuugaccaguu

SEQ ID NO: 2023985 - RNA, 19 nt, Homo sapiens
  misc_RNA (1)...(19): siRNA sense strand
aacaagcgccuuccuucua

SEQ ID NO: 2023986 - RNA, 19 nt, Homo sapiens
  misc_RNA (1)...(19): siRNA sense strand
aaauuaguguggaacaauc

SEQ ID NO: 2023987 - RNA, 19 nt, Homo sapiens
  misc_RNA (1)...(19): siRNA sense strand
gaccauaccaccgagauca

SEQ ID NO: 2023988 - RNA, 19 nt, Homo sapiens
  misc_RNA (1)...(19): siRNA sense strand
gccaugcaauuaguaaauc

SEQ ID NO: 2023989 - RNA, 19 nt, Homo sapiens
  misc_RNA (1)...(19): siRNA sense strand
uuggaaaucuccugcaaag

SEQ ID NO: 2023990 - RNA, 19 nt, Homo sapiens
  misc_RNA (1)...(19): siRNA sense strand
ccgagacaauggccuuaau

SEQ ID NO: 2023991 - RNA, 19 nt, Homo sapiens
  misc_RNA (1)...(19): siRNA sense strand
ugacucguccucccacuga

SEQ ID NO: 2023992 - RNA, 19 nt, Homo sapiens
  misc_RNA (1)...(19): siRNA sense strand
ugaaugacaccaugguuag

SEQ ID NO: 2023993 - RNA, 19 nt, Homo sapiens
  misc_RNA (1)...(19): siRNA sense strand
gaugucauacgacuaucaa

SEQ ID NO: 2023994 - RNA, 19 nt, Homo sapiens
  misc_RNA (1)...(19): siRNA sense strand
gagacaauggccuuaauac

SEQ ID NO: 2023995 - RNA, 19 nt, Homo sapiens
  misc_RNA (1)...(19): siRNA sense strand
cuggacaaauugagauaug

SEQ ID NO: 2023996 - RNA, 19 nt, Homo sapiens
  misc_RNA (1)...(19): siRNA sense strand
uagaaaugcgugcucagaa

SEQ ID NO: 2023997 - RNA, 19 nt, Homo sapiens
  misc_RNA (1)...(19): siRNA sense strand
agagaaaccacuugaccuu

SEQ ID NO: 2023998 - RNA, 19 nt, Homo sapiens
  misc_RNA (1)...(19): siRNA sense strand
auacgacuaucaacuuaca

SEQ ID NO: 2023999 - RNA, 19 nt, Homo sapiens
  misc_RNA (1)...(19): siRNA sense strand
ccagaugucagauuccaau

SEQ ID NO: 2024000 - RNA, 19 nt, Homo sapiens
  misc_RNA (1)...(19): siRNA sense strand
gaauuuugaugucauacga

SEQ ID NO: 2024001 - RNA, 19 nt, Homo sapiens
  misc_RNA (1)...(19): siRNA sense strand
ugaccuugcacauauaguu

SEQ ID NO: 2024002 - RNA, 19 nt, Homo sapiens
  misc_RNA (1)...(19): siRNA sense strand
acaagcgccuuccuucuac

SEQ ID NO: 2024003 - RNA, 19 nt, Homo sapiens
  misc_RNA (1)...(19): siRNA sense strand
ucucccagaugucagauuc

SEQ ID NO: 2024004 - RNA, 19 nt, Homo sapiens
  misc_RNA (1)...(19): siRNA sense strand
cuuaauacacuggaccaua

SEQ ID NO: 2024005 - RNA, 19 nt, Homo sapiens
  misc_RNA (1)...(19): siRNA sense strand
gaugccaacaaacaacaaa

SEQ ID NO: 2024006 - RNA, 19 nt, Homo sapiens
  misc_RNA (1)...(19): siRNA sense strand
augaaugacaccaugguua

SEQ ID NO: 2024007 - RNA, 19 nt, Homo sapiens
  misc_RNA (1)...(19): siRNA sense strand
gacgguauuuucaguuaaa

SEQ ID NO: 2024008 - RNA, 19 nt, Homo sapiens
  misc_RNA (1)...(19): siRNA sense strand
ucuccuccaucuacuauca

SEQ ID NO: 2024009 - RNA, 19 nt, Homo sapiens
  misc_RNA (1)...(19): siRNA sense strand
cagagaagaggcagcuguu

SEQ ID NO: 2024010 - RNA, 19 nt, Homo sapiens
  misc_RNA (1)...(19): siRNA sense strand
cagcagagaaagauaaugc

SEQ ID NO: 2024011 - RNA, 19 nt, Homo sapiens
  misc_RNA (1)...(19): siRNA sense strand
agauuccaauggcuuaaug

SEQ ID NO: 2024012 - RNA, 19 nt, Homo sapiens
  misc_RNA (1)...(19): siRNA sense strand
gcuuauugcagaacuggaa

SEQ ID NO: 2024013 - RNA, 19 nt, Homo sapiens
  misc_RNA (1)...(19): siRNA sense strand
ccaacaaacaacaaagaca

SEQ ID NO: 2024014 - RNA, 19 nt, Homo sapiens
  misc_RNA (1)...(19): siRNA sense strand
gucauacgacuaucaacuu

SEQ ID NO: 2024015 - RNA, 19 nt, Homo sapiens
  misc_RNA (1)...(19): siRNA sense strand
gagccaugcaauuaguaaa

SEQ ID NO: 2024016 - RNA, 19 nt, Homo sapiens
  misc_RNA (1)...(19): siRNA sense strand
ugaggaaagugggaacaag

SEQ ID NO: 2024017 - RNA, 19 nt, Homo sapiens
  misc_RNA (1)...(19): siRNA sense strand
agacaauggccuuaauaca

SEQ ID NO: 2024018 - RNA, 19 nt, Homo sapiens
  misc_RNA (1)...(19): siRNA sense strand
gcaaccagagaaaccacuu

SEQ ID NO: 2024019 - RNA, 19 nt, Homo sapiens
  misc_RNA (1)...(19): siRNA sense strand
uauguuagcaaccaugugu

SEQ ID NO: 2024020 - RNA, 19 nt, Homo sapiens
  misc_RNA (1)...(19): siRNA sense strand
uugcagaacuggaaaacaa

SEQ ID NO: 2024021 - RNA, 19 nt, Homo sapiens
  misc_RNA (1)...(19): siRNA sense strand
cagaacagccugcaaauua

SEQ ID NO: 2024022 - RNA, 19 nt, Homo sapiens
  misc_RNA (1)...(19): siRNA sense strand
ggaaaucuccugcaaagaa

SEQ ID NO: 2024023 - RNA, 19 nt, Homo sapiens
  misc_RNA (1)...(19): siRNA sense strand
caacaaagacagcuuauug

SEQ ID NO: 2024024 - RNA, 19 nt, Homo sapiens
  misc_RNA (1)...(19): siRNA sense strand
uggaagagcugaugaaguu

SEQ ID NO: 2024025 - RNA, 19 nt, Homo sapiens
  misc_RNA (1)...(19): siRNA sense strand
guugauaucuggaacauga

SEQ ID NO: 2024026 - RNA, 19 nt, Homo sapiens
  misc_RNA (1)...(19): siRNA sense strand
ggaagaccauggcagagaa

SEQ ID NO: 2024027 - RNA, 19 nt, Homo sapiens
  misc_RNA (1)...(19): siRNA sense strand
gacuugagcuuuaacuuug

SEQ ID NO: 2024028 - RNA, 19 nt, Homo sapiens
  misc_RNA (1)...(19): siRNA sense strand
ucauacgacuaucaacuua

SEQ ID NO: 2024029 - RNA, 19 nt, Homo sapiens
  misc_RNA (1)...(19): siRNA sense strand
gcacaggcuugcccauguu

SEQ ID NO: 2024030 - RNA, 19 nt, Homo sapiens
  misc_RNA (1)...(19): siRNA sense strand
gaaaugcgugcucagaauu

SEQ ID NO: 2024031 - RNA, 19 nt, Homo sapiens
  misc_RNA (1)...(19): siRNA sense strand
gaaaucuccugcaaagaag

SEQ ID NO: 2024032 - RNA, 19 nt, Homo sapiens
  misc_RNA (1)...(19): siRNA sense strand
uccaauggcuuaaugauau

SEQ ID NO: 2024033 - RNA, 19 nt, Homo sapiens
  misc_RNA (1)...(19): siRNA sense strand
ccacugacuugagcuuuaa

SEQ ID NO: 2024034 - RNA, 19 nt, Homo sapiens
  misc_RNA (1)...(19): siRNA sense strand
aaacaacaaagacagcuua

SEQ ID NO: 2024035 - RNA, 19 nt, Homo sapiens
  misc_RNA (1)...(19): siRNA sense strand
uagcaaguuugaccaguuu

SEQ ID NO: 2024036 - RNA, 19 nt, Homo sapiens
  misc_RNA (1)...(19): siRNA sense strand
cccaacagcugucuuugaa

SEQ ID NO: 2024037 - RNA, 19 nt, Homo sapiens
  misc_RNA (1)...(19): siRNA sense strand
gaggaacaccgucuuauag

SEQ ID NO: 2024038 - RNA, 19 nt, Homo sapiens
  misc_RNA (1)...(19): siRNA sense strand
gaugaggaacaccgucuua

SEQ ID NO: 2024039 - RNA, 19 nt, Homo sapiens
  misc_RNA (1)...(19): siRNA sense strand
agaggcagcuguucauaga

SEQ ID NO: 2024040 - RNA, 19 nt, Homo sapiens
  misc_RNA (1)...(19): siRNA sense strand
gaagaggcagcuguucaua

SEQ ID NO: 2024041 - RNA, 19 nt, Homo sapiens
  misc_RNA (1)...(19): siRNA sense strand
gcagagaaagauaaugcua

SEQ ID NO: 2024042 - RNA, 19 nt, Homo sapiens
  misc_RNA (1)...(19): siRNA sense strand
ccacagcagagaaagauaa

SEQ ID NO: 2024043 - RNA, 19 nt, Homo sapiens
  misc_RNA (1)...(19): siRNA sense strand
gccacagggucaccacaua

SEQ ID NO: 2024044 - RNA, 19 nt, Homo sapiens
  misc_RNA (1)...(19): siRNA sense strand
aagcugagccaugcaauua

SEQ ID NO: 2024045 - RNA, 19 nt, Homo sapiens
  misc_RNA (1)...(19): siRNA sense strand
gaggcaaguugacgguauu

SEQ ID NO: 2024046 - RNA, 19 nt, Homo sapiens
  misc_RNA (1)...(19): siRNA sense strand
ugacuugagcuuuaacuuu

SEQ ID NO: 2024047 - RNA, 19 nt, Homo sapiens
  misc_RNA (1)...(19): siRNA sense strand
gugagaguaugauggguuu

SEQ ID NO: 2024048 - RNA, 19 nt, Homo sapiens
  misc_RNA (1)...(19): siRNA sense strand
ggacaaauugagauauguu

SEQ ID NO: 2024049 - RNA, 19 nt, Homo sapiens
  misc_RNA (1)...(19): siRNA sense strand
ugaggaacaccgucuuaua

SEQ ID NO: 2024050 - RNA, 19 nt, Homo sapiens
  misc_RNA (1)...(19): siRNA sense strand
ccacuugaccuugcacaua

SEQ ID NO: 2024051 - RNA, 19 nt, Homo sapiens
  misc_RNA (1)...(19): siRNA sense strand
ccaauggcuuaaugauauu

SEQ ID NO: 2024052 - RNA, 19 nt, Homo sapiens
  misc_RNA (1)...(19): siRNA sense strand
agaaaugcgugcucagaau

SEQ ID NO: 2024053 - RNA, 19 nt, Homo sapiens
  misc_RNA (1)...(19): siRNA sense strand
gcaaccagcaccagaugaa

SEQ ID NO: 2024054 - RNA, 19 nt, Homo sapiens
  misc_RNA (1)...(19): siRNA sense strand
gcaggaggccuucgcacaa

SEQ ID NO: 2024055 - RNA, 19 nt, Homo sapiens
  misc_RNA (1)...(19): siRNA sense strand
gaagcugagccaugcaauu

SEQ ID NO: 2024056 - RNA, 19 nt, Homo sapiens
  misc_RNA (1)...(19): siRNA sense strand
gagaagaggcagcuguuca

SEQ ID NO: 2024057 - RNA, 19 nt, Homo sapiens
  misc_RNA (1)...(19): siRNA sense strand
cgagacaauggccuuaaua

SEQ ID NO: 2024058 - RNA, 19 nt, Homo sapiens
  misc_RNA (1)...(19): siRNA sense strand
cccacugacuugagcuuua

SEQ ID NO: 2024059 - RNA, 19 nt, Homo sapiens
  misc_RNA (1)...(19): siRNA sense strand
gaacaagcgccuuccuucu

SEQ ID NO: 2024060 - RNA, 19 nt, Homo sapiens
  misc_RNA (1)...(19): siRNA sense strand
uuaauacacuggaccauac

SEQ ID NO: 2024061 - RNA, 19 nt, Homo sapiens
  misc_RNA (1)...(19): siRNA sense strand
gcaaaggaaggaugaacug

SEQ ID NO: 2024062 - RNA, 19 nt, Homo sapiens
  misc_RNA (1)...(19): siRNA sense strand
cacuugaccuugcacauau

SEQ ID NO: 2024063 - RNA, 19 nt, Homo sapiens
  misc_RNA (1)...(19): siRNA sense strand
gaaaccacuugaccuugca

SEQ ID NO: 2024064 - RNA, 19 nt, Homo sapiens
  misc_RNA (1)...(19): siRNA sense strand
cagagaaagauaaugcuaa

SEQ ID NO: 2024065 - RNA, 19 nt, Homo sapiens
  misc_RNA (1)...(19): siRNA sense strand
ccaaauuaguguggaacaa

SEQ ID NO: 2024066 - RNA, 19 nt, Homo sapiens
  misc_RNA (1)...(19): siRNA sense strand
gaacuggagcagaggaugu

SEQ ID NO: 2024067 - RNA, 19 nt, Homo sapiens
  misc_RNA (1)...(19): siRNA sense strand
ggaacaagcggaagaccau

SEQ ID NO: 2024068 - RNA, 19 nt, Homo sapiens
  misc_RNA (1)...(19): siRNA sense strand
uuacagaacagccugcaaa

SEQ ID NO: 2024069 - RNA, 19 nt, Homo sapiens
  misc_RNA (1)...(19): siRNA sense strand
aggcagcuguucauagaaa

SEQ ID NO: 2024070 - RNA, 19 nt, Homo sapiens
  misc_RNA (1)...(19): siRNA sense strand
ugaaggaaguucugaagcu

SEQ ID NO: 2024071 - RNA, 19 nt, Homo sapiens
  misc_RNA (1)...(19): siRNA sense strand
cgaggcaaguugacgguau

SEQ ID NO: 2024072 - RNA, 19 nt, Homo sapiens
  misc_RNA (1)...(19): siRNA sense strand
ggaacaccgucuuauagcu

SEQ ID NO: 2024073 - RNA, 19 nt, Homo sapiens
  misc_RNA (1)...(19): siRNA sense strand
gcaauuaguaaaucuuugg

SEQ ID NO: 2024074 - RNA, 19 nt, Homo sapiens
  misc_RNA (1)...(19): siRNA sense strand
gcugagccaugcaauuagu

SEQ ID NO: 2024075 - RNA, 19 nt, Homo sapiens
  misc_RNA (1)...(19): siRNA sense strand
acaauggccuuaauacacu

SEQ ID NO: 2024076 - RNA, 19 nt, Homo sapiens
  misc_RNA (1)...(19): siRNA sense strand
gaagggccaucuuuugguu

SEQ ID NO: 2024077 - RNA, 19 nt, Homo sapiens
  misc_RNA (1)...(19): siRNA sense strand
cuccucaacuuuaugauug

SEQ ID NO: 2024078 - RNA, 19 nt, Homo sapiens
  misc_RNA (1)...(19): siRNA sense strand
gacaauggccuuaauacac

SEQ ID NO: 2024079 - RNA, 19 nt, Homo sapiens
  misc_RNA (1)...(19): siRNA sense strand
caaauuaguguggaacaau

SEQ ID NO: 2024080 - RNA, 19 nt, Homo sapiens
  misc_RNA (1)...(19): siRNA sense strand
ucaccaaauuaguguggaa

SEQ ID NO: 2024081 - RNA, 19 nt, Homo sapiens
  misc_RNA (1)...(19): siRNA sense strand
acuaucaacuuacagaaca

SEQ ID NO: 2024082 - RNA, 19 nt, Homo sapiens
  misc_RNA (1)...(19): siRNA sense strand
agaacagccugcaaauuac

SEQ ID NO: 2024083 - RNA, 19 nt, Homo sapiens
  misc_RNA (1)...(19): siRNA sense strand
gcucccaacagcugucuuu

SEQ ID NO: 2024084 - RNA, 19 nt, Homo sapiens
  misc_RNA (1)...(19): siRNA sense strand
uuagcaaguuugaccaguu

SEQ ID NO: 2024085 - RNA, 19 nt, Homo sapiens
  misc_RNA (1)...(19): siRNA sense strand
aacaagcgccuuccuucua

SEQ ID NO: 2024086 - RNA, 19 nt, Homo sapiens
  misc_RNA (1)...(19): siRNA sense strand
aaauuaguguggaacaauc

SEQ ID NO: 2024087 - RNA, 19 nt, Homo sapiens
  misc_RNA (1)...(19): siRNA sense strand
gaccauaccaccgagauca

SEQ ID NO: 2024088 - RNA, 19 nt, Homo sapiens
  misc_RNA (1)...(19): siRNA sense strand
gccaugcaauuaguaaauc

SEQ ID NO: 2024089 - RNA, 19 nt, Homo sapiens
  misc_RNA (1)...(19): siRNA sense strand
uuggaaaucuccugcaaag

SEQ ID NO: 2024090 - RNA, 19 nt, Homo sapiens
  misc_RNA (1)...(19): siRNA sense strand
ccgagacaauggccuuaau

SEQ ID NO: 2024091 - RNA, 19 nt, Homo sapiens
  misc_RNA (1)...(19): siRNA sense strand
ugacucguccucccacuga

SEQ ID NO: 2024092 - RNA, 19 nt, Homo sapiens
  misc_RNA (1)...(19): siRNA sense strand
ugaaugacaccaugguuag

SEQ ID NO: 2024093 - RNA, 19 nt, Homo sapiens
  misc_RNA (1)...(19): siRNA sense strand
gaugucauacgacuaucaa

SEQ ID NO: 2024094 - RNA, 19 nt, Homo sapiens
  misc_RNA (1)...(19): siRNA sense strand
gagacaauggccuuaauac

SEQ ID NO: 2024095 - RNA, 19 nt, Homo sapiens
  misc_RNA (1)...(19): siRNA sense strand
cuggacaaauugagauaug

SEQ ID NO: 2024096 - RNA, 19 nt, Homo sapiens
  misc_RNA (1)...(19): siRNA sense strand
uagaaaugcgugcucagaa

SEQ ID NO: 2024097 - RNA, 19 nt, Homo sapiens
  misc_RNA (1)...(19): siRNA sense strand
agagaaaccacuugaccuu

SEQ ID NO: 2024098 - RNA, 19 nt, Homo sapiens
  misc_RNA (1)...(19): siRNA sense strand
auacgacuaucaacuuaca

SEQ ID NO: 2024099 - RNA, 19 nt, Homo sapiens
  misc_RNA (1)...(19): siRNA sense strand
ccagaugucagauuccaau

SEQ ID NO: 2024100 - RNA, 19 nt, Homo sapiens
  misc_RNA (1)...(19): siRNA sense strand
gaauuuugaugucauacga

SEQ ID NO: 2024101 - RNA, 19 nt, Homo sapiens
  misc_RNA (1)...(19): siRNA sense strand
ugaccuugcacauauaguu

SEQ ID NO: 2024102 - RNA, 19 nt, Homo sapiens
  misc_RNA (1)...(19): siRNA sense strand
acaagcgccuuccuucuac

SEQ ID NO: 2024103 - RNA, 19 nt, Homo sapiens
  misc_RNA (1)...(19): siRNA sense strand
ucucccagaugucagauuc

SEQ ID NO: 2024104 - RNA, 19 nt, Homo sapiens
  misc_RNA (1)...(19): siRNA sense strand
cuuaauacacuggaccaua

SEQ ID NO: 2024105 - RNA, 19 nt, Homo sapiens
  misc_RNA (1)...(19): siRNA sense strand
gaugccaacaaacaacaaa

SEQ ID NO: 2024106 - RNA, 19 nt, Homo sapiens
  misc_RNA (1)...(19): siRNA sense strand
augaaugacaccaugguua

SEQ ID NO: 2024107 - RNA, 19 nt, Homo sapiens
  misc_RNA (1)...(19): siRNA sense strand
gacgguauuuucaguuaaa

SEQ ID NO: 2024108 - RNA, 19 nt, Homo sapiens
  misc_RNA (1)...(19): siRNA sense strand
ucuccuccaucuacuauca

SEQ ID NO: 2024109 - RNA, 19 nt, Homo sapiens
  misc_RNA (1)...(19): siRNA sense strand
cagagaagaggcagcuguu

SEQ ID NO: 2024110 - RNA, 19 nt, Homo sapiens
  misc_RNA (1)...(19): siRNA sense strand
cagcagagaaagauaaugc

SEQ ID NO: 2024111 - RNA, 19 nt, Homo sapiens
  misc_RNA (1)...(19): siRNA sense strand
agauuccaauggcuuaaug

SEQ ID NO: 2024112 - RNA, 19 nt, Homo sapiens
  misc_RNA (1)...(19): siRNA sense strand
gcuuauugcagaacuggaa

SEQ ID NO: 2024113 - RNA, 19 nt, Homo sapiens
  misc_RNA (1)...(19): siRNA sense strand
ccaacaaacaacaaagaca

SEQ ID NO: 2024114 - RNA, 19 nt, Homo sapiens
  misc_RNA (1)...(19): siRNA sense strand
gucauacgacuaucaacuu

SEQ ID NO: 2024115 - RNA, 19 nt, Homo sapiens
  misc_RNA (1)...(19): siRNA sense strand
gagccaugcaauuaguaaa

SEQ ID NO: 2024116 - RNA, 19 nt, Homo sapiens
  misc_RNA (1)...(19): siRNA sense strand
ugaggaaagugggaacaag

SEQ ID NO: 2024117 - RNA, 19 nt, Homo sapiens
  misc_RNA (1)...(19): siRNA sense strand
agacaauggccuuaauaca

SEQ ID NO: 2024118 - RNA, 19 nt, Homo sapiens
  misc_RNA (1)...(19): siRNA sense strand
gcaaccagagaaaccacuu

SEQ ID NO: 2024119 - RNA, 19 nt, Homo sapiens
  misc_RNA (1)...(19): siRNA sense strand
uauguuagcaaccaugugu

SEQ ID NO: 2024120 - RNA, 19 nt, Homo sapiens
  misc_RNA (1)...(19): siRNA sense strand
uugcagaacuggaaaacaa

SEQ ID NO: 2024121 - RNA, 19 nt, Homo sapiens
  misc_RNA (1)...(19): siRNA sense strand
cagaacagccugcaaauua

SEQ ID NO: 2024122 - RNA, 19 nt, Homo sapiens
  misc_RNA (1)...(19): siRNA sense strand
ggaaaucuccugcaaagaa

SEQ ID NO: 2024123 - RNA, 19 nt, Homo sapiens
  misc_RNA (1)...(19): siRNA sense strand
caacaaagacagcuuauug

SEQ ID NO: 2024124 - RNA, 19 nt, Homo sapiens
  misc_RNA (1)...(19): siRNA sense strand
uggaagagcugaugaaguu

SEQ ID NO: 2024125 - RNA, 19 nt, Homo sapiens
  misc_RNA (1)...(19): siRNA sense strand
guugauaucuggaacauga

SEQ ID NO: 2024126 - RNA, 19 nt, Homo sapiens
  misc_RNA (1)...(19): siRNA sense strand
ggaagaccauggcagagaa

SEQ ID NO: 2024127 - RNA, 19 nt, Homo sapiens
  misc_RNA (1)...(19): siRNA sense strand
gacuugagcuuuaacuuug

SEQ ID NO: 2024128 - RNA, 19 nt, Homo sapiens
  misc_RNA (1)...(19): siRNA sense strand
ucauacgacuaucaacuua

SEQ ID NO: 2024129 - RNA, 19 nt, Homo sapiens
  misc_RNA (1)...(19): siRNA sense strand
gcacaggcuugcccauguu

SEQ ID NO: 2024130 - RNA, 19 nt, Homo sapiens
  misc_RNA (1)...(19): siRNA sense strand
gaaaugcgugcucagaauu

SEQ ID NO: 2024131 - RNA, 19 nt, Homo sapiens
  misc_RNA (1)...(19): siRNA sense strand
gaaaucuccugcaaagaag

SEQ ID NO: 2024132 - RNA, 19 nt, Homo sapiens
  misc_RNA (1)...(19): siRNA sense strand
uccaauggcuuaaugauau

SEQ ID NO: 2024133 - RNA, 19 nt, Homo sapiens
  misc_RNA (1)...(19): siRNA sense strand
ccacugacuugagcuuuaa

SEQ ID NO: 2024134 - RNA, 19 nt, Homo sapiens
  misc_RNA (1)...(19): siRNA sense strand
aaacaacaaagacagcuua

SEQ ID NO: 2024135 - RNA, 19 nt, Homo sapiens
  misc_RNA (1)...(19): siRNA sense strand
uagcaaguuugaccaguuu

SEQ ID NO: 2024136 - RNA, 19 nt, Homo sapiens
  misc_RNA (1)...(19): siRNA sense strand
cccaacagcugucuuugaa

SEQ ID NO: 2024137 - RNA, 19 nt, Homo sapiens
  misc_RNA (1)...(19): siRNA sense strand
gaggaacaccgucuuauag

SEQ ID NO: 2024138 - RNA, 19 nt, Homo sapiens
  misc_RNA (1)...(19): siRNA sense strand
gaugaggaacaccgucuua

SEQ ID NO: 2024139 - RNA, 19 nt, Homo sapiens
  misc_RNA (1)...(19): siRNA sense strand
agaggcagcuguucauaga

SEQ ID NO: 2024140 - RNA, 19 nt, Homo sapiens
  misc_RNA (1)...(19): siRNA sense strand
gaagaggcagcuguucaua

SEQ ID NO: 2024141 - RNA, 19 nt, Homo sapiens
  misc_RNA (1)...(19): siRNA sense strand
gcagagaaagauaaugcua

SEQ ID NO: 2024142 - RNA, 19 nt, Homo sapiens
  misc_RNA (1)...(19): siRNA sense strand
ccacagcagagaaagauaa

SEQ ID NO: 2024143 - RNA, 19 nt, Homo sapiens
  misc_RNA (1)...(19): siRNA sense strand
gccacagggucaccacaua

SEQ ID NO: 2024144 - RNA, 19 nt, Homo sapiens
  misc_RNA (1)...(19): siRNA sense strand
aagcugagccaugcaauua

SEQ ID NO: 2024145 - RNA, 19 nt, Homo sapiens
  misc_RNA (1)...(19): siRNA sense strand
gaggcaaguugacgguauu

SEQ ID NO: 2024146 - RNA, 19 nt, Homo sapiens
  misc_RNA (1)...(19): siRNA sense strand
ugacuugagcuuuaacuuu

SEQ ID NO: 2024147 - RNA, 19 nt, Homo sapiens
  misc_RNA (1)...(19): siRNA sense strand
gugagaguaugauggguuu

SEQ ID NO: 2024148 - RNA, 19 nt, Homo sapiens
  misc_RNA (1)...(19): siRNA sense strand
ggacaaauugagauauguu

SEQ ID NO: 2024149 - RNA, 19 nt, Homo sapiens
  misc_RNA (1)...(19): siRNA sense strand
ugaggaacaccgucuuaua

SEQ ID NO: 2024150 - RNA, 19 nt, Homo sapiens
  misc_RNA (1)...(19): siRNA sense strand
ccacuugaccuugcacaua

SEQ ID NO: 2024151 - RNA, 19 nt, Homo sapiens
  misc_RNA (1)...(19): siRNA sense strand
ccaauggcuuaaugauauu

SEQ ID NO: 2024152 - RNA, 19 nt, Homo sapiens
  misc_RNA (1)...(19): siRNA sense strand
agaaaugcgugcucagaau

SEQ ID NO: 2024153 - RNA, 19 nt, Homo sapiens
  misc_RNA (1)...(19): siRNA sense strand
gcaaccagcaccagaugaa

SEQ ID NO: 2024154 - RNA, 19 nt, Homo sapiens
  misc_RNA (1)...(19): siRNA sense strand
gcaggaggccuucgcacaa

SEQ ID NO: 2024155 - RNA, 19 nt, Homo sapiens
  misc_RNA (1)...(19): siRNA sense strand
gaagcugagccaugcaauu

SEQ ID NO: 2024156 - RNA, 19 nt, Homo sapiens
  misc_RNA (1)...(19): siRNA sense strand
gagaagaggcagcuguuca

SEQ ID NO: 2024157 - RNA, 19 nt, Homo sapiens
  misc_RNA (1)...(19): siRNA sense strand
cgagacaauggccuuaaua

SEQ ID NO: 2024158 - RNA, 19 nt, Homo sapiens
  misc_RNA (1)...(19): siRNA sense strand
cccacugacuugagcuuua

SEQ ID NO: 2024159 - RNA, 19 nt, Homo sapiens
  misc_RNA (1)...(19): siRNA sense strand
gaacaagcgccuuccuucu

SEQ ID NO: 2024160 - RNA, 19 nt, Homo sapiens
  misc_RNA (1)...(19): siRNA sense strand
uuaauacacuggaccauac

SEQ ID NO: 2024161 - RNA, 19 nt, Homo sapiens
  misc_RNA (1)...(19): siRNA sense strand
gcaaaggaaggaugaacug

SEQ ID NO: 2024162 - RNA, 19 nt, Homo sapiens
  misc_RNA (1)...(19): siRNA sense strand
cacuugaccuugcacauau

SEQ ID NO: 2024163 - RNA, 19 nt, Homo sapiens
  misc_RNA (1)...(19): siRNA sense strand
gaaaccacuugaccuugca

SEQ ID NO: 2024164 - RNA, 19 nt, Homo sapiens
  misc_RNA (1)...(19): siRNA sense strand
cagagaaagauaaugcuaa

SEQ ID NO: 2024165 - RNA, 19 nt, Homo sapiens
  misc_RNA (1)...(19): siRNA sense strand
ccaaauuaguguggaacaa

SEQ ID NO: 2024166 - RNA, 19 nt, Homo sapiens
  misc_RNA (1)...(19): siRNA sense strand
gaacuggagcagaggaugu

SEQ ID NO: 2024167 - RNA, 19 nt, Homo sapiens
  misc_RNA (1)...(19): siRNA sense strand
ggaacaagcggaagaccau

SEQ ID NO: 2024168 - RNA, 19 nt, Homo sapiens
  misc_RNA (1)...(19): siRNA sense strand
uuacagaacagccugcaaa

SEQ ID NO: 2024169 - RNA, 19 nt, Homo sapiens
  misc_RNA (1)...(19): siRNA sense strand
aggcagcuguucauagaaa

SEQ ID NO: 2024170 - RNA, 19 nt, Homo sapiens
  misc_RNA (1)...(19): siRNA sense strand
ugaaggaaguucugaagcu

SEQ ID NO: 2024171 - RNA, 19 nt, Homo sapiens
  misc_RNA (1)...(19): siRNA sense strand
cgaggcaaguugacgguau

SEQ ID NO: 2024172 - RNA, 19 nt, Homo sapiens
  misc_RNA (1)...(19): siRNA sense strand
ggaacaccgucuuauagcu

SEQ ID NO: 2024173 - RNA, 19 nt, Homo sapiens
  misc_RNA (1)...(19): siRNA sense strand
gcaauuaguaaaucuuugg

SEQ ID NO: 2024174 - RNA, 19 nt, Homo sapiens
  misc_RNA (1)...(19): siRNA sense strand
gcugagccaugcaauuagu

SEQ ID NO: 2024175 - RNA, 19 nt, Homo sapiens
  misc_RNA (1)...(19): siRNA sense strand
acaauggccuuaauacacu

SEQ ID NO: 2024176 - RNA, 19 nt, Homo sapiens
  misc_RNA (1)...(19): siRNA sense strand
gaagggccaucuuuugguu

SEQ ID NO: 2024177 - RNA, 19 nt, Homo sapiens
  misc_RNA (1)...(19): siRNA sense strand
cuccucaacuuuaugauug

SEQ ID NO: 2024178 - RNA, 19 nt, Homo sapiens
  misc_RNA (1)...(19): siRNA sense strand
gacaauggccuuaauacac

SEQ ID NO: 2024179 - RNA, 19 nt, Homo sapiens
  misc_RNA (1)...(19): siRNA sense strand
caaauuaguguggaacaau

SEQ ID NO: 2024180 - RNA, 19 nt, Homo sapiens
  misc_RNA (1)...(19): siRNA sense strand
ucaccaaauuaguguggaa

SEQ ID NO: 2024181 - RNA, 19 nt, Homo sapiens
  misc_RNA (1)...(19): siRNA sense strand
acuaucaacuuacagaaca

SEQ ID NO: 2024182 - RNA, 19 nt, Homo sapiens
  misc_RNA (1)...(19): siRNA sense strand
agaacagccugcaaauuac

SEQ ID NO: 2024183 - RNA, 19 nt, Homo sapiens
  misc_RNA (1)...(19): siRNA sense strand
gcucccaacagcugucuuu

SEQ ID NO: 2024184 - RNA, 19 nt, Homo sapiens
  misc_RNA (1)...(19): siRNA sense strand
uuagcaaguuugaccaguu

SEQ ID NO: 2024185 - RNA, 19 nt, Homo sapiens
  misc_RNA (1)...(19): siRNA sense strand
aacaagcgccuuccuucua

SEQ ID NO: 2024186 - RNA, 19 nt, Homo sapiens
  misc_RNA (1)...(19): siRNA sense strand
aaauuaguguggaacaauc

SEQ ID NO: 2024187 - RNA, 19 nt, Homo sapiens
  misc_RNA (1)...(19): siRNA sense strand
gaccauaccaccgagauca

SEQ ID NO: 2024188 - RNA, 19 nt, Homo sapiens
  misc_RNA (1)...(19): siRNA sense strand
gccaugcaauuaguaaauc

SEQ ID NO: 2024189 - RNA, 19 nt, Homo sapiens
  misc_RNA (1)...(19): siRNA sense strand
uuggaaaucuccugcaaag

SEQ ID NO: 2024190 - RNA, 19 nt, Homo sapiens
  misc_RNA (1)...(19): siRNA sense strand
ccgagacaauggccuuaau

SEQ ID NO: 2024191 - RNA, 19 nt, Homo sapiens
  misc_RNA (1)...(19): siRNA sense strand
ugacucguccucccacuga

SEQ ID NO: 2024192 - RNA, 19 nt, Homo sapiens
  misc_RNA (1)...(19): siRNA sense strand
ugaaugacaccaugguuag

SEQ ID NO: 2024193 - RNA, 19 nt, Homo sapiens
  misc_RNA (1)...(19): siRNA sense strand
gaugucauacgacuaucaa

SEQ ID NO: 2024194 - RNA, 19 nt, Homo sapiens
  misc_RNA (1)...(19): siRNA sense strand
gagacaauggccuuaauac

SEQ ID NO: 2024195 - RNA, 19 nt, Homo sapiens
  misc_RNA (1)...(19): siRNA sense strand
cuggacaaauugagauaug

SEQ ID NO: 2024196 - RNA, 19 nt, Homo sapiens
  misc_RNA (1)...(19): siRNA sense strand
uagaaaugcgugcucagaa

SEQ ID NO: 2024197 - RNA, 19 nt, Homo sapiens
  misc_RNA (1)...(19): siRNA sense strand
agagaaaccacuugaccuu

SEQ ID NO: 2024198 - RNA, 19 nt, Homo sapiens
  misc_RNA (1)...(19): siRNA sense strand
auacgacuaucaacuuaca

SEQ ID NO: 2024199 - RNA, 19 nt, Homo sapiens
  misc_RNA (1)...(19): siRNA sense strand
ccagaugucagauuccaau

SEQ ID NO: 2024200 - RNA, 19 nt, Homo sapiens
  misc_RNA (1)...(19): siRNA sense strand
gaauuuugaugucauacga

SEQ ID NO: 2024201 - RNA, 19 nt, Homo sapiens
  misc_RNA (1)...(19): siRNA sense strand
ugaccuugcacauauaguu

SEQ ID NO: 2024202 - RNA, 19 nt, Homo sapiens
  misc_RNA (1)...(19): siRNA sense strand
acaagcgccuuccuucuac

SEQ ID NO: 2024203 - RNA, 19 nt, Homo sapiens
  misc_RNA (1)...(19): siRNA sense strand
ucucccagaugucagauuc

SEQ ID NO: 2024204 - RNA, 19 nt, Homo sapiens
  misc_RNA (1)...(19): siRNA sense strand
cuuaauacacuggaccaua

SEQ ID NO: 2024205 - RNA, 19 nt, Homo sapiens
  misc_RNA (1)...(19): siRNA sense strand
gaugccaacaaacaacaaa

SEQ ID NO: 2024206 - RNA, 19 nt, Homo sapiens
  misc_RNA (1)...(19): siRNA sense strand
augaaugacaccaugguua

SEQ ID NO: 2024207 - RNA, 19 nt, Homo sapiens
  misc_RNA (1)...(19): siRNA sense strand
gacgguauuuucaguuaaa

SEQ ID NO: 2024208 - RNA, 19 nt, Homo sapiens
  misc_RNA (1)...(19): siRNA sense strand
ucuccuccaucuacuauca

SEQ ID NO: 2024209 - RNA, 19 nt, Homo sapiens
  misc_RNA (1)...(19): siRNA sense strand
cagagaagaggcagcuguu

SEQ ID NO: 2024210 - RNA, 19 nt, Homo sapiens
  misc_RNA (1)...(19): siRNA sense strand
cagcagagaaagauaaugc

SEQ ID NO: 2024211 - RNA, 19 nt, Homo sapiens
  misc_RNA (1)...(19): siRNA sense strand
agauuccaauggcuuaaug

SEQ ID NO: 2024212 - RNA, 19 nt, Homo sapiens
  misc_RNA (1)...(19): siRNA sense strand
gcuuauugcagaacuggaa

SEQ ID NO: 2024213 - RNA, 19 nt, Homo sapiens
  misc_RNA (1)...(19): siRNA sense strand
ccaacaaacaacaaagaca

SEQ ID NO: 2024214 - RNA, 19 nt, Homo sapiens
  misc_RNA (1)...(19): siRNA sense strand
gucauacgacuaucaacuu

SEQ ID NO: 2024215 - RNA, 19 nt, Homo sapiens
  misc_RNA (1)...(19): siRNA sense strand
gagccaugcaauuaguaaa

SEQ ID NO: 2024216 - RNA, 19 nt, Homo sapiens
  misc_RNA (1)...(19): siRNA sense strand
ugaggaaagugggaacaag

SEQ ID NO: 2024217 - RNA, 19 nt, Homo sapiens
  misc_RNA (1)...(19): siRNA sense strand
agacaauggccuuaauaca

SEQ ID NO: 2024218 - RNA, 19 nt, Homo sapiens
  misc_RNA (1)...(19): siRNA sense strand
gcaaccagagaaaccacuu

SEQ ID NO: 2024219 - RNA, 19 nt, Homo sapiens
  misc_RNA (1)...(19): siRNA sense strand
uauguuagcaaccaugugu

SEQ ID NO: 2024220 - RNA, 19 nt, Homo sapiens
  misc_RNA (1)...(19): siRNA sense strand
uugcagaacuggaaaacaa

SEQ ID NO: 2024221 - RNA, 19 nt, Homo sapiens
  misc_RNA (1)...(19): siRNA sense strand
cagaacagccugcaaauua

SEQ ID NO: 2024222 - RNA, 19 nt, Homo sapiens
  misc_RNA (1)...(19): siRNA sense strand
ggaaaucuccugcaaagaa

SEQ ID NO: 2024223 - RNA, 19 nt, Homo sapiens
  misc_RNA (1)...(19): siRNA sense strand
caacaaagacagcuuauug

SEQ ID NO: 2024224 - RNA, 19 nt, Homo sapiens
  misc_RNA (1)...(19): siRNA sense strand
uggaagagcugaugaaguu

SEQ ID NO: 2024225 - RNA, 19 nt, Homo sapiens
  misc_RNA (1)...(19): siRNA sense strand
guugauaucuggaacauga

SEQ ID NO: 2024226 - RNA, 19 nt, Homo sapiens
  misc_RNA (1)...(19): siRNA sense strand
ggaagaccauggcagagaa

SEQ ID NO: 2024227 - RNA, 19 nt, Homo sapiens
  misc_RNA (1)...(19): siRNA sense strand
gacuugagcuuuaacuuug

SEQ ID NO: 2024228 - RNA, 19 nt, Homo sapiens
  misc_RNA (1)...(19): siRNA sense strand
ucauacgacuaucaacuua

SEQ ID NO: 2024229 - RNA, 19 nt, Homo sapiens
  misc_RNA (1)...(19): siRNA sense strand
gcacaggcuugcccauguu

SEQ ID NO: 2024230 - RNA, 19 nt, Homo sapiens
  misc_RNA (1)...(19): siRNA sense strand
gaaaugcgugcucagaauu

SEQ ID NO: 2024231 - RNA, 19 nt, Homo sapiens
  misc_RNA (1)...(19): siRNA sense strand
gaaaucuccugcaaagaag

SEQ ID NO: 2024232 - RNA, 19 nt, Homo sapiens
  misc_RNA (1)...(19): siRNA sense strand
uccaauggcuuaaugauau

SEQ ID NO: 2024233 - RNA, 19 nt, Homo sapiens
  misc_RNA (1)...(19): siRNA sense strand
ccacugacuugagcuuuaa

SEQ ID NO: 2024234 - RNA, 19 nt, Homo sapiens
  misc_RNA (1)...(19): siRNA sense strand
aaacaacaaagacagcuua

SEQ ID NO: 2024235 - RNA, 19 nt, Homo sapiens
  misc_RNA (1)...(19): siRNA sense strand
uagcaaguuugaccaguuu

SEQ ID NO: 2024236 - RNA, 19 nt, Homo sapiens
  misc_RNA (1)...(19): siRNA sense strand
cccaacagcugucuuugaa

SEQ ID NO: 2024237 - RNA, 19 nt, Homo sapiens
  misc_RNA (1)...(19): siRNA sense strand
gaggaacaccgucuuauag

SEQ ID NO: 2024238 - RNA, 19 nt, Homo sapiens
  misc_RNA (1)...(19): siRNA sense strand
gaugaggaacaccgucuua

SEQ ID NO: 2024239 - RNA, 19 nt, Homo sapiens
  misc_RNA (1)...(19): siRNA sense strand
agaggcagcuguucauaga

SEQ ID NO: 2024240 - RNA, 19 nt, Homo sapiens
  misc_RNA (1)...(19): siRNA sense strand
gaagaggcagcuguucaua

SEQ ID NO: 2024241 - RNA, 19 nt, Homo sapiens
  misc_RNA (1)...(19): siRNA sense strand
gcagagaaagauaaugcua

SEQ ID NO: 2024242 - RNA, 19 nt, Homo sapiens
  misc_RNA (1)...(19): siRNA sense strand
ccacagcagagaaagauaa

SEQ ID NO: 2024243 - RNA, 19 nt, Homo sapiens
  misc_RNA (1)...(19): siRNA sense strand
gccacagggucaccacaua

SEQ ID NO: 2024244 - RNA, 19 nt, Homo sapiens
  misc_RNA (1)...(19): siRNA sense strand
aagcugagccaugcaauua

SEQ ID NO: 2024245 - RNA, 19 nt, Homo sapiens
  misc_RNA (1)...(19): siRNA sense strand
gaggcaaguugacgguauu

SEQ ID NO: 2024246 - RNA, 19 nt, Homo sapiens
  misc_RNA (1)...(19): siRNA sense strand
ugacuugagcuuuaacuuu

SEQ ID NO: 2024247 - RNA, 19 nt, Homo sapiens
  misc_RNA (1)...(19): siRNA sense strand
gugagaguaugauggguuu

SEQ ID NO: 2024248 - RNA, 19 nt, Homo sapiens
  misc_RNA (1)...(19): siRNA sense strand
ggacaaauugagauauguu

SEQ ID NO: 2024249 - RNA, 19 nt, Homo sapiens
  misc_RNA (1)...(19): siRNA sense strand
ugaggaacaccgucuuaua

SEQ ID NO: 2024250 - RNA, 19 nt, Homo sapiens
  misc_RNA (1)...(19): siRNA sense strand
ccacuugaccuugcacaua

SEQ ID NO: 2024251 - RNA, 19 nt, Homo sapiens
  misc_RNA (1)...(19): siRNA sense strand
ccaauggcuuaaugauauu

SEQ ID NO: 2024252 - RNA, 19 nt, Homo sapiens
  misc_RNA (1)...(19): siRNA sense strand
agaaaugcgugcucagaau

SEQ ID NO: 2024253 - RNA, 19 nt, Homo sapiens
  misc_RNA (1)...(19): siRNA sense strand
gcaaccagcaccagaugaa

SEQ ID NO: 2024254 - RNA, 19 nt, Homo sapiens
  misc_RNA (1)...(19): siRNA sense strand
gcaggaggccuucgcacaa

SEQ ID NO: 2024255 - RNA, 19 nt, Homo sapiens
  misc_RNA (1)...(19): siRNA sense strand
gaagcugagccaugcaauu

SEQ ID NO: 2024256 - RNA, 19 nt, Homo sapiens
  misc_RNA (1)...(19): siRNA sense strand
gagaagaggcagcuguuca

SEQ ID NO: 2024257 - RNA, 19 nt, Homo sapiens
  misc_RNA (1)...(19): siRNA sense strand
cgagacaauggccuuaaua

SEQ ID NO: 2024258 - RNA, 19 nt, Homo sapiens
  misc_RNA (1)...(19): siRNA sense strand
cccacugacuugagcuuua

SEQ ID NO: 2024259 - RNA, 19 nt, Homo sapiens
  misc_RNA (1)...(19): siRNA sense strand
gaacaagcgccuuccuucu

SEQ ID NO: 2024260 - RNA, 19 nt, Homo sapiens
  misc_RNA (1)...(19): siRNA sense strand
uuaauacacuggaccauac

SEQ ID NO: 2024261 - RNA, 19 nt, Homo sapiens
  misc_RNA (1)...(19): siRNA sense strand
gcaaaggaaggaugaacug

SEQ ID NO: 2024262 - RNA, 19 nt, Homo sapiens
  misc_RNA (1)...(19): siRNA sense strand
cacuugaccuugcacauau

SEQ ID NO: 2024263 - RNA, 19 nt, Homo sapiens
  misc_RNA (1)...(19): siRNA sense strand
gaaaccacuugaccuugca

SEQ ID NO: 2024264 - RNA, 19 nt, Homo sapiens
  misc_RNA (1)...(19): siRNA sense strand
cagagaaagauaaugcuaa

SEQ ID NO: 2024265 - RNA, 19 nt, Homo sapiens
  misc_RNA (1)...(19): siRNA sense strand
ccaaauuaguguggaacaa

SEQ ID NO: 2024266 - RNA, 19 nt, Homo sapiens
  misc_RNA (1)...(19): siRNA sense strand
gaacuggagcagaggaugu

SEQ ID NO: 2024267 - RNA, 19 nt, Homo sapiens
  misc_RNA (1)...(19): siRNA sense strand
ggaacaagcggaagaccau

SEQ ID NO: 2024268 - RNA, 19 nt, Homo sapiens
  misc_RNA (1)...(19): siRNA sense strand
uuacagaacagccugcaaa

SEQ ID NO: 2024269 - RNA, 19 nt, Homo sapiens
  misc_RNA (1)...(19): siRNA sense strand
aggcagcuguucauagaaa

SEQ ID NO: 2024270 - RNA, 19 nt, Homo sapiens
  misc_RNA (1)...(19): siRNA sense strand
ugaaggaaguucugaagcu

SEQ ID NO: 2024271 - RNA, 19 nt, Homo sapiens
  misc_RNA (1)...(19): siRNA sense strand
cgaggcaaguugacgguau

SEQ ID NO: 2024272 - RNA, 19 nt, Homo sapiens
  misc_RNA (1)...(19): siRNA sense strand
ggaacaccgucuuauagcu

SEQ ID NO: 2024273 - RNA, 19 nt, Homo sapiens
  misc_RNA (1)...(19): siRNA sense strand
gcaauuaguaaaucuuugg

SEQ ID NO: 2024274 - RNA, 19 nt, Homo sapiens
  misc_RNA (1)...(19): siRNA sense strand
gcugagccaugcaauuagu

SEQ ID NO: 2024275 - RNA, 19 nt, Homo sapiens
  misc_RNA (1)...(19): siRNA sense strand
acaauggccuuaauacacu

SEQ ID NO: 2024276 - RNA, 19 nt, Homo sapiens
  misc_RNA (1)...(19): siRNA sense strand
gaagggccaucuuuugguu

SEQ ID NO: 2024277 - RNA, 19 nt, Homo sapiens
  misc_RNA (1)...(19): siRNA sense strand
cuccucaacuuuaugauug

SEQ ID NO: 2024278 - RNA, 19 nt, Homo sapiens
  misc_RNA (1)...(19): siRNA sense strand
gacaauggccuuaauacac

SEQ ID NO: 2024279 - RNA, 19 nt, Homo sapiens
  misc_RNA (1)...(19): siRNA sense strand
caaauuaguguggaacaau

SEQ ID NO: 2024280 - RNA, 19 nt, Homo sapiens
  misc_RNA (1)...(19): siRNA sense strand
ucaccaaauuaguguggaa

SEQ ID NO: 2024281 - RNA, 19 nt, Homo sapiens
  misc_RNA (1)...(19): siRNA sense strand
acuaucaacuuacagaaca

SEQ ID NO: 2024282 - RNA, 19 nt, Homo sapiens
  misc_RNA (1)...(19): siRNA sense strand
agaacagccugcaaauuac

SEQ ID NO: 2024283 - RNA, 19 nt, Homo sapiens
  misc_RNA (1)...(19): siRNA sense strand
gcucccaacagcugucuuu

SEQ ID NO: 2024284 - RNA, 19 nt, Homo sapiens
  misc_RNA (1)...(19): siRNA sense strand
uuagcaaguuugaccaguu

SEQ ID NO: 2024285 - RNA, 19 nt, Homo sapiens
  misc_RNA (1)...(19): siRNA sense strand
aacaagcgccuuccuucua

SEQ ID NO: 2024286 - RNA, 19 nt, Homo sapiens
  misc_RNA (1)...(19): siRNA sense strand
aaauuaguguggaacaauc

SEQ ID NO: 2024287 - RNA, 19 nt, Homo sapiens
  misc_RNA (1)...(19): siRNA sense strand
gaccauaccaccgagauca

SEQ ID NO: 2024288 - RNA, 19 nt, Homo sapiens
  misc_RNA (1)...(19): siRNA sense strand
gccaugcaauuaguaaauc

SEQ ID NO: 2024289 - RNA, 19 nt, Homo sapiens
  misc_RNA (1)...(19): siRNA sense strand
uuggaaaucuccugcaaag

SEQ ID NO: 2024290 - RNA, 19 nt, Homo sapiens
  misc_RNA (1)...(19): siRNA sense strand
ccgagacaauggccuuaau

SEQ ID NO: 2024291 - RNA, 19 nt, Homo sapiens
  misc_RNA (1)...(19): siRNA sense strand
ugacucguccucccacuga

SEQ ID NO: 2024292 - RNA, 19 nt, Homo sapiens
  misc_RNA (1)...(19): siRNA sense strand
ugaaugacaccaugguuag

SEQ ID NO: 2024293 - RNA, 19 nt, Homo sapiens
  misc_RNA (1)...(19): siRNA sense strand
gaugucauacgacuaucaa

SEQ ID NO: 2024294 - RNA, 19 nt, Homo sapiens
  misc_RNA (1)...(19): siRNA sense strand
gagacaauggccuuaauac

SEQ ID NO: 2024295 - RNA, 19 nt, Homo sapiens
  misc_RNA (1)...(19): siRNA sense strand
cuggacaaauugagauaug

SEQ ID NO: 2024296 - RNA, 19 nt, Homo sapiens
  misc_RNA (1)...(19): siRNA sense strand
uagaaaugcgugcucagaa

SEQ ID NO: 2024297 - RNA, 19 nt, Homo sapiens
  misc_RNA (1)...(19): siRNA sense strand
agagaaaccacuugaccuu

SEQ ID NO: 2024298 - RNA, 19 nt, Homo sapiens
  misc_RNA (1)...(19): siRNA sense strand
auacgacuaucaacuuaca

SEQ ID NO: 2024299 - RNA, 19 nt, Homo sapiens
  misc_RNA (1)...(19): siRNA sense strand
ccagaugucagauuccaau

SEQ ID NO: 2024300 - RNA, 19 nt, Homo sapiens
  misc_RNA (1)...(19): siRNA sense strand
gaauuuugaugucauacga

SEQ ID NO: 2024301 - RNA, 19 nt, Homo sapiens
  misc_RNA (1)...(19): siRNA sense strand
ugaccuugcacauauaguu

SEQ ID NO: 2024302 - RNA, 19 nt, Homo sapiens
  misc_RNA (1)...(19): siRNA sense strand
acaagcgccuuccuucuac

SEQ ID NO: 2024303 - RNA, 19 nt, Homo sapiens
  misc_RNA (1)...(19): siRNA sense strand
ucucccagaugucagauuc

SEQ ID NO: 2024304 - RNA, 19 nt, Homo sapiens
  misc_RNA (1)...(19): siRNA sense strand
cuuaauacacuggaccaua

SEQ ID NO: 2024305 - RNA, 19 nt, Homo sapiens
  misc_RNA (1)...(19): siRNA sense strand
gaugccaacaaacaacaaa

SEQ ID NO: 2024306 - RNA, 19 nt, Homo sapiens
  misc_RNA (1)...(19): siRNA sense strand
augaaugacaccaugguua

SEQ ID NO: 2024307 - RNA, 19 nt, Homo sapiens
  misc_RNA (1)...(19): siRNA sense strand
gacgguauuuucaguuaaa

SEQ ID NO: 2024308 - RNA, 19 nt, Homo sapiens
  misc_RNA (1)...(19): siRNA sense strand
ucuccuccaucuacuauca

SEQ ID NO: 2024309 - RNA, 19 nt, Homo sapiens
  misc_RNA (1)...(19): siRNA sense strand
cagagaagaggcagcuguu

SEQ ID NO: 2024310 - RNA, 19 nt, Homo sapiens
  misc_RNA (1)...(19): siRNA sense strand
cagcagagaaagauaaugc

SEQ ID NO: 2024311 - RNA, 19 nt, Homo sapiens
  misc_RNA (1)...(19): siRNA sense strand
agauuccaauggcuuaaug

SEQ ID NO: 2024312 - RNA, 19 nt, Homo sapiens
  misc_RNA (1)...(19): siRNA sense strand
gcuuauugcagaacuggaa

SEQ ID NO: 2024313 - RNA, 19 nt, Homo sapiens
  misc_RNA (1)...(19): siRNA sense strand
ccaacaaacaacaaagaca

SEQ ID NO: 2024314 - RNA, 19 nt, Homo sapiens
  misc_RNA (1)...(19): siRNA sense strand
gucauacgacuaucaacuu

SEQ ID NO: 2024315 - RNA, 19 nt, Homo sapiens
  misc_RNA (1)...(19): siRNA sense strand
gagccaugcaauuaguaaa

SEQ ID NO: 2024316 - RNA, 19 nt, Homo sapiens
  misc_RNA (1)...(19): siRNA sense strand
ugaggaaagugggaacaag

SEQ ID NO: 2024317 - RNA, 19 nt, Homo sapiens
  misc_RNA (1)...(19): siRNA sense strand
agacaauggccuuaauaca

SEQ ID NO: 2024318 - RNA, 19 nt, Homo sapiens
  misc_RNA (1)...(19): siRNA sense strand
gcaaccagagaaaccacuu

SEQ ID NO: 2024319 - RNA, 19 nt, Homo sapiens
  misc_RNA (1)...(19): siRNA sense strand
uauguuagcaaccaugugu

SEQ ID NO: 2024320 - RNA, 19 nt, Homo sapiens
  misc_RNA (1)...(19): siRNA sense strand
uugcagaacuggaaaacaa

SEQ ID NO: 2024321 - RNA, 19 nt, Homo sapiens
  misc_RNA (1)...(19): siRNA sense strand
cagaacagccugcaaauua

SEQ ID NO: 2024322 - RNA, 19 nt, Homo sapiens
  misc_RNA (1)...(19): siRNA sense strand
ggaaaucuccugcaaagaa

SEQ ID NO: 2024323 - RNA, 19 nt, Homo sapiens
  misc_RNA (1)...(19): siRNA sense strand
caacaaagacagcuuauug

SEQ ID NO: 2024324 - RNA, 19 nt, Homo sapiens
  misc_RNA (1)...(19): siRNA sense strand
uggaagagcugaugaaguu

SEQ ID NO: 2024325 - RNA, 19 nt, Homo sapiens
  misc_RNA (1)...(19): siRNA sense strand
guugauaucuggaacauga

SEQ ID NO: 2024326 - RNA, 19 nt, Homo sapiens
  misc_RNA (1)...(19): siRNA sense strand
ggaagaccauggcagagaa

SEQ ID NO: 2024327 - RNA, 19 nt, Homo sapiens
  misc_RNA (1)...(19): siRNA sense strand
gacuugagcuuuaacuuug

SEQ ID NO: 2024328 - RNA, 19 nt, Homo sapiens
  misc_RNA (1)...(19): siRNA sense strand
ucauacgacuaucaacuua

SEQ ID NO: 2024329 - RNA, 19 nt, Homo sapiens
  misc_RNA (1)...(19): siRNA sense strand
gcacaggcuugcccauguu

SEQ ID NO: 2024330 - RNA, 19 nt, Homo sapiens
  misc_RNA (1)...(19): siRNA sense strand
gaaaugcgugcucagaauu

SEQ ID NO: 2024331 - RNA, 19 nt, Homo sapiens
  misc_RNA (1)...(19): siRNA sense strand
gaaaucuccugcaaagaag

SEQ ID NO: 2024332 - RNA, 19 nt, Homo sapiens
  misc_RNA (1)...(19): siRNA sense strand
uccaauggcuuaaugauau

SEQ ID NO: 2024333 - RNA, 19 nt, Homo sapiens
  misc_RNA (1)...(19): siRNA sense strand
ccacugacuugagcuuuaa

SEQ ID NO: 2024334 - RNA, 19 nt, Homo sapiens
  misc_RNA (1)...(19): siRNA sense strand
aaacaacaaagacagcuua

SEQ ID NO: 2024335 - RNA, 19 nt, Homo sapiens
  misc_RNA (1)...(19): siRNA sense strand
uagcaaguuugaccaguuu

SEQ ID NO: 2024336 - RNA, 19 nt, Homo sapiens
  misc_RNA (1)...(19): siRNA sense strand
cccaacagcugucuuugaa

SEQ ID NO: 2024337 - RNA, 19 nt, Homo sapiens
  misc_RNA (1)...(19): siRNA sense strand
gaggaacaccgucuuauag

SEQ ID NO: 2024338 - RNA, 19 nt, Homo sapiens
  misc_RNA (1)...(19): siRNA sense strand
gaugaggaacaccgucuua

SEQ ID NO: 2024339 - RNA, 19 nt, Homo sapiens
  misc_RNA (1)...(19): siRNA sense strand
agaggcagcuguucauaga

SEQ ID NO: 2024340 - RNA, 19 nt, Homo sapiens
  misc_RNA (1)...(19): siRNA sense strand
gaagaggcagcuguucaua

SEQ ID NO: 2024341 - RNA, 19 nt, Homo sapiens
  misc_RNA (1)...(19): siRNA sense strand
gcagagaaagauaaugcua

SEQ ID NO: 2024342 - RNA, 19 nt, Homo sapiens
  misc_RNA (1)...(19): siRNA sense strand
ccacagcagagaaagauaa

SEQ ID NO: 2024343 - RNA, 19 nt, Homo sapiens
  misc_RNA (1)...(19): siRNA sense strand
gccacagggucaccacaua

SEQ ID NO: 2024344 - RNA, 19 nt, Homo sapiens
  misc_RNA (1)...(19): siRNA sense strand
aagcugagccaugcaauua

SEQ ID NO: 2024345 - RNA, 19 nt, Homo sapiens
  misc_RNA (1)...(19): siRNA sense strand
gaggcaaguugacgguauu

SEQ ID NO: 2024346 - RNA, 19 nt, Homo sapiens
  misc_RNA (1)...(19): siRNA sense strand
ugacuugagcuuuaacuuu

SEQ ID NO: 2024347 - RNA, 19 nt, Homo sapiens
  misc_RNA (1)...(19): siRNA sense strand
gugagaguaugauggguuu

SEQ ID NO: 2024348 - RNA, 19 nt, Homo sapiens
  misc_RNA (1)...(19): siRNA sense strand
ggacaaauugagauauguu

SEQ ID NO: 2024349 - RNA, 19 nt, Homo sapiens
  misc_RNA (1)...(19): siRNA sense strand
ugaggaacaccgucuuaua

SEQ ID NO: 2024350 - RNA, 19 nt, Homo sapiens
  misc_RNA (1)...(19): siRNA sense strand
ccacuugaccuugcacaua

SEQ ID NO: 2024351 - RNA, 19 nt, Homo sapiens
  misc_RNA (1)...(19): siRNA sense strand
ccaauggcuuaaugauauu

SEQ ID NO: 2024352 - RNA, 19 nt, Homo sapiens
  misc_RNA (1)...(19): siRNA sense strand
agaaaugcgugcucagaau

SEQ ID NO: 2024353 - RNA, 19 nt, Homo sapiens
  misc_RNA (1)...(19): siRNA sense strand
gcaaccagcaccagaugaa

SEQ ID NO: 2024354 - RNA, 19 nt, Homo sapiens
  misc_RNA (1)...(19): siRNA sense strand
gcaggaggccuucgcacaa

SEQ ID NO: 2024355 - RNA, 19 nt, Homo sapiens
  misc_RNA (1)...(19): siRNA sense strand
gaagcugagccaugcaauu

SEQ ID NO: 2024356 - RNA, 19 nt, Homo sapiens
  misc_RNA (1)...(19): siRNA sense strand
gagaagaggcagcuguuca

SEQ ID NO: 2024357 - RNA, 19 nt, Homo sapiens
  misc_RNA (1)...(19): siRNA sense strand
cgagacaauggccuuaaua

SEQ ID NO: 2024358 - RNA, 19 nt, Homo sapiens
  misc_RNA (1)...(19): siRNA sense strand
cccacugacuugagcuuua

SEQ ID NO: 2024359 - RNA, 19 nt, Homo sapiens
  misc_RNA (1)...(19): siRNA sense strand
gaacaagcgccuuccuucu

SEQ ID NO: 2024360 - RNA, 19 nt, Homo sapiens
  misc_RNA (1)...(19): siRNA sense strand
uuaauacacuggaccauac

SEQ ID NO: 2024361 - RNA, 19 nt, Homo sapiens
  misc_RNA (1)...(19): siRNA sense strand
gcaaaggaaggaugaacug

SEQ ID NO: 2024362 - RNA, 19 nt, Homo sapiens
  misc_RNA (1)...(19): siRNA sense strand
cacuugaccuugcacauau

SEQ ID NO: 2024363 - RNA, 19 nt, Homo sapiens
  misc_RNA (1)...(19): siRNA sense strand
gaaaccacuugaccuugca

SEQ ID NO: 2024364 - RNA, 19 nt, Homo sapiens
  misc_RNA (1)...(19): siRNA sense strand
cagagaaagauaaugcuaa

SEQ ID NO: 2024365 - RNA, 19 nt, Homo sapiens
  misc_RNA (1)...(19): siRNA sense strand
ccaaauuaguguggaacaa

SEQ ID NO: 2024366 - RNA, 19 nt, Homo sapiens
  misc_RNA (1)...(19): siRNA sense strand
gaacuggagcagaggaugu

SEQ ID NO: 2024367 - RNA, 19 nt, Homo sapiens
  misc_RNA (1)...(19): siRNA sense strand
ggaacaagcggaagaccau

SEQ ID NO: 2024368 - RNA, 19 nt, Homo sapiens
  misc_RNA (1)...(19): siRNA sense strand
uuacagaacagccugcaaa

SEQ ID NO: 2024369 - RNA, 19 nt, Homo sapiens
  misc_RNA (1)...(19): siRNA sense strand
aggcagcuguucauagaaa

SEQ ID NO: 2024370 - RNA, 19 nt, Homo sapiens
  misc_RNA (1)...(19): siRNA sense strand
ugaaggaaguucugaagcu

SEQ ID NO: 2024371 - RNA, 19 nt, Homo sapiens
  misc_RNA (1)...(19): siRNA sense strand
cgaggcaaguugacgguau

SEQ ID NO: 2024372 - RNA, 19 nt, Homo sapiens
  misc_RNA (1)...(19): siRNA sense strand
ggaacaccgucuuauagcu

SEQ ID NO: 2024373 - RNA, 19 nt, Homo sapiens
  misc_RNA (1)...(19): siRNA sense strand
gcaauuaguaaaucuuugg

SEQ ID NO: 2024374 - RNA, 19 nt, Homo sapiens
  misc_RNA (1)...(19): siRNA sense strand
gcugagccaugcaauuagu

SEQ ID NO: 2024375 - RNA, 19 nt, Homo sapiens
  misc_RNA (1)...(19): siRNA sense strand
acaauggccuuaauacacu

SEQ ID NO: 2024376 - RNA, 19 nt, Homo sapiens
  misc_RNA (1)...(19): siRNA sense strand
gaagggccaucuuuugguu

SEQ ID NO: 2024377 - RNA, 19 nt, Homo sapiens
  misc_RNA (1)...(19): siRNA sense strand
cuccucaacuuuaugauug

SEQ ID NO: 2024378 - RNA, 19 nt, Homo sapiens
  misc_RNA (1)...(19): siRNA sense strand
gacaauggccuuaauacac

SEQ ID NO: 2024379 - RNA, 19 nt, Homo sapiens
  misc_RNA (1)...(19): siRNA sense strand
caaauuaguguggaacaau

SEQ ID NO: 2024380 - RNA, 19 nt, Homo sapiens
  misc_RNA (1)...(19): siRNA sense strand
ucaccaaauuaguguggaa

SEQ ID NO: 2024381 - RNA, 19 nt, Homo sapiens
  misc_RNA (1)...(19): siRNA sense strand
acuaucaacuuacagaaca

SEQ ID NO: 2024382 - RNA, 19 nt, Homo sapiens
  misc_RNA (1)...(19): siRNA sense strand
agaacagccugcaaauuac

SEQ ID NO: 2024383 - RNA, 19 nt, Homo sapiens
  misc_RNA (1)...(19): siRNA sense strand
gcucccaacagcugucuuu

SEQ ID NO: 2024384 - RNA, 19 nt, Homo sapiens
  misc_RNA (1)...(19): siRNA sense strand
uuagcaaguuugaccaguu

SEQ ID NO: 2024385 - RNA, 19 nt, Homo sapiens
  misc_RNA (1)...(19): siRNA sense strand
aacaagcgccuuccuucua

SEQ ID NO: 2024386 - RNA, 19 nt, Homo sapiens
  misc_RNA (1)...(19): siRNA sense strand
aaauuaguguggaacaauc

SEQ ID NO: 2024387 - RNA, 19 nt, Homo sapiens
  misc_RNA (1)...(19): siRNA sense strand
gaccauaccaccgagauca

SEQ ID NO: 2024388 - RNA, 19 nt, Homo sapiens
  misc_RNA (1)...(19): siRNA sense strand
gccaugcaauuaguaaauc

SEQ ID NO: 2024389 - RNA, 19 nt, Homo sapiens
  misc_RNA (1)...(19): siRNA sense strand
uuggaaaucuccugcaaag

SEQ ID NO: 2024390 - RNA, 19 nt, Homo sapiens
  misc_RNA (1)...(19): siRNA sense strand
ccgagacaauggccuuaau

SEQ ID NO: 2024391 - RNA, 19 nt, Homo sapiens
  misc_RNA (1)...(19): siRNA sense strand
ugacucguccucccacuga

SEQ ID NO: 2024392 - RNA, 19 nt, Homo sapiens
  misc_RNA (1)...(19): siRNA sense strand
ugaaugacaccaugguuag

SEQ ID NO: 2024393 - RNA, 19 nt, Homo sapiens
  misc_RNA (1)...(19): siRNA sense strand
gaugucauacgacuaucaa

SEQ ID NO: 2024394 - RNA, 19 nt, Homo sapiens
  misc_RNA (1)...(19): siRNA sense strand
gagacaauggccuuaauac

SEQ ID NO: 2024395 - RNA, 19 nt, Homo sapiens
  misc_RNA (1)...(19): siRNA sense strand
cuggacaaauugagauaug

SEQ ID NO: 2024396 - RNA, 19 nt, Homo sapiens
  misc_RNA (1)...(19): siRNA sense strand
uagaaaugcgugcucagaa

SEQ ID NO: 2024397 - RNA, 19 nt, Homo sapiens
  misc_RNA (1)...(19): siRNA sense strand
agagaaaccacuugaccuu

SEQ ID NO: 2024398 - RNA, 19 nt, Homo sapiens
  misc_RNA (1)...(19): siRNA sense strand
auacgacuaucaacuuaca

SEQ ID NO: 2024399 - RNA, 19 nt, Homo sapiens
  misc_RNA (1)...(19): siRNA sense strand
ccagaugucagauuccaau

SEQ ID NO: 2024400 - RNA, 19 nt, Homo sapiens
  misc_RNA (1)...(19): siRNA sense strand
gaauuuugaugucauacga

SEQ ID NO: 2024401 - RNA, 19 nt, Homo sapiens
  misc_RNA (1)...(19): siRNA sense strand
ugaccuugcacauauaguu

SEQ ID NO: 2024402 - RNA, 19 nt, Homo sapiens
  misc_RNA (1)...(19): siRNA sense strand
acaagcgccuuccuucuac

SEQ ID NO: 2024403 - RNA, 19 nt, Homo sapiens
  misc_RNA (1)...(19): siRNA sense strand
ucucccagaugucagauuc

SEQ ID NO: 2024404 - RNA, 19 nt, Homo sapiens
  misc_RNA (1)...(19): siRNA sense strand
cuuaauacacuggaccaua

SEQ ID NO: 2024405 - RNA, 19 nt, Homo sapiens
  misc_RNA (1)...(19): siRNA sense strand
gaugccaacaaacaacaaa

SEQ ID NO: 2024406 - RNA, 19 nt, Homo sapiens
  misc_RNA (1)...(19): siRNA sense strand
augaaugacaccaugguua

SEQ ID NO: 2024407 - RNA, 19 nt, Homo sapiens
  misc_RNA (1)...(19): siRNA sense strand
gacgguauuuucaguuaaa

SEQ ID NO: 2024408 - RNA, 19 nt, Homo sapiens
  misc_RNA (1)...(19): siRNA sense strand
ucuccuccaucuacuauca

SEQ ID NO: 2024409 - RNA, 19 nt, Homo sapiens
  misc_RNA (1)...(19): siRNA sense strand
cagagaagaggcagcuguu

SEQ ID NO: 2024410 - RNA, 19 nt, Homo sapiens
  misc_RNA (1)...(19): siRNA sense strand
cagcagagaaagauaaugc

SEQ ID NO: 2024411 - RNA, 19 nt, Homo sapiens
  misc_RNA (1)...(19): siRNA sense strand
agauuccaauggcuuaaug

SEQ ID NO: 2024412 - RNA, 19 nt, Homo sapiens
  misc_RNA (1)...(19): siRNA sense strand
gcuuauugcagaacuggaa

SEQ ID NO: 2024413 - RNA, 19 nt, Homo sapiens
  misc_RNA (1)...(19): siRNA sense strand
ccaacaaacaacaaagaca

SEQ ID NO: 2024414 - RNA, 19 nt, Homo sapiens
  misc_RNA (1)...(19): siRNA sense strand
gucauacgacuaucaacuu

SEQ ID NO: 2024415 - RNA, 19 nt, Homo sapiens
  misc_RNA (1)...(19): siRNA sense strand
gagccaugcaauuaguaaa

SEQ ID NO: 2024416 - RNA, 19 nt, Homo sapiens
  misc_RNA (1)...(19): siRNA sense strand
ugaggaaagugggaacaag

SEQ ID NO: 2024417 - RNA, 19 nt, Homo sapiens
  misc_RNA (1)...(19): siRNA sense strand
agacaauggccuuaauaca

SEQ ID NO: 2024418 - RNA, 19 nt, Homo sapiens
  misc_RNA (1)...(19): siRNA sense strand
gcaaccagagaaaccacuu

SEQ ID NO: 2024419 - RNA, 19 nt, Homo sapiens
  misc_RNA (1)...(19): siRNA sense strand
uauguuagcaaccaugugu

SEQ ID NO: 2024420 - RNA, 19 nt, Homo sapiens
  misc_RNA (1)...(19): siRNA sense strand
uugcagaacuggaaaacaa

SEQ ID NO: 2024421 - RNA, 19 nt, Homo sapiens
  misc_RNA (1)...(19): siRNA sense strand
cagaacagccugcaaauua

SEQ ID NO: 2024422 - RNA, 19 nt, Homo sapiens
  misc_RNA (1)...(19): siRNA sense strand
ggaaaucuccugcaaagaa

SEQ ID NO: 2024423 - RNA, 19 nt, Homo sapiens
  misc_RNA (1)...(19): siRNA sense strand
caacaaagacagcuuauug

SEQ ID NO: 2024424 - RNA, 19 nt, Homo sapiens
  misc_RNA (1)...(19): siRNA sense strand
uggaagagcugaugaaguu

SEQ ID NO: 2024425 - RNA, 19 nt, Homo sapiens
  misc_RNA (1)...(19): siRNA sense strand
guugauaucuggaacauga

SEQ ID NO: 2024426 - RNA, 19 nt, Homo sapiens
  misc_RNA (1)...(19): siRNA sense strand
ggaagaccauggcagagaa

SEQ ID NO: 2024427 - RNA, 19 nt, Homo sapiens
  misc_RNA (1)...(19): siRNA sense strand
gacuugagcuuuaacuuug

SEQ ID NO: 2024428 - RNA, 19 nt, Homo sapiens
  misc_RNA (1)...(19): siRNA sense strand
ucauacgacuaucaacuua

SEQ ID NO: 2024429 - RNA, 19 nt, Homo sapiens
  misc_RNA (1)...(19): siRNA sense strand
gcacaggcuugcccauguu

SEQ ID NO: 2024430 - RNA, 19 nt, Homo sapiens
  misc_RNA (1)...(19): siRNA sense strand
gaaaugcgugcucagaauu

SEQ ID NO: 2024431 - RNA, 19 nt, Homo sapiens
  misc_RNA (1)...(19): siRNA sense strand
gaaaucuccugcaaagaag

SEQ ID NO: 2024432 - RNA, 19 nt, Homo sapiens
  misc_RNA (1)...(19): siRNA sense strand
uccaauggcuuaaugauau

SEQ ID NO: 2024433 - RNA, 19 nt, Homo sapiens
  misc_RNA (1)...(19): siRNA sense strand
ccacugacuugagcuuuaa

SEQ ID NO: 2024434 - RNA, 19 nt, Homo sapiens
  misc_RNA (1)...(19): siRNA sense strand
aaacaacaaagacagcuua

SEQ ID NO: 2024435 - RNA, 19 nt, Homo sapiens
  misc_RNA (1)...(19): siRNA sense strand
uagcaaguuugaccaguuu

SEQ ID NO: 2024436 - RNA, 19 nt, Homo sapiens
  misc_RNA (1)...(19): siRNA sense strand
cccaacagcugucuuugaa

SEQ ID NO: 2024437 - RNA, 19 nt, Homo sapiens
  misc_RNA (1)...(19): siRNA sense strand
gaggaacaccgucuuauag

SEQ ID NO: 2024438 - RNA, 19 nt, Homo sapiens
  misc_RNA (1)...(19): siRNA sense strand
gaugaggaacaccgucuua

SEQ ID NO: 2024439 - RNA, 19 nt, Homo sapiens
  misc_RNA (1)...(19): siRNA sense strand
agaggcagcuguucauaga

SEQ ID NO: 2024440 - RNA, 19 nt, Homo sapiens
  misc_RNA (1)...(19): siRNA sense strand
gaagaggcagcuguucaua

SEQ ID NO: 2024441 - RNA, 19 nt, Homo sapiens
  misc_RNA (1)...(19): siRNA sense strand
gcagagaaagauaaugcua

SEQ ID NO: 2024442 - RNA, 19 nt, Homo sapiens
  misc_RNA (1)...(19): siRNA sense strand
ccacagcagagaaagauaa

SEQ ID NO: 2024443 - RNA, 19 nt, Homo sapiens
  misc_RNA (1)...(19): siRNA sense strand
gccacagggucaccacaua

SEQ ID NO: 2024444 - RNA, 19 nt, Homo sapiens
  misc_RNA (1)...(19): siRNA sense strand
aagcugagccaugcaauua

SEQ ID NO: 2024445 - RNA, 19 nt, Homo sapiens
  misc_RNA (1)...(19): siRNA sense strand
gaggcaaguugacgguauu

SEQ ID NO: 2024446 - RNA, 19 nt, Homo sapiens
  misc_RNA (1)...(19): siRNA sense strand
ugacuugagcuuuaacuuu

SEQ ID NO: 2024447 - RNA, 19 nt, Homo sapiens
  misc_RNA (1)...(19): siRNA sense strand
gugagaguaugauggguuu

SEQ ID NO: 2024448 - RNA, 19 nt, Homo sapiens
  misc_RNA (1)...(19): siRNA sense strand
ggacaaauugagauauguu

SEQ ID NO: 2024449 - RNA, 19 nt, Homo sapiens
  misc_RNA (1)...(19): siRNA sense strand
ugaggaacaccgucuuaua

SEQ ID NO: 2024450 - RNA, 19 nt, Homo sapiens
  misc_RNA (1)...(19): siRNA sense strand
ccacuugaccuugcacaua

SEQ ID NO: 2024451 - RNA, 19 nt, Homo sapiens
  misc_RNA (1)...(19): siRNA sense strand
ccaauggcuuaaugauauu

SEQ ID NO: 2024452 - RNA, 19 nt, Homo sapiens
  misc_RNA (1)...(19): siRNA sense strand
agaaaugcgugcucagaau

SEQ ID NO: 2024453 - RNA, 19 nt, Homo sapiens
  misc_RNA (1)...(19): siRNA sense strand
gcaaccagcaccagaugaa

SEQ ID NO: 2024454 - RNA, 19 nt, Homo sapiens
  misc_RNA (1)...(19): siRNA sense strand
gcaggaggccuucgcacaa

SEQ ID NO: 2024455 - RNA, 19 nt, Homo sapiens
  misc_RNA (1)...(19): siRNA sense strand
gaagcugagccaugcaauu

SEQ ID NO: 2024456 - RNA, 19 nt, Homo sapiens
  misc_RNA (1)...(19): siRNA sense strand
gagaagaggcagcuguuca

SEQ ID NO: 2024457 - RNA, 19 nt, Homo sapiens
  misc_RNA (1)...(19): siRNA sense strand
cgagacaauggccuuaaua

SEQ ID NO: 2024458 - RNA, 19 nt, Homo sapiens
  misc_RNA (1)...(19): siRNA sense strand
cccacugacuugagcuuua

SEQ ID NO: 2024459 - RNA, 19 nt, Homo sapiens
  misc_RNA (1)...(19): siRNA sense strand
gaacaagcgccuuccuucu

SEQ ID NO: 2024460 - RNA, 19 nt, Homo sapiens
  misc_RNA (1)...(19): siRNA sense strand
uuaauacacuggaccauac

SEQ ID NO: 2024461 - RNA, 19 nt, Homo sapiens
  misc_RNA (1)...(19): siRNA sense strand
gcaaaggaaggaugaacug

SEQ ID NO: 2024462 - RNA, 19 nt, Homo sapiens
  misc_RNA (1)...(19): siRNA sense strand
cacuugaccuugcacauau

SEQ ID NO: 2024463 - RNA, 19 nt, Homo sapiens
  misc_RNA (1)...(19): siRNA sense strand
gaaaccacuugaccuugca

SEQ ID NO: 2024464 - RNA, 19 nt, Homo sapiens
  misc_RNA (1)...(19): siRNA sense strand
cagagaaagauaaugcuaa

SEQ ID NO: 2024465 - RNA, 19 nt, Homo sapiens
  misc_RNA (1)...(19): siRNA sense strand
ccaaauuaguguggaacaa

SEQ ID NO: 2024466 - RNA, 19 nt, Homo sapiens
  misc_RNA (1)...(19): siRNA sense strand
gaacuggagcagaggaugu

SEQ ID NO: 2024467 - RNA, 19 nt, Homo sapiens
  misc_RNA (1)...(19): siRNA sense strand
ggaacaagcggaagaccau

SEQ ID NO: 2024468 - RNA, 19 nt, Homo sapiens
  misc_RNA (1)...(19): siRNA sense strand
uuacagaacagccugcaaa

SEQ ID NO: 2024469 - RNA, 19 nt, Homo sapiens
  misc_RNA (1)...(19): siRNA sense strand
aggcagcuguucauagaaa

SEQ ID NO: 2024470 - RNA, 19 nt, Homo sapiens
  misc_RNA (1)...(19): siRNA sense strand
ugaaggaaguucugaagcu

SEQ ID NO: 2024471 - RNA, 19 nt, Homo sapiens
  misc_RNA (1)...(19): siRNA sense strand
cgaggcaaguugacgguau

SEQ ID NO: 2024472 - RNA, 19 nt, Homo sapiens
  misc_RNA (1)...(19): siRNA sense strand
ggaacaccgucuuauagcu

SEQ ID NO: 2024473 - RNA, 19 nt, Homo sapiens
  misc_RNA (1)...(19): siRNA sense strand
gcaauuaguaaaucuuugg

SEQ ID NO: 2024474 - RNA, 19 nt, Homo sapiens
  misc_RNA (1)...(19): siRNA sense strand
gcugagccaugcaauuagu

SEQ ID NO: 2024475 - RNA, 19 nt, Homo sapiens
  misc_RNA (1)...(19): siRNA sense strand
acaauggccuuaauacacu

SEQ ID NO: 2024476 - RNA, 19 nt, Homo sapiens
  misc_RNA (1)...(19): siRNA sense strand
gaagggccaucuuuugguu

SEQ ID NO: 2024477 - RNA, 19 nt, Homo sapiens
  misc_RNA (1)...(19): siRNA sense strand
cuccucaacuuuaugauug

SEQ ID NO: 2024478 - RNA, 19 nt, Homo sapiens
  misc_RNA (1)...(19): siRNA sense strand
gacaauggccuuaauacac

SEQ ID NO: 2024479 - RNA, 19 nt, Homo sapiens
  misc_RNA (1)...(19): siRNA sense strand
caaauuaguguggaacaau

SEQ ID NO: 2024480 - RNA, 19 nt, Homo sapiens
  misc_RNA (1)...(19): siRNA sense strand
ucaccaaauuaguguggaa

SEQ ID NO: 2024481 - RNA, 19 nt, Homo sapiens
  misc_RNA (1)...(19): siRNA sense strand
acuaucaacuuacagaaca

SEQ ID NO: 2024482 - RNA, 19 nt, Homo sapiens
  misc_RNA (1)...(19): siRNA sense strand
agaacagccugcaaauuac

SEQ ID NO: 2024483 - RNA, 19 nt, Homo sapiens
  misc_RNA (1)...(19): siRNA sense strand
gcucccaacagcugucuuu

SEQ ID NO: 2024484 - RNA, 19 nt, Homo sapiens
  misc_RNA (1)...(19): siRNA sense strand
uuagcaaguuugaccaguu

SEQ ID NO: 2024485 - RNA, 19 nt, Homo sapiens
  misc_RNA (1)...(19): siRNA sense strand
aacaagcgccuuccuucua

SEQ ID NO: 2024486 - RNA, 19 nt, Homo sapiens
  misc_RNA (1)...(19): siRNA sense strand
aaauuaguguggaacaauc

SEQ ID NO: 2024487 - RNA, 19 nt, Homo sapiens
  misc_RNA (1)...(19): siRNA sense strand
gaccauaccaccgagauca

SEQ ID NO: 2024488 - RNA, 19 nt, Homo sapiens
  misc_RNA (1)...(19): siRNA sense strand
gccaugcaauuaguaaauc

SEQ ID NO: 2024489 - RNA, 19 nt, Homo sapiens
  misc_RNA (1)...(19): siRNA sense strand
uuggaaaucuccugcaaag

SEQ ID NO: 2024490 - RNA, 19 nt, Homo sapiens
  misc_RNA (1)...(19): siRNA sense strand
ccgagacaauggccuuaau

SEQ ID NO: 2024491 - RNA, 19 nt, Homo sapiens
  misc_RNA (1)...(19): siRNA sense strand
ugacucguccucccacuga

SEQ ID NO: 2024492 - RNA, 19 nt, Homo sapiens
  misc_RNA (1)...(19): siRNA sense strand
ugaaugacaccaugguuag

SEQ ID NO: 2024493 - RNA, 19 nt, Homo sapiens
  misc_RNA (1)...(19): siRNA sense strand
gaugucauacgacuaucaa

SEQ ID NO: 2024494 - RNA, 19 nt, Homo sapiens
  misc_RNA (1)...(19): siRNA sense strand
gagacaauggccuuaauac

SEQ ID NO: 2024495 - RNA, 19 nt, Homo sapiens
  misc_RNA (1)...(19): siRNA sense strand
cuggacaaauugagauaug

SEQ ID NO: 2024496 - RNA, 19 nt, Homo sapiens
  misc_RNA (1)...(19): siRNA sense strand
uagaaaugcgugcucagaa

SEQ ID NO: 2024497 - RNA, 19 nt, Homo sapiens
  misc_RNA (1)...(19): siRNA sense strand
agagaaaccacuugaccuu

SEQ ID NO: 2024498 - RNA, 19 nt, Homo sapiens
  misc_RNA (1)...(19): siRNA sense strand
auacgacuaucaacuuaca

SEQ ID NO: 2024499 - RNA, 19 nt, Homo sapiens
  misc_RNA (1)...(19): siRNA sense strand
ccagaugucagauuccaau

SEQ ID NO: 2024500 - RNA, 19 nt, Homo sapiens
  misc_RNA (1)...(19): siRNA sense strand
gaauuuugaugucauacga

SEQ ID NO: 2024501 - RNA, 19 nt, Homo sapiens
  misc_RNA (1)...(19): siRNA sense strand
ugaccuugcacauauaguu

SEQ ID NO: 2024502 - RNA, 19 nt, Homo sapiens
  misc_RNA (1)...(19): siRNA sense strand
acaagcgccuuccuucuac

SEQ ID NO: 2024503 - RNA, 19 nt, Homo sapiens
  misc_RNA (1)...(19): siRNA sense strand
ucucccagaugucagauuc

SEQ ID NO: 2024504 - RNA, 19 nt, Homo sapiens
  misc_RNA (1)...(19): siRNA sense strand
cuuaauacacuggaccaua

SEQ ID NO: 2024505 - RNA, 19 nt, Homo sapiens
  misc_RNA (1)...(19): siRNA sense strand
gaugccaacaaacaacaaa

SEQ ID NO: 2024506 - RNA, 19 nt, Homo sapiens
  misc_RNA (1)...(19): siRNA sense strand
augaaugacaccaugguua

SEQ ID NO: 2024507 - RNA, 19 nt, Homo sapiens
  misc_RNA (1)...(19): siRNA sense strand
gacgguauuuucaguuaaa

SEQ ID NO: 2024508 - RNA, 19 nt, Homo sapiens
  misc_RNA (1)...(19): siRNA sense strand
ucuccuccaucuacuauca

SEQ ID NO: 2024509 - RNA, 19 nt, Homo sapiens
  misc_RNA (1)...(19): siRNA sense strand
cagagaagaggcagcuguu

SEQ ID NO: 2024510 - RNA, 19 nt, Homo sapiens
  misc_RNA (1)...(19): siRNA sense strand
cagcagagaaagauaaugc

SEQ ID NO: 2024511 - RNA, 19 nt, Homo sapiens
  misc_RNA (1)...(19): siRNA sense strand
agauuccaauggcuuaaug

SEQ ID NO: 2024512 - RNA, 19 nt, Homo sapiens
  misc_RNA (1)...(19): siRNA sense strand
gcuuauugcagaacuggaa

SEQ ID NO: 2024513 - RNA, 19 nt, Homo sapiens
  misc_RNA (1)...(19): siRNA sense strand
ccaacaaacaacaaagaca

SEQ ID NO: 2024514 - RNA, 19 nt, Homo sapiens
  misc_RNA (1)...(19): siRNA sense strand
gucauacgacuaucaacuu

SEQ ID NO: 2024515 - RNA, 19 nt, Homo sapiens
  misc_RNA (1)...(19): siRNA sense strand
gagccaugcaauuaguaaa

SEQ ID NO: 2024516 - RNA, 19 nt, Homo sapiens
  misc_RNA (1)...(19): siRNA sense strand
ugaggaaagugggaacaag

SEQ ID NO: 2024517 - RNA, 19 nt, Homo sapiens
  misc_RNA (1)...(19): siRNA sense strand
agacaauggccuuaauaca

SEQ ID NO: 2024518 - RNA, 19 nt, Homo sapiens
  misc_RNA (1)...(19): siRNA sense strand
gcaaccagagaaaccacuu

SEQ ID NO: 2024519 - RNA, 19 nt, Homo sapiens
  misc_RNA (1)...(19): siRNA sense strand
uauguuagcaaccaugugu

SEQ ID NO: 2024520 - RNA, 19 nt, Homo sapiens
  misc_RNA (1)...(19): siRNA sense strand
uugcagaacuggaaaacaa

SEQ ID NO: 2024521 - RNA, 19 nt, Homo sapiens
  misc_RNA (1)...(19): siRNA sense strand
cagaacagccugcaaauua

SEQ ID NO: 2024522 - RNA, 19 nt, Homo sapiens
  misc_RNA (1)...(19): siRNA sense strand
ggaaaucuccugcaaagaa

SEQ ID NO: 2024523 - RNA, 19 nt, Homo sapiens
  misc_RNA (1)...(19): siRNA sense strand
caacaaagacagcuuauug

SEQ ID NO: 2024524 - RNA, 19 nt, Homo sapiens
  misc_RNA (1)...(19): siRNA sense strand
uggaagagcugaugaaguu

SEQ ID NO: 2024525 - RNA, 19 nt, Homo sapiens
  misc_RNA (1)...(19): siRNA sense strand
guugauaucuggaacauga

SEQ ID NO: 2024526 - RNA, 19 nt, Homo sapiens
  misc_RNA (1)...(19): siRNA sense strand
ggaagaccauggcagagaa

SEQ ID NO: 2024527 - RNA, 19 nt, Homo sapiens
  misc_RNA (1)...(19): siRNA sense strand
gacuugagcuuuaacuuug

SEQ ID NO: 2024528 - RNA, 19 nt, Homo sapiens
  misc_RNA (1)...(19): siRNA sense strand
ucauacgacuaucaacuua

SEQ ID NO: 2024529 - RNA, 19 nt, Homo sapiens
  misc_RNA (1)...(19): siRNA sense strand
gcacaggcuugcccauguu

SEQ ID NO: 2024530 - RNA, 19 nt, Homo sapiens
  misc_RNA (1)...(19): siRNA sense strand
gaaaugcgugcucagaauu

SEQ ID NO: 2024531 - RNA, 19 nt, Homo sapiens
  misc_RNA (1)...(19): siRNA sense strand
gaaaucuccugcaaagaag

SEQ ID NO: 2024532 - RNA, 19 nt, Homo sapiens
  misc_RNA (1)...(19): siRNA sense strand
uccaauggcuuaaugauau

SEQ ID NO: 2024533 - RNA, 19 nt, Homo sapiens
  misc_RNA (1)...(19): siRNA sense strand
ccacugacuugagcuuuaa

SEQ ID NO: 2024534 - RNA, 19 nt, Homo sapiens
  misc_RNA (1)...(19): siRNA sense strand
aaacaacaaagacagcuua

SEQ ID NO: 2024535 - RNA, 19 nt, Homo sapiens
  misc_RNA (1)...(19): siRNA sense strand
uagcaaguuugaccaguuu

SEQ ID NO: 2024536 - RNA, 19 nt, Homo sapiens
  misc_RNA (1)...(19): siRNA sense strand
cccaacagcugucuuugaa

SEQ ID NO: 2024537 - RNA, 19 nt, Homo sapiens
  misc_RNA (1)...(19): siRNA sense strand
gaggaacaccgucuuauag

SEQ ID NO: 2024538 - RNA, 19 nt, Homo sapiens
  misc_RNA (1)...(19): siRNA sense strand
gaugaggaacaccgucuua

SEQ ID NO: 2024539 - RNA, 19 nt, Homo sapiens
  misc_RNA (1)...(19): siRNA sense strand
agaggcagcuguucauaga

SEQ ID NO: 2024540 - RNA, 19 nt, Homo sapiens
  misc_RNA (1)...(19): siRNA sense strand
gaagaggcagcuguucaua

SEQ ID NO: 2024541 - RNA, 19 nt, Homo sapiens
  misc_RNA (1)...(19): siRNA sense strand
gcagagaaagauaaugcua

SEQ ID NO: 2024542 - RNA, 19 nt, Homo sapiens
  misc_RNA (1)...(19): siRNA sense strand
ccacagcagagaaagauaa

SEQ ID NO: 2024543 - RNA, 19 nt, Homo sapiens
  misc_RNA (1)...(19): siRNA sense strand
gccacagggucaccacaua

SEQ ID NO: 2024544 - RNA, 19 nt, Homo sapiens
  misc_RNA (1)...(19): siRNA sense strand
aagcugagccaugcaauua

SEQ ID NO: 2024545 - RNA, 19 nt, Homo sapiens
  misc_RNA (1)...(19): siRNA sense strand
gaggcaaguugacgguauu

SEQ ID NO: 2024546 - RNA, 19 nt, Homo sapiens
  misc_RNA (1)...(19): siRNA sense strand
ugacuugagcuuuaacuuu

SEQ ID NO: 2024547 - RNA, 19 nt, Homo sapiens
  misc_RNA (1)...(19): siRNA sense strand
gugagaguaugauggguuu

SEQ ID NO: 2024548 - RNA, 19 nt, Homo sapiens
  misc_RNA (1)...(19): siRNA sense strand
ggacaaauugagauauguu

SEQ ID NO: 2024549 - RNA, 19 nt, Homo sapiens
  misc_RNA (1)...(19): siRNA sense strand
ugaggaacaccgucuuaua

SEQ ID NO: 2024550 - RNA, 19 nt, Homo sapiens
  misc_RNA (1)...(19): siRNA sense strand
ccacuugaccuugcacaua

SEQ ID NO: 2024551 - RNA, 19 nt, Homo sapiens
  misc_RNA (1)...(19): siRNA sense strand
ccaauggcuuaaugauauu

SEQ ID NO: 2024552 - RNA, 19 nt, Homo sapiens
  misc_RNA (1)...(19): siRNA sense strand
agaaaugcgugcucagaau

SEQ ID NO: 2024553 - RNA, 19 nt, Homo sapiens
  misc_RNA (1)...(19): siRNA sense strand
gcaaccagcaccagaugaa

SEQ ID NO: 2024554 - RNA, 19 nt, Homo sapiens
  misc_RNA (1)...(19): siRNA sense strand
gcaggaggccuucgcacaa

SEQ ID NO: 2024555 - RNA, 19 nt, Homo sapiens
  misc_RNA (1)...(19): siRNA sense strand
gaagcugagccaugcaauu

SEQ ID NO: 2024556 - RNA, 19 nt, Homo sapiens
  misc_RNA (1)...(19): siRNA sense strand
gagaagaggcagcuguuca

SEQ ID NO: 2024557 - RNA, 19 nt, Homo sapiens
  misc_RNA (1)...(19): siRNA sense strand
cgagacaauggccuuaaua

SEQ ID NO: 2024558 - RNA, 19 nt, Homo sapiens
  misc_RNA (1)...(19): siRNA sense strand
cccacugacuugagcuuua

SEQ ID NO: 2024559 - RNA, 19 nt, Homo sapiens
  misc_RNA (1)...(19): siRNA sense strand
gaacaagcgccuuccuucu

SEQ ID NO: 2024560 - RNA, 19 nt, Homo sapiens
  misc_RNA (1)...(19): siRNA sense strand
uuaauacacuggaccauac

SEQ ID NO: 2024561 - RNA, 19 nt, Homo sapiens
  misc_RNA (1)...(19): siRNA sense strand
gcaaaggaaggaugaacug

SEQ ID NO: 2024562 - RNA, 19 nt, Homo sapiens
  misc_RNA (1)...(19): siRNA sense strand
cacuugaccuugcacauau

SEQ ID NO: 2024563 - RNA, 19 nt, Homo sapiens
  misc_RNA (1)...(19): siRNA sense strand
gaaaccacuugaccuugca

SEQ ID NO: 2024564 - RNA, 19 nt, Homo sapiens
  misc_RNA (1)...(19): siRNA sense strand
cagagaaagauaaugcuaa

SEQ ID NO: 2024565 - RNA, 19 nt, Homo sapiens
  misc_RNA (1)...(19): siRNA sense strand
ccaaauuaguguggaacaa

SEQ ID NO: 2024566 - RNA, 19 nt, Homo sapiens
  misc_RNA (1)...(19): siRNA sense strand
gaacuggagcagaggaugu

SEQ ID NO: 2024567 - RNA, 19 nt, Homo sapiens
  misc_RNA (1)...(19): siRNA sense strand
ggaacaagcggaagaccau

SEQ ID NO: 2024568 - RNA, 19 nt, Homo sapiens
  misc_RNA (1)...(19): siRNA sense strand
uuacagaacagccugcaaa

SEQ ID NO: 2024569 - RNA, 19 nt, Homo sapiens
  misc_RNA (1)...(19): siRNA sense strand
aggcagcuguucauagaaa

SEQ ID NO: 2024570 - RNA, 19 nt, Homo sapiens
  misc_RNA (1)...(19): siRNA sense strand
ugaaggaaguucugaagcu

SEQ ID NO: 2024571 - RNA, 19 nt, Homo sapiens
  misc_RNA (1)...(19): siRNA sense strand
cgaggcaaguugacgguau

SEQ ID NO: 2024572 - RNA, 19 nt, Homo sapiens
  misc_RNA (1)...(19): siRNA sense strand
ggaacaccgucuuauagcu

SEQ ID NO: 2024573 - RNA, 19 nt, Homo sapiens
  misc_RNA (1)...(19): siRNA sense strand
gcaauuaguaaaucuuugg

SEQ ID NO: 2024574 - RNA, 19 nt, Homo sapiens
  misc_RNA (1)...(19): siRNA sense strand
gcugagccaugcaauuagu

SEQ ID NO: 2024575 - RNA, 19 nt, Homo sapiens
  misc_RNA (1)...(19): siRNA sense strand
acaauggccuuaauacacu

SEQ ID NO: 2024576 - RNA, 19 nt, Homo sapiens
  misc_RNA (1)...(19): siRNA sense strand
gaagggccaucuuuugguu

SEQ ID NO: 2024577 - RNA, 19 nt, Homo sapiens
  misc_RNA (1)...(19): siRNA sense strand
cuccucaacuuuaugauug

SEQ ID NO: 2024578 - RNA, 19 nt, Homo sapiens
  misc_RNA (1)...(19): siRNA sense strand
gacaauggccuuaauacac

SEQ ID NO: 2024579 - RNA, 19 nt, Homo sapiens
  misc_RNA (1)...(19): siRNA sense strand
caaauuaguguggaacaau

SEQ ID NO: 2024580 - RNA, 19 nt, Homo sapiens
  misc_RNA (1)...(19): siRNA sense strand
ucaccaaauuaguguggaa

SEQ ID NO: 2024581 - RNA, 19 nt, Homo sapiens
  misc_RNA (1)...(19): siRNA sense strand
acuaucaacuuacagaaca

SEQ ID NO: 2024582 - RNA, 19 nt, Homo sapiens
  misc_RNA (1)...(19): siRNA sense strand
agaacagccugcaaauuac

SEQ ID NO: 2024583 - RNA, 19 nt, Homo sapiens
  misc_RNA (1)...(19): siRNA sense strand
gcucccaacagcugucuuu

SEQ ID NO: 2024584 - RNA, 19 nt, Homo sapiens
  misc_RNA (1)...(19): siRNA sense strand
uuagcaaguuugaccaguu

SEQ ID NO: 2024585 - RNA, 19 nt, Homo sapiens
  misc_RNA (1)...(19): siRNA sense strand
aacaagcgccuuccuucua

SEQ ID NO: 2024586 - RNA, 19 nt, Homo sapiens
  misc_RNA (1)...(19): siRNA sense strand
aaauuaguguggaacaauc

SEQ ID NO: 2024587 - RNA, 19 nt, Homo sapiens
  misc_RNA (1)...(19): siRNA sense strand
gaccauaccaccgagauca

SEQ ID NO: 2024588 - RNA, 19 nt, Homo sapiens
  misc_RNA (1)...(19): siRNA sense strand
gccaugcaauuaguaaauc

SEQ ID NO: 2024589 - RNA, 19 nt, Homo sapiens
  misc_RNA (1)...(19): siRNA sense strand
uuggaaaucuccugcaaag

SEQ ID NO: 2024590 - RNA, 19 nt, Homo sapiens
  misc_RNA (1)...(19): siRNA sense strand
ccgagacaauggccuuaau

SEQ ID NO: 2024591 - RNA, 19 nt, Homo sapiens
  misc_RNA (1)...(19): siRNA sense strand
ugacucguccucccacuga

SEQ ID NO: 2024592 - RNA, 19 nt, Homo sapiens
  misc_RNA (1)...(19): siRNA sense strand
ugaaugacaccaugguuag

SEQ ID NO: 2024593 - RNA, 19 nt, Homo sapiens
  misc_RNA (1)...(19): siRNA sense strand
gaugucauacgacuaucaa

SEQ ID NO: 2024594 - RNA, 19 nt, Homo sapiens
  misc_RNA (1)...(19): siRNA sense strand
gagacaauggccuuaauac

SEQ ID NO: 2024595 - RNA, 19 nt, Homo sapiens
  misc_RNA (1)...(19): siRNA sense strand
cuggacaaauugagauaug

SEQ ID NO: 2024596 - RNA, 19 nt, Homo sapiens
  misc_RNA (1)...(19): siRNA sense strand
uagaaaugcgugcucagaa

SEQ ID NO: 2024597 - RNA, 19 nt, Homo sapiens
  misc_RNA (1)...(19): siRNA sense strand
agagaaaccacuugaccuu

SEQ ID NO: 2024598 - RNA, 19 nt, Homo sapiens
  misc_RNA (1)...(19): siRNA sense strand
auacgacuaucaacuuaca

SEQ ID NO: 2024599 - RNA, 19 nt, Homo sapiens
  misc_RNA (1)...(19): siRNA sense strand
ccagaugucagauuccaau

SEQ ID NO: 2024600 - RNA, 19 nt, Homo sapiens
  misc_RNA (1)...(19): siRNA sense strand
gaauuuugaugucauacga

SEQ ID NO: 2024601 - RNA, 19 nt, Homo sapiens
  misc_RNA (1)...(19): siRNA sense strand
ugaccuugcacauauaguu

SEQ ID NO: 2024602 - RNA, 19 nt, Homo sapiens
  misc_RNA (1)...(19): siRNA sense strand
acaagcgccuuccuucuac

SEQ ID NO: 2024603 - RNA, 19 nt, Homo sapiens
  misc_RNA (1)...(19): siRNA sense strand
ucucccagaugucagauuc

SEQ ID NO: 2024604 - RNA, 19 nt, Homo sapiens
  misc_RNA (1)...(19): siRNA sense strand
cuuaauacacuggaccaua

SEQ ID NO: 2024605 - RNA, 19 nt, Homo sapiens
  misc_RNA (1)...(19): siRNA sense strand
gaugccaacaaacaacaaa

SEQ ID NO: 2024606 - RNA, 19 nt, Homo sapiens
  misc_RNA (1)...(19): siRNA sense strand
augaaugacaccaugguua

SEQ ID NO: 2024607 - RNA, 19 nt, Homo sapiens
  misc_RNA (1)...(19): siRNA sense strand
gacgguauuuucaguuaaa

SEQ ID NO: 2024608 - RNA, 19 nt, Homo sapiens
  misc_RNA (1)...(19): siRNA sense strand
ucuccuccaucuacuauca

SEQ ID NO: 2024609 - RNA, 19 nt, Homo sapiens
  misc_RNA (1)...(19): siRNA sense strand
cagagaagaggcagcuguu

SEQ ID NO: 2024610 - RNA, 19 nt, Homo sapiens
  misc_RNA (1)...(19): siRNA sense strand
cagcagagaaagauaaugc

SEQ ID NO: 2024611 - RNA, 19 nt, Homo sapiens
  misc_RNA (1)...(19): siRNA sense strand
agauuccaauggcuuaaug

SEQ ID NO: 2024612 - RNA, 19 nt, Homo sapiens
  misc_RNA (1)...(19): siRNA sense strand
gcuuauugcagaacuggaa

SEQ ID NO: 2024613 - RNA, 19 nt, Homo sapiens
  misc_RNA (1)...(19): siRNA sense strand
ccaacaaacaacaaagaca

SEQ ID NO: 2024614 - RNA, 19 nt, Homo sapiens
  misc_RNA (1)...(19): siRNA sense strand
gucauacgacuaucaacuu

SEQ ID NO: 2024615 - RNA, 19 nt, Homo sapiens
  misc_RNA (1)...(19): siRNA sense strand
gagccaugcaauuaguaaa

SEQ ID NO: 2024616 - RNA, 19 nt, Homo sapiens
  misc_RNA (1)...(19): siRNA sense strand
ugaggaaagugggaacaag

SEQ ID NO: 2024617 - RNA, 19 nt, Homo sapiens
  misc_RNA (1)...(19): siRNA sense strand
agacaauggccuuaauaca

SEQ ID NO: 2024618 - RNA, 19 nt, Homo sapiens
  misc_RNA (1)...(19): siRNA sense strand
gcaaccagagaaaccacuu

SEQ ID NO: 2024619 - RNA, 19 nt, Homo sapiens
  misc_RNA (1)...(19): siRNA sense strand
uauguuagcaaccaugugu

SEQ ID NO: 2024620 - RNA, 19 nt, Homo sapiens
  misc_RNA (1)...(19): siRNA sense strand
uugcagaacuggaaaacaa

SEQ ID NO: 2024621 - RNA, 19 nt, Homo sapiens
  misc_RNA (1)...(19): siRNA sense strand
cagaacagccugcaaauua

SEQ ID NO: 2024622 - RNA, 19 nt, Homo sapiens
  misc_RNA (1)...(19): siRNA sense strand
ggaaaucuccugcaaagaa

SEQ ID NO: 2024623 - RNA, 19 nt, Homo sapiens
  misc_RNA (1)...(19): siRNA sense strand
caacaaagacagcuuauug

SEQ ID NO: 2024624 - RNA, 19 nt, Homo sapiens
  misc_RNA (1)...(19): siRNA sense strand
uggaagagcugaugaaguu

SEQ ID NO: 2024625 - RNA, 19 nt, Homo sapiens
  misc_RNA (1)...(19): siRNA sense strand
guugauaucuggaacauga

SEQ ID NO: 2024626 - RNA, 19 nt, Homo sapiens
  misc_RNA (1)...(19): siRNA sense strand
ggaagaccauggcagagaa

SEQ ID NO: 2024627 - RNA, 19 nt, Homo sapiens
  misc_RNA (1)...(19): siRNA sense strand
gacuugagcuuuaacuuug

SEQ ID NO: 2024628 - RNA, 19 nt, Homo sapiens
  misc_RNA (1)...(19): siRNA sense strand
ucauacgacuaucaacuua

SEQ ID NO: 2024629 - RNA, 19 nt, Homo sapiens
  misc_RNA (1)...(19): siRNA sense strand
gcacaggcuugcccauguu

SEQ ID NO: 2024630 - RNA, 19 nt, Homo sapiens
  misc_RNA (1)...(19): siRNA sense strand
gaaaugcgugcucagaauu

SEQ ID NO: 2024631 - RNA, 19 nt, Homo sapiens
  misc_RNA (1)...(19): siRNA sense strand
gaaaucuccugcaaagaag

SEQ ID NO: 2024632 - RNA, 19 nt, Homo sapiens
  misc_RNA (1)...(19): siRNA sense strand
uccaauggcuuaaugauau

SEQ ID NO: 2024633 - RNA, 19 nt, Homo sapiens
  misc_RNA (1)...(19): siRNA sense strand
ccacugacuugagcuuuaa

SEQ ID NO: 2024634 - RNA, 19 nt, Homo sapiens
  misc_RNA (1)...(19): siRNA sense strand
aaacaacaaagacagcuua

SEQ ID NO: 2024635 - RNA, 19 nt, Homo sapiens
  misc_RNA (1)...(19): siRNA sense strand
uagcaaguuugaccaguuu

SEQ ID NO: 2024636 - RNA, 19 nt, Homo sapiens
  misc_RNA (1)...(19): siRNA sense strand
cccaacagcugucuuugaa

SEQ ID NO: 2024637 - RNA, 19 nt, Homo sapiens
  misc_RNA (1)...(19): siRNA sense strand
gaggaacaccgucuuauag

SEQ ID NO: 2024638 - RNA, 19 nt, Homo sapiens
  misc_RNA (1)...(19): siRNA sense strand
gaugaggaacaccgucuua

SEQ ID NO: 2024639 - RNA, 19 nt, Homo sapiens
  misc_RNA (1)...(19): siRNA sense strand
agaggcagcuguucauaga

SEQ ID NO: 2024640 - RNA, 19 nt, Homo sapiens
  misc_RNA (1)...(19): siRNA sense strand
gaagaggcagcuguucaua

SEQ ID NO: 2024641 - RNA, 19 nt, Homo sapiens
  misc_RNA (1)...(19): siRNA sense strand
gcagagaaagauaaugcua

SEQ ID NO: 2024642 - RNA, 19 nt, Homo sapiens
  misc_RNA (1)...(19): siRNA sense strand
ccacagcagagaaagauaa

SEQ ID NO: 2024643 - RNA, 19 nt, Homo sapiens
  misc_RNA (1)...(19): siRNA sense strand
gccacagggucaccacaua

SEQ ID NO: 2024644 - RNA, 19 nt, Homo sapiens
  misc_RNA (1)...(19): siRNA sense strand
aagcugagccaugcaauua

SEQ ID NO: 2024645 - RNA, 19 nt, Homo sapiens
  misc_RNA (1)...(19): siRNA sense strand
gaggcaaguugacgguauu

SEQ ID NO: 2024646 - RNA, 19 nt, Homo sapiens
  misc_RNA (1)...(19): siRNA sense strand
ugacuugagcuuuaacuuu

SEQ ID NO: 2024647 - RNA, 19 nt, Homo sapiens
  misc_RNA (1)...(19): siRNA sense strand
gugagaguaugauggguuu

SEQ ID NO: 2024648 - RNA, 19 nt, Homo sapiens
  misc_RNA (1)...(19): siRNA sense strand
ggacaaauugagauauguu

SEQ ID NO: 2024649 - RNA, 19 nt, Homo sapiens
  misc_RNA (1)...(19): siRNA sense strand
ugaggaacaccgucuuaua

SEQ ID NO: 2024650 - RNA, 19 nt, Homo sapiens
  misc_RNA (1)...(19): siRNA sense strand
ccacuugaccuugcacaua

SEQ ID NO: 2024651 - RNA, 19 nt, Homo sapiens
  misc_RNA (1)...(19): siRNA sense strand
ccaauggcuuaaugauauu

SEQ ID NO: 2024652 - RNA, 19 nt, Homo sapiens
  misc_RNA (1)...(19): siRNA sense strand
agaaaugcgugcucagaau

SEQ ID NO: 2024653 - RNA, 19 nt, Homo sapiens
  misc_RNA (1)...(19): siRNA sense strand
gcaaccagcaccagaugaa

SEQ ID NO: 2024654 - RNA, 19 nt, Homo sapiens
  misc_RNA (1)...(19): siRNA sense strand
gcaggaggccuucgcacaa

SEQ ID NO: 2024655 - RNA, 19 nt, Homo sapiens
  misc_RNA (1)...(19): siRNA sense strand
gaagcugagccaugcaauu

SEQ ID NO: 2024656 - RNA, 19 nt, Homo sapiens
  misc_RNA (1)...(19): siRNA sense strand
gagaagaggcagcuguuca

SEQ ID NO: 2024657 - RNA, 19 nt, Homo sapiens
  misc_RNA (1)...(19): siRNA sense strand
cgagacaauggccuuaaua

SEQ ID NO: 2024658 - RNA, 19 nt, Homo sapiens
  misc_RNA (1)...(19): siRNA sense strand
cccacugacuugagcuuua

SEQ ID NO: 2024659 - RNA, 19 nt, Homo sapiens
  misc_RNA (1)...(19): siRNA sense strand
gaacaagcgccuuccuucu

SEQ ID NO: 2024660 - RNA, 19 nt, Homo sapiens
  misc_RNA (1)...(19): siRNA sense strand
uuaauacacuggaccauac

SEQ ID NO: 2024661 - RNA, 19 nt, Homo sapiens
  misc_RNA (1)...(19): siRNA sense strand
gcaaaggaaggaugaacug

SEQ ID NO: 2024662 - RNA, 19 nt, Homo sapiens
  misc_RNA (1)...(19): siRNA sense strand
cacuugaccuugcacauau

SEQ ID NO: 2024663 - RNA, 19 nt, Homo sapiens
  misc_RNA (1)...(19): siRNA sense strand
gaaaccacuugaccuugca

SEQ ID NO: 2024664 - RNA, 19 nt, Homo sapiens
  misc_RNA (1)...(19): siRNA sense strand
cagagaaagauaaugcuaa

SEQ ID NO: 2024665 - RNA, 19 nt, Homo sapiens
  misc_RNA (1)...(19): siRNA sense strand
ccaaauuaguguggaacaa

SEQ ID NO: 2024666 - RNA, 19 nt, Homo sapiens
  misc_RNA (1)...(19): siRNA sense strand
gaacuggagcagaggaugu

SEQ ID NO: 2024667 - RNA, 19 nt, Homo sapiens
  misc_RNA (1)...(19): siRNA sense strand
ggaacaagcggaagaccau

SEQ ID NO: 2024668 - RNA, 19 nt, Homo sapiens
  misc_RNA (1)...(19): siRNA sense strand
uuacagaacagccugcaaa

SEQ ID NO: 2024669 - RNA, 19 nt, Homo sapiens
  misc_RNA (1)...(19): siRNA sense strand
aggcagcuguucauagaaa

SEQ ID NO: 2024670 - RNA, 19 nt, Homo sapiens
  misc_RNA (1)...(19): siRNA sense strand
ugaaggaaguucugaagcu

SEQ ID NO: 2024671 - RNA, 19 nt, Homo sapiens
  misc_RNA (1)...(19): siRNA sense strand
cgaggcaaguugacgguau

SEQ ID NO: 2024672 - RNA, 19 nt, Homo sapiens
  misc_RNA (1)...(19): siRNA sense strand
ggaacaccgucuuauagcu

SEQ ID NO: 2024673 - RNA, 19 nt, Homo sapiens
  misc_RNA (1)...(19): siRNA sense strand
gcaauuaguaaaucuuugg

SEQ ID NO: 2024674 - RNA, 19 nt, Homo sapiens
  misc_RNA (1)...(19): siRNA sense strand
gcugagccaugcaauuagu

SEQ ID NO: 2024675 - RNA, 19 nt, Homo sapiens
  misc_RNA (1)...(19): siRNA sense strand
acaauggccuuaauacacu

SEQ ID NO: 2024676 - RNA, 19 nt, Homo sapiens
  misc_RNA (1)...(19): siRNA sense strand
gaagggccaucuuuugguu

SEQ ID NO: 2024677 - RNA, 19 nt, Homo sapiens
  misc_RNA (1)...(19): siRNA sense strand
cuccucaacuuuaugauug

SEQ ID NO: 2024678 - RNA, 19 nt, Homo sapiens
  misc_RNA (1)...(19): siRNA sense strand
gacaauggccuuaauacac

SEQ ID NO: 2024679 - RNA, 19 nt, Homo sapiens
  misc_RNA (1)...(19): siRNA sense strand
caaauuaguguggaacaau

SEQ ID NO: 2024680 - RNA, 19 nt, Homo sapiens
  misc_RNA (1)...(19): siRNA sense strand
ucaccaaauuaguguggaa

SEQ ID NO: 2024681 - RNA, 19 nt, Homo sapiens
  misc_RNA (1)...(19): siRNA sense strand
acuaucaacuuacagaaca

SEQ ID NO: 2024682 - RNA, 19 nt, Homo sapiens
  misc_RNA (1)...(19): siRNA sense strand
agaacagccugcaaauuac

SEQ ID NO: 2024683 - RNA, 19 nt, Homo sapiens
  misc_RNA (1)...(19): siRNA sense strand
gcucccaacagcugucuuu

SEQ ID NO: 2024684 - RNA, 19 nt, Homo sapiens
  misc_RNA (1)...(19): siRNA sense strand
uuagcaaguuugaccaguu

SEQ ID NO: 2024685 - RNA, 19 nt, Homo sapiens
  misc_RNA (1)...(19): siRNA sense strand
aacaagcgccuuccuucua

SEQ ID NO: 2024686 - RNA, 19 nt, Homo sapiens
  misc_RNA (1)...(19): siRNA sense strand
aaauuaguguggaacaauc

SEQ ID NO: 2024687 - RNA, 19 nt, Homo sapiens
  misc_RNA (1)...(19): siRNA sense strand
gaccauaccaccgagauca

SEQ ID NO: 2024688 - RNA, 19 nt, Homo sapiens
  misc_RNA (1)...(19): siRNA sense strand
gccaugcaauuaguaaauc

SEQ ID NO: 2024689 - RNA, 19 nt, Homo sapiens
  misc_RNA (1)...(19): siRNA sense strand
uuggaaaucuccugcaaag

SEQ ID NO: 2024690 - RNA, 19 nt, Homo sapiens
  misc_RNA (1)...(19): siRNA sense strand
ccgagacaauggccuuaau

SEQ ID NO: 2024691 - RNA, 19 nt, Homo sapiens
  misc_RNA (1)...(19): siRNA sense strand
ugacucguccucccacuga

SEQ ID NO: 2024692 - RNA, 19 nt, Homo sapiens
  misc_RNA (1)...(19): siRNA sense strand
ugaaugacaccaugguuag

SEQ ID NO: 2024693 - RNA, 19 nt, Homo sapiens
  misc_RNA (1)...(19): siRNA sense strand
gaugucauacgacuaucaa

SEQ ID NO: 2024694 - RNA, 19 nt, Homo sapiens
  misc_RNA (1)...(19): siRNA sense strand
gagacaauggccuuaauac

SEQ ID NO: 2024695 - RNA, 19 nt, Homo sapiens
  misc_RNA (1)...(19): siRNA sense strand
cuggacaaauugagauaug

SEQ ID NO: 2024696 - RNA, 19 nt, Homo sapiens
  misc_RNA (1)...(19): siRNA sense strand
uagaaaugcgugcucagaa

SEQ ID NO: 2024697 - RNA, 19 nt, Homo sapiens
  misc_RNA (1)...(19): siRNA sense strand
agagaaaccacuugaccuu

SEQ ID NO: 2024698 - RNA, 19 nt, Homo sapiens
  misc_RNA (1)...(19): siRNA sense strand
auacgacuaucaacuuaca

SEQ ID NO: 2024699 - RNA, 19 nt, Homo sapiens
  misc_RNA (1)...(19): siRNA sense strand
ccagaugucagauuccaau

SEQ ID NO: 2024700 - RNA, 19 nt, Homo sapiens
  misc_RNA (1)...(19): siRNA sense strand
gaauuuugaugucauacga

SEQ ID NO: 2024701 - RNA, 19 nt, Homo sapiens
  misc_RNA (1)...(19): siRNA sense strand
ugaccuugcacauauaguu

SEQ ID NO: 2024702 - RNA, 19 nt, Homo sapiens
  misc_RNA (1)...(19): siRNA sense strand
acaagcgccuuccuucuac

SEQ ID NO: 2024703 - RNA, 19 nt, Homo sapiens
  misc_RNA (1)...(19): siRNA sense strand
ucucccagaugucagauuc

SEQ ID NO: 2024704 - RNA, 19 nt, Homo sapiens
  misc_RNA (1)...(19): siRNA sense strand
cuuaauacacuggaccaua

SEQ ID NO: 2024705 - RNA, 19 nt, Homo sapiens
  misc_RNA (1)...(19): siRNA sense strand
gaugccaacaaacaacaaa

SEQ ID NO: 2024706 - RNA, 19 nt, Homo sapiens
  misc_RNA (1)...(19): siRNA sense strand
augaaugacaccaugguua

SEQ ID NO: 2024707 - RNA, 19 nt, Homo sapiens
  misc_RNA (1)...(19): siRNA sense strand
gacgguauuuucaguuaaa

SEQ ID NO: 2024708 - RNA, 19 nt, Homo sapiens
  misc_RNA (1)...(19): siRNA sense strand
ucuccuccaucuacuauca

SEQ ID NO: 2024709 - RNA, 19 nt, Homo sapiens
  misc_RNA (1)...(19): siRNA sense strand
cagagaagaggcagcuguu

SEQ ID NO: 2024710 - RNA, 19 nt, Homo sapiens
  misc_RNA (1)...(19): siRNA sense strand
cagcagagaaagauaaugc

SEQ ID NO: 2024711 - RNA, 19 nt, Homo sapiens
  misc_RNA (1)...(19): siRNA sense strand
agauuccaauggcuuaaug

SEQ ID NO: 2024712 - RNA, 19 nt, Homo sapiens
  misc_RNA (1)...(19): siRNA sense strand
gcuuauugcagaacuggaa

SEQ ID NO: 2024713 - RNA, 19 nt, Homo sapiens
  misc_RNA (1)...(19): siRNA sense strand
ccaacaaacaacaaagaca

SEQ ID NO: 2024714 - RNA, 19 nt, Homo sapiens
  misc_RNA (1)...(19): siRNA sense strand
gucauacgacuaucaacuu

SEQ ID NO: 2024715 - RNA, 19 nt, Homo sapiens
  misc_RNA (1)...(19): siRNA sense strand
gagccaugcaauuaguaaa

SEQ ID NO: 2024716 - RNA, 19 nt, Homo sapiens
  misc_RNA (1)...(19): siRNA sense strand
ugaggaaagugggaacaag

SEQ ID NO: 2024717 - RNA, 19 nt, Homo sapiens
  misc_RNA (1)...(19): siRNA sense strand
agacaauggccuuaauaca

SEQ ID NO: 2024718 - RNA, 19 nt, Homo sapiens
  misc_RNA (1)...(19): siRNA sense strand
gcaaccagagaaaccacuu

SEQ ID NO: 2024719 - RNA, 19 nt, Homo sapiens
  misc_RNA (1)...(19): siRNA sense strand
uauguuagcaaccaugugu

SEQ ID NO: 2024720 - RNA, 19 nt, Homo sapiens
  misc_RNA (1)...(19): siRNA sense strand
uugcagaacuggaaaacaa

SEQ ID NO: 2024721 - RNA, 19 nt, Homo sapiens
  misc_RNA (1)...(19): siRNA sense strand
cagaacagccugcaaauua

SEQ ID NO: 2024722 - RNA, 19 nt, Homo sapiens
  misc_RNA (1)...(19): siRNA sense strand
ggaaaucuccugcaaagaa

SEQ ID NO: 2024723 - RNA, 19 nt, Homo sapiens
  misc_RNA (1)...(19): siRNA sense strand
caacaaagacagcuuauug

SEQ ID NO: 2024724 - RNA, 19 nt, Homo sapiens
  misc_RNA (1)...(19): siRNA sense strand
uggaagagcugaugaaguu

SEQ ID NO: 2024725 - RNA, 19 nt, Homo sapiens
  misc_RNA (1)...(19): siRNA sense strand
guugauaucuggaacauga

SEQ ID NO: 2024726 - RNA, 19 nt, Homo sapiens
  misc_RNA (1)...(19): siRNA sense strand
ggaagaccauggcagagaa

SEQ ID NO: 2024727 - RNA, 19 nt, Homo sapiens
  misc_RNA (1)...(19): siRNA sense strand
gacuugagcuuuaacuuug

SEQ ID NO: 2024728 - RNA, 19 nt, Homo sapiens
  misc_RNA (1)...(19): siRNA sense strand
ucauacgacuaucaacuua

SEQ ID NO: 2024729 - RNA, 19 nt, Homo sapiens
  misc_RNA (1)...(19): siRNA sense strand
gcacaggcuugcccauguu

SEQ ID NO: 2024730 - RNA, 19 nt, Homo sapiens
  misc_RNA (1)...(19): siRNA sense strand
gaaaugcgugcucagaauu

SEQ ID NO: 2024731 - RNA, 19 nt, Homo sapiens
  misc_RNA (1)...(19): siRNA sense strand
gaaaucuccugcaaagaag

SEQ ID NO: 2024732 - RNA, 19 nt, Homo sapiens
  misc_RNA (1)...(19): siRNA sense strand
uccaauggcuuaaugauau

SEQ ID NO: 2024733 - RNA, 19 nt, Homo sapiens
  misc_RNA (1)...(19): siRNA sense strand
ccacugacuugagcuuuaa

SEQ ID NO: 2024734 - RNA, 19 nt, Homo sapiens
  misc_RNA (1)...(19): siRNA sense strand
aaacaacaaagacagcuua

SEQ ID NO: 2024735 - RNA, 19 nt, Homo sapiens
  misc_RNA (1)...(19): siRNA sense strand
uagcaaguuugaccaguuu

SEQ ID NO: 2024736 - RNA, 19 nt, Homo sapiens
  misc_RNA (1)...(19): siRNA sense strand
cccaacagcugucuuugaa

SEQ ID NO: 2024737 - RNA, 19 nt, Homo sapiens
  misc_RNA (1)...(19): siRNA sense strand
gaggaacaccgucuuauag

SEQ ID NO: 2024738 - RNA, 19 nt, Homo sapiens
  misc_RNA (1)...(19): siRNA sense strand
gaugaggaacaccgucuua

SEQ ID NO: 2024739 - RNA, 19 nt, Homo sapiens
  misc_RNA (1)...(19): siRNA sense strand
agaggcagcuguucauaga

SEQ ID NO: 2024740 - RNA, 19 nt, Homo sapiens
  misc_RNA (1)...(19): siRNA sense strand
gaagaggcagcuguucaua

SEQ ID NO: 2024741 - RNA, 19 nt, Homo sapiens
  misc_RNA (1)...(19): siRNA sense strand
gcagagaaagauaaugcua

SEQ ID NO: 2024742 - RNA, 19 nt, Homo sapiens
  misc_RNA (1)...(19): siRNA sense strand
ccacagcagagaaagauaa

SEQ ID NO: 2024743 - RNA, 19 nt, Homo sapiens
  misc_RNA (1)...(19): siRNA sense strand
gccacagggucaccacaua

SEQ ID NO: 2024744 - RNA, 19 nt, Homo sapiens
  misc_RNA (1)...(19): siRNA sense strand
aagcugagccaugcaauua

SEQ ID NO: 2024745 - RNA, 19 nt, Homo sapiens
  misc_RNA (1)...(19): siRNA sense strand
gaggcaaguugacgguauu

SEQ ID NO: 2024746 - RNA, 19 nt, Homo sapiens
  misc_RNA (1)...(19): siRNA sense strand
ugacuugagcuuuaacuuu

SEQ ID NO: 2024747 - RNA, 19 nt, Homo sapiens
  misc_RNA (1)...(19): siRNA sense strand
gugagaguaugauggguuu

SEQ ID NO: 2024748 - RNA, 19 nt, Homo sapiens
  misc_RNA (1)...(19): siRNA sense strand
ggacaaauugagauauguu

SEQ ID NO: 2024749 - RNA, 19 nt, Homo sapiens
  misc_RNA (1)...(19): siRNA sense strand
ugaggaacaccgucuuaua

SEQ ID NO: 2024750 - RNA, 19 nt, Homo sapiens
  misc_RNA (1)...(19): siRNA sense strand
ccacuugaccuugcacaua

SEQ ID NO: 2024751 - RNA, 19 nt, Homo sapiens
  misc_RNA (1)...(19): siRNA sense strand
ccaauggcuuaaugauauu

SEQ ID NO: 2024752 - RNA, 19 nt, Homo sapiens
  misc_RNA (1)...(19): siRNA sense strand
agaaaugcgugcucagaau

SEQ ID NO: 2024753 - RNA, 19 nt, Homo sapiens
  misc_RNA (1)...(19): siRNA sense strand
gcaaccagcaccagaugaa

SEQ ID NO: 2024754 - RNA, 19 nt, Homo sapiens
  misc_RNA (1)...(19): siRNA sense strand
gcaggaggccuucgcacaa

SEQ ID NO: 2024755 - RNA, 19 nt, Homo sapiens
  misc_RNA (1)...(19): siRNA sense strand
gaagcugagccaugcaauu

SEQ ID NO: 2024756 - RNA, 19 nt, Homo sapiens
  misc_RNA (1)...(19): siRNA sense strand
gagaagaggcagcuguuca

SEQ ID NO: 2024757 - RNA, 19 nt, Homo sapiens
  misc_RNA (1)...(19): siRNA sense strand
cgagacaauggccuuaaua

SEQ ID NO: 2024758 - RNA, 19 nt, Homo sapiens
  misc_RNA (1)...(19): siRNA sense strand
cccacugacuugagcuuua

SEQ ID NO: 2024759 - RNA, 19 nt, Homo sapiens
  misc_RNA (1)...(19): siRNA sense strand
gaacaagcgccuuccuucu

SEQ ID NO: 2024760 - RNA, 19 nt, Homo sapiens
  misc_RNA (1)...(19): siRNA sense strand
uuaauacacuggaccauac

SEQ ID NO: 2024761 - RNA, 19 nt, Homo sapiens
  misc_RNA (1)...(19): siRNA sense strand
gcaaaggaaggaugaacug

SEQ ID NO: 2024762 - RNA, 19 nt, Homo sapiens
  misc_RNA (1)...(19): siRNA sense strand
cacuugaccuugcacauau

SEQ ID NO: 2024763 - RNA, 19 nt, Homo sapiens
  misc_RNA (1)...(19): siRNA sense strand
gaaaccacuugaccuugca

SEQ ID NO: 2024764 - RNA, 19 nt, Homo sapiens
  misc_RNA (1)...(19): siRNA sense strand
cagagaaagauaaugcuaa

SEQ ID NO: 2024765 - RNA, 19 nt, Homo sapiens
  misc_RNA (1)...(19): siRNA sense strand
ccaaauuaguguggaacaa

SEQ ID NO: 2024766 - RNA, 19 nt, Homo sapiens
  misc_RNA (1)...(19): siRNA sense strand
gaacuggagcagaggaugu

SEQ ID NO: 2024767 - RNA, 19 nt, Homo sapiens
  misc_RNA (1)...(19): siRNA sense strand
ggaacaagcggaagaccau

SEQ ID NO: 2024768 - RNA, 19 nt, Homo sapiens
  misc_RNA (1)...(19): siRNA sense strand
uuacagaacagccugcaaa

SEQ ID NO: 2024769 - RNA, 19 nt, Homo sapiens
  misc_RNA (1)...(19): siRNA sense strand
aggcagcuguucauagaaa

SEQ ID NO: 2024770 - RNA, 19 nt, Homo sapiens
  misc_RNA (1)...(19): siRNA sense strand
ugaaggaaguucugaagcu

SEQ ID NO: 2024771 - RNA, 19 nt, Homo sapiens
  misc_RNA (1)...(19): siRNA sense strand
cgaggcaaguugacgguau

SEQ ID NO: 2024772 - RNA, 19 nt, Homo sapiens
  misc_RNA (1)...(19): siRNA sense strand
ggaacaccgucuuauagcu

SEQ ID NO: 2024773 - RNA, 19 nt, Homo sapiens
  misc_RNA (1)...(19): siRNA sense strand
gcaauuaguaaaucuuugg

SEQ ID NO: 2024774 - RNA, 19 nt, Homo sapiens
  misc_RNA (1)...(19): siRNA sense strand
gcugagccaugcaauuagu

SEQ ID NO: 2024775 - RNA, 19 nt, Homo sapiens
  misc_RNA (1)...(19): siRNA sense strand
acaauggccuuaauacacu

SEQ ID NO: 2024776 - RNA, 19 nt, Homo sapiens
  misc_RNA (1)...(19): siRNA sense strand
gaagggccaucuuuugguu

SEQ ID NO: 2024777 - RNA, 19 nt, Homo sapiens
  misc_RNA (1)...(19): siRNA sense strand
cuccucaacuuuaugauug

SEQ ID NO: 2024778 - RNA, 19 nt, Homo sapiens
  misc_RNA (1)...(19): siRNA sense strand
gacaauggccuuaauacac

SEQ ID NO: 2024779 - RNA, 19 nt, Homo sapiens
  misc_RNA (1)...(19): siRNA sense strand
caaauuaguguggaacaau

SEQ ID NO: 2024780 - RNA, 19 nt, Homo sapiens
  misc_RNA (1)...(19): siRNA sense strand
ucaccaaauuaguguggaa

SEQ ID NO: 2024781 - RNA, 19 nt, Homo sapiens
  misc_RNA (1)...(19): siRNA sense strand
acuaucaacuuacagaaca

SEQ ID NO: 2024782 - RNA, 19 nt, Homo sapiens
  misc_RNA (1)...(19): siRNA sense strand
agaacagccugcaaauuac

SEQ ID NO: 2024783 - RNA, 19 nt, Homo sapiens
  misc_RNA (1)...(19): siRNA sense strand
gcucccaacagcugucuuu

SEQ ID NO: 2024784 - RNA, 19 nt, Homo sapiens
  misc_RNA (1)...(19): siRNA sense strand
uuagcaaguuugaccaguu

SEQ ID NO: 2024785 - RNA, 19 nt, Homo sapiens
  misc_RNA (1)...(19): siRNA sense strand
aacaagcgccuuccuucua

SEQ ID NO: 2024786 - RNA, 19 nt, Homo sapiens
  misc_RNA (1)...(19): siRNA sense strand
aaauuaguguggaacaauc

SEQ ID NO: 2024787 - RNA, 19 nt, Homo sapiens
  misc_RNA (1)...(19): siRNA sense strand
gaccauaccaccgagauca

SEQ ID NO: 2024788 - RNA, 19 nt, Homo sapiens
  misc_RNA (1)...(19): siRNA sense strand
gccaugcaauuaguaaauc

SEQ ID NO: 2024789 - RNA, 19 nt, Homo sapiens
  misc_RNA (1)...(19): siRNA sense strand
uuggaaaucuccugcaaag

SEQ ID NO: 2024790 - RNA, 19 nt, Homo sapiens
  misc_RNA (1)...(19): siRNA sense strand
ccgagacaauggccuuaau

SEQ ID NO: 2024791 - RNA, 19 nt, Homo sapiens
  misc_RNA (1)...(19): siRNA sense strand
ugacucguccucccacuga

SEQ ID NO: 2024792 - RNA, 19 nt, Homo sapiens
  misc_RNA (1)...(19): siRNA sense strand
ugaaugacaccaugguuag

SEQ ID NO: 2024793 - RNA, 19 nt, Homo sapiens
  misc_RNA (1)...(19): siRNA sense strand
gaugucauacgacuaucaa

SEQ ID NO: 2024794 - RNA, 19 nt, Homo sapiens
  misc_RNA (1)...(19): siRNA sense strand
gagacaauggccuuaauac

SEQ ID NO: 2024795 - RNA, 19 nt, Homo sapiens
  misc_RNA (1)...(19): siRNA sense strand
cuggacaaauugagauaug

SEQ ID NO: 2024796 - RNA, 19 nt, Homo sapiens
  misc_RNA (1)...(19): siRNA sense strand
uagaaaugcgugcucagaa

SEQ ID NO: 2024797 - RNA, 19 nt, Homo sapiens
  misc_RNA (1)...(19): siRNA sense strand
agagaaaccacuugaccuu

SEQ ID NO: 2024798 - RNA, 19 nt, Homo sapiens
  misc_RNA (1)...(19): siRNA sense strand
auacgacuaucaacuuaca

SEQ ID NO: 2024799 - RNA, 19 nt, Homo sapiens
  misc_RNA (1)...(19): siRNA sense strand
ccagaugucagauuccaau

SEQ ID NO: 2024800 - RNA, 19 nt, Homo sapiens
  misc_RNA (1)...(19): siRNA sense strand
gaauuuugaugucauacga

SEQ ID NO: 2024801 - RNA, 19 nt, Homo sapiens
  misc_RNA (1)...(19): siRNA sense strand
ugaccuugcacauauaguu

SEQ ID NO: 2024802 - RNA, 19 nt, Homo sapiens
  misc_RNA (1)...(19): siRNA sense strand
acaagcgccuuccuucuac

SEQ ID NO: 2024803 - RNA, 19 nt, Homo sapiens
  misc_RNA (1)...(19): siRNA sense strand
ucucccagaugucagauuc

SEQ ID NO: 2024804 - RNA, 19 nt, Homo sapiens
  misc_RNA (1)...(19): siRNA sense strand
cuuaauacacuggaccaua

SEQ ID NO: 2024805 - RNA, 19 nt, Homo sapiens
  misc_RNA (1)...(19): siRNA sense strand
gaugccaacaaacaacaaa

SEQ ID NO: 2024806 - RNA, 19 nt, Homo sapiens
  misc_RNA (1)...(19): siRNA sense strand
augaaugacaccaugguua

SEQ ID NO: 2024807 - RNA, 19 nt, Homo sapiens
  misc_RNA (1)...(19): siRNA sense strand
gacgguauuuucaguuaaa

SEQ ID NO: 2024808 - RNA, 19 nt, Homo sapiens
  misc_RNA (1)...(19): siRNA sense strand
ucuccuccaucuacuauca

SEQ ID NO: 2024809 - RNA, 19 nt, Homo sapiens
  misc_RNA (1)...(19): siRNA sense strand
cagagaagaggcagcuguu

SEQ ID NO: 2024810 - RNA, 19 nt, Homo sapiens
  misc_RNA (1)...(19): siRNA sense strand
cagcagagaaagauaaugc

SEQ ID NO: 2024811 - RNA, 19 nt, Homo sapiens
  misc_RNA (1)...(19): siRNA sense strand
agauuccaauggcuuaaug

SEQ ID NO: 2024812 - RNA, 19 nt, Homo sapiens
  misc_RNA (1)...(19): siRNA sense strand
gcuuauugcagaacuggaa

SEQ ID NO: 2024813 - RNA, 19 nt, Homo sapiens
  misc_RNA (1)...(19): siRNA sense strand
ccaacaaacaacaaagaca

SEQ ID NO: 2024814 - RNA, 19 nt, Homo sapiens
  misc_RNA (1)...(19): siRNA sense strand
gucauacgacuaucaacuu

SEQ ID NO: 2024815 - RNA, 19 nt, Homo sapiens
  misc_RNA (1)...(19): siRNA sense strand
gagccaugcaauuaguaaa

SEQ ID NO: 2024816 - RNA, 19 nt, Homo sapiens
  misc_RNA (1)...(19): siRNA sense strand
ugaggaaagugggaacaag

SEQ ID NO: 2024817 - RNA, 19 nt, Homo sapiens
  misc_RNA (1)...(19): siRNA sense strand
agacaauggccuuaauaca

SEQ ID NO: 2024818 - RNA, 19 nt, Homo sapiens
  misc_RNA (1)...(19): siRNA sense strand
gcaaccagagaaaccacuu

SEQ ID NO: 2024819 - RNA, 19 nt, Homo sapiens
  misc_RNA (1)...(19): siRNA sense strand
uauguuagcaaccaugugu

SEQ ID NO: 2024820 - RNA, 19 nt, Homo sapiens
  misc_RNA (1)...(19): siRNA sense strand
uugcagaacuggaaaacaa

SEQ ID NO: 2024821 - RNA, 19 nt, Homo sapiens
  misc_RNA (1)...(19): siRNA sense strand
cagaacagccugcaaauua

SEQ ID NO: 2024822 - RNA, 19 nt, Homo sapiens
  misc_RNA (1)...(19): siRNA sense strand
ggaaaucuccugcaaagaa

SEQ ID NO: 2024823 - RNA, 19 nt, Homo sapiens
  misc_RNA (1)...(19): siRNA sense strand
caacaaagacagcuuauug

SEQ ID NO: 2024824 - RNA, 19 nt, Homo sapiens
  misc_RNA (1)...(19): siRNA sense strand
uggaagagcugaugaaguu

SEQ ID NO: 2024825 - RNA, 19 nt, Homo sapiens
  misc_RNA (1)...(19): siRNA sense strand
guugauaucuggaacauga

SEQ ID NO: 2024826 - RNA, 19 nt, Homo sapiens
  misc_RNA (1)...(19): siRNA sense strand
ggaagaccauggcagagaa

SEQ ID NO: 2024827 - RNA, 19 nt, Homo sapiens
  misc_RNA (1)...(19): siRNA sense strand
gacuugagcuuuaacuuug

SEQ ID NO: 2024828 - RNA, 19 nt, Homo sapiens
  misc_RNA (1)...(19): siRNA sense strand
ucauacgacuaucaacuua

SEQ ID NO: 2024829 - RNA, 19 nt, Homo sapiens
  misc_RNA (1)...(19): siRNA sense strand
gcacaggcuugcccauguu

SEQ ID NO: 2024830 - RNA, 19 nt, Homo sapiens
  misc_RNA (1)...(19): siRNA sense strand
gaaaugcgugcucagaauu

SEQ ID NO: 2024831 - RNA, 19 nt, Homo sapiens
  misc_RNA (1)...(19): siRNA sense strand
gaaaucuccugcaaagaag

SEQ ID NO: 2024832 - RNA, 19 nt, Homo sapiens
  misc_RNA (1)...(19): siRNA sense strand
uccaauggcuuaaugauau

SEQ ID NO: 2024833 - RNA, 19 nt, Homo sapiens
  misc_RNA (1)...(19): siRNA sense strand
ccacugacuugagcuuuaa

SEQ ID NO: 2024834 - RNA, 19 nt, Homo sapiens
  misc_RNA (1)...(19): siRNA sense strand
aaacaacaaagacagcuua

SEQ ID NO: 2024835 - RNA, 19 nt, Homo sapiens
  misc_RNA (1)...(19): siRNA sense strand
uagcaaguuugaccaguuu

SEQ ID NO: 2024836 - RNA, 19 nt, Homo sapiens
  misc_RNA (1)...(19): siRNA sense strand
cccaacagcugucuuugaa

SEQ ID NO: 2024837 - RNA, 19 nt, Homo sapiens
  misc_RNA (1)...(19): siRNA sense strand
gaggaacaccgucuuauag

SEQ ID NO: 2024838 - RNA, 19 nt, Homo sapiens
  misc_RNA (1)...(19): siRNA sense strand
gaugaggaacaccgucuua

SEQ ID NO: 2024839 - RNA, 19 nt, Homo sapiens
  misc_RNA (1)...(19): siRNA sense strand
agaggcagcuguucauaga

SEQ ID NO: 2024840 - RNA, 19 nt, Homo sapiens
  misc_RNA (1)...(19): siRNA sense strand
gaagaggcagcuguucaua

SEQ ID NO: 2024841 - RNA, 19 nt, Homo sapiens
  misc_RNA (1)...(19): siRNA sense strand
gcagagaaagauaaugcua

SEQ ID NO: 2024842 - RNA, 19 nt, Homo sapiens
  misc_RNA (1)...(19): siRNA sense strand
ccacagcagagaaagauaa

SEQ ID NO: 2024843 - RNA, 19 nt, Homo sapiens
  misc_RNA (1)...(19): siRNA sense strand
gccacagggucaccacaua

SEQ ID NO: 2024844 - RNA, 19 nt, Homo sapiens
  misc_RNA (1)...(19): siRNA sense strand
aagcugagccaugcaauua

SEQ ID NO: 2024845 - RNA, 19 nt, Homo sapiens
  misc_RNA (1)...(19): siRNA sense strand
gaggcaaguugacgguauu

SEQ ID NO: 2024846 - RNA, 19 nt, Homo sapiens
  misc_RNA (1)...(19): siRNA sense strand
ugacuugagcuuuaacuuu

SEQ ID NO: 2024847 - RNA, 19 nt, Homo sapiens
  misc_RNA (1)...(19): siRNA sense strand
gugagaguaugauggguuu

SEQ ID NO: 2024848 - RNA, 19 nt, Homo sapiens
  misc_RNA (1)...(19): siRNA sense strand
ggacaaauugagauauguu

SEQ ID NO: 2024849 - RNA, 19 nt, Homo sapiens
  misc_RNA (1)...(19): siRNA sense strand
ugaggaacaccgucuuaua

SEQ ID NO: 2024850 - RNA, 19 nt, Homo sapiens
  misc_RNA (1)...(19): siRNA sense strand
ccacuugaccuugcacaua

SEQ ID NO: 2024851 - RNA, 19 nt, Homo sapiens
  misc_RNA (1)...(19): siRNA sense strand
ccaauggcuuaaugauauu

SEQ ID NO: 2024852 - RNA, 19 nt, Homo sapiens
  misc_RNA (1)...(19): siRNA sense strand
agaaaugcgugcucagaau

SEQ ID NO: 2024853 - RNA, 19 nt, Homo sapiens
  misc_RNA (1)...(19): siRNA sense strand
gcaaccagcaccagaugaa

SEQ ID NO: 2024854 - RNA, 19 nt, Homo sapiens
  misc_RNA (1)...(19): siRNA sense strand
gcaggaggccuucgcacaa

SEQ ID NO: 2024855 - RNA, 19 nt, Homo sapiens
  misc_RNA (1)...(19): siRNA sense strand
gaagcugagccaugcaauu

SEQ ID NO: 2024856 - RNA, 19 nt, Homo sapiens
  misc_RNA (1)...(19): siRNA sense strand
gagaagaggcagcuguuca

SEQ ID NO: 2024857 - RNA, 19 nt, Homo sapiens
  misc_RNA (1)...(19): siRNA sense strand
cgagacaauggccuuaaua

SEQ ID NO: 2024858 - RNA, 19 nt, Homo sapiens
  misc_RNA (1)...(19): siRNA sense strand
cccacugacuugagcuuua

SEQ ID NO: 2024859 - RNA, 19 nt, Homo sapiens
  misc_RNA (1)...(19): siRNA sense strand
gaacaagcgccuuccuucu

SEQ ID NO: 2024860 - RNA, 19 nt, Homo sapiens
  misc_RNA (1)...(19): siRNA sense strand
uuaauacacuggaccauac

SEQ ID NO: 2024861 - RNA, 19 nt, Homo sapiens
  misc_RNA (1)...(19): siRNA sense strand
gcaaaggaaggaugaacug

SEQ ID NO: 2024862 - RNA, 19 nt, Homo sapiens
  misc_RNA (1)...(19): siRNA sense strand
cacuugaccuugcacauau

SEQ ID NO: 2024863 - RNA, 19 nt, Homo sapiens
  misc_RNA (1)...(19): siRNA sense strand
gaaaccacuugaccuugca

SEQ ID NO: 2024864 - RNA, 19 nt, Homo sapiens
  misc_RNA (1)...(19): siRNA sense strand
cagagaaagauaaugcuaa

SEQ ID NO: 2024865 - RNA, 19 nt, Homo sapiens
  misc_RNA (1)...(19): siRNA sense strand
ccaaauuaguguggaacaa

SEQ ID NO: 2024866 - RNA, 19 nt, Homo sapiens
  misc_RNA (1)...(19): siRNA sense strand
gaacuggagcagaggaugu

SEQ ID NO: 2024867 - RNA, 19 nt, Homo sapiens
  misc_RNA (1)...(19): siRNA sense strand
ggaacaagcggaagaccau

SEQ ID NO: 2024868 - RNA, 19 nt, Homo sapiens
  misc_RNA (1)...(19): siRNA sense strand
uuacagaacagccugcaaa

SEQ ID NO: 2024869 - RNA, 19 nt, Homo sapiens
  misc_RNA (1)...(19): siRNA sense strand
aggcagcuguucauagaaa

SEQ ID NO: 2024870 - RNA, 19 nt, Homo sapiens
  misc_RNA (1)...(19): siRNA sense strand
ugaaggaaguucugaagcu

SEQ ID NO: 2024871 - RNA, 19 nt, Homo sapiens
  misc_RNA (1)...(19): siRNA sense strand
cgaggcaaguugacgguau

SEQ ID NO: 2024872 - RNA, 19 nt, Homo sapiens
  misc_RNA (1)...(19): siRNA sense strand
ggaacaccgucuuauagcu

SEQ ID NO: 2024873 - RNA, 19 nt, Homo sapiens
  misc_RNA (1)...(19): siRNA sense strand
gcaauuaguaaaucuuugg

SEQ ID NO: 2024874 - RNA, 19 nt, Homo sapiens
  misc_RNA (1)...(19): siRNA sense strand
gcugagccaugcaauuagu

SEQ ID NO: 2024875 - RNA, 19 nt, Homo sapiens
  misc_RNA (1)...(19): siRNA sense strand
acaauggccuuaauacacu

SEQ ID NO: 2024876 - RNA, 19 nt, Homo sapiens
  misc_RNA (1)...(19): siRNA sense strand
gaagggccaucuuuugguu

SEQ ID NO: 2024877 - RNA, 19 nt, Homo sapiens
  misc_RNA (1)...(19): siRNA sense strand
cuccucaacuuuaugauug

SEQ ID NO: 2024878 - RNA, 19 nt, Homo sapiens
  misc_RNA (1)...(19): siRNA sense strand
gacaauggccuuaauacac

SEQ ID NO: 2024879 - RNA, 19 nt, Homo sapiens
  misc_RNA (1)...(19): siRNA sense strand
caaauuaguguggaacaau

SEQ ID NO: 2024880 - RNA, 19 nt, Homo sapiens
  misc_RNA (1)...(19): siRNA sense strand
ucaccaaauuaguguggaa

SEQ ID NO: 2024881 - RNA, 19 nt, Homo sapiens
  misc_RNA (1)...(19): siRNA sense strand
acuaucaacuuacagaaca

SEQ ID NO: 2024882 - RNA, 19 nt, Homo sapiens
  misc_RNA (1)...(19): siRNA sense strand
agaacagccugcaaauuac

SEQ ID NO: 2024883 - RNA, 19 nt, Homo sapiens
  misc_RNA (1)...(19): siRNA sense strand
gcucccaacagcugucuuu

SEQ ID NO: 2024884 - RNA, 19 nt, Homo sapiens
  misc_RNA (1)...(19): siRNA sense strand
uuagcaaguuugaccaguu

SEQ ID NO: 2024885 - RNA, 19 nt, Homo sapiens
  misc_RNA (1)...(19): siRNA sense strand
aacaagcgccuuccuucua

SEQ ID NO: 2024886 - RNA, 19 nt, Homo sapiens
  misc_RNA (1)...(19): siRNA sense strand
aaauuaguguggaacaauc

SEQ ID NO: 2024887 - RNA, 19 nt, Homo sapiens
  misc_RNA (1)...(19): siRNA sense strand
gaccauaccaccgagauca

SEQ ID NO: 2024888 - RNA, 19 nt, Homo sapiens
  misc_RNA (1)...(19): siRNA sense strand
gccaugcaauuaguaaauc

SEQ ID NO: 2024889 - RNA, 19 nt, Homo sapiens
  misc_RNA (1)...(19): siRNA sense strand
uuggaaaucuccugcaaag

SEQ ID NO: 2024890 - RNA, 19 nt, Homo sapiens
  misc_RNA (1)...(19): siRNA sense strand
ccgagacaauggccuuaau

SEQ ID NO: 2024891 - RNA, 19 nt, Homo sapiens
  misc_RNA (1)...(19): siRNA sense strand
ugacucguccucccacuga

SEQ ID NO: 2024892 - RNA, 19 nt, Homo sapiens
  misc_RNA (1)...(19): siRNA sense strand
ugaaugacaccaugguuag

SEQ ID NO: 2024893 - RNA, 19 nt, Homo sapiens
  misc_RNA (1)...(19): siRNA sense strand
gaugucauacgacuaucaa

SEQ ID NO: 2024894 - RNA, 19 nt, Homo sapiens
  misc_RNA (1)...(19): siRNA sense strand
gagacaauggccuuaauac

SEQ ID NO: 2024895 - RNA, 19 nt, Homo sapiens
  misc_RNA (1)...(19): siRNA sense strand
cuggacaaauugagauaug

SEQ ID NO: 2024896 - RNA, 19 nt, Homo sapiens
  misc_RNA (1)...(19): siRNA sense strand
uagaaaugcgugcucagaa

SEQ ID NO: 2024897 - RNA, 19 nt, Homo sapiens
  misc_RNA (1)...(19): siRNA sense strand
agagaaaccacuugaccuu

SEQ ID NO: 2024898 - RNA, 19 nt, Homo sapiens
  misc_RNA (1)...(19): siRNA sense strand
auacgacuaucaacuuaca

SEQ ID NO: 2024899 - RNA, 19 nt, Homo sapiens
  misc_RNA (1)...(19): siRNA sense strand
ccagaugucagauuccaau

SEQ ID NO: 2024900 - RNA, 19 nt, Homo sapiens
  misc_RNA (1)...(19): siRNA sense strand
gaauuuugaugucauacga

SEQ ID NO: 2024901 - RNA, 19 nt, Homo sapiens
  misc_RNA (1)...(19): siRNA sense strand
ugaccuugcacauauaguu

SEQ ID NO: 2024902 - RNA, 19 nt, Homo sapiens
  misc_RNA (1)...(19): siRNA sense strand
acaagcgccuuccuucuac

SEQ ID NO: 2024903 - RNA, 19 nt, Homo sapiens
  misc_RNA (1)...(19): siRNA sense strand
ucucccagaugucagauuc

SEQ ID NO: 2024904 - RNA, 19 nt, Homo sapiens
  misc_RNA (1)...(19): siRNA sense strand
cuuaauacacuggaccaua

SEQ ID NO: 2024905 - RNA, 19 nt, Homo sapiens
  misc_RNA (1)...(19): siRNA sense strand
gaugccaacaaacaacaaa

SEQ ID NO: 2024906 - RNA, 19 nt, Homo sapiens
  misc_RNA (1)...(19): siRNA sense strand
augaaugacaccaugguua

SEQ ID NO: 2024907 - RNA, 19 nt, Homo sapiens
  misc_RNA (1)...(19): siRNA sense strand
gacgguauuuucaguuaaa

SEQ ID NO: 2024908 - RNA, 19 nt, Homo sapiens
  misc_RNA (1)...(19): siRNA sense strand
ucuccuccaucuacuauca

SEQ ID NO: 2024909 - RNA, 19 nt, Homo sapiens
  misc_RNA (1)...(19): siRNA sense strand
cagagaagaggcagcuguu

SEQ ID NO: 2024910 - RNA, 19 nt, Homo sapiens
  misc_RNA (1)...(19): siRNA sense strand
cagcagagaaagauaaugc

SEQ ID NO: 2024911 - RNA, 19 nt, Homo sapiens
  misc_RNA (1)...(19): siRNA sense strand
agauuccaauggcuuaaug

SEQ ID NO: 2024912 - RNA, 19 nt, Homo sapiens
  misc_RNA (1)...(19): siRNA sense strand
gcuuauugcagaacuggaa

SEQ ID NO: 2024913 - RNA, 19 nt, Homo sapiens
  misc_RNA (1)...(19): siRNA sense strand
ccaacaaacaacaaagaca

SEQ ID NO: 2024914 - RNA, 19 nt, Homo sapiens
  misc_RNA (1)...(19): siRNA sense strand
gucauacgacuaucaacuu

SEQ ID NO: 2024915 - RNA, 19 nt, Homo sapiens
  misc_RNA (1)...(19): siRNA sense strand
gagccaugcaauuaguaaa

SEQ ID NO: 2024916 - RNA, 19 nt, Homo sapiens
  misc_RNA (1)...(19): siRNA sense strand
ugaggaaagugggaacaag

SEQ ID NO: 2024917 - RNA, 19 nt, Homo sapiens
  misc_RNA (1)...(19): siRNA sense strand
agacaauggccuuaauaca

SEQ ID NO: 2024918 - RNA, 19 nt, Homo sapiens
  misc_RNA (1)...(19): siRNA sense strand
gcaaccagagaaaccacuu

SEQ ID NO: 2024919 - RNA, 19 nt, Homo sapiens
  misc_RNA (1)...(19): siRNA sense strand
uauguuagcaaccaugugu

SEQ ID NO: 2024920 - RNA, 19 nt, Homo sapiens
  misc_RNA (1)...(19): siRNA sense strand
uugcagaacuggaaaacaa

SEQ ID NO: 2024921 - RNA, 19 nt, Homo sapiens
  misc_RNA (1)...(19): siRNA sense strand
cagaacagccugcaaauua

SEQ ID NO: 2024922 - RNA, 19 nt, Homo sapiens
  misc_RNA (1)...(19): siRNA sense strand
ggaaaucuccugcaaagaa

SEQ ID NO: 2024923 - RNA, 19 nt, Homo sapiens
  misc_RNA (1)...(19): siRNA sense strand
caacaaagacagcuuauug

SEQ ID NO: 2024924 - RNA, 19 nt, Homo sapiens
  misc_RNA (1)...(19): siRNA sense strand
uggaagagcugaugaaguu

SEQ ID NO: 2024925 - RNA, 19 nt, Homo sapiens
  misc_RNA (1)...(19): siRNA sense strand
guugauaucuggaacauga

SEQ ID NO: 2024926 - RNA, 19 nt, Homo sapiens
  misc_RNA (1)...(19): siRNA sense strand
ggaagaccauggcagagaa

SEQ ID NO: 2024927 - RNA, 19 nt, Homo sapiens
  misc_RNA (1)...(19): siRNA sense strand
gacuugagcuuuaacuuug

SEQ ID NO: 2024928 - RNA, 19 nt, Homo sapiens
  misc_RNA (1)...(19): siRNA sense strand
ucauacgacuaucaacuua

SEQ ID NO: 2024929 - RNA, 19 nt, Homo sapiens
  misc_RNA (1)...(19): siRNA sense strand
gcacaggcuugcccauguu

SEQ ID NO: 2024930 - RNA, 19 nt, Homo sapiens
  misc_RNA (1)...(19): siRNA sense strand
gaaaugcgugcucagaauu

SEQ ID NO: 2024931 - RNA, 19 nt, Homo sapiens
  misc_RNA (1)...(19): siRNA sense strand
gaaaucuccugcaaagaag

SEQ ID NO: 2024932 - RNA, 19 nt, Homo sapiens
  misc_RNA (1)...(19): siRNA sense strand
uccaauggcuuaaugauau

SEQ ID NO: 2024933 - RNA, 19 nt, Homo sapiens
  misc_RNA (1)...(19): siRNA sense strand
ccacugacuugagcuuuaa

SEQ ID NO: 2024934 - RNA, 19 nt, Homo sapiens
  misc_RNA (1)...(19): siRNA sense strand
aaacaacaaagacagcuua

SEQ ID NO: 2024935 - RNA, 19 nt, Homo sapiens
  misc_RNA (1)...(19): siRNA sense strand
uagcaaguuugaccaguuu

SEQ ID NO: 2024936 - RNA, 19 nt, Homo sapiens
  misc_RNA (1)...(19): siRNA sense strand
cccaacagcugucuuugaa

SEQ ID NO: 2024937 - RNA, 19 nt, Homo sapiens
  misc_RNA (1)...(19): siRNA sense strand
gaggaacaccgucuuauag

SEQ ID NO: 2024938 - RNA, 19 nt, Homo sapiens
  misc_RNA (1)...(19): siRNA sense strand
gaugaggaacaccgucuua

SEQ ID NO: 2024939 - RNA, 19 nt, Homo sapiens
  misc_RNA (1)...(19): siRNA sense strand
agaggcagcuguucauaga

SEQ ID NO: 2024940 - RNA, 19 nt, Homo sapiens
  misc_RNA (1)...(19): siRNA sense strand
gaagaggcagcuguucaua

SEQ ID NO: 2024941 - RNA, 19 nt, Homo sapiens
  misc_RNA (1)...(19): siRNA sense strand
gcagagaaagauaaugcua

SEQ ID NO: 2024942 - RNA, 19 nt, Homo sapiens
  misc_RNA (1)...(19): siRNA sense strand
ccacagcagagaaagauaa

SEQ ID NO: 2024943 - RNA, 19 nt, Homo sapiens
  misc_RNA (1)...(19): siRNA sense strand
gccacagggucaccacaua

SEQ ID NO: 2024944 - RNA, 19 nt, Homo sapiens
  misc_RNA (1)...(19): siRNA sense strand
aagcugagccaugcaauua

SEQ ID NO: 2024945 - RNA, 19 nt, Homo sapiens
  misc_RNA (1)...(19): siRNA sense strand
gaggcaaguugacgguauu

SEQ ID NO: 2024946 - RNA, 19 nt, Homo sapiens
  misc_RNA (1)...(19): siRNA sense strand
ugacuugagcuuuaacuuu

SEQ ID NO: 2024947 - RNA, 19 nt, Homo sapiens
  misc_RNA (1)...(19): siRNA sense strand
gugagaguaugauggguuu

SEQ ID NO: 2024948 - RNA, 19 nt, Homo sapiens
  misc_RNA (1)...(19): siRNA sense strand
ggacaaauugagauauguu

SEQ ID NO: 2024949 - RNA, 19 nt, Homo sapiens
  misc_RNA (1)...(19): siRNA sense strand
ugaggaacaccgucuuaua

SEQ ID NO: 2024950 - RNA, 19 nt, Homo sapiens
  misc_RNA (1)...(19): siRNA sense strand
ccacuugaccuugcacaua

SEQ ID NO: 2024951 - RNA, 19 nt, Homo sapiens
  misc_RNA (1)...(19): siRNA sense strand
ccaauggcuuaaugauauu

SEQ ID NO: 2024952 - RNA, 19 nt, Homo sapiens
  misc_RNA (1)...(19): siRNA sense strand
agaaaugcgugcucagaau

SEQ ID NO: 2024953 - RNA, 19 nt, Homo sapiens
  misc_RNA (1)...(19): siRNA sense strand
gcaaccagcaccagaugaa

SEQ ID NO: 2024954 - RNA, 19 nt, Homo sapiens
  misc_RNA (1)...(19): siRNA sense strand
gcaggaggccuucgcacaa

SEQ ID NO: 2024955 - RNA, 19 nt, Homo sapiens
  misc_RNA (1)...(19): siRNA sense strand
gaagcugagccaugcaauu

SEQ ID NO: 2024956 - RNA, 19 nt, Homo sapiens
  misc_RNA (1)...(19): siRNA sense strand
gagaagaggcagcuguuca

SEQ ID NO: 2024957 - RNA, 19 nt, Homo sapiens
  misc_RNA (1)...(19): siRNA sense strand
cgagacaauggccuuaaua

SEQ ID NO: 2024958 - RNA, 19 nt, Homo sapiens
  misc_RNA (1)...(19): siRNA sense strand
cccacugacuugagcuuua

SEQ ID NO: 2024959 - RNA, 19 nt, Homo sapiens
  misc_RNA (1)...(19): siRNA sense strand
gaacaagcgccuuccuucu

SEQ ID NO: 2024960 - RNA, 19 nt, Homo sapiens
  misc_RNA (1)...(19): siRNA sense strand
uuaauacacuggaccauac

SEQ ID NO: 2024961 - RNA, 19 nt, Homo sapiens
  misc_RNA (1)...(19): siRNA sense strand
gcaaaggaaggaugaacug

SEQ ID NO: 2024962 - RNA, 19 nt, Homo sapiens
  misc_RNA (1)...(19): siRNA sense strand
cacuugaccuugcacauau

SEQ ID NO: 2024963 - RNA, 19 nt, Homo sapiens
  misc_RNA (1)...(19): siRNA sense strand
gaaaccacuugaccuugca

SEQ ID NO: 2024964 - RNA, 19 nt, Homo sapiens
  misc_RNA (1)...(19): siRNA sense strand
cagagaaagauaaugcuaa

SEQ ID NO: 2024965 - RNA, 19 nt, Homo sapiens
  misc_RNA (1)...(19): siRNA sense strand
ccaaauuaguguggaacaa

SEQ ID NO: 2024966 - RNA, 19 nt, Homo sapiens
  misc_RNA (1)...(19): siRNA sense strand
gaacuggagcagaggaugu

SEQ ID NO: 2024967 - RNA, 19 nt, Homo sapiens
  misc_RNA (1)...(19): siRNA sense strand
ggaacaagcggaagaccau

SEQ ID NO: 2024968 - RNA, 19 nt, Homo sapiens
  misc_RNA (1)...(19): siRNA sense strand
uuacagaacagccugcaaa

SEQ ID NO: 2024969 - RNA, 19 nt, Homo sapiens
  misc_RNA (1)...(19): siRNA sense strand
aggcagcuguucauagaaa

SEQ ID NO: 2024970 - RNA, 19 nt, Homo sapiens
  misc_RNA (1)...(19): siRNA sense strand
ugaaggaaguucugaagcu

SEQ ID NO: 2024971 - RNA, 19 nt, Homo sapiens
  misc_RNA (1)...(19): siRNA sense strand
cgaggcaaguugacgguau

SEQ ID NO: 2024972 - RNA, 19 nt, Homo sapiens
  misc_RNA (1)...(19): siRNA sense strand
ggaacaccgucuuauagcu

SEQ ID NO: 2024973 - RNA, 19 nt, Homo sapiens
  misc_RNA (1)...(19): siRNA sense strand
gcaauuaguaaaucuuugg

SEQ ID NO: 2024974 - RNA, 19 nt, Homo sapiens
  misc_RNA (1)...(19): siRNA sense strand
gcugagccaugcaauuagu

SEQ ID NO: 2024975 - RNA, 19 nt, Homo sapiens
  misc_RNA (1)...(19): siRNA sense strand
acaauggccuuaauacacu

SEQ ID NO: 2024976 - RNA, 19 nt, Homo sapiens
  misc_RNA (1)...(19): siRNA sense strand
gaagggccaucuuuugguu

SEQ ID NO: 2024977 - RNA, 19 nt, Homo sapiens
  misc_RNA (1)...(19): siRNA sense strand
cuccucaacuuuaugauug

SEQ ID NO: 2024978 - RNA, 19 nt, Homo sapiens
  misc_RNA (1)...(19): siRNA sense strand
gacaauggccuuaauacac

SEQ ID NO: 2024979 - RNA, 19 nt, Homo sapiens
  misc_RNA (1)...(19): siRNA sense strand
caaauuaguguggaacaau

SEQ ID NO: 2024980 - RNA, 19 nt, Homo sapiens
  misc_RNA (1)...(19): siRNA sense strand
ucaccaaauuaguguggaa

SEQ ID NO: 2024981 - RNA, 19 nt, Homo sapiens
  misc_RNA (1)...(19): siRNA sense strand
acuaucaacuuacagaaca

SEQ ID NO: 2024982 - RNA, 19 nt, Homo sapiens
  misc_RNA (1)...(19): siRNA sense strand
agaacagccugcaaauuac

SEQ ID NO: 2024983 - RNA, 19 nt, Homo sapiens
  misc_RNA (1)...(19): siRNA sense strand
gcucccaacagcugucuuu

SEQ ID NO: 2024984 - RNA, 19 nt, Homo sapiens
  misc_RNA (1)...(19): siRNA sense strand
uuagcaaguuugaccaguu

SEQ ID NO: 2024985 - RNA, 19 nt, Homo sapiens
  misc_RNA (1)...(19): siRNA sense strand
aacaagcgccuuccuucua

SEQ ID NO: 2024986 - RNA, 19 nt, Homo sapiens
  misc_RNA (1)...(19): siRNA sense strand
aaauuaguguggaacaauc

SEQ ID NO: 2024987 - RNA, 19 nt, Homo sapiens
  misc_RNA (1)...(19): siRNA sense strand
gaccauaccaccgagauca

SEQ ID NO: 2024988 - RNA, 19 nt, Homo sapiens
  misc_RNA (1)...(19): siRNA sense strand
gccaugcaauuaguaaauc

SEQ ID NO: 2024989 - RNA, 19 nt, Homo sapiens
  misc_RNA (1)...(19): siRNA sense strand
uuggaaaucuccugcaaag

SEQ ID NO: 2024990 - RNA, 19 nt, Homo sapiens
  misc_RNA (1)...(19): siRNA sense strand
ccgagacaauggccuuaau

SEQ ID NO: 2024991 - RNA, 19 nt, Homo sapiens
  misc_RNA (1)...(19): siRNA sense strand
ugacucguccucccacuga

SEQ ID NO: 2024992 - RNA, 19 nt, Homo sapiens
  misc_RNA (1)...(19): siRNA sense strand
ugaaugacaccaugguuag

SEQ ID NO: 2024993 - RNA, 19 nt, Homo sapiens
  misc_RNA (1)...(19): siRNA sense strand
gaugucauacgacuaucaa

SEQ ID NO: 2024994 - RNA, 19 nt, Homo sapiens
  misc_RNA (1)...(19): siRNA sense strand
gagacaauggccuuaauac

SEQ ID NO: 2024995 - RNA, 19 nt, Homo sapiens
  misc_RNA (1)...(19): siRNA sense strand
cuggacaaauugagauaug

SEQ ID NO: 2024996 - RNA, 19 nt, Homo sapiens
  misc_RNA (1)...(19): siRNA sense strand
uagaaaugcgugcucagaa

SEQ ID NO: 2024997 - RNA, 19 nt, Homo sapiens
  misc_RNA (1)...(19): siRNA sense strand
agagaaaccacuugaccuu

SEQ ID NO: 2024998 - RNA, 19 nt, Homo sapiens
  misc_RNA (1)...(19): siRNA sense strand
auacgacuaucaacuuaca

SEQ ID NO: 2024999 - RNA, 19 nt, Homo sapiens
  misc_RNA (1)...(19): siRNA sense strand
ccagaugucagauuccaau

SEQ ID NO: 2025000 - RNA, 19 nt, Homo sapiens
  misc_RNA (1)...(19): siRNA sense strand
gaauuuugaugucauacga

SEQ ID NO: 2025001 - RNA, 19 nt, Homo sapiens
  misc_RNA (1)...(19): siRNA sense strand
ugaccuugcacauauaguu

SEQ ID NO: 2025002 - RNA, 19 nt, Homo sapiens
  misc_RNA (1)...(19): siRNA sense strand
acaagcgccuuccuucuac

SEQ ID NO: 2025003 - RNA, 19 nt, Homo sapiens
  misc_RNA (1)...(19): siRNA sense strand
ucucccagaugucagauuc

SEQ ID NO: 2025004 - RNA, 19 nt, Homo sapiens
  misc_RNA (1)...(19): siRNA sense strand
cuuaauacacuggaccaua

SEQ ID NO: 2025005 - RNA, 19 nt, Homo sapiens
  misc_RNA (1)...(19): siRNA sense strand
gaugccaacaaacaacaaa

SEQ ID NO: 2025006 - RNA, 19 nt, Homo sapiens
  misc_RNA (1)...(19): siRNA sense strand
augaaugacaccaugguua

SEQ ID NO: 2025007 - RNA, 19 nt, Homo sapiens
  misc_RNA (1)...(19): siRNA sense strand
gacgguauuuucaguuaaa

SEQ ID NO: 2025008 - RNA, 19 nt, Homo sapiens
  misc_RNA (1)...(19): siRNA sense strand
ucuccuccaucuacuauca

SEQ ID NO: 2025009 - RNA, 19 nt, Homo sapiens
  misc_RNA (1)...(19): siRNA sense strand
cagagaagaggcagcuguu

SEQ ID NO: 2025010 - RNA, 19 nt, Homo sapiens
  misc_RNA (1)...(19): siRNA sense strand
cagcagagaaagauaaugc

SEQ ID NO: 2025011 - RNA, 19 nt, Homo sapiens
  misc_RNA (1)...(19): siRNA sense strand
agauuccaauggcuuaaug

SEQ ID NO: 2025012 - RNA, 19 nt, Homo sapiens
  misc_RNA (1)...(19): siRNA sense strand
gcuuauugcagaacuggaa

SEQ ID NO: 2025013 - RNA, 19 nt, Homo sapiens
  misc_RNA (1)...(19): siRNA sense strand
ccaacaaacaacaaagaca

SEQ ID NO: 2025014 - RNA, 19 nt, Homo sapiens
  misc_RNA (1)...(19): siRNA sense strand
gucauacgacuaucaacuu

SEQ ID NO: 2025015 - RNA, 19 nt, Homo sapiens
  misc_RNA (1)...(19): siRNA sense strand
gagccaugcaauuaguaaa

SEQ ID NO: 2025016 - RNA, 19 nt, Homo sapiens
  misc_RNA (1)...(19): siRNA sense strand
ugaggaaagugggaacaag

SEQ ID NO: 2025017 - RNA, 19 nt, Homo sapiens
  misc_RNA (1)...(19): siRNA sense strand
agacaauggccuuaauaca

SEQ ID NO: 2025018 - RNA, 19 nt, Homo sapiens
  misc_RNA (1)...(19): siRNA sense strand
gcaaccagagaaaccacuu

SEQ ID NO: 2025019 - RNA, 19 nt, Homo sapiens
  misc_RNA (1)...(19): siRNA sense strand
uauguuagcaaccaugugu

SEQ ID NO: 2025020 - RNA, 19 nt, Homo sapiens
  misc_RNA (1)...(19): siRNA sense strand
uugcagaacuggaaaacaa

SEQ ID NO: 2025021 - RNA, 19 nt, Homo sapiens
  misc_RNA (1)...(19): siRNA sense strand
cagaacagccugcaaauua

SEQ ID NO: 2025022 - RNA, 19 nt, Homo sapiens
  misc_RNA (1)...(19): siRNA sense strand
ggaaaucuccugcaaagaa

SEQ ID NO: 2025023 - RNA, 19 nt, Homo sapiens
  misc_RNA (1)...(19): siRNA sense strand
caacaaagacagcuuauug

SEQ ID NO: 2025024 - RNA, 19 nt, Homo sapiens
  misc_RNA (1)...(19): siRNA sense strand
uggaagagcugaugaaguu

SEQ ID NO: 2025025 - RNA, 19 nt, Homo sapiens
  misc_RNA (1)...(19): siRNA sense strand
guugauaucuggaacauga

SEQ ID NO: 2025026 - RNA, 19 nt, Homo sapiens
  misc_RNA (1)...(19): siRNA sense strand
ggaagaccauggcagagaa

SEQ ID NO: 2025027 - RNA, 19 nt, Homo sapiens
  misc_RNA (1)...(19): siRNA sense strand
gacuugagcuuuaacuuug

SEQ ID NO: 2025028 - RNA, 19 nt, Homo sapiens
  misc_RNA (1)...(19): siRNA sense strand
ucauacgacuaucaacuua

SEQ ID NO: 2025029 - RNA, 19 nt, Homo sapiens
  misc_RNA (1)...(19): siRNA sense strand
gcacaggcuugcccauguu

SEQ ID NO: 2025030 - RNA, 19 nt, Homo sapiens
  misc_RNA (1)...(19): siRNA sense strand
gaaaugcgugcucagaauu

SEQ ID NO: 2025031 - RNA, 19 nt, Homo sapiens
  misc_RNA (1)...(19): siRNA sense strand
gaaaucuccugcaaagaag

SEQ ID NO: 2025032 - RNA, 19 nt, Homo sapiens
  misc_RNA (1)...(19): siRNA sense strand
uccaauggcuuaaugauau

SEQ ID NO: 2025033 - RNA, 19 nt, Homo sapiens
  misc_RNA (1)...(19): siRNA sense strand
ccacugacuugagcuuuaa

SEQ ID NO: 2025034 - RNA, 19 nt, Homo sapiens
  misc_RNA (1)...(19): siRNA sense strand
aaacaacaaagacagcuua

SEQ ID NO: 2025035 - RNA, 19 nt, Homo sapiens
  misc_RNA (1)...(19): siRNA sense strand
uagcaaguuugaccaguuu

SEQ ID NO: 2025036 - RNA, 19 nt, Homo sapiens
  misc_RNA (1)...(19): siRNA sense strand
cccaacagcugucuuugaa

SEQ ID NO: 2025037 - RNA, 19 nt, Homo sapiens
  misc_RNA (1)...(19): siRNA sense strand
gaggaacaccgucuuauag

SEQ ID NO: 2025038 - RNA, 19 nt, Homo sapiens
  misc_RNA (1)...(19): siRNA sense strand
gaugaggaacaccgucuua

SEQ ID NO: 2025039 - RNA, 19 nt, Homo sapiens
  misc_RNA (1)...(19): siRNA sense strand
agaggcagcuguucauaga

SEQ ID NO: 2025040 - RNA, 19 nt, Homo sapiens
  misc_RNA (1)...(19): siRNA sense strand
gaagaggcagcuguucaua

SEQ ID NO: 2025041 - RNA, 19 nt, Homo sapiens
  misc_RNA (1)...(19): siRNA sense strand
gcagagaaagauaaugcua

SEQ ID NO: 2025042 - RNA, 19 nt, Homo sapiens
  misc_RNA (1)...(19): siRNA sense strand
ccacagcagagaaagauaa

SEQ ID NO: 2025043 - RNA, 19 nt, Homo sapiens
  misc_RNA (1)...(19): siRNA sense strand
gccacagggucaccacaua

SEQ ID NO: 2025044 - RNA, 19 nt, Homo sapiens
  misc_RNA (1)...(19): siRNA sense strand
aagcugagccaugcaauua

SEQ ID NO: 2025045 - RNA, 19 nt, Homo sapiens
  misc_RNA (1)...(19): siRNA sense strand
gaggcaaguugacgguauu

SEQ ID NO: 2025046 - RNA, 19 nt, Homo sapiens
  misc_RNA (1)...(19): siRNA sense strand
ugacuugagcuuuaacuuu

SEQ ID NO: 2025047 - RNA, 19 nt, Homo sapiens
  misc_RNA (1)...(19): siRNA sense strand
gugagaguaugauggguuu

SEQ ID NO: 2025048 - RNA, 19 nt, Homo sapiens
  misc_RNA (1)...(19): siRNA sense strand
ggacaaauugagauauguu

SEQ ID NO: 2025049 - RNA, 19 nt, Homo sapiens
  misc_RNA (1)...(19): siRNA sense strand
ugaggaacaccgucuuaua

SEQ ID NO: 2025050 - RNA, 19 nt, Homo sapiens
  misc_RNA (1)...(19): siRNA sense strand
ccacuugaccuugcacaua

SEQ ID NO: 2025051 - RNA, 19 nt, Homo sapiens
  misc_RNA (1)...(19): siRNA sense strand
ccaauggcuuaaugauauu

SEQ ID NO: 2025052 - RNA, 19 nt, Homo sapiens
  misc_RNA (1)...(19): siRNA sense strand
agaaaugcgugcucagaau

SEQ ID NO: 2025053 - RNA, 19 nt, Homo sapiens
  misc_RNA (1)...(19): siRNA sense strand
gcaaccagcaccagaugaa

SEQ ID NO: 2025054 - RNA, 19 nt, Homo sapiens
  misc_RNA (1)...(19): siRNA sense strand
gcaggaggccuucgcacaa

SEQ ID NO: 2025055 - RNA, 19 nt, Homo sapiens
  misc_RNA (1)...(19): siRNA sense strand
gaagcugagccaugcaauu

SEQ ID NO: 2025056 - RNA, 19 nt, Homo sapiens
  misc_RNA (1)...(19): siRNA sense strand
gagaagaggcagcuguuca

SEQ ID NO: 2025057 - RNA, 19 nt, Homo sapiens
  misc_RNA (1)...(19): siRNA sense strand
cgagacaauggccuuaaua

SEQ ID NO: 2025058 - RNA, 19 nt, Homo sapiens
  misc_RNA (1)...(19): siRNA sense strand
cccacugacuugagcuuua

SEQ ID NO: 2025059 - RNA, 19 nt, Homo sapiens
  misc_RNA (1)...(19): siRNA sense strand
gaacaagcgccuuccuucu

SEQ ID NO: 2025060 - RNA, 19 nt, Homo sapiens
  misc_RNA (1)...(19): siRNA sense strand
uuaauacacuggaccauac

SEQ ID NO: 2025061 - RNA, 19 nt, Homo sapiens
  misc_RNA (1)...(19): siRNA sense strand
gcaaaggaaggaugaacug

SEQ ID NO: 2025062 - RNA, 19 nt, Homo sapiens
  misc_RNA (1)...(19): siRNA sense strand
cacuugaccuugcacauau

SEQ ID NO: 2025063 - RNA, 19 nt, Homo sapiens
  misc_RNA (1)...(19): siRNA sense strand
gaaaccacuugaccuugca

SEQ ID NO: 2025064 - RNA, 19 nt, Homo sapiens
  misc_RNA (1)...(19): siRNA sense strand
cagagaaagauaaugcuaa

SEQ ID NO: 2025065 - RNA, 19 nt, Homo sapiens
  misc_RNA (1)...(19): siRNA sense strand
ccaaauuaguguggaacaa

SEQ ID NO: 2025066 - RNA, 19 nt, Homo sapiens
  misc_RNA (1)...(19): siRNA sense strand
gaacuggagcagaggaugu

SEQ ID NO: 2025067 - RNA, 19 nt, Homo sapiens
  misc_RNA (1)...(19): siRNA sense strand
ggaacaagcggaagaccau

SEQ ID NO: 2025068 - RNA, 19 nt, Homo sapiens
  misc_RNA (1)...(19): siRNA sense strand
uuacagaacagccugcaaa

SEQ ID NO: 2025069 - RNA, 19 nt, Homo sapiens
  misc_RNA (1)...(19): siRNA sense strand
aggcagcuguucauagaaa

SEQ ID NO: 2025070 - RNA, 19 nt, Homo sapiens
  misc_RNA (1)...(19): siRNA sense strand
ugaaggaaguucugaagcu

SEQ ID NO: 2025071 - RNA, 19 nt, Homo sapiens
  misc_RNA (1)...(19): siRNA sense strand
cgaggcaaguugacgguau

SEQ ID NO: 2025072 - RNA, 19 nt, Homo sapiens
  misc_RNA (1)...(19): siRNA sense strand
ggaacaccgucuuauagcu

SEQ ID NO: 2025073 - RNA, 19 nt, Homo sapiens
  misc_RNA (1)...(19): siRNA sense strand
gcaauuaguaaaucuuugg

SEQ ID NO: 2025074 - RNA, 19 nt, Homo sapiens
  misc_RNA (1)...(19): siRNA sense strand
gcugagccaugcaauuagu

SEQ ID NO: 2025075 - RNA, 19 nt, Homo sapiens
  misc_RNA (1)...(19): siRNA sense strand
acaauggccuuaauacacu

SEQ ID NO: 2025076 - RNA, 19 nt, Homo sapiens
  misc_RNA (1)...(19): siRNA sense strand
gaagggccaucuuuugguu

SEQ ID NO: 2025077 - RNA, 19 nt, Homo sapiens
  misc_RNA (1)...(19): siRNA sense strand
cuccucaacuuuaugauug

SEQ ID NO: 2025078 - RNA, 19 nt, Homo sapiens
  misc_RNA (1)...(19): siRNA sense strand
gacaauggccuuaauacac

SEQ ID NO: 2025079 - RNA, 19 nt, Homo sapiens
  misc_RNA (1)...(19): siRNA sense strand
caaauuaguguggaacaau

SEQ ID NO: 2025080 - RNA, 19 nt, Homo sapiens
  misc_RNA (1)...(19): siRNA sense strand
ucaccaaauuaguguggaa

SEQ ID NO: 2025081 - RNA, 19 nt, Homo sapiens
  misc_RNA (1)...(19): siRNA sense strand
acuaucaacuuacagaaca

SEQ ID NO: 2025082 - RNA, 19 nt, Homo sapiens
  misc_RNA (1)...(19): siRNA sense strand
agaacagccugcaaauuac

SEQ ID NO: 2025083 - RNA, 19 nt, Homo sapiens
  misc_RNA (1)...(19): siRNA sense strand
gcucccaacagcugucuuu

SEQ ID NO: 2025084 - RNA, 19 nt, Homo sapiens
  misc_RNA (1)...(19): siRNA sense strand
uuagcaaguuugaccaguu

SEQ ID NO: 2025085 - RNA, 19 nt, Homo sapiens
  misc_RNA (1)...(19): siRNA sense strand
aacaagcgccuuccuucua

SEQ ID NO: 2025086 - RNA, 19 nt, Homo sapiens
  misc_RNA (1)...(19): siRNA sense strand
aaauuaguguggaacaauc

SEQ ID NO: 2025087 - RNA, 19 nt, Homo sapiens
  misc_RNA (1)...(19): siRNA sense strand
gaccauaccaccgagauca

SEQ ID NO: 2025088 - RNA, 19 nt, Homo sapiens
  misc_RNA (1)...(19): siRNA sense strand
gccaugcaauuaguaaauc

SEQ ID NO: 2025089 - RNA, 19 nt, Homo sapiens
  misc_RNA (1)...(19): siRNA sense strand
uuggaaaucuccugcaaag

SEQ ID NO: 2025090 - RNA, 19 nt, Homo sapiens
  misc_RNA (1)...(19): siRNA sense strand
ccgagacaauggccuuaau

SEQ ID NO: 2025091 - RNA, 19 nt, Homo sapiens
  misc_RNA (1)...(19): siRNA sense strand
ugacucguccucccacuga

SEQ ID NO: 2025092 - RNA, 19 nt, Homo sapiens
  misc_RNA (1)...(19): siRNA sense strand
ugaaugacaccaugguuag

SEQ ID NO: 2025093 - RNA, 19 nt, Homo sapiens
  misc_RNA (1)...(19): siRNA sense strand
gaugucauacgacuaucaa

SEQ ID NO: 2025094 - RNA, 19 nt, Homo sapiens
  misc_RNA (1)...(19): siRNA sense strand
gagacaauggccuuaauac

SEQ ID NO: 2025095 - RNA, 19 nt, Homo sapiens
  misc_RNA (1)...(19): siRNA sense strand
cuggacaaauugagauaug

SEQ ID NO: 2025096 - RNA, 19 nt, Homo sapiens
  misc_RNA (1)...(19): siRNA sense strand
uagaaaugcgugcucagaa

SEQ ID NO: 2025097 - RNA, 19 nt, Homo sapiens
  misc_RNA (1)...(19): siRNA sense strand
agagaaaccacuugaccuu

SEQ ID NO: 2025098 - RNA, 19 nt, Homo sapiens
  misc_RNA (1)...(19): siRNA sense strand
auacgacuaucaacuuaca

SEQ ID NO: 2025099 - RNA, 19 nt, Homo sapiens
  misc_RNA (1)...(19): siRNA sense strand
ccagaugucagauuccaau

SEQ ID NO: 2025100 - RNA, 19 nt, Homo sapiens
  misc_RNA (1)...(19): siRNA sense strand
gaauuuugaugucauacga

SEQ ID NO: 2025101 - RNA, 19 nt, Homo sapiens
  misc_RNA (1)...(19): siRNA sense strand
ugaccuugcacauauaguu

SEQ ID NO: 2025102 - RNA, 19 nt, Homo sapiens
  misc_RNA (1)...(19): siRNA sense strand
acaagcgccuuccuucuac

SEQ ID NO: 2025103 - RNA, 19 nt, Homo sapiens
  misc_RNA (1)...(19): siRNA sense strand
ucucccagaugucagauuc

SEQ ID NO: 2025104 - RNA, 19 nt, Homo sapiens
  misc_RNA (1)...(19): siRNA sense strand
cuuaauacacuggaccaua

SEQ ID NO: 2025105 - RNA, 19 nt, Homo sapiens
  misc_RNA (1)...(19): siRNA sense strand
gaugccaacaaacaacaaa

SEQ ID NO: 2025106 - RNA, 19 nt, Homo sapiens
  misc_RNA (1)...(19): siRNA sense strand
augaaugacaccaugguua

SEQ ID NO: 2025107 - RNA, 19 nt, Homo sapiens
  misc_RNA (1)...(19): siRNA sense strand
gacgguauuuucaguuaaa

SEQ ID NO: 2025108 - RNA, 19 nt, Homo sapiens
  misc_RNA (1)...(19): siRNA sense strand
ucuccuccaucuacuauca

SEQ ID NO: 2025109 - RNA, 19 nt, Homo sapiens
  misc_RNA (1)...(19): siRNA sense strand
cagagaagaggcagcuguu

SEQ ID NO: 2025110 - RNA, 19 nt, Homo sapiens
  misc_RNA (1)...(19): siRNA sense strand
cagcagagaaagauaaugc

SEQ ID NO: 2025111 - RNA, 19 nt, Homo sapiens
  misc_RNA (1)...(19): siRNA sense strand
agauuccaauggcuuaaug

SEQ ID NO: 2025112 - RNA, 19 nt, Homo sapiens
  misc_RNA (1)...(19): siRNA sense strand
gcuuauugcagaacuggaa

SEQ ID NO: 2025113 - RNA, 19 nt, Homo sapiens
  misc_RNA (1)...(19): siRNA sense strand
ccaacaaacaacaaagaca

SEQ ID NO: 2025114 - RNA, 19 nt, Homo sapiens
  misc_RNA (1)...(19): siRNA sense strand
gucauacgacuaucaacuu

SEQ ID NO: 2025115 - RNA, 19 nt, Homo sapiens
  misc_RNA (1)...(19): siRNA sense strand
gagccaugcaauuaguaaa

SEQ ID NO: 2025116 - RNA, 19 nt, Homo sapiens
  misc_RNA (1)...(19): siRNA sense strand
ugaggaaagugggaacaag

SEQ ID NO: 2025117 - RNA, 19 nt, Homo sapiens
  misc_RNA (1)...(19): siRNA sense strand
agacaauggccuuaauaca

SEQ ID NO: 2025118 - RNA, 19 nt, Homo sapiens
  misc_RNA (1)...(19): siRNA sense strand
gcaaccagagaaaccacuu

SEQ ID NO: 2025119 - RNA, 19 nt, Homo sapiens
  misc_RNA (1)...(19): siRNA sense strand
uauguuagcaaccaugugu

SEQ ID NO: 2025120 - RNA, 19 nt, Homo sapiens
  misc_RNA (1)...(19): siRNA sense strand
uugcagaacuggaaaacaa

SEQ ID NO: 2025121 - RNA, 19 nt, Homo sapiens
  misc_RNA (1)...(19): siRNA sense strand
cagaacagccugcaaauua

SEQ ID NO: 2025122 - RNA, 19 nt, Homo sapiens
  misc_RNA (1)...(19): siRNA sense strand
ggaaaucuccugcaaagaa

SEQ ID NO: 2025123 - RNA, 19 nt, Homo sapiens
  misc_RNA (1)...(19): siRNA sense strand
caacaaagacagcuuauug

SEQ ID NO: 2025124 - RNA, 19 nt, Homo sapiens
  misc_RNA (1)...(19): siRNA sense strand
uggaagagcugaugaaguu

SEQ ID NO: 2025125 - RNA, 19 nt, Homo sapiens
  misc_RNA (1)...(19): siRNA sense strand
guugauaucuggaacauga

SEQ ID NO: 2025126 - RNA, 19 nt, Homo sapiens
  misc_RNA (1)...(19): siRNA sense strand
ggaagaccauggcagagaa

SEQ ID NO: 2025127 - RNA, 19 nt, Homo sapiens
  misc_RNA (1)...(19): siRNA sense strand
gacuugagcuuuaacuuug

SEQ ID NO: 2025128 - RNA, 19 nt, Homo sapiens
  misc_RNA (1)...(19): siRNA sense strand
ucauacgacuaucaacuua

SEQ ID NO: 2025129 - RNA, 19 nt, Homo sapiens
  misc_RNA (1)...(19): siRNA sense strand
gcacaggcuugcccauguu

SEQ ID NO: 2025130 - RNA, 19 nt, Homo sapiens
  misc_RNA (1)...(19): siRNA sense strand
gaaaugcgugcucagaauu

SEQ ID NO: 2025131 - RNA, 19 nt, Homo sapiens
  misc_RNA (1)...(19): siRNA sense strand
gaaaucuccugcaaagaag

SEQ ID NO: 2025132 - RNA, 19 nt, Homo sapiens
  misc_RNA (1)...(19): siRNA sense strand
uccaauggcuuaaugauau

SEQ ID NO: 2025133 - RNA, 19 nt, Homo sapiens
  misc_RNA (1)...(19): siRNA sense strand
ccacugacuugagcuuuaa

SEQ ID NO: 2025134 - RNA, 19 nt, Homo sapiens
  misc_RNA (1)...(19): siRNA sense strand
aaacaacaaagacagcuua

SEQ ID NO: 2025135 - RNA, 19 nt, Homo sapiens
  misc_RNA (1)...(19): siRNA sense strand
uagcaaguuugaccaguuu

SEQ ID NO: 2025136 - RNA, 19 nt, Homo sapiens
  misc_RNA (1)...(19): siRNA sense strand
cccaacagcugucuuugaa

SEQ ID NO: 2025137 - RNA, 19 nt, Homo sapiens
  misc_RNA (1)...(19): siRNA sense strand
gaggaacaccgucuuauag

SEQ ID NO: 2025138 - RNA, 19 nt, Homo sapiens
  misc_RNA (1)...(19): siRNA sense strand
gaugaggaacaccgucuua

SEQ ID NO: 2025139 - RNA, 19 nt, Homo sapiens
  misc_RNA (1)...(19): siRNA sense strand
agaggcagcuguucauaga

SEQ ID NO: 2025140 - RNA, 19 nt, Homo sapiens
  misc_RNA (1)...(19): siRNA sense strand
gaagaggcagcuguucaua

SEQ ID NO: 2025141 - RNA, 19 nt, Homo sapiens
  misc_RNA (1)...(19): siRNA sense strand
gcagagaaagauaaugcua

SEQ ID NO: 2025142 - RNA, 19 nt, Homo sapiens
  misc_RNA (1)...(19): siRNA sense strand
ccacagcagagaaagauaa

SEQ ID NO: 2025143 - RNA, 19 nt, Homo sapiens
  misc_RNA (1)...(19): siRNA sense strand
gccacagggucaccacaua

SEQ ID NO: 2025144 - RNA, 19 nt, Homo sapiens
  misc_RNA (1)...(19): siRNA sense strand
aagcugagccaugcaauua

SEQ ID NO: 2025145 - RNA, 19 nt, Homo sapiens
  misc_RNA (1)...(19): siRNA sense strand
gaggcaaguugacgguauu

SEQ ID NO: 2025146 - RNA, 19 nt, Homo sapiens
  misc_RNA (1)...(19): siRNA sense strand
ugacuugagcuuuaacuuu

SEQ ID NO: 2025147 - RNA, 19 nt, Homo sapiens
  misc_RNA (1)...(19): siRNA sense strand
gugagaguaugauggguuu

SEQ ID NO: 2025148 - RNA, 19 nt, Homo sapiens
  misc_RNA (1)...(19): siRNA sense strand
ggacaaauugagauauguu

SEQ ID NO: 2025149 - RNA, 19 nt, Homo sapiens
  misc_RNA (1)...(19): siRNA sense strand
ugaggaacaccgucuuaua

SEQ ID NO: 2025150 - RNA, 19 nt, Homo sapiens
  misc_RNA (1)...(19): siRNA sense strand
ccacuugaccuugcacaua

SEQ ID NO: 2025151 - RNA, 19 nt, Homo sapiens
  misc_RNA (1)...(19): siRNA sense strand
ccaauggcuuaaugauauu

SEQ ID NO: 2025152 - RNA, 19 nt, Homo sapiens
  misc_RNA (1)...(19): siRNA sense strand
agaaaugcgugcucagaau

SEQ ID NO: 2025153 - RNA, 19 nt, Homo sapiens
  misc_RNA (1)...(19): siRNA sense strand
gcaaccagcaccagaugaa

SEQ ID NO: 2025154 - RNA, 19 nt, Homo sapiens
  misc_RNA (1)...(19): siRNA sense strand
gcaggaggccuucgcacaa

SEQ ID NO: 2025155 - RNA, 19 nt, Homo sapiens
  misc_RNA (1)...(19): siRNA sense strand
gaagcugagccaugcaauu

SEQ ID NO: 2025156 - RNA, 19 nt, Homo sapiens
  misc_RNA (1)...(19): siRNA sense strand
gagaagaggcagcuguuca

SEQ ID NO: 2025157 - RNA, 19 nt, Homo sapiens
  misc_RNA (1)...(19): siRNA sense strand
cgagacaauggccuuaaua

SEQ ID NO: 2025158 - RNA, 19 nt, Homo sapiens
  misc_RNA (1)...(19): siRNA sense strand
cccacugacuugagcuuua

SEQ ID NO: 2025159 - RNA, 19 nt, Homo sapiens
  misc_RNA (1)...(19): siRNA sense strand
gaacaagcgccuuccuucu

SEQ ID NO: 2025160 - RNA, 19 nt, Homo sapiens
  misc_RNA (1)...(19): siRNA sense strand
uuaauacacuggaccauac

SEQ ID NO: 2025161 - RNA, 19 nt, Homo sapiens
  misc_RNA (1)...(19): siRNA sense strand
gcaaaggaaggaugaacug

SEQ ID NO: 2025162 - RNA, 19 nt, Homo sapiens
  misc_RNA (1)...(19): siRNA sense strand
cacuugaccuugcacauau

SEQ ID NO: 2025163 - RNA, 19 nt, Homo sapiens
  misc_RNA (1)...(19): siRNA sense strand
gaaaccacuugaccuugca

SEQ ID NO: 2025164 - RNA, 19 nt, Homo sapiens
  misc_RNA (1)...(19): siRNA sense strand
cagagaaagauaaugcuaa

SEQ ID NO: 2025165 - RNA, 19 nt, Homo sapiens
  misc_RNA (1)...(19): siRNA sense strand
ccaaauuaguguggaacaa

SEQ ID NO: 2025166 - RNA, 19 nt, Homo sapiens
  misc_RNA (1)...(19): siRNA sense strand
gaacuggagcagaggaugu

SEQ ID NO: 2025167 - RNA, 19 nt, Homo sapiens
  misc_RNA (1)...(19): siRNA sense strand
ggaacaagcggaagaccau

SEQ ID NO: 2025168 - RNA, 19 nt, Homo sapiens
  misc_RNA (1)...(19): siRNA sense strand
uuacagaacagccugcaaa

SEQ ID NO: 2025169 - RNA, 19 nt, Homo sapiens
  misc_RNA (1)...(19): siRNA sense strand
aggcagcuguucauagaaa

SEQ ID NO: 2025170 - RNA, 19 nt, Homo sapiens
  misc_RNA (1)...(19): siRNA sense strand
ugaaggaaguucugaagcu

SEQ ID NO: 2025171 - RNA, 19 nt, Homo sapiens
  misc_RNA (1)...(19): siRNA sense strand
cgaggcaaguugacgguau

SEQ ID NO: 2025172 - RNA, 19 nt, Homo sapiens
  misc_RNA (1)...(19): siRNA sense strand
ggaacaccgucuuauagcu

SEQ ID NO: 2025173 - RNA, 19 nt, Homo sapiens
  misc_RNA (1)...(19): siRNA sense strand
gcaauuaguaaaucuuugg

SEQ ID NO: 2025174 - RNA, 19 nt, Homo sapiens
  misc_RNA (1)...(19): siRNA sense strand
gcugagccaugcaauuagu

SEQ ID NO: 2025175 - RNA, 19 nt, Homo sapiens
  misc_RNA (1)...(19): siRNA sense strand
acaauggccuuaauacacu

SEQ ID NO: 2025176 - RNA, 19 nt, Homo sapiens
  misc_RNA (1)...(19): siRNA sense strand
gaagggccaucuuuugguu

SEQ ID NO: 2025177 - RNA, 19 nt, Homo sapiens
  misc_RNA (1)...(19): siRNA sense strand
cuccucaacuuuaugauug

SEQ ID NO: 2025178 - RNA, 19 nt, Homo sapiens
  misc_RNA (1)...(19): siRNA sense strand
gacaauggccuuaauacac

SEQ ID NO: 2025179 - RNA, 19 nt, Homo sapiens
  misc_RNA (1)...(19): siRNA sense strand
caaauuaguguggaacaau

SEQ ID NO: 2025180 - RNA, 19 nt, Homo sapiens
  misc_RNA (1)...(19): siRNA sense strand
ucaccaaauuaguguggaa

SEQ ID NO: 2025181 - RNA, 19 nt, Homo sapiens
  misc_RNA (1)...(19): siRNA sense strand
acuaucaacuuacagaaca

SEQ ID NO: 2025182 - RNA, 19 nt, Homo sapiens
  misc_RNA (1)...(19): siRNA sense strand
agaacagccugcaaauuac

SEQ ID NO: 2025183 - RNA, 19 nt, Homo sapiens
  misc_RNA (1)...(19): siRNA sense strand
gcucccaacagcugucuuu

SEQ ID NO: 2025184 - RNA, 19 nt, Homo sapiens
  misc_RNA (1)...(19): siRNA sense strand
uuagcaaguuugaccaguu

SEQ ID NO: 2025185 - RNA, 19 nt, Homo sapiens
  misc_RNA (1)...(19): siRNA sense strand
aacaagcgccuuccuucua

SEQ ID NO: 2025186 - RNA, 19 nt, Homo sapiens
  misc_RNA (1)...(19): siRNA sense strand
aaauuaguguggaacaauc

SEQ ID NO: 2025187 - RNA, 19 nt, Homo sapiens
  misc_RNA (1)...(19): siRNA sense strand
gaccauaccaccgagauca

SEQ ID NO: 2025188 - RNA, 19 nt, Homo sapiens
  misc_RNA (1)...(19): siRNA sense strand
gccaugcaauuaguaaauc

SEQ ID NO: 2025189 - RNA, 19 nt, Homo sapiens
  misc_RNA (1)...(19): siRNA sense strand
uuggaaaucuccugcaaag

SEQ ID NO: 2025190 - RNA, 19 nt, Homo sapiens
  misc_RNA (1)...(19): siRNA sense strand
ccgagacaauggccuuaau

SEQ ID NO: 2025191 - RNA, 19 nt, Homo sapiens
  misc_RNA (1)...(19): siRNA sense strand
ugacucguccucccacuga

SEQ ID NO: 2025192 - RNA, 19 nt, Homo sapiens
  misc_RNA (1)...(19): siRNA sense strand
ugaaugacaccaugguuag

SEQ ID NO: 2025193 - RNA, 19 nt, Homo sapiens
  misc_RNA (1)...(19): siRNA sense strand
gaugucauacgacuaucaa

SEQ ID NO: 2025194 - RNA, 19 nt, Homo sapiens
  misc_RNA (1)...(19): siRNA sense strand
gagacaauggccuuaauac

SEQ ID NO: 2025195 - RNA, 19 nt, Homo sapiens
  misc_RNA (1)...(19): siRNA sense strand
cuggacaaauugagauaug

SEQ ID NO: 2025196 - RNA, 19 nt, Homo sapiens
  misc_RNA (1)...(19): siRNA sense strand
uagaaaugcgugcucagaa

SEQ ID NO: 2025197 - RNA, 19 nt, Homo sapiens
  misc_RNA (1)...(19): siRNA sense strand
agagaaaccacuugaccuu

SEQ ID NO: 2025198 - RNA, 19 nt, Homo sapiens
  misc_RNA (1)...(19): siRNA sense strand
auacgacuaucaacuuaca

SEQ ID NO: 2025199 - RNA, 19 nt, Homo sapiens
  misc_RNA (1)...(19): siRNA sense strand
ccagaugucagauuccaau

SEQ ID NO: 2025200 - RNA, 19 nt, Homo sapiens
  misc_RNA (1)...(19): siRNA sense strand
gaauuuugaugucauacga

SEQ ID NO: 2025201 - RNA, 19 nt, Homo sapiens
  misc_RNA (1)...(19): siRNA sense strand
ugaccuugcacauauaguu

SEQ ID NO: 2025202 - RNA, 19 nt, Homo sapiens
  misc_RNA (1)...(19): siRNA sense strand
acaagcgccuuccuucuac

SEQ ID NO: 2025203 - RNA, 19 nt, Homo sapiens
  misc_RNA (1)...(19): siRNA sense strand
ucucccagaugucagauuc

SEQ ID NO: 2025204 - RNA, 19 nt, Homo sapiens
  misc_RNA (1)...(19): siRNA sense strand
cuuaauacacuggaccaua

SEQ ID NO: 2025205 - RNA, 19 nt, Homo sapiens
  misc_RNA (1)...(19): siRNA sense strand
gaugccaacaaacaacaaa

SEQ ID NO: 2025206 - RNA, 19 nt, Homo sapiens
  misc_RNA (1)...(19): siRNA sense strand
augaaugacaccaugguua

SEQ ID NO: 2025207 - RNA, 19 nt, Homo sapiens
  misc_RNA (1)...(19): siRNA sense strand
gacgguauuuucaguuaaa

SEQ ID NO: 2025208 - RNA, 19 nt, Homo sapiens
  misc_RNA (1)...(19): siRNA sense strand
ucuccuccaucuacuauca

SEQ ID NO: 2025209 - RNA, 19 nt, Homo sapiens
  misc_RNA (1)...(19): siRNA sense strand
cagagaagaggcagcuguu

SEQ ID NO: 2025210 - RNA, 19 nt, Homo sapiens
  misc_RNA (1)...(19): siRNA sense strand
cagcagagaaagauaaugc

SEQ ID NO: 2025211 - RNA, 19 nt, Homo sapiens
  misc_RNA (1)...(19): siRNA sense strand
agauuccaauggcuuaaug

SEQ ID NO: 2025212 - RNA, 19 nt, Homo sapiens
  misc_RNA (1)...(19): siRNA sense strand
gcuuauugcagaacuggaa

SEQ ID NO: 2025213 - RNA, 19 nt, Homo sapiens
  misc_RNA (1)...(19): siRNA sense strand
ccaacaaacaacaaagaca

SEQ ID NO: 2025214 - RNA, 19 nt, Homo sapiens
  misc_RNA (1)...(19): siRNA sense strand
gucauacgacuaucaacuu

SEQ ID NO: 2025215 - RNA, 19 nt, Homo sapiens
  misc_RNA (1)...(19): siRNA sense strand
gagccaugcaauuaguaaa

SEQ ID NO: 2025216 - RNA, 19 nt, Homo sapiens
  misc_RNA (1)...(19): siRNA sense strand
ugaggaaagugggaacaag

SEQ ID NO: 2025217 - RNA, 19 nt, Homo sapiens
  misc_RNA (1)...(19): siRNA sense strand
agacaauggccuuaauaca

SEQ ID NO: 2025218 - RNA, 19 nt, Homo sapiens
  misc_RNA (1)...(19): siRNA sense strand
gcaaccagagaaaccacuu

SEQ ID NO: 2025219 - RNA, 19 nt, Homo sapiens
  misc_RNA (1)...(19): siRNA sense strand
uauguuagcaaccaugugu

SEQ ID NO: 2025220 - RNA, 19 nt, Homo sapiens
  misc_RNA (1)...(19): siRNA sense strand
uugcagaacuggaaaacaa

SEQ ID NO: 2025221 - RNA, 19 nt, Homo sapiens
  misc_RNA (1)...(19): siRNA sense strand
cagaacagccugcaaauua

SEQ ID NO: 2025222 - RNA, 19 nt, Homo sapiens
  misc_RNA (1)...(19): siRNA sense strand
ggaaaucuccugcaaagaa

SEQ ID NO: 2025223 - RNA, 19 nt, Homo sapiens
  misc_RNA (1)...(19): siRNA sense strand
caacaaagacagcuuauug

SEQ ID NO: 2025224 - RNA, 19 nt, Homo sapiens
  misc_RNA (1)...(19): siRNA sense strand
uggaagagcugaugaaguu

SEQ ID NO: 2025225 - RNA, 19 nt, Homo sapiens
  misc_RNA (1)...(19): siRNA sense strand
guugauaucuggaacauga

SEQ ID NO: 2025226 - RNA, 19 nt, Homo sapiens
  misc_RNA (1)...(19): siRNA sense strand
ggaagaccauggcagagaa

SEQ ID NO: 2025227 - RNA, 19 nt, Homo sapiens
  misc_RNA (1)...(19): siRNA sense strand
gacuugagcuuuaacuuug

SEQ ID NO: 2025228 - RNA, 19 nt, Homo sapiens
  misc_RNA (1)...(19): siRNA sense strand
ucauacgacuaucaacuua

SEQ ID NO: 2025229 - RNA, 19 nt, Homo sapiens
  misc_RNA (1)...(19): siRNA sense strand
gcacaggcuugcccauguu

SEQ ID NO: 2025230 - RNA, 19 nt, Homo sapiens
  misc_RNA (1)...(19): siRNA sense strand
gaaaugcgugcucagaauu

SEQ ID NO: 2025231 - RNA, 19 nt, Homo sapiens
  misc_RNA (1)...(19): siRNA sense strand
gaaaucuccugcaaagaag

SEQ ID NO: 2025232 - RNA, 19 nt, Homo sapiens
  misc_RNA (1)...(19): siRNA sense strand
uccaauggcuuaaugauau

SEQ ID NO: 2025233 - RNA, 19 nt, Homo sapiens
  misc_RNA (1)...(19): siRNA sense strand
ccacugacuugagcuuuaa

SEQ ID NO: 2025234 - RNA, 19 nt, Homo sapiens
  misc_RNA (1)...(19): siRNA sense strand
aaacaacaaagacagcuua

SEQ ID NO: 2025235 - RNA, 19 nt, Homo sapiens
  misc_RNA (1)...(19): siRNA sense strand
uagcaaguuugaccaguuu

SEQ ID NO: 2025236 - RNA, 19 nt, Homo sapiens
  misc_RNA (1)...(19): siRNA sense strand
cccaacagcugucuuugaa

SEQ ID NO: 2025237 - RNA, 19 nt, Homo sapiens
  misc_RNA (1)...(19): siRNA sense strand
gaggaacaccgucuuauag

SEQ ID NO: 2025238 - RNA, 19 nt, Homo sapiens
  misc_RNA (1)...(19): siRNA sense strand
gaugaggaacaccgucuua

SEQ ID NO: 2025239 - RNA, 19 nt, Homo sapiens
  misc_RNA (1)...(19): siRNA sense strand
agaggcagcuguucauaga

SEQ ID NO: 2025240 - RNA, 19 nt, Homo sapiens
  misc_RNA (1)...(19): siRNA sense strand
gaagaggcagcuguucaua

SEQ ID NO: 2025241 - RNA, 19 nt, Homo sapiens
  misc_RNA (1)...(19): siRNA sense strand
gcagagaaagauaaugcua

SEQ ID NO: 2025242 - RNA, 19 nt, Homo sapiens
  misc_RNA (1)...(19): siRNA sense strand
ccacagcagagaaagauaa

SEQ ID NO: 2025243 - RNA, 19 nt, Homo sapiens
  misc_RNA (1)...(19): siRNA sense strand
gccacagggucaccacaua

SEQ ID NO: 2025244 - RNA, 19 nt, Homo sapiens
  misc_RNA (1)...(19): siRNA sense strand
aagcugagccaugcaauua

SEQ ID NO: 2025245 - RNA, 19 nt, Homo sapiens
  misc_RNA (1)...(19): siRNA sense strand
gaggcaaguugacgguauu

SEQ ID NO: 2025246 - RNA, 19 nt, Homo sapiens
  misc_RNA (1)...(19): siRNA sense strand
ugacuugagcuuuaacuuu

SEQ ID NO: 2025247 - RNA, 19 nt, Homo sapiens
  misc_RNA (1)...(19): siRNA sense strand
gugagaguaugauggguuu

SEQ ID NO: 2025248 - RNA, 19 nt, Homo sapiens
  misc_RNA (1)...(19): siRNA sense strand
ggacaaauugagauauguu

SEQ ID NO: 2025249 - RNA, 19 nt, Homo sapiens
  misc_RNA (1)...(19): siRNA sense strand
ugaggaacaccgucuuaua

SEQ ID NO: 2025250 - RNA, 19 nt, Homo sapiens
  misc_RNA (1)...(19): siRNA sense strand
ccacuugaccuugcacaua

SEQ ID NO: 2025251 - RNA, 19 nt, Homo sapiens
  misc_RNA (1)...(19): siRNA sense strand
ccaauggcuuaaugauauu

SEQ ID NO: 2025252 - RNA, 19 nt, Homo sapiens
  misc_RNA (1)...(19): siRNA sense strand
agaaaugcgugcucagaau

SEQ ID NO: 2025253 - RNA, 19 nt, Homo sapiens
  misc_RNA (1)...(19): siRNA sense strand
gcaaccagcaccagaugaa

SEQ ID NO: 2025254 - RNA, 19 nt, Homo sapiens
  misc_RNA (1)...(19): siRNA sense strand
gcaggaggccuucgcacaa

SEQ ID NO: 2025255 - RNA, 19 nt, Homo sapiens
  misc_RNA (1)...(19): siRNA sense strand
gaagcugagccaugcaauu

SEQ ID NO: 2025256 - RNA, 19 nt, Homo sapiens
  misc_RNA (1)...(19): siRNA sense strand
gagaagaggcagcuguuca

SEQ ID NO: 2025257 - RNA, 19 nt, Homo sapiens
  misc_RNA (1)...(19): siRNA sense strand
cgagacaauggccuuaaua

SEQ ID NO: 2025258 - RNA, 19 nt, Homo sapiens
  misc_RNA (1)...(19): siRNA sense strand
cccacugacuugagcuuua

SEQ ID NO: 2025259 - RNA, 19 nt, Homo sapiens
  misc_RNA (1)...(19): siRNA sense strand
gaacaagcgccuuccuucu

SEQ ID NO: 2025260 - RNA, 19 nt, Homo sapiens
  misc_RNA (1)...(19): siRNA sense strand
uuaauacacuggaccauac

SEQ ID NO: 2025261 - RNA, 19 nt, Homo sapiens
  misc_RNA (1)...(19): siRNA sense strand
gcaaaggaaggaugaacug

SEQ ID NO: 2025262 - RNA, 19 nt, Homo sapiens
  misc_RNA (1)...(19): siRNA sense strand
cacuugaccuugcacauau

SEQ ID NO: 2025263 - RNA, 19 nt, Homo sapiens
  misc_RNA (1)...(19): siRNA sense strand
gaaaccacuugaccuugca

SEQ ID NO: 2025264 - RNA, 19 nt, Homo sapiens
  misc_RNA (1)...(19): siRNA sense strand
cagagaaagauaaugcuaa

SEQ ID NO: 2025265 - RNA, 19 nt, Homo sapiens
  misc_RNA (1)...(19): siRNA sense strand
ccaaauuaguguggaacaa

SEQ ID NO: 2025266 - RNA, 19 nt, Homo sapiens
  misc_RNA (1)...(19): siRNA sense strand
gaacuggagcagaggaugu

SEQ ID NO: 2025267 - RNA, 19 nt, Homo sapiens
  misc_RNA (1)...(19): siRNA sense strand
ggaacaagcggaagaccau

SEQ ID NO: 2025268 - RNA, 19 nt, Homo sapiens
  misc_RNA (1)...(19): siRNA sense strand
uuacagaacagccugcaaa

SEQ ID NO: 2025269 - RNA, 19 nt, Homo sapiens
  misc_RNA (1)...(19): siRNA sense strand
aggcagcuguucauagaaa

SEQ ID NO: 2025270 - RNA, 19 nt, Homo sapiens
  misc_RNA (1)...(19): siRNA sense strand
ugaaggaaguucugaagcu

SEQ ID NO: 2025271 - RNA, 19 nt, Homo sapiens
  misc_RNA (1)...(19): siRNA sense strand
cgaggcaaguugacgguau

SEQ ID NO: 2025272 - RNA, 19 nt, Homo sapiens
  misc_RNA (1)...(19): siRNA sense strand
ggaacaccgucuuauagcu

SEQ ID NO: 2025273 - RNA, 19 nt, Homo sapiens
  misc_RNA (1)...(19): siRNA sense strand
gcaauuaguaaaucuuugg

SEQ ID NO: 2025274 - RNA, 19 nt, Homo sapiens
  misc_RNA (1)...(19): siRNA sense strand
gcugagccaugcaauuagu

SEQ ID NO: 2025275 - RNA, 19 nt, Homo sapiens
  misc_RNA (1)...(19): siRNA sense strand
acaauggccuuaauacacu

SEQ ID NO: 2025276 - RNA, 19 nt, Homo sapiens
  misc_RNA (1)...(19): siRNA sense strand
gaagggccaucuuuugguu

SEQ ID NO: 2025277 - RNA, 19 nt, Homo sapiens
  misc_RNA (1)...(19): siRNA sense strand
cuccucaacuuuaugauug

SEQ ID NO: 2025278 - RNA, 19 nt, Homo sapiens
  misc_RNA (1)...(19): siRNA sense strand
gacaauggccuuaauacac

SEQ ID NO: 2025279 - RNA, 19 nt, Homo sapiens
  misc_RNA (1)...(19): siRNA sense strand
caaauuaguguggaacaau

SEQ ID NO: 2025280 - RNA, 19 nt, Homo sapiens
  misc_RNA (1)...(19): siRNA sense strand
ucaccaaauuaguguggaa

SEQ ID NO: 2025281 - RNA, 19 nt, Homo sapiens
  misc_RNA (1)...(19): siRNA sense strand
acuaucaacuuacagaaca

SEQ ID NO: 2025282 - RNA, 19 nt, Homo sapiens
  misc_RNA (1)...(19): siRNA sense strand
agaacagccugcaaauuac

SEQ ID NO: 2025283 - RNA, 19 nt, Homo sapiens
  misc_RNA (1)...(19): siRNA sense strand
gcucccaacagcugucuuu

SEQ ID NO: 2025284 - RNA, 19 nt, Homo sapiens
  misc_RNA (1)...(19): siRNA sense strand
uuagcaaguuugaccaguu

SEQ ID NO: 2025285 - RNA, 19 nt, Homo sapiens
  misc_RNA (1)...(19): siRNA sense strand
aacaagcgccuuccuucua

SEQ ID NO: 2025286 - RNA, 19 nt, Homo sapiens
  misc_RNA (1)...(19): siRNA sense strand
aaauuaguguggaacaauc

SEQ ID NO: 2025287 - RNA, 19 nt, Homo sapiens
  misc_RNA (1)...(19): siRNA sense strand
gaccauaccaccgagauca

SEQ ID NO: 2025288 - RNA, 19 nt, Homo sapiens
  misc_RNA (1)...(19): siRNA sense strand
gccaugcaauuaguaaauc

SEQ ID NO: 2025289 - RNA, 19 nt, Homo sapiens
  misc_RNA (1)...(19): siRNA sense strand
uuggaaaucuccugcaaag

SEQ ID NO: 2025290 - RNA, 19 nt, Homo sapiens
  misc_RNA (1)...(19): siRNA sense strand
ccgagacaauggccuuaau

SEQ ID NO: 2025291 - RNA, 19 nt, Homo sapiens
  misc_RNA (1)...(19): siRNA sense strand
ugacucguccucccacuga

SEQ ID NO: 2025292 - RNA, 19 nt, Homo sapiens
  misc_RNA (1)...(19): siRNA sense strand
ugaaugacaccaugguuag

SEQ ID NO: 2025293 - RNA, 19 nt, Homo sapiens
  misc_RNA (1)...(19): siRNA sense strand
gaugucauacgacuaucaa

SEQ ID NO: 2025294 - RNA, 19 nt, Homo sapiens
  misc_RNA (1)...(19): siRNA sense strand
gagacaauggccuuaauac

SEQ ID NO: 2025295 - RNA, 19 nt, Homo sapiens
  misc_RNA (1)...(19): siRNA sense strand
cuggacaaauugagauaug

SEQ ID NO: 2025296 - RNA, 19 nt, Homo sapiens
  misc_RNA (1)...(19): siRNA sense strand
uagaaaugcgugcucagaa

SEQ ID NO: 2025297 - RNA, 19 nt, Homo sapiens
  misc_RNA (1)...(19): siRNA sense strand
agagaaaccacuugaccuu

SEQ ID NO: 2025298 - RNA, 19 nt, Homo sapiens
  misc_RNA (1)...(19): siRNA sense strand
auacgacuaucaacuuaca

SEQ ID NO: 2025299 - RNA, 19 nt, Homo sapiens
  misc_RNA (1)...(19): siRNA sense strand
ccagaugucagauuccaau

SEQ ID NO: 2025300 - RNA, 19 nt, Homo sapiens
  misc_RNA (1)...(19): siRNA sense strand
gaauuuugaugucauacga

SEQ ID NO: 2025301 - RNA, 19 nt, Homo sapiens
  misc_RNA (1)...(19): siRNA sense strand
ugaccuugcacauauaguu

SEQ ID NO: 2025302 - RNA, 19 nt, Homo sapiens
  misc_RNA (1)...(19): siRNA sense strand
acaagcgccuuccuucuac

SEQ ID NO: 2025303 - RNA, 19 nt, Homo sapiens
  misc_RNA (1)...(19): siRNA sense strand
ucucccagaugucagauuc

SEQ ID NO: 2025304 - RNA, 19 nt, Homo sapiens
  misc_RNA (1)...(19): siRNA sense strand
cuuaauacacuggaccaua

SEQ ID NO: 2025305 - RNA, 19 nt, Homo sapiens
  misc_RNA (1)...(19): siRNA sense strand
gaugccaacaaacaacaaa

SEQ ID NO: 2025306 - RNA, 19 nt, Homo sapiens
  misc_RNA (1)...(19): siRNA sense strand
augaaugacaccaugguua

SEQ ID NO: 2025307 - RNA, 19 nt, Homo sapiens
  misc_RNA (1)...(19): siRNA sense strand
gacgguauuuucaguuaaa

SEQ ID NO: 2025308 - RNA, 19 nt, Homo sapiens
  misc_RNA (1)...(19): siRNA sense strand
ucuccuccaucuacuauca

SEQ ID NO: 2025309 - RNA, 19 nt, Homo sapiens
  misc_RNA (1)...(19): siRNA sense strand
cagagaagaggcagcuguu

SEQ ID NO: 2025310 - RNA, 19 nt, Homo sapiens
  misc_RNA (1)...(19): siRNA sense strand
cagcagagaaagauaaugc

SEQ ID NO: 2025311 - RNA, 19 nt, Homo sapiens
  misc_RNA (1)...(19): siRNA sense strand
agauuccaauggcuuaaug

SEQ ID NO: 2025312 - RNA, 19 nt, Homo sapiens
  misc_RNA (1)...(19): siRNA sense strand
gcuuauugcagaacuggaa

SEQ ID NO: 2025313 - RNA, 19 nt, Homo sapiens
  misc_RNA (1)...(19): siRNA sense strand
ccaacaaacaacaaagaca

SEQ ID NO: 2025314 - RNA, 19 nt, Homo sapiens
  misc_RNA (1)...(19): siRNA sense strand
gucauacgacuaucaacuu

SEQ ID NO: 2025315 - RNA, 19 nt, Homo sapiens
  misc_RNA (1)...(19): siRNA sense strand
gagccaugcaauuaguaaa

SEQ ID NO: 2025316 - RNA, 19 nt, Homo sapiens
  misc_RNA (1)...(19): siRNA sense strand
ugaggaaagugggaacaag

SEQ ID NO: 2025317 - RNA, 19 nt, Homo sapiens
  misc_RNA (1)...(19): siRNA sense strand
agacaauggccuuaauaca

SEQ ID NO: 2025318 - RNA, 19 nt, Homo sapiens
  misc_RNA (1)...(19): siRNA sense strand
gcaaccagagaaaccacuu

SEQ ID NO: 2025319 - RNA, 19 nt, Homo sapiens
  misc_RNA (1)...(19): siRNA sense strand
uauguuagcaaccaugugu

SEQ ID NO: 2025320 - RNA, 19 nt, Homo sapiens
  misc_RNA (1)...(19): siRNA sense strand
uugcagaacuggaaaacaa

SEQ ID NO: 2025321 - RNA, 19 nt, Homo sapiens
  misc_RNA (1)...(19): siRNA sense strand
cagaacagccugcaaauua

SEQ ID NO: 2025322 - RNA, 19 nt, Homo sapiens
  misc_RNA (1)...(19): siRNA sense strand
ggaaaucuccugcaaagaa

SEQ ID NO: 2025323 - RNA, 19 nt, Homo sapiens
  misc_RNA (1)...(19): siRNA sense strand
caacaaagacagcuuauug

SEQ ID NO: 2025324 - RNA, 19 nt, Homo sapiens
  misc_RNA (1)...(19): siRNA sense strand
uggaagagcugaugaaguu

SEQ ID NO: 2025325 - RNA, 19 nt, Homo sapiens
  misc_RNA (1)...(19): siRNA sense strand
guugauaucuggaacauga

SEQ ID NO: 2025326 - RNA, 19 nt, Homo sapiens
  misc_RNA (1)...(19): siRNA sense strand
ggaagaccauggcagagaa

SEQ ID NO: 2025327 - RNA, 19 nt, Homo sapiens
  misc_RNA (1)...(19): siRNA sense strand
gacuugagcuuuaacuuug

SEQ ID NO: 2025328 - RNA, 19 nt, Homo sapiens
  misc_RNA (1)...(19): siRNA sense strand
ucauacgacuaucaacuua

SEQ ID NO: 2025329 - RNA, 19 nt, Homo sapiens
  misc_RNA (1)...(19): siRNA sense strand
gcacaggcuugcccauguu

SEQ ID NO: 2025330 - RNA, 19 nt, Homo sapiens
  misc_RNA (1)...(19): siRNA sense strand
gaaaugcgugcucagaauu

SEQ ID NO: 2025331 - RNA, 19 nt, Homo sapiens
  misc_RNA (1)...(19): siRNA sense strand
gaaaucuccugcaaagaag

SEQ ID NO: 2025332 - RNA, 19 nt, Homo sapiens
  misc_RNA (1)...(19): siRNA sense strand
uccaauggcuuaaugauau

SEQ ID NO: 2025333 - RNA, 19 nt, Homo sapiens
  misc_RNA (1)...(19): siRNA sense strand
ccacugacuugagcuuuaa

SEQ ID NO: 2025334 - RNA, 19 nt, Homo sapiens
  misc_RNA (1)...(19): siRNA sense strand
aaacaacaaagacagcuua

SEQ ID NO: 2025335 - RNA, 19 nt, Homo sapiens
  misc_RNA (1)...(19): siRNA sense strand
uagcaaguuugaccaguuu

SEQ ID NO: 2025336 - RNA, 19 nt, Homo sapiens
  misc_RNA (1)...(19): siRNA sense strand
cccaacagcugucuuugaa

SEQ ID NO: 2025337 - RNA, 19 nt, Homo sapiens
  misc_RNA (1)...(19): siRNA sense strand
gaggaacaccgucuuauag

SEQ ID NO: 2025338 - RNA, 19 nt, Homo sapiens
  misc_RNA (1)...(19): siRNA sense strand
gaugaggaacaccgucuua

SEQ ID NO: 2025339 - RNA, 19 nt, Homo sapiens
  misc_RNA (1)...(19): siRNA sense strand
agaggcagcuguucauaga

SEQ ID NO: 2025340 - RNA, 19 nt, Homo sapiens
  misc_RNA (1)...(19): siRNA sense strand
gaagaggcagcuguucaua

SEQ ID NO: 2025341 - RNA, 19 nt, Homo sapiens
  misc_RNA (1)...(19): siRNA sense strand
gcagagaaagauaaugcua

SEQ ID NO: 2025342 - RNA, 19 nt, Homo sapiens
  misc_RNA (1)...(19): siRNA sense strand
ccacagcagagaaagauaa

SEQ ID NO: 2025343 - RNA, 19 nt, Homo sapiens
  misc_RNA (1)...(19): siRNA sense strand
gccacagggucaccacaua

SEQ ID NO: 2025344 - RNA, 19 nt, Homo sapiens
  misc_RNA (1)...(19): siRNA sense strand
aagcugagccaugcaauua

SEQ ID NO: 2025345 - RNA, 19 nt, Homo sapiens
  misc_RNA (1)...(19): siRNA sense strand
gaggcaaguugacgguauu

SEQ ID NO: 2025346 - RNA, 19 nt, Homo sapiens
  misc_RNA (1)...(19): siRNA sense strand
ugacuugagcuuuaacuuu

SEQ ID NO: 2025347 - RNA, 19 nt, Homo sapiens
  misc_RNA (1)...(19): siRNA sense strand
gugagaguaugauggguuu

SEQ ID NO: 2025348 - RNA, 19 nt, Homo sapiens
  misc_RNA (1)...(19): siRNA sense strand
ggacaaauugagauauguu

SEQ ID NO: 2025349 - RNA, 19 nt, Homo sapiens
  misc_RNA (1)...(19): siRNA sense strand
ugaggaacaccgucuuaua

SEQ ID NO: 2025350 - RNA, 19 nt, Homo sapiens
  misc_RNA (1)...(19): siRNA sense strand
ccacuugaccuugcacaua

SEQ ID NO: 2025351 - RNA, 19 nt, Homo sapiens
  misc_RNA (1)...(19): siRNA sense strand
ccaauggcuuaaugauauu

SEQ ID NO: 2025352 - RNA, 19 nt, Homo sapiens
  misc_RNA (1)...(19): siRNA sense strand
agaaaugcgugcucagaau

SEQ ID NO: 2025353 - RNA, 19 nt, Homo sapiens
  misc_RNA (1)...(19): siRNA sense strand
gcaaccagcaccagaugaa

SEQ ID NO: 2025354 - RNA, 19 nt, Homo sapiens
  misc_RNA (1)...(19): siRNA sense strand
gcaggaggccuucgcacaa

SEQ ID NO: 2025355 - RNA, 19 nt, Homo sapiens
  misc_RNA (1)...(19): siRNA sense strand
gaagcugagccaugcaauu

SEQ ID NO: 2025356 - RNA, 19 nt, Homo sapiens
  misc_RNA (1)...(19): siRNA sense strand
gagaagaggcagcuguuca

SEQ ID NO: 2025357 - RNA, 19 nt, Homo sapiens
  misc_RNA (1)...(19): siRNA sense strand
cgagacaauggccuuaaua

SEQ ID NO: 2025358 - RNA, 19 nt, Homo sapiens
  misc_RNA (1)...(19): siRNA sense strand
cccacugacuugagcuuua

SEQ ID NO: 2025359 - RNA, 19 nt, Homo sapiens
  misc_RNA (1)...(19): siRNA sense strand
gaacaagcgccuuccuucu

SEQ ID NO: 2025360 - RNA, 19 nt, Homo sapiens
  misc_RNA (1)...(19): siRNA sense strand
uuaauacacuggaccauac

SEQ ID NO: 2025361 - RNA, 19 nt, Homo sapiens
  misc_RNA (1)...(19): siRNA sense strand
gcaaaggaaggaugaacug

SEQ ID NO: 2025362 - RNA, 19 nt, Homo sapiens
  misc_RNA (1)...(19): siRNA sense strand
cacuugaccuugcacauau

SEQ ID NO: 2025363 - RNA, 19 nt, Homo sapiens
  misc_RNA (1)...(19): siRNA sense strand
gaaaccacuugaccuugca

SEQ ID NO: 2025364 - RNA, 19 nt, Homo sapiens
  misc_RNA (1)...(19): siRNA sense strand
cagagaaagauaaugcuaa

SEQ ID NO: 2025365 - RNA, 19 nt, Homo sapiens
  misc_RNA (1)...(19): siRNA sense strand
ccaaauuaguguggaacaa

SEQ ID NO: 2025366 - RNA, 19 nt, Homo sapiens
  misc_RNA (1)...(19): siRNA sense strand
gaacuggagcagaggaugu

SEQ ID NO: 2025367 - RNA, 19 nt, Homo sapiens
  misc_RNA (1)...(19): siRNA sense strand
ggaacaagcggaagaccau

SEQ ID NO: 2025368 - RNA, 19 nt, Homo sapiens
  misc_RNA (1)...(19): siRNA sense strand
uuacagaacagccugcaaa

SEQ ID NO: 2025369 - RNA, 19 nt, Homo sapiens
  misc_RNA (1)...(19): siRNA sense strand
aggcagcuguucauagaaa

SEQ ID NO: 2025370 - RNA, 19 nt, Homo sapiens
  misc_RNA (1)...(19): siRNA sense strand
ugaaggaaguucugaagcu

SEQ ID NO: 2025371 - RNA, 19 nt, Homo sapiens
  misc_RNA (1)...(19): siRNA sense strand
cgaggcaaguugacgguau

SEQ ID NO: 2025372 - RNA, 19 nt, Homo sapiens
  misc_RNA (1)...(19): siRNA sense strand
ggaacaccgucuuauagcu

SEQ ID NO: 2025373 - RNA, 19 nt, Homo sapiens
  misc_RNA (1)...(19): siRNA sense strand
gcaauuaguaaaucuuugg

SEQ ID NO: 2025374 - RNA, 19 nt, Homo sapiens
  misc_RNA (1)...(19): siRNA sense strand
gcugagccaugcaauuagu

SEQ ID NO: 2025375 - RNA, 19 nt, Homo sapiens
  misc_RNA (1)...(19): siRNA sense strand
acaauggccuuaauacacu

SEQ ID NO: 2025376 - RNA, 19 nt, Homo sapiens
  misc_RNA (1)...(19): siRNA sense strand
gaagggccaucuuuugguu

SEQ ID NO: 2025377 - RNA, 19 nt, Homo sapiens
  misc_RNA (1)...(19): siRNA sense strand
cuccucaacuuuaugauug

SEQ ID NO: 2025378 - RNA, 19 nt, Homo sapiens
  misc_RNA (1)...(19): siRNA sense strand
gacaauggccuuaauacac

SEQ ID NO: 2025379 - RNA, 19 nt, Homo sapiens
  misc_RNA (1)...(19): siRNA sense strand
caaauuaguguggaacaau

SEQ ID NO: 2025380 - RNA, 19 nt, Homo sapiens
  misc_RNA (1)...(19): siRNA sense strand
ucaccaaauuaguguggaa

SEQ ID NO: 2025381 - RNA, 19 nt, Homo sapiens
  misc_RNA (1)...(19): siRNA sense strand
acuaucaacuuacagaaca

SEQ ID NO: 2025382 - RNA, 19 nt, Homo sapiens
  misc_RNA (1)...(19): siRNA sense strand
agaacagccugcaaauuac

SEQ ID NO: 2025383 - RNA, 19 nt, Homo sapiens
  misc_RNA (1)...(19): siRNA sense strand
gcucccaacagcugucuuu

SEQ ID NO: 2025384 - RNA, 19 nt, Homo sapiens
  misc_RNA (1)...(19): siRNA sense strand
uuagcaaguuugaccaguu

SEQ ID NO: 2025385 - RNA, 19 nt, Homo sapiens
  misc_RNA (1)...(19): siRNA sense strand
aacaagcgccuuccuucua

SEQ ID NO: 2025386 - RNA, 19 nt, Homo sapiens
  misc_RNA (1)...(19): siRNA sense strand
aaauuaguguggaacaauc

SEQ ID NO: 2025387 - RNA, 19 nt, Homo sapiens
  misc_RNA (1)...(19): siRNA sense strand
gaccauaccaccgagauca

SEQ ID NO: 2025388 - RNA, 19 nt, Homo sapiens
  misc_RNA (1)...(19): siRNA sense strand
gccaugcaauuaguaaauc

SEQ ID NO: 2025389 - RNA, 19 nt, Homo sapiens
  misc_RNA (1)...(19): siRNA sense strand
uuggaaaucuccugcaaag

SEQ ID NO: 2025390 - RNA, 19 nt, Homo sapiens
  misc_RNA (1)...(19): siRNA sense strand
ccgagacaauggccuuaau

SEQ ID NO: 2025391 - RNA, 19 nt, Homo sapiens
  misc_RNA (1)...(19): siRNA sense strand
ugacucguccucccacuga

SEQ ID NO: 2025392 - RNA, 19 nt, Homo sapiens
  misc_RNA (1)...(19): siRNA sense strand
ugaaugacaccaugguuag

SEQ ID NO: 2025393 - RNA, 19 nt, Homo sapiens
  misc_RNA (1)...(19): siRNA sense strand
gaugucauacgacuaucaa

SEQ ID NO: 2025394 - RNA, 19 nt, Homo sapiens
  misc_RNA (1)...(19): siRNA sense strand
gagacaauggccuuaauac

SEQ ID NO: 2025395 - RNA, 19 nt, Homo sapiens
  misc_RNA (1)...(19): siRNA sense strand
cuggacaaauugagauaug

SEQ ID NO: 2025396 - RNA, 19 nt, Homo sapiens
  misc_RNA (1)...(19): siRNA sense strand
uagaaaugcgugcucagaa

SEQ ID NO: 2025397 - RNA, 19 nt, Homo sapiens
  misc_RNA (1)...(19): siRNA sense strand
agagaaaccacuugaccuu

SEQ ID NO: 2025398 - RNA, 19 nt, Homo sapiens
  misc_RNA (1)...(19): siRNA sense strand
auacgacuaucaacuuaca

SEQ ID NO: 2025399 - RNA, 19 nt, Homo sapiens
  misc_RNA (1)...(19): siRNA sense strand
ccagaugucagauuccaau

SEQ ID NO: 2025400 - RNA, 19 nt, Homo sapiens
  misc_RNA (1)...(19): siRNA sense strand
gaauuuugaugucauacga

SEQ ID NO: 2025401 - RNA, 19 nt, Homo sapiens
  misc_RNA (1)...(19): siRNA sense strand
ugaccuugcacauauaguu

SEQ ID NO: 2025402 - RNA, 19 nt, Homo sapiens
  misc_RNA (1)...(19): siRNA sense strand
acaagcgccuuccuucuac

SEQ ID NO: 2025403 - RNA, 19 nt, Homo sapiens
  misc_RNA (1)...(19): siRNA sense strand
ucucccagaugucagauuc

SEQ ID NO: 2025404 - RNA, 19 nt, Homo sapiens
  misc_RNA (1)...(19): siRNA sense strand
cuuaauacacuggaccaua

SEQ ID NO: 2025405 - RNA, 19 nt, Homo sapiens
  misc_RNA (1)...(19): siRNA sense strand
gaugccaacaaacaacaaa

SEQ ID NO: 2025406 - RNA, 19 nt, Homo sapiens
  misc_RNA (1)...(19): siRNA sense strand
augaaugacaccaugguua

SEQ ID NO: 2025407 - RNA, 19 nt, Homo sapiens
  misc_RNA (1)...(19): siRNA sense strand
gacgguauuuucaguuaaa

SEQ ID NO: 2025408 - RNA, 19 nt, Homo sapiens
  misc_RNA (1)...(19): siRNA sense strand
ucuccuccaucuacuauca

SEQ ID NO: 2025409 - RNA, 19 nt, Homo sapiens
  misc_RNA (1)...(19): siRNA sense strand
cagagaagaggcagcuguu

SEQ ID NO: 2025410 - RNA, 19 nt, Homo sapiens
  misc_RNA (1)...(19): siRNA sense strand
cagcagagaaagauaaugc

SEQ ID NO: 2025411 - RNA, 19 nt, Homo sapiens
  misc_RNA (1)...(19): siRNA sense strand
agauuccaauggcuuaaug

SEQ ID NO: 2025412 - RNA, 19 nt, Homo sapiens
  misc_RNA (1)...(19): siRNA sense strand
gcuuauugcagaacuggaa

SEQ ID NO: 2025413 - RNA, 19 nt, Homo sapiens
  misc_RNA (1)...(19): siRNA sense strand
ccaacaaacaacaaagaca

SEQ ID NO: 2025414 - RNA, 19 nt, Homo sapiens
  misc_RNA (1)...(19): siRNA sense strand
gucauacgacuaucaacuu

SEQ ID NO: 2025415 - RNA, 19 nt, Homo sapiens
  misc_RNA (1)...(19): siRNA sense strand
gagccaugcaauuaguaaa

SEQ ID NO: 2025416 - RNA, 19 nt, Homo sapiens
  misc_RNA (1)...(19): siRNA sense strand
ugaggaaagugggaacaag

SEQ ID NO: 2025417 - RNA, 19 nt, Homo sapiens
  misc_RNA (1)...(19): siRNA sense strand
agacaauggccuuaauaca

SEQ ID NO: 2025418 - RNA, 19 nt, Homo sapiens
  misc_RNA (1)...(19): siRNA sense strand
gcaaccagagaaaccacuu

SEQ ID NO: 2025419 - RNA, 19 nt, Homo sapiens
  misc_RNA (1)...(19): siRNA sense strand
uauguuagcaaccaugugu

SEQ ID NO: 2025420 - RNA, 19 nt, Homo sapiens
  misc_RNA (1)...(19): siRNA sense strand
uugcagaacuggaaaacaa

SEQ ID NO: 2025421 - RNA, 19 nt, Homo sapiens
  misc_RNA (1)...(19): siRNA sense strand
cagaacagccugcaaauua

SEQ ID NO: 2025422 - RNA, 19 nt, Homo sapiens
  misc_RNA (1)...(19): siRNA sense strand
ggaaaucuccugcaaagaa

SEQ ID NO: 2025423 - RNA, 19 nt, Homo sapiens
  misc_RNA (1)...(19): siRNA sense strand
caacaaagacagcuuauug

SEQ ID NO: 2025424 - RNA, 19 nt, Homo sapiens
  misc_RNA (1)...(19): siRNA sense strand
uggaagagcugaugaaguu

SEQ ID NO: 2025425 - RNA, 19 nt, Homo sapiens
  misc_RNA (1)...(19): siRNA sense strand
guugauaucuggaacauga

SEQ ID NO: 2025426 - RNA, 19 nt, Homo sapiens
  misc_RNA (1)...(19): siRNA sense strand
ggaagaccauggcagagaa

SEQ ID NO: 2025427 - RNA, 19 nt, Homo sapiens
  misc_RNA (1)...(19): siRNA sense strand
gacuugagcuuuaacuuug

SEQ ID NO: 2025428 - RNA, 19 nt, Homo sapiens
  misc_RNA (1)...(19): siRNA sense strand
ucauacgacuaucaacuua

SEQ ID NO: 2025429 - RNA, 19 nt, Homo sapiens
  misc_RNA (1)...(19): siRNA sense strand
gcacaggcuugcccauguu

SEQ ID NO: 2025430 - RNA, 19 nt, Homo sapiens
  misc_RNA (1)...(19): siRNA sense strand
gaaaugcgugcucagaauu

SEQ ID NO: 2025431 - RNA, 19 nt, Homo sapiens
  misc_RNA (1)...(19): siRNA sense strand
gaaaucuccugcaaagaag

SEQ ID NO: 2025432 - RNA, 19 nt, Homo sapiens
  misc_RNA (1)...(19): siRNA sense strand
uccaauggcuuaaugauau

SEQ ID NO: 2025433 - RNA, 19 nt, Homo sapiens
  misc_RNA (1)...(19): siRNA sense strand
ccacugacuugagcuuuaa

SEQ ID NO: 2025434 - RNA, 19 nt, Homo sapiens
  misc_RNA (1)...(19): siRNA sense strand
aaacaacaaagacagcuua

SEQ ID NO: 2025435 - RNA, 19 nt, Homo sapiens
  misc_RNA (1)...(19): siRNA sense strand
uagcaaguuugaccaguuu

SEQ ID NO: 2025436 - RNA, 19 nt, Homo sapiens
  misc_RNA (1)...(19): siRNA sense strand
cccaacagcugucuuugaa

SEQ ID NO: 2025437 - RNA, 19 nt, Homo sapiens
  misc_RNA (1)...(19): siRNA sense strand
gaggaacaccgucuuauag

SEQ ID NO: 2025438 - RNA, 19 nt, Homo sapiens
  misc_RNA (1)...(19): siRNA sense strand
gaugaggaacaccgucuua

SEQ ID NO: 2025439 - RNA, 19 nt, Homo sapiens
  misc_RNA (1)...(19): siRNA sense strand
agaggcagcuguucauaga

SEQ ID NO: 2025440 - RNA, 19 nt, Homo sapiens
  misc_RNA (1)...(19): siRNA sense strand
gaagaggcagcuguucaua

SEQ ID NO: 2025441 - RNA, 19 nt, Homo sapiens
  misc_RNA (1)...(19): siRNA sense strand
gcagagaaagauaaugcua

SEQ ID NO: 2025442 - RNA, 19 nt, Homo sapiens
  misc_RNA (1)...(19): siRNA sense strand
ccacagcagagaaagauaa

SEQ ID NO: 2025443 - RNA, 19 nt, Homo sapiens
  misc_RNA (1)...(19): siRNA sense strand
gccacagggucaccacaua

SEQ ID NO: 2025444 - RNA, 19 nt, Homo sapiens
  misc_RNA (1)...(19): siRNA sense strand
aagcugagccaugcaauua

SEQ ID NO: 2025445 - RNA, 19 nt, Homo sapiens
  misc_RNA (1)...(19): siRNA sense strand
gaggcaaguugacgguauu

SEQ ID NO: 2025446 - RNA, 19 nt, Homo sapiens
  misc_RNA (1)...(19): siRNA sense strand
ugacuugagcuuuaacuuu

SEQ ID NO: 2025447 - RNA, 19 nt, Homo sapiens
  misc_RNA (1)...(19): siRNA sense strand
gugagaguaugauggguuu

SEQ ID NO: 2025448 - RNA, 19 nt, Homo sapiens
  misc_RNA (1)...(19): siRNA sense strand
ggacaaauugagauauguu

SEQ ID NO: 2025449 - RNA, 19 nt, Homo sapiens
  misc_RNA (1)...(19): siRNA sense strand
ugaggaacaccgucuuaua

SEQ ID NO: 2025450 - RNA, 19 nt, Homo sapiens
  misc_RNA (1)...(19): siRNA sense strand
ccacuugaccuugcacaua

SEQ ID NO: 2025451 - RNA, 19 nt, Homo sapiens
  misc_RNA (1)...(19): siRNA sense strand
ccaauggcuuaaugauauu

SEQ ID NO: 2025452 - RNA, 19 nt, Homo sapiens
  misc_RNA (1)...(19): siRNA sense strand
agaaaugcgugcucagaau

SEQ ID NO: 2025453 - RNA, 19 nt, Homo sapiens
  misc_RNA (1)...(19): siRNA sense strand
gcaaccagcaccagaugaa

SEQ ID NO: 2025454 - RNA, 19 nt, Homo sapiens
  misc_RNA (1)...(19): siRNA sense strand
gcaggaggccuucgcacaa

SEQ ID NO: 2025455 - RNA, 19 nt, Homo sapiens
  misc_RNA (1)...(19): siRNA sense strand
gaagcugagccaugcaauu

SEQ ID NO: 2025456 - RNA, 19 nt, Homo sapiens
  misc_RNA (1)...(19): siRNA sense strand
gagaagaggcagcuguuca

SEQ ID NO: 2025457 - RNA, 19 nt, Homo sapiens
  misc_RNA (1)...(19): siRNA sense strand
cgagacaauggccuuaaua

SEQ ID NO: 2025458 - RNA, 19 nt, Homo sapiens
  misc_RNA (1)...(19): siRNA sense strand
cccacugacuugagcuuua

SEQ ID NO: 2025459 - RNA, 19 nt, Homo sapiens
  misc_RNA (1)...(19): siRNA sense strand
gaacaagcgccuuccuucu

SEQ ID NO: 2025460 - RNA, 19 nt, Homo sapiens
  misc_RNA (1)...(19): siRNA sense strand
uuaauacacuggaccauac

SEQ ID NO: 2025461 - RNA, 19 nt, Homo sapiens
  misc_RNA (1)...(19): siRNA sense strand
gcaaaggaaggaugaacug

SEQ ID NO: 2025462 - RNA, 19 nt, Homo sapiens
  misc_RNA (1)...(19): siRNA sense strand
cacuugaccuugcacauau

SEQ ID NO: 2025463 - RNA, 19 nt, Homo sapiens
  misc_RNA (1)...(19): siRNA sense strand
gaaaccacuugaccuugca

SEQ ID NO: 2025464 - RNA, 19 nt, Homo sapiens
  misc_RNA (1)...(19): siRNA sense strand
cagagaaagauaaugcuaa

SEQ ID NO: 2025465 - RNA, 19 nt, Homo sapiens
  misc_RNA (1)...(19): siRNA sense strand
ccaaauuaguguggaacaa

SEQ ID NO: 2025466 - RNA, 19 nt, Homo sapiens
  misc_RNA (1)...(19): siRNA sense strand
gaacuggagcagaggaugu

SEQ ID NO: 2025467 - RNA, 19 nt, Homo sapiens
  misc_RNA (1)...(19): siRNA sense strand
ggaacaagcggaagaccau

SEQ ID NO: 2025468 - RNA, 19 nt, Homo sapiens
  misc_RNA (1)...(19): siRNA sense strand
uuacagaacagccugcaaa

SEQ ID NO: 2025469 - RNA, 19 nt, Homo sapiens
  misc_RNA (1)...(19): siRNA sense strand
aggcagcuguucauagaaa

SEQ ID NO: 2025470 - RNA, 19 nt, Homo sapiens
  misc_RNA (1)...(19): siRNA sense strand
ugaaggaaguucugaagcu

SEQ ID NO: 2025471 - RNA, 19 nt, Homo sapiens
  misc_RNA (1)...(19): siRNA sense strand
cgaggcaaguugacgguau

SEQ ID NO: 2025472 - RNA, 19 nt, Homo sapiens
  misc_RNA (1)...(19): siRNA sense strand
ggaacaccgucuuauagcu

SEQ ID NO: 2025473 - RNA, 19 nt, Homo sapiens
  misc_RNA (1)...(19): siRNA sense strand
gcaauuaguaaaucuuugg

SEQ ID NO: 2025474 - RNA, 19 nt, Homo sapiens
  misc_RNA (1)...(19): siRNA sense strand
gcugagccaugcaauuagu

SEQ ID NO: 2025475 - RNA, 19 nt, Homo sapiens
  misc_RNA (1)...(19): siRNA sense strand
acaauggccuuaauacacu

SEQ ID NO: 2025476 - RNA, 19 nt, Homo sapiens
  misc_RNA (1)...(19): siRNA sense strand
gaagggccaucuuuugguu

SEQ ID NO: 2025477 - RNA, 19 nt, Homo sapiens
  misc_RNA (1)...(19): siRNA sense strand
cuccucaacuuuaugauug

SEQ ID NO: 2025478 - RNA, 19 nt, Homo sapiens
  misc_RNA (1)...(19): siRNA sense strand
gacaauggccuuaauacac

SEQ ID NO: 2025479 - RNA, 19 nt, Homo sapiens
  misc_RNA (1)...(19): siRNA sense strand
caaauuaguguggaacaau

SEQ ID NO: 2025480 - RNA, 19 nt, Homo sapiens
  misc_RNA (1)...(19): siRNA sense strand
ucaccaaauuaguguggaa

SEQ ID NO: 2025481 - RNA, 19 nt, Homo sapiens
  misc_RNA (1)...(19): siRNA sense strand
acuaucaacuuacagaaca

SEQ ID NO: 2025482 - RNA, 19 nt, Homo sapiens
  misc_RNA (1)...(19): siRNA sense strand
agaacagccugcaaauuac

SEQ ID NO: 2025483 - RNA, 19 nt, Homo sapiens
  misc_RNA (1)...(19): siRNA sense strand
gcucccaacagcugucuuu

SEQ ID NO: 2025484 - RNA, 19 nt, Homo sapiens
  misc_RNA (1)...(19): siRNA sense strand
uuagcaaguuugaccaguu

SEQ ID NO: 2025485 - RNA, 19 nt, Homo sapiens
  misc_RNA (1)...(19): siRNA sense strand
aacaagcgccuuccuucua

SEQ ID NO: 2025486 - RNA, 19 nt, Homo sapiens
  misc_RNA (1)...(19): siRNA sense strand
aaauuaguguggaacaauc

SEQ ID NO: 2025487 - RNA, 19 nt, Homo sapiens
  misc_RNA (1)...(19): siRNA sense strand
gaccauaccaccgagauca

SEQ ID NO: 2025488 - RNA, 19 nt, Homo sapiens
  misc_RNA (1)...(19): siRNA sense strand
gccaugcaauuaguaaauc

SEQ ID NO: 2025489 - RNA, 19 nt, Homo sapiens
  misc_RNA (1)...(19): siRNA sense strand
uuggaaaucuccugcaaag

SEQ ID NO: 2025490 - RNA, 19 nt, Homo sapiens
  misc_RNA (1)...(19): siRNA sense strand
ccgagacaauggccuuaau

SEQ ID NO: 2025491 - RNA, 19 nt, Homo sapiens
  misc_RNA (1)...(19): siRNA sense strand
ugacucguccucccacuga

SEQ ID NO: 2025492 - RNA, 19 nt, Homo sapiens
  misc_RNA (1)...(19): siRNA sense strand
ugaaugacaccaugguuag

SEQ ID NO: 2025493 - RNA, 19 nt, Homo sapiens
  misc_RNA (1)...(19): siRNA sense strand
gaugucauacgacuaucaa

SEQ ID NO: 2025494 - RNA, 19 nt, Homo sapiens
  misc_RNA (1)...(19): siRNA sense strand
gagacaauggccuuaauac

SEQ ID NO: 2025495 - RNA, 19 nt, Homo sapiens
  misc_RNA (1)...(19): siRNA sense strand
cuggacaaauugagauaug

SEQ ID NO: 2025496 - RNA, 19 nt, Homo sapiens
  misc_RNA (1)...(19): siRNA sense strand
uagaaaugcgugcucagaa

SEQ ID NO: 2025497 - RNA, 19 nt, Homo sapiens
  misc_RNA (1)...(19): siRNA sense strand
agagaaaccacuugaccuu

SEQ ID NO: 2025498 - RNA, 19 nt, Homo sapiens
  misc_RNA (1)...(19): siRNA sense strand
auacgacuaucaacuuaca

SEQ ID NO: 2025499 - RNA, 19 nt, Homo sapiens
  misc_RNA (1)...(19): siRNA sense strand
ccagaugucagauuccaau

SEQ ID NO: 2025500 - RNA, 19 nt, Homo sapiens
  misc_RNA (1)...(19): siRNA sense strand
gaauuuugaugucauacga

SEQ ID NO: 2025501 - RNA, 19 nt, Homo sapiens
  misc_RNA (1)...(19): siRNA sense strand
ugaccuugcacauauaguu

SEQ ID NO: 2025502 - RNA, 19 nt, Homo sapiens
  misc_RNA (1)...(19): siRNA sense strand
acaagcgccuuccuucuac

SEQ ID NO: 2025503 - RNA, 19 nt, Homo sapiens
  misc_RNA (1)...(19): siRNA sense strand
ucucccagaugucagauuc

SEQ ID NO: 2025504 - RNA, 19 nt, Homo sapiens
  misc_RNA (1)...(19): siRNA sense strand
cuuaauacacuggaccaua

SEQ ID NO: 2025505 - RNA, 19 nt, Homo sapiens
  misc_RNA (1)...(19): siRNA sense strand
gaugccaacaaacaacaaa

SEQ ID NO: 2025506 - RNA, 19 nt, Homo sapiens
  misc_RNA (1)...(19): siRNA sense strand
augaaugacaccaugguua

SEQ ID NO: 2025507 - RNA, 19 nt, Homo sapiens
  misc_RNA (1)...(19): siRNA sense strand
gacgguauuuucaguuaaa

SEQ ID NO: 2025508 - RNA, 19 nt, Homo sapiens
  misc_RNA (1)...(19): siRNA sense strand
ucuccuccaucuacuauca

SEQ ID NO: 2025509 - RNA, 19 nt, Homo sapiens
  misc_RNA (1)...(19): siRNA sense strand
cagagaagaggcagcuguu

SEQ ID NO: 2025510 - RNA, 19 nt, Homo sapiens
  misc_RNA (1)...(19): siRNA sense strand
cagcagagaaagauaaugc

SEQ ID NO: 2025511 - RNA, 19 nt, Homo sapiens
  misc_RNA (1)...(19): siRNA sense strand
agauuccaauggcuuaaug

SEQ ID NO: 2025512 - RNA, 19 nt, Homo sapiens
  misc_RNA (1)...(19): siRNA sense strand
gcuuauugcagaacuggaa

SEQ ID NO: 2025513 - RNA, 19 nt, Homo sapiens
  misc_RNA (1)...(19): siRNA sense strand
ccaacaaacaacaaagaca

SEQ ID NO: 2025514 - RNA, 19 nt, Homo sapiens
  misc_RNA (1)...(19): siRNA sense strand
gucauacgacuaucaacuu

SEQ ID NO: 2025515 - RNA, 19 nt, Homo sapiens
  misc_RNA (1)...(19): siRNA sense strand
gagccaugcaauuaguaaa

SEQ ID NO: 2025516 - RNA, 19 nt, Homo sapiens
  misc_RNA (1)...(19): siRNA sense strand
ugaggaaagugggaacaag

SEQ ID NO: 2025517 - RNA, 19 nt, Homo sapiens
  misc_RNA (1)...(19): siRNA sense strand
agacaauggccuuaauaca

SEQ ID NO: 2025518 - RNA, 19 nt, Homo sapiens
  misc_RNA (1)...(19): siRNA sense strand
gcaaccagagaaaccacuu

SEQ ID NO: 2025519 - RNA, 19 nt, Homo sapiens
  misc_RNA (1)...(19): siRNA sense strand
uauguuagcaaccaugugu

SEQ ID NO: 2025520 - RNA, 19 nt, Homo sapiens
  misc_RNA (1)...(19): siRNA sense strand
uugcagaacuggaaaacaa

SEQ ID NO: 2025521 - RNA, 19 nt, Homo sapiens
  misc_RNA (1)...(19): siRNA sense strand
ggaaauacgucccaagagu

SEQ ID NO: 2025522 - RNA, 19 nt, Homo sapiens
  misc_RNA (1)...(19): siRNA sense strand
gaaauggcauggagacaau

SEQ ID NO: 2025523 - RNA, 19 nt, Homo sapiens
  misc_RNA (1)...(19): siRNA sense strand
ucaaaggacugcaaagaau

SEQ ID NO: 2025524 - RNA, 19 nt, Homo sapiens
  misc_RNA (1)...(19): siRNA sense strand
gggaugaucuucucaaagg

SEQ ID NO: 2025525 - RNA, 19 nt, Homo sapiens
  misc_RNA (1)...(19): siRNA sense strand
gaaauacgucccaagaguu

SEQ ID NO: 2025526 - RNA, 19 nt, Homo sapiens
  misc_RNA (1)...(19): siRNA sense strand
caagacaccauuucucaaa

SEQ ID NO: 2025527 - RNA, 19 nt, Homo sapiens
  misc_RNA (1)...(19): siRNA sense strand
cgagggacaugcuggauga

SEQ ID NO: 2025528 - RNA, 19 nt, Homo sapiens
  misc_RNA (1)...(19): siRNA sense strand
gugcagcccuuguacagaa

SEQ ID NO: 2025529 - RNA, 19 nt, Homo sapiens
  misc_RNA (1)...(19): siRNA sense strand
ggaagaaagauuaggaaau

SEQ ID NO: 2025530 - RNA, 19 nt, Homo sapiens
  misc_RNA (1)...(19): siRNA sense strand
ggaggacuguaaauauuuc

SEQ ID NO: 2025531 - RNA, 19 nt, Homo sapiens
  misc_RNA (1)...(19): siRNA sense strand
gucgugagcuguauaacaa

SEQ ID NO: 2025532 - RNA, 19 nt, Homo sapiens
  misc_RNA (1)...(19): siRNA sense strand
gggacaugcuggaugauga

SEQ ID NO: 2025533 - RNA, 19 nt, Homo sapiens
  misc_RNA (1)...(19): siRNA sense strand
gcuaccaguucuauaaaga

SEQ ID NO: 2025534 - RNA, 19 nt, Homo sapiens
  misc_RNA (1)...(19): siRNA sense strand
cuaccaugcugaagauaaa

SEQ ID NO: 2025535 - RNA, 19 nt, Homo sapiens
  misc_RNA (1)...(19): siRNA sense strand
guaaauauuucugccuuag

SEQ ID NO: 2025536 - RNA, 19 nt, Homo sapiens
  misc_RNA (1)...(19): siRNA sense strand
acaagaagaccuggaauuu

SEQ ID NO: 2025537 - RNA, 19 nt, Homo sapiens
  misc_RNA (1)...(19): siRNA sense strand
ugggaggacuguaaauauu

SEQ ID NO: 2025538 - RNA, 19 nt, Homo sapiens
  misc_RNA (1)...(19): siRNA sense strand
gggaggacuguaaauauuu

SEQ ID NO: 2025539 - RNA, 19 nt, Homo sapiens
  misc_RNA (1)...(19): siRNA sense strand
caggaagucugcagcaugu

SEQ ID NO: 2025540 - RNA, 19 nt, Homo sapiens
  misc_RNA (1)...(19): siRNA sense strand
caagaagaccuggaauuug

SEQ ID NO: 2025541 - RNA, 19 nt, Homo sapiens
  misc_RNA (1)...(19): siRNA sense strand
ggaaauggcauggagacaa

SEQ ID NO: 2025542 - RNA, 19 nt, Homo sapiens
  misc_RNA (1)...(19): siRNA sense strand
caaaggacugcaaagaauu

SEQ ID NO: 2025543 - RNA, 19 nt, Homo sapiens
  misc_RNA (1)...(19): siRNA sense strand
guacagaacaauggaaaug

SEQ ID NO: 2025544 - RNA, 19 nt, Homo sapiens
  misc_RNA (1)...(19): siRNA sense strand
caaacaagaagaccuggaa

SEQ ID NO: 2025545 - RNA, 19 nt, Homo sapiens
  misc_RNA (1)...(19): siRNA sense strand
aaauauuucugccuuagug

SEQ ID NO: 2025546 - RNA, 19 nt, Homo sapiens
  misc_RNA (1)...(19): siRNA sense strand
aagaagaccuggaauuugc

SEQ ID NO: 2025547 - RNA, 19 nt, Homo sapiens
  misc_RNA (1)...(19): siRNA sense strand
cuucaaguccagaauauaa

SEQ ID NO: 2025548 - RNA, 19 nt, Homo sapiens
  misc_RNA (1)...(19): siRNA sense strand
gaauuugccgcgucucaga

SEQ ID NO: 2025549 - RNA, 19 nt, Homo sapiens
  misc_RNA (1)...(19): siRNA sense strand
gaauugaagcguugugucu

SEQ ID NO: 2025550 - RNA, 19 nt, Homo sapiens
  misc_RNA (1)...(19): siRNA sense strand
uaccagcucuccaauacug

SEQ ID NO: 2025551 - RNA, 19 nt, Homo sapiens
  misc_RNA (1)...(19): siRNA sense strand
aaaguugggaggacuguaa

SEQ ID NO: 2025552 - RNA, 19 nt, Homo sapiens
  misc_RNA (1)...(19): siRNA sense strand
gacaauugcuaccaguucu

SEQ ID NO: 2025553 - RNA, 19 nt, Homo sapiens
  misc_RNA (1)...(19): siRNA sense strand
guugcaaucucuucaaguc

SEQ ID NO: 2025554 - RNA, 19 nt, Homo sapiens
  misc_RNA (1)...(19): siRNA sense strand
gaugucaccagcccaagaa

SEQ ID NO: 2025555 - RNA, 19 nt, Homo sapiens
  misc_RNA (1)...(19): siRNA sense strand
ucaaggcucugccacaacu

SEQ ID NO: 2025556 - RNA, 19 nt, Homo sapiens
  misc_RNA (1)...(19): siRNA sense strand
guugggaggacuguaaaua

SEQ ID NO: 2025557 - RNA, 19 nt, Homo sapiens
  misc_RNA (1)...(19): siRNA sense strand
gaguugcaaucucuucaag

SEQ ID NO: 2025558 - RNA, 19 nt, Homo sapiens
  misc_RNA (1)...(19): siRNA sense strand
ggacugcaaagaauugaag

SEQ ID NO: 2025559 - RNA, 19 nt, Homo sapiens
  misc_RNA (1)...(19): siRNA sense strand
ggaugaucuucucaaagga

SEQ ID NO: 2025560 - RNA, 19 nt, Homo sapiens
  misc_RNA (1)...(19): siRNA sense strand
ucucaaggcucugccacaa

SEQ ID NO: 2025561 - RNA, 19 nt, Homo sapiens
  misc_RNA (1)...(19): siRNA sense strand
uaggaaauacgucccaaga

SEQ ID NO: 2025562 - RNA, 19 nt, Homo sapiens
  misc_RNA (1)...(19): siRNA sense strand
uauaaagcuugcaggaagu

SEQ ID NO: 2025563 - RNA, 19 nt, Homo sapiens
  misc_RNA (1)...(19): siRNA sense strand
gucaagacaccauuucuca

SEQ ID NO: 2025564 - RNA, 19 nt, Homo sapiens
  misc_RNA (1)...(19): siRNA sense strand
aaaggacugcaaagaauug

SEQ ID NO: 2025565 - RNA, 19 nt, Homo sapiens
  misc_RNA (1)...(19): siRNA sense strand
gauaaacaaacaagaagac

SEQ ID NO: 2025566 - RNA, 19 nt, Homo sapiens
  misc_RNA (1)...(19): siRNA sense strand
aaauacgucccaagaguug

SEQ ID NO: 2025567 - RNA, 19 nt, Homo sapiens
  misc_RNA (1)...(19): siRNA sense strand
gaaagauuaggaaauacgu

SEQ ID NO: 2025568 - RNA, 19 nt, Homo sapiens
  misc_RNA (1)...(19): siRNA sense strand
uuaaugggaugaucuucuc

SEQ ID NO: 2025569 - RNA, 19 nt, Homo sapiens
  misc_RNA (1)...(19): siRNA sense strand
caaauggaagaaagauuag

SEQ ID NO: 2025570 - RNA, 19 nt, Homo sapiens
  misc_RNA (1)...(19): siRNA sense strand
ggacaugcuggaugaugau

SEQ ID NO: 2025571 - RNA, 19 nt, Homo sapiens
  misc_RNA (1)...(19): siRNA sense strand
acuaccagcucuccaauac

SEQ ID NO: 2025572 - RNA, 19 nt, Homo sapiens
  misc_RNA (1)...(19): siRNA sense strand
ggaauggugaagccagaga

SEQ ID NO: 2025573 - RNA, 19 nt, Homo sapiens
  misc_RNA (1)...(19): siRNA sense strand
gagagaagggcaggaaugg

SEQ ID NO: 2025574 - RNA, 19 nt, Homo sapiens
  misc_RNA (1)...(19): siRNA sense strand
gcccugacccugcugacuu

SEQ ID NO: 2025575 - RNA, 19 nt, Homo sapiens
  misc_RNA (1)...(19): siRNA sense strand
ugagagaagggcaggaaug

SEQ ID NO: 2025576 - RNA, 19 nt, Homo sapiens
  misc_RNA (1)...(19): siRNA sense strand
cccugacccugcugacuuu

SEQ ID NO: 2025577 - RNA, 19 nt, Homo sapiens
  misc_RNA (1)...(19): siRNA sense strand
gaaccccuuucacuucuga

SEQ ID NO: 2025578 - RNA, 19 nt, Homo sapiens
  misc_RNA (1)...(19): siRNA sense strand
gagacaauugcuaccaguu

SEQ ID NO: 2025579 - RNA, 19 nt, Homo sapiens
  misc_RNA (1)...(19): siRNA sense strand
ucucuucaaguccagaaua

SEQ ID NO: 2025580 - RNA, 19 nt, Homo sapiens
  misc_RNA (1)...(19): siRNA sense strand
ugacccugcugacuuugug

SEQ ID NO: 2025581 - RNA, 19 nt, Homo sapiens
  misc_RNA (1)...(19): siRNA sense strand
uaccaguucuauaaagaca

SEQ ID NO: 2025582 - RNA, 19 nt, Homo sapiens
  misc_RNA (1)...(19): siRNA sense strand
ucucaaaggacugcaaaga

SEQ ID NO: 2025583 - RNA, 19 nt, Homo sapiens
  misc_RNA (1)...(19): siRNA sense strand
aacaagaagaccuggaauu

SEQ ID NO: 2025584 - RNA, 19 nt, Homo sapiens
  misc_RNA (1)...(19): siRNA sense strand
gaagggcaggaauggugaa

SEQ ID NO: 2025585 - RNA, 19 nt, Homo sapiens
  misc_RNA (1)...(19): siRNA sense strand
cucaaaggacugcaaagaa

SEQ ID NO: 2025586 - RNA, 19 nt, Homo sapiens
  misc_RNA (1)...(19): siRNA sense strand
acucuaccaugcugaagau

SEQ ID NO: 2025587 - RNA, 19 nt, Homo sapiens
  misc_RNA (1)...(19): siRNA sense strand
ucaagacaccauuucucaa

SEQ ID NO: 2025588 - RNA, 19 nt, Homo sapiens
  misc_RNA (1)...(19): siRNA sense strand
caagaagcagagacugugu

SEQ ID NO: 2025589 - RNA, 19 nt, Homo sapiens
  misc_RNA (1)...(19): siRNA sense strand
ggucaagacaccauuucuc

SEQ ID NO: 2025590 - RNA, 19 nt, Homo sapiens
  misc_RNA (1)...(19): siRNA sense strand
guacuaccagcucuccaau

SEQ ID NO: 2025591 - RNA, 19 nt, Homo sapiens
  misc_RNA (1)...(19): siRNA sense strand
agacaauugcuaccaguuc

SEQ ID NO: 2025592 - RNA, 19 nt, Homo sapiens
  misc_RNA (1)...(19): siRNA sense strand
caauugcuaccaguucuau

SEQ ID NO: 2025593 - RNA, 19 nt, Homo sapiens
  misc_RNA (1)...(19): siRNA sense strand
uggaagaaagauuaggaaa

SEQ ID NO: 2025594 - RNA, 19 nt, Homo sapiens
  misc_RNA (1)...(19): siRNA sense strand
ucuaccaugcugaagauaa

SEQ ID NO: 2025595 - RNA, 19 nt, Homo sapiens
  misc_RNA (1)...(19): siRNA sense strand
cgugagcuguauaacaaag

SEQ ID NO: 2025596 - RNA, 19 nt, Homo sapiens
  misc_RNA (1)...(19): siRNA sense strand
gacuguguggccauccuua

SEQ ID NO: 2025597 - RNA, 19 nt, Homo sapiens
  misc_RNA (1)...(19): siRNA sense strand
aauauaaagcuugcaggaa

SEQ ID NO: 2025598 - RNA, 19 nt, Homo sapiens
  misc_RNA (1)...(19): siRNA sense strand
gcuuggugcugcugauagg

SEQ ID NO: 2025599 - RNA, 19 nt, Homo sapiens
  misc_RNA (1)...(19): siRNA sense strand
gcucuccaauacuggucaa

SEQ ID NO: 2025600 - RNA, 19 nt, Homo sapiens
  misc_RNA (1)...(19): siRNA sense strand
cacaggugcagcccuugua

SEQ ID NO: 2025601 - RNA, 19 nt, Homo sapiens
  misc_RNA (1)...(19): siRNA sense strand
gugaagagcuccagagaaa

SEQ ID NO: 2025602 - RNA, 19 nt, Homo sapiens
  misc_RNA (1)...(19): siRNA sense strand
gaagagcuccagagaaaua

SEQ ID NO: 2025603 - RNA, 19 nt, Homo sapiens
  misc_RNA (1)...(19): siRNA sense strand
ggacagcuguuauuuccua

SEQ ID NO: 2025604 - RNA, 19 nt, Homo sapiens
  misc_RNA (1)...(19): siRNA sense strand
caaauuaugucgugagcua

SEQ ID NO: 2025605 - RNA, 19 nt, Homo sapiens
  misc_RNA (1)...(19): siRNA sense strand
gggauuaucuccugaagaa

SEQ ID NO: 2025606 - RNA, 19 nt, Homo sapiens
  misc_RNA (1)...(19): siRNA sense strand
ggagauggauuuggcauaa

SEQ ID NO: 2025607 - RNA, 19 nt, Homo sapiens
  misc_RNA (1)...(19): siRNA sense strand
gcaagcauguuucacguaa

SEQ ID NO: 2025608 - RNA, 19 nt, Homo sapiens
  misc_RNA (1)...(19): siRNA sense strand
ucacguaacuuugaagaua

SEQ ID NO: 2025609 - RNA, 19 nt, Homo sapiens
  misc_RNA (1)...(19): siRNA sense strand
gcaccugacuuaaauaaca

SEQ ID NO: 2025610 - RNA, 19 nt, Homo sapiens
  misc_RNA (1)...(19): siRNA sense strand
gaacaagagcacaaaugua

SEQ ID NO: 2025611 - RNA, 19 nt, Homo sapiens
  misc_RNA (1)...(19): siRNA sense strand
aacaauagccaccaaauua

SEQ ID NO: 2025612 - RNA, 19 nt, Homo sapiens
  misc_RNA (1)...(19): siRNA sense strand
gaaacgcaccugacuuaaa

SEQ ID NO: 2025613 - RNA, 19 nt, Homo sapiens
  misc_RNA (1)...(19): siRNA sense strand
aaacgcaccugacuuaaau

SEQ ID NO: 2025614 - RNA, 19 nt, Homo sapiens
  misc_RNA (1)...(19): siRNA sense strand
aaacauggcaggagaguaa

SEQ ID NO: 2025615 - RNA, 19 nt, Homo sapiens
  misc_RNA (1)...(19): siRNA sense strand
gagaguggauaauauaauc

SEQ ID NO: 2025616 - RNA, 19 nt, Homo sapiens
  misc_RNA (1)...(19): siRNA sense strand
caacugaugaguaacauga

SEQ ID NO: 2025617 - RNA, 19 nt, Homo sapiens
  misc_RNA (1)...(19): siRNA sense strand
aagaaacgcaccugacuua

SEQ ID NO: 2025618 - RNA, 19 nt, Homo sapiens
  misc_RNA (1)...(19): siRNA sense strand
guaugagaguggauaauau

SEQ ID NO: 2025619 - RNA, 19 nt, Homo sapiens
  misc_RNA (1)...(19): siRNA sense strand
gguaugagaguggauaaua

SEQ ID NO: 2025620 - RNA, 19 nt, Homo sapiens
  misc_RNA (1)...(19): siRNA sense strand
gcuguuauuuccuaaguga

SEQ ID NO: 2025621 - RNA, 19 nt, Homo sapiens
  misc_RNA (1)...(19): siRNA sense strand
gcaaagaacaagagcacaa

SEQ ID NO: 2025622 - RNA, 19 nt, Homo sapiens
  misc_RNA (1)...(19): siRNA sense strand
cagcuugguucuacauauu

SEQ ID NO: 2025623 - RNA, 19 nt, Homo sapiens
  misc_RNA (1)...(19): siRNA sense strand
aacaagagcacaaauguaa

SEQ ID NO: 2025624 - RNA, 19 nt, Homo sapiens
  misc_RNA (1)...(19): siRNA sense strand
gcagcuugguucuacauau

SEQ ID NO: 2025625 - RNA, 19 nt, Homo sapiens
  misc_RNA (1)...(19): siRNA sense strand
gaguagaucauaugacuau

SEQ ID NO: 2025626 - RNA, 19 nt, Homo sapiens
  misc_RNA (1)...(19): siRNA sense strand
ccagcagccuuguuucuga

SEQ ID NO: 2025627 - RNA, 19 nt, Homo sapiens
  misc_RNA (1)...(19): siRNA sense strand
augaauaucuccaacaaga

SEQ ID NO: 2025628 - RNA, 19 nt, Homo sapiens
  misc_RNA (1)...(19): siRNA sense strand
ccaccacacugcaaacaau

SEQ ID NO: 2025629 - RNA, 19 nt, Homo sapiens
  misc_RNA (1)...(19): siRNA sense strand
cagaguagaucauaugacu

SEQ ID NO: 2025630 - RNA, 19 nt, Homo sapiens
  misc_RNA (1)...(19): siRNA sense strand
gauuaucuccugaagaaga

SEQ ID NO: 2025631 - RNA, 19 nt, Homo sapiens
  misc_RNA (1)...(19): siRNA sense strand
ccagcucccucucauguau

SEQ ID NO: 2025632 - RNA, 19 nt, Homo sapiens
  misc_RNA (1)...(19): siRNA sense strand
agaaugauaugugagaaga

SEQ ID NO: 2025633 - RNA, 19 nt, Homo sapiens
  misc_RNA (1)...(19): siRNA sense strand
aaacaauagccaccaaauu

SEQ ID NO: 2025634 - RNA, 19 nt, Homo sapiens
  misc_RNA (1)...(19): siRNA sense strand
gagcuccagagaaauauuu

SEQ ID NO: 2025635 - RNA, 19 nt, Homo sapiens
  misc_RNA (1)...(19): siRNA sense strand
gaucuucaauuccagaacu

SEQ ID NO: 2025636 - RNA, 19 nt, Homo sapiens
  misc_RNA (1)...(19): siRNA sense strand
gccagccuguugaagauaa

SEQ ID NO: 2025637 - RNA, 19 nt, Homo sapiens
  misc_RNA (1)...(19): siRNA sense strand
gcaaacaauagccaccaaa

SEQ ID NO: 2025638 - RNA, 19 nt, Homo sapiens
  misc_RNA (1)...(19): siRNA sense strand
caaagaacaagagcacaaa

SEQ ID NO: 2025639 - RNA, 19 nt, Homo sapiens
  misc_RNA (1)...(19): siRNA sense strand
guagaucauaugacuauug

SEQ ID NO: 2025640 - RNA, 19 nt, Homo sapiens
  misc_RNA (1)...(19): siRNA sense strand
uuaugcagaucuucaauuc

SEQ ID NO: 2025641 - RNA, 19 nt, Homo sapiens
  misc_RNA (1)...(19): siRNA sense strand
ggcauaaggacagcuguua

SEQ ID NO: 2025642 - RNA, 19 nt, Homo sapiens
  misc_RNA (1)...(19): siRNA sense strand
acaugaauaucuccaacaa

SEQ ID NO: 2025643 - RNA, 19 nt, Homo sapiens
  misc_RNA (1)...(19): siRNA sense strand
gcauguuucacguaacuuu

SEQ ID NO: 2025644 - RNA, 19 nt, Homo sapiens
  misc_RNA (1)...(19): siRNA sense strand
ggccugugcugcucagaau

SEQ ID NO: 2025645 - RNA, 19 nt, Homo sapiens
  misc_RNA (1)...(19): siRNA sense strand
caauagccaccaaauuaug

SEQ ID NO: 2025646 - RNA, 19 nt, Homo sapiens
  misc_RNA (1)...(19): siRNA sense strand
uuccagaacuccagugaga

SEQ ID NO: 2025647 - RNA, 19 nt, Homo sapiens
  misc_RNA (1)...(19): siRNA sense strand
ccuaagugaugauguccaa

SEQ ID NO: 2025648 - RNA, 19 nt, Homo sapiens
  misc_RNA (1)...(19): siRNA sense strand
ugaguaacaugaauaucuc

SEQ ID NO: 2025649 - RNA, 19 nt, Homo sapiens
  misc_RNA (1)...(19): siRNA sense strand
gugagaagauggccaaucc

SEQ ID NO: 2025650 - RNA, 19 nt, Homo sapiens
  misc_RNA (1)...(19): siRNA sense strand
caaacaauagccaccaaau

SEQ ID NO: 2025651 - RNA, 19 nt, Homo sapiens
  misc_RNA (1)...(19): siRNA sense strand
cucuacaacugaugaguaa

SEQ ID NO: 2025652 - RNA, 19 nt, Homo sapiens
  misc_RNA (1)...(19): siRNA sense strand
aaugauaugugagaagaug

SEQ ID NO: 2025653 - RNA, 19 nt, Homo sapiens
  misc_RNA (1)...(19): siRNA sense strand
uagaucauaugacuauugg

SEQ ID NO: 2025654 - RNA, 19 nt, Homo sapiens
  misc_RNA (1)...(19): siRNA sense strand
acaauagccaccaaauuau

SEQ ID NO: 2025655 - RNA, 19 nt, Homo sapiens
  misc_RNA (1)...(19): siRNA sense strand
cagcuguuauuuccuaagu

SEQ ID NO: 2025656 - RNA, 19 nt, Homo sapiens
  misc_RNA (1)...(19): siRNA sense strand
cugccuggguuauaagaaa

SEQ ID NO: 2025657 - RNA, 19 nt, Homo sapiens
  misc_RNA (1)...(19): siRNA sense strand
uaaggacagcuguuauuuc

SEQ ID NO: 2025658 - RNA, 19 nt, Homo sapiens
  misc_RNA (1)...(19): siRNA sense strand
ccagaacuccagugagaug

SEQ ID NO: 2025659 - RNA, 19 nt, Homo sapiens
  misc_RNA (1)...(19): siRNA sense strand
cagaaugccagccuguuga

SEQ ID NO: 2025660 - RNA, 19 nt, Homo sapiens
  misc_RNA (1)...(19): siRNA sense strand
agaacaagagcacaaaugu

SEQ ID NO: 2025661 - RNA, 19 nt, Homo sapiens
  misc_RNA (1)...(19): siRNA sense strand
uaagaaacgcaccugacuu

SEQ ID NO: 2025662 - RNA, 19 nt, Homo sapiens
  misc_RNA (1)...(19): siRNA sense strand
guuauuuccuaagugauga

SEQ ID NO: 2025663 - RNA, 19 nt, Homo sapiens
  misc_RNA (1)...(19): siRNA sense strand
gacagcuguuauuuccuaa

SEQ ID NO: 2025664 - RNA, 19 nt, Homo sapiens
  misc_RNA (1)...(19): siRNA sense strand
cacguaacuuugaagauag

SEQ ID NO: 2025665 - RNA, 19 nt, Homo sapiens
  misc_RNA (1)...(19): siRNA sense strand
ucagaaugccagccuguug

SEQ ID NO: 2025666 - RNA, 19 nt, Homo sapiens
  misc_RNA (1)...(19): siRNA sense strand
gaacaaacuacaaaacauc

SEQ ID NO: 2025667 - RNA, 19 nt, Homo sapiens
  misc_RNA (1)...(19): siRNA sense strand
gagauggauuuggcauaag

SEQ ID NO: 2025668 - RNA, 19 nt, Homo sapiens
  misc_RNA (1)...(19): siRNA sense strand
aaggacagcuguuauuucc

SEQ ID NO: 2025669 - RNA, 19 nt, Homo sapiens
  misc_RNA (1)...(19): siRNA sense strand
ucucuacaacugaugagua

SEQ ID NO: 2025670 - RNA, 19 nt, Homo sapiens
  misc_RNA (1)...(19): siRNA sense strand
cuacaacugaugaguaaca

SEQ ID NO: 2025671 - RNA, 19 nt, Homo sapiens
  misc_RNA (1)...(19): siRNA sense strand
caccacacugcaaacaaua

SEQ ID NO: 2025672 - RNA, 19 nt, Homo sapiens
  misc_RNA (1)...(19): siRNA sense strand
ugccuucuguugcucauug

SEQ ID NO: 2025673 - RNA, 19 nt, Homo sapiens
  misc_RNA (1)...(19): siRNA sense strand
augcagaucuucaauucca

SEQ ID NO: 2025674 - RNA, 19 nt, Homo sapiens
  misc_RNA (1)...(19): siRNA sense strand
aauuaugucgugagcuaua

SEQ ID NO: 2025675 - RNA, 19 nt, Homo sapiens
  misc_RNA (1)...(19): siRNA sense strand
acuauuggcugggauuauc

SEQ ID NO: 2025676 - RNA, 19 nt, Homo sapiens
  misc_RNA (1)...(19): siRNA sense strand
ggcaagcauguuucacgua

SEQ ID NO: 2025677 - RNA, 19 nt, Homo sapiens
  misc_RNA (1)...(19): siRNA sense strand
cugaugaguaacaugaaua

SEQ ID NO: 2025678 - RNA, 19 nt, Homo sapiens
  misc_RNA (1)...(19): siRNA sense strand
caccugacuuaaauaacau

SEQ ID NO: 2025679 - RNA, 19 nt, Homo sapiens
  misc_RNA (1)...(19): siRNA sense strand
aagcauguuucacguaacu

SEQ ID NO: 2025680 - RNA, 19 nt, Homo sapiens
  misc_RNA (1)...(19): siRNA sense strand
ccagccuguugaagauaaa

SEQ ID NO: 2025681 - RNA, 19 nt, Homo sapiens
  misc_RNA (1)...(19): siRNA sense strand
aagaacaagagcacaaaug

SEQ ID NO: 2025682 - RNA, 19 nt, Homo sapiens
  misc_RNA (1)...(19): siRNA sense strand
ccaacaagaucaggaaccu

SEQ ID NO: 2025683 - RNA, 19 nt, Homo sapiens
  misc_RNA (1)...(19): siRNA sense strand
gcguccagcagccuuguuu

SEQ ID NO: 2025684 - RNA, 19 nt, Homo sapiens
  misc_RNA (1)...(19): siRNA sense strand
aaauguaagccuuguccaa

SEQ ID NO: 2025685 - RNA, 19 nt, Homo sapiens
  misc_RNA (1)...(19): siRNA sense strand
caagagcacaaauguaagc

SEQ ID NO: 2025686 - RNA, 19 nt, Homo sapiens
  misc_RNA (1)...(19): siRNA sense strand
ugacuauuggcugggauua

SEQ ID NO: 2025687 - RNA, 19 nt, Homo sapiens
  misc_RNA (1)...(19): siRNA sense strand
guaacaugaauaucuccaa

SEQ ID NO: 2025688 - RNA, 19 nt, Homo sapiens
  misc_RNA (1)...(19): siRNA sense strand
acucuucugugccuucugu

SEQ ID NO: 2025689 - RNA, 19 nt, Homo sapiens
  misc_RNA (1)...(19): siRNA sense strand
acgcaccugacuuaaauaa

SEQ ID NO: 2025690 - RNA, 19 nt, Homo sapiens
  misc_RNA (1)...(19): siRNA sense strand
cagugcagcuugguucuac

SEQ ID NO: 2025691 - RNA, 19 nt, Homo sapiens
  misc_RNA (1)...(19): siRNA sense strand
acugaugaguaacaugaau

SEQ ID NO: 2025692 - RNA, 19 nt, Homo sapiens
  misc_RNA (1)...(19): siRNA sense strand
uaagugaugauguccaaac

SEQ ID NO: 2025693 - RNA, 19 nt, Homo sapiens
  misc_RNA (1)...(19): siRNA sense strand
uuacuuaugcagaucuuca

SEQ ID NO: 2025694 - RNA, 19 nt, Homo sapiens
  misc_RNA (1)...(19): siRNA sense strand
gagauuggaauucaaguaa

SEQ ID NO: 2025695 - RNA, 19 nt, Homo sapiens
  misc_RNA (1)...(19): siRNA sense strand
uaaacuaacucgagauucu

SEQ ID NO: 2025696 - RNA, 19 nt, Homo sapiens
  misc_RNA (1)...(19): siRNA sense strand
gaagaaggagauuggaauu

SEQ ID NO: 2025697 - RNA, 19 nt, Homo sapiens
  misc_RNA (1)...(19): siRNA sense strand
gaaggagauuggaauucaa

SEQ ID NO: 2025698 - RNA, 19 nt, Homo sapiens
  misc_RNA (1)...(19): siRNA sense strand
gauguuacaccgaaagaaa

SEQ ID NO: 2025699 - RNA, 19 nt, Homo sapiens
  misc_RNA (1)...(19): siRNA sense strand
caacaugccgaccuaacua

SEQ ID NO: 2025700 - RNA, 19 nt, Homo sapiens
  misc_RNA (1)...(19): siRNA sense strand
gagagggagugaaggaugu

SEQ ID NO: 2025701 - RNA, 19 nt, Homo sapiens
  misc_RNA (1)...(19): siRNA sense strand
ggagauuggaauucaagua

SEQ ID NO: 2025702 - RNA, 19 nt, Homo sapiens
  misc_RNA (1)...(19): siRNA sense strand
agaaggagauuggaauuca

SEQ ID NO: 2025703 - RNA, 19 nt, Homo sapiens
  misc_RNA (1)...(19): siRNA sense strand
uaaagaagaaggagauugg

SEQ ID NO: 2025704 - RNA, 19 nt, Homo sapiens
  misc_RNA (1)...(19): siRNA sense strand
gugccuaccucagcgauga

SEQ ID NO: 2025705 - RNA, 19 nt, Homo sapiens
  misc_RNA (1)...(19): siRNA sense strand
gaacaggacaauggguaga

SEQ ID NO: 2025706 - RNA, 19 nt, Homo sapiens
  misc_RNA (1)...(19): siRNA sense strand
cgaccuaacuauaauugac

SEQ ID NO: 2025707 - RNA, 19 nt, Homo sapiens
  misc_RNA (1)...(19): siRNA sense strand
caaguaaauacaacuguuc

SEQ ID NO: 2025708 - RNA, 19 nt, Homo sapiens
  misc_RNA (1)...(19): siRNA sense strand
ugacaacauagaagaaaug

SEQ ID NO: 2025709 - RNA, 19 nt, Homo sapiens
  misc_RNA (1)...(19): siRNA sense strand
gcuagauguuacaccgaaa

SEQ ID NO: 2025710 - RNA, 19 nt, Homo sapiens
  misc_RNA (1)...(19): siRNA sense strand
auacaacuguuccacucaa

SEQ ID NO: 2025711 - RNA, 19 nt, Homo sapiens
  misc_RNA (1)...(19): siRNA sense strand
caugccgaccuaacuauaa

SEQ ID NO: 2025712 - RNA, 19 nt, Homo sapiens
  misc_RNA (1)...(19): siRNA sense strand
uaaaugcaguucugaucac

SEQ ID NO: 2025713 - RNA, 19 nt, Homo sapiens
  misc_RNA (1)...(19): siRNA sense strand
gacaacauagaagaaauga

SEQ ID NO: 2025714 - RNA, 19 nt, Homo sapiens
  misc_RNA (1)...(19): siRNA sense strand
uuucuuaggcgguauaaau

SEQ ID NO: 2025715 - RNA, 19 nt, Homo sapiens
  misc_RNA (1)...(19): siRNA sense strand
agaagaaggagauuggaau

SEQ ID NO: 2025716 - RNA, 19 nt, Homo sapiens
  misc_RNA (1)...(19): siRNA sense strand
ucacuggauuggacugaag

SEQ ID NO: 2025717 - RNA, 19 nt, Homo sapiens
  misc_RNA (1)...(19): siRNA sense strand
uauaaaugcaguucugauc

SEQ ID NO: 2025718 - RNA, 19 nt, Homo sapiens
  misc_RNA (1)...(19): siRNA sense strand
cgguauaaaugcaguucug

SEQ ID NO: 2025719 - RNA, 19 nt, Homo sapiens
  misc_RNA (1)...(19): siRNA sense strand
gauggugcagcaacagcua

SEQ ID NO: 2025720 - RNA, 19 nt, Homo sapiens
  misc_RNA (1)...(19): siRNA sense strand
gguauaaaugcaguucuga

SEQ ID NO: 2025721 - RNA, 19 nt, Homo sapiens
  misc_RNA (1)...(19): siRNA sense strand
caugagagggagugaagga

SEQ ID NO: 2025722 - RNA, 19 nt, Homo sapiens
  misc_RNA (1)...(19): siRNA sense strand
ccuaugauuggauugguuu

SEQ ID NO: 2025723 - RNA, 19 nt, Homo sapiens
  misc_RNA (1)...(19): siRNA sense strand
gaccuaacuauaauugaca

SEQ ID NO: 2025724 - RNA, 19 nt, Homo sapiens
  misc_RNA (1)...(19): siRNA sense strand
cuaaagaagaaggagauug

SEQ ID NO: 2025725 - RNA, 19 nt, Homo sapiens
  misc_RNA (1)...(19): siRNA sense strand
cgaugauggugcagcaaca

SEQ ID NO: 2025726 - RNA, 19 nt, Homo sapiens
  misc_RNA (1)...(19): siRNA sense strand
guauaaaugcaguucugau

SEQ ID NO: 2025727 - RNA, 19 nt, Homo sapiens
  misc_RNA (1)...(19): siRNA sense strand
gaucacuggauuggacuga

SEQ ID NO: 2025728 - RNA, 19 nt, Homo sapiens
  misc_RNA (1)...(19): siRNA sense strand
gccgaccuaacuauaauug

SEQ ID NO: 2025729 - RNA, 19 nt, Homo sapiens
  misc_RNA (1)...(19): siRNA sense strand
acaggacaauggguagaug

SEQ ID NO: 2025730 - RNA, 19 nt, Homo sapiens
  misc_RNA (1)...(19): siRNA sense strand
auaaaugcaguucugauca

SEQ ID NO: 2025731 - RNA, 19 nt, Homo sapiens
  misc_RNA (1)...(19): siRNA sense strand
aagaagaaggagauuggaa

SEQ ID NO: 2025732 - RNA, 19 nt, Homo sapiens
  misc_RNA (1)...(19): siRNA sense strand
caggauagcugccgacuaa

SEQ ID NO: 2025733 - RNA, 19 nt, Homo sapiens
  misc_RNA (1)...(19): siRNA sense strand
ccagaacccuaccauguuu

SEQ ID NO: 2025734 - RNA, 19 nt, Homo sapiens
  misc_RNA (1)...(19): siRNA sense strand
caucagaucuggccaugga

SEQ ID NO: 2025735 - RNA, 19 nt, Homo sapiens
  misc_RNA (1)...(19): siRNA sense strand
agugucagcuccauuaaua

SEQ ID NO: 2025736 - RNA, 19 nt, Homo sapiens
  misc_RNA (1)...(19): siRNA sense strand
cauccggccuggagugaua

SEQ ID NO: 2025737 - RNA, 19 nt, Homo sapiens
  misc_RNA (1)...(19): siRNA sense strand
gaaaauggaugacagugau

SEQ ID NO: 2025738 - RNA, 19 nt, Homo sapiens
  misc_RNA (1)...(19): siRNA sense strand
ccucacaacuccaucagau

SEQ ID NO: 2025739 - RNA, 19 nt, Homo sapiens
  misc_RNA (1)...(19): siRNA sense strand
ccaaggugguggagaagau

SEQ ID NO: 2025740 - RNA, 19 nt, Homo sapiens
  misc_RNA (1)...(19): siRNA sense strand
ccaaagugcagcaaccauu

SEQ ID NO: 2025741 - RNA, 19 nt, Homo sapiens
  misc_RNA (1)...(19): siRNA sense strand
ggaugacagugaucaggau

SEQ ID NO: 2025742 - RNA, 19 nt, Homo sapiens
  misc_RNA (1)...(19): siRNA sense strand
gccagaacccuaccauguu

SEQ ID NO: 2025743 - RNA, 19 nt, Homo sapiens
  misc_RNA (1)...(19): siRNA sense strand
guaaggcccugcgacaucu

SEQ ID NO: 2025744 - RNA, 19 nt, Homo sapiens
  misc_RNA (1)...(19): siRNA sense strand
gaugacagugaucaggaua

SEQ ID NO: 2025745 - RNA, 19 nt, Homo sapiens
  misc_RNA (1)...(19): siRNA sense strand
caaagugcagcaaccauuc

SEQ ID NO: 2025746 - RNA, 19 nt, Homo sapiens
  misc_RNA (1)...(19): siRNA sense strand
ucagcuccauuaauagaau

SEQ ID NO: 2025747 - RNA, 19 nt, Homo sapiens
  misc_RNA (1)...(19): siRNA sense strand
gacuaagcauugacucaca

SEQ ID NO: 2025748 - RNA, 19 nt, Homo sapiens
  misc_RNA (1)...(19): siRNA sense strand
ccacugccacggccuuuga

SEQ ID NO: 2025749 - RNA, 19 nt, Homo sapiens
  misc_RNA (1)...(19): siRNA sense strand
gagggcgucugugacaaug

SEQ ID NO: 2025750 - RNA, 19 nt, Homo sapiens
  misc_RNA (1)...(19): siRNA sense strand
cauucaaccucccuaugga

SEQ ID NO: 2025751 - RNA, 19 nt, Homo sapiens
  misc_RNA (1)...(19): siRNA sense strand
cccagugucagcuccauua

SEQ ID NO: 2025752 - RNA, 19 nt, Homo sapiens
  misc_RNA (1)...(19): siRNA sense strand
ugaguuccccauauuauua

SEQ ID NO: 2025753 - RNA, 19 nt, Homo sapiens
  misc_RNA (1)...(19): siRNA sense strand
cauuugagcggcagcacua

SEQ ID NO: 2025754 - RNA, 19 nt, Homo sapiens
  misc_RNA (1)...(19): siRNA sense strand
gcacuacccagaggccuau

SEQ ID NO: 2025755 - RNA, 19 nt, Homo sapiens
  misc_RNA (1)...(19): siRNA sense strand
uauuacaguuccacaucaa

SEQ ID NO: 2025756 - RNA, 19 nt, Homo sapiens
  misc_RNA (1)...(19): siRNA sense strand
ucacaacuccaucagaucu

SEQ ID NO: 2025757 - RNA, 19 nt, Homo sapiens
  misc_RNA (1)...(19): siRNA sense strand
gaagauuggggacuacaaa

SEQ ID NO: 2025758 - RNA, 19 nt, Homo sapiens
  misc_RNA (1)...(19): siRNA sense strand
ccacggccuuugaccaucu

SEQ ID NO: 2025759 - RNA, 19 nt, Homo sapiens
  misc_RNA (1)...(19): siRNA sense strand
gauagcugccgacuaagca

SEQ ID NO: 2025760 - RNA, 19 nt, Homo sapiens
  misc_RNA (1)...(19): siRNA sense strand
ggaaaauggaugacaguga

SEQ ID NO: 2025761 - RNA, 19 nt, Homo sapiens
  misc_RNA (1)...(19): siRNA sense strand
gcugagggcgucugugaca

SEQ ID NO: 2025762 - RNA, 19 nt, Homo sapiens
  misc_RNA (1)...(19): siRNA sense strand
cgccagaacccuaccaugu

SEQ ID NO: 2025763 - RNA, 19 nt, Homo sapiens
  misc_RNA (1)...(19): siRNA sense strand
uuauuacaguuccacauca

SEQ ID NO: 2025764 - RNA, 19 nt, Homo sapiens
  misc_RNA (1)...(19): siRNA sense strand
ugucagcuccauuaauaga

SEQ ID NO: 2025765 - RNA, 19 nt, Homo sapiens
  misc_RNA (1)...(19): siRNA sense strand
agaaucauccggaccaaag

SEQ ID NO: 2025766 - RNA, 19 nt, Homo sapiens
  misc_RNA (1)...(19): siRNA sense strand
ccgcucgagugcccauuug

SEQ ID NO: 2025767 - RNA, 19 nt, Homo sapiens
  misc_RNA (1)...(19): siRNA sense strand
ggaggggccuuugugaaug

SEQ ID NO: 2025768 - RNA, 19 nt, Homo sapiens
  misc_RNA (1)...(19): siRNA sense strand
ggacuacaaacgccagaac

SEQ ID NO: 2025769 - RNA, 19 nt, Homo sapiens
  misc_RNA (1)...(19): siRNA sense strand
gggcgucugugacaaugac

SEQ ID NO: 2025770 - RNA, 19 nt, Homo sapiens
  misc_RNA (1)...(19): siRNA sense strand
uggcugagggcgucuguga

SEQ ID NO: 2025771 - RNA, 19 nt, Homo sapiens
  misc_RNA (1)...(19): siRNA sense strand
ccagugucagcuccauuaa

SEQ ID NO: 2025772 - RNA, 19 nt, Homo sapiens
  misc_RNA (1)...(19): siRNA sense strand
caaggugguggagaagauu

SEQ ID NO: 2025773 - RNA, 19 nt, Homo sapiens
  misc_RNA (1)...(19): siRNA sense strand
caggauagcugccgacuaa

SEQ ID NO: 2025774 - RNA, 19 nt, Homo sapiens
  misc_RNA (1)...(19): siRNA sense strand
ccagaacccuaccauguuu

SEQ ID NO: 2025775 - RNA, 19 nt, Homo sapiens
  misc_RNA (1)...(19): siRNA sense strand
caucagaucuggccaugga

SEQ ID NO: 2025776 - RNA, 19 nt, Homo sapiens
  misc_RNA (1)...(19): siRNA sense strand
agugucagcuccauuaaua

SEQ ID NO: 2025777 - RNA, 19 nt, Homo sapiens
  misc_RNA (1)...(19): siRNA sense strand
cauccggccuggagugaua

SEQ ID NO: 2025778 - RNA, 19 nt, Homo sapiens
  misc_RNA (1)...(19): siRNA sense strand
gaaaauggaugacagugau

SEQ ID NO: 2025779 - RNA, 19 nt, Homo sapiens
  misc_RNA (1)...(19): siRNA sense strand
ccucacaacuccaucagau

SEQ ID NO: 2025780 - RNA, 19 nt, Homo sapiens
  misc_RNA (1)...(19): siRNA sense strand
ccaaggugguggagaagau

SEQ ID NO: 2025781 - RNA, 19 nt, Homo sapiens
  misc_RNA (1)...(19): siRNA sense strand
ccaaagugcagcaaccauu

SEQ ID NO: 2025782 - RNA, 19 nt, Homo sapiens
  misc_RNA (1)...(19): siRNA sense strand
ggaugacagugaucaggau

SEQ ID NO: 2025783 - RNA, 19 nt, Homo sapiens
  misc_RNA (1)...(19): siRNA sense strand
gccagaacccuaccauguu

SEQ ID NO: 2025784 - RNA, 19 nt, Homo sapiens
  misc_RNA (1)...(19): siRNA sense strand
guaaggcccugcgacaucu

SEQ ID NO: 2025785 - RNA, 19 nt, Homo sapiens
  misc_RNA (1)...(19): siRNA sense strand
gaugacagugaucaggaua

SEQ ID NO: 2025786 - RNA, 19 nt, Homo sapiens
  misc_RNA (1)...(19): siRNA sense strand
caaagugcagcaaccauuc

SEQ ID NO: 2025787 - RNA, 19 nt, Homo sapiens
  misc_RNA (1)...(19): siRNA sense strand
ucagcuccauuaauagaau

SEQ ID NO: 2025788 - RNA, 19 nt, Homo sapiens
  misc_RNA (1)...(19): siRNA sense strand
gacuaagcauugacucaca

SEQ ID NO: 2025789 - RNA, 19 nt, Homo sapiens
  misc_RNA (1)...(19): siRNA sense strand
ccacugccacggccuuuga

SEQ ID NO: 2025790 - RNA, 19 nt, Homo sapiens
  misc_RNA (1)...(19): siRNA sense strand
gagggcgucugugacaaug

SEQ ID NO: 2025791 - RNA, 19 nt, Homo sapiens
  misc_RNA (1)...(19): siRNA sense strand
cauucaaccucccuaugga

SEQ ID NO: 2025792 - RNA, 19 nt, Homo sapiens
  misc_RNA (1)...(19): siRNA sense strand
cccagugucagcuccauua

SEQ ID NO: 2025793 - RNA, 19 nt, Homo sapiens
  misc_RNA (1)...(19): siRNA sense strand
ugaguuccccauauuauua

SEQ ID NO: 2025794 - RNA, 19 nt, Homo sapiens
  misc_RNA (1)...(19): siRNA sense strand
cauuugagcggcagcacua

SEQ ID NO: 2025795 - RNA, 19 nt, Homo sapiens
  misc_RNA (1)...(19): siRNA sense strand
gcacuacccagaggccuau

SEQ ID NO: 2025796 - RNA, 19 nt, Homo sapiens
  misc_RNA (1)...(19): siRNA sense strand
uauuacaguuccacaucaa

SEQ ID NO: 2025797 - RNA, 19 nt, Homo sapiens
  misc_RNA (1)...(19): siRNA sense strand
ucacaacuccaucagaucu

SEQ ID NO: 2025798 - RNA, 19 nt, Homo sapiens
  misc_RNA (1)...(19): siRNA sense strand
gaagauuggggacuacaaa

SEQ ID NO: 2025799 - RNA, 19 nt, Homo sapiens
  misc_RNA (1)...(19): siRNA sense strand
ccacggccuuugaccaucu

SEQ ID NO: 2025800 - RNA, 19 nt, Homo sapiens
  misc_RNA (1)...(19): siRNA sense strand
gauagcugccgacuaagca

SEQ ID NO: 2025801 - RNA, 19 nt, Homo sapiens
  misc_RNA (1)...(19): siRNA sense strand
ggaaaauggaugacaguga

SEQ ID NO: 2025802 - RNA, 19 nt, Homo sapiens
  misc_RNA (1)...(19): siRNA sense strand
gcugagggcgucugugaca

SEQ ID NO: 2025803 - RNA, 19 nt, Homo sapiens
  misc_RNA (1)...(19): siRNA sense strand
cgccagaacccuaccaugu

SEQ ID NO: 2025804 - RNA, 19 nt, Homo sapiens
  misc_RNA (1)...(19): siRNA sense strand
uuauuacaguuccacauca

SEQ ID NO: 2025805 - RNA, 19 nt, Homo sapiens
  misc_RNA (1)...(19): siRNA sense strand
ugucagcuccauuaauaga

SEQ ID NO: 2025806 - RNA, 19 nt, Homo sapiens
  misc_RNA (1)...(19): siRNA sense strand
agaaucauccggaccaaag

SEQ ID NO: 2025807 - RNA, 19 nt, Homo sapiens
  misc_RNA (1)...(19): siRNA sense strand
ccgcucgagugcccauuug

SEQ ID NO: 2025808 - RNA, 19 nt, Homo sapiens
  misc_RNA (1)...(19): siRNA sense strand
ggaggggccuuugugaaug

SEQ ID NO: 2025809 - RNA, 19 nt, Homo sapiens
  misc_RNA (1)...(19): siRNA sense strand
ggacuacaaacgccagaac

SEQ ID NO: 2025810 - RNA, 19 nt, Homo sapiens
  misc_RNA (1)...(19): siRNA sense strand
gggcgucugugacaaugac

SEQ ID NO: 2025811 - RNA, 19 nt, Homo sapiens
  misc_RNA (1)...(19): siRNA sense strand
uggcugagggcgucuguga

SEQ ID NO: 2025812 - RNA, 19 nt, Homo sapiens
  misc_RNA (1)...(19): siRNA sense strand
ccagugucagcuccauuaa

SEQ ID NO: 2025813 - RNA, 19 nt, Homo sapiens
  misc_RNA (1)...(19): siRNA sense strand
caaggugguggagaagauu

SEQ ID NO: 2025814 - RNA, 19 nt, Homo sapiens
  misc_RNA (1)...(19): siRNA sense strand
caggauagcugccgacuaa

SEQ ID NO: 2025815 - RNA, 19 nt, Homo sapiens
  misc_RNA (1)...(19): siRNA sense strand
ccagaacccuaccauguuu

SEQ ID NO: 2025816 - RNA, 19 nt, Homo sapiens
  misc_RNA (1)...(19): siRNA sense strand
caucagaucuggccaugga

SEQ ID NO: 2025817 - RNA, 19 nt, Homo sapiens
  misc_RNA (1)...(19): siRNA sense strand
agugucagcuccauuaaua

SEQ ID NO: 2025818 - RNA, 19 nt, Homo sapiens
  misc_RNA (1)...(19): siRNA sense strand
cauccggccuggagugaua

SEQ ID NO: 2025819 - RNA, 19 nt, Homo sapiens
  misc_RNA (1)...(19): siRNA sense strand
gaaaauggaugacagugau

SEQ ID NO: 2025820 - RNA, 19 nt, Homo sapiens
  misc_RNA (1)...(19): siRNA sense strand
ccucacaacuccaucagau

SEQ ID NO: 2025821 - RNA, 19 nt, Homo sapiens
  misc_RNA (1)...(19): siRNA sense strand
ccaaggugguggagaagau

SEQ ID NO: 2025822 - RNA, 19 nt, Homo sapiens
  misc_RNA (1)...(19): siRNA sense strand
ccaaagugcagcaaccauu

SEQ ID NO: 2025823 - RNA, 19 nt, Homo sapiens
  misc_RNA (1)...(19): siRNA sense strand
ggaugacagugaucaggau

SEQ ID NO: 2025824 - RNA, 19 nt, Homo sapiens
  misc_RNA (1)...(19): siRNA sense strand
gccagaacccuaccauguu

SEQ ID NO: 2025825 - RNA, 19 nt, Homo sapiens
  misc_RNA (1)...(19): siRNA sense strand
guaaggcccugcgacaucu

SEQ ID NO: 2025826 - RNA, 19 nt, Homo sapiens
  misc_RNA (1)...(19): siRNA sense strand
gaugacagugaucaggaua

SEQ ID NO: 2025827 - RNA, 19 nt, Homo sapiens
  misc_RNA (1)...(19): siRNA sense strand
caaagugcagcaaccauuc

SEQ ID NO: 2025828 - RNA, 19 nt, Homo sapiens
  misc_RNA (1)...(19): siRNA sense strand
ucagcuccauuaauagaau

SEQ ID NO: 2025829 - RNA, 19 nt, Homo sapiens
  misc_RNA (1)...(19): siRNA sense strand
gacuaagcauugacucaca

SEQ ID NO: 2025830 - RNA, 19 nt, Homo sapiens
  misc_RNA (1)...(19): siRNA sense strand
gagggcgucugugacaaug

SEQ ID NO: 2025831 - RNA, 19 nt, Homo sapiens
  misc_RNA (1)...(19): siRNA sense strand
cauucaaccucccuaugga

SEQ ID NO: 2025832 - RNA, 19 nt, Homo sapiens
  misc_RNA (1)...(19): siRNA sense strand
cccagugucagcuccauua

SEQ ID NO: 2025833 - RNA, 19 nt, Homo sapiens
  misc_RNA (1)...(19): siRNA sense strand
cauuugagcggcagcacua

SEQ ID NO: 2025834 - RNA, 19 nt, Homo sapiens
  misc_RNA (1)...(19): siRNA sense strand
gcacuacccagaggccuau

SEQ ID NO: 2025835 - RNA, 19 nt, Homo sapiens
  misc_RNA (1)...(19): siRNA sense strand
ucacaacuccaucagaucu

SEQ ID NO: 2025836 - RNA, 19 nt, Homo sapiens
  misc_RNA (1)...(19): siRNA sense strand
gaagauuggggacuacaaa

SEQ ID NO: 2025837 - RNA, 19 nt, Homo sapiens
  misc_RNA (1)...(19): siRNA sense strand
gauagcugccgacuaagca

SEQ ID NO: 2025838 - RNA, 19 nt, Homo sapiens
  misc_RNA (1)...(19): siRNA sense strand
ggaaaauggaugacaguga

SEQ ID NO: 2025839 - RNA, 19 nt, Homo sapiens
  misc_RNA (1)...(19): siRNA sense strand
gcugagggcgucugugaca

SEQ ID NO: 2025840 - RNA, 19 nt, Homo sapiens
  misc_RNA (1)...(19): siRNA sense strand
cgccagaacccuaccaugu

SEQ ID NO: 2025841 - RNA, 19 nt, Homo sapiens
  misc_RNA (1)...(19): siRNA sense strand
ugucagcuccauuaauaga

SEQ ID NO: 2025842 - RNA, 19 nt, Homo sapiens
  misc_RNA (1)...(19): siRNA sense strand
agaaucauccggaccaaag

SEQ ID NO: 2025843 - RNA, 19 nt, Homo sapiens
  misc_RNA (1)...(19): siRNA sense strand
ccgcucgagugcccauuug

SEQ ID NO: 2025844 - RNA, 19 nt, Homo sapiens
  misc_RNA (1)...(19): siRNA sense strand
ggaggggccuuugugaaug

SEQ ID NO: 2025845 - RNA, 19 nt, Homo sapiens
  misc_RNA (1)...(19): siRNA sense strand
ggacuacaaacgccagaac

SEQ ID NO: 2025846 - RNA, 19 nt, Homo sapiens
  misc_RNA (1)...(19): siRNA sense strand
gggcgucugugacaaugac

SEQ ID NO: 2025847 - RNA, 19 nt, Homo sapiens
  misc_RNA (1)...(19): siRNA sense strand
uggcugagggcgucuguga

SEQ ID NO: 2025848 - RNA, 19 nt, Homo sapiens
  misc_RNA (1)...(19): siRNA sense strand
ccagugucagcuccauuaa

SEQ ID NO: 2025849 - RNA, 19 nt, Homo sapiens
  misc_RNA (1)...(19): siRNA sense strand
caaggugguggagaagauu

SEQ ID NO: 2025850 - RNA, 19 nt, Homo sapiens
  misc_RNA (1)...(19): siRNA sense strand
caggauagcugccgacuaa

SEQ ID NO: 2025851 - RNA, 19 nt, Homo sapiens
  misc_RNA (1)...(19): siRNA sense strand
ccagaacccuaccauguuu

SEQ ID NO: 2025852 - RNA, 19 nt, Homo sapiens
  misc_RNA (1)...(19): siRNA sense strand
caucagaucuggccaugga

SEQ ID NO: 2025853 - RNA, 19 nt, Homo sapiens
  misc_RNA (1)...(19): siRNA sense strand
agugucagcuccauuaaua

SEQ ID NO: 2025854 - RNA, 19 nt, Homo sapiens
  misc_RNA (1)...(19): siRNA sense strand
cauccggccuggagugaua

SEQ ID NO: 2025855 - RNA, 19 nt, Homo sapiens
  misc_RNA (1)...(19): siRNA sense strand
gaaaauggaugacagugau

SEQ ID NO: 2025856 - RNA, 19 nt, Homo sapiens
  misc_RNA (1)...(19): siRNA sense strand
ccucacaacuccaucagau

SEQ ID NO: 2025857 - RNA, 19 nt, Homo sapiens
  misc_RNA (1)...(19): siRNA sense strand
ccaaggugguggagaagau

SEQ ID NO: 2025858 - RNA, 19 nt, Homo sapiens
  misc_RNA (1)...(19): siRNA sense strand
ccaaagugcagcaaccauu

SEQ ID NO: 2025859 - RNA, 19 nt, Homo sapiens
  misc_RNA (1)...(19): siRNA sense strand
ggaugacagugaucaggau

SEQ ID NO: 2025860 - RNA, 19 nt, Homo sapiens
  misc_RNA (1)...(19): siRNA sense strand
gccagaacccuaccauguu

SEQ ID NO: 2025861 - RNA, 19 nt, Homo sapiens
  misc_RNA (1)...(19): siRNA sense strand
guaaggcccugcgacaucu

SEQ ID NO: 2025862 - RNA, 19 nt, Homo sapiens
  misc_RNA (1)...(19): siRNA sense strand
gaugacagugaucaggaua

SEQ ID NO: 2025863 - RNA, 19 nt, Homo sapiens
  misc_RNA (1)...(19): siRNA sense strand
caaagugcagcaaccauuc

SEQ ID NO: 2025864 - RNA, 19 nt, Homo sapiens
  misc_RNA (1)...(19): siRNA sense strand
ucagcuccauuaauagaau

SEQ ID NO: 2025865 - RNA, 19 nt, Homo sapiens
  misc_RNA (1)...(19): siRNA sense strand
gacuaagcauugacucaca

SEQ ID NO: 2025866 - RNA, 19 nt, Homo sapiens
  misc_RNA (1)...(19): siRNA sense strand
gagggcgucugugacaaug

SEQ ID NO: 2025867 - RNA, 19 nt, Homo sapiens
  misc_RNA (1)...(19): siRNA sense strand
cauucaaccucccuaugga

SEQ ID NO: 2025868 - RNA, 19 nt, Homo sapiens
  misc_RNA (1)...(19): siRNA sense strand
cccagugucagcuccauua

SEQ ID NO: 2025869 - RNA, 19 nt, Homo sapiens
  misc_RNA (1)...(19): siRNA sense strand
cauuugagcggcagcacua

SEQ ID NO: 2025870 - RNA, 19 nt, Homo sapiens
  misc_RNA (1)...(19): siRNA sense strand
gcacuacccagaggccuau

SEQ ID NO: 2025871 - RNA, 19 nt, Homo sapiens
  misc_RNA (1)...(19): siRNA sense strand
ucacaacuccaucagaucu

SEQ ID NO: 2025872 - RNA, 19 nt, Homo sapiens
  misc_RNA (1)...(19): siRNA sense strand
gaagauuggggacuacaaa

SEQ ID NO: 2025873 - RNA, 19 nt, Homo sapiens
  misc_RNA (1)...(19): siRNA sense strand
gauagcugccgacuaagca

SEQ ID NO: 2025874 - RNA, 19 nt, Homo sapiens
  misc_RNA (1)...(19): siRNA sense strand
ggaaaauggaugacaguga

SEQ ID NO: 2025875 - RNA, 19 nt, Homo sapiens
  misc_RNA (1)...(19): siRNA sense strand
gcugagggcgucugugaca

SEQ ID NO: 2025876 - RNA, 19 nt, Homo sapiens
  misc_RNA (1)...(19): siRNA sense strand
cgccagaacccuaccaugu

SEQ ID NO: 2025877 - RNA, 19 nt, Homo sapiens
  misc_RNA (1)...(19): siRNA sense strand
ugucagcuccauuaauaga

SEQ ID NO: 2025878 - RNA, 19 nt, Homo sapiens
  misc_RNA (1)...(19): siRNA sense strand
agaaucauccggaccaaag

SEQ ID NO: 2025879 - RNA, 19 nt, Homo sapiens
  misc_RNA (1)...(19): siRNA sense strand
ccgcucgagugcccauuug

SEQ ID NO: 2025880 - RNA, 19 nt, Homo sapiens
  misc_RNA (1)...(19): siRNA sense strand
ggaggggccuuugugaaug

SEQ ID NO: 2025881 - RNA, 19 nt, Homo sapiens
  misc_RNA (1)...(19): siRNA sense strand
ggacuacaaacgccagaac

SEQ ID NO: 2025882 - RNA, 19 nt, Homo sapiens
  misc_RNA (1)...(19): siRNA sense strand
gggcgucugugacaaugac

SEQ ID NO: 2025883 - RNA, 19 nt, Homo sapiens
  misc_RNA (1)...(19): siRNA sense strand
uggcugagggcgucuguga

SEQ ID NO: 2025884 - RNA, 19 nt, Homo sapiens
  misc_RNA (1)...(19): siRNA sense strand
ccagugucagcuccauuaa

SEQ ID NO: 2025885 - RNA, 19 nt, Homo sapiens
  misc_RNA (1)...(19): siRNA sense strand
caaggugguggagaagauu

SEQ ID NO: 2025886 - RNA, 19 nt, Homo sapiens
  misc_RNA (1)...(19): siRNA sense strand
caggauagcugccgacuaa

SEQ ID NO: 2025887 - RNA, 19 nt, Homo sapiens
  misc_RNA (1)...(19): siRNA sense strand
ccagaacccuaccauguuu

SEQ ID NO: 2025888 - RNA, 19 nt, Homo sapiens
  misc_RNA (1)...(19): siRNA sense strand
caucagaucuggccaugga

SEQ ID NO: 2025889 - RNA, 19 nt, Homo sapiens
  misc_RNA (1)...(19): siRNA sense strand
agugucagcuccauuaaua

SEQ ID NO: 2025890 - RNA, 19 nt, Homo sapiens
  misc_RNA (1)...(19): siRNA sense strand
cauccggccuggagugaua

SEQ ID NO: 2025891 - RNA, 19 nt, Homo sapiens
  misc_RNA (1)...(19): siRNA sense strand
gaaaauggaugacagugau

SEQ ID NO: 2025892 - RNA, 19 nt, Homo sapiens
  misc_RNA (1)...(19): siRNA sense strand
ccucacaacuccaucagau

SEQ ID NO: 2025893 - RNA, 19 nt, Homo sapiens
  misc_RNA (1)...(19): siRNA sense strand
ccaaggugguggagaagau

SEQ ID NO: 2025894 - RNA, 19 nt, Homo sapiens
  misc_RNA (1)...(19): siRNA sense strand
ccaaagugcagcaaccauu

SEQ ID NO: 2025895 - RNA, 19 nt, Homo sapiens
  misc_RNA (1)...(19): siRNA sense strand
ggaugacagugaucaggau

SEQ ID NO: 2025896 - RNA, 19 nt, Homo sapiens
  misc_RNA (1)...(19): siRNA sense strand
gccagaacccuaccauguu

SEQ ID NO: 2025897 - RNA, 19 nt, Homo sapiens
  misc_RNA (1)...(19): siRNA sense strand
guaaggcccugcgacaucu

SEQ ID NO: 2025898 - RNA, 19 nt, Homo sapiens
  misc_RNA (1)...(19): siRNA sense strand
gaugacagugaucaggaua

SEQ ID NO: 2025899 - RNA, 19 nt, Homo sapiens
  misc_RNA (1)...(19): siRNA sense strand
caaagugcagcaaccauuc

SEQ ID NO: 2025900 - RNA, 19 nt, Homo sapiens
  misc_RNA (1)...(19): siRNA sense strand
ucagcuccauuaauagaau

SEQ ID NO: 2025901 - RNA, 19 nt, Homo sapiens
  misc_RNA (1)...(19): siRNA sense strand
gacuaagcauugacucaca

SEQ ID NO: 2025902 - RNA, 19 nt, Homo sapiens
  misc_RNA (1)...(19): siRNA sense strand
gagggcgucugugacaaug

SEQ ID NO: 2025903 - RNA, 19 nt, Homo sapiens
  misc_RNA (1)...(19): siRNA sense strand
cauucaaccucccuaugga

SEQ ID NO: 2025904 - RNA, 19 nt, Homo sapiens
  misc_RNA (1)...(19): siRNA sense strand
cccagugucagcuccauua

SEQ ID NO: 2025905 - RNA, 19 nt, Homo sapiens
  misc_RNA (1)...(19): siRNA sense strand
cauuugagcggcagcacua

SEQ ID NO: 2025906 - RNA, 19 nt, Homo sapiens
  misc_RNA (1)...(19): siRNA sense strand
gcacuacccagaggccuau

SEQ ID NO: 2025907 - RNA, 19 nt, Homo sapiens
  misc_RNA (1)...(19): siRNA sense strand
ucacaacuccaucagaucu

SEQ ID NO: 2025908 - RNA, 19 nt, Homo sapiens
  misc_RNA (1)...(19): siRNA sense strand
gaagauuggggacuacaaa

SEQ ID NO: 2025909 - RNA, 19 nt, Homo sapiens
  misc_RNA (1)...(19): siRNA sense strand
gauagcugccgacuaagca

SEQ ID NO: 2025910 - RNA, 19 nt, Homo sapiens
  misc_RNA (1)...(19): siRNA sense strand
ggaaaauggaugacaguga

SEQ ID NO: 2025911 - RNA, 19 nt, Homo sapiens
  misc_RNA (1)...(19): siRNA sense strand
gcugagggcgucugugaca

SEQ ID NO: 2025912 - RNA, 19 nt, Homo sapiens
  misc_RNA (1)...(19): siRNA sense strand
cgccagaacccuaccaugu

SEQ ID NO: 2025913 - RNA, 19 nt, Homo sapiens
  misc_RNA (1)...(19): siRNA sense strand
ugucagcuccauuaauaga

SEQ ID NO: 2025914 - RNA, 19 nt, Homo sapiens
  misc_RNA (1)...(19): siRNA sense strand
agaaucauccggaccaaag

SEQ ID NO: 2025915 - RNA, 19 nt, Homo sapiens
  misc_RNA (1)...(19): siRNA sense strand
ccgcucgagugcccauuug

SEQ ID NO: 2025916 - RNA, 19 nt, Homo sapiens
  misc_RNA (1)...(19): siRNA sense strand
ggaggggccuuugugaaug

SEQ ID NO: 2025917 - RNA, 19 nt, Homo sapiens
  misc_RNA (1)...(19): siRNA sense strand
ggacuacaaacgccagaac

SEQ ID NO: 2025918 - RNA, 19 nt, Homo sapiens
  misc_RNA (1)...(19): siRNA sense strand
gggcgucugugacaaugac

SEQ ID NO: 2025919 - RNA, 19 nt, Homo sapiens
  misc_RNA (1)...(19): siRNA sense strand
uggcugagggcgucuguga

SEQ ID NO: 2025920 - RNA, 19 nt, Homo sapiens
  misc_RNA (1)...(19): siRNA sense strand
ccagugucagcuccauuaa

SEQ ID NO: 2025921 - RNA, 19 nt, Homo sapiens
  misc_RNA (1)...(19): siRNA sense strand
caaggugguggagaagauu

SEQ ID NO: 2025922 - RNA, 19 nt, Homo sapiens
  misc_RNA (1)...(19): siRNA sense strand
caggauagcugccgacuaa

SEQ ID NO: 2025923 - RNA, 19 nt, Homo sapiens
  misc_RNA (1)...(19): siRNA sense strand
ccagaacccuaccauguuu

SEQ ID NO: 2025924 - RNA, 19 nt, Homo sapiens
  misc_RNA (1)...(19): siRNA sense strand
caucagaucuggccaugga

SEQ ID NO: 2025925 - RNA, 19 nt, Homo sapiens
  misc_RNA (1)...(19): siRNA sense strand
agugucagcuccauuaaua

SEQ ID NO: 2025926 - RNA, 19 nt, Homo sapiens
  misc_RNA (1)...(19): siRNA sense strand
cauccggccuggagugaua

SEQ ID NO: 2025927 - RNA, 19 nt, Homo sapiens
  misc_RNA (1)...(19): siRNA sense strand
gaaaauggaugacagugau

SEQ ID NO: 2025928 - RNA, 19 nt, Homo sapiens
  misc_RNA (1)...(19): siRNA sense strand
ccucacaacuccaucagau

SEQ ID NO: 2025929 - RNA, 19 nt, Homo sapiens
  misc_RNA (1)...(19): siRNA sense strand
ccaaggugguggagaagau

SEQ ID NO: 2025930 - RNA, 19 nt, Homo sapiens
  misc_RNA (1)...(19): siRNA sense strand
ccaaagugcagcaaccauu

SEQ ID NO: 2025931 - RNA, 19 nt, Homo sapiens
  misc_RNA (1)...(19): siRNA sense strand
ggaugacagugaucaggau

SEQ ID NO: 2025932 - RNA, 19 nt, Homo sapiens
  misc_RNA (1)...(19): siRNA sense strand
gccagaacccuaccauguu

SEQ ID NO: 2025933 - RNA, 19 nt, Homo sapiens
  misc_RNA (1)...(19): siRNA sense strand
guaaggcccugcgacaucu

SEQ ID NO: 2025934 - RNA, 19 nt, Homo sapiens
  misc_RNA (1)...(19): siRNA sense strand
gaugacagugaucaggaua

SEQ ID NO: 2025935 - RNA, 19 nt, Homo sapiens
  misc_RNA (1)...(19): siRNA sense strand
caaagugcagcaaccauuc

SEQ ID NO: 2025936 - RNA, 19 nt, Homo sapiens
  misc_RNA (1)...(19): siRNA sense strand
ucagcuccauuaauagaau

SEQ ID NO: 2025937 - RNA, 19 nt, Homo sapiens
  misc_RNA (1)...(19): siRNA sense strand
gacuaagcauugacucaca

SEQ ID NO: 2025938 - RNA, 19 nt, Homo sapiens
  misc_RNA (1)...(19): siRNA sense strand
ccacugccacggccuuuga

SEQ ID NO: 2025939 - RNA, 19 nt, Homo sapiens
  misc_RNA (1)...(19): siRNA sense strand
gagggcgucugugacaaug

SEQ ID NO: 2025940 - RNA, 19 nt, Homo sapiens
  misc_RNA (1)...(19): siRNA sense strand
cauucaaccucccuaugga

SEQ ID NO: 2025941 - RNA, 19 nt, Homo sapiens
  misc_RNA (1)...(19): siRNA sense strand
cccagugucagcuccauua

SEQ ID NO: 2025942 - RNA, 19 nt, Homo sapiens
  misc_RNA (1)...(19): siRNA sense strand
ugaguuccccauauuauua

SEQ ID NO: 2025943 - RNA, 19 nt, Homo sapiens
  misc_RNA (1)...(19): siRNA sense strand
cauuugagcggcagcacua

SEQ ID NO: 2025944 - RNA, 19 nt, Homo sapiens
  misc_RNA (1)...(19): siRNA sense strand
gcacuacccagaggccuau

SEQ ID NO: 2025945 - RNA, 19 nt, Homo sapiens
  misc_RNA (1)...(19): siRNA sense strand
uauuacaguuccacaucaa

SEQ ID NO: 2025946 - RNA, 19 nt, Homo sapiens
  misc_RNA (1)...(19): siRNA sense strand
ucacaacuccaucagaucu

SEQ ID NO: 2025947 - RNA, 19 nt, Homo sapiens
  misc_RNA (1)...(19): siRNA sense strand
gaagauuggggacuacaaa

SEQ ID NO: 2025948 - RNA, 19 nt, Homo sapiens
  misc_RNA (1)...(19): siRNA sense strand
ccacggccuuugaccaucu

SEQ ID NO: 2025949 - RNA, 19 nt, Homo sapiens
  misc_RNA (1)...(19): siRNA sense strand
gauagcugccgacuaagca

SEQ ID NO: 2025950 - RNA, 19 nt, Homo sapiens
  misc_RNA (1)...(19): siRNA sense strand
ggaaaauggaugacaguga

SEQ ID NO: 2025951 - RNA, 19 nt, Homo sapiens
  misc_RNA (1)...(19): siRNA sense strand
gcugagggcgucugugaca

SEQ ID NO: 2025952 - RNA, 19 nt, Homo sapiens
  misc_RNA (1)...(19): siRNA sense strand
cgccagaacccuaccaugu

SEQ ID NO: 2025953 - RNA, 19 nt, Homo sapiens
  misc_RNA (1)...(19): siRNA sense strand
uuauuacaguuccacauca

SEQ ID NO: 2025954 - RNA, 19 nt, Homo sapiens
  misc_RNA (1)...(19): siRNA sense strand
ugucagcuccauuaauaga

SEQ ID NO: 2025955 - RNA, 19 nt, Homo sapiens
  misc_RNA (1)...(19): siRNA sense strand
agaaucauccggaccaaag

SEQ ID NO: 2025956 - RNA, 19 nt, Homo sapiens
  misc_RNA (1)...(19): siRNA sense strand
ccgcucgagugcccauuug

SEQ ID NO: 2025957 - RNA, 19 nt, Homo sapiens
  misc_RNA (1)...(19): siRNA sense strand
ggaggggccuuugugaaug

SEQ ID NO: 2025958 - RNA, 19 nt, Homo sapiens
  misc_RNA (1)...(19): siRNA sense strand
ggacuacaaacgccagaac

SEQ ID NO: 2025959 - RNA, 19 nt, Homo sapiens
  misc_RNA (1)...(19): siRNA sense strand
gggcgucugugacaaugac

SEQ ID NO: 2025960 - RNA, 19 nt, Homo sapiens
  misc_RNA (1)...(19): siRNA sense strand
uggcugagggcgucuguga

SEQ ID NO: 2025961 - RNA, 19 nt, Homo sapiens
  misc_RNA (1)...(19): siRNA sense strand
ccagugucagcuccauuaa

SEQ ID NO: 2025962 - RNA, 19 nt, Homo sapiens
  misc_RNA (1)...(19): siRNA sense strand
caaggugguggagaagauu

SEQ ID NO: 2025963 - RNA, 19 nt, Homo sapiens
  misc_RNA (1)...(19): siRNA sense strand
caggauagcugccgacuaa

SEQ ID NO: 2025964 - RNA, 19 nt, Homo sapiens
  misc_RNA (1)...(19): siRNA sense strand
ccagaacccuaccauguuu

SEQ ID NO: 2025965 - RNA, 19 nt, Homo sapiens
  misc_RNA (1)...(19): siRNA sense strand
caucagaucuggccaugga

SEQ ID NO: 2025966 - RNA, 19 nt, Homo sapiens
  misc_RNA (1)...(19): siRNA sense strand
agugucagcuccauuaaua

SEQ ID NO: 2025967 - RNA, 19 nt, Homo sapiens
  misc_RNA (1)...(19): siRNA sense strand
cauccggccuggagugaua

SEQ ID NO: 2025968 - RNA, 19 nt, Homo sapiens
  misc_RNA (1)...(19): siRNA sense strand
gaaaauggaugacagugau

SEQ ID NO: 2025969 - RNA, 19 nt, Homo sapiens
  misc_RNA (1)...(19): siRNA sense strand
ccucacaacuccaucagau

SEQ ID NO: 2025970 - RNA, 19 nt, Homo sapiens
  misc_RNA (1)...(19): siRNA sense strand
ccaaggugguggagaagau

SEQ ID NO: 2025971 - RNA, 19 nt, Homo sapiens
  misc_RNA (1)...(19): siRNA sense strand
ccaaagugcagcaaccauu

SEQ ID NO: 2025972 - RNA, 19 nt, Homo sapiens
  misc_RNA (1)...(19): siRNA sense strand
ggaugacagugaucaggau

SEQ ID NO: 2025973 - RNA, 19 nt, Homo sapiens
  misc_RNA (1)...(19): siRNA sense strand
gccagaacccuaccauguu

SEQ ID NO: 2025974 - RNA, 19 nt, Homo sapiens
  misc_RNA (1)...(19): siRNA sense strand
guaaggcccugcgacaucu

SEQ ID NO: 2025975 - RNA, 19 nt, Homo sapiens
  misc_RNA (1)...(19): siRNA sense strand
gaugacagugaucaggaua

SEQ ID NO: 2025976 - RNA, 19 nt, Homo sapiens
  misc_RNA (1)...(19): siRNA sense strand
caaagugcagcaaccauuc

SEQ ID NO: 2025977 - RNA, 19 nt, Homo sapiens
  misc_RNA (1)...(19): siRNA sense strand
ucagcuccauuaauagaau

SEQ ID NO: 2025978 - RNA, 19 nt, Homo sapiens
  misc_RNA (1)...(19): siRNA sense strand
gacuaagcauugacucaca

SEQ ID NO: 2025979 - RNA, 19 nt, Homo sapiens
  misc_RNA (1)...(19): siRNA sense strand
ccacugccacggccuuuga

SEQ ID NO: 2025980 - RNA, 19 nt, Homo sapiens
  misc_RNA (1)...(19): siRNA sense strand
gagggcgucugugacaaug

SEQ ID NO: 2025981 - RNA, 19 nt, Homo sapiens
  misc_RNA (1)...(19): siRNA sense strand
cauucaaccucccuaugga

SEQ ID NO: 2025982 - RNA, 19 nt, Homo sapiens
  misc_RNA (1)...(19): siRNA sense strand
cccagugucagcuccauua

SEQ ID NO: 2025983 - RNA, 19 nt, Homo sapiens
  misc_RNA (1)...(19): siRNA sense strand
ugaguuccccauauuauua

SEQ ID NO: 2025984 - RNA, 19 nt, Homo sapiens
  misc_RNA (1)...(19): siRNA sense strand
cauuugagcggcagcacua

SEQ ID NO: 2025985 - RNA, 19 nt, Homo sapiens
  misc_RNA (1)...(19): siRNA sense strand
gcacuacccagaggccuau

SEQ ID NO: 2025986 - RNA, 19 nt, Homo sapiens
  misc_RNA (1)...(19): siRNA sense strand
uauuacaguuccacaucaa

SEQ ID NO: 2025987 - RNA, 19 nt, Homo sapiens
  misc_RNA (1)...(19): siRNA sense strand
ucacaacuccaucagaucu

SEQ ID NO: 2025988 - RNA, 19 nt, Homo sapiens
  misc_RNA (1)...(19): siRNA sense strand
gaagauuggggacuacaaa

SEQ ID NO: 2025989 - RNA, 19 nt, Homo sapiens
  misc_RNA (1)...(19): siRNA sense strand
ccacggccuuugaccaucu

SEQ ID NO: 2025990 - RNA, 19 nt, Homo sapiens
  misc_RNA (1)...(19): siRNA sense strand
gauagcugccgacuaagca

SEQ ID NO: 2025991 - RNA, 19 nt, Homo sapiens
  misc_RNA (1)...(19): siRNA sense strand
ggaaaauggaugacaguga

SEQ ID NO: 2025992 - RNA, 19 nt, Homo sapiens
  misc_RNA (1)...(19): siRNA sense strand
gcugagggcgucugugaca

SEQ ID NO: 2025993 - RNA, 19 nt, Homo sapiens
  misc_RNA (1)...(19): siRNA sense strand
cgccagaacccuaccaugu

SEQ ID NO: 2025994 - RNA, 19 nt, Homo sapiens
  misc_RNA (1)...(19): siRNA sense strand
uuauuacaguuccacauca

SEQ ID NO: 2025995 - RNA, 19 nt, Homo sapiens
  misc_RNA (1)...(19): siRNA sense strand
ugucagcuccauuaauaga

SEQ ID NO: 2025996 - RNA, 19 nt, Homo sapiens
  misc_RNA (1)...(19): siRNA sense strand
agaaucauccggaccaaag

SEQ ID NO: 2025997 - RNA, 19 nt, Homo sapiens
  misc_RNA (1)...(19): siRNA sense strand
ccgcucgagugcccauuug

SEQ ID NO: 2025998 - RNA, 19 nt, Homo sapiens
  misc_RNA (1)...(19): siRNA sense strand
ggaggggccuuugugaaug

SEQ ID NO: 2025999 - RNA, 19 nt, Homo sapiens
  misc_RNA (1)...(19): siRNA sense strand
ggacuacaaacgccagaac

SEQ ID NO: 2026000 - RNA, 19 nt, Homo sapiens
  misc_RNA (1)...(19): siRNA sense strand
gggcgucugugacaaugac

SEQ ID NO: 2026001 - RNA, 19 nt, Homo sapiens
  misc_RNA (1)...(19): siRNA sense strand
uggcugagggcgucuguga

SEQ ID NO: 2026002 - RNA, 19 nt, Homo sapiens
  misc_RNA (1)...(19): siRNA sense strand
ccagugucagcuccauuaa

SEQ ID NO: 2026003 - RNA, 19 nt, Homo sapiens
  misc_RNA (1)...(19): siRNA sense strand
caaggugguggagaagauu

SEQ ID NO: 2026004 - RNA, 19 nt, Homo sapiens
  misc_RNA (1)...(19): siRNA sense strand
caggauagcugccgacuaa

SEQ ID NO: 2026005 - RNA, 19 nt, Homo sapiens
  misc_RNA (1)...(19): siRNA sense strand
ccagaacccuaccauguuu

SEQ ID NO: 2026006 - RNA, 19 nt, Homo sapiens
  misc_RNA (1)...(19): siRNA sense strand
caucagaucuggccaugga

SEQ ID NO: 2026007 - RNA, 19 nt, Homo sapiens
  misc_RNA (1)...(19): siRNA sense strand
agugucagcuccauuaaua

SEQ ID NO: 2026008 - RNA, 19 nt, Homo sapiens
  misc_RNA (1)...(19): siRNA sense strand
cauccggccuggagugaua

SEQ ID NO: 2026009 - RNA, 19 nt, Homo sapiens
  misc_RNA (1)...(19): siRNA sense strand
gaaaauggaugacagugau

SEQ ID NO: 2026010 - RNA, 19 nt, Homo sapiens
  misc_RNA (1)...(19): siRNA sense strand
ccucacaacuccaucagau

SEQ ID NO: 2026011 - RNA, 19 nt, Homo sapiens
  misc_RNA (1)...(19): siRNA sense strand
ccaaggugguggagaagau

SEQ ID NO: 2026012 - RNA, 19 nt, Homo sapiens
  misc_RNA (1)...(19): siRNA sense strand
ccaaagugcagcaaccauu

SEQ ID NO: 2026013 - RNA, 19 nt, Homo sapiens
  misc_RNA (1)...(19): siRNA sense strand
ggaugacagugaucaggau

SEQ ID NO: 2026014 - RNA, 19 nt, Homo sapiens
  misc_RNA (1)...(19): siRNA sense strand
gccagaacccuaccauguu

SEQ ID NO: 2026015 - RNA, 19 nt, Homo sapiens
  misc_RNA (1)...(19): siRNA sense strand
guaaggcccugcgacaucu

SEQ ID NO: 2026016 - RNA, 19 nt, Homo sapiens
  misc_RNA (1)...(19): siRNA sense strand
gaugacagugaucaggaua

SEQ ID NO: 2026017 - RNA, 19 nt, Homo sapiens
  misc_RNA (1)...(19): siRNA sense strand
caaagugcagcaaccauuc

SEQ ID NO: 2026018 - RNA, 19 nt, Homo sapiens
  misc_RNA (1)...(19): siRNA sense strand
ucagcuccauuaauagaau

SEQ ID NO: 2026019 - RNA, 19 nt, Homo sapiens
  misc_RNA (1)...(19): siRNA sense strand
gacuaagcauugacucaca

SEQ ID NO: 2026020 - RNA, 19 nt, Homo sapiens
  misc_RNA (1)...(19): siRNA sense strand
gagggcgucugugacaaug

SEQ ID NO: 2026021 - RNA, 19 nt, Homo sapiens
  misc_RNA (1)...(19): siRNA sense strand
cauucaaccucccuaugga

SEQ ID NO: 2026022 - RNA, 19 nt, Homo sapiens
  misc_RNA (1)...(19): siRNA sense strand
cccagugucagcuccauua

SEQ ID NO: 2026023 - RNA, 19 nt, Homo sapiens
  misc_RNA (1)...(19): siRNA sense strand
cauuugagcggcagcacua

SEQ ID NO: 2026024 - RNA, 19 nt, Homo sapiens
  misc_RNA (1)...(19): siRNA sense strand
gcacuacccagaggccuau

SEQ ID NO: 2026025 - RNA, 19 nt, Homo sapiens
  misc_RNA (1)...(19): siRNA sense strand
ucacaacuccaucagaucu

SEQ ID NO: 2026026 - RNA, 19 nt, Homo sapiens
  misc_RNA (1)...(19): siRNA sense strand
gaagauuggggacuacaaa

SEQ ID NO: 2026027 - RNA, 19 nt, Homo sapiens
  misc_RNA (1)...(19): siRNA sense strand
gauagcugccgacuaagca

SEQ ID NO: 2026028 - RNA, 19 nt, Homo sapiens
  misc_RNA (1)...(19): siRNA sense strand
ggaaaauggaugacaguga

SEQ ID NO: 2026029 - RNA, 19 nt, Homo sapiens
  misc_RNA (1)...(19): siRNA sense strand
gcugagggcgucugugaca

SEQ ID NO: 2026030 - RNA, 19 nt, Homo sapiens
  misc_RNA (1)...(19): siRNA sense strand
cgccagaacccuaccaugu

SEQ ID NO: 2026031 - RNA, 19 nt, Homo sapiens
  misc_RNA (1)...(19): siRNA sense strand
ugucagcuccauuaauaga

SEQ ID NO: 2026032 - RNA, 19 nt, Homo sapiens
  misc_RNA (1)...(19): siRNA sense strand
agaaucauccggaccaaag

SEQ ID NO: 2026033 - RNA, 19 nt, Homo sapiens
  misc_RNA (1)...(19): siRNA sense strand
ccgcucgagugcccauuug

SEQ ID NO: 2026034 - RNA, 19 nt, Homo sapiens
  misc_RNA (1)...(19): siRNA sense strand
ggaggggccuuugugaaug

SEQ ID NO: 2026035 - RNA, 19 nt, Homo sapiens
  misc_RNA (1)...(19): siRNA sense strand
ggacuacaaacgccagaac

SEQ ID NO: 2026036 - RNA, 19 nt, Homo sapiens
  misc_RNA (1)...(19): siRNA sense strand
gggcgucugugacaaugac

SEQ ID NO: 2026037 - RNA, 19 nt, Homo sapiens
  misc_RNA (1)...(19): siRNA sense strand
uggcugagggcgucuguga

SEQ ID NO: 2026038 - RNA, 19 nt, Homo sapiens
  misc_RNA (1)...(19): siRNA sense strand
ccagugucagcuccauuaa

SEQ ID NO: 2026039 - RNA, 19 nt, Homo sapiens
  misc_RNA (1)...(19): siRNA sense strand
caaggugguggagaagauu

SEQ ID NO: 2026040 - RNA, 19 nt, Homo sapiens
  misc_RNA (1)...(19): siRNA sense strand
caggauagcugccgacuaa

SEQ ID NO: 2026041 - RNA, 19 nt, Homo sapiens
  misc_RNA (1)...(19): siRNA sense strand
ccagaacccuaccauguuu

SEQ ID NO: 2026042 - RNA, 19 nt, Homo sapiens
  misc_RNA (1)...(19): siRNA sense strand
caucagaucuggccaugga

SEQ ID NO: 2026043 - RNA, 19 nt, Homo sapiens
  misc_RNA (1)...(19): siRNA sense strand
agugucagcuccauuaaua

SEQ ID NO: 2026044 - RNA, 19 nt, Homo sapiens
  misc_RNA (1)...(19): siRNA sense strand
cauccggccuggagugaua

SEQ ID NO: 2026045 - RNA, 19 nt, Homo sapiens
  misc_RNA (1)...(19): siRNA sense strand
gaaaauggaugacagugau

SEQ ID NO: 2026046 - RNA, 19 nt, Homo sapiens
  misc_RNA (1)...(19): siRNA sense strand
ccucacaacuccaucagau

SEQ ID NO: 2026047 - RNA, 19 nt, Homo sapiens
  misc_RNA (1)...(19): siRNA sense strand
ccaaggugguggagaagau

SEQ ID NO: 2026048 - RNA, 19 nt, Homo sapiens
  misc_RNA (1)...(19): siRNA sense strand
ccaaagugcagcaaccauu

SEQ ID NO: 2026049 - RNA, 19 nt, Homo sapiens
  misc_RNA (1)...(19): siRNA sense strand
ggaugacagugaucaggau

SEQ ID NO: 2026050 - RNA, 19 nt, Homo sapiens
  misc_RNA (1)...(19): siRNA sense strand
gccagaacccuaccauguu

SEQ ID NO: 2026051 - RNA, 19 nt, Homo sapiens
  misc_RNA (1)...(19): siRNA sense strand
guaaggcccugcgacaucu

SEQ ID NO: 2026052 - RNA, 19 nt, Homo sapiens
  misc_RNA (1)...(19): siRNA sense strand
gaugacagugaucaggaua

SEQ ID NO: 2026053 - RNA, 19 nt, Homo sapiens
  misc_RNA (1)...(19): siRNA sense strand
caaagugcagcaaccauuc

SEQ ID NO: 2026054 - RNA, 19 nt, Homo sapiens
  misc_RNA (1)...(19): siRNA sense strand
ucagcuccauuaauagaau

SEQ ID NO: 2026055 - RNA, 19 nt, Homo sapiens
  misc_RNA (1)...(19): siRNA sense strand
gacuaagcauugacucaca

SEQ ID NO: 2026056 - RNA, 19 nt, Homo sapiens
  misc_RNA (1)...(19): siRNA sense strand
gagggcgucugugacaaug

SEQ ID NO: 2026057 - RNA, 19 nt, Homo sapiens
  misc_RNA (1)...(19): siRNA sense strand
cauucaaccucccuaugga

SEQ ID NO: 2026058 - RNA, 19 nt, Homo sapiens
  misc_RNA (1)...(19): siRNA sense strand
cccagugucagcuccauua

SEQ ID NO: 2026059 - RNA, 19 nt, Homo sapiens
  misc_RNA (1)...(19): siRNA sense strand
cauuugagcggcagcacua

SEQ ID NO: 2026060 - RNA, 19 nt, Homo sapiens
  misc_RNA (1)...(19): siRNA sense strand
gcacuacccagaggccuau

SEQ ID NO: 2026061 - RNA, 19 nt, Homo sapiens
  misc_RNA (1)...(19): siRNA sense strand
ucacaacuccaucagaucu

SEQ ID NO: 2026062 - RNA, 19 nt, Homo sapiens
  misc_RNA (1)...(19): siRNA sense strand
gaagauuggggacuacaaa

SEQ ID NO: 2026063 - RNA, 19 nt, Homo sapiens
  misc_RNA (1)...(19): siRNA sense strand
gauagcugccgacuaagca

SEQ ID NO: 2026064 - RNA, 19 nt, Homo sapiens
  misc_RNA (1)...(19): siRNA sense strand
ggaaaauggaugacaguga

SEQ ID NO: 2026065 - RNA, 19 nt, Homo sapiens
  misc_RNA (1)...(19): siRNA sense strand
gcugagggcgucugugaca

SEQ ID NO: 2026066 - RNA, 19 nt, Homo sapiens
  misc_RNA (1)...(19): siRNA sense strand
cgccagaacccuaccaugu

SEQ ID NO: 2026067 - RNA, 19 nt, Homo sapiens
  misc_RNA (1)...(19): siRNA sense strand
ugucagcuccauuaauaga

SEQ ID NO: 2026068 - RNA, 19 nt, Homo sapiens
  misc_RNA (1)...(19): siRNA sense strand
agaaucauccggaccaaag

SEQ ID NO: 2026069 - RNA, 19 nt, Homo sapiens
  misc_RNA (1)...(19): siRNA sense strand
ccgcucgagugcccauuug

SEQ ID NO: 2026070 - RNA, 19 nt, Homo sapiens
  misc_RNA (1)...(19): siRNA sense strand
ggaggggccuuugugaaug

SEQ ID NO: 2026071 - RNA, 19 nt, Homo sapiens
  misc_RNA (1)...(19): siRNA sense strand
ggacuacaaacgccagaac

SEQ ID NO: 2026072 - RNA, 19 nt, Homo sapiens
  misc_RNA (1)...(19): siRNA sense strand
gggcgucugugacaaugac

SEQ ID NO: 2026073 - RNA, 19 nt, Homo sapiens
  misc_RNA (1)...(19): siRNA sense strand
uggcugagggcgucuguga

SEQ ID NO: 2026074 - RNA, 19 nt, Homo sapiens
  misc_RNA (1)...(19): siRNA sense strand
ccagugucagcuccauuaa

SEQ ID NO: 2026075 - RNA, 19 nt, Homo sapiens
  misc_RNA (1)...(19): siRNA sense strand
caaggugguggagaagauu

SEQ ID NO: 2026076 - RNA, 19 nt, Homo sapiens
  misc_RNA (1)...(19): siRNA sense strand
caggauagcugccgacuaa

SEQ ID NO: 2026077 - RNA, 19 nt, Homo sapiens
  misc_RNA (1)...(19): siRNA sense strand
ccagaacccuaccauguuu

SEQ ID NO: 2026078 - RNA, 19 nt, Homo sapiens
  misc_RNA (1)...(19): siRNA sense strand
caucagaucuggccaugga

SEQ ID NO: 2026079 - RNA, 19 nt, Homo sapiens
  misc_RNA (1)...(19): siRNA sense strand
agugucagcuccauuaaua

SEQ ID NO: 2026080 - RNA, 19 nt, Homo sapiens
  misc_RNA (1)...(19): siRNA sense strand
cauccggccuggagugaua

SEQ ID NO: 2026081 - RNA, 19 nt, Homo sapiens
  misc_RNA (1)...(19): siRNA sense strand
gaaaauggaugacagugau

SEQ ID NO: 2026082 - RNA, 19 nt, Homo sapiens
  misc_RNA (1)...(19): siRNA sense strand
ccucacaacuccaucagau

SEQ ID NO: 2026083 - RNA, 19 nt, Homo sapiens
  misc_RNA (1)...(19): siRNA sense strand
ccaaggugguggagaagau

SEQ ID NO: 2026084 - RNA, 19 nt, Homo sapiens
  misc_RNA (1)...(19): siRNA sense strand
ccaaagugcagcaaccauu

SEQ ID NO: 2026085 - RNA, 19 nt, Homo sapiens
  misc_RNA (1)...(19): siRNA sense strand
ggaugacagugaucaggau

SEQ ID NO: 2026086 - RNA, 19 nt, Homo sapiens
  misc_RNA (1)...(19): siRNA sense strand
gccagaacccuaccauguu

SEQ ID NO: 2026087 - RNA, 19 nt, Homo sapiens
  misc_RNA (1)...(19): siRNA sense strand
guaaggcccugcgacaucu

SEQ ID NO: 2026088 - RNA, 19 nt, Homo sapiens
  misc_RNA (1)...(19): siRNA sense strand
gaugacagugaucaggaua

SEQ ID NO: 2026089 - RNA, 19 nt, Homo sapiens
  misc_RNA (1)...(19): siRNA sense strand
caaagugcagcaaccauuc

SEQ ID NO: 2026090 - RNA, 19 nt, Homo sapiens
  misc_RNA (1)...(19): siRNA sense strand
ucagcuccauuaauagaau

SEQ ID NO: 2026091 - RNA, 19 nt, Homo sapiens
  misc_RNA (1)...(19): siRNA sense strand
gacuaagcauugacucaca

SEQ ID NO: 2026092 - RNA, 19 nt, Homo sapiens
  misc_RNA (1)...(19): siRNA sense strand
gagggcgucugugacaaug

SEQ ID NO: 2026093 - RNA, 19 nt, Homo sapiens
  misc_RNA (1)...(19): siRNA sense strand
cauucaaccucccuaugga

SEQ ID NO: 2026094 - RNA, 19 nt, Homo sapiens
  misc_RNA (1)...(19): siRNA sense strand
cccagugucagcuccauua

SEQ ID NO: 2026095 - RNA, 19 nt, Homo sapiens
  misc_RNA (1)...(19): siRNA sense strand
cauuugagcggcagcacua

SEQ ID NO: 2026096 - RNA, 19 nt, Homo sapiens
  misc_RNA (1)...(19): siRNA sense strand
gcacuacccagaggccuau

SEQ ID NO: 2026097 - RNA, 19 nt, Homo sapiens
  misc_RNA (1)...(19): siRNA sense strand
ucacaacuccaucagaucu

SEQ ID NO: 2026098 - RNA, 19 nt, Homo sapiens
  misc_RNA (1)...(19): siRNA sense strand
gaagauuggggacuacaaa

SEQ ID NO: 2026099 - RNA, 19 nt, Homo sapiens
  misc_RNA (1)...(19): siRNA sense strand
gauagcugccgacuaagca

SEQ ID NO: 2026100 - RNA, 19 nt, Homo sapiens
  misc_RNA (1)...(19): siRNA sense strand
ggaaaauggaugacaguga

SEQ ID NO: 2026101 - RNA, 19 nt, Homo sapiens
  misc_RNA (1)...(19): siRNA sense strand
gcugagggcgucugugaca

SEQ ID NO: 2026102 - RNA, 19 nt, Homo sapiens
  misc_RNA (1)...(19): siRNA sense strand
cgccagaacccuaccaugu

SEQ ID NO: 2026103 - RNA, 19 nt, Homo sapiens
  misc_RNA (1)...(19): siRNA sense strand
ugucagcuccauuaauaga

SEQ ID NO: 2026104 - RNA, 19 nt, Homo sapiens
  misc_RNA (1)...(19): siRNA sense strand
agaaucauccggaccaaag

SEQ ID NO: 2026105 - RNA, 19 nt, Homo sapiens
  misc_RNA (1)...(19): siRNA sense strand
ccgcucgagugcccauuug

SEQ ID NO: 2026106 - RNA, 19 nt, Homo sapiens
  misc_RNA (1)...(19): siRNA sense strand
ggaggggccuuugugaaug

SEQ ID NO: 2026107 - RNA, 19 nt, Homo sapiens
  misc_RNA (1)...(19): siRNA sense strand
ggacuacaaacgccagaac

SEQ ID NO: 2026108 - RNA, 19 nt, Homo sapiens
  misc_RNA (1)...(19): siRNA sense strand
gggcgucugugacaaugac

SEQ ID NO: 2026109 - RNA, 19 nt, Homo sapiens
  misc_RNA (1)...(19): siRNA sense strand
uggcugagggcgucuguga

SEQ ID NO: 2026110 - RNA, 19 nt, Homo sapiens
  misc_RNA (1)...(19): siRNA sense strand
ccagugucagcuccauuaa

SEQ ID NO: 2026111 - RNA, 19 nt, Homo sapiens
  misc_RNA (1)...(19): siRNA sense strand
caaggugguggagaagauu

SEQ ID NO: 2026112 - RNA, 19 nt, Homo sapiens
  misc_RNA (1)...(19): siRNA sense strand
caggauagcugccgacuaa

SEQ ID NO: 2026113 - RNA, 19 nt, Homo sapiens
  misc_RNA (1)...(19): siRNA sense strand
ccagaacccuaccauguuu

SEQ ID NO: 2026114 - RNA, 19 nt, Homo sapiens
  misc_RNA (1)...(19): siRNA sense strand
caucagaucuggccaugga

SEQ ID NO: 2026115 - RNA, 19 nt, Homo sapiens
  misc_RNA (1)...(19): siRNA sense strand
agugucagcuccauuaaua

SEQ ID NO: 2026116 - RNA, 19 nt, Homo sapiens
  misc_RNA (1)...(19): siRNA sense strand
cauccggccuggagugaua

SEQ ID NO: 2026117 - RNA, 19 nt, Homo sapiens
  misc_RNA (1)...(19): siRNA sense strand
gaaaauggaugacagugau

SEQ ID NO: 2026118 - RNA, 19 nt, Homo sapiens
  misc_RNA (1)...(19): siRNA sense strand
ccucacaacuccaucagau

SEQ ID NO: 2026119 - RNA, 19 nt, Homo sapiens
  misc_RNA (1)...(19): siRNA sense strand
ccaaggugguggagaagau

SEQ ID NO: 2026120 - RNA, 19 nt, Homo sapiens
  misc_RNA (1)...(19): siRNA sense strand
ccaaagugcagcaaccauu

SEQ ID NO: 2026121 - RNA, 19 nt, Homo sapiens
  misc_RNA (1)...(19): siRNA sense strand
ggaugacagugaucaggau

SEQ ID NO: 2026122 - RNA, 19 nt, Homo sapiens
  misc_RNA (1)...(19): siRNA sense strand
gccagaacccuaccauguu

SEQ ID NO: 2026123 - RNA, 19 nt, Homo sapiens
  misc_RNA (1)...(19): siRNA sense strand
guaaggcccugcgacaucu

SEQ ID NO: 2026124 - RNA, 19 nt, Homo sapiens
  misc_RNA (1)...(19): siRNA sense strand
gaugacagugaucaggaua

SEQ ID NO: 2026125 - RNA, 19 nt, Homo sapiens
  misc_RNA (1)...(19): siRNA sense strand
caaagugcagcaaccauuc

SEQ ID NO: 2026126 - RNA, 19 nt, Homo sapiens
  misc_RNA (1)...(19): siRNA sense strand
ucagcuccauuaauagaau

SEQ ID NO: 2026127 - RNA, 19 nt, Homo sapiens
  misc_RNA (1)...(19): siRNA sense strand
gacuaagcauugacucaca

SEQ ID NO: 2026128 - RNA, 19 nt, Homo sapiens
  misc_RNA (1)...(19): siRNA sense strand
ccacugccacggccuuuga

SEQ ID NO: 2026129 - RNA, 19 nt, Homo sapiens
  misc_RNA (1)...(19): siRNA sense strand
gagggcgucugugacaaug

SEQ ID NO: 2026130 - RNA, 19 nt, Homo sapiens
  misc_RNA (1)...(19): siRNA sense strand
cauucaaccucccuaugga

SEQ ID NO: 2026131 - RNA, 19 nt, Homo sapiens
  misc_RNA (1)...(19): siRNA sense strand
cccagugucagcuccauua

SEQ ID NO: 2026132 - RNA, 19 nt, Homo sapiens
  misc_RNA (1)...(19): siRNA sense strand
ugaguuccccauauuauua

SEQ ID NO: 2026133 - RNA, 19 nt, Homo sapiens
  misc_RNA (1)...(19): siRNA sense strand
cauuugagcggcagcacua

SEQ ID NO: 2026134 - RNA, 19 nt, Homo sapiens
  misc_RNA (1)...(19): siRNA sense strand
gcacuacccagaggccuau

SEQ ID NO: 2026135 - RNA, 19 nt, Homo sapiens
  misc_RNA (1)...(19): siRNA sense strand
uauuacaguuccacaucaa

SEQ ID NO: 2026136 - RNA, 19 nt, Homo sapiens
  misc_RNA (1)...(19): siRNA sense strand
ucacaacuccaucagaucu

SEQ ID NO: 2026137 - RNA, 19 nt, Homo sapiens
  misc_RNA (1)...(19): siRNA sense strand
gaagauuggggacuacaaa

SEQ ID NO: 2026138 - RNA, 19 nt, Homo sapiens
  misc_RNA (1)...(19): siRNA sense strand
ccacggccuuugaccaucu

SEQ ID NO: 2026139 - RNA, 19 nt, Homo sapiens
  misc_RNA (1)...(19): siRNA sense strand
gauagcugccgacuaagca

SEQ ID NO: 2026140 - RNA, 19 nt, Homo sapiens
  misc_RNA (1)...(19): siRNA sense strand
ggaaaauggaugacaguga

SEQ ID NO: 2026141 - RNA, 19 nt, Homo sapiens
  misc_RNA (1)...(19): siRNA sense strand
gcugagggcgucugugaca

SEQ ID NO: 2026142 - RNA, 19 nt, Homo sapiens
  misc_RNA (1)...(19): siRNA sense strand
cgccagaacccuaccaugu

SEQ ID NO: 2026143 - RNA, 19 nt, Homo sapiens
  misc_RNA (1)...(19): siRNA sense strand
uuauuacaguuccacauca

SEQ ID NO: 2026144 - RNA, 19 nt, Homo sapiens
  misc_RNA (1)...(19): siRNA sense strand
ugucagcuccauuaauaga

SEQ ID NO: 2026145 - RNA, 19 nt, Homo sapiens
  misc_RNA (1)...(19): siRNA sense strand
agaaucauccggaccaaag

SEQ ID NO: 2026146 - RNA, 19 nt, Homo sapiens
  misc_RNA (1)...(19): siRNA sense strand
ccgcucgagugcccauuug

SEQ ID NO: 2026147 - RNA, 19 nt, Homo sapiens
  misc_RNA (1)...(19): siRNA sense strand
ggaggggccuuugugaaug

SEQ ID NO: 2026148 - RNA, 19 nt, Homo sapiens
  misc_RNA (1)...(19): siRNA sense strand
ggacuacaaacgccagaac

SEQ ID NO: 2026149 - RNA, 19 nt, Homo sapiens
  misc_RNA (1)...(19): siRNA sense strand
gggcgucugugacaaugac

SEQ ID NO: 2026150 - RNA, 19 nt, Homo sapiens
  misc_RNA (1)...(19): siRNA sense strand
uggcugagggcgucuguga

SEQ ID NO: 2026151 - RNA, 19 nt, Homo sapiens
  misc_RNA (1)...(19): siRNA sense strand
ccagugucagcuccauuaa

SEQ ID NO: 2026152 - RNA, 19 nt, Homo sapiens
  misc_RNA (1)...(19): siRNA sense strand
caaggugguggagaagauu

SEQ ID NO: 2026153 - RNA, 19 nt, Homo sapiens
  misc_RNA (1)...(19): siRNA sense strand
caggauagcugccgacuaa

SEQ ID NO: 2026154 - RNA, 19 nt, Homo sapiens
  misc_RNA (1)...(19): siRNA sense strand
ccagaacccuaccauguuu

SEQ ID NO: 2026155 - RNA, 19 nt, Homo sapiens
  misc_RNA (1)...(19): siRNA sense strand
caucagaucuggccaugga

SEQ ID NO: 2026156 - RNA, 19 nt, Homo sapiens
  misc_RNA (1)...(19): siRNA sense strand
agugucagcuccauuaaua

SEQ ID NO: 2026157 - RNA, 19 nt, Homo sapiens
  misc_RNA (1)...(19): siRNA sense strand
cauccggccuggagugaua

SEQ ID NO: 2026158 - RNA, 19 nt, Homo sapiens
  misc_RNA (1)...(19): siRNA sense strand
gaaaauggaugacagugau

SEQ ID NO: 2026159 - RNA, 19 nt, Homo sapiens
  misc_RNA (1)...(19): siRNA sense strand
ccucacaacuccaucagau

SEQ ID NO: 2026160 - RNA, 19 nt, Homo sapiens
  misc_RNA (1)...(19): siRNA sense strand
ccaaggugguggagaagau

SEQ ID NO: 2026161 - RNA, 19 nt, Homo sapiens
  misc_RNA (1)...(19): siRNA sense strand
ccaaagugcagcaaccauu

SEQ ID NO: 2026162 - RNA, 19 nt, Homo sapiens
  misc_RNA (1)...(19): siRNA sense strand
ggaugacagugaucaggau

SEQ ID NO: 2026163 - RNA, 19 nt, Homo sapiens
  misc_RNA (1)...(19): siRNA sense strand
gccagaacccuaccauguu

SEQ ID NO: 2026164 - RNA, 19 nt, Homo sapiens
  misc_RNA (1)...(19): siRNA sense strand
guaaggcccugcgacaucu

SEQ ID NO: 2026165 - RNA, 19 nt, Homo sapiens
  misc_RNA (1)...(19): siRNA sense strand
gaugacagugaucaggaua

SEQ ID NO: 2026166 - RNA, 19 nt, Homo sapiens
  misc_RNA (1)...(19): siRNA sense strand
caaagugcagcaaccauuc

SEQ ID NO: 2026167 - RNA, 19 nt, Homo sapiens
  misc_RNA (1)...(19): siRNA sense strand
ucagcuccauuaauagaau

SEQ ID NO: 2026168 - RNA, 19 nt, Homo sapiens
  misc_RNA (1)...(19): siRNA sense strand
gacuaagcauugacucaca

SEQ ID NO: 2026169 - RNA, 19 nt, Homo sapiens
  misc_RNA (1)...(19): siRNA sense strand
ccacugccacggccuuuga

SEQ ID NO: 2026170 - RNA, 19 nt, Homo sapiens
  misc_RNA (1)...(19): siRNA sense strand
gagggcgucugugacaaug

SEQ ID NO: 2026171 - RNA, 19 nt, Homo sapiens
  misc_RNA (1)...(19): siRNA sense strand
cauucaaccucccuaugga

SEQ ID NO: 2026172 - RNA, 19 nt, Homo sapiens
  misc_RNA (1)...(19): siRNA sense strand
cccagugucagcuccauua

SEQ ID NO: 2026173 - RNA, 19 nt, Homo sapiens
  misc_RNA (1)...(19): siRNA sense strand
ugaguuccccauauuauua

SEQ ID NO: 2026174 - RNA, 19 nt, Homo sapiens
  misc_RNA (1)...(19): siRNA sense strand
cauuugagcggcagcacua

SEQ ID NO: 2026175 - RNA, 19 nt, Homo sapiens
  misc_RNA (1)...(19): siRNA sense strand
gcacuacccagaggccuau

SEQ ID NO: 2026176 - RNA, 19 nt, Homo sapiens
  misc_RNA (1)...(19): siRNA sense strand
uauuacaguuccacaucaa

SEQ ID NO: 2026177 - RNA, 19 nt, Homo sapiens
  misc_RNA (1)...(19): siRNA sense strand
ucacaacuccaucagaucu

SEQ ID NO: 2026178 - RNA, 19 nt, Homo sapiens
  misc_RNA (1)...(19): siRNA sense strand
gaagauuggggacuacaaa

SEQ ID NO: 2026179 - RNA, 19 nt, Homo sapiens
  misc_RNA (1)...(19): siRNA sense strand
ccacggccuuugaccaucu

SEQ ID NO: 2026180 - RNA, 19 nt, Homo sapiens
  misc_RNA (1)...(19): siRNA sense strand
gauagcugccgacuaagca

SEQ ID NO: 2026181 - RNA, 19 nt, Homo sapiens
  misc_RNA (1)...(19): siRNA sense strand
ggaaaauggaugacaguga

SEQ ID NO: 2026182 - RNA, 19 nt, Homo sapiens
  misc_RNA (1)...(19): siRNA sense strand
gcugagggcgucugugaca

SEQ ID NO: 2026183 - RNA, 19 nt, Homo sapiens
  misc_RNA (1)...(19): siRNA sense strand
cgccagaacccuaccaugu

SEQ ID NO: 2026184 - RNA, 19 nt, Homo sapiens
  misc_RNA (1)...(19): siRNA sense strand
uuauuacaguuccacauca

SEQ ID NO: 2026185 - RNA, 19 nt, Homo sapiens
  misc_RNA (1)...(19): siRNA sense strand
ugucagcuccauuaauaga

SEQ ID NO: 2026186 - RNA, 19 nt, Homo sapiens
  misc_RNA (1)...(19): siRNA sense strand
agaaucauccggaccaaag

SEQ ID NO: 2026187 - RNA, 19 nt, Homo sapiens
  misc_RNA (1)...(19): siRNA sense strand
ccgcucgagugcccauuug

SEQ ID NO: 2026188 - RNA, 19 nt, Homo sapiens
  misc_RNA (1)...(19): siRNA sense strand
ggaggggccuuugugaaug

SEQ ID NO: 2026189 - RNA, 19 nt, Homo sapiens
  misc_RNA (1)...(19): siRNA sense strand
ggacuacaaacgccagaac

SEQ ID NO: 2026190 - RNA, 19 nt, Homo sapiens
  misc_RNA (1)...(19): siRNA sense strand
gggcgucugugacaaugac

SEQ ID NO: 2026191 - RNA, 19 nt, Homo sapiens
  misc_RNA (1)...(19): siRNA sense strand
uggcugagggcgucuguga

SEQ ID NO: 2026192 - RNA, 19 nt, Homo sapiens
  misc_RNA (1)...(19): siRNA sense strand
ccagugucagcuccauuaa

SEQ ID NO: 2026193 - RNA, 19 nt, Homo sapiens
  misc_RNA (1)...(19): siRNA sense strand
caaggugguggagaagauu

SEQ ID NO: 2026194 - RNA, 19 nt, Homo sapiens
  misc_RNA (1)...(19): siRNA sense strand
caggauagcugccgacuaa

SEQ ID NO: 2026195 - RNA, 19 nt, Homo sapiens
  misc_RNA (1)...(19): siRNA sense strand
ccagaacccuaccauguuu

SEQ ID NO: 2026196 - RNA, 19 nt, Homo sapiens
  misc_RNA (1)...(19): siRNA sense strand
caucagaucuggccaugga

SEQ ID NO: 2026197 - RNA, 19 nt, Homo sapiens
  misc_RNA (1)...(19): siRNA sense strand
agugucagcuccauuaaua

SEQ ID NO: 2026198 - RNA, 19 nt, Homo sapiens
  misc_RNA (1)...(19): siRNA sense strand
cauccggccuggagugaua

SEQ ID NO: 2026199 - RNA, 19 nt, Homo sapiens
  misc_RNA (1)...(19): siRNA sense strand
gaaaauggaugacagugau

SEQ ID NO: 2026200 - RNA, 19 nt, Homo sapiens
  misc_RNA (1)...(19): siRNA sense strand
ccucacaacuccaucagau

SEQ ID NO: 2026201 - RNA, 19 nt, Homo sapiens
  misc_RNA (1)...(19): siRNA sense strand
ccaaggugguggagaagau

SEQ ID NO: 2026202 - RNA, 19 nt, Homo sapiens
  misc_RNA (1)...(19): siRNA sense strand
ccaaagugcagcaaccauu

SEQ ID NO: 2026203 - RNA, 19 nt, Homo sapiens
  misc_RNA (1)...(19): siRNA sense strand
ggaugacagugaucaggau

SEQ ID NO: 2026204 - RNA, 19 nt, Homo sapiens
  misc_RNA (1)...(19): siRNA sense strand
gccagaacccuaccauguu

SEQ ID NO: 2026205 - RNA, 19 nt, Homo sapiens
  misc_RNA (1)...(19): siRNA sense strand
guaaggcccugcgacaucu

SEQ ID NO: 2026206 - RNA, 19 nt, Homo sapiens
  misc_RNA (1)...(19): siRNA sense strand
gaugacagugaucaggaua

SEQ ID NO: 2026207 - RNA, 19 nt, Homo sapiens
  misc_RNA (1)...(19): siRNA sense strand
caaagugcagcaaccauuc

SEQ ID NO: 2026208 - RNA, 19 nt, Homo sapiens
  misc_RNA (1)...(19): siRNA sense strand
ucagcuccauuaauagaau

SEQ ID NO: 2026209 - RNA, 19 nt, Homo sapiens
  misc_RNA (1)...(19): siRNA sense strand
gacuaagcauugacucaca

SEQ ID NO: 2026210 - RNA, 19 nt, Homo sapiens
  misc_RNA (1)...(19): siRNA sense strand
gagggcgucugugacaaug

SEQ ID NO: 2026211 - RNA, 19 nt, Homo sapiens
  misc_RNA (1)...(19): siRNA sense strand
cauucaaccucccuaugga

SEQ ID NO: 2026212 - RNA, 19 nt, Homo sapiens
  misc_RNA (1)...(19): siRNA sense strand
cccagugucagcuccauua

SEQ ID NO: 2026213 - RNA, 19 nt, Homo sapiens
  misc_RNA (1)...(19): siRNA sense strand
cauuugagcggcagcacua

SEQ ID NO: 2026214 - RNA, 19 nt, Homo sapiens
  misc_RNA (1)...(19): siRNA sense strand
gcacuacccagaggccuau

SEQ ID NO: 2026215 - RNA, 19 nt, Homo sapiens
  misc_RNA (1)...(19): siRNA sense strand
ucacaacuccaucagaucu

SEQ ID NO: 2026216 - RNA, 19 nt, Homo sapiens
  misc_RNA (1)...(19): siRNA sense strand
gaagauuggggacuacaaa

SEQ ID NO: 2026217 - RNA, 19 nt, Homo sapiens
  misc_RNA (1)...(19): siRNA sense strand
gauagcugccgacuaagca

SEQ ID NO: 2026218 - RNA, 19 nt, Homo sapiens
  misc_RNA (1)...(19): siRNA sense strand
ggaaaauggaugacaguga

SEQ ID NO: 2026219 - RNA, 19 nt, Homo sapiens
  misc_RNA (1)...(19): siRNA sense strand
gcugagggcgucugugaca

SEQ ID NO: 2026220 - RNA, 19 nt, Homo sapiens
  misc_RNA (1)...(19): siRNA sense strand
cgccagaacccuaccaugu

SEQ ID NO: 2026221 - RNA, 19 nt, Homo sapiens
  misc_RNA (1)...(19): siRNA sense strand
ugucagcuccauuaauaga

SEQ ID NO: 2026222 - RNA, 19 nt, Homo sapiens
  misc_RNA (1)...(19): siRNA sense strand
agaaucauccggaccaaag

SEQ ID NO: 2026223 - RNA, 19 nt, Homo sapiens
  misc_RNA (1)...(19): siRNA sense strand
ccgcucgagugcccauuug

SEQ ID NO: 2026224 - RNA, 19 nt, Homo sapiens
  misc_RNA (1)...(19): siRNA sense strand
ggaggggccuuugugaaug

SEQ ID NO: 2026225 - RNA, 19 nt, Homo sapiens
  misc_RNA (1)...(19): siRNA sense strand
ggacuacaaacgccagaac

SEQ ID NO: 2026226 - RNA, 19 nt, Homo sapiens
  misc_RNA (1)...(19): siRNA sense strand
gggcgucugugacaaugac

SEQ ID NO: 2026227 - RNA, 19 nt, Homo sapiens
  misc_RNA (1)...(19): siRNA sense strand
uggcugagggcgucuguga

SEQ ID NO: 2026228 - RNA, 19 nt, Homo sapiens
  misc_RNA (1)...(19): siRNA sense strand
ccagugucagcuccauuaa

SEQ ID NO: 2026229 - RNA, 19 nt, Homo sapiens
  misc_RNA (1)...(19): siRNA sense strand
caaggugguggagaagauu

SEQ ID NO: 2026230 - RNA, 19 nt, Homo sapiens
  misc_RNA (1)...(19): siRNA sense strand
caggauagcugccgacuaa

SEQ ID NO: 2026231 - RNA, 19 nt, Homo sapiens
  misc_RNA (1)...(19): siRNA sense strand
ccagaacccuaccauguuu

SEQ ID NO: 2026232 - RNA, 19 nt, Homo sapiens
  misc_RNA (1)...(19): siRNA sense strand
caucagaucuggccaugga

SEQ ID NO: 2026233 - RNA, 19 nt, Homo sapiens
  misc_RNA (1)...(19): siRNA sense strand
agugucagcuccauuaaua

SEQ ID NO: 2026234 - RNA, 19 nt, Homo sapiens
  misc_RNA (1)...(19): siRNA sense strand
cauccggccuggagugaua

SEQ ID NO: 2026235 - RNA, 19 nt, Homo sapiens
  misc_RNA (1)...(19): siRNA sense strand
gaaaauggaugacagugau

SEQ ID NO: 2026236 - RNA, 19 nt, Homo sapiens
  misc_RNA (1)...(19): siRNA sense strand
ccucacaacuccaucagau

SEQ ID NO: 2026237 - RNA, 19 nt, Homo sapiens
  misc_RNA (1)...(19): siRNA sense strand
ccaaggugguggagaagau

SEQ ID NO: 2026238 - RNA, 19 nt, Homo sapiens
  misc_RNA (1)...(19): siRNA sense strand
ccaaagugcagcaaccauu

SEQ ID NO: 2026239 - RNA, 19 nt, Homo sapiens
  misc_RNA (1)...(19): siRNA sense strand
ggaugacagugaucaggau

SEQ ID NO: 2026240 - RNA, 19 nt, Homo sapiens
  misc_RNA (1)...(19): siRNA sense strand
gccagaacccuaccauguu

SEQ ID NO: 2026241 - RNA, 19 nt, Homo sapiens
  misc_RNA (1)...(19): siRNA sense strand
guaaggcccugcgacaucu

SEQ ID NO: 2026242 - RNA, 19 nt, Homo sapiens
  misc_RNA (1)...(19): siRNA sense strand
gaugacagugaucaggaua

SEQ ID NO: 2026243 - RNA, 19 nt, Homo sapiens
  misc_RNA (1)...(19): siRNA sense strand
caaagugcagcaaccauuc

SEQ ID NO: 2026244 - RNA, 19 nt, Homo sapiens
  misc_RNA (1)...(19): siRNA sense strand
ucagcuccauuaauagaau

SEQ ID NO: 2026245 - RNA, 19 nt, Homo sapiens
  misc_RNA (1)...(19): siRNA sense strand
gacuaagcauugacucaca

SEQ ID NO: 2026246 - RNA, 19 nt, Homo sapiens
  misc_RNA (1)...(19): siRNA sense strand
gagggcgucugugacaaug

SEQ ID NO: 2026247 - RNA, 19 nt, Homo sapiens
  misc_RNA (1)...(19): siRNA sense strand
cauucaaccucccuaugga

SEQ ID NO: 2026248 - RNA, 19 nt, Homo sapiens
  misc_RNA (1)...(19): siRNA sense strand
cccagugucagcuccauua

SEQ ID NO: 2026249 - RNA, 19 nt, Homo sapiens
  misc_RNA (1)...(19): siRNA sense strand
cauuugagcggcagcacua

SEQ ID NO: 2026250 - RNA, 19 nt, Homo sapiens
  misc_RNA (1)...(19): siRNA sense strand
gcacuacccagaggccuau

SEQ ID NO: 2026251 - RNA, 19 nt, Homo sapiens
  misc_RNA (1)...(19): siRNA sense strand
ucacaacuccaucagaucu

SEQ ID NO: 2026252 - RNA, 19 nt, Homo sapiens
  misc_RNA (1)...(19): siRNA sense strand
gaagauuggggacuacaaa

SEQ ID NO: 2026253 - RNA, 19 nt, Homo sapiens
  misc_RNA (1)...(19): siRNA sense strand
gauagcugccgacuaagca

SEQ ID NO: 2026254 - RNA, 19 nt, Homo sapiens
  misc_RNA (1)...(19): siRNA sense strand
ggaaaauggaugacaguga

SEQ ID NO: 2026255 - RNA, 19 nt, Homo sapiens
  misc_RNA (1)...(19): siRNA sense strand
gcugagggcgucugugaca

SEQ ID NO: 2026256 - RNA, 19 nt, Homo sapiens
  misc_RNA (1)...(19): siRNA sense strand
cgccagaacccuaccaugu

SEQ ID NO: 2026257 - RNA, 19 nt, Homo sapiens
  misc_RNA (1)...(19): siRNA sense strand
ugucagcuccauuaauaga

SEQ ID NO: 2026258 - RNA, 19 nt, Homo sapiens
  misc_RNA (1)...(19): siRNA sense strand
agaaucauccggaccaaag

SEQ ID NO: 2026259 - RNA, 19 nt, Homo sapiens
  misc_RNA (1)...(19): siRNA sense strand
ccgcucgagugcccauuug

SEQ ID NO: 2026260 - RNA, 19 nt, Homo sapiens
  misc_RNA (1)...(19): siRNA sense strand
ggaggggccuuugugaaug

SEQ ID NO: 2026261 - RNA, 19 nt, Homo sapiens
  misc_RNA (1)...(19): siRNA sense strand
ggacuacaaacgccagaac

SEQ ID NO: 2026262 - RNA, 19 nt, Homo sapiens
  misc_RNA (1)...(19): siRNA sense strand
gggcgucugugacaaugac

SEQ ID NO: 2026263 - RNA, 19 nt, Homo sapiens
  misc_RNA (1)...(19): siRNA sense strand
uggcugagggcgucuguga

SEQ ID NO: 2026264 - RNA, 19 nt, Homo sapiens
  misc_RNA (1)...(19): siRNA sense strand
ccagugucagcuccauuaa

SEQ ID NO: 2026265 - RNA, 19 nt, Homo sapiens
  misc_RNA (1)...(19): siRNA sense strand
caaggugguggagaagauu

SEQ ID NO: 2026266 - RNA, 19 nt, Homo sapiens
  misc_RNA (1)...(19): siRNA sense strand
caggauagcugccgacuaa

SEQ ID NO: 2026267 - RNA, 19 nt, Homo sapiens
  misc_RNA (1)...(19): siRNA sense strand
ccagaacccuaccauguuu

SEQ ID NO: 2026268 - RNA, 19 nt, Homo sapiens
  misc_RNA (1)...(19): siRNA sense strand
caucagaucuggccaugga

SEQ ID NO: 2026269 - RNA, 19 nt, Homo sapiens
  misc_RNA (1)...(19): siRNA sense strand
agugucagcuccauuaaua

SEQ ID NO: 2026270 - RNA, 19 nt, Homo sapiens
  misc_RNA (1)...(19): siRNA sense strand
cauccggccuggagugaua

SEQ ID NO: 2026271 - RNA, 19 nt, Homo sapiens
  misc_RNA (1)...(19): siRNA sense strand
gaaaauggaugacagugau

SEQ ID NO: 2026272 - RNA, 19 nt, Homo sapiens
  misc_RNA (1)...(19): siRNA sense strand
ccucacaacuccaucagau

SEQ ID NO: 2026273 - RNA, 19 nt, Homo sapiens
  misc_RNA (1)...(19): siRNA sense strand
ccaaggugguggagaagau

SEQ ID NO: 2026274 - RNA, 19 nt, Homo sapiens
  misc_RNA (1)...(19): siRNA sense strand
ccaaagugcagcaaccauu

SEQ ID NO: 2026275 - RNA, 19 nt, Homo sapiens
  misc_RNA (1)...(19): siRNA sense strand
ggaugacagugaucaggau

SEQ ID NO: 2026276 - RNA, 19 nt, Homo sapiens
  misc_RNA (1)...(19): siRNA sense strand
gccagaacccuaccauguu

SEQ ID NO: 2026277 - RNA, 19 nt, Homo sapiens
  misc_RNA (1)...(19): siRNA sense strand
guaaggcccugcgacaucu

SEQ ID NO: 2026278 - RNA, 19 nt, Homo sapiens
  misc_RNA (1)...(19): siRNA sense strand
gaugacagugaucaggaua

SEQ ID NO: 2026279 - RNA, 19 nt, Homo sapiens
  misc_RNA (1)...(19): siRNA sense strand
caaagugcagcaaccauuc

SEQ ID NO: 2026280 - RNA, 19 nt, Homo sapiens
  misc_RNA (1)...(19): siRNA sense strand
ucagcuccauuaauagaau

SEQ ID NO: 2026281 - RNA, 19 nt, Homo sapiens
  misc_RNA (1)...(19): siRNA sense strand
gacuaagcauugacucaca

SEQ ID NO: 2026282 - RNA, 19 nt, Homo sapiens
  misc_RNA (1)...(19): siRNA sense strand
gagggcgucugugacaaug

SEQ ID NO: 2026283 - RNA, 19 nt, Homo sapiens
  misc_RNA (1)...(19): siRNA sense strand
cauucaaccucccuaugga

SEQ ID NO: 2026284 - RNA, 19 nt, Homo sapiens
  misc_RNA (1)...(19): siRNA sense strand
cccagugucagcuccauua

SEQ ID NO: 2026285 - RNA, 19 nt, Homo sapiens
  misc_RNA (1)...(19): siRNA sense strand
cauuugagcggcagcacua

SEQ ID NO: 2026286 - RNA, 19 nt, Homo sapiens
  misc_RNA (1)...(19): siRNA sense strand
gcacuacccagaggccuau

SEQ ID NO: 2026287 - RNA, 19 nt, Homo sapiens
  misc_RNA (1)...(19): siRNA sense strand
ucacaacuccaucagaucu

SEQ ID NO: 2026288 - RNA, 19 nt, Homo sapiens
  misc_RNA (1)...(19): siRNA sense strand
gaagauuggggacuacaaa

SEQ ID NO: 2026289 - RNA, 19 nt, Homo sapiens
  misc_RNA (1)...(19): siRNA sense strand
gauagcugccgacuaagca

SEQ ID NO: 2026290 - RNA, 19 nt, Homo sapiens
  misc_RNA (1)...(19): siRNA sense strand
ggaaaauggaugacaguga

SEQ ID NO: 2026291 - RNA, 19 nt, Homo sapiens
  misc_RNA (1)...(19): siRNA sense strand
gcugagggcgucugugaca

SEQ ID NO: 2026292 - RNA, 19 nt, Homo sapiens
  misc_RNA (1)...(19): siRNA sense strand
cgccagaacccuaccaugu

SEQ ID NO: 2026293 - RNA, 19 nt, Homo sapiens
  misc_RNA (1)...(19): siRNA sense strand
ugucagcuccauuaauaga

SEQ ID NO: 2026294 - RNA, 19 nt, Homo sapiens
  misc_RNA (1)...(19): siRNA sense strand
agaaucauccggaccaaag

SEQ ID NO: 2026295 - RNA, 19 nt, Homo sapiens
  misc_RNA (1)...(19): siRNA sense strand
ccgcucgagugcccauuug

SEQ ID NO: 2026296 - RNA, 19 nt, Homo sapiens
  misc_RNA (1)...(19): siRNA sense strand
ggaggggccuuugugaaug

SEQ ID NO: 2026297 - RNA, 19 nt, Homo sapiens
  misc_RNA (1)...(19): siRNA sense strand
ggacuacaaacgccagaac

SEQ ID NO: 2026298 - RNA, 19 nt, Homo sapiens
  misc_RNA (1)...(19): siRNA sense strand
gggcgucugugacaaugac

SEQ ID NO: 2026299 - RNA, 19 nt, Homo sapiens
  misc_RNA (1)...(19): siRNA sense strand
uggcugagggcgucuguga

SEQ ID NO: 2026300 - RNA, 19 nt, Homo sapiens
  misc_RNA (1)...(19): siRNA sense strand
ccagugucagcuccauuaa

SEQ ID NO: 2026301 - RNA, 19 nt, Homo sapiens
  misc_RNA (1)...(19): siRNA sense strand
caaggugguggagaagauu

SEQ ID NO: 2026302 - RNA, 19 nt, Homo sapiens
  misc_RNA (1)...(19): siRNA sense strand
caggauagcugccgacuaa

SEQ ID NO: 2026303 - RNA, 19 nt, Homo sapiens
  misc_RNA (1)...(19): siRNA sense strand
ccagaacccuaccauguuu

SEQ ID NO: 2026304 - RNA, 19 nt, Homo sapiens
  misc_RNA (1)...(19): siRNA sense strand
caucagaucuggccaugga

SEQ ID NO: 2026305 - RNA, 19 nt, Homo sapiens
  misc_RNA (1)...(19): siRNA sense strand
agugucagcuccauuaaua

SEQ ID NO: 2026306 - RNA, 19 nt, Homo sapiens
  misc_RNA (1)...(19): siRNA sense strand
cauccggccuggagugaua

SEQ ID NO: 2026307 - RNA, 19 nt, Homo sapiens
  misc_RNA (1)...(19): siRNA sense strand
gaaaauggaugacagugau

SEQ ID NO: 2026308 - RNA, 19 nt, Homo sapiens
  misc_RNA (1)...(19): siRNA sense strand
ccucacaacuccaucagau

SEQ ID NO: 2026309 - RNA, 19 nt, Homo sapiens
  misc_RNA (1)...(19): siRNA sense strand
ccaaggugguggagaagau

SEQ ID NO: 2026310 - RNA, 19 nt, Homo sapiens
  misc_RNA (1)...(19): siRNA sense strand
ccaaagugcagcaaccauu

SEQ ID NO: 2026311 - RNA, 19 nt, Homo sapiens
  misc_RNA (1)...(19): siRNA sense strand
ggaugacagugaucaggau

SEQ ID NO: 2026312 - RNA, 19 nt, Homo sapiens
  misc_RNA (1)...(19): siRNA sense strand
gccagaacccuaccauguu

SEQ ID NO: 2026313 - RNA, 19 nt, Homo sapiens
  misc_RNA (1)...(19): siRNA sense strand
guaaggcccugcgacaucu

SEQ ID NO: 2026314 - RNA, 19 nt, Homo sapiens
  misc_RNA (1)...(19): siRNA sense strand
gaugacagugaucaggaua

SEQ ID NO: 2026315 - RNA, 19 nt, Homo sapiens
  misc_RNA (1)...(19): siRNA sense strand
caaagugcagcaaccauuc

SEQ ID NO: 2026316 - RNA, 19 nt, Homo sapiens
  misc_RNA (1)...(19): siRNA sense strand
ucagcuccauuaauagaau

SEQ ID NO: 2026317 - RNA, 19 nt, Homo sapiens
  misc_RNA (1)...(19): siRNA sense strand
gacuaagcauugacucaca

SEQ ID NO: 2026318 - RNA, 19 nt, Homo sapiens
  misc_RNA (1)...(19): siRNA sense strand
ccacugccacggccuuuga

SEQ ID NO: 2026319 - RNA, 19 nt, Homo sapiens
  misc_RNA (1)...(19): siRNA sense strand
gagggcgucugugacaaug

SEQ ID NO: 2026320 - RNA, 19 nt, Homo sapiens
  misc_RNA (1)...(19): siRNA sense strand
cauucaaccucccuaugga

SEQ ID NO: 2026321 - RNA, 19 nt, Homo sapiens
  misc_RNA (1)...(19): siRNA sense strand
cccagugucagcuccauua

SEQ ID NO: 2026322 - RNA, 19 nt, Homo sapiens
  misc_RNA (1)...(19): siRNA sense strand
ugaguuccccauauuauua

SEQ ID NO: 2026323 - RNA, 19 nt, Homo sapiens
  misc_RNA (1)...(19): siRNA sense strand
cauuugagcggcagcacua

SEQ ID NO: 2026324 - RNA, 19 nt, Homo sapiens
  misc_RNA (1)...(19): siRNA sense strand
gcacuacccagaggccuau

SEQ ID NO: 2026325 - RNA, 19 nt, Homo sapiens
  misc_RNA (1)...(19): siRNA sense strand
uauuacaguuccacaucaa

SEQ ID NO: 2026326 - RNA, 19 nt, Homo sapiens
  misc_RNA (1)...(19): siRNA sense strand
ucacaacuccaucagaucu

SEQ ID NO: 2026327 - RNA, 19 nt, Homo sapiens
  misc_RNA (1)...(19): siRNA sense strand
gaagauuggggacuacaaa

SEQ ID NO: 2026328 - RNA, 19 nt, Homo sapiens
  misc_RNA (1)...(19): siRNA sense strand
ccacggccuuugaccaucu

SEQ ID NO: 2026329 - RNA, 19 nt, Homo sapiens
  misc_RNA (1)...(19): siRNA sense strand
gauagcugccgacuaagca

SEQ ID NO: 2026330 - RNA, 19 nt, Homo sapiens
  misc_RNA (1)...(19): siRNA sense strand
ggaaaauggaugacaguga

SEQ ID NO: 2026331 - RNA, 19 nt, Homo sapiens
  misc_RNA (1)...(19): siRNA sense strand
gcugagggcgucugugaca

SEQ ID NO: 2026332 - RNA, 19 nt, Homo sapiens
  misc_RNA (1)...(19): siRNA sense strand
cgccagaacccuaccaugu

SEQ ID NO: 2026333 - RNA, 19 nt, Homo sapiens
  misc_RNA (1)...(19): siRNA sense strand
uuauuacaguuccacauca

SEQ ID NO: 2026334 - RNA, 19 nt, Homo sapiens
  misc_RNA (1)...(19): siRNA sense strand
ugucagcuccauuaauaga

SEQ ID NO: 2026335 - RNA, 19 nt, Homo sapiens
  misc_RNA (1)...(19): siRNA sense strand
agaaucauccggaccaaag

SEQ ID NO: 2026336 - RNA, 19 nt, Homo sapiens
  misc_RNA (1)...(19): siRNA sense strand
ccgcucgagugcccauuug

SEQ ID NO: 2026337 - RNA, 19 nt, Homo sapiens
  misc_RNA (1)...(19): siRNA sense strand
ggaggggccuuugugaaug

SEQ ID NO: 2026338 - RNA, 19 nt, Homo sapiens
  misc_RNA (1)...(19): siRNA sense strand
ggacuacaaacgccagaac

SEQ ID NO: 2026339 - RNA, 19 nt, Homo sapiens
  misc_RNA (1)...(19): siRNA sense strand
gggcgucugugacaaugac

SEQ ID NO: 2026340 - RNA, 19 nt, Homo sapiens
  misc_RNA (1)...(19): siRNA sense strand
uggcugagggcgucuguga

SEQ ID NO: 2026341 - RNA, 19 nt, Homo sapiens
  misc_RNA (1)...(19): siRNA sense strand
ccagugucagcuccauuaa

SEQ ID NO: 2026342 - RNA, 19 nt, Homo sapiens
  misc_RNA (1)...(19): siRNA sense strand
caaggugguggagaagauu

SEQ ID NO: 2026343 - RNA, 19 nt, Homo sapiens
  misc_RNA (1)...(19): siRNA sense strand
caggauagcugccgacuaa

SEQ ID NO: 2026344 - RNA, 19 nt, Homo sapiens
  misc_RNA (1)...(19): siRNA sense strand
ccagaacccuaccauguuu

SEQ ID NO: 2026345 - RNA, 19 nt, Homo sapiens
  misc_RNA (1)...(19): siRNA sense strand
caucagaucuggccaugga

SEQ ID NO: 2026346 - RNA, 19 nt, Homo sapiens
  misc_RNA (1)...(19): siRNA sense strand
agugucagcuccauuaaua

SEQ ID NO: 2026347 - RNA, 19 nt, Homo sapiens
  misc_RNA (1)...(19): siRNA sense strand
cauccggccuggagugaua

SEQ ID NO: 2026348 - RNA, 19 nt, Homo sapiens
  misc_RNA (1)...(19): siRNA sense strand
gaaaauggaugacagugau

SEQ ID NO: 2026349 - RNA, 19 nt, Homo sapiens
  misc_RNA (1)...(19): siRNA sense strand
ccucacaacuccaucagau

SEQ ID NO: 2026350 - RNA, 19 nt, Homo sapiens
  misc_RNA (1)...(19): siRNA sense strand
ccaaggugguggagaagau

SEQ ID NO: 2026351 - RNA, 19 nt, Homo sapiens
  misc_RNA (1)...(19): siRNA sense strand
ccaaagugcagcaaccauu

SEQ ID NO: 2026352 - RNA, 19 nt, Homo sapiens
  misc_RNA (1)...(19): siRNA sense strand
ggaugacagugaucaggau

SEQ ID NO: 2026353 - RNA, 19 nt, Homo sapiens
  misc_RNA (1)...(19): siRNA sense strand
gccagaacccuaccauguu

SEQ ID NO: 2026354 - RNA, 19 nt, Homo sapiens
  misc_RNA (1)...(19): siRNA sense strand
guaaggcccugcgacaucu

SEQ ID NO: 2026355 - RNA, 19 nt, Homo sapiens
  misc_RNA (1)...(19): siRNA sense strand
gaugacagugaucaggaua

SEQ ID NO: 2026356 - RNA, 19 nt, Homo sapiens
  misc_RNA (1)...(19): siRNA sense strand
caaagugcagcaaccauuc

SEQ ID NO: 2026357 - RNA, 19 nt, Homo sapiens
  misc_RNA (1)...(19): siRNA sense strand
ucagcuccauuaauagaau

SEQ ID NO: 2026358 - RNA, 19 nt, Homo sapiens
  misc_RNA (1)...(19): siRNA sense strand
gacuaagcauugacucaca

SEQ ID NO: 2026359 - RNA, 19 nt, Homo sapiens
  misc_RNA (1)...(19): siRNA sense strand
ccacugccacggccuuuga

SEQ ID NO: 2026360 - RNA, 19 nt, Homo sapiens
  misc_RNA (1)...(19): siRNA sense strand
gagggcgucugugacaaug

SEQ ID NO: 2026361 - RNA, 19 nt, Homo sapiens
  misc_RNA (1)...(19): siRNA sense strand
cauucaaccucccuaugga

SEQ ID NO: 2026362 - RNA, 19 nt, Homo sapiens
  misc_RNA (1)...(19): siRNA sense strand
cccagugucagcuccauua

SEQ ID NO: 2026363 - RNA, 19 nt, Homo sapiens
  misc_RNA (1)...(19): siRNA sense strand
ugaguuccccauauuauua

SEQ ID NO: 2026364 - RNA, 19 nt, Homo sapiens
  misc_RNA (1)...(19): siRNA sense strand
cauuugagcggcagcacua

SEQ ID NO: 2026365 - RNA, 19 nt, Homo sapiens
  misc_RNA (1)...(19): siRNA sense strand
gcacuacccagaggccuau

SEQ ID NO: 2026366 - RNA, 19 nt, Homo sapiens
  misc_RNA (1)...(19): siRNA sense strand
uauuacaguuccacaucaa

SEQ ID NO: 2026367 - RNA, 19 nt, Homo sapiens
  misc_RNA (1)...(19): siRNA sense strand
ucacaacuccaucagaucu

SEQ ID NO: 2026368 - RNA, 19 nt, Homo sapiens
  misc_RNA (1)...(19): siRNA sense strand
gaagauuggggacuacaaa

SEQ ID NO: 2026369 - RNA, 19 nt, Homo sapiens
  misc_RNA (1)...(19): siRNA sense strand
ccacggccuuugaccaucu

SEQ ID NO: 2026370 - RNA, 19 nt, Homo sapiens
  misc_RNA (1)...(19): siRNA sense strand
gauagcugccgacuaagca

SEQ ID NO: 2026371 - RNA, 19 nt, Homo sapiens
  misc_RNA (1)...(19): siRNA sense strand
ggaaaauggaugacaguga

SEQ ID NO: 2026372 - RNA, 19 nt, Homo sapiens
  misc_RNA (1)...(19): siRNA sense strand
gcugagggcgucugugaca

SEQ ID NO: 2026373 - RNA, 19 nt, Homo sapiens
  misc_RNA (1)...(19): siRNA sense strand
cgccagaacccuaccaugu

SEQ ID NO: 2026374 - RNA, 19 nt, Homo sapiens
  misc_RNA (1)...(19): siRNA sense strand
uuauuacaguuccacauca

SEQ ID NO: 2026375 - RNA, 19 nt, Homo sapiens
  misc_RNA (1)...(19): siRNA sense strand
ugucagcuccauuaauaga

SEQ ID NO: 2026376 - RNA, 19 nt, Homo sapiens
  misc_RNA (1)...(19): siRNA sense strand
agaaucauccggaccaaag

SEQ ID NO: 2026377 - RNA, 19 nt, Homo sapiens
  misc_RNA (1)...(19): siRNA sense strand
ccgcucgagugcccauuug

SEQ ID NO: 2026378 - RNA, 19 nt, Homo sapiens
  misc_RNA (1)...(19): siRNA sense strand
ggaggggccuuugugaaug

SEQ ID NO: 2026379 - RNA, 19 nt, Homo sapiens
  misc_RNA (1)...(19): siRNA sense strand
ggacuacaaacgccagaac

SEQ ID NO: 2026380 - RNA, 19 nt, Homo sapiens
  misc_RNA (1)...(19): siRNA sense strand
gggcgucugugacaaugac

SEQ ID NO: 2026381 - RNA, 19 nt, Homo sapiens
  misc_RNA (1)...(19): siRNA sense strand
uggcugagggcgucuguga

SEQ ID NO: 2026382 - RNA, 19 nt, Homo sapiens
  misc_RNA (1)...(19): siRNA sense strand
ccagugucagcuccauuaa

SEQ ID NO: 2026383 - RNA, 19 nt, Homo sapiens
  misc_RNA (1)...(19): siRNA sense strand
caaggugguggagaagauu

SEQ ID NO: 2026384 - RNA, 19 nt, Homo sapiens
  misc_RNA (1)...(19): siRNA sense strand
caggauagcugccgacuaa

SEQ ID NO: 2026385 - RNA, 19 nt, Homo sapiens
  misc_RNA (1)...(19): siRNA sense strand
ccagaacccuaccauguuu

SEQ ID NO: 2026386 - RNA, 19 nt, Homo sapiens
  misc_RNA (1)...(19): siRNA sense strand
caucagaucuggccaugga

SEQ ID NO: 2026387 - RNA, 19 nt, Homo sapiens
  misc_RNA (1)...(19): siRNA sense strand
agugucagcuccauuaaua

SEQ ID NO: 2026388 - RNA, 19 nt, Homo sapiens
  misc_RNA (1)...(19): siRNA sense strand
cauccggccuggagugaua

SEQ ID NO: 2026389 - RNA, 19 nt, Homo sapiens
  misc_RNA (1)...(19): siRNA sense strand
gaaaauggaugacagugau

SEQ ID NO: 2026390 - RNA, 19 nt, Homo sapiens
  misc_RNA (1)...(19): siRNA sense strand
ccucacaacuccaucagau

SEQ ID NO: 2026391 - RNA, 19 nt, Homo sapiens
  misc_RNA (1)...(19): siRNA sense strand
ccaaggugguggagaagau

SEQ ID NO: 2026392 - RNA, 19 nt, Homo sapiens
  misc_RNA (1)...(19): siRNA sense strand
ccaaagugcagcaaccauu

SEQ ID NO: 2026393 - RNA, 19 nt, Homo sapiens
  misc_RNA (1)...(19): siRNA sense strand
ggaugacagugaucaggau

SEQ ID NO: 2026394 - RNA, 19 nt, Homo sapiens
  misc_RNA (1)...(19): siRNA sense strand
gccagaacccuaccauguu

SEQ ID NO: 2026395 - RNA, 19 nt, Homo sapiens
  misc_RNA (1)...(19): siRNA sense strand
guaaggcccugcgacaucu

SEQ ID NO: 2026396 - RNA, 19 nt, Homo sapiens
  misc_RNA (1)...(19): siRNA sense strand
gaugacagugaucaggaua

SEQ ID NO: 2026397 - RNA, 19 nt, Homo sapiens
  misc_RNA (1)...(19): siRNA sense strand
caaagugcagcaaccauuc

SEQ ID NO: 2026398 - RNA, 19 nt, Homo sapiens
  misc_RNA (1)...(19): siRNA sense strand
ucagcuccauuaauagaau

SEQ ID NO: 2026399 - RNA, 19 nt, Homo sapiens
  misc_RNA (1)...(19): siRNA sense strand
gacuaagcauugacucaca

SEQ ID NO: 2026400 - RNA, 19 nt, Homo sapiens
  misc_RNA (1)...(19): siRNA sense strand
gagggcgucugugacaaug

SEQ ID NO: 2026401 - RNA, 19 nt, Homo sapiens
  misc_RNA (1)...(19): siRNA sense strand
cauucaaccucccuaugga

SEQ ID NO: 2026402 - RNA, 19 nt, Homo sapiens
  misc_RNA (1)...(19): siRNA sense strand
cccagugucagcuccauua

SEQ ID NO: 2026403 - RNA, 19 nt, Homo sapiens
  misc_RNA (1)...(19): siRNA sense strand
cauuugagcggcagcacua

SEQ ID NO: 2026404 - RNA, 19 nt, Homo sapiens
  misc_RNA (1)...(19): siRNA sense strand
gcacuacccagaggccuau

SEQ ID NO: 2026405 - RNA, 19 nt, Homo sapiens
  misc_RNA (1)...(19): siRNA sense strand
ucacaacuccaucagaucu

SEQ ID NO: 2026406 - RNA, 19 nt, Homo sapiens
  misc_RNA (1)...(19): siRNA sense strand
gaagauuggggacuacaaa

SEQ ID NO: 2026407 - RNA, 19 nt, Homo sapiens
  misc_RNA (1)...(19): siRNA sense strand
gauagcugccgacuaagca

SEQ ID NO: 2026408 - RNA, 19 nt, Homo sapiens
  misc_RNA (1)...(19): siRNA sense strand
ggaaaauggaugacaguga

SEQ ID NO: 2026409 - RNA, 19 nt, Homo sapiens
  misc_RNA (1)...(19): siRNA sense strand
gcugagggcgucugugaca

SEQ ID NO: 2026410 - RNA, 19 nt, Homo sapiens
  misc_RNA (1)...(19): siRNA sense strand
cgccagaacccuaccaugu

SEQ ID NO: 2026411 - RNA, 19 nt, Homo sapiens
  misc_RNA (1)...(19): siRNA sense strand
ugucagcuccauuaauaga

SEQ ID NO: 2026412 - RNA, 19 nt, Homo sapiens
  misc_RNA (1)...(19): siRNA sense strand
agaaucauccggaccaaag

SEQ ID NO: 2026413 - RNA, 19 nt, Homo sapiens
  misc_RNA (1)...(19): siRNA sense strand
ccgcucgagugcccauuug

SEQ ID NO: 2026414 - RNA, 19 nt, Homo sapiens
  misc_RNA (1)...(19): siRNA sense strand
ggaggggccuuugugaaug

SEQ ID NO: 2026415 - RNA, 19 nt, Homo sapiens
  misc_RNA (1)...(19): siRNA sense strand
ggacuacaaacgccagaac

SEQ ID NO: 2026416 - RNA, 19 nt, Homo sapiens
  misc_RNA (1)...(19): siRNA sense strand
gggcgucugugacaaugac

SEQ ID NO: 2026417 - RNA, 19 nt, Homo sapiens
  misc_RNA (1)...(19): siRNA sense strand
uggcugagggcgucuguga

SEQ ID NO: 2026418 - RNA, 19 nt, Homo sapiens
  misc_RNA (1)...(19): siRNA sense strand
ccagugucagcuccauuaa

SEQ ID NO: 2026419 - RNA, 19 nt, Homo sapiens
  misc_RNA (1)...(19): siRNA sense strand
caaggugguggagaagauu

SEQ ID NO: 2026420 - RNA, 19 nt, Homo sapiens
  misc_RNA (1)...(19): siRNA sense strand
caggauagcugccgacuaa

SEQ ID NO: 2026421 - RNA, 19 nt, Homo sapiens
  misc_RNA (1)...(19): siRNA sense strand
ccagaacccuaccauguuu

SEQ ID NO: 2026422 - RNA, 19 nt, Homo sapiens
  misc_RNA (1)...(19): siRNA sense strand
caucagaucuggccaugga

SEQ ID NO: 2026423 - RNA, 19 nt, Homo sapiens
  misc_RNA (1)...(19): siRNA sense strand
agugucagcuccauuaaua

SEQ ID NO: 2026424 - RNA, 19 nt, Homo sapiens
  misc_RNA (1)...(19): siRNA sense strand
cauccggccuggagugaua

SEQ ID NO: 2026425 - RNA, 19 nt, Homo sapiens
  misc_RNA (1)...(19): siRNA sense strand
gaaaauggaugacagugau

SEQ ID NO: 2026426 - RNA, 19 nt, Homo sapiens
  misc_RNA (1)...(19): siRNA sense strand
ccucacaacuccaucagau

SEQ ID NO: 2026427 - RNA, 19 nt, Homo sapiens
  misc_RNA (1)...(19): siRNA sense strand
ccaaggugguggagaagau

SEQ ID NO: 2026428 - RNA, 19 nt, Homo sapiens
  misc_RNA (1)...(19): siRNA sense strand
ccaaagugcagcaaccauu

SEQ ID NO: 2026429 - RNA, 19 nt, Homo sapiens
  misc_RNA (1)...(19): siRNA sense strand
ggaugacagugaucaggau

SEQ ID NO: 2026430 - RNA, 19 nt, Homo sapiens
  misc_RNA (1)...(19): siRNA sense strand
gccagaacccuaccauguu

SEQ ID NO: 2026431 - RNA, 19 nt, Homo sapiens
  misc_RNA (1)...(19): siRNA sense strand
guaaggcccugcgacaucu

SEQ ID NO: 2026432 - RNA, 19 nt, Homo sapiens
  misc_RNA (1)...(19): siRNA sense strand
gaugacagugaucaggaua

SEQ ID NO: 2026433 - RNA, 19 nt, Homo sapiens
  misc_RNA (1)...(19): siRNA sense strand
caaagugcagcaaccauuc

SEQ ID NO: 2026434 - RNA, 19 nt, Homo sapiens
  misc_RNA (1)...(19): siRNA sense strand
ucagcuccauuaauagaau

SEQ ID NO: 2026435 - RNA, 19 nt, Homo sapiens
  misc_RNA (1)...(19): siRNA sense strand
gacuaagcauugacucaca

SEQ ID NO: 2026436 - RNA, 19 nt, Homo sapiens
  misc_RNA (1)...(19): siRNA sense strand
gagggcgucugugacaaug

SEQ ID NO: 2026437 - RNA, 19 nt, Homo sapiens
  misc_RNA (1)...(19): siRNA sense strand
cauucaaccucccuaugga

SEQ ID NO: 2026438 - RNA, 19 nt, Homo sapiens
  misc_RNA (1)...(19): siRNA sense strand
cccagugucagcuccauua

SEQ ID NO: 2026439 - RNA, 19 nt, Homo sapiens
  misc_RNA (1)...(19): siRNA sense strand
cauuugagcggcagcacua

SEQ ID NO: 2026440 - RNA, 19 nt, Homo sapiens
  misc_RNA (1)...(19): siRNA sense strand
gcacuacccagaggccuau

SEQ ID NO: 2026441 - RNA, 19 nt, Homo sapiens
  misc_RNA (1)...(19): siRNA sense strand
ucacaacuccaucagaucu

SEQ ID NO: 2026442 - RNA, 19 nt, Homo sapiens
  misc_RNA (1)...(19): siRNA sense strand
gaagauuggggacuacaaa

SEQ ID NO: 2026443 - RNA, 19 nt, Homo sapiens
  misc_RNA (1)...(19): siRNA sense strand
gauagcugccgacuaagca

SEQ ID NO: 2026444 - RNA, 19 nt, Homo sapiens
  misc_RNA (1)...(19): siRNA sense strand
ggaaaauggaugacaguga

SEQ ID NO: 2026445 - RNA, 19 nt, Homo sapiens
  misc_RNA (1)...(19): siRNA sense strand
gcugagggcgucugugaca

SEQ ID NO: 2026446 - RNA, 19 nt, Homo sapiens
  misc_RNA (1)...(19): siRNA sense strand
cgccagaacccuaccaugu

SEQ ID NO: 2026447 - RNA, 19 nt, Homo sapiens
  misc_RNA (1)...(19): siRNA sense strand
ugucagcuccauuaauaga

SEQ ID NO: 2026448 - RNA, 19 nt, Homo sapiens
  misc_RNA (1)...(19): siRNA sense strand
agaaucauccggaccaaag

SEQ ID NO: 2026449 - RNA, 19 nt, Homo sapiens
  misc_RNA (1)...(19): siRNA sense strand
ccgcucgagugcccauuug

SEQ ID NO: 2026450 - RNA, 19 nt, Homo sapiens
  misc_RNA (1)...(19): siRNA sense strand
ggaggggccuuugugaaug

SEQ ID NO: 2026451 - RNA, 19 nt, Homo sapiens
  misc_RNA (1)...(19): siRNA sense strand
ggacuacaaacgccagaac

SEQ ID NO: 2026452 - RNA, 19 nt, Homo sapiens
  misc_RNA (1)...(19): siRNA sense strand
gggcgucugugacaaugac

SEQ ID NO: 2026453 - RNA, 19 nt, Homo sapiens
  misc_RNA (1)...(19): siRNA sense strand
uggcugagggcgucuguga

SEQ ID NO: 2026454 - RNA, 19 nt, Homo sapiens
  misc_RNA (1)...(19): siRNA sense strand
ccagugucagcuccauuaa

SEQ ID NO: 2026455 - RNA, 19 nt, Homo sapiens
  misc_RNA (1)...(19): siRNA sense strand
caaggugguggagaagauu

SEQ ID NO: 2026456 - RNA, 19 nt, Homo sapiens
  misc_RNA (1)...(19): siRNA sense strand
caggauagcugccgacuaa

SEQ ID NO: 2026457 - RNA, 19 nt, Homo sapiens
  misc_RNA (1)...(19): siRNA sense strand
ccagaacccuaccauguuu

SEQ ID NO: 2026458 - RNA, 19 nt, Homo sapiens
  misc_RNA (1)...(19): siRNA sense strand
caucagaucuggccaugga

SEQ ID NO: 2026459 - RNA, 19 nt, Homo sapiens
  misc_RNA (1)...(19): siRNA sense strand
agugucagcuccauuaaua

SEQ ID NO: 2026460 - RNA, 19 nt, Homo sapiens
  misc_RNA (1)...(19): siRNA sense strand
cauccggccuggagugaua

SEQ ID NO: 2026461 - RNA, 19 nt, Homo sapiens
  misc_RNA (1)...(19): siRNA sense strand
gaaaauggaugacagugau

SEQ ID NO: 2026462 - RNA, 19 nt, Homo sapiens
  misc_RNA (1)...(19): siRNA sense strand
ccucacaacuccaucagau

SEQ ID NO: 2026463 - RNA, 19 nt, Homo sapiens
  misc_RNA (1)...(19): siRNA sense strand
ccaaggugguggagaagau

SEQ ID NO: 2026464 - RNA, 19 nt, Homo sapiens
  misc_RNA (1)...(19): siRNA sense strand
ccaaagugcagcaaccauu

SEQ ID NO: 2026465 - RNA, 19 nt, Homo sapiens
  misc_RNA (1)...(19): siRNA sense strand
ggaugacagugaucaggau

SEQ ID NO: 2026466 - RNA, 19 nt, Homo sapiens
  misc_RNA (1)...(19): siRNA sense strand
gccagaacccuaccauguu

SEQ ID NO: 2026467 - RNA, 19 nt, Homo sapiens
  misc_RNA (1)...(19): siRNA sense strand
guaaggcccugcgacaucu

SEQ ID NO: 2026468 - RNA, 19 nt, Homo sapiens
  misc_RNA (1)...(19): siRNA sense strand
gaugacagugaucaggaua

SEQ ID NO: 2026469 - RNA, 19 nt, Homo sapiens
  misc_RNA (1)...(19): siRNA sense strand
caaagugcagcaaccauuc

SEQ ID NO: 2026470 - RNA, 19 nt, Homo sapiens
  misc_RNA (1)...(19): siRNA sense strand
ucagcuccauuaauagaau

SEQ ID NO: 2026471 - RNA, 19 nt, Homo sapiens
  misc_RNA (1)...(19): siRNA sense strand
gacuaagcauugacucaca

SEQ ID NO: 2026472 - RNA, 19 nt, Homo sapiens
  misc_RNA (1)...(19): siRNA sense strand
gagggcgucugugacaaug

SEQ ID NO: 2026473 - RNA, 19 nt, Homo sapiens
  misc_RNA (1)...(19): siRNA sense strand
cauucaaccucccuaugga

SEQ ID NO: 2026474 - RNA, 19 nt, Homo sapiens
  misc_RNA (1)...(19): siRNA sense strand
cccagugucagcuccauua

SEQ ID NO: 2026475 - RNA, 19 nt, Homo sapiens
  misc_RNA (1)...(19): siRNA sense strand
cauuugagcggcagcacua

SEQ ID NO: 2026476 - RNA, 19 nt, Homo sapiens
  misc_RNA (1)...(19): siRNA sense strand
gcacuacccagaggccuau

SEQ ID NO: 2026477 - RNA, 19 nt, Homo sapiens
  misc_RNA (1)...(19): siRNA sense strand
ucacaacuccaucagaucu

SEQ ID NO: 2026478 - RNA, 19 nt, Homo sapiens
  misc_RNA (1)...(19): siRNA sense strand
gaagauuggggacuacaaa

SEQ ID NO: 2026479 - RNA, 19 nt, Homo sapiens
  misc_RNA (1)...(19): siRNA sense strand
gauagcugccgacuaagca

SEQ ID NO: 2026480 - RNA, 19 nt, Homo sapiens
  misc_RNA (1)...(19): siRNA sense strand
ggaaaauggaugacaguga

SEQ ID NO: 2026481 - RNA, 19 nt, Homo sapiens
  misc_RNA (1)...(19): siRNA sense strand
gcugagggcgucugugaca

SEQ ID NO: 2026482 - RNA, 19 nt, Homo sapiens
  misc_RNA (1)...(19): siRNA sense strand
cgccagaacccuaccaugu

SEQ ID NO: 2026483 - RNA, 19 nt, Homo sapiens
  misc_RNA (1)...(19): siRNA sense strand
ugucagcuccauuaauaga

SEQ ID NO: 2026484 - RNA, 19 nt, Homo sapiens
  misc_RNA (1)...(19): siRNA sense strand
agaaucauccggaccaaag

SEQ ID NO: 2026485 - RNA, 19 nt, Homo sapiens
  misc_RNA (1)...(19): siRNA sense strand
ccgcucgagugcccauuug

SEQ ID NO: 2026486 - RNA, 19 nt, Homo sapiens
  misc_RNA (1)...(19): siRNA sense strand
ggaggggccuuugugaaug

SEQ ID NO: 2026487 - RNA, 19 nt, Homo sapiens
  misc_RNA (1)...(19): siRNA sense strand
ggacuacaaacgccagaac

SEQ ID NO: 2026488 - RNA, 19 nt, Homo sapiens
  misc_RNA (1)...(19): siRNA sense strand
gggcgucugugacaaugac

SEQ ID NO: 2026489 - RNA, 19 nt, Homo sapiens
  misc_RNA (1)...(19): siRNA sense strand
uggcugagggcgucuguga

SEQ ID NO: 2026490 - RNA, 19 nt, Homo sapiens
  misc_RNA (1)...(19): siRNA sense strand
ccagugucagcuccauuaa

SEQ ID NO: 2026491 - RNA, 19 nt, Homo sapiens
  misc_RNA (1)...(19): siRNA sense strand
caaggugguggagaagauu

SEQ ID NO: 2026492 - RNA, 19 nt, Homo sapiens
  misc_RNA (1)...(19): siRNA sense strand
caggauagcugccgacuaa

SEQ ID NO: 2026493 - RNA, 19 nt, Homo sapiens
  misc_RNA (1)...(19): siRNA sense strand
ccagaacccuaccauguuu

SEQ ID NO: 2026494 - RNA, 19 nt, Homo sapiens
  misc_RNA (1)...(19): siRNA sense strand
caucagaucuggccaugga

SEQ ID NO: 2026495 - RNA, 19 nt, Homo sapiens
  misc_RNA (1)...(19): siRNA sense strand
agugucagcuccauuaaua

SEQ ID NO: 2026496 - RNA, 19 nt, Homo sapiens
  misc_RNA (1)...(19): siRNA sense strand
cauccggccuggagugaua

SEQ ID NO: 2026497 - RNA, 19 nt, Homo sapiens
  misc_RNA (1)...(19): siRNA sense strand
gaaaauggaugacagugau

SEQ ID NO: 2026498 - RNA, 19 nt, Homo sapiens
  misc_RNA (1)...(19): siRNA sense strand
ccucacaacuccaucagau

SEQ ID NO: 2026499 - RNA, 19 nt, Homo sapiens
  misc_RNA (1)...(19): siRNA sense strand
ccaaggugguggagaagau

SEQ ID NO: 2026500 - RNA, 19 nt, Homo sapiens
  misc_RNA (1)...(19): siRNA sense strand
ccaaagugcagcaaccauu

SEQ ID NO: 2026501 - RNA, 19 nt, Homo sapiens
  misc_RNA (1)...(19): siRNA sense strand
ggaugacagugaucaggau

SEQ ID NO: 2026502 - RNA, 19 nt, Homo sapiens
  misc_RNA (1)...(19): siRNA sense strand
gccagaacccuaccauguu

SEQ ID NO: 2026503 - RNA, 19 nt, Homo sapiens
  misc_RNA (1)...(19): siRNA sense strand
guaaggcccugcgacaucu

SEQ ID NO: 2026504 - RNA, 19 nt, Homo sapiens
  misc_RNA (1)...(19): siRNA sense strand
gaugacagugaucaggaua

SEQ ID NO: 2026505 - RNA, 19 nt, Homo sapiens
  misc_RNA (1)...(19): siRNA sense strand
caaagugcagcaaccauuc

SEQ ID NO: 2026506 - RNA, 19 nt, Homo sapiens
  misc_RNA (1)...(19): siRNA sense strand
ucagcuccauuaauagaau

SEQ ID NO: 2026507 - RNA, 19 nt, Homo sapiens
  misc_RNA (1)...(19): siRNA sense strand
gacuaagcauugacucaca

SEQ ID NO: 2026508 - RNA, 19 nt, Homo sapiens
  misc_RNA (1)...(19): siRNA sense strand
ccacugccacggccuuuga

SEQ ID NO: 2026509 - RNA, 19 nt, Homo sapiens
  misc_RNA (1)...(19): siRNA sense strand
gagggcgucugugacaaug

SEQ ID NO: 2026510 - RNA, 19 nt, Homo sapiens
  misc_RNA (1)...(19): siRNA sense strand
cauucaaccucccuaugga

SEQ ID NO: 2026511 - RNA, 19 nt, Homo sapiens
  misc_RNA (1)...(19): siRNA sense strand
cccagugucagcuccauua

SEQ ID NO: 2026512 - RNA, 19 nt, Homo sapiens
  misc_RNA (1)...(19): siRNA sense strand
ugaguuccccauauuauua

SEQ ID NO: 2026513 - RNA, 19 nt, Homo sapiens
  misc_RNA (1)...(19): siRNA sense strand
cauuugagcggcagcacua

SEQ ID NO: 2026514 - RNA, 19 nt, Homo sapiens
  misc_RNA (1)...(19): siRNA sense strand
gcacuacccagaggccuau

SEQ ID NO: 2026515 - RNA, 19 nt, Homo sapiens
  misc_RNA (1)...(19): siRNA sense strand
uauuacaguuccacaucaa

SEQ ID NO: 2026516 - RNA, 19 nt, Homo sapiens
  misc_RNA (1)...(19): siRNA sense strand
ucacaacuccaucagaucu

SEQ ID NO: 2026517 - RNA, 19 nt, Homo sapiens
  misc_RNA (1)...(19): siRNA sense strand
gaagauuggggacuacaaa

SEQ ID NO: 2026518 - RNA, 19 nt, Homo sapiens
  misc_RNA (1)...(19): siRNA sense strand
ccacggccuuugaccaucu

SEQ ID NO: 2026519 - RNA, 19 nt, Homo sapiens
  misc_RNA (1)...(19): siRNA sense strand
gauagcugccgacuaagca

SEQ ID NO: 2026520 - RNA, 19 nt, Homo sapiens
  misc_RNA (1)...(19): siRNA sense strand
ggaaaauggaugacaguga

SEQ ID NO: 2026521 - RNA, 19 nt, Homo sapiens
  misc_RNA (1)...(19): siRNA sense strand
gcugagggcgucugugaca

SEQ ID NO: 2026522 - RNA, 19 nt, Homo sapiens
  misc_RNA (1)...(19): siRNA sense strand
cgccagaacccuaccaugu

SEQ ID NO: 2026523 - RNA, 19 nt, Homo sapiens
  misc_RNA (1)...(19): siRNA sense strand
uuauuacaguuccacauca

SEQ ID NO: 2026524 - RNA, 19 nt, Homo sapiens
  misc_RNA (1)...(19): siRNA sense strand
ugucagcuccauuaauaga

SEQ ID NO: 2026525 - RNA, 19 nt, Homo sapiens
  misc_RNA (1)...(19): siRNA sense strand
agaaucauccggaccaaag

SEQ ID NO: 2026526 - RNA, 19 nt, Homo sapiens
  misc_RNA (1)...(19): siRNA sense strand
ccgcucgagugcccauuug

SEQ ID NO: 2026527 - RNA, 19 nt, Homo sapiens
  misc_RNA (1)...(19): siRNA sense strand
ggaggggccuuugugaaug

SEQ ID NO: 2026528 - RNA, 19 nt, Homo sapiens
  misc_RNA (1)...(19): siRNA sense strand
ggacuacaaacgccagaac

SEQ ID NO: 2026529 - RNA, 19 nt, Homo sapiens
  misc_RNA (1)...(19): siRNA sense strand
gggcgucugugacaaugac

SEQ ID NO: 2026530 - RNA, 19 nt, Homo sapiens
  misc_RNA (1)...(19): siRNA sense strand
uggcugagggcgucuguga

SEQ ID NO: 2026531 - RNA, 19 nt, Homo sapiens
  misc_RNA (1)...(19): siRNA sense strand
ccagugucagcuccauuaa

SEQ ID NO: 2026532 - RNA, 19 nt, Homo sapiens
  misc_RNA (1)...(19): siRNA sense strand
caaggugguggagaagauu

SEQ ID NO: 2026533 - RNA, 19 nt, Homo sapiens
  misc_RNA (1)...(19): siRNA sense strand
caggauagcugccgacuaa

SEQ ID NO: 2026534 - RNA, 19 nt, Homo sapiens
  misc_RNA (1)...(19): siRNA sense strand
ccagaacccuaccauguuu

SEQ ID NO: 2026535 - RNA, 19 nt, Homo sapiens
  misc_RNA (1)...(19): siRNA sense strand
caucagaucuggccaugga

SEQ ID NO: 2026536 - RNA, 19 nt, Homo sapiens
  misc_RNA (1)...(19): siRNA sense strand
agugucagcuccauuaaua

SEQ ID NO: 2026537 - RNA, 19 nt, Homo sapiens
  misc_RNA (1)...(19): siRNA sense strand
cauccggccuggagugaua

SEQ ID NO: 2026538 - RNA, 19 nt, Homo sapiens
  misc_RNA (1)...(19): siRNA sense strand
gaaaauggaugacagugau

SEQ ID NO: 2026539 - RNA, 19 nt, Homo sapiens
  misc_RNA (1)...(19): siRNA sense strand
ccucacaacuccaucagau

SEQ ID NO: 2026540 - RNA, 19 nt, Homo sapiens
  misc_RNA (1)...(19): siRNA sense strand
ccaaggugguggagaagau

SEQ ID NO: 2026541 - RNA, 19 nt, Homo sapiens
  misc_RNA (1)...(19): siRNA sense strand
ccaaagugcagcaaccauu

SEQ ID NO: 2026542 - RNA, 19 nt, Homo sapiens
  misc_RNA (1)...(19): siRNA sense strand
ggaugacagugaucaggau

SEQ ID NO: 2026543 - RNA, 19 nt, Homo sapiens
  misc_RNA (1)...(19): siRNA sense strand
gccagaacccuaccauguu

SEQ ID NO: 2026544 - RNA, 19 nt, Homo sapiens
  misc_RNA (1)...(19): siRNA sense strand
guaaggcccugcgacaucu

SEQ ID NO: 2026545 - RNA, 19 nt, Homo sapiens
  misc_RNA (1)...(19): siRNA sense strand
gaugacagugaucaggaua

SEQ ID NO: 2026546 - RNA, 19 nt, Homo sapiens
  misc_RNA (1)...(19): siRNA sense strand
caaagugcagcaaccauuc

SEQ ID NO: 2026547 - RNA, 19 nt, Homo sapiens
  misc_RNA (1)...(19): siRNA sense strand
ucagcuccauuaauagaau

SEQ ID NO: 2026548 - RNA, 19 nt, Homo sapiens
  misc_RNA (1)...(19): siRNA sense strand
gacuaagcauugacucaca

SEQ ID NO: 2026549 - RNA, 19 nt, Homo sapiens
  misc_RNA (1)...(19): siRNA sense strand
ccacugccacggccuuuga

SEQ ID NO: 2026550 - RNA, 19 nt, Homo sapiens
  misc_RNA (1)...(19): siRNA sense strand
gagggcgucugugacaaug

SEQ ID NO: 2026551 - RNA, 19 nt, Homo sapiens
  misc_RNA (1)...(19): siRNA sense strand
cauucaaccucccuaugga

SEQ ID NO: 2026552 - RNA, 19 nt, Homo sapiens
  misc_RNA (1)...(19): siRNA sense strand
cccagugucagcuccauua

SEQ ID NO: 2026553 - RNA, 19 nt, Homo sapiens
  misc_RNA (1)...(19): siRNA sense strand
ugaguuccccauauuauua

SEQ ID NO: 2026554 - RNA, 19 nt, Homo sapiens
  misc_RNA (1)...(19): siRNA sense strand
cauuugagcggcagcacua

SEQ ID NO: 2026555 - RNA, 19 nt, Homo sapiens
  misc_RNA (1)...(19): siRNA sense strand
gcacuacccagaggccuau

SEQ ID NO: 2026556 - RNA, 19 nt, Homo sapiens
  misc_RNA (1)...(19): siRNA sense strand
uauuacaguuccacaucaa

SEQ ID NO: 2026557 - RNA, 19 nt, Homo sapiens
  misc_RNA (1)...(19): siRNA sense strand
ucacaacuccaucagaucu

SEQ ID NO: 2026558 - RNA, 19 nt, Homo sapiens
  misc_RNA (1)...(19): siRNA sense strand
gaagauuggggacuacaaa

SEQ ID NO: 2026559 - RNA, 19 nt, Homo sapiens
  misc_RNA (1)...(19): siRNA sense strand
ccacggccuuugaccaucu

SEQ ID NO: 2026560 - RNA, 19 nt, Homo sapiens
  misc_RNA (1)...(19): siRNA sense strand
gauagcugccgacuaagca

SEQ ID NO: 2026561 - RNA, 19 nt, Homo sapiens
  misc_RNA (1)...(19): siRNA sense strand
ggaaaauggaugacaguga

SEQ ID NO: 2026562 - RNA, 19 nt, Homo sapiens
  misc_RNA (1)...(19): siRNA sense strand
gcugagggcgucugugaca

SEQ ID NO: 2026563 - RNA, 19 nt, Homo sapiens
  misc_RNA (1)...(19): siRNA sense strand
cgccagaacccuaccaugu

SEQ ID NO: 2026564 - RNA, 19 nt, Homo sapiens
  misc_RNA (1)...(19): siRNA sense strand
uuauuacaguuccacauca

SEQ ID NO: 2026565 - RNA, 19 nt, Homo sapiens
  misc_RNA (1)...(19): siRNA sense strand
ugucagcuccauuaauaga

SEQ ID NO: 2026566 - RNA, 19 nt, Homo sapiens
  misc_RNA (1)...(19): siRNA sense strand
agaaucauccggaccaaag

SEQ ID NO: 2026567 - RNA, 19 nt, Homo sapiens
  misc_RNA (1)...(19): siRNA sense strand
ccgcucgagugcccauuug

SEQ ID NO: 2026568 - RNA, 19 nt, Homo sapiens
  misc_RNA (1)...(19): siRNA sense strand
ggaggggccuuugugaaug

SEQ ID NO: 2026569 - RNA, 19 nt, Homo sapiens
  misc_RNA (1)...(19): siRNA sense strand
ggacuacaaacgccagaac

SEQ ID NO: 2026570 - RNA, 19 nt, Homo sapiens
  misc_RNA (1)...(19): siRNA sense strand
gggcgucugugacaaugac

SEQ ID NO: 2026571 - RNA, 19 nt, Homo sapiens
  misc_RNA (1)...(19): siRNA sense strand
uggcugagggcgucuguga

SEQ ID NO: 2026572 - RNA, 19 nt, Homo sapiens
  misc_RNA (1)...(19): siRNA sense strand
ccagugucagcuccauuaa

SEQ ID NO: 2026573 - RNA, 19 nt, Homo sapiens
  misc_RNA (1)...(19): siRNA sense strand
caaggugguggagaagauu

SEQ ID NO: 2026574 - RNA, 19 nt, Homo sapiens
  misc_RNA (1)...(19): siRNA sense strand
caggauagcugccgacuaa

SEQ ID NO: 2026575 - RNA, 19 nt, Homo sapiens
  misc_RNA (1)...(19): siRNA sense strand
ccagaacccuaccauguuu

SEQ ID NO: 2026576 - RNA, 19 nt, Homo sapiens
  misc_RNA (1)...(19): siRNA sense strand
caucagaucuggccaugga

SEQ ID NO: 2026577 - RNA, 19 nt, Homo sapiens
  misc_RNA (1)...(19): siRNA sense strand
agugucagcuccauuaaua

SEQ ID NO: 2026578 - RNA, 19 nt, Homo sapiens
  misc_RNA (1)...(19): siRNA sense strand
cauccggccuggagugaua

SEQ ID NO: 2026579 - RNA, 19 nt, Homo sapiens
  misc_RNA (1)...(19): siRNA sense strand
gaaaauggaugacagugau

SEQ ID NO: 2026580 - RNA, 19 nt, Homo sapiens
  misc_RNA (1)...(19): siRNA sense strand
ccucacaacuccaucagau

SEQ ID NO: 2026581 - RNA, 19 nt, Homo sapiens
  misc_RNA (1)...(19): siRNA sense strand
ccaaggugguggagaagau

SEQ ID NO: 2026582 - RNA, 19 nt, Homo sapiens
  misc_RNA (1)...(19): siRNA sense strand
ccaaagugcagcaaccauu

SEQ ID NO: 2026583 - RNA, 19 nt, Homo sapiens
  misc_RNA (1)...(19): siRNA sense strand
ggaugacagugaucaggau

SEQ ID NO: 2026584 - RNA, 19 nt, Homo sapiens
  misc_RNA (1)...(19): siRNA sense strand
gccagaacccuaccauguu

SEQ ID NO: 2026585 - RNA, 19 nt, Homo sapiens
  misc_RNA (1)...(19): siRNA sense strand
guaaggcccugcgacaucu

SEQ ID NO: 2026586 - RNA, 19 nt, Homo sapiens
  misc_RNA (1)...(19): siRNA sense strand
gaugacagugaucaggaua

SEQ ID NO: 2026587 - RNA, 19 nt, Homo sapiens
  misc_RNA (1)...(19): siRNA sense strand
caaagugcagcaaccauuc

SEQ ID NO: 2026588 - RNA, 19 nt, Homo sapiens
  misc_RNA (1)...(19): siRNA sense strand
ucagcuccauuaauagaau

SEQ ID NO: 2026589 - RNA, 19 nt, Homo sapiens
  misc_RNA (1)...(19): siRNA sense strand
gacuaagcauugacucaca

SEQ ID NO: 2026590 - RNA, 19 nt, Homo sapiens
  misc_RNA (1)...(19): siRNA sense strand
gagggcgucugugacaaug

SEQ ID NO: 2026591 - RNA, 19 nt, Homo sapiens
  misc_RNA (1)...(19): siRNA sense strand
cauucaaccucccuaugga

SEQ ID NO: 2026592 - RNA, 19 nt, Homo sapiens
  misc_RNA (1)...(19): siRNA sense strand
cccagugucagcuccauua

SEQ ID NO: 2026593 - RNA, 19 nt, Homo sapiens
  misc_RNA (1)...(19): siRNA sense strand
cauuugagcggcagcacua

SEQ ID NO: 2026594 - RNA, 19 nt, Homo sapiens
  misc_RNA (1)...(19): siRNA sense strand
gcacuacccagaggccuau

SEQ ID NO: 2026595 - RNA, 19 nt, Homo sapiens
  misc_RNA (1)...(19): siRNA sense strand
ucacaacuccaucagaucu

SEQ ID NO: 2026596 - RNA, 19 nt, Homo sapiens
  misc_RNA (1)...(19): siRNA sense strand
gaagauuggggacuacaaa

SEQ ID NO: 2026597 - RNA, 19 nt, Homo sapiens
  misc_RNA (1)...(19): siRNA sense strand
gauagcugccgacuaagca

SEQ ID NO: 2026598 - RNA, 19 nt, Homo sapiens
  misc_RNA (1)...(19): siRNA sense strand
ggaaaauggaugacaguga

SEQ ID NO: 2026599 - RNA, 19 nt, Homo sapiens
  misc_RNA (1)...(19): siRNA sense strand
gcugagggcgucugugaca

SEQ ID NO: 2026600 - RNA, 19 nt, Homo sapiens
  misc_RNA (1)...(19): siRNA sense strand
cgccagaacccuaccaugu

SEQ ID NO: 2026601 - RNA, 19 nt, Homo sapiens
  misc_RNA (1)...(19): siRNA sense strand
ugucagcuccauuaauaga

SEQ ID NO: 2026602 - RNA, 19 nt, Homo sapiens
  misc_RNA (1)...(19): siRNA sense strand
agaaucauccggaccaaag

SEQ ID NO: 2026603 - RNA, 19 nt, Homo sapiens
  misc_RNA (1)...(19): siRNA sense strand
ccgcucgagugcccauuug

SEQ ID NO: 2026604 - RNA, 19 nt, Homo sapiens
  misc_RNA (1)...(19): siRNA sense strand
ggaggggccuuugugaaug

SEQ ID NO: 2026605 - RNA, 19 nt, Homo sapiens
  misc_RNA (1)...(19): siRNA sense strand
ggacuacaaacgccagaac

SEQ ID NO: 2026606 - RNA, 19 nt, Homo sapiens
  misc_RNA (1)...(19): siRNA sense strand
gggcgucugugacaaugac

SEQ ID NO: 2026607 - RNA, 19 nt, Homo sapiens
  misc_RNA (1)...(19): siRNA sense strand
uggcugagggcgucuguga

SEQ ID NO: 2026608 - RNA, 19 nt, Homo sapiens
  misc_RNA (1)...(19): siRNA sense strand
ccagugucagcuccauuaa

SEQ ID NO: 2026609 - RNA, 19 nt, Homo sapiens
  misc_RNA (1)...(19): siRNA sense strand
caaggugguggagaagauu

SEQ ID NO: 2026610 - RNA, 19 nt, Homo sapiens
  misc_RNA (1)...(19): siRNA sense strand
caggauagcugccgacuaa

SEQ ID NO: 2026611 - RNA, 19 nt, Homo sapiens
  misc_RNA (1)...(19): siRNA sense strand
ccagaacccuaccauguuu

SEQ ID NO: 2026612 - RNA, 19 nt, Homo sapiens
  misc_RNA (1)...(19): siRNA sense strand
caucagaucuggccaugga

SEQ ID NO: 2026613 - RNA, 19 nt, Homo sapiens
  misc_RNA (1)...(19): siRNA sense strand
agugucagcuccauuaaua

SEQ ID NO: 2026614 - RNA, 19 nt, Homo sapiens
  misc_RNA (1)...(19): siRNA sense strand
cauccggccuggagugaua

SEQ ID NO: 2026615 - RNA, 19 nt, Homo sapiens
  misc_RNA (1)...(19): siRNA sense strand
gaaaauggaugacagugau

SEQ ID NO: 2026616 - RNA, 19 nt, Homo sapiens
  misc_RNA (1)...(19): siRNA sense strand
ccucacaacuccaucagau

SEQ ID NO: 2026617 - RNA, 19 nt, Homo sapiens
  misc_RNA (1)...(19): siRNA sense strand
ccaaggugguggagaagau

SEQ ID NO: 2026618 - RNA, 19 nt, Homo sapiens
  misc_RNA (1)...(19): siRNA sense strand
ccaaagugcagcaaccauu

SEQ ID NO: 2026619 - RNA, 19 nt, Homo sapiens
  misc_RNA (1)...(19): siRNA sense strand
ggaugacagugaucaggau

SEQ ID NO: 2026620 - RNA, 19 nt, Homo sapiens
  misc_RNA (1)...(19): siRNA sense strand
gccagaacccuaccauguu

SEQ ID NO: 2026621 - RNA, 19 nt, Homo sapiens
  misc_RNA (1)...(19): siRNA sense strand
guaaggcccugcgacaucu

SEQ ID NO: 2026622 - RNA, 19 nt, Homo sapiens
  misc_RNA (1)...(19): siRNA sense strand
gaugacagugaucaggaua

SEQ ID NO: 2026623 - RNA, 19 nt, Homo sapiens
  misc_RNA (1)...(19): siRNA sense strand
caaagugcagcaaccauuc

SEQ ID NO: 2026624 - RNA, 19 nt, Homo sapiens
  misc_RNA (1)...(19): siRNA sense strand
ucagcuccauuaauagaau

SEQ ID NO: 2026625 - RNA, 19 nt, Homo sapiens
  misc_RNA (1)...(19): siRNA sense strand
gacuaagcauugacucaca

SEQ ID NO: 2026626 - RNA, 19 nt, Homo sapiens
  misc_RNA (1)...(19): siRNA sense strand
gagggcgucugugacaaug

SEQ ID NO: 2026627 - RNA, 19 nt, Homo sapiens
  misc_RNA (1)...(19): siRNA sense strand
cauucaaccucccuaugga

SEQ ID NO: 2026628 - RNA, 19 nt, Homo sapiens
  misc_RNA (1)...(19): siRNA sense strand
cccagugucagcuccauua

SEQ ID NO: 2026629 - RNA, 19 nt, Homo sapiens
  misc_RNA (1)...(19): siRNA sense strand
cauuugagcggcagcacua

SEQ ID NO: 2026630 - RNA, 19 nt, Homo sapiens
  misc_RNA (1)...(19): siRNA sense strand
gcacuacccagaggccuau

SEQ ID NO: 2026631 - RNA, 19 nt, Homo sapiens
  misc_RNA (1)...(19): siRNA sense strand
ucacaacuccaucagaucu

SEQ ID NO: 2026632 - RNA, 19 nt, Homo sapiens
  misc_RNA (1)...(19): siRNA sense strand
gaagauuggggacuacaaa

SEQ ID NO: 2026633 - RNA, 19 nt, Homo sapiens
  misc_RNA (1)...(19): siRNA sense strand
gauagcugccgacuaagca

SEQ ID NO: 2026634 - RNA, 19 nt, Homo sapiens
  misc_RNA (1)...(19): siRNA sense strand
ggaaaauggaugacaguga

SEQ ID NO: 2026635 - RNA, 19 nt, Homo sapiens
  misc_RNA (1)...(19): siRNA sense strand
gcugagggcgucugugaca

SEQ ID NO: 2026636 - RNA, 19 nt, Homo sapiens
  misc_RNA (1)...(19): siRNA sense strand
cgccagaacccuaccaugu

SEQ ID NO: 2026637 - RNA, 19 nt, Homo sapiens
  misc_RNA (1)...(19): siRNA sense strand
ugucagcuccauuaauaga

SEQ ID NO: 2026638 - RNA, 19 nt, Homo sapiens
  misc_RNA (1)...(19): siRNA sense strand
agaaucauccggaccaaag

SEQ ID NO: 2026639 - RNA, 19 nt, Homo sapiens
  misc_RNA (1)...(19): siRNA sense strand
ccgcucgagugcccauuug

SEQ ID NO: 2026640 - RNA, 19 nt, Homo sapiens
  misc_RNA (1)...(19): siRNA sense strand
ggaggggccuuugugaaug

SEQ ID NO: 2026641 - RNA, 19 nt, Homo sapiens
  misc_RNA (1)...(19): siRNA sense strand
ggacuacaaacgccagaac

SEQ ID NO: 2026642 - RNA, 19 nt, Homo sapiens
  misc_RNA (1)...(19): siRNA sense strand
gggcgucugugacaaugac

SEQ ID NO: 2026643 - RNA, 19 nt, Homo sapiens
  misc_RNA (1)...(19): siRNA sense strand
uggcugagggcgucuguga

SEQ ID NO: 2026644 - RNA, 19 nt, Homo sapiens
  misc_RNA (1)...(19): siRNA sense strand
ccagugucagcuccauuaa

SEQ ID NO: 2026645 - RNA, 19 nt, Homo sapiens
  misc_RNA (1)...(19): siRNA sense strand
caaggugguggagaagauu

SEQ ID NO: 2026646 - RNA, 19 nt, Homo sapiens
  misc_RNA (1)...(19): siRNA sense strand
caggauagcugccgacuaa

SEQ ID NO: 2026647 - RNA, 19 nt, Homo sapiens
  misc_RNA (1)...(19): siRNA sense strand
ccagaacccuaccauguuu

SEQ ID NO: 2026648 - RNA, 19 nt, Homo sapiens
  misc_RNA (1)...(19): siRNA sense strand
caucagaucuggccaugga

SEQ ID NO: 2026649 - RNA, 19 nt, Homo sapiens
  misc_RNA (1)...(19): siRNA sense strand
agugucagcuccauuaaua

SEQ ID NO: 2026650 - RNA, 19 nt, Homo sapiens
  misc_RNA (1)...(19): siRNA sense strand
cauccggccuggagugaua

SEQ ID NO: 2026651 - RNA, 19 nt, Homo sapiens
  misc_RNA (1)...(19): siRNA sense strand
gaaaauggaugacagugau

SEQ ID NO: 2026652 - RNA, 19 nt, Homo sapiens
  misc_RNA (1)...(19): siRNA sense strand
ccucacaacuccaucagau

SEQ ID NO: 2026653 - RNA, 19 nt, Homo sapiens
  misc_RNA (1)...(19): siRNA sense strand
ccaaggugguggagaagau

SEQ ID NO: 2026654 - RNA, 19 nt, Homo sapiens
  misc_RNA (1)...(19): siRNA sense strand
ccaaagugcagcaaccauu

SEQ ID NO: 2026655 - RNA, 19 nt, Homo sapiens
  misc_RNA (1)...(19): siRNA sense strand
ggaugacagugaucaggau

SEQ ID NO: 2026656 - RNA, 19 nt, Homo sapiens
  misc_RNA (1)...(19): siRNA sense strand
gccagaacccuaccauguu

SEQ ID NO: 2026657 - RNA, 19 nt, Homo sapiens
  misc_RNA (1)...(19): siRNA sense strand
guaaggcccugcgacaucu

SEQ ID NO: 2026658 - RNA, 19 nt, Homo sapiens
  misc_RNA (1)...(19): siRNA sense strand
gaugacagugaucaggaua

SEQ ID NO: 2026659 - RNA, 19 nt, Homo sapiens
  misc_RNA (1)...(19): siRNA sense strand
caaagugcagcaaccauuc

SEQ ID NO: 2026660 - RNA, 19 nt, Homo sapiens
  misc_RNA (1)...(19): siRNA sense strand
ucagcuccauuaauagaau

SEQ ID NO: 2026661 - RNA, 19 nt, Homo sapiens
  misc_RNA (1)...(19): siRNA sense strand
gacuaagcauugacucaca

SEQ ID NO: 2026662 - RNA, 19 nt, Homo sapiens
  misc_RNA (1)...(19): siRNA sense strand
gagggcgucugugacaaug

SEQ ID NO: 2026663 - RNA, 19 nt, Homo sapiens
  misc_RNA (1)...(19): siRNA sense strand
cauucaaccucccuaugga

SEQ ID NO: 2026664 - RNA, 19 nt, Homo sapiens
  misc_RNA (1)...(19): siRNA sense strand
cccagugucagcuccauua

SEQ ID NO: 2026665 - RNA, 19 nt, Homo sapiens
  misc_RNA (1)...(19): siRNA sense strand
cauuugagcggcagcacua

SEQ ID NO: 2026666 - RNA, 19 nt, Homo sapiens
  misc_RNA (1)...(19): siRNA sense strand
gcacuacccagaggccuau

SEQ ID NO: 2026667 - RNA, 19 nt, Homo sapiens
  misc_RNA (1)...(19): siRNA sense strand
ucacaacuccaucagaucu

SEQ ID NO: 2026668 - RNA, 19 nt, Homo sapiens
  misc_RNA (1)...(19): siRNA sense strand
gaagauuggggacuacaaa

SEQ ID NO: 2026669 - RNA, 19 nt, Homo sapiens
  misc_RNA (1)...(19): siRNA sense strand
gauagcugccgacuaagca

SEQ ID NO: 2026670 - RNA, 19 nt, Homo sapiens
  misc_RNA (1)...(19): siRNA sense strand
ggaaaauggaugacaguga

SEQ ID NO: 2026671 - RNA, 19 nt, Homo sapiens
  misc_RNA (1)...(19): siRNA sense strand
gcugagggcgucugugaca

SEQ ID NO: 2026672 - RNA, 19 nt, Homo sapiens
  misc_RNA (1)...(19): siRNA sense strand
cgccagaacccuaccaugu

SEQ ID NO: 2026673 - RNA, 19 nt, Homo sapiens
  misc_RNA (1)...(19): siRNA sense strand
ugucagcuccauuaauaga

SEQ ID NO: 2026674 - RNA, 19 nt, Homo sapiens
  misc_RNA (1)...(19): siRNA sense strand
agaaucauccggaccaaag

SEQ ID NO: 2026675 - RNA, 19 nt, Homo sapiens
  misc_RNA (1)...(19): siRNA sense strand
ccgcucgagugcccauuug

SEQ ID NO: 2026676 - RNA, 19 nt, Homo sapiens
  misc_RNA (1)...(19): siRNA sense strand
ggaggggccuuugugaaug

SEQ ID NO: 2026677 - RNA, 19 nt, Homo sapiens
  misc_RNA (1)...(19): siRNA sense strand
ggacuacaaacgccagaac

SEQ ID NO: 2026678 - RNA, 19 nt, Homo sapiens
  misc_RNA (1)...(19): siRNA sense strand
gggcgucugugacaaugac

SEQ ID NO: 2026679 - RNA, 19 nt, Homo sapiens
  misc_RNA (1)...(19): siRNA sense strand
uggcugagggcgucuguga

SEQ ID NO: 2026680 - RNA, 19 nt, Homo sapiens
  misc_RNA (1)...(19): siRNA sense strand
ccagugucagcuccauuaa

SEQ ID NO: 2026681 - RNA, 19 nt, Homo sapiens
  misc_RNA (1)...(19): siRNA sense strand
caaggugguggagaagauu

SEQ ID NO: 2026682 - RNA, 19 nt, Homo sapiens
  misc_RNA (1)...(19): siRNA sense strand
ggaaugaccuuauuucuac

SEQ ID NO: 2026683 - RNA, 19 nt, Homo sapiens
  misc_RNA (1)...(19): siRNA sense strand
ggaacagucucacagauuu

SEQ ID NO: 2026684 - RNA, 19 nt, Homo sapiens
  misc_RNA (1)...(19): siRNA sense strand
gaucaucucugggcuuauu

SEQ ID NO: 2026685 - RNA, 19 nt, Homo sapiens
  misc_RNA (1)...(19): siRNA sense strand
uaacugaugcugagaagua

SEQ ID NO: 2026686 - RNA, 19 nt, Homo sapiens
  misc_RNA (1)...(19): siRNA sense strand
ugagaagaaugccaaauga

SEQ ID NO: 2026687 - RNA, 19 nt, Homo sapiens
  misc_RNA (1)...(19): siRNA sense strand
ccaaucagaaucagaauuu

SEQ ID NO: 2026688 - RNA, 19 nt, Homo sapiens
  misc_RNA (1)...(19): siRNA sense strand
gcuuaaaguuguuggaaug

SEQ ID NO: 2026689 - RNA, 19 nt, Homo sapiens
  misc_RNA (1)...(19): siRNA sense strand
gaaucagaauuucaacugu

SEQ ID NO: 2026690 - RNA, 19 nt, Homo sapiens
  misc_RNA (1)...(19): siRNA sense strand
gagaaaagguggcguugga

SEQ ID NO: 2026691 - RNA, 19 nt, Homo sapiens
  misc_RNA (1)...(19): siRNA sense strand
ggaaaaggauccacauugg

SEQ ID NO: 2026692 - RNA, 19 nt, Homo sapiens
  misc_RNA (1)...(19): siRNA sense strand
gcaauguuaccaaucagaa

SEQ ID NO: 2026693 - RNA, 19 nt, Homo sapiens
  misc_RNA (1)...(19): siRNA sense strand
gcugagaaguauuuuauug

SEQ ID NO: 2026694 - RNA, 19 nt, Homo sapiens
  misc_RNA (1)...(19): siRNA sense strand
uggaaugaccuuauuucua

SEQ ID NO: 2026695 - RNA, 19 nt, Homo sapiens
  misc_RNA (1)...(19): siRNA sense strand
caauggcaauguuaccaau

SEQ ID NO: 2026696 - RNA, 19 nt, Homo sapiens
  misc_RNA (1)...(19): siRNA sense strand
gugagaagaaugccaaaug

SEQ ID NO: 2026697 - RNA, 19 nt, Homo sapiens
  misc_RNA (1)...(19): siRNA sense strand
gguagugcuuaaaguuguu

SEQ ID NO: 2026698 - RNA, 19 nt, Homo sapiens
  misc_RNA (1)...(19): siRNA sense strand
cuuauccacuucugaauca

SEQ ID NO: 2026699 - RNA, 19 nt, Homo sapiens
  misc_RNA (1)...(19): siRNA sense strand
ggaauuuuaucaagcaaga

SEQ ID NO: 2026700 - RNA, 19 nt, Homo sapiens
  misc_RNA (1)...(19): siRNA sense strand
ccaaagacugggaauuuua

SEQ ID NO: 2026701 - RNA, 19 nt, Homo sapiens
  misc_RNA (1)...(19): siRNA sense strand
cauaacugaugcugagaag

SEQ ID NO: 2026702 - RNA, 19 nt, Homo sapiens
  misc_RNA (1)...(19): siRNA sense strand
ggaaugaaagcagggacuu

SEQ ID NO: 2026703 - RNA, 19 nt, Homo sapiens
  misc_RNA (1)...(19): siRNA sense strand
cgcaggaucugugagaaga

SEQ ID NO: 2026704 - RNA, 19 nt, Homo sapiens
  misc_RNA (1)...(19): siRNA sense strand
acaacucuguguucaaugg

SEQ ID NO: 2026705 - RNA, 19 nt, Homo sapiens
  misc_RNA (1)...(19): siRNA sense strand
acaaggagcuauggaacag

SEQ ID NO: 2026706 - RNA, 19 nt, Homo sapiens
  misc_RNA (1)...(19): siRNA sense strand
augaucaucucugggcuua

SEQ ID NO: 2026707 - RNA, 19 nt, Homo sapiens
  misc_RNA (1)...(19): siRNA sense strand
cuacuuuauuucccacaga

SEQ ID NO: 2026708 - RNA, 19 nt, Homo sapiens
  misc_RNA (1)...(19): siRNA sense strand
caggaucugugagaagaau

SEQ ID NO: 2026709 - RNA, 19 nt, Homo sapiens
  misc_RNA (1)...(19): siRNA sense strand
uuaccaaucagaaucagaa

SEQ ID NO: 2026710 - RNA, 19 nt, Homo sapiens
  misc_RNA (1)...(19): siRNA sense strand
ugucaacacgccagagaaa

SEQ ID NO: 2026711 - RNA, 19 nt, Homo sapiens
  misc_RNA (1)...(19): siRNA sense strand
caaucagaaucagaauuuc

SEQ ID NO: 2026712 - RNA, 19 nt, Homo sapiens
  misc_RNA (1)...(19): siRNA sense strand
uggaacagucucacagauu

SEQ ID NO: 2026713 - RNA, 19 nt, Homo sapiens
  misc_RNA (1)...(19): siRNA sense strand
uuaccaucgugaagagaaa

SEQ ID NO: 2026714 - RNA, 19 nt, Homo sapiens
  misc_RNA (1)...(19): siRNA sense strand
gaacuggcacaugaucauc

SEQ ID NO: 2026715 - RNA, 19 nt, Homo sapiens
  misc_RNA (1)...(19): siRNA sense strand
cccaacggcuucauuacca

SEQ ID NO: 2026716 - RNA, 19 nt, Homo sapiens
  misc_RNA (1)...(19): siRNA sense strand
uguguucaauggcaauguu

SEQ ID NO: 2026717 - RNA, 19 nt, Homo sapiens
  misc_RNA (1)...(19): siRNA sense strand
uaauuuaccaucgugaaga

SEQ ID NO: 2026718 - RNA, 19 nt, Homo sapiens
  misc_RNA (1)...(19): siRNA sense strand
ccacuucugaaucaucuug

SEQ ID NO: 2026719 - RNA, 19 nt, Homo sapiens
  misc_RNA (1)...(19): siRNA sense strand
uaacaaaaguaacgauggu

SEQ ID NO: 2026720 - RNA, 19 nt, Homo sapiens
  misc_RNA (1)...(19): siRNA sense strand
gaccauuggccuaacaaag

SEQ ID NO: 2026721 - RNA, 19 nt, Homo sapiens
  misc_RNA (1)...(19): siRNA sense strand
ggaacagucugccccaaag

SEQ ID NO: 2026722 - RNA, 19 nt, Homo sapiens
  misc_RNA (1)...(19): siRNA sense strand
accauuggccuaacaaaga

SEQ ID NO: 2026723 - RNA, 19 nt, Homo sapiens
  misc_RNA (1)...(19): siRNA sense strand
agaaucagaauuucaacug

SEQ ID NO: 2026724 - RNA, 19 nt, Homo sapiens
  misc_RNA (1)...(19): siRNA sense strand
gaacagucucacagauuuu

SEQ ID NO: 2026725 - RNA, 19 nt, Homo sapiens
  misc_RNA (1)...(19): siRNA sense strand
gugguagugcuuaaaguug

SEQ ID NO: 2026726 - RNA, 19 nt, Homo sapiens
  misc_RNA (1)...(19): siRNA sense strand
gaaugaccuuauuucuacu

SEQ ID NO: 2026727 - RNA, 19 nt, Homo sapiens
  misc_RNA (1)...(19): siRNA sense strand
ugguagugcuuaaaguugu

SEQ ID NO: 2026728 - RNA, 19 nt, Homo sapiens
  misc_RNA (1)...(19): siRNA sense strand
ucugaaucaucuuggaaug

SEQ ID NO: 2026729 - RNA, 19 nt, Homo sapiens
  misc_RNA (1)...(19): siRNA sense strand
cugaugcugagaaguauuu

SEQ ID NO: 2026730 - RNA, 19 nt, Homo sapiens
  misc_RNA (1)...(19): siRNA sense strand
agucccaacggcuucauua

SEQ ID NO: 2026731 - RNA, 19 nt, Homo sapiens
  misc_RNA (1)...(19): siRNA sense strand
uuauugugguagugcuuaa

SEQ ID NO: 2026732 - RNA, 19 nt, Homo sapiens
  misc_RNA (1)...(19): siRNA sense strand
ccauuggccuaacaaagac

SEQ ID NO: 2026733 - RNA, 19 nt, Homo sapiens
  misc_RNA (1)...(19): siRNA sense strand
gcaggaucugugagaagaa

SEQ ID NO: 2026734 - RNA, 19 nt, Homo sapiens
  misc_RNA (1)...(19): siRNA sense strand
guuggaaugaccuuauuuc

SEQ ID NO: 2026735 - RNA, 19 nt, Homo sapiens
  misc_RNA (1)...(19): siRNA sense strand
caauguuaccaaucagaau

SEQ ID NO: 2026736 - RNA, 19 nt, Homo sapiens
  misc_RNA (1)...(19): siRNA sense strand
ucaauggcaauguuaccaa

SEQ ID NO: 2026737 - RNA, 19 nt, Homo sapiens
  misc_RNA (1)...(19): siRNA sense strand
caacacgccagagaaacug

SEQ ID NO: 2026738 - RNA, 19 nt, Homo sapiens
  misc_RNA (1)...(19): siRNA sense strand
ggaaaucacuuaugcugaa

SEQ ID NO: 2026739 - RNA, 19 nt, Homo sapiens
  misc_RNA (1)...(19): siRNA sense strand
ggaaugauguuaauugucu

SEQ ID NO: 2026740 - RNA, 19 nt, Homo sapiens
  misc_RNA (1)...(19): siRNA sense strand
gauaaacacucaagaagag

SEQ ID NO: 2026741 - RNA, 19 nt, Homo sapiens
  misc_RNA (1)...(19): siRNA sense strand
gagaaggacugugcuagaa

SEQ ID NO: 2026742 - RNA, 19 nt, Homo sapiens
  misc_RNA (1)...(19): siRNA sense strand
gaaggacugugcuagaaug

SEQ ID NO: 2026743 - RNA, 19 nt, Homo sapiens
  misc_RNA (1)...(19): siRNA sense strand
gcaagaagaaucugcuuau

SEQ ID NO: 2026744 - RNA, 19 nt, Homo sapiens
  misc_RNA (1)...(19): siRNA sense strand
caagaagaaucugcuuauu

SEQ ID NO: 2026745 - RNA, 19 nt, Homo sapiens
  misc_RNA (1)...(19): siRNA sense strand
gcaauggguugaucagaca

SEQ ID NO: 2026746 - RNA, 19 nt, Homo sapiens
  misc_RNA (1)...(19): siRNA sense strand
gaucagacaccauacaaug

SEQ ID NO: 2026747 - RNA, 19 nt, Homo sapiens
  misc_RNA (1)...(19): siRNA sense strand
ugaugaagauccacuuaug

SEQ ID NO: 2026748 - RNA, 19 nt, Homo sapiens
  misc_RNA (1)...(19): siRNA sense strand
gaugaugaagauccacuua

SEQ ID NO: 2026749 - RNA, 19 nt, Homo sapiens
  misc_RNA (1)...(19): siRNA sense strand
caaagaauuggaagucauu

SEQ ID NO: 2026750 - RNA, 19 nt, Homo sapiens
  misc_RNA (1)...(19): siRNA sense strand
gaugaagauccacuuauga

SEQ ID NO: 2026751 - RNA, 19 nt, Homo sapiens
  misc_RNA (1)...(19): siRNA sense strand
gggcuggaaugauguuaau

SEQ ID NO: 2026752 - RNA, 19 nt, Homo sapiens
  misc_RNA (1)...(19): siRNA sense strand
gcucucagauccagaaggu

SEQ ID NO: 2026753 - RNA, 19 nt, Homo sapiens
  misc_RNA (1)...(19): siRNA sense strand
gcuacuuuauuucuacuga

SEQ ID NO: 2026754 - RNA, 19 nt, Homo sapiens
  misc_RNA (1)...(19): siRNA sense strand
ggugauaaacacucaagaa

SEQ ID NO: 2026755 - RNA, 19 nt, Homo sapiens
  misc_RNA (1)...(19): siRNA sense strand
gcuggaaugauguuaauug

SEQ ID NO: 2026756 - RNA, 19 nt, Homo sapiens
  misc_RNA (1)...(19): siRNA sense strand
uccaacugcuacuuuauuu

SEQ ID NO: 2026757 - RNA, 19 nt, Homo sapiens
  misc_RNA (1)...(19): siRNA sense strand
gcugcguugugcuaaauuu

SEQ ID NO: 2026758 - RNA, 19 nt, Homo sapiens
  misc_RNA (1)...(19): siRNA sense strand
gaaaucacuuaugcugaag

SEQ ID NO: 2026759 - RNA, 19 nt, Homo sapiens
  misc_RNA (1)...(19): siRNA sense strand
caacugcuacuuuauuucu

SEQ ID NO: 2026760 - RNA, 19 nt, Homo sapiens
  misc_RNA (1)...(19): siRNA sense strand
gcuguugcccaaagaauug

SEQ ID NO: 2026761 - RNA, 19 nt, Homo sapiens
  misc_RNA (1)...(19): siRNA sense strand
ugauaaacacucaagaaga

SEQ ID NO: 2026762 - RNA, 19 nt, Homo sapiens
  misc_RNA (1)...(19): siRNA sense strand
ggguugaucagacaccaua

SEQ ID NO: 2026763 - RNA, 19 nt, Homo sapiens
  misc_RNA (1)...(19): siRNA sense strand
cagacaccauacaaugaaa

SEQ ID NO: 2026764 - RNA, 19 nt, Homo sapiens
  misc_RNA (1)...(19): siRNA sense strand
ucagacaccauacaaugaa

SEQ ID NO: 2026765 - RNA, 19 nt, Homo sapiens
  misc_RNA (1)...(19): siRNA sense strand
gcgcugcguugugcuaaau

SEQ ID NO: 2026766 - RNA, 19 nt, Homo sapiens
  misc_RNA (1)...(19): siRNA sense strand
agagcaggauuucaucuuc

SEQ ID NO: 2026767 - RNA, 19 nt, Homo sapiens
  misc_RNA (1)...(19): siRNA sense strand
guaaaucacccaaaagaug

SEQ ID NO: 2026768 - RNA, 19 nt, Homo sapiens
  misc_RNA (1)...(19): siRNA sense strand
uuugugagaugaugaagau

SEQ ID NO: 2026769 - RNA, 19 nt, Homo sapiens
  misc_RNA (1)...(19): siRNA sense strand
ugagaaggacugugcuaga

SEQ ID NO: 2026770 - RNA, 19 nt, Homo sapiens
  misc_RNA (1)...(19): siRNA sense strand
gaagagcaggauuucaucu

SEQ ID NO: 2026771 - RNA, 19 nt, Homo sapiens
  misc_RNA (1)...(19): siRNA sense strand
ggcaagacagugagaagga

SEQ ID NO: 2026772 - RNA, 19 nt, Homo sapiens
  misc_RNA (1)...(19): siRNA sense strand
gaauuggaagucauuuagu

SEQ ID NO: 2026773 - RNA, 19 nt, Homo sapiens
  misc_RNA (1)...(19): siRNA sense strand
caccauacaaugaaaguuc

SEQ ID NO: 2026774 - RNA, 19 nt, Homo sapiens
  misc_RNA (1)...(19): siRNA sense strand
gugauaaacacucaagaag

SEQ ID NO: 2026775 - RNA, 19 nt, Homo sapiens
  misc_RNA (1)...(19): siRNA sense strand
aagaagagcaggauuucau

SEQ ID NO: 2026776 - RNA, 19 nt, Homo sapiens
  misc_RNA (1)...(19): siRNA sense strand
cuucggaaaucacuuaugc

SEQ ID NO: 2026777 - RNA, 19 nt, Homo sapiens
  misc_RNA (1)...(19): siRNA sense strand
ccagaaggucagcgacauu

SEQ ID NO: 2026778 - RNA, 19 nt, Homo sapiens
  misc_RNA (1)...(19): siRNA sense strand
ucaagaagagcaggauuuc

SEQ ID NO: 2026779 - RNA, 19 nt, Homo sapiens
  misc_RNA (1)...(19): siRNA sense strand
cuggaaugauguuaauugu

SEQ ID NO: 2026780 - RNA, 19 nt, Homo sapiens
  misc_RNA (1)...(19): siRNA sense strand
ccaaugagcgcugcguugu

SEQ ID NO: 2026781 - RNA, 19 nt, Homo sapiens
  misc_RNA (1)...(19): siRNA sense strand
agaauuggaagucauuuag

SEQ ID NO: 2026782 - RNA, 19 nt, Homo sapiens
  misc_RNA (1)...(19): siRNA sense strand
gguccucaaaggucaguuu

SEQ ID NO: 2026783 - RNA, 19 nt, Homo sapiens
  misc_RNA (1)...(19): siRNA sense strand
aaggucaguuugugagaug

SEQ ID NO: 2026784 - RNA, 19 nt, Homo sapiens
  misc_RNA (1)...(19): siRNA sense strand
ggauuucaucuuccagaau

SEQ ID NO: 2026785 - RNA, 19 nt, Homo sapiens
  misc_RNA (1)...(19): siRNA sense strand
cagaaggucagcgacauug

SEQ ID NO: 2026786 - RNA, 19 nt, Homo sapiens
  misc_RNA (1)...(19): siRNA sense strand
gagcuguugcccaaagaau

SEQ ID NO: 2026787 - RNA, 19 nt, Homo sapiens
  misc_RNA (1)...(19): siRNA sense strand
ugcaagaagaaucugcuua

SEQ ID NO: 2026788 - RNA, 19 nt, Homo sapiens
  misc_RNA (1)...(19): siRNA sense strand
aaaggucaguuugugagau

SEQ ID NO: 2026789 - RNA, 19 nt, Homo sapiens
  misc_RNA (1)...(19): siRNA sense strand
gcccagugaucccaaugag

SEQ ID NO: 2026790 - RNA, 19 nt, Homo sapiens
  misc_RNA (1)...(19): siRNA sense strand
cucaagaagagcaggauuu

SEQ ID NO: 2026791 - RNA, 19 nt, Homo sapiens
  misc_RNA (1)...(19): siRNA sense strand
gaaucugcaagaagaaucu

SEQ ID NO: 2026792 - RNA, 19 nt, Homo sapiens
  misc_RNA (1)...(19): siRNA sense strand
caagaagagcaggauuuca

SEQ ID NO: 2026793 - RNA, 19 nt, Homo sapiens
  misc_RNA (1)...(19): siRNA sense strand
ggagcuguugcccaaagaa

SEQ ID NO: 2026794 - RNA, 19 nt, Homo sapiens
  misc_RNA (1)...(19): siRNA sense strand
ccacgugagcccagugauc

SEQ ID NO: 2026795 - RNA, 19 nt, Homo sapiens
  misc_RNA (1)...(19): siRNA sense strand
gcaucaacacagccucuuc

SEQ ID NO: 2026796 - RNA, 19 nt, Homo sapiens
  misc_RNA (1)...(19): siRNA sense strand
aggauuucaucuuccagaa

SEQ ID NO: 2026797 - RNA, 19 nt, Homo sapiens
  misc_RNA (1)...(19): siRNA sense strand
gugagaugaugaagaucca

SEQ ID NO: 2026798 - RNA, 19 nt, Homo sapiens
  misc_RNA (1)...(19): siRNA sense strand
gagcgcugcguugugcuaa

SEQ ID NO: 2026799 - RNA, 19 nt, Homo sapiens
  misc_RNA (1)...(19): siRNA sense strand
ggaaaucacuuaugcugaa

SEQ ID NO: 2026800 - RNA, 19 nt, Homo sapiens
  misc_RNA (1)...(19): siRNA sense strand
ggaaugauguuaauugucu

SEQ ID NO: 2026801 - RNA, 19 nt, Homo sapiens
  misc_RNA (1)...(19): siRNA sense strand
gauaaacacucaagaagag

SEQ ID NO: 2026802 - RNA, 19 nt, Homo sapiens
  misc_RNA (1)...(19): siRNA sense strand
gagaaggacugugcuagaa

SEQ ID NO: 2026803 - RNA, 19 nt, Homo sapiens
  misc_RNA (1)...(19): siRNA sense strand
gaaggacugugcuagaaug

SEQ ID NO: 2026804 - RNA, 19 nt, Homo sapiens
  misc_RNA (1)...(19): siRNA sense strand
gcaagaagaaucugcuuau

SEQ ID NO: 2026805 - RNA, 19 nt, Homo sapiens
  misc_RNA (1)...(19): siRNA sense strand
caagaagaaucugcuuauu

SEQ ID NO: 2026806 - RNA, 19 nt, Homo sapiens
  misc_RNA (1)...(19): siRNA sense strand
gcaauggguugaucagaca

SEQ ID NO: 2026807 - RNA, 19 nt, Homo sapiens
  misc_RNA (1)...(19): siRNA sense strand
gaucagacaccauacaaug

SEQ ID NO: 2026808 - RNA, 19 nt, Homo sapiens
  misc_RNA (1)...(19): siRNA sense strand
ugaugaagauccacuuaug

SEQ ID NO: 2026809 - RNA, 19 nt, Homo sapiens
  misc_RNA (1)...(19): siRNA sense strand
gaugaugaagauccacuua

SEQ ID NO: 2026810 - RNA, 19 nt, Homo sapiens
  misc_RNA (1)...(19): siRNA sense strand
caaagaauuggaagucauu

SEQ ID NO: 2026811 - RNA, 19 nt, Homo sapiens
  misc_RNA (1)...(19): siRNA sense strand
gaugaagauccacuuauga

SEQ ID NO: 2026812 - RNA, 19 nt, Homo sapiens
  misc_RNA (1)...(19): siRNA sense strand
gggcuggaaugauguuaau

SEQ ID NO: 2026813 - RNA, 19 nt, Homo sapiens
  misc_RNA (1)...(19): siRNA sense strand
gcucucagauccagaaggu

SEQ ID NO: 2026814 - RNA, 19 nt, Homo sapiens
  misc_RNA (1)...(19): siRNA sense strand
gcuacuuuauuucuacuga

SEQ ID NO: 2026815 - RNA, 19 nt, Homo sapiens
  misc_RNA (1)...(19): siRNA sense strand
ggugauaaacacucaagaa

SEQ ID NO: 2026816 - RNA, 19 nt, Homo sapiens
  misc_RNA (1)...(19): siRNA sense strand
gcuggaaugauguuaauug

SEQ ID NO: 2026817 - RNA, 19 nt, Homo sapiens
  misc_RNA (1)...(19): siRNA sense strand
uccaacugcuacuuuauuu

SEQ ID NO: 2026818 - RNA, 19 nt, Homo sapiens
  misc_RNA (1)...(19): siRNA sense strand
gcugcguugugcuaaauuu

SEQ ID NO: 2026819 - RNA, 19 nt, Homo sapiens
  misc_RNA (1)...(19): siRNA sense strand
gaaaucacuuaugcugaag

SEQ ID NO: 2026820 - RNA, 19 nt, Homo sapiens
  misc_RNA (1)...(19): siRNA sense strand
caacugcuacuuuauuucu

SEQ ID NO: 2026821 - RNA, 19 nt, Homo sapiens
  misc_RNA (1)...(19): siRNA sense strand
gcuguugcccaaagaauug

SEQ ID NO: 2026822 - RNA, 19 nt, Homo sapiens
  misc_RNA (1)...(19): siRNA sense strand
ugauaaacacucaagaaga

SEQ ID NO: 2026823 - RNA, 19 nt, Homo sapiens
  misc_RNA (1)...(19): siRNA sense strand
ggguugaucagacaccaua

SEQ ID NO: 2026824 - RNA, 19 nt, Homo sapiens
  misc_RNA (1)...(19): siRNA sense strand
cagacaccauacaaugaaa

SEQ ID NO: 2026825 - RNA, 19 nt, Homo sapiens
  misc_RNA (1)...(19): siRNA sense strand
ucagacaccauacaaugaa

SEQ ID NO: 2026826 - RNA, 19 nt, Homo sapiens
  misc_RNA (1)...(19): siRNA sense strand
gcgcugcguugugcuaaau

SEQ ID NO: 2026827 - RNA, 19 nt, Homo sapiens
  misc_RNA (1)...(19): siRNA sense strand
agagcaggauuucaucuuc

SEQ ID NO: 2026828 - RNA, 19 nt, Homo sapiens
  misc_RNA (1)...(19): siRNA sense strand
guaaaucacccaaaagaug

SEQ ID NO: 2026829 - RNA, 19 nt, Homo sapiens
  misc_RNA (1)...(19): siRNA sense strand
uuugugagaugaugaagau

SEQ ID NO: 2026830 - RNA, 19 nt, Homo sapiens
  misc_RNA (1)...(19): siRNA sense strand
ugagaaggacugugcuaga

SEQ ID NO: 2026831 - RNA, 19 nt, Homo sapiens
  misc_RNA (1)...(19): siRNA sense strand
gaagagcaggauuucaucu

SEQ ID NO: 2026832 - RNA, 19 nt, Homo sapiens
  misc_RNA (1)...(19): siRNA sense strand
ggcaagacagugagaagga

SEQ ID NO: 2026833 - RNA, 19 nt, Homo sapiens
  misc_RNA (1)...(19): siRNA sense strand
gaauuggaagucauuuagu

SEQ ID NO: 2026834 - RNA, 19 nt, Homo sapiens
  misc_RNA (1)...(19): siRNA sense strand
caccauacaaugaaaguuc

SEQ ID NO: 2026835 - RNA, 19 nt, Homo sapiens
  misc_RNA (1)...(19): siRNA sense strand
gugauaaacacucaagaag

SEQ ID NO: 2026836 - RNA, 19 nt, Homo sapiens
  misc_RNA (1)...(19): siRNA sense strand
aagaagagcaggauuucau

SEQ ID NO: 2026837 - RNA, 19 nt, Homo sapiens
  misc_RNA (1)...(19): siRNA sense strand
cuucggaaaucacuuaugc

SEQ ID NO: 2026838 - RNA, 19 nt, Homo sapiens
  misc_RNA (1)...(19): siRNA sense strand
ccagaaggucagcgacauu

SEQ ID NO: 2026839 - RNA, 19 nt, Homo sapiens
  misc_RNA (1)...(19): siRNA sense strand
ucaagaagagcaggauuuc

SEQ ID NO: 2026840 - RNA, 19 nt, Homo sapiens
  misc_RNA (1)...(19): siRNA sense strand
cuggaaugauguuaauugu

SEQ ID NO: 2026841 - RNA, 19 nt, Homo sapiens
  misc_RNA (1)...(19): siRNA sense strand
ccaaugagcgcugcguugu

SEQ ID NO: 2026842 - RNA, 19 nt, Homo sapiens
  misc_RNA (1)...(19): siRNA sense strand
agaauuggaagucauuuag

SEQ ID NO: 2026843 - RNA, 19 nt, Homo sapiens
  misc_RNA (1)...(19): siRNA sense strand
gguccucaaaggucaguuu

SEQ ID NO: 2026844 - RNA, 19 nt, Homo sapiens
  misc_RNA (1)...(19): siRNA sense strand
aaggucaguuugugagaug

SEQ ID NO: 2026845 - RNA, 19 nt, Homo sapiens
  misc_RNA (1)...(19): siRNA sense strand
ggauuucaucuuccagaau

SEQ ID NO: 2026846 - RNA, 19 nt, Homo sapiens
  misc_RNA (1)...(19): siRNA sense strand
cagaaggucagcgacauug

SEQ ID NO: 2026847 - RNA, 19 nt, Homo sapiens
  misc_RNA (1)...(19): siRNA sense strand
gagcuguugcccaaagaau

SEQ ID NO: 2026848 - RNA, 19 nt, Homo sapiens
  misc_RNA (1)...(19): siRNA sense strand
ugcaagaagaaucugcuua

SEQ ID NO: 2026849 - RNA, 19 nt, Homo sapiens
  misc_RNA (1)...(19): siRNA sense strand
aaaggucaguuugugagau

SEQ ID NO: 2026850 - RNA, 19 nt, Homo sapiens
  misc_RNA (1)...(19): siRNA sense strand
gcccagugaucccaaugag

SEQ ID NO: 2026851 - RNA, 19 nt, Homo sapiens
  misc_RNA (1)...(19): siRNA sense strand
cucaagaagagcaggauuu

SEQ ID NO: 2026852 - RNA, 19 nt, Homo sapiens
  misc_RNA (1)...(19): siRNA sense strand
gaaucugcaagaagaaucu

SEQ ID NO: 2026853 - RNA, 19 nt, Homo sapiens
  misc_RNA (1)...(19): siRNA sense strand
caagaagagcaggauuuca

SEQ ID NO: 2026854 - RNA, 19 nt, Homo sapiens
  misc_RNA (1)...(19): siRNA sense strand
ggagcuguugcccaaagaa

SEQ ID NO: 2026855 - RNA, 19 nt, Homo sapiens
  misc_RNA (1)...(19): siRNA sense strand
ccacgugagcccagugauc

SEQ ID NO: 2026856 - RNA, 19 nt, Homo sapiens
  misc_RNA (1)...(19): siRNA sense strand
gcaucaacacagccucuuc

SEQ ID NO: 2026857 - RNA, 19 nt, Homo sapiens
  misc_RNA (1)...(19): siRNA sense strand
aggauuucaucuuccagaa

SEQ ID NO: 2026858 - RNA, 19 nt, Homo sapiens
  misc_RNA (1)...(19): siRNA sense strand
gugagaugaugaagaucca

SEQ ID NO: 2026859 - RNA, 19 nt, Homo sapiens
  misc_RNA (1)...(19): siRNA sense strand
gagcgcugcguugugcuaa

SEQ ID NO: 2026860 - RNA, 19 nt, Homo sapiens
  misc_RNA (1)...(19): siRNA sense strand
ggaaaucacuuaugcugaa

SEQ ID NO: 2026861 - RNA, 19 nt, Homo sapiens
  misc_RNA (1)...(19): siRNA sense strand
ggaaugauguuaauugucu

SEQ ID NO: 2026862 - RNA, 19 nt, Homo sapiens
  misc_RNA (1)...(19): siRNA sense strand
gauaaacacucaagaagag

SEQ ID NO: 2026863 - RNA, 19 nt, Homo sapiens
  misc_RNA (1)...(19): siRNA sense strand
gagaaggacugugcuagaa

SEQ ID NO: 2026864 - RNA, 19 nt, Homo sapiens
  misc_RNA (1)...(19): siRNA sense strand
gaaggacugugcuagaaug

SEQ ID NO: 2026865 - RNA, 19 nt, Homo sapiens
  misc_RNA (1)...(19): siRNA sense strand
gcaagaagaaucugcuuau

SEQ ID NO: 2026866 - RNA, 19 nt, Homo sapiens
  misc_RNA (1)...(19): siRNA sense strand
caagaagaaucugcuuauu

SEQ ID NO: 2026867 - RNA, 19 nt, Homo sapiens
  misc_RNA (1)...(19): siRNA sense strand
gcaauggguugaucagaca

SEQ ID NO: 2026868 - RNA, 19 nt, Homo sapiens
  misc_RNA (1)...(19): siRNA sense strand
gaucagacaccauacaaug

SEQ ID NO: 2026869 - RNA, 19 nt, Homo sapiens
  misc_RNA (1)...(19): siRNA sense strand
ugaugaagauccacuuaug

SEQ ID NO: 2026870 - RNA, 19 nt, Homo sapiens
  misc_RNA (1)...(19): siRNA sense strand
gaugaugaagauccacuua

SEQ ID NO: 2026871 - RNA, 19 nt, Homo sapiens
  misc_RNA (1)...(19): siRNA sense strand
caaagaauuggaagucauu

SEQ ID NO: 2026872 - RNA, 19 nt, Homo sapiens
  misc_RNA (1)...(19): siRNA sense strand
gaugaagauccacuuauga

SEQ ID NO: 2026873 - RNA, 19 nt, Homo sapiens
  misc_RNA (1)...(19): siRNA sense strand
gggcuggaaugauguuaau

SEQ ID NO: 2026874 - RNA, 19 nt, Homo sapiens
  misc_RNA (1)...(19): siRNA sense strand
gcucucagauccagaaggu

SEQ ID NO: 2026875 - RNA, 19 nt, Homo sapiens
  misc_RNA (1)...(19): siRNA sense strand
gcuacuuuauuucuacuga

SEQ ID NO: 2026876 - RNA, 19 nt, Homo sapiens
  misc_RNA (1)...(19): siRNA sense strand
ggugauaaacacucaagaa

SEQ ID NO: 2026877 - RNA, 19 nt, Homo sapiens
  misc_RNA (1)...(19): siRNA sense strand
gcuggaaugauguuaauug

SEQ ID NO: 2026878 - RNA, 19 nt, Homo sapiens
  misc_RNA (1)...(19): siRNA sense strand
uccaacugcuacuuuauuu

SEQ ID NO: 2026879 - RNA, 19 nt, Homo sapiens
  misc_RNA (1)...(19): siRNA sense strand
gcugcguugugcuaaauuu

SEQ ID NO: 2026880 - RNA, 19 nt, Homo sapiens
  misc_RNA (1)...(19): siRNA sense strand
gaaaucacuuaugcugaag

SEQ ID NO: 2026881 - RNA, 19 nt, Homo sapiens
  misc_RNA (1)...(19): siRNA sense strand
caacugcuacuuuauuucu

SEQ ID NO: 2026882 - RNA, 19 nt, Homo sapiens
  misc_RNA (1)...(19): siRNA sense strand
gcuguugcccaaagaauug

SEQ ID NO: 2026883 - RNA, 19 nt, Homo sapiens
  misc_RNA (1)...(19): siRNA sense strand
ugauaaacacucaagaaga

SEQ ID NO: 2026884 - RNA, 19 nt, Homo sapiens
  misc_RNA (1)...(19): siRNA sense strand
ggguugaucagacaccaua

SEQ ID NO: 2026885 - RNA, 19 nt, Homo sapiens
  misc_RNA (1)...(19): siRNA sense strand
cagacaccauacaaugaaa

SEQ ID NO: 2026886 - RNA, 19 nt, Homo sapiens
  misc_RNA (1)...(19): siRNA sense strand
ucagacaccauacaaugaa

SEQ ID NO: 2026887 - RNA, 19 nt, Homo sapiens
  misc_RNA (1)...(19): siRNA sense strand
gcgcugcguugugcuaaau

SEQ ID NO: 2026888 - RNA, 19 nt, Homo sapiens
  misc_RNA (1)...(19): siRNA sense strand
agagcaggauuucaucuuc

SEQ ID NO: 2026889 - RNA, 19 nt, Homo sapiens
  misc_RNA (1)...(19): siRNA sense strand
guaaaucacccaaaagaug

SEQ ID NO: 2026890 - RNA, 19 nt, Homo sapiens
  misc_RNA (1)...(19): siRNA sense strand
uuugugagaugaugaagau

SEQ ID NO: 2026891 - RNA, 19 nt, Homo sapiens
  misc_RNA (1)...(19): siRNA sense strand
ugagaaggacugugcuaga

SEQ ID NO: 2026892 - RNA, 19 nt, Homo sapiens
  misc_RNA (1)...(19): siRNA sense strand
gaagagcaggauuucaucu

SEQ ID NO: 2026893 - RNA, 19 nt, Homo sapiens
  misc_RNA (1)...(19): siRNA sense strand
ggcaagacagugagaagga

SEQ ID NO: 2026894 - RNA, 19 nt, Homo sapiens
  misc_RNA (1)...(19): siRNA sense strand
gaauuggaagucauuuagu

SEQ ID NO: 2026895 - RNA, 19 nt, Homo sapiens
  misc_RNA (1)...(19): siRNA sense strand
caccauacaaugaaaguuc

SEQ ID NO: 2026896 - RNA, 19 nt, Homo sapiens
  misc_RNA (1)...(19): siRNA sense strand
gugauaaacacucaagaag

SEQ ID NO: 2026897 - RNA, 19 nt, Homo sapiens
  misc_RNA (1)...(19): siRNA sense strand
aagaagagcaggauuucau

SEQ ID NO: 2026898 - RNA, 19 nt, Homo sapiens
  misc_RNA (1)...(19): siRNA sense strand
cuucggaaaucacuuaugc

SEQ ID NO: 2026899 - RNA, 19 nt, Homo sapiens
  misc_RNA (1)...(19): siRNA sense strand
ccagaaggucagcgacauu

SEQ ID NO: 2026900 - RNA, 19 nt, Homo sapiens
  misc_RNA (1)...(19): siRNA sense strand
ucaagaagagcaggauuuc

SEQ ID NO: 2026901 - RNA, 19 nt, Homo sapiens
  misc_RNA (1)...(19): siRNA sense strand
cuggaaugauguuaauugu

SEQ ID NO: 2026902 - RNA, 19 nt, Homo sapiens
  misc_RNA (1)...(19): siRNA sense strand
ccaaugagcgcugcguugu

SEQ ID NO: 2026903 - RNA, 19 nt, Homo sapiens
  misc_RNA (1)...(19): siRNA sense strand
agaauuggaagucauuuag

SEQ ID NO: 2026904 - RNA, 19 nt, Homo sapiens
  misc_RNA (1)...(19): siRNA sense strand
gguccucaaaggucaguuu

SEQ ID NO: 2026905 - RNA, 19 nt, Homo sapiens
  misc_RNA (1)...(19): siRNA sense strand
aaggucaguuugugagaug

SEQ ID NO: 2026906 - RNA, 19 nt, Homo sapiens
  misc_RNA (1)...(19): siRNA sense strand
ggauuucaucuuccagaau

SEQ ID NO: 2026907 - RNA, 19 nt, Homo sapiens
  misc_RNA (1)...(19): siRNA sense strand
cagaaggucagcgacauug

SEQ ID NO: 2026908 - RNA, 19 nt, Homo sapiens
  misc_RNA (1)...(19): siRNA sense strand
gagcuguugcccaaagaau

SEQ ID NO: 2026909 - RNA, 19 nt, Homo sapiens
  misc_RNA (1)...(19): siRNA sense strand
ugcaagaagaaucugcuua

SEQ ID NO: 2026910 - RNA, 19 nt, Homo sapiens
  misc_RNA (1)...(19): siRNA sense strand
aaaggucaguuugugagau

SEQ ID NO: 2026911 - RNA, 19 nt, Homo sapiens
  misc_RNA (1)...(19): siRNA sense strand
gcccagugaucccaaugag

SEQ ID NO: 2026912 - RNA, 19 nt, Homo sapiens
  misc_RNA (1)...(19): siRNA sense strand
cucaagaagagcaggauuu

SEQ ID NO: 2026913 - RNA, 19 nt, Homo sapiens
  misc_RNA (1)...(19): siRNA sense strand
gaaucugcaagaagaaucu

SEQ ID NO: 2026914 - RNA, 19 nt, Homo sapiens
  misc_RNA (1)...(19): siRNA sense strand
caagaagagcaggauuuca

SEQ ID NO: 2026915 - RNA, 19 nt, Homo sapiens
  misc_RNA (1)...(19): siRNA sense strand
ggagcuguugcccaaagaa

SEQ ID NO: 2026916 - RNA, 19 nt, Homo sapiens
  misc_RNA (1)...(19): siRNA sense strand
ccacgugagcccagugauc

SEQ ID NO: 2026917 - RNA, 19 nt, Homo sapiens
  misc_RNA (1)...(19): siRNA sense strand
gcaucaacacagccucuuc

SEQ ID NO: 2026918 - RNA, 19 nt, Homo sapiens
  misc_RNA (1)...(19): siRNA sense strand
aggauuucaucuuccagaa

SEQ ID NO: 2026919 - RNA, 19 nt, Homo sapiens
  misc_RNA (1)...(19): siRNA sense strand
gugagaugaugaagaucca

SEQ ID NO: 2026920 - RNA, 19 nt, Homo sapiens
  misc_RNA (1)...(19): siRNA sense strand
gagcgcugcguugugcuaa

SEQ ID NO: 2026921 - RNA, 19 nt, Homo sapiens
  misc_RNA (1)...(19): siRNA sense strand
ggaaaucacuuaugcugaa

SEQ ID NO: 2026922 - RNA, 19 nt, Homo sapiens
  misc_RNA (1)...(19): siRNA sense strand
ggaaugauguuaauugucu

SEQ ID NO: 2026923 - RNA, 19 nt, Homo sapiens
  misc_RNA (1)...(19): siRNA sense strand
gauaaacacucaagaagag

SEQ ID NO: 2026924 - RNA, 19 nt, Homo sapiens
  misc_RNA (1)...(19): siRNA sense strand
gagaaggacugugcuagaa

SEQ ID NO: 2026925 - RNA, 19 nt, Homo sapiens
  misc_RNA (1)...(19): siRNA sense strand
gaaggacugugcuagaaug

SEQ ID NO: 2026926 - RNA, 19 nt, Homo sapiens
  misc_RNA (1)...(19): siRNA sense strand
gcaagaagaaucugcuuau

SEQ ID NO: 2026927 - RNA, 19 nt, Homo sapiens
  misc_RNA (1)...(19): siRNA sense strand
caagaagaaucugcuuauu

SEQ ID NO: 2026928 - RNA, 19 nt, Homo sapiens
  misc_RNA (1)...(19): siRNA sense strand
gcaauggguugaucagaca

SEQ ID NO: 2026929 - RNA, 19 nt, Homo sapiens
  misc_RNA (1)...(19): siRNA sense strand
gaucagacaccauacaaug

SEQ ID NO: 2026930 - RNA, 19 nt, Homo sapiens
  misc_RNA (1)...(19): siRNA sense strand
ugaugaagauccacuuaug

SEQ ID NO: 2026931 - RNA, 19 nt, Homo sapiens
  misc_RNA (1)...(19): siRNA sense strand
gaugaugaagauccacuua

SEQ ID NO: 2026932 - RNA, 19 nt, Homo sapiens
  misc_RNA (1)...(19): siRNA sense strand
caaagaauuggaagucauu

SEQ ID NO: 2026933 - RNA, 19 nt, Homo sapiens
  misc_RNA (1)...(19): siRNA sense strand
gaugaagauccacuuauga

SEQ ID NO: 2026934 - RNA, 19 nt, Homo sapiens
  misc_RNA (1)...(19): siRNA sense strand
gggcuggaaugauguuaau

SEQ ID NO: 2026935 - RNA, 19 nt, Homo sapiens
  misc_RNA (1)...(19): siRNA sense strand
gcucucagauccagaaggu

SEQ ID NO: 2026936 - RNA, 19 nt, Homo sapiens
  misc_RNA (1)...(19): siRNA sense strand
gcuacuuuauuucuacuga

SEQ ID NO: 2026937 - RNA, 19 nt, Homo sapiens
  misc_RNA (1)...(19): siRNA sense strand
ggugauaaacacucaagaa

SEQ ID NO: 2026938 - RNA, 19 nt, Homo sapiens
  misc_RNA (1)...(19): siRNA sense strand
gcuggaaugauguuaauug

SEQ ID NO: 2026939 - RNA, 19 nt, Homo sapiens
  misc_RNA (1)...(19): siRNA sense strand
uccaacugcuacuuuauuu

SEQ ID NO: 2026940 - RNA, 19 nt, Homo sapiens
  misc_RNA (1)...(19): siRNA sense strand
gcugcguugugcuaaauuu

SEQ ID NO: 2026941 - RNA, 19 nt, Homo sapiens
  misc_RNA (1)...(19): siRNA sense strand
gaaaucacuuaugcugaag

SEQ ID NO: 2026942 - RNA, 19 nt, Homo sapiens
  misc_RNA (1)...(19): siRNA sense strand
caacugcuacuuuauuucu

SEQ ID NO: 2026943 - RNA, 19 nt, Homo sapiens
  misc_RNA (1)...(19): siRNA sense strand
gcuguugcccaaagaauug

SEQ ID NO: 2026944 - RNA, 19 nt, Homo sapiens
  misc_RNA (1)...(19): siRNA sense strand
ugauaaacacucaagaaga

SEQ ID NO: 2026945 - RNA, 19 nt, Homo sapiens
  misc_RNA (1)...(19): siRNA sense strand
ggguugaucagacaccaua

SEQ ID NO: 2026946 - RNA, 19 nt, Homo sapiens
  misc_RNA (1)...(19): siRNA sense strand
cagacaccauacaaugaaa

SEQ ID NO: 2026947 - RNA, 19 nt, Homo sapiens
  misc_RNA (1)...(19): siRNA sense strand
ucagacaccauacaaugaa

SEQ ID NO: 2026948 - RNA, 19 nt, Homo sapiens
  misc_RNA (1)...(19): siRNA sense strand
gcgcugcguugugcuaaau

SEQ ID NO: 2026949 - RNA, 19 nt, Homo sapiens
  misc_RNA (1)...(19): siRNA sense strand
agagcaggauuucaucuuc

SEQ ID NO: 2026950 - RNA, 19 nt, Homo sapiens
  misc_RNA (1)...(19): siRNA sense strand
guaaaucacccaaaagaug

SEQ ID NO: 2026951 - RNA, 19 nt, Homo sapiens
  misc_RNA (1)...(19): siRNA sense strand
uuugugagaugaugaagau

SEQ ID NO: 2026952 - RNA, 19 nt, Homo sapiens
  misc_RNA (1)...(19): siRNA sense strand
ugagaaggacugugcuaga

SEQ ID NO: 2026953 - RNA, 19 nt, Homo sapiens
  misc_RNA (1)...(19): siRNA sense strand
gaagagcaggauuucaucu

SEQ ID NO: 2026954 - RNA, 19 nt, Homo sapiens
  misc_RNA (1)...(19): siRNA sense strand
ggcaagacagugagaagga

SEQ ID NO: 2026955 - RNA, 19 nt, Homo sapiens
  misc_RNA (1)...(19): siRNA sense strand
gaauuggaagucauuuagu

SEQ ID NO: 2026956 - RNA, 19 nt, Homo sapiens
  misc_RNA (1)...(19): siRNA sense strand
caccauacaaugaaaguuc

SEQ ID NO: 2026957 - RNA, 19 nt, Homo sapiens
  misc_RNA (1)...(19): siRNA sense strand
gugauaaacacucaagaag

SEQ ID NO: 2026958 - RNA, 19 nt, Homo sapiens
  misc_RNA (1)...(19): siRNA sense strand
aagaagagcaggauuucau

SEQ ID NO: 2026959 - RNA, 19 nt, Homo sapiens
  misc_RNA (1)...(19): siRNA sense strand
cuucggaaaucacuuaugc

SEQ ID NO: 2026960 - RNA, 19 nt, Homo sapiens
  misc_RNA (1)...(19): siRNA sense strand
ccagaaggucagcgacauu

SEQ ID NO: 2026961 - RNA, 19 nt, Homo sapiens
  misc_RNA (1)...(19): siRNA sense strand
ucaagaagagcaggauuuc

SEQ ID NO: 2026962 - RNA, 19 nt, Homo sapiens
  misc_RNA (1)...(19): siRNA sense strand
cuggaaugauguuaauugu

SEQ ID NO: 2026963 - RNA, 19 nt, Homo sapiens
  misc_RNA (1)...(19): siRNA sense strand
ccaaugagcgcugcguugu

SEQ ID NO: 2026964 - RNA, 19 nt, Homo sapiens
  misc_RNA (1)...(19): siRNA sense strand
agaauuggaagucauuuag

SEQ ID NO: 2026965 - RNA, 19 nt, Homo sapiens
  misc_RNA (1)...(19): siRNA sense strand
gguccucaaaggucaguuu

SEQ ID NO: 2026966 - RNA, 19 nt, Homo sapiens
  misc_RNA (1)...(19): siRNA sense strand
aaggucaguuugugagaug

SEQ ID NO: 2026967 - RNA, 19 nt, Homo sapiens
  misc_RNA (1)...(19): siRNA sense strand
ggauuucaucuuccagaau

SEQ ID NO: 2026968 - RNA, 19 nt, Homo sapiens
  misc_RNA (1)...(19): siRNA sense strand
cagaaggucagcgacauug

SEQ ID NO: 2026969 - RNA, 19 nt, Homo sapiens
  misc_RNA (1)...(19): siRNA sense strand
gagcuguugcccaaagaau

SEQ ID NO: 2026970 - RNA, 19 nt, Homo sapiens
  misc_RNA (1)...(19): siRNA sense strand
ugcaagaagaaucugcuua

SEQ ID NO: 2026971 - RNA, 19 nt, Homo sapiens
  misc_RNA (1)...(19): siRNA sense strand
aaaggucaguuugugagau

SEQ ID NO: 2026972 - RNA, 19 nt, Homo sapiens
  misc_RNA (1)...(19): siRNA sense strand
gcccagugaucccaaugag

SEQ ID NO: 2026973 - RNA, 19 nt, Homo sapiens
  misc_RNA (1)...(19): siRNA sense strand
cucaagaagagcaggauuu

SEQ ID NO: 2026974 - RNA, 19 nt, Homo sapiens
  misc_RNA (1)...(19): siRNA sense strand
gaaucugcaagaagaaucu

SEQ ID NO: 2026975 - RNA, 19 nt, Homo sapiens
  misc_RNA (1)...(19): siRNA sense strand
caagaagagcaggauuuca

SEQ ID NO: 2026976 - RNA, 19 nt, Homo sapiens
  misc_RNA (1)...(19): siRNA sense strand
ggagcuguugcccaaagaa

SEQ ID NO: 2026977 - RNA, 19 nt, Homo sapiens
  misc_RNA (1)...(19): siRNA sense strand
ccacgugagcccagugauc

SEQ ID NO: 2026978 - RNA, 19 nt, Homo sapiens
  misc_RNA (1)...(19): siRNA sense strand
gcaucaacacagccucuuc

SEQ ID NO: 2026979 - RNA, 19 nt, Homo sapiens
  misc_RNA (1)...(19): siRNA sense strand
aggauuucaucuuccagaa

SEQ ID NO: 2026980 - RNA, 19 nt, Homo sapiens
  misc_RNA (1)...(19): siRNA sense strand
gugagaugaugaagaucca

SEQ ID NO: 2026981 - RNA, 19 nt, Homo sapiens
  misc_RNA (1)...(19): siRNA sense strand
gagcgcugcguugugcuaa

SEQ ID NO: 2026982 - RNA, 19 nt, Homo sapiens
  misc_RNA (1)...(19): siRNA sense strand
ggaaaucacuuaugcugaa

SEQ ID NO: 2026983 - RNA, 19 nt, Homo sapiens
  misc_RNA (1)...(19): siRNA sense strand
ggaaugauguuaauugucu

SEQ ID NO: 2026984 - RNA, 19 nt, Homo sapiens
  misc_RNA (1)...(19): siRNA sense strand
gauaaacacucaagaagag

SEQ ID NO: 2026985 - RNA, 19 nt, Homo sapiens
  misc_RNA (1)...(19): siRNA sense strand
gagaaggacugugcuagaa

SEQ ID NO: 2026986 - RNA, 19 nt, Homo sapiens
  misc_RNA (1)...(19): siRNA sense strand
gaaggacugugcuagaaug

SEQ ID NO: 2026987 - RNA, 19 nt, Homo sapiens
  misc_RNA (1)...(19): siRNA sense strand
gcaagaagaaucugcuuau

SEQ ID NO: 2026988 - RNA, 19 nt, Homo sapiens
  misc_RNA (1)...(19): siRNA sense strand
caagaagaaucugcuuauu

SEQ ID NO: 2026989 - RNA, 19 nt, Homo sapiens
  misc_RNA (1)...(19): siRNA sense strand
gcaauggguugaucagaca

SEQ ID NO: 2026990 - RNA, 19 nt, Homo sapiens
  misc_RNA (1)...(19): siRNA sense strand
gaucagacaccauacaaug

SEQ ID NO: 2026991 - RNA, 19 nt, Homo sapiens
  misc_RNA (1)...(19): siRNA sense strand
ugaugaagauccacuuaug

SEQ ID NO: 2026992 - RNA, 19 nt, Homo sapiens
  misc_RNA (1)...(19): siRNA sense strand
gaugaugaagauccacuua

SEQ ID NO: 2026993 - RNA, 19 nt, Homo sapiens
  misc_RNA (1)...(19): siRNA sense strand
caaagaauuggaagucauu

SEQ ID NO: 2026994 - RNA, 19 nt, Homo sapiens
  misc_RNA (1)...(19): siRNA sense strand
gaugaagauccacuuauga

SEQ ID NO: 2026995 - RNA, 19 nt, Homo sapiens
  misc_RNA (1)...(19): siRNA sense strand
gggcuggaaugauguuaau

SEQ ID NO: 2026996 - RNA, 19 nt, Homo sapiens
  misc_RNA (1)...(19): siRNA sense strand
gcucucagauccagaaggu

SEQ ID NO: 2026997 - RNA, 19 nt, Homo sapiens
  misc_RNA (1)...(19): siRNA sense strand
gcuacuuuauuucuacuga

SEQ ID NO: 2026998 - RNA, 19 nt, Homo sapiens
  misc_RNA (1)...(19): siRNA sense strand
ggugauaaacacucaagaa

SEQ ID NO: 2026999 - RNA, 19 nt, Homo sapiens
  misc_RNA (1)...(19): siRNA sense strand
gcuggaaugauguuaauug

SEQ ID NO: 2027000 - RNA, 19 nt, Homo sapiens
  misc_RNA (1)...(19): siRNA sense strand
uccaacugcuacuuuauuu

SEQ ID NO: 2027001 - RNA, 19 nt, Homo sapiens
  misc_RNA (1)...(19): siRNA sense strand
gcugcguugugcuaaauuu

SEQ ID NO: 2027002 - RNA, 19 nt, Homo sapiens
  misc_RNA (1)...(19): siRNA sense strand
gaaaucacuuaugcugaag

SEQ ID NO: 2027003 - RNA, 19 nt, Homo sapiens
  misc_RNA (1)...(19): siRNA sense strand
caacugcuacuuuauuucu

SEQ ID NO: 2027004 - RNA, 19 nt, Homo sapiens
  misc_RNA (1)...(19): siRNA sense strand
gcuguugcccaaagaauug

SEQ ID NO: 2027005 - RNA, 19 nt, Homo sapiens
  misc_RNA (1)...(19): siRNA sense strand
ugauaaacacucaagaaga

SEQ ID NO: 2027006 - RNA, 19 nt, Homo sapiens
  misc_RNA (1)...(19): siRNA sense strand
ggguugaucagacaccaua

SEQ ID NO: 2027007 - RNA, 19 nt, Homo sapiens
  misc_RNA (1)...(19): siRNA sense strand
cagacaccauacaaugaaa

SEQ ID NO: 2027008 - RNA, 19 nt, Homo sapiens
  misc_RNA (1)...(19): siRNA sense strand
ucagacaccauacaaugaa

SEQ ID NO: 2027009 - RNA, 19 nt, Homo sapiens
  misc_RNA (1)...(19): siRNA sense strand
gcgcugcguugugcuaaau

SEQ ID NO: 2027010 - RNA, 19 nt, Homo sapiens
  misc_RNA (1)...(19): siRNA sense strand
agagcaggauuucaucuuc

SEQ ID NO: 2027011 - RNA, 19 nt, Homo sapiens
  misc_RNA (1)...(19): siRNA sense strand
guaaaucacccaaaagaug

SEQ ID NO: 2027012 - RNA, 19 nt, Homo sapiens
  misc_RNA (1)...(19): siRNA sense strand
uuugugagaugaugaagau

SEQ ID NO: 2027013 - RNA, 19 nt, Homo sapiens
  misc_RNA (1)...(19): siRNA sense strand
ugagaaggacugugcuaga

SEQ ID NO: 2027014 - RNA, 19 nt, Homo sapiens
  misc_RNA (1)...(19): siRNA sense strand
gaagagcaggauuucaucu

SEQ ID NO: 2027015 - RNA, 19 nt, Homo sapiens
  misc_RNA (1)...(19): siRNA sense strand
ggcaagacagugagaagga

SEQ ID NO: 2027016 - RNA, 19 nt, Homo sapiens
  misc_RNA (1)...(19): siRNA sense strand
gaauuggaagucauuuagu

SEQ ID NO: 2027017 - RNA, 19 nt, Homo sapiens
  misc_RNA (1)...(19): siRNA sense strand
caccauacaaugaaaguuc

SEQ ID NO: 2027018 - RNA, 19 nt, Homo sapiens
  misc_RNA (1)...(19): siRNA sense strand
gugauaaacacucaagaag

SEQ ID NO: 2027019 - RNA, 19 nt, Homo sapiens
  misc_RNA (1)...(19): siRNA sense strand
aagaagagcaggauuucau

SEQ ID NO: 2027020 - RNA, 19 nt, Homo sapiens
  misc_RNA (1)...(19): siRNA sense strand
cuucggaaaucacuuaugc

SEQ ID NO: 2027021 - RNA, 19 nt, Homo sapiens
  misc_RNA (1)...(19): siRNA sense strand
ccagaaggucagcgacauu

SEQ ID NO: 2027022 - RNA, 19 nt, Homo sapiens
  misc_RNA (1)...(19): siRNA sense strand
ucaagaagagcaggauuuc

SEQ ID NO: 2027023 - RNA, 19 nt, Homo sapiens
  misc_RNA (1)...(19): siRNA sense strand
cuggaaugauguuaauugu

SEQ ID NO: 2027024 - RNA, 19 nt, Homo sapiens
  misc_RNA (1)...(19): siRNA sense strand
ccaaugagcgcugcguugu

SEQ ID NO: 2027025 - RNA, 19 nt, Homo sapiens
  misc_RNA (1)...(19): siRNA sense strand
agaauuggaagucauuuag

SEQ ID NO: 2027026 - RNA, 19 nt, Homo sapiens
  misc_RNA (1)...(19): siRNA sense strand
gguccucaaaggucaguuu

SEQ ID NO: 2027027 - RNA, 19 nt, Homo sapiens
  misc_RNA (1)...(19): siRNA sense strand
aaggucaguuugugagaug

SEQ ID NO: 2027028 - RNA, 19 nt, Homo sapiens
  misc_RNA (1)...(19): siRNA sense strand
ggauuucaucuuccagaau

SEQ ID NO: 2027029 - RNA, 19 nt, Homo sapiens
  misc_RNA (1)...(19): siRNA sense strand
cagaaggucagcgacauug

SEQ ID NO: 2027030 - RNA, 19 nt, Homo sapiens
  misc_RNA (1)...(19): siRNA sense strand
gagcuguugcccaaagaau

SEQ ID NO: 2027031 - RNA, 19 nt, Homo sapiens
  misc_RNA (1)...(19): siRNA sense strand
ugcaagaagaaucugcuua

SEQ ID NO: 2027032 - RNA, 19 nt, Homo sapiens
  misc_RNA (1)...(19): siRNA sense strand
aaaggucaguuugugagau

SEQ ID NO: 2027033 - RNA, 19 nt, Homo sapiens
  misc_RNA (1)...(19): siRNA sense strand
gcccagugaucccaaugag

SEQ ID NO: 2027034 - RNA, 19 nt, Homo sapiens
  misc_RNA (1)...(19): siRNA sense strand
cucaagaagagcaggauuu

SEQ ID NO: 2027035 - RNA, 19 nt, Homo sapiens
  misc_RNA (1)...(19): siRNA sense strand
gaaucugcaagaagaaucu

SEQ ID NO: 2027036 - RNA, 19 nt, Homo sapiens
  misc_RNA (1)...(19): siRNA sense strand
caagaagagcaggauuuca

SEQ ID NO: 2027037 - RNA, 19 nt, Homo sapiens
  misc_RNA (1)...(19): siRNA sense strand
ggagcuguugcccaaagaa

SEQ ID NO: 2027038 - RNA, 19 nt, Homo sapiens
  misc_RNA (1)...(19): siRNA sense strand
ccacgugagcccagugauc

SEQ ID NO: 2027039 - RNA, 19 nt, Homo sapiens
  misc_RNA (1)...(19): siRNA sense strand
gcaucaacacagccucuuc

SEQ ID NO: 2027040 - RNA, 19 nt, Homo sapiens
  misc_RNA (1)...(19): siRNA sense strand
aggauuucaucuuccagaa

SEQ ID NO: 2027041 - RNA, 19 nt, Homo sapiens
  misc_RNA (1)...(19): siRNA sense strand
gugagaugaugaagaucca

SEQ ID NO: 2027042 - RNA, 19 nt, Homo sapiens
  misc_RNA (1)...(19): siRNA sense strand
gagcgcugcguugugcuaa

SEQ ID NO: 2027043 - RNA, 19 nt, Homo sapiens
  misc_RNA (1)...(19): siRNA sense strand
ggaaaucacuuaugcugaa

SEQ ID NO: 2027044 - RNA, 19 nt, Homo sapiens
  misc_RNA (1)...(19): siRNA sense strand
ggaaugauguuaauugucu

SEQ ID NO: 2027045 - RNA, 19 nt, Homo sapiens
  misc_RNA (1)...(19): siRNA sense strand
gauaaacacucaagaagag

SEQ ID NO: 2027046 - RNA, 19 nt, Homo sapiens
  misc_RNA (1)...(19): siRNA sense strand
gagaaggacugugcuagaa

SEQ ID NO: 2027047 - RNA, 19 nt, Homo sapiens
  misc_RNA (1)...(19): siRNA sense strand
gaaggacugugcuagaaug

SEQ ID NO: 2027048 - RNA, 19 nt, Homo sapiens
  misc_RNA (1)...(19): siRNA sense strand
gcaagaagaaucugcuuau

SEQ ID NO: 2027049 - RNA, 19 nt, Homo sapiens
  misc_RNA (1)...(19): siRNA sense strand
caagaagaaucugcuuauu

SEQ ID NO: 2027050 - RNA, 19 nt, Homo sapiens
  misc_RNA (1)...(19): siRNA sense strand
gcaauggguugaucagaca

SEQ ID NO: 2027051 - RNA, 19 nt, Homo sapiens
  misc_RNA (1)...(19): siRNA sense strand
gaucagacaccauacaaug

SEQ ID NO: 2027052 - RNA, 19 nt, Homo sapiens
  misc_RNA (1)...(19): siRNA sense strand
ugaugaagauccacuuaug

SEQ ID NO: 2027053 - RNA, 19 nt, Homo sapiens
  misc_RNA (1)...(19): siRNA sense strand
gaugaugaagauccacuua

SEQ ID NO: 2027054 - RNA, 19 nt, Homo sapiens
  misc_RNA (1)...(19): siRNA sense strand
caaagaauuggaagucauu

SEQ ID NO: 2027055 - RNA, 19 nt, Homo sapiens
  misc_RNA (1)...(19): siRNA sense strand
gaugaagauccacuuauga

SEQ ID NO: 2027056 - RNA, 19 nt, Homo sapiens
  misc_RNA (1)...(19): siRNA sense strand
gggcuggaaugauguuaau

SEQ ID NO: 2027057 - RNA, 19 nt, Homo sapiens
  misc_RNA (1)...(19): siRNA sense strand
gcucucagauccagaaggu

SEQ ID NO: 2027058 - RNA, 19 nt, Homo sapiens
  misc_RNA (1)...(19): siRNA sense strand
gcuacuuuauuucuacuga

SEQ ID NO: 2027059 - RNA, 19 nt, Homo sapiens
  misc_RNA (1)...(19): siRNA sense strand
ggugauaaacacucaagaa

SEQ ID NO: 2027060 - RNA, 19 nt, Homo sapiens
  misc_RNA (1)...(19): siRNA sense strand
gcuggaaugauguuaauug

SEQ ID NO: 2027061 - RNA, 19 nt, Homo sapiens
  misc_RNA (1)...(19): siRNA sense strand
uccaacugcuacuuuauuu

SEQ ID NO: 2027062 - RNA, 19 nt, Homo sapiens
  misc_RNA (1)...(19): siRNA sense strand
gcugcguugugcuaaauuu

SEQ ID NO: 2027063 - RNA, 19 nt, Homo sapiens
  misc_RNA (1)...(19): siRNA sense strand
gaaaucacuuaugcugaag

SEQ ID NO: 2027064 - RNA, 19 nt, Homo sapiens
  misc_RNA (1)...(19): siRNA sense strand
caacugcuacuuuauuucu

SEQ ID NO: 2027065 - RNA, 19 nt, Homo sapiens
  misc_RNA (1)...(19): siRNA sense strand
gcuguugcccaaagaauug

SEQ ID NO: 2027066 - RNA, 19 nt, Homo sapiens
  misc_RNA (1)...(19): siRNA sense strand
ugauaaacacucaagaaga

SEQ ID NO: 2027067 - RNA, 19 nt, Homo sapiens
  misc_RNA (1)...(19): siRNA sense strand
ggguugaucagacaccaua

SEQ ID NO: 2027068 - RNA, 19 nt, Homo sapiens
  misc_RNA (1)...(19): siRNA sense strand
cagacaccauacaaugaaa

SEQ ID NO: 2027069 - RNA, 19 nt, Homo sapiens
  misc_RNA (1)...(19): siRNA sense strand
ucagacaccauacaaugaa

SEQ ID NO: 2027070 - RNA, 19 nt, Homo sapiens
  misc_RNA (1)...(19): siRNA sense strand
gcgcugcguugugcuaaau

SEQ ID NO: 2027071 - RNA, 19 nt, Homo sapiens
  misc_RNA (1)...(19): siRNA sense strand
agagcaggauuucaucuuc

SEQ ID NO: 2027072 - RNA, 19 nt, Homo sapiens
  misc_RNA (1)...(19): siRNA sense strand
guaaaucacccaaaagaug

SEQ ID NO: 2027073 - RNA, 19 nt, Homo sapiens
  misc_RNA (1)...(19): siRNA sense strand
uuugugagaugaugaagau

SEQ ID NO: 2027074 - RNA, 19 nt, Homo sapiens
  misc_RNA (1)...(19): siRNA sense strand
ugagaaggacugugcuaga

SEQ ID NO: 2027075 - RNA, 19 nt, Homo sapiens
  misc_RNA (1)...(19): siRNA sense strand
gaagagcaggauuucaucu

SEQ ID NO: 2027076 - RNA, 19 nt, Homo sapiens
  misc_RNA (1)...(19): siRNA sense strand
ggcaagacagugagaagga

SEQ ID NO: 2027077 - RNA, 19 nt, Homo sapiens
  misc_RNA (1)...(19): siRNA sense strand
gaauuggaagucauuuagu

SEQ ID NO: 2027078 - RNA, 19 nt, Homo sapiens
  misc_RNA (1)...(19): siRNA sense strand
caccauacaaugaaaguuc

SEQ ID NO: 2027079 - RNA, 19 nt, Homo sapiens
  misc_RNA (1)...(19): siRNA sense strand
gugauaaacacucaagaag

SEQ ID NO: 2027080 - RNA, 19 nt, Homo sapiens
  misc_RNA (1)...(19): siRNA sense strand
aagaagagcaggauuucau

SEQ ID NO: 2027081 - RNA, 19 nt, Homo sapiens
  misc_RNA (1)...(19): siRNA sense strand
cuucggaaaucacuuaugc

SEQ ID NO: 2027082 - RNA, 19 nt, Homo sapiens
  misc_RNA (1)...(19): siRNA sense strand
ccagaaggucagcgacauu

SEQ ID NO: 2027083 - RNA, 19 nt, Homo sapiens
  misc_RNA (1)...(19): siRNA sense strand
ucaagaagagcaggauuuc

SEQ ID NO: 2027084 - RNA, 19 nt, Homo sapiens
  misc_RNA (1)...(19): siRNA sense strand
cuggaaugauguuaauugu

SEQ ID NO: 2027085 - RNA, 19 nt, Homo sapiens
  misc_RNA (1)...(19): siRNA sense strand
ccaaugagcgcugcguugu

SEQ ID NO: 2027086 - RNA, 19 nt, Homo sapiens
  misc_RNA (1)...(19): siRNA sense strand
agaauuggaagucauuuag

SEQ ID NO: 2027087 - RNA, 19 nt, Homo sapiens
  misc_RNA (1)...(19): siRNA sense strand
gguccucaaaggucaguuu

SEQ ID NO: 2027088 - RNA, 19 nt, Homo sapiens
  misc_RNA (1)...(19): siRNA sense strand
aaggucaguuugugagaug

SEQ ID NO: 2027089 - RNA, 19 nt, Homo sapiens
  misc_RNA (1)...(19): siRNA sense strand
ggauuucaucuuccagaau

SEQ ID NO: 2027090 - RNA, 19 nt, Homo sapiens
  misc_RNA (1)...(19): siRNA sense strand
cagaaggucagcgacauug

SEQ ID NO: 2027091 - RNA, 19 nt, Homo sapiens
  misc_RNA (1)...(19): siRNA sense strand
gagcuguugcccaaagaau

SEQ ID NO: 2027092 - RNA, 19 nt, Homo sapiens
  misc_RNA (1)...(19): siRNA sense strand
ugcaagaagaaucugcuua

SEQ ID NO: 2027093 - RNA, 19 nt, Homo sapiens
  misc_RNA (1)...(19): siRNA sense strand
aaaggucaguuugugagau

SEQ ID NO: 2027094 - RNA, 19 nt, Homo sapiens
  misc_RNA (1)...(19): siRNA sense strand
gcccagugaucccaaugag

SEQ ID NO: 2027095 - RNA, 19 nt, Homo sapiens
  misc_RNA (1)...(19): siRNA sense strand
cucaagaagagcaggauuu

SEQ ID NO: 2027096 - RNA, 19 nt, Homo sapiens
  misc_RNA (1)...(19): siRNA sense strand
gaaucugcaagaagaaucu

SEQ ID NO: 2027097 - RNA, 19 nt, Homo sapiens
  misc_RNA (1)...(19): siRNA sense strand
caagaagagcaggauuuca

SEQ ID NO: 2027098 - RNA, 19 nt, Homo sapiens
  misc_RNA (1)...(19): siRNA sense strand
ggagcuguugcccaaagaa

SEQ ID NO: 2027099 - RNA, 19 nt, Homo sapiens
  misc_RNA (1)...(19): siRNA sense strand
ccacgugagcccagugauc

SEQ ID NO: 2027100 - RNA, 19 nt, Homo sapiens
  misc_RNA (1)...(19): siRNA sense strand
gcaucaacacagccucuuc

SEQ ID NO: 2027101 - RNA, 19 nt, Homo sapiens
  misc_RNA (1)...(19): siRNA sense strand
aggauuucaucuuccagaa

SEQ ID NO: 2027102 - RNA, 19 nt, Homo sapiens
  misc_RNA (1)...(19): siRNA sense strand
gugagaugaugaagaucca

SEQ ID NO: 2027103 - RNA, 19 nt, Homo sapiens
  misc_RNA (1)...(19): siRNA sense strand
gagcgcugcguugugcuaa

SEQ ID NO: 2027104 - RNA, 19 nt, Homo sapiens
  misc_RNA (1)...(19): siRNA sense strand
ggaaaucacuuaugcugaa

SEQ ID NO: 2027105 - RNA, 19 nt, Homo sapiens
  misc_RNA (1)...(19): siRNA sense strand
ggaaugauguuaauugucu

SEQ ID NO: 2027106 - RNA, 19 nt, Homo sapiens
  misc_RNA (1)...(19): siRNA sense strand
gauaaacacucaagaagag

SEQ ID NO: 2027107 - RNA, 19 nt, Homo sapiens
  misc_RNA (1)...(19): siRNA sense strand
gagaaggacugugcuagaa

SEQ ID NO: 2027108 - RNA, 19 nt, Homo sapiens
  misc_RNA (1)...(19): siRNA sense strand
gaaggacugugcuagaaug

SEQ ID NO: 2027109 - RNA, 19 nt, Homo sapiens
  misc_RNA (1)...(19): siRNA sense strand
gcaagaagaaucugcuuau

SEQ ID NO: 2027110 - RNA, 19 nt, Homo sapiens
  misc_RNA (1)...(19): siRNA sense strand
caagaagaaucugcuuauu

SEQ ID NO: 2027111 - RNA, 19 nt, Homo sapiens
  misc_RNA (1)...(19): siRNA sense strand
gcaauggguugaucagaca

SEQ ID NO: 2027112 - RNA, 19 nt, Homo sapiens
  misc_RNA (1)...(19): siRNA sense strand
gaucagacaccauacaaug

SEQ ID NO: 2027113 - RNA, 19 nt, Homo sapiens
  misc_RNA (1)...(19): siRNA sense strand
ugaugaagauccacuuaug

SEQ ID NO: 2027114 - RNA, 19 nt, Homo sapiens
  misc_RNA (1)...(19): siRNA sense strand
gaugaugaagauccacuua

SEQ ID NO: 2027115 - RNA, 19 nt, Homo sapiens
  misc_RNA (1)...(19): siRNA sense strand
caaagaauuggaagucauu

SEQ ID NO: 2027116 - RNA, 19 nt, Homo sapiens
  misc_RNA (1)...(19): siRNA sense strand
gaugaagauccacuuauga

SEQ ID NO: 2027117 - RNA, 19 nt, Homo sapiens
  misc_RNA (1)...(19): siRNA sense strand
gggcuggaaugauguuaau

SEQ ID NO: 2027118 - RNA, 19 nt, Homo sapiens
  misc_RNA (1)...(19): siRNA sense strand
gcucucagauccagaaggu

SEQ ID NO: 2027119 - RNA, 19 nt, Homo sapiens
  misc_RNA (1)...(19): siRNA sense strand
gcuacuuuauuucuacuga

SEQ ID NO: 2027120 - RNA, 19 nt, Homo sapiens
  misc_RNA (1)...(19): siRNA sense strand
ggugauaaacacucaagaa

SEQ ID NO: 2027121 - RNA, 19 nt, Homo sapiens
  misc_RNA (1)...(19): siRNA sense strand
gcuggaaugauguuaauug

SEQ ID NO: 2027122 - RNA, 19 nt, Homo sapiens
  misc_RNA (1)...(19): siRNA sense strand
uccaacugcuacuuuauuu

SEQ ID NO: 2027123 - RNA, 19 nt, Homo sapiens
  misc_RNA (1)...(19): siRNA sense strand
gcugcguugugcuaaauuu

SEQ ID NO: 2027124 - RNA, 19 nt, Homo sapiens
  misc_RNA (1)...(19): siRNA sense strand
gaaaucacuuaugcugaag

SEQ ID NO: 2027125 - RNA, 19 nt, Homo sapiens
  misc_RNA (1)...(19): siRNA sense strand
caacugcuacuuuauuucu

SEQ ID NO: 2027126 - RNA, 19 nt, Homo sapiens
  misc_RNA (1)...(19): siRNA sense strand
gcuguugcccaaagaauug

SEQ ID NO: 2027127 - RNA, 19 nt, Homo sapiens
  misc_RNA (1)...(19): siRNA sense strand
ugauaaacacucaagaaga

SEQ ID NO: 2027128 - RNA, 19 nt, Homo sapiens
  misc_RNA (1)...(19): siRNA sense strand
ggguugaucagacaccaua

SEQ ID NO: 2027129 - RNA, 19 nt, Homo sapiens
  misc_RNA (1)...(19): siRNA sense strand
cagacaccauacaaugaaa

SEQ ID NO: 2027130 - RNA, 19 nt, Homo sapiens
  misc_RNA (1)...(19): siRNA sense strand
ucagacaccauacaaugaa

SEQ ID NO: 2027131 - RNA, 19 nt, Homo sapiens
  misc_RNA (1)...(19): siRNA sense strand
gcgcugcguugugcuaaau

SEQ ID NO: 2027132 - RNA, 19 nt, Homo sapiens
  misc_RNA (1)...(19): siRNA sense strand
agagcaggauuucaucuuc

SEQ ID NO: 2027133 - RNA, 19 nt, Homo sapiens
  misc_RNA (1)...(19): siRNA sense strand
guaaaucacccaaaagaug

SEQ ID NO: 2027134 - RNA, 19 nt, Homo sapiens
  misc_RNA (1)...(19): siRNA sense strand
uuugugagaugaugaagau

SEQ ID NO: 2027135 - RNA, 19 nt, Homo sapiens
  misc_RNA (1)...(19): siRNA sense strand
ugagaaggacugugcuaga

SEQ ID NO: 2027136 - RNA, 19 nt, Homo sapiens
  misc_RNA (1)...(19): siRNA sense strand
gaagagcaggauuucaucu

SEQ ID NO: 2027137 - RNA, 19 nt, Homo sapiens
  misc_RNA (1)...(19): siRNA sense strand
ggcaagacagugagaagga

SEQ ID NO: 2027138 - RNA, 19 nt, Homo sapiens
  misc_RNA (1)...(19): siRNA sense strand
gaauuggaagucauuuagu

SEQ ID NO: 2027139 - RNA, 19 nt, Homo sapiens
  misc_RNA (1)...(19): siRNA sense strand
caccauacaaugaaaguuc

SEQ ID NO: 2027140 - RNA, 19 nt, Homo sapiens
  misc_RNA (1)...(19): siRNA sense strand
gugauaaacacucaagaag

SEQ ID NO: 2027141 - RNA, 19 nt, Homo sapiens
  misc_RNA (1)...(19): siRNA sense strand
aagaagagcaggauuucau

SEQ ID NO: 2027142 - RNA, 19 nt, Homo sapiens
  misc_RNA (1)...(19): siRNA sense strand
cuucggaaaucacuuaugc

SEQ ID NO: 2027143 - RNA, 19 nt, Homo sapiens
  misc_RNA (1)...(19): siRNA sense strand
ccagaaggucagcgacauu

SEQ ID NO: 2027144 - RNA, 19 nt, Homo sapiens
  misc_RNA (1)...(19): siRNA sense strand
ucaagaagagcaggauuuc

SEQ ID NO: 2027145 - RNA, 19 nt, Homo sapiens
  misc_RNA (1)...(19): siRNA sense strand
cuggaaugauguuaauugu

SEQ ID NO: 2027146 - RNA, 19 nt, Homo sapiens
  misc_RNA (1)...(19): siRNA sense strand
ccaaugagcgcugcguugu

SEQ ID NO: 2027147 - RNA, 19 nt, Homo sapiens
  misc_RNA (1)...(19): siRNA sense strand
agaauuggaagucauuuag

SEQ ID NO: 2027148 - RNA, 19 nt, Homo sapiens
  misc_RNA (1)...(19): siRNA sense strand
gguccucaaaggucaguuu

SEQ ID NO: 2027149 - RNA, 19 nt, Homo sapiens
  misc_RNA (1)...(19): siRNA sense strand
aaggucaguuugugagaug

SEQ ID NO: 2027150 - RNA, 19 nt, Homo sapiens
  misc_RNA (1)...(19): siRNA sense strand
ggauuucaucuuccagaau

SEQ ID NO: 2027151 - RNA, 19 nt, Homo sapiens
  misc_RNA (1)...(19): siRNA sense strand
cagaaggucagcgacauug

SEQ ID NO: 2027152 - RNA, 19 nt, Homo sapiens
  misc_RNA (1)...(19): siRNA sense strand
gagcuguugcccaaagaau

SEQ ID NO: 2027153 - RNA, 19 nt, Homo sapiens
  misc_RNA (1)...(19): siRNA sense strand
ugcaagaagaaucugcuua

SEQ ID NO: 2027154 - RNA, 19 nt, Homo sapiens
  misc_RNA (1)...(19): siRNA sense strand
aaaggucaguuugugagau

SEQ ID NO: 2027155 - RNA, 19 nt, Homo sapiens
  misc_RNA (1)...(19): siRNA sense strand
gcccagugaucccaaugag

SEQ ID NO: 2027156 - RNA, 19 nt, Homo sapiens
  misc_RNA (1)...(19): siRNA sense strand
cucaagaagagcaggauuu

SEQ ID NO: 2027157 - RNA, 19 nt, Homo sapiens
  misc_RNA (1)...(19): siRNA sense strand
gaaucugcaagaagaaucu

SEQ ID NO: 2027158 - RNA, 19 nt, Homo sapiens
  misc_RNA (1)...(19): siRNA sense strand
caagaagagcaggauuuca

SEQ ID NO: 2027159 - RNA, 19 nt, Homo sapiens
  misc_RNA (1)...(19): siRNA sense strand
ggagcuguugcccaaagaa

SEQ ID NO: 2027160 - RNA, 19 nt, Homo sapiens
  misc_RNA (1)...(19): siRNA sense strand
ccacgugagcccagugauc

SEQ ID NO: 2027161 - RNA, 19 nt, Homo sapiens
  misc_RNA (1)...(19): siRNA sense strand
gcaucaacacagccucuuc

SEQ ID NO: 2027162 - RNA, 19 nt, Homo sapiens
  misc_RNA (1)...(19): siRNA sense strand
aggauuucaucuuccagaa

SEQ ID NO: 2027163 - RNA, 19 nt, Homo sapiens
  misc_RNA (1)...(19): siRNA sense strand
gugagaugaugaagaucca

SEQ ID NO: 2027164 - RNA, 19 nt, Homo sapiens
  misc_RNA (1)...(19): siRNA sense strand
gagcgcugcguugugcuaa

SEQ ID NO: 2027165 - RNA, 19 nt, Homo sapiens
  misc_RNA (1)...(19): siRNA sense strand
ggaaaucacuuaugcugaa

SEQ ID NO: 2027166 - RNA, 19 nt, Homo sapiens
  misc_RNA (1)...(19): siRNA sense strand
ggaaugauguuaauugucu

SEQ ID NO: 2027167 - RNA, 19 nt, Homo sapiens
  misc_RNA (1)...(19): siRNA sense strand
gauaaacacucaagaagag

SEQ ID NO: 2027168 - RNA, 19 nt, Homo sapiens
  misc_RNA (1)...(19): siRNA sense strand
gagaaggacugugcuagaa

SEQ ID NO: 2027169 - RNA, 19 nt, Homo sapiens
  misc_RNA (1)...(19): siRNA sense strand
gaaggacugugcuagaaug

SEQ ID NO: 2027170 - RNA, 19 nt, Homo sapiens
  misc_RNA (1)...(19): siRNA sense strand
gcaagaagaaucugcuuau

SEQ ID NO: 2027171 - RNA, 19 nt, Homo sapiens
  misc_RNA (1)...(19): siRNA sense strand
caagaagaaucugcuuauu

SEQ ID NO: 2027172 - RNA, 19 nt, Homo sapiens
  misc_RNA (1)...(19): siRNA sense strand
gcaauggguugaucagaca

SEQ ID NO: 2027173 - RNA, 19 nt, Homo sapiens
  misc_RNA (1)...(19): siRNA sense strand
gaucagacaccauacaaug

SEQ ID NO: 2027174 - RNA, 19 nt, Homo sapiens
  misc_RNA (1)...(19): siRNA sense strand
ugaugaagauccacuuaug

SEQ ID NO: 2027175 - RNA, 19 nt, Homo sapiens
  misc_RNA (1)...(19): siRNA sense strand
gaugaugaagauccacuua

SEQ ID NO: 2027176 - RNA, 19 nt, Homo sapiens
  misc_RNA (1)...(19): siRNA sense strand
caaagaauuggaagucauu

SEQ ID NO: 2027177 - RNA, 19 nt, Homo sapiens
  misc_RNA (1)...(19): siRNA sense strand
gaugaagauccacuuauga

SEQ ID NO: 2027178 - RNA, 19 nt, Homo sapiens
  misc_RNA (1)...(19): siRNA sense strand
gggcuggaaugauguuaau

SEQ ID NO: 2027179 - RNA, 19 nt, Homo sapiens
  misc_RNA (1)...(19): siRNA sense strand
gcucucagauccagaaggu

SEQ ID NO: 2027180 - RNA, 19 nt, Homo sapiens
  misc_RNA (1)...(19): siRNA sense strand
gcuacuuuauuucuacuga

SEQ ID NO: 2027181 - RNA, 19 nt, Homo sapiens
  misc_RNA (1)...(19): siRNA sense strand
ggugauaaacacucaagaa

SEQ ID NO: 2027182 - RNA, 19 nt, Homo sapiens
  misc_RNA (1)...(19): siRNA sense strand
gcuggaaugauguuaauug

SEQ ID NO: 2027183 - RNA, 19 nt, Homo sapiens
  misc_RNA (1)...(19): siRNA sense strand
uccaacugcuacuuuauuu

SEQ ID NO: 2027184 - RNA, 19 nt, Homo sapiens
  misc_RNA (1)...(19): siRNA sense strand
gcugcguugugcuaaauuu

SEQ ID NO: 2027185 - RNA, 19 nt, Homo sapiens
  misc_RNA (1)...(19): siRNA sense strand
gaaaucacuuaugcugaag

SEQ ID NO: 2027186 - RNA, 19 nt, Homo sapiens
  misc_RNA (1)...(19): siRNA sense strand
caacugcuacuuuauuucu

SEQ ID NO: 2027187 - RNA, 19 nt, Homo sapiens
  misc_RNA (1)...(19): siRNA sense strand
gcuguugcccaaagaauug

SEQ ID NO: 2027188 - RNA, 19 nt, Homo sapiens
  misc_RNA (1)...(19): siRNA sense strand
ugauaaacacucaagaaga

SEQ ID NO: 2027189 - RNA, 19 nt, Homo sapiens
  misc_RNA (1)...(19): siRNA sense strand
ggguugaucagacaccaua

SEQ ID NO: 2027190 - RNA, 19 nt, Homo sapiens
  misc_RNA (1)...(19): siRNA sense strand
cagacaccauacaaugaaa

SEQ ID NO: 2027191 - RNA, 19 nt, Homo sapiens
  misc_RNA (1)...(19): siRNA sense strand
ucagacaccauacaaugaa

SEQ ID NO: 2027192 - RNA, 19 nt, Homo sapiens
  misc_RNA (1)...(19): siRNA sense strand
gcgcugcguugugcuaaau

SEQ ID NO: 2027193 - RNA, 19 nt, Homo sapiens
  misc_RNA (1)...(19): siRNA sense strand
agagcaggauuucaucuuc

SEQ ID NO: 2027194 - RNA, 19 nt, Homo sapiens
  misc_RNA (1)...(19): siRNA sense strand
guaaaucacccaaaagaug

SEQ ID NO: 2027195 - RNA, 19 nt, Homo sapiens
  misc_RNA (1)...(19): siRNA sense strand
uuugugagaugaugaagau

SEQ ID NO: 2027196 - RNA, 19 nt, Homo sapiens
  misc_RNA (1)...(19): siRNA sense strand
ugagaaggacugugcuaga

SEQ ID NO: 2027197 - RNA, 19 nt, Homo sapiens
  misc_RNA (1)...(19): siRNA sense strand
gaagagcaggauuucaucu

SEQ ID NO: 2027198 - RNA, 19 nt, Homo sapiens
  misc_RNA (1)...(19): siRNA sense strand
ggcaagacagugagaagga

SEQ ID NO: 2027199 - RNA, 19 nt, Homo sapiens
  misc_RNA (1)...(19): siRNA sense strand
gaauuggaagucauuuagu

SEQ ID NO: 2027200 - RNA, 19 nt, Homo sapiens
  misc_RNA (1)...(19): siRNA sense strand
caccauacaaugaaaguuc

SEQ ID NO: 2027201 - RNA, 19 nt, Homo sapiens
  misc_RNA (1)...(19): siRNA sense strand
gugauaaacacucaagaag

SEQ ID NO: 2027202 - RNA, 19 nt, Homo sapiens
  misc_RNA (1)...(19): siRNA sense strand
aagaagagcaggauuucau

SEQ ID NO: 2027203 - RNA, 19 nt, Homo sapiens
  misc_RNA (1)...(19): siRNA sense strand
cuucggaaaucacuuaugc

SEQ ID NO: 2027204 - RNA, 19 nt, Homo sapiens
  misc_RNA (1)...(19): siRNA sense strand
ccagaaggucagcgacauu

SEQ ID NO: 2027205 - RNA, 19 nt, Homo sapiens
  misc_RNA (1)...(19): siRNA sense strand
ucaagaagagcaggauuuc

SEQ ID NO: 2027206 - RNA, 19 nt, Homo sapiens
  misc_RNA (1)...(19): siRNA sense strand
cuggaaugauguuaauugu

SEQ ID NO: 2027207 - RNA, 19 nt, Homo sapiens
  misc_RNA (1)...(19): siRNA sense strand
ccaaugagcgcugcguugu

SEQ ID NO: 2027208 - RNA, 19 nt, Homo sapiens
  misc_RNA (1)...(19): siRNA sense strand
agaauuggaagucauuuag

SEQ ID NO: 2027209 - RNA, 19 nt, Homo sapiens
  misc_RNA (1)...(19): siRNA sense strand
gguccucaaaggucaguuu

SEQ ID NO: 2027210 - RNA, 19 nt, Homo sapiens
  misc_RNA (1)...(19): siRNA sense strand
aaggucaguuugugagaug

SEQ ID NO: 2027211 - RNA, 19 nt, Homo sapiens
  misc_RNA (1)...(19): siRNA sense strand
ggauuucaucuuccagaau

SEQ ID NO: 2027212 - RNA, 19 nt, Homo sapiens
  misc_RNA (1)...(19): siRNA sense strand
cagaaggucagcgacauug

SEQ ID NO: 2027213 - RNA, 19 nt, Homo sapiens
  misc_RNA (1)...(19): siRNA sense strand
gagcuguugcccaaagaau

SEQ ID NO: 2027214 - RNA, 19 nt, Homo sapiens
  misc_RNA (1)...(19): siRNA sense strand
ugcaagaagaaucugcuua

SEQ ID NO: 2027215 - RNA, 19 nt, Homo sapiens
  misc_RNA (1)...(19): siRNA sense strand
aaaggucaguuugugagau

SEQ ID NO: 2027216 - RNA, 19 nt, Homo sapiens
  misc_RNA (1)...(19): siRNA sense strand
gcccagugaucccaaugag

SEQ ID NO: 2027217 - RNA, 19 nt, Homo sapiens
  misc_RNA (1)...(19): siRNA sense strand
cucaagaagagcaggauuu

SEQ ID NO: 2027218 - RNA, 19 nt, Homo sapiens
  misc_RNA (1)...(19): siRNA sense strand
gaaucugcaagaagaaucu

SEQ ID NO: 2027219 - RNA, 19 nt, Homo sapiens
  misc_RNA (1)...(19): siRNA sense strand
caagaagagcaggauuuca

SEQ ID NO: 2027220 - RNA, 19 nt, Homo sapiens
  misc_RNA (1)...(19): siRNA sense strand
ggagcuguugcccaaagaa

SEQ ID NO: 2027221 - RNA, 19 nt, Homo sapiens
  misc_RNA (1)...(19): siRNA sense strand
ccacgugagcccagugauc

SEQ ID NO: 2027222 - RNA, 19 nt, Homo sapiens
  misc_RNA (1)...(19): siRNA sense strand
gcaucaacacagccucuuc

SEQ ID NO: 2027223 - RNA, 19 nt, Homo sapiens
  misc_RNA (1)...(19): siRNA sense strand
aggauuucaucuuccagaa

SEQ ID NO: 2027224 - RNA, 19 nt, Homo sapiens
  misc_RNA (1)...(19): siRNA sense strand
gugagaugaugaagaucca

SEQ ID NO: 2027225 - RNA, 19 nt, Homo sapiens
  misc_RNA (1)...(19): siRNA sense strand
gagcgcugcguugugcuaa

SEQ ID NO: 2027226 - RNA, 19 nt, Homo sapiens
  misc_RNA (1)...(19): siRNA sense strand
ggaaaucacuuaugcugaa

SEQ ID NO: 2027227 - RNA, 19 nt, Homo sapiens
  misc_RNA (1)...(19): siRNA sense strand
ggaaugauguuaauugucu

SEQ ID NO: 2027228 - RNA, 19 nt, Homo sapiens
  misc_RNA (1)...(19): siRNA sense strand
gauaaacacucaagaagag

SEQ ID NO: 2027229 - RNA, 19 nt, Homo sapiens
  misc_RNA (1)...(19): siRNA sense strand
gagaaggacugugcuagaa

SEQ ID NO: 2027230 - RNA, 19 nt, Homo sapiens
  misc_RNA (1)...(19): siRNA sense strand
gaaggacugugcuagaaug

SEQ ID NO: 2027231 - RNA, 19 nt, Homo sapiens
  misc_RNA (1)...(19): siRNA sense strand
gcaagaagaaucugcuuau

SEQ ID NO: 2027232 - RNA, 19 nt, Homo sapiens
  misc_RNA (1)...(19): siRNA sense strand
caagaagaaucugcuuauu

SEQ ID NO: 2027233 - RNA, 19 nt, Homo sapiens
  misc_RNA (1)...(19): siRNA sense strand
gcaauggguugaucagaca

SEQ ID NO: 2027234 - RNA, 19 nt, Homo sapiens
  misc_RNA (1)...(19): siRNA sense strand
gaucagacaccauacaaug

SEQ ID NO: 2027235 - RNA, 19 nt, Homo sapiens
  misc_RNA (1)...(19): siRNA sense strand
ugaugaagauccacuuaug

SEQ ID NO: 2027236 - RNA, 19 nt, Homo sapiens
  misc_RNA (1)...(19): siRNA sense strand
gaugaugaagauccacuua

SEQ ID NO: 2027237 - RNA, 19 nt, Homo sapiens
  misc_RNA (1)...(19): siRNA sense strand
caaagaauuggaagucauu

SEQ ID NO: 2027238 - RNA, 19 nt, Homo sapiens
  misc_RNA (1)...(19): siRNA sense strand
gaugaagauccacuuauga

SEQ ID NO: 2027239 - RNA, 19 nt, Homo sapiens
  misc_RNA (1)...(19): siRNA sense strand
gggcuggaaugauguuaau

SEQ ID NO: 2027240 - RNA, 19 nt, Homo sapiens
  misc_RNA (1)...(19): siRNA sense strand
gcucucagauccagaaggu

SEQ ID NO: 2027241 - RNA, 19 nt, Homo sapiens
  misc_RNA (1)...(19): siRNA sense strand
gcuacuuuauuucuacuga

SEQ ID NO: 2027242 - RNA, 19 nt, Homo sapiens
  misc_RNA (1)...(19): siRNA sense strand
ggugauaaacacucaagaa

SEQ ID NO: 2027243 - RNA, 19 nt, Homo sapiens
  misc_RNA (1)...(19): siRNA sense strand
gcuggaaugauguuaauug

SEQ ID NO: 2027244 - RNA, 19 nt, Homo sapiens
  misc_RNA (1)...(19): siRNA sense strand
uccaacugcuacuuuauuu

SEQ ID NO: 2027245 - RNA, 19 nt, Homo sapiens
  misc_RNA (1)...(19): siRNA sense strand
gcugcguugugcuaaauuu

SEQ ID NO: 2027246 - RNA, 19 nt, Homo sapiens
  misc_RNA (1)...(19): siRNA sense strand
gaaaucacuuaugcugaag

SEQ ID NO: 2027247 - RNA, 19 nt, Homo sapiens
  misc_RNA (1)...(19): siRNA sense strand
caacugcuacuuuauuucu

SEQ ID NO: 2027248 - RNA, 19 nt, Homo sapiens
  misc_RNA (1)...(19): siRNA sense strand
gcuguugcccaaagaauug

SEQ ID NO: 2027249 - RNA, 19 nt, Homo sapiens
  misc_RNA (1)...(19): siRNA sense strand
ugauaaacacucaagaaga

SEQ ID NO: 2027250 - RNA, 19 nt, Homo sapiens
  misc_RNA (1)...(19): siRNA sense strand
ggguugaucagacaccaua

SEQ ID NO: 2027251 - RNA, 19 nt, Homo sapiens
  misc_RNA (1)...(19): siRNA sense strand
cagacaccauacaaugaaa

SEQ ID NO: 2027252 - RNA, 19 nt, Homo sapiens
  misc_RNA (1)...(19): siRNA sense strand
ucagacaccauacaaugaa

SEQ ID NO: 2027253 - RNA, 19 nt, Homo sapiens
  misc_RNA (1)...(19): siRNA sense strand
gcgcugcguugugcuaaau

SEQ ID NO: 2027254 - RNA, 19 nt, Homo sapiens
  misc_RNA (1)...(19): siRNA sense strand
agagcaggauuucaucuuc

SEQ ID NO: 2027255 - RNA, 19 nt, Homo sapiens
  misc_RNA (1)...(19): siRNA sense strand
guaaaucacccaaaagaug

SEQ ID NO: 2027256 - RNA, 19 nt, Homo sapiens
  misc_RNA (1)...(19): siRNA sense strand
uuugugagaugaugaagau

SEQ ID NO: 2027257 - RNA, 19 nt, Homo sapiens
  misc_RNA (1)...(19): siRNA sense strand
ugagaaggacugugcuaga

SEQ ID NO: 2027258 - RNA, 19 nt, Homo sapiens
  misc_RNA (1)...(19): siRNA sense strand
gaagagcaggauuucaucu

SEQ ID NO: 2027259 - RNA, 19 nt, Homo sapiens
  misc_RNA (1)...(19): siRNA sense strand
ggcaagacagugagaagga

SEQ ID NO: 2027260 - RNA, 19 nt, Homo sapiens
  misc_RNA (1)...(19): siRNA sense strand
gaauuggaagucauuuagu

SEQ ID NO: 2027261 - RNA, 19 nt, Homo sapiens
  misc_RNA (1)...(19): siRNA sense strand
caccauacaaugaaaguuc

SEQ ID NO: 2027262 - RNA, 19 nt, Homo sapiens
  misc_RNA (1)...(19): siRNA sense strand
gugauaaacacucaagaag

SEQ ID NO: 2027263 - RNA, 19 nt, Homo sapiens
  misc_RNA (1)...(19): siRNA sense strand
aagaagagcaggauuucau

SEQ ID NO: 2027264 - RNA, 19 nt, Homo sapiens
  misc_RNA (1)...(19): siRNA sense strand
cuucggaaaucacuuaugc

SEQ ID NO: 2027265 - RNA, 19 nt, Homo sapiens
  misc_RNA (1)...(19): siRNA sense strand
ccagaaggucagcgacauu

SEQ ID NO: 2027266 - RNA, 19 nt, Homo sapiens
  misc_RNA (1)...(19): siRNA sense strand
ucaagaagagcaggauuuc

SEQ ID NO: 2027267 - RNA, 19 nt, Homo sapiens
  misc_RNA (1)...(19): siRNA sense strand
cuggaaugauguuaauugu

SEQ ID NO: 2027268 - RNA, 19 nt, Homo sapiens
  misc_RNA (1)...(19): siRNA sense strand
ccaaugagcgcugcguugu

SEQ ID NO: 2027269 - RNA, 19 nt, Homo sapiens
  misc_RNA (1)...(19): siRNA sense strand
agaauuggaagucauuuag

SEQ ID NO: 2027270 - RNA, 19 nt, Homo sapiens
  misc_RNA (1)...(19): siRNA sense strand
gguccucaaaggucaguuu

SEQ ID NO: 2027271 - RNA, 19 nt, Homo sapiens
  misc_RNA (1)...(19): siRNA sense strand
aaggucaguuugugagaug

SEQ ID NO: 2027272 - RNA, 19 nt, Homo sapiens
  misc_RNA (1)...(19): siRNA sense strand
ggauuucaucuuccagaau

SEQ ID NO: 2027273 - RNA, 19 nt, Homo sapiens
  misc_RNA (1)...(19): siRNA sense strand
cagaaggucagcgacauug

SEQ ID NO: 2027274 - RNA, 19 nt, Homo sapiens
  misc_RNA (1)...(19): siRNA sense strand
gagcuguugcccaaagaau

SEQ ID NO: 2027275 - RNA, 19 nt, Homo sapiens
  misc_RNA (1)...(19): siRNA sense strand
ugcaagaagaaucugcuua

SEQ ID NO: 2027276 - RNA, 19 nt, Homo sapiens
  misc_RNA (1)...(19): siRNA sense strand
aaaggucaguuugugagau

SEQ ID NO: 2027277 - RNA, 19 nt, Homo sapiens
  misc_RNA (1)...(19): siRNA sense strand
gcccagugaucccaaugag

SEQ ID NO: 2027278 - RNA, 19 nt, Homo sapiens
  misc_RNA (1)...(19): siRNA sense strand
cucaagaagagcaggauuu

SEQ ID NO: 2027279 - RNA, 19 nt, Homo sapiens
  misc_RNA (1)...(19): siRNA sense strand
gaaucugcaagaagaaucu

SEQ ID NO: 2027280 - RNA, 19 nt, Homo sapiens
  misc_RNA (1)...(19): siRNA sense strand
caagaagagcaggauuuca

SEQ ID NO: 2027281 - RNA, 19 nt, Homo sapiens
  misc_RNA (1)...(19): siRNA sense strand
ggagcuguugcccaaagaa

SEQ ID NO: 2027282 - RNA, 19 nt, Homo sapiens
  misc_RNA (1)...(19): siRNA sense strand
ccacgugagcccagugauc

SEQ ID NO: 2027283 - RNA, 19 nt, Homo sapiens
  misc_RNA (1)...(19): siRNA sense strand
gcaucaacacagccucuuc

SEQ ID NO: 2027284 - RNA, 19 nt, Homo sapiens
  misc_RNA (1)...(19): siRNA sense strand
aggauuucaucuuccagaa

SEQ ID NO: 2027285 - RNA, 19 nt, Homo sapiens
  misc_RNA (1)...(19): siRNA sense strand
gugagaugaugaagaucca

SEQ ID NO: 2027286 - RNA, 19 nt, Homo sapiens
  misc_RNA (1)...(19): siRNA sense strand
gagcgcugcguugugcuaa

SEQ ID NO: 2027287 - RNA, 19 nt, Homo sapiens
  misc_RNA (1)...(19): siRNA sense strand
ggaaaucacuuaugcugaa

SEQ ID NO: 2027288 - RNA, 19 nt, Homo sapiens
  misc_RNA (1)...(19): siRNA sense strand
ggaaugauguuaauugucu

SEQ ID NO: 2027289 - RNA, 19 nt, Homo sapiens
  misc_RNA (1)...(19): siRNA sense strand
gauaaacacucaagaagag

SEQ ID NO: 2027290 - RNA, 19 nt, Homo sapiens
  misc_RNA (1)...(19): siRNA sense strand
gagaaggacugugcuagaa

SEQ ID NO: 2027291 - RNA, 19 nt, Homo sapiens
  misc_RNA (1)...(19): siRNA sense strand
gaaggacugugcuagaaug

SEQ ID NO: 2027292 - RNA, 19 nt, Homo sapiens
  misc_RNA (1)...(19): siRNA sense strand
gcaagaagaaucugcuuau

SEQ ID NO: 2027293 - RNA, 19 nt, Homo sapiens
  misc_RNA (1)...(19): siRNA sense strand
caagaagaaucugcuuauu

SEQ ID NO: 2027294 - RNA, 19 nt, Homo sapiens
  misc_RNA (1)...(19): siRNA sense strand
gcaauggguugaucagaca

SEQ ID NO: 2027295 - RNA, 19 nt, Homo sapiens
  misc_RNA (1)...(19): siRNA sense strand
gaucagacaccauacaaug

SEQ ID NO: 2027296 - RNA, 19 nt, Homo sapiens
  misc_RNA (1)...(19): siRNA sense strand
ugaugaagauccacuuaug

SEQ ID NO: 2027297 - RNA, 19 nt, Homo sapiens
  misc_RNA (1)...(19): siRNA sense strand
gaugaugaagauccacuua

SEQ ID NO: 2027298 - RNA, 19 nt, Homo sapiens
  misc_RNA (1)...(19): siRNA sense strand
caaagaauuggaagucauu

SEQ ID NO: 2027299 - RNA, 19 nt, Homo sapiens
  misc_RNA (1)...(19): siRNA sense strand
gaugaagauccacuuauga

SEQ ID NO: 2027300 - RNA, 19 nt, Homo sapiens
  misc_RNA (1)...(19): siRNA sense strand
gggcuggaaugauguuaau

SEQ ID NO: 2027301 - RNA, 19 nt, Homo sapiens
  misc_RNA (1)...(19): siRNA sense strand
gcucucagauccagaaggu

SEQ ID NO: 2027302 - RNA, 19 nt, Homo sapiens
  misc_RNA (1)...(19): siRNA sense strand
gcuacuuuauuucuacuga

SEQ ID NO: 2027303 - RNA, 19 nt, Homo sapiens
  misc_RNA (1)...(19): siRNA sense strand
ggugauaaacacucaagaa

SEQ ID NO: 2027304 - RNA, 19 nt, Homo sapiens
  misc_RNA (1)...(19): siRNA sense strand
gcuggaaugauguuaauug

SEQ ID NO: 2027305 - RNA, 19 nt, Homo sapiens
  misc_RNA (1)...(19): siRNA sense strand
uccaacugcuacuuuauuu

SEQ ID NO: 2027306 - RNA, 19 nt, Homo sapiens
  misc_RNA (1)...(19): siRNA sense strand
gcugcguugugcuaaauuu

SEQ ID NO: 2027307 - RNA, 19 nt, Homo sapiens
  misc_RNA (1)...(19): siRNA sense strand
gaaaucacuuaugcugaag

SEQ ID NO: 2027308 - RNA, 19 nt, Homo sapiens
  misc_RNA (1)...(19): siRNA sense strand
caacugcuacuuuauuucu

SEQ ID NO: 2027309 - RNA, 19 nt, Homo sapiens
  misc_RNA (1)...(19): siRNA sense strand
gcuguugcccaaagaauug

SEQ ID NO: 2027310 - RNA, 19 nt, Homo sapiens
  misc_RNA (1)...(19): siRNA sense strand
ugauaaacacucaagaaga

SEQ ID NO: 2027311 - RNA, 19 nt, Homo sapiens
  misc_RNA (1)...(19): siRNA sense strand
ggguugaucagacaccaua

SEQ ID NO: 2027312 - RNA, 19 nt, Homo sapiens
  misc_RNA (1)...(19): siRNA sense strand
cagacaccauacaaugaaa

SEQ ID NO: 2027313 - RNA, 19 nt, Homo sapiens
  misc_RNA (1)...(19): siRNA sense strand
ucagacaccauacaaugaa

SEQ ID NO: 2027314 - RNA, 19 nt, Homo sapiens
  misc_RNA (1)...(19): siRNA sense strand
gcgcugcguugugcuaaau

SEQ ID NO: 2027315 - RNA, 19 nt, Homo sapiens
  misc_RNA (1)...(19): siRNA sense strand
agagcaggauuucaucuuc

SEQ ID NO: 2027316 - RNA, 19 nt, Homo sapiens
  misc_RNA (1)...(19): siRNA sense strand
guaaaucacccaaaagaug

SEQ ID NO: 2027317 - RNA, 19 nt, Homo sapiens
  misc_RNA (1)...(19): siRNA sense strand
uuugugagaugaugaagau

SEQ ID NO: 2027318 - RNA, 19 nt, Homo sapiens
  misc_RNA (1)...(19): siRNA sense strand
ugagaaggacugugcuaga

SEQ ID NO: 2027319 - RNA, 19 nt, Homo sapiens
  misc_RNA (1)...(19): siRNA sense strand
gaagagcaggauuucaucu

SEQ ID NO: 2027320 - RNA, 19 nt, Homo sapiens
  misc_RNA (1)...(19): siRNA sense strand
ggcaagacagugagaagga

SEQ ID NO: 2027321 - RNA, 19 nt, Homo sapiens
  misc_RNA (1)...(19): siRNA sense strand
gaauuggaagucauuuagu

SEQ ID NO: 2027322 - RNA, 19 nt, Homo sapiens
  misc_RNA (1)...(19): siRNA sense strand
caccauacaaugaaaguuc

SEQ ID NO: 2027323 - RNA, 19 nt, Homo sapiens
  misc_RNA (1)...(19): siRNA sense strand
gugauaaacacucaagaag

SEQ ID NO: 2027324 - RNA, 19 nt, Homo sapiens
  misc_RNA (1)...(19): siRNA sense strand
aagaagagcaggauuucau

SEQ ID NO: 2027325 - RNA, 19 nt, Homo sapiens
  misc_RNA (1)...(19): siRNA sense strand
cuucggaaaucacuuaugc

SEQ ID NO: 2027326 - RNA, 19 nt, Homo sapiens
  misc_RNA (1)...(19): siRNA sense strand
ccagaaggucagcgacauu

SEQ ID NO: 2027327 - RNA, 19 nt, Homo sapiens
  misc_RNA (1)...(19): siRNA sense strand
ucaagaagagcaggauuuc

SEQ ID NO: 2027328 - RNA, 19 nt, Homo sapiens
  misc_RNA (1)...(19): siRNA sense strand
cuggaaugauguuaauugu

SEQ ID NO: 2027329 - RNA, 19 nt, Homo sapiens
  misc_RNA (1)...(19): siRNA sense strand
ccaaugagcgcugcguugu

SEQ ID NO: 2027330 - RNA, 19 nt, Homo sapiens
  misc_RNA (1)...(19): siRNA sense strand
agaauuggaagucauuuag

SEQ ID NO: 2027331 - RNA, 19 nt, Homo sapiens
  misc_RNA (1)...(19): siRNA sense strand
gguccucaaaggucaguuu

SEQ ID NO: 2027332 - RNA, 19 nt, Homo sapiens
  misc_RNA (1)...(19): siRNA sense strand
aaggucaguuugugagaug

SEQ ID NO: 2027333 - RNA, 19 nt, Homo sapiens
  misc_RNA (1)...(19): siRNA sense strand
ggauuucaucuuccagaau

SEQ ID NO: 2027334 - RNA, 19 nt, Homo sapiens
  misc_RNA (1)...(19): siRNA sense strand
cagaaggucagcgacauug

SEQ ID NO: 2027335 - RNA, 19 nt, Homo sapiens
  misc_RNA (1)...(19): siRNA sense strand
gagcuguugcccaaagaau

SEQ ID NO: 2027336 - RNA, 19 nt, Homo sapiens
  misc_RNA (1)...(19): siRNA sense strand
ugcaagaagaaucugcuua

SEQ ID NO: 2027337 - RNA, 19 nt, Homo sapiens
  misc_RNA (1)...(19): siRNA sense strand
aaaggucaguuugugagau

SEQ ID NO: 2027338 - RNA, 19 nt, Homo sapiens
  misc_RNA (1)...(19): siRNA sense strand
gcccagugaucccaaugag

SEQ ID NO: 2027339 - RNA, 19 nt, Homo sapiens
  misc_RNA (1)...(19): siRNA sense strand
cucaagaagagcaggauuu

SEQ ID NO: 2027340 - RNA, 19 nt, Homo sapiens
  misc_RNA (1)...(19): siRNA sense strand
gaaucugcaagaagaaucu

SEQ ID NO: 2027341 - RNA, 19 nt, Homo sapiens
  misc_RNA (1)...(19): siRNA sense strand
caagaagagcaggauuuca

SEQ ID NO: 2027342 - RNA, 19 nt, Homo sapiens
  misc_RNA (1)...(19): siRNA sense strand
ggagcuguugcccaaagaa

SEQ ID NO: 2027343 - RNA, 19 nt, Homo sapiens
  misc_RNA (1)...(19): siRNA sense strand
ccacgugagcccagugauc

SEQ ID NO: 2027344 - RNA, 19 nt, Homo sapiens
  misc_RNA (1)...(19): siRNA sense strand
gcaucaacacagccucuuc

SEQ ID NO: 2027345 - RNA, 19 nt, Homo sapiens
  misc_RNA (1)...(19): siRNA sense strand
aggauuucaucuuccagaa

SEQ ID NO: 2027346 - RNA, 19 nt, Homo sapiens
  misc_RNA (1)...(19): siRNA sense strand
gugagaugaugaagaucca

SEQ ID NO: 2027347 - RNA, 19 nt, Homo sapiens
  misc_RNA (1)...(19): siRNA sense strand
gagcgcugcguugugcuaa

SEQ ID NO: 2027348 - RNA, 19 nt, Homo sapiens
  misc_RNA (1)...(19): siRNA sense strand
ggaaaucacuuaugcugaa

SEQ ID NO: 2027349 - RNA, 19 nt, Homo sapiens
  misc_RNA (1)...(19): siRNA sense strand
ggaaugauguuaauugucu

SEQ ID NO: 2027350 - RNA, 19 nt, Homo sapiens
  misc_RNA (1)...(19): siRNA sense strand
gauaaacacucaagaagag

SEQ ID NO: 2027351 - RNA, 19 nt, Homo sapiens
  misc_RNA (1)...(19): siRNA sense strand
gagaaggacugugcuagaa

SEQ ID NO: 2027352 - RNA, 19 nt, Homo sapiens
  misc_RNA (1)...(19): siRNA sense strand
gaaggacugugcuagaaug

SEQ ID NO: 2027353 - RNA, 19 nt, Homo sapiens
  misc_RNA (1)...(19): siRNA sense strand
gcaagaagaaucugcuuau

SEQ ID NO: 2027354 - RNA, 19 nt, Homo sapiens
  misc_RNA (1)...(19): siRNA sense strand
caagaagaaucugcuuauu

SEQ ID NO: 2027355 - RNA, 19 nt, Homo sapiens
  misc_RNA (1)...(19): siRNA sense strand
gcaauggguugaucagaca

SEQ ID NO: 2027356 - RNA, 19 nt, Homo sapiens
  misc_RNA (1)...(19): siRNA sense strand
gaucagacaccauacaaug

SEQ ID NO: 2027357 - RNA, 19 nt, Homo sapiens
  misc_RNA (1)...(19): siRNA sense strand
ugaugaagauccacuuaug

SEQ ID NO: 2027358 - RNA, 19 nt, Homo sapiens
  misc_RNA (1)...(19): siRNA sense strand
gaugaugaagauccacuua

SEQ ID NO: 2027359 - RNA, 19 nt, Homo sapiens
  misc_RNA (1)...(19): siRNA sense strand
caaagaauuggaagucauu

SEQ ID NO: 2027360 - RNA, 19 nt, Homo sapiens
  misc_RNA (1)...(19): siRNA sense strand
gaugaagauccacuuauga

SEQ ID NO: 2027361 - RNA, 19 nt, Homo sapiens
  misc_RNA (1)...(19): siRNA sense strand
gggcuggaaugauguuaau

SEQ ID NO: 2027362 - RNA, 19 nt, Homo sapiens
  misc_RNA (1)...(19): siRNA sense strand
gcucucagauccagaaggu

SEQ ID NO: 2027363 - RNA, 19 nt, Homo sapiens
  misc_RNA (1)...(19): siRNA sense strand
gcuacuuuauuucuacuga

SEQ ID NO: 2027364 - RNA, 19 nt, Homo sapiens
  misc_RNA (1)...(19): siRNA sense strand
ggugauaaacacucaagaa

SEQ ID NO: 2027365 - RNA, 19 nt, Homo sapiens
  misc_RNA (1)...(19): siRNA sense strand
gcuggaaugauguuaauug

SEQ ID NO: 2027366 - RNA, 19 nt, Homo sapiens
  misc_RNA (1)...(19): siRNA sense strand
uccaacugcuacuuuauuu

SEQ ID NO: 2027367 - RNA, 19 nt, Homo sapiens
  misc_RNA (1)...(19): siRNA sense strand
gcugcguugugcuaaauuu

SEQ ID NO: 2027368 - RNA, 19 nt, Homo sapiens
  misc_RNA (1)...(19): siRNA sense strand
gaaaucacuuaugcugaag

SEQ ID NO: 2027369 - RNA, 19 nt, Homo sapiens
  misc_RNA (1)...(19): siRNA sense strand
caacugcuacuuuauuucu

SEQ ID NO: 2027370 - RNA, 19 nt, Homo sapiens
  misc_RNA (1)...(19): siRNA sense strand
gcuguugcccaaagaauug

SEQ ID NO: 2027371 - RNA, 19 nt, Homo sapiens
  misc_RNA (1)...(19): siRNA sense strand
ugauaaacacucaagaaga

SEQ ID NO: 2027372 - RNA, 19 nt, Homo sapiens
  misc_RNA (1)...(19): siRNA sense strand
ggguugaucagacaccaua

SEQ ID NO: 2027373 - RNA, 19 nt, Homo sapiens
  misc_RNA (1)...(19): siRNA sense strand
cagacaccauacaaugaaa

SEQ ID NO: 2027374 - RNA, 19 nt, Homo sapiens
  misc_RNA (1)...(19): siRNA sense strand
ucagacaccauacaaugaa

SEQ ID NO: 2027375 - RNA, 19 nt, Homo sapiens
  misc_RNA (1)...(19): siRNA sense strand
gcgcugcguugugcuaaau

SEQ ID NO: 2027376 - RNA, 19 nt, Homo sapiens
  misc_RNA (1)...(19): siRNA sense strand
agagcaggauuucaucuuc

SEQ ID NO: 2027377 - RNA, 19 nt, Homo sapiens
  misc_RNA (1)...(19): siRNA sense strand
guaaaucacccaaaagaug

SEQ ID NO: 2027378 - RNA, 19 nt, Homo sapiens
  misc_RNA (1)...(19): siRNA sense strand
uuugugagaugaugaagau

SEQ ID NO: 2027379 - RNA, 19 nt, Homo sapiens
  misc_RNA (1)...(19): siRNA sense strand
ugagaaggacugugcuaga

SEQ ID NO: 2027380 - RNA, 19 nt, Homo sapiens
  misc_RNA (1)...(19): siRNA sense strand
gaagagcaggauuucaucu

SEQ ID NO: 2027381 - RNA, 19 nt, Homo sapiens
  misc_RNA (1)...(19): siRNA sense strand
ggcaagacagugagaagga

SEQ ID NO: 2027382 - RNA, 19 nt, Homo sapiens
  misc_RNA (1)...(19): siRNA sense strand
gaauuggaagucauuuagu

SEQ ID NO: 2027383 - RNA, 19 nt, Homo sapiens
  misc_RNA (1)...(19): siRNA sense strand
caccauacaaugaaaguuc

SEQ ID NO: 2027384 - RNA, 19 nt, Homo sapiens
  misc_RNA (1)...(19): siRNA sense strand
gugauaaacacucaagaag

SEQ ID NO: 2027385 - RNA, 19 nt, Homo sapiens
  misc_RNA (1)...(19): siRNA sense strand
aagaagagcaggauuucau

SEQ ID NO: 2027386 - RNA, 19 nt, Homo sapiens
  misc_RNA (1)...(19): siRNA sense strand
cuucggaaaucacuuaugc

SEQ ID NO: 2027387 - RNA, 19 nt, Homo sapiens
  misc_RNA (1)...(19): siRNA sense strand
ccagaaggucagcgacauu

SEQ ID NO: 2027388 - RNA, 19 nt, Homo sapiens
  misc_RNA (1)...(19): siRNA sense strand
ucaagaagagcaggauuuc

SEQ ID NO: 2027389 - RNA, 19 nt, Homo sapiens
  misc_RNA (1)...(19): siRNA sense strand
cuggaaugauguuaauugu

SEQ ID NO: 2027390 - RNA, 19 nt, Homo sapiens
  misc_RNA (1)...(19): siRNA sense strand
ccaaugagcgcugcguugu

SEQ ID NO: 2027391 - RNA, 19 nt, Homo sapiens
  misc_RNA (1)...(19): siRNA sense strand
agaauuggaagucauuuag

SEQ ID NO: 2027392 - RNA, 19 nt, Homo sapiens
  misc_RNA (1)...(19): siRNA sense strand
gguccucaaaggucaguuu

SEQ ID NO: 2027393 - RNA, 19 nt, Homo sapiens
  misc_RNA (1)...(19): siRNA sense strand
aaggucaguuugugagaug

SEQ ID NO: 2027394 - RNA, 19 nt, Homo sapiens
  misc_RNA (1)...(19): siRNA sense strand
ggauuucaucuuccagaau

SEQ ID NO: 2027395 - RNA, 19 nt, Homo sapiens
  misc_RNA (1)...(19): siRNA sense strand
cagaaggucagcgacauug

SEQ ID NO: 2027396 - RNA, 19 nt, Homo sapiens
  misc_RNA (1)...(19): siRNA sense strand
gagcuguugcccaaagaau

SEQ ID NO: 2027397 - RNA, 19 nt, Homo sapiens
  misc_RNA (1)...(19): siRNA sense strand
ugcaagaagaaucugcuua

SEQ ID NO: 2027398 - RNA, 19 nt, Homo sapiens
  misc_RNA (1)...(19): siRNA sense strand
aaaggucaguuugugagau

SEQ ID NO: 2027399 - RNA, 19 nt, Homo sapiens
  misc_RNA (1)...(19): siRNA sense strand
gcccagugaucccaaugag

SEQ ID NO: 2027400 - RNA, 19 nt, Homo sapiens
  misc_RNA (1)...(19): siRNA sense strand
cucaagaagagcaggauuu

SEQ ID NO: 2027401 - RNA, 19 nt, Homo sapiens
  misc_RNA (1)...(19): siRNA sense strand
gaaucugcaagaagaaucu

SEQ ID NO: 2027402 - RNA, 19 nt, Homo sapiens
  misc_RNA (1)...(19): siRNA sense strand
caagaagagcaggauuuca

SEQ ID NO: 2027403 - RNA, 19 nt, Homo sapiens
  misc_RNA (1)...(19): siRNA sense strand
ggagcuguugcccaaagaa

SEQ ID NO: 2027404 - RNA, 19 nt, Homo sapiens
  misc_RNA (1)...(19): siRNA sense strand
ccacgugagcccagugauc

SEQ ID NO: 2027405 - RNA, 19 nt, Homo sapiens
  misc_RNA (1)...(19): siRNA sense strand
gcaucaacacagccucuuc

SEQ ID NO: 2027406 - RNA, 19 nt, Homo sapiens
  misc_RNA (1)...(19): siRNA sense strand
aggauuucaucuuccagaa

SEQ ID NO: 2027407 - RNA, 19 nt, Homo sapiens
  misc_RNA (1)...(19): siRNA sense strand
gugagaugaugaagaucca

SEQ ID NO: 2027408 - RNA, 19 nt, Homo sapiens
  misc_RNA (1)...(19): siRNA sense strand
gagcgcugcguugugcuaa

SEQ ID NO: 2027409 - RNA, 19 nt, Homo sapiens
  misc_RNA (1)...(19): siRNA sense strand
ggaaaucacuuaugcugaa

SEQ ID NO: 2027410 - RNA, 19 nt, Homo sapiens
  misc_RNA (1)...(19): siRNA sense strand
ggaaugauguuaauugucu

SEQ ID NO: 2027411 - RNA, 19 nt, Homo sapiens
  misc_RNA (1)...(19): siRNA sense strand
gauaaacacucaagaagag

SEQ ID NO: 2027412 - RNA, 19 nt, Homo sapiens
  misc_RNA (1)...(19): siRNA sense strand
gagaaggacugugcuagaa

SEQ ID NO: 2027413 - RNA, 19 nt, Homo sapiens
  misc_RNA (1)...(19): siRNA sense strand
gaaggacugugcuagaaug

SEQ ID NO: 2027414 - RNA, 19 nt, Homo sapiens
  misc_RNA (1)...(19): siRNA sense strand
gcaagaagaaucugcuuau

SEQ ID NO: 2027415 - RNA, 19 nt, Homo sapiens
  misc_RNA (1)...(19): siRNA sense strand
caagaagaaucugcuuauu

SEQ ID NO: 2027416 - RNA, 19 nt, Homo sapiens
  misc_RNA (1)...(19): siRNA sense strand
gcaauggguugaucagaca

SEQ ID NO: 2027417 - RNA, 19 nt, Homo sapiens
  misc_RNA (1)...(19): siRNA sense strand
gaucagacaccauacaaug

SEQ ID NO: 2027418 - RNA, 19 nt, Homo sapiens
  misc_RNA (1)...(19): siRNA sense strand
ugaugaagauccacuuaug

SEQ ID NO: 2027419 - RNA, 19 nt, Homo sapiens
  misc_RNA (1)...(19): siRNA sense strand
gaugaugaagauccacuua

SEQ ID NO: 2027420 - RNA, 19 nt, Homo sapiens
  misc_RNA (1)...(19): siRNA sense strand
caaagaauuggaagucauu

SEQ ID NO: 2027421 - RNA, 19 nt, Homo sapiens
  misc_RNA (1)...(19): siRNA sense strand
gaugaagauccacuuauga

SEQ ID NO: 2027422 - RNA, 19 nt, Homo sapiens
  misc_RNA (1)...(19): siRNA sense strand
gggcuggaaugauguuaau

SEQ ID NO: 2027423 - RNA, 19 nt, Homo sapiens
  misc_RNA (1)...(19): siRNA sense strand
gcucucagauccagaaggu

SEQ ID NO: 2027424 - RNA, 19 nt, Homo sapiens
  misc_RNA (1)...(19): siRNA sense strand
gcuacuuuauuucuacuga

SEQ ID NO: 2027425 - RNA, 19 nt, Homo sapiens
  misc_RNA (1)...(19): siRNA sense strand
ggugauaaacacucaagaa

SEQ ID NO: 2027426 - RNA, 19 nt, Homo sapiens
  misc_RNA (1)...(19): siRNA sense strand
gcuggaaugauguuaauug

SEQ ID NO: 2027427 - RNA, 19 nt, Homo sapiens
  misc_RNA (1)...(19): siRNA sense strand
uccaacugcuacuuuauuu

SEQ ID NO: 2027428 - RNA, 19 nt, Homo sapiens
  misc_RNA (1)...(19): siRNA sense strand
gcugcguugugcuaaauuu

SEQ ID NO: 2027429 - RNA, 19 nt, Homo sapiens
  misc_RNA (1)...(19): siRNA sense strand
gaaaucacuuaugcugaag

SEQ ID NO: 2027430 - RNA, 19 nt, Homo sapiens
  misc_RNA (1)...(19): siRNA sense strand
caacugcuacuuuauuucu

SEQ ID NO: 2027431 - RNA, 19 nt, Homo sapiens
  misc_RNA (1)...(19): siRNA sense strand
gcuguugcccaaagaauug

SEQ ID NO: 2027432 - RNA, 19 nt, Homo sapiens
  misc_RNA (1)...(19): siRNA sense strand
ugauaaacacucaagaaga

SEQ ID NO: 2027433 - RNA, 19 nt, Homo sapiens
  misc_RNA (1)...(19): siRNA sense strand
ggguugaucagacaccaua

SEQ ID NO: 2027434 - RNA, 19 nt, Homo sapiens
  misc_RNA (1)...(19): siRNA sense strand
cagacaccauacaaugaaa

SEQ ID NO: 2027435 - RNA, 19 nt, Homo sapiens
  misc_RNA (1)...(19): siRNA sense strand
ucagacaccauacaaugaa

SEQ ID NO: 2027436 - RNA, 19 nt, Homo sapiens
  misc_RNA (1)...(19): siRNA sense strand
gcgcugcguugugcuaaau

SEQ ID NO: 2027437 - RNA, 19 nt, Homo sapiens
  misc_RNA (1)...(19): siRNA sense strand
agagcaggauuucaucuuc

SEQ ID NO: 2027438 - RNA, 19 nt, Homo sapiens
  misc_RNA (1)...(19): siRNA sense strand
guaaaucacccaaaagaug

SEQ ID NO: 2027439 - RNA, 19 nt, Homo sapiens
  misc_RNA (1)...(19): siRNA sense strand
uuugugagaugaugaagau

SEQ ID NO: 2027440 - RNA, 19 nt, Homo sapiens
  misc_RNA (1)...(19): siRNA sense strand
ugagaaggacugugcuaga

SEQ ID NO: 2027441 - RNA, 19 nt, Homo sapiens
  misc_RNA (1)...(19): siRNA sense strand
gaagagcaggauuucaucu

SEQ ID NO: 2027442 - RNA, 19 nt, Homo sapiens
  misc_RNA (1)...(19): siRNA sense strand
ggcaagacagugagaagga

SEQ ID NO: 2027443 - RNA, 19 nt, Homo sapiens
  misc_RNA (1)...(19): siRNA sense strand
gaauuggaagucauuuagu

SEQ ID NO: 2027444 - RNA, 19 nt, Homo sapiens
  misc_RNA (1)...(19): siRNA sense strand
caccauacaaugaaaguuc

SEQ ID NO: 2027445 - RNA, 19 nt, Homo sapiens
  misc_RNA (1)...(19): siRNA sense strand
gugauaaacacucaagaag

SEQ ID NO: 2027446 - RNA, 19 nt, Homo sapiens
  misc_RNA (1)...(19): siRNA sense strand
aagaagagcaggauuucau

SEQ ID NO: 2027447 - RNA, 19 nt, Homo sapiens
  misc_RNA (1)...(19): siRNA sense strand
cuucggaaaucacuuaugc

SEQ ID NO: 2027448 - RNA, 19 nt, Homo sapiens
  misc_RNA (1)...(19): siRNA sense strand
ccagaaggucagcgacauu

SEQ ID NO: 2027449 - RNA, 19 nt, Homo sapiens
  misc_RNA (1)...(19): siRNA sense strand
ucaagaagagcaggauuuc

SEQ ID NO: 2027450 - RNA, 19 nt, Homo sapiens
  misc_RNA (1)...(19): siRNA sense strand
cuggaaugauguuaauugu

SEQ ID NO: 2027451 - RNA, 19 nt, Homo sapiens
  misc_RNA (1)...(19): siRNA sense strand
ccaaugagcgcugcguugu

SEQ ID NO: 2027452 - RNA, 19 nt, Homo sapiens
  misc_RNA (1)...(19): siRNA sense strand
agaauuggaagucauuuag

SEQ ID NO: 2027453 - RNA, 19 nt, Homo sapiens
  misc_RNA (1)...(19): siRNA sense strand
gguccucaaaggucaguuu

SEQ ID NO: 2027454 - RNA, 19 nt, Homo sapiens
  misc_RNA (1)...(19): siRNA sense strand
aaggucaguuugugagaug

SEQ ID NO: 2027455 - RNA, 19 nt, Homo sapiens
  misc_RNA (1)...(19): siRNA sense strand
ggauuucaucuuccagaau

SEQ ID NO: 2027456 - RNA, 19 nt, Homo sapiens
  misc_RNA (1)...(19): siRNA sense strand
cagaaggucagcgacauug

SEQ ID NO: 2027457 - RNA, 19 nt, Homo sapiens
  misc_RNA (1)...(19): siRNA sense strand
gagcuguugcccaaagaau

SEQ ID NO: 2027458 - RNA, 19 nt, Homo sapiens
  misc_RNA (1)...(19): siRNA sense strand
ugcaagaagaaucugcuua

SEQ ID NO: 2027459 - RNA, 19 nt, Homo sapiens
  misc_RNA (1)...(19): siRNA sense strand
aaaggucaguuugugagau

SEQ ID NO: 2027460 - RNA, 19 nt, Homo sapiens
  misc_RNA (1)...(19): siRNA sense strand
gcccagugaucccaaugag

SEQ ID NO: 2027461 - RNA, 19 nt, Homo sapiens
  misc_RNA (1)...(19): siRNA sense strand
cucaagaagagcaggauuu

SEQ ID NO: 2027462 - RNA, 19 nt, Homo sapiens
  misc_RNA (1)...(19): siRNA sense strand
gaaucugcaagaagaaucu

SEQ ID NO: 2027463 - RNA, 19 nt, Homo sapiens
  misc_RNA (1)...(19): siRNA sense strand
caagaagagcaggauuuca

SEQ ID NO: 2027464 - RNA, 19 nt, Homo sapiens
  misc_RNA (1)...(19): siRNA sense strand
ggagcuguugcccaaagaa

SEQ ID NO: 2027465 - RNA, 19 nt, Homo sapiens
  misc_RNA (1)...(19): siRNA sense strand
ccacgugagcccagugauc

SEQ ID NO: 2027466 - RNA, 19 nt, Homo sapiens
  misc_RNA (1)...(19): siRNA sense strand
gcaucaacacagccucuuc

SEQ ID NO: 2027467 - RNA, 19 nt, Homo sapiens
  misc_RNA (1)...(19): siRNA sense strand
aggauuucaucuuccagaa

SEQ ID NO: 2027468 - RNA, 19 nt, Homo sapiens
  misc_RNA (1)...(19): siRNA sense strand
gugagaugaugaagaucca

SEQ ID NO: 2027469 - RNA, 19 nt, Homo sapiens
  misc_RNA (1)...(19): siRNA sense strand
gagcgcugcguugugcuaa

SEQ ID NO: 2027470 - RNA, 19 nt, Homo sapiens
  misc_RNA (1)...(19): siRNA sense strand
ggaaaucacuuaugcugaa

SEQ ID NO: 2027471 - RNA, 19 nt, Homo sapiens
  misc_RNA (1)...(19): siRNA sense strand
ggaaugauguuaauugucu

SEQ ID NO: 2027472 - RNA, 19 nt, Homo sapiens
  misc_RNA (1)...(19): siRNA sense strand
gauaaacacucaagaagag

SEQ ID NO: 2027473 - RNA, 19 nt, Homo sapiens
  misc_RNA (1)...(19): siRNA sense strand
gagaaggacugugcuagaa

SEQ ID NO: 2027474 - RNA, 19 nt, Homo sapiens
  misc_RNA (1)...(19): siRNA sense strand
gaaggacugugcuagaaug

SEQ ID NO: 2027475 - RNA, 19 nt, Homo sapiens
  misc_RNA (1)...(19): siRNA sense strand
gcaagaagaaucugcuuau

SEQ ID NO: 2027476 - RNA, 19 nt, Homo sapiens
  misc_RNA (1)...(19): siRNA sense strand
caagaagaaucugcuuauu

SEQ ID NO: 2027477 - RNA, 19 nt, Homo sapiens
  misc_RNA (1)...(19): siRNA sense strand
gcaauggguugaucagaca

SEQ ID NO: 2027478 - RNA, 19 nt, Homo sapiens
  misc_RNA (1)...(19): siRNA sense strand
gaucagacaccauacaaug

SEQ ID NO: 2027479 - RNA, 19 nt, Homo sapiens
  misc_RNA (1)...(19): siRNA sense strand
ugaugaagauccacuuaug

SEQ ID NO: 2027480 - RNA, 19 nt, Homo sapiens
  misc_RNA (1)...(19): siRNA sense strand
gaugaugaagauccacuua

SEQ ID NO: 2027481 - RNA, 19 nt, Homo sapiens
  misc_RNA (1)...(19): siRNA sense strand
caaagaauuggaagucauu

SEQ ID NO: 2027482 - RNA, 19 nt, Homo sapiens
  misc_RNA (1)...(19): siRNA sense strand
gaugaagauccacuuauga

SEQ ID NO: 2027483 - RNA, 19 nt, Homo sapiens
  misc_RNA (1)...(19): siRNA sense strand
gggcuggaaugauguuaau

SEQ ID NO: 2027484 - RNA, 19 nt, Homo sapiens
  misc_RNA (1)...(19): siRNA sense strand
gcucucagauccagaaggu

SEQ ID NO: 2027485 - RNA, 19 nt, Homo sapiens
  misc_RNA (1)...(19): siRNA sense strand
gcuacuuuauuucuacuga

SEQ ID NO: 2027486 - RNA, 19 nt, Homo sapiens
  misc_RNA (1)...(19): siRNA sense strand
ggugauaaacacucaagaa

SEQ ID NO: 2027487 - RNA, 19 nt, Homo sapiens
  misc_RNA (1)...(19): siRNA sense strand
gcuggaaugauguuaauug

SEQ ID NO: 2027488 - RNA, 19 nt, Homo sapiens
  misc_RNA (1)...(19): siRNA sense strand
uccaacugcuacuuuauuu

SEQ ID NO: 2027489 - RNA, 19 nt, Homo sapiens
  misc_RNA (1)...(19): siRNA sense strand
gcugcguugugcuaaauuu

SEQ ID NO: 2027490 - RNA, 19 nt, Homo sapiens
  misc_RNA (1)...(19): siRNA sense strand
gaaaucacuuaugcugaag

SEQ ID NO: 2027491 - RNA, 19 nt, Homo sapiens
  misc_RNA (1)...(19): siRNA sense strand
caacugcuacuuuauuucu

SEQ ID NO: 2027492 - RNA, 19 nt, Homo sapiens
  misc_RNA (1)...(19): siRNA sense strand
gcuguugcccaaagaauug

SEQ ID NO: 2027493 - RNA, 19 nt, Homo sapiens
  misc_RNA (1)...(19): siRNA sense strand
ugauaaacacucaagaaga

SEQ ID NO: 2027494 - RNA, 19 nt, Homo sapiens
  misc_RNA (1)...(19): siRNA sense strand
ggguugaucagacaccaua

SEQ ID NO: 2027495 - RNA, 19 nt, Homo sapiens
  misc_RNA (1)...(19): siRNA sense strand
cagacaccauacaaugaaa

SEQ ID NO: 2027496 - RNA, 19 nt, Homo sapiens
  misc_RNA (1)...(19): siRNA sense strand
ucagacaccauacaaugaa

SEQ ID NO: 2027497 - RNA, 19 nt, Homo sapiens
  misc_RNA (1)...(19): siRNA sense strand
gcgcugcguugugcuaaau

SEQ ID NO: 2027498 - RNA, 19 nt, Homo sapiens
  misc_RNA (1)...(19): siRNA sense strand
agagcaggauuucaucuuc

SEQ ID NO: 2027499 - RNA, 19 nt, Homo sapiens
  misc_RNA (1)...(19): siRNA sense strand
guaaaucacccaaaagaug

SEQ ID NO: 2027500 - RNA, 19 nt, Homo sapiens
  misc_RNA (1)...(19): siRNA sense strand
uuugugagaugaugaagau

SEQ ID NO: 2027501 - RNA, 19 nt, Homo sapiens
  misc_RNA (1)...(19): siRNA sense strand
ugagaaggacugugcuaga

SEQ ID NO: 2027502 - RNA, 19 nt, Homo sapiens
  misc_RNA (1)...(19): siRNA sense strand
gaagagcaggauuucaucu

SEQ ID NO: 2027503 - RNA, 19 nt, Homo sapiens
  misc_RNA (1)...(19): siRNA sense strand
ggcaagacagugagaagga

SEQ ID NO: 2027504 - RNA, 19 nt, Homo sapiens
  misc_RNA (1)...(19): siRNA sense strand
gaauuggaagucauuuagu

SEQ ID NO: 2027505 - RNA, 19 nt, Homo sapiens
  misc_RNA (1)...(19): siRNA sense strand
caccauacaaugaaaguuc

SEQ ID NO: 2027506 - RNA, 19 nt, Homo sapiens
  misc_RNA (1)...(19): siRNA sense strand
gugauaaacacucaagaag

SEQ ID NO: 2027507 - RNA, 19 nt, Homo sapiens
  misc_RNA (1)...(19): siRNA sense strand
aagaagagcaggauuucau

SEQ ID NO: 2027508 - RNA, 19 nt, Homo sapiens
  misc_RNA (1)...(19): siRNA sense strand
cuucggaaaucacuuaugc

SEQ ID NO: 2027509 - RNA, 19 nt, Homo sapiens
  misc_RNA (1)...(19): siRNA sense strand
ccagaaggucagcgacauu

SEQ ID NO: 2027510 - RNA, 19 nt, Homo sapiens
  misc_RNA (1)...(19): siRNA sense strand
ucaagaagagcaggauuuc

SEQ ID NO: 2027511 - RNA, 19 nt, Homo sapiens
  misc_RNA (1)...(19): siRNA sense strand
cuggaaugauguuaauugu

SEQ ID NO: 2027512 - RNA, 19 nt, Homo sapiens
  misc_RNA (1)...(19): siRNA sense strand
ccaaugagcgcugcguugu

SEQ ID NO: 2027513 - RNA, 19 nt, Homo sapiens
  misc_RNA (1)...(19): siRNA sense strand
agaauuggaagucauuuag

SEQ ID NO: 2027514 - RNA, 19 nt, Homo sapiens
  misc_RNA (1)...(19): siRNA sense strand
gguccucaaaggucaguuu

SEQ ID NO: 2027515 - RNA, 19 nt, Homo sapiens
  misc_RNA (1)...(19): siRNA sense strand
aaggucaguuugugagaug

SEQ ID NO: 2027516 - RNA, 19 nt, Homo sapiens
  misc_RNA (1)...(19): siRNA sense strand
ggauuucaucuuccagaau

SEQ ID NO: 2027517 - RNA, 19 nt, Homo sapiens
  misc_RNA (1)...(19): siRNA sense strand
cagaaggucagcgacauug

SEQ ID NO: 2027518 - RNA, 19 nt, Homo sapiens
  misc_RNA (1)...(19): siRNA sense strand
gagcuguugcccaaagaau

SEQ ID NO: 2027519 - RNA, 19 nt, Homo sapiens
  misc_RNA (1)...(19): siRNA sense strand
ugcaagaagaaucugcuua

SEQ ID NO: 2027520 - RNA, 19 nt, Homo sapiens
  misc_RNA (1)...(19): siRNA sense strand
aaaggucaguuugugagau

SEQ ID NO: 2027521 - RNA, 19 nt, Homo sapiens
  misc_RNA (1)...(19): siRNA sense strand
gcccagugaucccaaugag

SEQ ID NO: 2027522 - RNA, 19 nt, Homo sapiens
  misc_RNA (1)...(19): siRNA sense strand
cucaagaagagcaggauuu

SEQ ID NO: 2027523 - RNA, 19 nt, Homo sapiens
  misc_RNA (1)...(19): siRNA sense strand
gaaucugcaagaagaaucu

SEQ ID NO: 2027524 - RNA, 19 nt, Homo sapiens
  misc_RNA (1)...(19): siRNA sense strand
caagaagagcaggauuuca

SEQ ID NO: 2027525 - RNA, 19 nt, Homo sapiens
  misc_RNA (1)...(19): siRNA sense strand
ggagcuguugcccaaagaa

SEQ ID NO: 2027526 - RNA, 19 nt, Homo sapiens
  misc_RNA (1)...(19): siRNA sense strand
ccacgugagcccagugauc

SEQ ID NO: 2027527 - RNA, 19 nt, Homo sapiens
  misc_RNA (1)...(19): siRNA sense strand
gcaucaacacagccucuuc

SEQ ID NO: 2027528 - RNA, 19 nt, Homo sapiens
  misc_RNA (1)...(19): siRNA sense strand
aggauuucaucuuccagaa

SEQ ID NO: 2027529 - RNA, 19 nt, Homo sapiens
  misc_RNA (1)...(19): siRNA sense strand
gugagaugaugaagaucca

SEQ ID NO: 2027530 - RNA, 19 nt, Homo sapiens
  misc_RNA (1)...(19): siRNA sense strand
gagcgcugcguugugcuaa

SEQ ID NO: 2027531 - RNA, 19 nt, Homo sapiens
  misc_RNA (1)...(19): siRNA sense strand
ggaaaucacuuaugcugaa

SEQ ID NO: 2027532 - RNA, 19 nt, Homo sapiens
  misc_RNA (1)...(19): siRNA sense strand
ggaaugauguuaauugucu

SEQ ID NO: 2027533 - RNA, 19 nt, Homo sapiens
  misc_RNA (1)...(19): siRNA sense strand
gauaaacacucaagaagag

SEQ ID NO: 2027534 - RNA, 19 nt, Homo sapiens
  misc_RNA (1)...(19): siRNA sense strand
gagaaggacugugcuagaa

SEQ ID NO: 2027535 - RNA, 19 nt, Homo sapiens
  misc_RNA (1)...(19): siRNA sense strand
gaaggacugugcuagaaug

SEQ ID NO: 2027536 - RNA, 19 nt, Homo sapiens
  misc_RNA (1)...(19): siRNA sense strand
gcaagaagaaucugcuuau

SEQ ID NO: 2027537 - RNA, 19 nt, Homo sapiens
  misc_RNA (1)...(19): siRNA sense strand
caagaagaaucugcuuauu

SEQ ID NO: 2027538 - RNA, 19 nt, Homo sapiens
  misc_RNA (1)...(19): siRNA sense strand
gcaauggguugaucagaca

SEQ ID NO: 2027539 - RNA, 19 nt, Homo sapiens
  misc_RNA (1)...(19): siRNA sense strand
gaucagacaccauacaaug

SEQ ID NO: 2027540 - RNA, 19 nt, Homo sapiens
  misc_RNA (1)...(19): siRNA sense strand
ugaugaagauccacuuaug

SEQ ID NO: 2027541 - RNA, 19 nt, Homo sapiens
  misc_RNA (1)...(19): siRNA sense strand
gaugaugaagauccacuua

SEQ ID NO: 2027542 - RNA, 19 nt, Homo sapiens
  misc_RNA (1)...(19): siRNA sense strand
caaagaauuggaagucauu

SEQ ID NO: 2027543 - RNA, 19 nt, Homo sapiens
  misc_RNA (1)...(19): siRNA sense strand
gaugaagauccacuuauga

SEQ ID NO: 2027544 - RNA, 19 nt, Homo sapiens
  misc_RNA (1)...(19): siRNA sense strand
gggcuggaaugauguuaau

SEQ ID NO: 2027545 - RNA, 19 nt, Homo sapiens
  misc_RNA (1)...(19): siRNA sense strand
gcucucagauccagaaggu

SEQ ID NO: 2027546 - RNA, 19 nt, Homo sapiens
  misc_RNA (1)...(19): siRNA sense strand
gcuacuuuauuucuacuga

SEQ ID NO: 2027547 - RNA, 19 nt, Homo sapiens
  misc_RNA (1)...(19): siRNA sense strand
ggugauaaacacucaagaa

SEQ ID NO: 2027548 - RNA, 19 nt, Homo sapiens
  misc_RNA (1)...(19): siRNA sense strand
gcuggaaugauguuaauug

SEQ ID NO: 2027549 - RNA, 19 nt, Homo sapiens
  misc_RNA (1)...(19): siRNA sense strand
uccaacugcuacuuuauuu

SEQ ID NO: 2027550 - RNA, 19 nt, Homo sapiens
  misc_RNA (1)...(19): siRNA sense strand
gcugcguugugcuaaauuu

SEQ ID NO: 2027551 - RNA, 19 nt, Homo sapiens
  misc_RNA (1)...(19): siRNA sense strand
gaaaucacuuaugcugaag

SEQ ID NO: 2027552 - RNA, 19 nt, Homo sapiens
  misc_RNA (1)...(19): siRNA sense strand
caacugcuacuuuauuucu

SEQ ID NO: 2027553 - RNA, 19 nt, Homo sapiens
  misc_RNA (1)...(19): siRNA sense strand
gcuguugcccaaagaauug

SEQ ID NO: 2027554 - RNA, 19 nt, Homo sapiens
  misc_RNA (1)...(19): siRNA sense strand
ugauaaacacucaagaaga

SEQ ID NO: 2027555 - RNA, 19 nt, Homo sapiens
  misc_RNA (1)...(19): siRNA sense strand
ggguugaucagacaccaua

SEQ ID NO: 2027556 - RNA, 19 nt, Homo sapiens
  misc_RNA (1)...(19): siRNA sense strand
cagacaccauacaaugaaa

SEQ ID NO: 2027557 - RNA, 19 nt, Homo sapiens
  misc_RNA (1)...(19): siRNA sense strand
ucagacaccauacaaugaa

SEQ ID NO: 2027558 - RNA, 19 nt, Homo sapiens
  misc_RNA (1)...(19): siRNA sense strand
gcgcugcguugugcuaaau

SEQ ID NO: 2027559 - RNA, 19 nt, Homo sapiens
  misc_RNA (1)...(19): siRNA sense strand
agagcaggauuucaucuuc

SEQ ID NO: 2027560 - RNA, 19 nt, Homo sapiens
  misc_RNA (1)...(19): siRNA sense strand
guaaaucacccaaaagaug

SEQ ID NO: 2027561 - RNA, 19 nt, Homo sapiens
  misc_RNA (1)...(19): siRNA sense strand
uuugugagaugaugaagau

SEQ ID NO: 2027562 - RNA, 19 nt, Homo sapiens
  misc_RNA (1)...(19): siRNA sense strand
ugagaaggacugugcuaga

SEQ ID NO: 2027563 - RNA, 19 nt, Homo sapiens
  misc_RNA (1)...(19): siRNA sense strand
gaagagcaggauuucaucu

SEQ ID NO: 2027564 - RNA, 19 nt, Homo sapiens
  misc_RNA (1)...(19): siRNA sense strand
ggcaagacagugagaagga

SEQ ID NO: 2027565 - RNA, 19 nt, Homo sapiens
  misc_RNA (1)...(19): siRNA sense strand
gaauuggaagucauuuagu

SEQ ID NO: 2027566 - RNA, 19 nt, Homo sapiens
  misc_RNA (1)...(19): siRNA sense strand
caccauacaaugaaaguuc

SEQ ID NO: 2027567 - RNA, 19 nt, Homo sapiens
  misc_RNA (1)...(19): siRNA sense strand
gugauaaacacucaagaag

SEQ ID NO: 2027568 - RNA, 19 nt, Homo sapiens
  misc_RNA (1)...(19): siRNA sense strand
aagaagagcaggauuucau

SEQ ID NO: 2027569 - RNA, 19 nt, Homo sapiens
  misc_RNA (1)...(19): siRNA sense strand
cuucggaaaucacuuaugc

SEQ ID NO: 2027570 - RNA, 19 nt, Homo sapiens
  misc_RNA (1)...(19): siRNA sense strand
ccagaaggucagcgacauu

SEQ ID NO: 2027571 - RNA, 19 nt, Homo sapiens
  misc_RNA (1)...(19): siRNA sense strand
ucaagaagagcaggauuuc

SEQ ID NO: 2027572 - RNA, 19 nt, Homo sapiens
  misc_RNA (1)...(19): siRNA sense strand
cuggaaugauguuaauugu

SEQ ID NO: 2027573 - RNA, 19 nt, Homo sapiens
  misc_RNA (1)...(19): siRNA sense strand
ccaaugagcgcugcguugu

SEQ ID NO: 2027574 - RNA, 19 nt, Homo sapiens
  misc_RNA (1)...(19): siRNA sense strand
agaauuggaagucauuuag

SEQ ID NO: 2027575 - RNA, 19 nt, Homo sapiens
  misc_RNA (1)...(19): siRNA sense strand
gguccucaaaggucaguuu

SEQ ID NO: 2027576 - RNA, 19 nt, Homo sapiens
  misc_RNA (1)...(19): siRNA sense strand
aaggucaguuugugagaug

SEQ ID NO: 2027577 - RNA, 19 nt, Homo sapiens
  misc_RNA (1)...(19): siRNA sense strand
ggauuucaucuuccagaau

SEQ ID NO: 2027578 - RNA, 19 nt, Homo sapiens
  misc_RNA (1)...(19): siRNA sense strand
cagaaggucagcgacauug

SEQ ID NO: 2027579 - RNA, 19 nt, Homo sapiens
  misc_RNA (1)...(19): siRNA sense strand
gagcuguugcccaaagaau

SEQ ID NO: 2027580 - RNA, 19 nt, Homo sapiens
  misc_RNA (1)...(19): siRNA sense strand
ugcaagaagaaucugcuua

SEQ ID NO: 2027581 - RNA, 19 nt, Homo sapiens
  misc_RNA (1)...(19): siRNA sense strand
aaaggucaguuugugagau

SEQ ID NO: 2027582 - RNA, 19 nt, Homo sapiens
  misc_RNA (1)...(19): siRNA sense strand
gcccagugaucccaaugag

SEQ ID NO: 2027583 - RNA, 19 nt, Homo sapiens
  misc_RNA (1)...(19): siRNA sense strand
cucaagaagagcaggauuu

SEQ ID NO: 2027584 - RNA, 19 nt, Homo sapiens
  misc_RNA (1)...(19): siRNA sense strand
gaaucugcaagaagaaucu

SEQ ID NO: 2027585 - RNA, 19 nt, Homo sapiens
  misc_RNA (1)...(19): siRNA sense strand
caagaagagcaggauuuca

SEQ ID NO: 2027586 - RNA, 19 nt, Homo sapiens
  misc_RNA (1)...(19): siRNA sense strand
ggagcuguugcccaaagaa

SEQ ID NO: 2027587 - RNA, 19 nt, Homo sapiens
  misc_RNA (1)...(19): siRNA sense strand
ccacgugagcccagugauc

SEQ ID NO: 2027588 - RNA, 19 nt, Homo sapiens
  misc_RNA (1)...(19): siRNA sense strand
gcaucaacacagccucuuc

SEQ ID NO: 2027589 - RNA, 19 nt, Homo sapiens
  misc_RNA (1)...(19): siRNA sense strand
aggauuucaucuuccagaa

SEQ ID NO: 2027590 - RNA, 19 nt, Homo sapiens
  misc_RNA (1)...(19): siRNA sense strand
gugagaugaugaagaucca

SEQ ID NO: 2027591 - RNA, 19 nt, Homo sapiens
  misc_RNA (1)...(19): siRNA sense strand
gagcgcugcguugugcuaa

SEQ ID NO: 2027592 - RNA, 19 nt, Homo sapiens
  misc_RNA (1)...(19): siRNA sense strand
ggaaaucacuuaugcugaa

SEQ ID NO: 2027593 - RNA, 19 nt, Homo sapiens
  misc_RNA (1)...(19): siRNA sense strand
ggaaugauguuaauugucu

SEQ ID NO: 2027594 - RNA, 19 nt, Homo sapiens
  misc_RNA (1)...(19): siRNA sense strand
gauaaacacucaagaagag

SEQ ID NO: 2027595 - RNA, 19 nt, Homo sapiens
  misc_RNA (1)...(19): siRNA sense strand
gagaaggacugugcuagaa

SEQ ID NO: 2027596 - RNA, 19 nt, Homo sapiens
  misc_RNA (1)...(19): siRNA sense strand
gaaggacugugcuagaaug

SEQ ID NO: 2027597 - RNA, 19 nt, Homo sapiens
  misc_RNA (1)...(19): siRNA sense strand
gcaagaagaaucugcuuau

SEQ ID NO: 2027598 - RNA, 19 nt, Homo sapiens
  misc_RNA (1)...(19): siRNA sense strand
caagaagaaucugcuuauu

SEQ ID NO: 2027599 - RNA, 19 nt, Homo sapiens
  misc_RNA (1)...(19): siRNA sense strand
gcaauggguugaucagaca

SEQ ID NO: 2027600 - RNA, 19 nt, Homo sapiens
  misc_RNA (1)...(19): siRNA sense strand
gaucagacaccauacaaug

SEQ ID NO: 2027601 - RNA, 19 nt, Homo sapiens
  misc_RNA (1)...(19): siRNA sense strand
ugaugaagauccacuuaug

SEQ ID NO: 2027602 - RNA, 19 nt, Homo sapiens
  misc_RNA (1)...(19): siRNA sense strand
gaugaugaagauccacuua

SEQ ID NO: 2027603 - RNA, 19 nt, Homo sapiens
  misc_RNA (1)...(19): siRNA sense strand
caaagaauuggaagucauu

SEQ ID NO: 2027604 - RNA, 19 nt, Homo sapiens
  misc_RNA (1)...(19): siRNA sense strand
gaugaagauccacuuauga

SEQ ID NO: 2027605 - RNA, 19 nt, Homo sapiens
  misc_RNA (1)...(19): siRNA sense strand
gggcuggaaugauguuaau

SEQ ID NO: 2027606 - RNA, 19 nt, Homo sapiens
  misc_RNA (1)...(19): siRNA sense strand
gcucucagauccagaaggu

SEQ ID NO: 2027607 - RNA, 19 nt, Homo sapiens
  misc_RNA (1)...(19): siRNA sense strand
gcuacuuuauuucuacuga

SEQ ID NO: 2027608 - RNA, 19 nt, Homo sapiens
  misc_RNA (1)...(19): siRNA sense strand
ggugauaaacacucaagaa

SEQ ID NO: 2027609 - RNA, 19 nt, Homo sapiens
  misc_RNA (1)...(19): siRNA sense strand
gcuggaaugauguuaauug

SEQ ID NO: 2027610 - RNA, 19 nt, Homo sapiens
  misc_RNA (1)...(19): siRNA sense strand
uccaacugcuacuuuauuu

SEQ ID NO: 2027611 - RNA, 19 nt, Homo sapiens
  misc_RNA (1)...(19): siRNA sense strand
gcugcguugugcuaaauuu

SEQ ID NO: 2027612 - RNA, 19 nt, Homo sapiens
  misc_RNA (1)...(19): siRNA sense strand
gaaaucacuuaugcugaag

SEQ ID NO: 2027613 - RNA, 19 nt, Homo sapiens
  misc_RNA (1)...(19): siRNA sense strand
caacugcuacuuuauuucu

SEQ ID NO: 2027614 - RNA, 19 nt, Homo sapiens
  misc_RNA (1)...(19): siRNA sense strand
gcuguugcccaaagaauug

SEQ ID NO: 2027615 - RNA, 19 nt, Homo sapiens
  misc_RNA (1)...(19): siRNA sense strand
ugauaaacacucaagaaga

SEQ ID NO: 2027616 - RNA, 19 nt, Homo sapiens
  misc_RNA (1)...(19): siRNA sense strand
ggguugaucagacaccaua

SEQ ID NO: 2027617 - RNA, 19 nt, Homo sapiens
  misc_RNA (1)...(19): siRNA sense strand
cagacaccauacaaugaaa

SEQ ID NO: 2027618 - RNA, 19 nt, Homo sapiens
  misc_RNA (1)...(19): siRNA sense strand
ucagacaccauacaaugaa

SEQ ID NO: 2027619 - RNA, 19 nt, Homo sapiens
  misc_RNA (1)...(19): siRNA sense strand
gcgcugcguugugcuaaau

SEQ ID NO: 2027620 - RNA, 19 nt, Homo sapiens
  misc_RNA (1)...(19): siRNA sense strand
agagcaggauuucaucuuc

SEQ ID NO: 2027621 - RNA, 19 nt, Homo sapiens
  misc_RNA (1)...(19): siRNA sense strand
guaaaucacccaaaagaug

SEQ ID NO: 2027622 - RNA, 19 nt, Homo sapiens
  misc_RNA (1)...(19): siRNA sense strand
uuugugagaugaugaagau

SEQ ID NO: 2027623 - RNA, 19 nt, Homo sapiens
  misc_RNA (1)...(19): siRNA sense strand
ugagaaggacugugcuaga

SEQ ID NO: 2027624 - RNA, 19 nt, Homo sapiens
  misc_RNA (1)...(19): siRNA sense strand
gaagagcaggauuucaucu

SEQ ID NO: 2027625 - RNA, 19 nt, Homo sapiens
  misc_RNA (1)...(19): siRNA sense strand
ggcaagacagugagaagga

SEQ ID NO: 2027626 - RNA, 19 nt, Homo sapiens
  misc_RNA (1)...(19): siRNA sense strand
gaauuggaagucauuuagu

SEQ ID NO: 2027627 - RNA, 19 nt, Homo sapiens
  misc_RNA (1)...(19): siRNA sense strand
caccauacaaugaaaguuc

SEQ ID NO: 2027628 - RNA, 19 nt, Homo sapiens
  misc_RNA (1)...(19): siRNA sense strand
gugauaaacacucaagaag

SEQ ID NO: 2027629 - RNA, 19 nt, Homo sapiens
  misc_RNA (1)...(19): siRNA sense strand
aagaagagcaggauuucau

SEQ ID NO: 2027630 - RNA, 19 nt, Homo sapiens
  misc_RNA (1)...(19): siRNA sense strand
cuucggaaaucacuuaugc

SEQ ID NO: 2027631 - RNA, 19 nt, Homo sapiens
  misc_RNA (1)...(19): siRNA sense strand
ccagaaggucagcgacauu

SEQ ID NO: 2027632 - RNA, 19 nt, Homo sapiens
  misc_RNA (1)...(19): siRNA sense strand
ucaagaagagcaggauuuc

SEQ ID NO: 2027633 - RNA, 19 nt, Homo sapiens
  misc_RNA (1)...(19): siRNA sense strand
cuggaaugauguuaauugu

SEQ ID NO: 2027634 - RNA, 19 nt, Homo sapiens
  misc_RNA (1)...(19): siRNA sense strand
ccaaugagcgcugcguugu

SEQ ID NO: 2027635 - RNA, 19 nt, Homo sapiens
  misc_RNA (1)...(19): siRNA sense strand
agaauuggaagucauuuag

SEQ ID NO: 2027636 - RNA, 19 nt, Homo sapiens
  misc_RNA (1)...(19): siRNA sense strand
gguccucaaaggucaguuu

SEQ ID NO: 2027637 - RNA, 19 nt, Homo sapiens
  misc_RNA (1)...(19): siRNA sense strand
aaggucaguuugugagaug

SEQ ID NO: 2027638 - RNA, 19 nt, Homo sapiens
  misc_RNA (1)...(19): siRNA sense strand
ggauuucaucuuccagaau

SEQ ID NO: 2027639 - RNA, 19 nt, Homo sapiens
  misc_RNA (1)...(19): siRNA sense strand
cagaaggucagcgacauug

SEQ ID NO: 2027640 - RNA, 19 nt, Homo sapiens
  misc_RNA (1)...(19): siRNA sense strand
gagcuguugcccaaagaau

SEQ ID NO: 2027641 - RNA, 19 nt, Homo sapiens
  misc_RNA (1)...(19): siRNA sense strand
ugcaagaagaaucugcuua

SEQ ID NO: 2027642 - RNA, 19 nt, Homo sapiens
  misc_RNA (1)...(19): siRNA sense strand
aaaggucaguuugugagau

SEQ ID NO: 2027643 - RNA, 19 nt, Homo sapiens
  misc_RNA (1)...(19): siRNA sense strand
gcccagugaucccaaugag

SEQ ID NO: 2027644 - RNA, 19 nt, Homo sapiens
  misc_RNA (1)...(19): siRNA sense strand
cucaagaagagcaggauuu

SEQ ID NO: 2027645 - RNA, 19 nt, Homo sapiens
  misc_RNA (1)...(19): siRNA sense strand
gaaucugcaagaagaaucu

SEQ ID NO: 2027646 - RNA, 19 nt, Homo sapiens
  misc_RNA (1)...(19): siRNA sense strand
caagaagagcaggauuuca

SEQ ID NO: 2027647 - RNA, 19 nt, Homo sapiens
  misc_RNA (1)...(19): siRNA sense strand
ggagcuguugcccaaagaa

SEQ ID NO: 2027648 - RNA, 19 nt, Homo sapiens
  misc_RNA (1)...(19): siRNA sense strand
ccacgugagcccagugauc

SEQ ID NO: 2027649 - RNA, 19 nt, Homo sapiens
  misc_RNA (1)...(19): siRNA sense strand
gcaucaacacagccucuuc

SEQ ID NO: 2027650 - RNA, 19 nt, Homo sapiens
  misc_RNA (1)...(19): siRNA sense strand
aggauuucaucuuccagaa

SEQ ID NO: 2027651 - RNA, 19 nt, Homo sapiens
  misc_RNA (1)...(19): siRNA sense strand
gugagaugaugaagaucca

SEQ ID NO: 2027652 - RNA, 19 nt, Homo sapiens
  misc_RNA (1)...(19): siRNA sense strand
gagcgcugcguugugcuaa

SEQ ID NO: 2027653 - RNA, 19 nt, Homo sapiens
  misc_RNA (1)...(19): siRNA sense strand
ggaaaucacuuaugcugaa

SEQ ID NO: 2027654 - RNA, 19 nt, Homo sapiens
  misc_RNA (1)...(19): siRNA sense strand
ggaaugauguuaauugucu

SEQ ID NO: 2027655 - RNA, 19 nt, Homo sapiens
  misc_RNA (1)...(19): siRNA sense strand
gauaaacacucaagaagag

SEQ ID NO: 2027656 - RNA, 19 nt, Homo sapiens
  misc_RNA (1)...(19): siRNA sense strand
gagaaggacugugcuagaa

SEQ ID NO: 2027657 - RNA, 19 nt, Homo sapiens
  misc_RNA (1)...(19): siRNA sense strand
gaaggacugugcuagaaug

SEQ ID NO: 2027658 - RNA, 19 nt, Homo sapiens
  misc_RNA (1)...(19): siRNA sense strand
gcaagaagaaucugcuuau

SEQ ID NO: 2027659 - RNA, 19 nt, Homo sapiens
  misc_RNA (1)...(19): siRNA sense strand
caagaagaaucugcuuauu

SEQ ID NO: 2027660 - RNA, 19 nt, Homo sapiens
  misc_RNA (1)...(19): siRNA sense strand
gcaauggguugaucagaca

SEQ ID NO: 2027661 - RNA, 19 nt, Homo sapiens
  misc_RNA (1)...(19): siRNA sense strand
gaucagacaccauacaaug

SEQ ID NO: 2027662 - RNA, 19 nt, Homo sapiens
  misc_RNA (1)...(19): siRNA sense strand
ugaugaagauccacuuaug

SEQ ID NO: 2027663 - RNA, 19 nt, Homo sapiens
  misc_RNA (1)...(19): siRNA sense strand
gaugaugaagauccacuua

SEQ ID NO: 2027664 - RNA, 19 nt, Homo sapiens
  misc_RNA (1)...(19): siRNA sense strand
caaagaauuggaagucauu

SEQ ID NO: 2027665 - RNA, 19 nt, Homo sapiens
  misc_RNA (1)...(19): siRNA sense strand
gaugaagauccacuuauga

SEQ ID NO: 2027666 - RNA, 19 nt, Homo sapiens
  misc_RNA (1)...(19): siRNA sense strand
gggcuggaaugauguuaau

SEQ ID NO: 2027667 - RNA, 19 nt, Homo sapiens
  misc_RNA (1)...(19): siRNA sense strand
gcucucagauccagaaggu

SEQ ID NO: 2027668 - RNA, 19 nt, Homo sapiens
  misc_RNA (1)...(19): siRNA sense strand
gcuacuuuauuucuacuga

SEQ ID NO: 2027669 - RNA, 19 nt, Homo sapiens
  misc_RNA (1)...(19): siRNA sense strand
ggugauaaacacucaagaa

SEQ ID NO: 2027670 - RNA, 19 nt, Homo sapiens
  misc_RNA (1)...(19): siRNA sense strand
gcuggaaugauguuaauug

SEQ ID NO: 2027671 - RNA, 19 nt, Homo sapiens
  misc_RNA (1)...(19): siRNA sense strand
uccaacugcuacuuuauuu

SEQ ID NO: 2027672 - RNA, 19 nt, Homo sapiens
  misc_RNA (1)...(19): siRNA sense strand
gcugcguugugcuaaauuu

SEQ ID NO: 2027673 - RNA, 19 nt, Homo sapiens
  misc_RNA (1)...(19): siRNA sense strand
gaaaucacuuaugcugaag

SEQ ID NO: 2027674 - RNA, 19 nt, Homo sapiens
  misc_RNA (1)...(19): siRNA sense strand
caacugcuacuuuauuucu

SEQ ID NO: 2027675 - RNA, 19 nt, Homo sapiens
  misc_RNA (1)...(19): siRNA sense strand
gcuguugcccaaagaauug

SEQ ID NO: 2027676 - RNA, 19 nt, Homo sapiens
  misc_RNA (1)...(19): siRNA sense strand
ugauaaacacucaagaaga

SEQ ID NO: 2027677 - RNA, 19 nt, Homo sapiens
  misc_RNA (1)...(19): siRNA sense strand
ggguugaucagacaccaua

SEQ ID NO: 2027678 - RNA, 19 nt, Homo sapiens
  misc_RNA (1)...(19): siRNA sense strand
cagacaccauacaaugaaa

SEQ ID NO: 2027679 - RNA, 19 nt, Homo sapiens
  misc_RNA (1)...(19): siRNA sense strand
ucagacaccauacaaugaa

SEQ ID NO: 2027680 - RNA, 19 nt, Homo sapiens
  misc_RNA (1)...(19): siRNA sense strand
gcgcugcguugugcuaaau

SEQ ID NO: 2027681 - RNA, 19 nt, Homo sapiens
  misc_RNA (1)...(19): siRNA sense strand
agagcaggauuucaucuuc

SEQ ID NO: 2027682 - RNA, 19 nt, Homo sapiens
  misc_RNA (1)...(19): siRNA sense strand
guaaaucacccaaaagaug

SEQ ID NO: 2027683 - RNA, 19 nt, Homo sapiens
  misc_RNA (1)...(19): siRNA sense strand
uuugugagaugaugaagau

SEQ ID NO: 2027684 - RNA, 19 nt, Homo sapiens
  misc_RNA (1)...(19): siRNA sense strand
ugagaaggacugugcuaga

SEQ ID NO: 2027685 - RNA, 19 nt, Homo sapiens
  misc_RNA (1)...(19): siRNA sense strand
gaagagcaggauuucaucu

SEQ ID NO: 2027686 - RNA, 19 nt, Homo sapiens
  misc_RNA (1)...(19): siRNA sense strand
ggcaagacagugagaagga

SEQ ID NO: 2027687 - RNA, 19 nt, Homo sapiens
  misc_RNA (1)...(19): siRNA sense strand
gaauuggaagucauuuagu

SEQ ID NO: 2027688 - RNA, 19 nt, Homo sapiens
  misc_RNA (1)...(19): siRNA sense strand
caccauacaaugaaaguuc

SEQ ID NO: 2027689 - RNA, 19 nt, Homo sapiens
  misc_RNA (1)...(19): siRNA sense strand
gugauaaacacucaagaag

SEQ ID NO: 2027690 - RNA, 19 nt, Homo sapiens
  misc_RNA (1)...(19): siRNA sense strand
aagaagagcaggauuucau

SEQ ID NO: 2027691 - RNA, 19 nt, Homo sapiens
  misc_RNA (1)...(19): siRNA sense strand
cuucggaaaucacuuaugc

SEQ ID NO: 2027692 - RNA, 19 nt, Homo sapiens
  misc_RNA (1)...(19): siRNA sense strand
ccagaaggucagcgacauu

SEQ ID NO: 2027693 - RNA, 19 nt, Homo sapiens
  misc_RNA (1)...(19): siRNA sense strand
ucaagaagagcaggauuuc

SEQ ID NO: 2027694 - RNA, 19 nt, Homo sapiens
  misc_RNA (1)...(19): siRNA sense strand
cuggaaugauguuaauugu

SEQ ID NO: 2027695 - RNA, 19 nt, Homo sapiens
  misc_RNA (1)...(19): siRNA sense strand
ccaaugagcgcugcguugu

SEQ ID NO: 2027696 - RNA, 19 nt, Homo sapiens
  misc_RNA (1)...(19): siRNA sense strand
agaauuggaagucauuuag

SEQ ID NO: 2027697 - RNA, 19 nt, Homo sapiens
  misc_RNA (1)...(19): siRNA sense strand
gguccucaaaggucaguuu

SEQ ID NO: 2027698 - RNA, 19 nt, Homo sapiens
  misc_RNA (1)...(19): siRNA sense strand
aaggucaguuugugagaug

SEQ ID NO: 2027699 - RNA, 19 nt, Homo sapiens
  misc_RNA (1)...(19): siRNA sense strand
ggauuucaucuuccagaau

SEQ ID NO: 2027700 - RNA, 19 nt, Homo sapiens
  misc_RNA (1)...(19): siRNA sense strand
cagaaggucagcgacauug

SEQ ID NO: 2027701 - RNA, 19 nt, Homo sapiens
  misc_RNA (1)...(19): siRNA sense strand
gagcuguugcccaaagaau

SEQ ID NO: 2027702 - RNA, 19 nt, Homo sapiens
  misc_RNA (1)...(19): siRNA sense strand
ugcaagaagaaucugcuua

SEQ ID NO: 2027703 - RNA, 19 nt, Homo sapiens
  misc_RNA (1)...(19): siRNA sense strand
aaaggucaguuugugagau

SEQ ID NO: 2027704 - RNA, 19 nt, Homo sapiens
  misc_RNA (1)...(19): siRNA sense strand
gcccagugaucccaaugag

SEQ ID NO: 2027705 - RNA, 19 nt, Homo sapiens
  misc_RNA (1)...(19): siRNA sense strand
cucaagaagagcaggauuu

SEQ ID NO: 2027706 - RNA, 19 nt, Homo sapiens
  misc_RNA (1)...(19): siRNA sense strand
gaaucugcaagaagaaucu

SEQ ID NO: 2027707 - RNA, 19 nt, Homo sapiens
  misc_RNA (1)...(19): siRNA sense strand
caagaagagcaggauuuca

SEQ ID NO: 2027708 - RNA, 19 nt, Homo sapiens
  misc_RNA (1)...(19): siRNA sense strand
ggagcuguugcccaaagaa

SEQ ID NO: 2027709 - RNA, 19 nt, Homo sapiens
  misc_RNA (1)...(19): siRNA sense strand
ccacgugagcccagugauc

SEQ ID NO: 2027710 - RNA, 19 nt, Homo sapiens
  misc_RNA (1)...(19): siRNA sense strand
gcaucaacacagccucuuc

SEQ ID NO: 2027711 - RNA, 19 nt, Homo sapiens
  misc_RNA (1)...(19): siRNA sense strand
aggauuucaucuuccagaa

SEQ ID NO: 2027712 - RNA, 19 nt, Homo sapiens
  misc_RNA (1)...(19): siRNA sense strand
gugagaugaugaagaucca

SEQ ID NO: 2027713 - RNA, 19 nt, Homo sapiens
  misc_RNA (1)...(19): siRNA sense strand
gagcgcugcguugugcuaa

SEQ ID NO: 2027714 - RNA, 19 nt, Homo sapiens
  misc_RNA (1)...(19): siRNA sense strand
gagcagaacuuuauuauuc

SEQ ID NO: 2027715 - RNA, 19 nt, Homo sapiens
  misc_RNA (1)...(19): siRNA sense strand
gcugauaccuucgguuauu

SEQ ID NO: 2027716 - RNA, 19 nt, Homo sapiens
  misc_RNA (1)...(19): siRNA sense strand
ucaaaugcaucaaagagaa

SEQ ID NO: 2027717 - RNA, 19 nt, Homo sapiens
  misc_RNA (1)...(19): siRNA sense strand
gaagcaaguaggauuugua

SEQ ID NO: 2027718 - RNA, 19 nt, Homo sapiens
  misc_RNA (1)...(19): siRNA sense strand
gcacggaagcugagcagaa

SEQ ID NO: 2027719 - RNA, 19 nt, Homo sapiens
  misc_RNA (1)...(19): siRNA sense strand
uaaaauaccuggaacaaca

SEQ ID NO: 2027720 - RNA, 19 nt, Homo sapiens
  misc_RNA (1)...(19): siRNA sense strand
cagcugauaccuucgguua

SEQ ID NO: 2027721 - RNA, 19 nt, Homo sapiens
  misc_RNA (1)...(19): siRNA sense strand
gcaaagcucaaaugcauca

SEQ ID NO: 2027722 - RNA, 19 nt, Homo sapiens
  misc_RNA (1)...(19): siRNA sense strand
gcaaguaggauuuguaaaa

SEQ ID NO: 2027723 - RNA, 19 nt, Homo sapiens
  misc_RNA (1)...(19): siRNA sense strand
gaagcugagcagaacuuua

SEQ ID NO: 2027724 - RNA, 19 nt, Homo sapiens
  misc_RNA (1)...(19): siRNA sense strand
ugauguuccuuguaacuuu

SEQ ID NO: 2027725 - RNA, 19 nt, Homo sapiens
  misc_RNA (1)...(19): siRNA sense strand
gggagcaccuggaacuguu

SEQ ID NO: 2027726 - RNA, 19 nt, Homo sapiens
  misc_RNA (1)...(19): siRNA sense strand
ggagaaaacuguguuguuc

SEQ ID NO: 2027727 - RNA, 19 nt, Homo sapiens
  misc_RNA (1)...(19): siRNA sense strand
gaaugaacccgacaacucu

SEQ ID NO: 2027728 - RNA, 19 nt, Homo sapiens
  misc_RNA (1)...(19): siRNA sense strand
gcugagcagaacuuuauua

SEQ ID NO: 2027729 - RNA, 19 nt, Homo sapiens
  misc_RNA (1)...(19): siRNA sense strand
ggagagccuuccaguccaa

SEQ ID NO: 2027730 - RNA, 19 nt, Homo sapiens
  misc_RNA (1)...(19): siRNA sense strand
gauguuccuuguaacuuug

SEQ ID NO: 2027731 - RNA, 19 nt, Homo sapiens
  misc_RNA (1)...(19): siRNA sense strand
caaguuguuuggugacuca

SEQ ID NO: 2027732 - RNA, 19 nt, Homo sapiens
  misc_RNA (1)...(19): siRNA sense strand
gaagggagcaccuggaacu

SEQ ID NO: 2027733 - RNA, 19 nt, Homo sapiens
  misc_RNA (1)...(19): siRNA sense strand
agaguauucuggcauaaga

SEQ ID NO: 2027734 - RNA, 19 nt, Homo sapiens
  misc_RNA (1)...(19): siRNA sense strand
aaacuguguuguucuuguu

SEQ ID NO: 2027735 - RNA, 19 nt, Homo sapiens
  misc_RNA (1)...(19): siRNA sense strand
caucaaagagaaaucagaa

SEQ ID NO: 2027736 - RNA, 19 nt, Homo sapiens
  misc_RNA (1)...(19): siRNA sense strand
gaacuguuguccuauugac

SEQ ID NO: 2027737 - RNA, 19 nt, Homo sapiens
  misc_RNA (1)...(19): siRNA sense strand
aaaugggccuggaaugaug

SEQ ID NO: 2027738 - RNA, 19 nt, Homo sapiens
  misc_RNA (1)...(19): siRNA sense strand
cacaggagugcacaaguua

SEQ ID NO: 2027739 - RNA, 19 nt, Homo sapiens
  misc_RNA (1)...(19): siRNA sense strand
aagcugagcagaacuuuau

SEQ ID NO: 2027740 - RNA, 19 nt, Homo sapiens
  misc_RNA (1)...(19): siRNA sense strand
gggcugagagugaaaggaa

SEQ ID NO: 2027741 - RNA, 19 nt, Homo sapiens
  misc_RNA (1)...(19): siRNA sense strand
caaaugcaucaaagagaaa

SEQ ID NO: 2027742 - RNA, 19 nt, Homo sapiens
  misc_RNA (1)...(19): siRNA sense strand
gagaugagaaugccaaagg

SEQ ID NO: 2027743 - RNA, 19 nt, Homo sapiens
  misc_RNA (1)...(19): siRNA sense strand
ggacuuagagaugagaaug

SEQ ID NO: 2027744 - RNA, 19 nt, Homo sapiens
  misc_RNA (1)...(19): siRNA sense strand
gauaaaugggccuggaaug

SEQ ID NO: 2027745 - RNA, 19 nt, Homo sapiens
  misc_RNA (1)...(19): siRNA sense strand
gacgugggcugagagugaa

SEQ ID NO: 2027746 - RNA, 19 nt, Homo sapiens
  misc_RNA (1)...(19): siRNA sense strand
aagcaaguaggauuuguaa

SEQ ID NO: 2027747 - RNA, 19 nt, Homo sapiens
  misc_RNA (1)...(19): siRNA sense strand
gcagaacuuuauuauucag

SEQ ID NO: 2027748 - RNA, 19 nt, Homo sapiens
  misc_RNA (1)...(19): siRNA sense strand
uaaaugggccuggaaugau

SEQ ID NO: 2027749 - RNA, 19 nt, Homo sapiens
  misc_RNA (1)...(19): siRNA sense strand
gcucaaaugcaucaaagag

SEQ ID NO: 2027750 - RNA, 19 nt, Homo sapiens
  misc_RNA (1)...(19): siRNA sense strand
agacgugggcugagaguga

SEQ ID NO: 2027751 - RNA, 19 nt, Homo sapiens
  misc_RNA (1)...(19): siRNA sense strand
ggaacuguuguccuauuga

SEQ ID NO: 2027752 - RNA, 19 nt, Homo sapiens
  misc_RNA (1)...(19): siRNA sense strand
caaagagaaaucagaacug

SEQ ID NO: 2027753 - RNA, 19 nt, Homo sapiens
  misc_RNA (1)...(19): siRNA sense strand
guuguuuggugacucauca

SEQ ID NO: 2027754 - RNA, 19 nt, Homo sapiens
  misc_RNA (1)...(19): siRNA sense strand
auaaaugggccuggaauga

SEQ ID NO: 2027755 - RNA, 19 nt, Homo sapiens
  misc_RNA (1)...(19): siRNA sense strand
uggaacuguuguccuauug

SEQ ID NO: 2027756 - RNA, 19 nt, Homo sapiens
  misc_RNA (1)...(19): siRNA sense strand
caaguuagagcaccaugca

SEQ ID NO: 2027757 - RNA, 19 nt, Homo sapiens
  misc_RNA (1)...(19): siRNA sense strand
gcaucaaagagaaaucaga

SEQ ID NO: 2027758 - RNA, 19 nt, Homo sapiens
  misc_RNA (1)...(19): siRNA sense strand
agaaugaacccgacaacuc

SEQ ID NO: 2027759 - RNA, 19 nt, Homo sapiens
  misc_RNA (1)...(19): siRNA sense strand
gaaugauguuccuuguaac

SEQ ID NO: 2027760 - RNA, 19 nt, Homo sapiens
  misc_RNA (1)...(19): siRNA sense strand
acuguguuguucuuguuua

SEQ ID NO: 2027761 - RNA, 19 nt, Homo sapiens
  misc_RNA (1)...(19): siRNA sense strand
ggaagcugagcagaacuuu

SEQ ID NO: 2027762 - RNA, 19 nt, Homo sapiens
  misc_RNA (1)...(19): siRNA sense strand
aagcucaaaugcaucaaag

SEQ ID NO: 2027763 - RNA, 19 nt, Homo sapiens
  misc_RNA (1)...(19): siRNA sense strand
gagagugaaaggaacuguu

SEQ ID NO: 2027764 - RNA, 19 nt, Homo sapiens
  misc_RNA (1)...(19): siRNA sense strand
cuggaacuguuguccuauu

SEQ ID NO: 2027765 - RNA, 19 nt, Homo sapiens
  misc_RNA (1)...(19): siRNA sense strand
ucaaagagaaaucagaacu

SEQ ID NO: 2027766 - RNA, 19 nt, Homo sapiens
  misc_RNA (1)...(19): siRNA sense strand
ccuuguaacuuugaagcaa

SEQ ID NO: 2027767 - RNA, 19 nt, Homo sapiens
  misc_RNA (1)...(19): siRNA sense strand
ugaagcaaguaggauuugu

SEQ ID NO: 2027768 - RNA, 19 nt, Homo sapiens
  misc_RNA (1)...(19): siRNA sense strand
caggagugcacaaguuaga

SEQ ID NO: 2027769 - RNA, 19 nt, Homo sapiens
  misc_RNA (1)...(19): siRNA sense strand
gguuauugcuguaguuuuc

SEQ ID NO: 2027770 - RNA, 19 nt, Homo sapiens
  misc_RNA (1)...(19): siRNA sense strand
uuauucaguuucuggauag

SEQ ID NO: 2027771 - RNA, 19 nt, Homo sapiens
  misc_RNA (1)...(19): siRNA sense strand
caacugcuauuuuccucuu

SEQ ID NO: 2027772 - RNA, 19 nt, Homo sapiens
  misc_RNA (1)...(19): siRNA sense strand
aacaagacgugggcugaga

SEQ ID NO: 2027773 - RNA, 19 nt, Homo sapiens
  misc_RNA (1)...(19): siRNA sense strand
gcaccaugcaaagcucaaa

SEQ ID NO: 2027774 - RNA, 19 nt, Homo sapiens
  misc_RNA (1)...(19): siRNA sense strand
uaacccacgcagaguauuc

SEQ ID NO: 2027775 - RNA, 19 nt, Homo sapiens
  misc_RNA (1)...(19): siRNA sense strand
ggaccagacgccauuuaac

SEQ ID NO: 2027776 - RNA, 19 nt, Homo sapiens
  misc_RNA (1)...(19): siRNA sense strand
uggaccagacgccauuuaa

SEQ ID NO: 2027777 - RNA, 19 nt, Homo sapiens
  misc_RNA (1)...(19): siRNA sense strand
guggaccagacgccauuua

SEQ ID NO: 2027778 - RNA, 19 nt, Homo sapiens
  misc_RNA (1)...(19): siRNA sense strand
cuauuuccuuggacuuaga

SEQ ID NO: 2027779 - RNA, 19 nt, Homo sapiens
  misc_RNA (1)...(19): siRNA sense strand
ucaucuuacuucucagugu

SEQ ID NO: 2027780 - RNA, 19 nt, Homo sapiens
  misc_RNA (1)...(19): siRNA sense strand
accuggaacuguuguccua

SEQ ID NO: 2027781 - RNA, 19 nt, Homo sapiens
  misc_RNA (1)...(19): siRNA sense strand
gcuuuccuauuuccuugga

SEQ ID NO: 2027782 - RNA, 19 nt, Homo sapiens
  misc_RNA (1)...(19): siRNA sense strand
uagacggcuuuccuauuuc

SEQ ID NO: 2027783 - RNA, 19 nt, Homo sapiens
  misc_RNA (1)...(19): siRNA sense strand
aguuagagcaccaugcaaa

SEQ ID NO: 2027784 - RNA, 19 nt, Homo sapiens
  misc_RNA (1)...(19): siRNA sense strand
gaccagacgccauuuaacc

SEQ ID NO: 2027785 - RNA, 19 nt, Homo sapiens
  misc_RNA (1)...(19): siRNA sense strand
cacggaagcugagcagaac

SEQ ID NO: 2027786 - RNA, 19 nt, Homo sapiens
  misc_RNA (1)...(19): siRNA sense strand
aaagcucaaaugcaucaaa

SEQ ID NO: 2027787 - RNA, 19 nt, Homo sapiens
  misc_RNA (1)...(19): siRNA sense strand
cugauaccuucgguuauug

SEQ ID NO: 2027788 - RNA, 19 nt, Homo sapiens
  misc_RNA (1)...(19): siRNA sense strand
ggaaugauguaaccuguuu

SEQ ID NO: 2027789 - RNA, 19 nt, Homo sapiens
  misc_RNA (1)...(19): siRNA sense strand
ucacagagcucuccugcua

SEQ ID NO: 2027790 - RNA, 19 nt, Homo sapiens
  misc_RNA (1)...(19): siRNA sense strand
uaaccuguuuccucaauua

SEQ ID NO: 2027791 - RNA, 19 nt, Homo sapiens
  misc_RNA (1)...(19): siRNA sense strand
gaaacacaaugcacagaga

SEQ ID NO: 2027792 - RNA, 19 nt, Homo sapiens
  misc_RNA (1)...(19): siRNA sense strand
caagaauuguuguccauug

SEQ ID NO: 2027793 - RNA, 19 nt, Homo sapiens
  misc_RNA (1)...(19): siRNA sense strand
ucaaaccugugaugagaaa

SEQ ID NO: 2027794 - RNA, 19 nt, Homo sapiens
  misc_RNA (1)...(19): siRNA sense strand
gaaaugguaggaauaaauc

SEQ ID NO: 2027795 - RNA, 19 nt, Homo sapiens
  misc_RNA (1)...(19): siRNA sense strand
ccuguuuccucaauuauuu

SEQ ID NO: 2027796 - RNA, 19 nt, Homo sapiens
  misc_RNA (1)...(19): siRNA sense strand
gagcucuccugcuacaauu

SEQ ID NO: 2027797 - RNA, 19 nt, Homo sapiens
  misc_RNA (1)...(19): siRNA sense strand
ccauugaacugggaauauu

SEQ ID NO: 2027798 - RNA, 19 nt, Homo sapiens
  misc_RNA (1)...(19): siRNA sense strand
caagaaaccuaaaaugaga

SEQ ID NO: 2027799 - RNA, 19 nt, Homo sapiens
  misc_RNA (1)...(19): siRNA sense strand
cagguucagucaagaauug

SEQ ID NO: 2027800 - RNA, 19 nt, Homo sapiens
  misc_RNA (1)...(19): siRNA sense strand
ggaauaaauccuuugaaca

SEQ ID NO: 2027801 - RNA, 19 nt, Homo sapiens
  misc_RNA (1)...(19): siRNA sense strand
gaauuccuuuccuacaaga

SEQ ID NO: 2027802 - RNA, 19 nt, Homo sapiens
  misc_RNA (1)...(19): siRNA sense strand
caaagucucugagcuucug

SEQ ID NO: 2027803 - RNA, 19 nt, Homo sapiens
  misc_RNA (1)...(19): siRNA sense strand
caccagauguguugugaca

SEQ ID NO: 2027804 - RNA, 19 nt, Homo sapiens
  misc_RNA (1)...(19): siRNA sense strand
aagaauuguuguccauuga

SEQ ID NO: 2027805 - RNA, 19 nt, Homo sapiens
  misc_RNA (1)...(19): siRNA sense strand
ggacugugccaccaugaga

SEQ ID NO: 2027806 - RNA, 19 nt, Homo sapiens
  misc_RNA (1)...(19): siRNA sense strand
ugacaaagucucugagcuu

SEQ ID NO: 2027807 - RNA, 19 nt, Homo sapiens
  misc_RNA (1)...(19): siRNA sense strand
ggaugcuucucuucccaaa

SEQ ID NO: 2027808 - RNA, 19 nt, Homo sapiens
  misc_RNA (1)...(19): siRNA sense strand
uuucaaaccugugaugaga

SEQ ID NO: 2027809 - RNA, 19 nt, Homo sapiens
  misc_RNA (1)...(19): siRNA sense strand
ugugacauuucgcaucuuu

SEQ ID NO: 2027810 - RNA, 19 nt, Homo sapiens
  misc_RNA (1)...(19): siRNA sense strand
gaucagguucagucaagaa

SEQ ID NO: 2027811 - RNA, 19 nt, Homo sapiens
  misc_RNA (1)...(19): siRNA sense strand
ggacggcacaccuuugaca

SEQ ID NO: 2027812 - RNA, 19 nt, Homo sapiens
  misc_RNA (1)...(19): siRNA sense strand
guaaccuguuuccucaauu

SEQ ID NO: 2027813 - RNA, 19 nt, Homo sapiens
  misc_RNA (1)...(19): siRNA sense strand
ucccaaauguucuuaugga

SEQ ID NO: 2027814 - RNA, 19 nt, Homo sapiens
  misc_RNA (1)...(19): siRNA sense strand
gaauuguuguccauugaac

SEQ ID NO: 2027815 - RNA, 19 nt, Homo sapiens
  misc_RNA (1)...(19): siRNA sense strand
gugaaaugguaggaauaaa

SEQ ID NO: 2027816 - RNA, 19 nt, Homo sapiens
  misc_RNA (1)...(19): siRNA sense strand
caauccagcugcuacuucu

SEQ ID NO: 2027817 - RNA, 19 nt, Homo sapiens
  misc_RNA (1)...(19): siRNA sense strand
gcacagagagaggaugcuu

SEQ ID NO: 2027818 - RNA, 19 nt, Homo sapiens
  misc_RNA (1)...(19): siRNA sense strand
acagagcucuccugcuaca

SEQ ID NO: 2027819 - RNA, 19 nt, Homo sapiens
  misc_RNA (1)...(19): siRNA sense strand
guugugacauuucgcaucu

SEQ ID NO: 2027820 - RNA, 19 nt, Homo sapiens
  misc_RNA (1)...(19): siRNA sense strand
augcuucucuucccaaaug

SEQ ID NO: 2027821 - RNA, 19 nt, Homo sapiens
  misc_RNA (1)...(19): siRNA sense strand
ugacauuucgcaucuuuca

SEQ ID NO: 2027822 - RNA, 19 nt, Homo sapiens
  misc_RNA (1)...(19): siRNA sense strand
gaacaaaggaaaaucucuu

SEQ ID NO: 2027823 - RNA, 19 nt, Homo sapiens
  misc_RNA (1)...(19): siRNA sense strand
acauuucgcaucuuucaaa

SEQ ID NO: 2027824 - RNA, 19 nt, Homo sapiens
  misc_RNA (1)...(19): siRNA sense strand
cugcuacaauuauggauca

SEQ ID NO: 2027825 - RNA, 19 nt, Homo sapiens
  misc_RNA (1)...(19): siRNA sense strand
gaacugggaauauuuucaa

SEQ ID NO: 2027826 - RNA, 19 nt, Homo sapiens
  misc_RNA (1)...(19): siRNA sense strand
uguaaccuguuuccucaau

SEQ ID NO: 2027827 - RNA, 19 nt, Homo sapiens
  misc_RNA (1)...(19): siRNA sense strand
uggaucagguucagucaag

SEQ ID NO: 2027828 - RNA, 19 nt, Homo sapiens
  misc_RNA (1)...(19): siRNA sense strand
cacaggaggagcaggaauu

SEQ ID NO: 2027829 - RNA, 19 nt, Homo sapiens
  misc_RNA (1)...(19): siRNA sense strand
cauugaacugggaauauuu

SEQ ID NO: 2027830 - RNA, 19 nt, Homo sapiens
  misc_RNA (1)...(19): siRNA sense strand
gucaagaauuguuguccau

SEQ ID NO: 2027831 - RNA, 19 nt, Homo sapiens
  misc_RNA (1)...(19): siRNA sense strand
ggaucagguucagucaaga

SEQ ID NO: 2027832 - RNA, 19 nt, Homo sapiens
  misc_RNA (1)...(19): siRNA sense strand
gcucuccugcuacaauuau

SEQ ID NO: 2027833 - RNA, 19 nt, Homo sapiens
  misc_RNA (1)...(19): siRNA sense strand
ugugaaaugguaggaauaa

SEQ ID NO: 2027834 - RNA, 19 nt, Homo sapiens
  misc_RNA (1)...(19): siRNA sense strand
gagcccaacaacauagcua

SEQ ID NO: 2027835 - RNA, 19 nt, Homo sapiens
  misc_RNA (1)...(19): siRNA sense strand
uaccugagaauuucacaga

SEQ ID NO: 2027836 - RNA, 19 nt, Homo sapiens
  misc_RNA (1)...(19): siRNA sense strand
cucagugccuguuucauca

SEQ ID NO: 2027837 - RNA, 19 nt, Homo sapiens
  misc_RNA (1)...(19): siRNA sense strand
cuaaaucaucugaaacaca

SEQ ID NO: 2027838 - RNA, 19 nt, Homo sapiens
  misc_RNA (1)...(19): siRNA sense strand
caccauuuccugggcguua

SEQ ID NO: 2027839 - RNA, 19 nt, Homo sapiens
  misc_RNA (1)...(19): siRNA sense strand
guggacggcacaccuuuga

SEQ ID NO: 2027840 - RNA, 19 nt, Homo sapiens
  misc_RNA (1)...(19): siRNA sense strand
guucagucaagaauuguug

SEQ ID NO: 2027841 - RNA, 19 nt, Homo sapiens
  misc_RNA (1)...(19): siRNA sense strand
uuccugggcguuaaguuua

SEQ ID NO: 2027842 - RNA, 19 nt, Homo sapiens
  misc_RNA (1)...(19): siRNA sense strand
cuucccaaauguucuuaug

SEQ ID NO: 2027843 - RNA, 19 nt, Homo sapiens
  misc_RNA (1)...(19): siRNA sense strand
ucucagugccuguuucauc

SEQ ID NO: 2027844 - RNA, 19 nt, Homo sapiens
  misc_RNA (1)...(19): siRNA sense strand
uuugugaaaugguaggaau

SEQ ID NO: 2027845 - RNA, 19 nt, Homo sapiens
  misc_RNA (1)...(19): siRNA sense strand
ucaauccagcugcuacuuc

SEQ ID NO: 2027846 - RNA, 19 nt, Homo sapiens
  misc_RNA (1)...(19): siRNA sense strand
gaaagaagcggcagaauug

SEQ ID NO: 2027847 - RNA, 19 nt, Homo sapiens
  misc_RNA (1)...(19): siRNA sense strand
gaauggcacuucacgguua

SEQ ID NO: 2027848 - RNA, 19 nt, Homo sapiens
  misc_RNA (1)...(19): siRNA sense strand
gaauauaucuggcaaacga

SEQ ID NO: 2027849 - RNA, 19 nt, Homo sapiens
  misc_RNA (1)...(19): siRNA sense strand
gaagucaauucaucuggaa

SEQ ID NO: 2027850 - RNA, 19 nt, Homo sapiens
  misc_RNA (1)...(19): siRNA sense strand
cagagaagguugucuacuu

SEQ ID NO: 2027851 - RNA, 19 nt, Homo sapiens
  misc_RNA (1)...(19): siRNA sense strand
gcucuuauauuccgacgaa

SEQ ID NO: 2027852 - RNA, 19 nt, Homo sapiens
  misc_RNA (1)...(19): siRNA sense strand
gaacuggcuaggcaaauaa

SEQ ID NO: 2027853 - RNA, 19 nt, Homo sapiens
  misc_RNA (1)...(19): siRNA sense strand
aagccaagcugaccaagaa

SEQ ID NO: 2027854 - RNA, 19 nt, Homo sapiens
  misc_RNA (1)...(19): siRNA sense strand
caagauuucuguugugaag

SEQ ID NO: 2027855 - RNA, 19 nt, Homo sapiens
  misc_RNA (1)...(19): siRNA sense strand
ugauauaccuacaacauuc

SEQ ID NO: 2027856 - RNA, 19 nt, Homo sapiens
  misc_RNA (1)...(19): siRNA sense strand
gauguccuguugccuuuaa

SEQ ID NO: 2027857 - RNA, 19 nt, Homo sapiens
  misc_RNA (1)...(19): siRNA sense strand
ugaaagaagcggcagaauu

SEQ ID NO: 2027858 - RNA, 19 nt, Homo sapiens
  misc_RNA (1)...(19): siRNA sense strand
gaagaguccggcuguuaaa

SEQ ID NO: 2027859 - RNA, 19 nt, Homo sapiens
  misc_RNA (1)...(19): siRNA sense strand
agaacuggcuaggcaaaua

SEQ ID NO: 2027860 - RNA, 19 nt, Homo sapiens
  misc_RNA (1)...(19): siRNA sense strand
gaguauaaggacagcauua

SEQ ID NO: 2027861 - RNA, 19 nt, Homo sapiens
  misc_RNA (1)...(19): siRNA sense strand
caagagacaaccacacuga

SEQ ID NO: 2027862 - RNA, 19 nt, Homo sapiens
  misc_RNA (1)...(19): siRNA sense strand
gaaaccaccaagcauuauu

SEQ ID NO: 2027863 - RNA, 19 nt, Homo sapiens
  misc_RNA (1)...(19): siRNA sense strand
gccauagguucucuagauu

SEQ ID NO: 2027864 - RNA, 19 nt, Homo sapiens
  misc_RNA (1)...(19): siRNA sense strand
ggcauuggcagcucuuaua

SEQ ID NO: 2027865 - RNA, 19 nt, Homo sapiens
  misc_RNA (1)...(19): siRNA sense strand
ccaagaagccaaagaacug

SEQ ID NO: 2027866 - RNA, 19 nt, Homo sapiens
  misc_RNA (1)...(19): siRNA sense strand
caaccuguagcuaagaaua

SEQ ID NO: 2027867 - RNA, 19 nt, Homo sapiens
  misc_RNA (1)...(19): siRNA sense strand
gaugauauaccuacaacau

SEQ ID NO: 2027868 - RNA, 19 nt, Homo sapiens
  misc_RNA (1)...(19): siRNA sense strand
gauuugaagugggcaagaa

SEQ ID NO: 2027869 - RNA, 19 nt, Homo sapiens
  misc_RNA (1)...(19): siRNA sense strand
ccauagguucucuagauua

SEQ ID NO: 2027870 - RNA, 19 nt, Homo sapiens
  misc_RNA (1)...(19): siRNA sense strand
gcuaggcaaauaagcuuua

SEQ ID NO: 2027871 - RNA, 19 nt, Homo sapiens
  misc_RNA (1)...(19): siRNA sense strand
ugaagaguccggcuguuaa

SEQ ID NO: 2027872 - RNA, 19 nt, Homo sapiens
  misc_RNA (1)...(19): siRNA sense strand
ggagagggagccauagguu

SEQ ID NO: 2027873 - RNA, 19 nt, Homo sapiens
  misc_RNA (1)...(19): siRNA sense strand
gcucugccaugaaggaugu

SEQ ID NO: 2027874 - RNA, 19 nt, Homo sapiens
  misc_RNA (1)...(19): siRNA sense strand
aagaagagcacuugccaaa

SEQ ID NO: 2027875 - RNA, 19 nt, Homo sapiens
  misc_RNA (1)...(19): siRNA sense strand
gcgcagccuuuagaggaua

SEQ ID NO: 2027876 - RNA, 19 nt, Homo sapiens
  misc_RNA (1)...(19): siRNA sense strand
gaggaaagaagagcacuug

SEQ ID NO: 2027877 - RNA, 19 nt, Homo sapiens
  misc_RNA (1)...(19): siRNA sense strand
gcuaagaauaccuccauga

SEQ ID NO: 2027878 - RNA, 19 nt, Homo sapiens
  misc_RNA (1)...(19): siRNA sense strand
ggaaagacuaucucugagu

SEQ ID NO: 2027879 - RNA, 19 nt, Homo sapiens
  misc_RNA (1)...(19): siRNA sense strand
cagccuucguggaguauaa

SEQ ID NO: 2027880 - RNA, 19 nt, Homo sapiens
  misc_RNA (1)...(19): siRNA sense strand
caauucaucuggaaagacu

SEQ ID NO: 2027881 - RNA, 19 nt, Homo sapiens
  misc_RNA (1)...(19): siRNA sense strand
gagacaaccacacugauca

SEQ ID NO: 2027882 - RNA, 19 nt, Homo sapiens
  misc_RNA (1)...(19): siRNA sense strand
caugaaaccaccaagcauu

SEQ ID NO: 2027883 - RNA, 19 nt, Homo sapiens
  misc_RNA (1)...(19): siRNA sense strand
cguacggacuccagaauuc

SEQ ID NO: 2027884 - RNA, 19 nt, Homo sapiens
  misc_RNA (1)...(19): siRNA sense strand
gccaucauccugaaacuug

SEQ ID NO: 2027885 - RNA, 19 nt, Homo sapiens
  misc_RNA (1)...(19): siRNA sense strand
ccaccagaguaucccauga

SEQ ID NO: 2027886 - RNA, 19 nt, Homo sapiens
  misc_RNA (1)...(19): siRNA sense strand
agccauagguucucuagau

SEQ ID NO: 2027887 - RNA, 19 nt, Homo sapiens
  misc_RNA (1)...(19): siRNA sense strand
cauagguucucuagauuac

SEQ ID NO: 2027888 - RNA, 19 nt, Homo sapiens
  misc_RNA (1)...(19): siRNA sense strand
cauccugacuuuggcauug

SEQ ID NO: 2027889 - RNA, 19 nt, Homo sapiens
  misc_RNA (1)...(19): siRNA sense strand
ugaccaagaagccaaagaa

SEQ ID NO: 2027890 - RNA, 19 nt, Homo sapiens
  misc_RNA (1)...(19): siRNA sense strand
guccggcuguuaaacguuu

SEQ ID NO: 2027891 - RNA, 19 nt, Homo sapiens
  misc_RNA (1)...(19): siRNA sense strand
aggcagaagucaauucauc

SEQ ID NO: 2027892 - RNA, 19 nt, Homo sapiens
  misc_RNA (1)...(19): siRNA sense strand
cuggaaagacuaucucuga

SEQ ID NO: 2027893 - RNA, 19 nt, Homo sapiens
  misc_RNA (1)...(19): siRNA sense strand
auuggcagcucuuauauuc

SEQ ID NO: 2027894 - RNA, 19 nt, Homo sapiens
  misc_RNA (1)...(19): siRNA sense strand
gcauuggcagcucuuauau

SEQ ID NO: 2027895 - RNA, 19 nt, Homo sapiens
  misc_RNA (1)...(19): siRNA sense strand
caagaugauauaccuacaa

SEQ ID NO: 2027896 - RNA, 19 nt, Homo sapiens
  misc_RNA (1)...(19): siRNA sense strand
gcuaauggucgauuugaag

SEQ ID NO: 2027897 - RNA, 19 nt, Homo sapiens
  misc_RNA (1)...(19): siRNA sense strand
gcagcauccuuucaucaac

SEQ ID NO: 2027898 - RNA, 19 nt, Homo sapiens
  misc_RNA (1)...(19): siRNA sense strand
agaagcggcagaauugaaa

SEQ ID NO: 2027899 - RNA, 19 nt, Homo sapiens
  misc_RNA (1)...(19): siRNA sense strand
cuaacugauuuacaagaug

SEQ ID NO: 2027900 - RNA, 19 nt, Homo sapiens
  misc_RNA (1)...(19): siRNA sense strand
cuaggcaaauaagcuuuaa

SEQ ID NO: 2027901 - RNA, 19 nt, Homo sapiens
  misc_RNA (1)...(19): siRNA sense strand
uggcagccuucguggagua

SEQ ID NO: 2027902 - RNA, 19 nt, Homo sapiens
  misc_RNA (1)...(19): siRNA sense strand
uaaggcagaagucaauuca

SEQ ID NO: 2027903 - RNA, 19 nt, Homo sapiens
  misc_RNA (1)...(19): siRNA sense strand
augaaaccaccaagcauua

SEQ ID NO: 2027904 - RNA, 19 nt, Homo sapiens
  misc_RNA (1)...(19): siRNA sense strand
cugaagaguccggcuguua

SEQ ID NO: 2027905 - RNA, 19 nt, Homo sapiens
  misc_RNA (1)...(19): siRNA sense strand
ggcuaauggucgauuugaa

SEQ ID NO: 2027906 - RNA, 19 nt, Homo sapiens
  misc_RNA (1)...(19): siRNA sense strand
ccaagcauuauucuccuaa

SEQ ID NO: 2027907 - RNA, 19 nt, Homo sapiens
  misc_RNA (1)...(19): siRNA sense strand
agauuucuguugugaagga

SEQ ID NO: 2027908 - RNA, 19 nt, Homo sapiens
  misc_RNA (1)...(19): siRNA sense strand
auugaaagauccaacagau

SEQ ID NO: 2027909 - RNA, 19 nt, Homo sapiens
  misc_RNA (1)...(19): siRNA sense strand
gagcaucucaggccaucau

SEQ ID NO: 2027910 - RNA, 19 nt, Homo sapiens
  misc_RNA (1)...(19): siRNA sense strand
gcggcagaauugaaagauc

SEQ ID NO: 2027911 - RNA, 19 nt, Homo sapiens
  misc_RNA (1)...(19): siRNA sense strand
aaagaacuggcuaggcaaa

SEQ ID NO: 2027912 - RNA, 19 nt, Homo sapiens
  misc_RNA (1)...(19): siRNA sense strand
ggaguauaaggacagcauu

SEQ ID NO: 2027913 - RNA, 19 nt, Homo sapiens
  misc_RNA (1)...(19): siRNA sense strand
ucuggcaaacgaauacaua

SEQ ID NO: 2027914 - RNA, 19 nt, Homo sapiens
  misc_RNA (1)...(19): siRNA sense strand
gucaauucaucuggaaaga

SEQ ID NO: 2027915 - RNA, 19 nt, Homo sapiens
  misc_RNA (1)...(19): siRNA sense strand
uccaacagaucauuaccau

SEQ ID NO: 2027916 - RNA, 19 nt, Homo sapiens
  misc_RNA (1)...(19): siRNA sense strand
gcauuauuagccaucauug

SEQ ID NO: 2027917 - RNA, 19 nt, Homo sapiens
  misc_RNA (1)...(19): siRNA sense strand
gcaagaaaaucuguuugag

SEQ ID NO: 2027918 - RNA, 19 nt, Homo sapiens
  misc_RNA (1)...(19): siRNA sense strand
caccagaguaucccaugaa

SEQ ID NO: 2027919 - RNA, 19 nt, Homo sapiens
  misc_RNA (1)...(19): siRNA sense strand
accagaguaucccaugaaa

SEQ ID NO: 2027920 - RNA, 19 nt, Homo sapiens
  misc_RNA (1)...(19): siRNA sense strand
cagcagcauccuuucauca

SEQ ID NO: 2027921 - RNA, 19 nt, Homo sapiens
  misc_RNA (1)...(19): siRNA sense strand
aagaugauauaccuacaac

SEQ ID NO: 2027922 - RNA, 19 nt, Homo sapiens
  misc_RNA (1)...(19): siRNA sense strand
aaaccaccaagcauuauuc

SEQ ID NO: 2027923 - RNA, 19 nt, Homo sapiens
  misc_RNA (1)...(19): siRNA sense strand
caagccaagcugaccaaga

SEQ ID NO: 2027924 - RNA, 19 nt, Homo sapiens
  misc_RNA (1)...(19): siRNA sense strand
aaaaggagagggagccaua

SEQ ID NO: 2027925 - RNA, 19 nt, Homo sapiens
  misc_RNA (1)...(19): siRNA sense strand
cagcuguacugauugucau

SEQ ID NO: 2027926 - RNA, 19 nt, Homo sapiens
  misc_RNA (1)...(19): siRNA sense strand
agucagagaagguugucua

SEQ ID NO: 2027927 - RNA, 19 nt, Homo sapiens
  misc_RNA (1)...(19): siRNA sense strand
cagcagcagagucagagaa

SEQ ID NO: 2027928 - RNA, 19 nt, Homo sapiens
  misc_RNA (1)...(19): siRNA sense strand
aagaagcggcagaauugaa

SEQ ID NO: 2027929 - RNA, 19 nt, Homo sapiens
  misc_RNA (1)...(19): siRNA sense strand
ucagcagcauccuuucauc

SEQ ID NO: 2027930 - RNA, 19 nt, Homo sapiens
  misc_RNA (1)...(19): siRNA sense strand
acaagaugauauaccuaca

SEQ ID NO: 2027931 - RNA, 19 nt, Homo sapiens
  misc_RNA (1)...(19): siRNA sense strand
ugaaaccaccaagcauuau

SEQ ID NO: 2027932 - RNA, 19 nt, Homo sapiens
  misc_RNA (1)...(19): siRNA sense strand
uauaucuggcaaacgaaua

SEQ ID NO: 2027933 - RNA, 19 nt, Homo sapiens
  misc_RNA (1)...(19): siRNA sense strand
cccaaccuguagcuaagaa

SEQ ID NO: 2027934 - RNA, 19 nt, Homo sapiens
  misc_RNA (1)...(19): siRNA sense strand
uacccaaccuguagcuaag

SEQ ID NO: 2027935 - RNA, 19 nt, Homo sapiens
  misc_RNA (1)...(19): siRNA sense strand
gaguccggcuguuaaacgu

SEQ ID NO: 2027936 - RNA, 19 nt, Homo sapiens
  misc_RNA (1)...(19): siRNA sense strand
gaauugaaagauccaacag

SEQ ID NO: 2027937 - RNA, 19 nt, Homo sapiens
  misc_RNA (1)...(19): siRNA sense strand
cagaguaucccaugaaacc

SEQ ID NO: 2027938 - RNA, 19 nt, Homo sapiens
  misc_RNA (1)...(19): siRNA sense strand
cuacuucaccagauguaau

SEQ ID NO: 2027939 - RNA, 19 nt, Homo sapiens
  misc_RNA (1)...(19): siRNA sense strand
cagcagagucagagaaggu

SEQ ID NO: 2027940 - RNA, 19 nt, Homo sapiens
  misc_RNA (1)...(19): siRNA sense strand
cuaagaauaccuccaugag

SEQ ID NO: 2027941 - RNA, 19 nt, Homo sapiens
  misc_RNA (1)...(19): siRNA sense strand
cagaauuccucagcagcau

SEQ ID NO: 2027942 - RNA, 19 nt, Homo sapiens
  misc_RNA (1)...(19): siRNA sense strand
ggagccauagguucucuag

SEQ ID NO: 2027943 - RNA, 19 nt, Homo sapiens
  misc_RNA (1)...(19): siRNA sense strand
cauuggcagcucuuauauu

SEQ ID NO: 2027944 - RNA, 19 nt, Homo sapiens
  misc_RNA (1)...(19): siRNA sense strand
aaagaagcggcagaauuga

SEQ ID NO: 2027945 - RNA, 19 nt, Homo sapiens
  misc_RNA (1)...(19): siRNA sense strand
ggauguccuguugccuuua

SEQ ID NO: 2027946 - RNA, 19 nt, Homo sapiens
  misc_RNA (1)...(19): siRNA sense strand
gugcagaguuuagcauuua

SEQ ID NO: 2027947 - RNA, 19 nt, Homo sapiens
  misc_RNA (1)...(19): siRNA sense strand
gcacaagacgaacucagua

SEQ ID NO: 2027948 - RNA, 19 nt, Homo sapiens
  misc_RNA (1)...(19): siRNA sense strand
cagagaauuuccuuucaaa

SEQ ID NO: 2027949 - RNA, 19 nt, Homo sapiens
  misc_RNA (1)...(19): siRNA sense strand
ccagagaauuuccuuucaa

SEQ ID NO: 2027950 - RNA, 19 nt, Homo sapiens
  misc_RNA (1)...(19): siRNA sense strand
gcccagagaugaccccuua

SEQ ID NO: 2027951 - RNA, 19 nt, Homo sapiens
  misc_RNA (1)...(19): siRNA sense strand
ugaauuauuuccugaaguc

SEQ ID NO: 2027952 - RNA, 19 nt, Homo sapiens
  misc_RNA (1)...(19): siRNA sense strand
acagaaagcacaagacgaa

SEQ ID NO: 2027953 - RNA, 19 nt, Homo sapiens
  misc_RNA (1)...(19): siRNA sense strand
gagcaucgcgcaggaguga

SEQ ID NO: 2027954 - RNA, 19 nt, Homo sapiens
  misc_RNA (1)...(19): siRNA sense strand
cccaguaucuauaugauca

SEQ ID NO: 2027955 - RNA, 19 nt, Homo sapiens
  misc_RNA (1)...(19): siRNA sense strand
guauagagacgucggacuu

SEQ ID NO: 2027956 - RNA, 19 nt, Homo sapiens
  misc_RNA (1)...(19): siRNA sense strand
aaaccucccaguaucuaua

SEQ ID NO: 2027957 - RNA, 19 nt, Homo sapiens
  misc_RNA (1)...(19): siRNA sense strand
uuucaaaccucccaguauc

SEQ ID NO: 2027958 - RNA, 19 nt, Homo sapiens
  misc_RNA (1)...(19): siRNA sense strand
cuggcgaacuuguuuguga

SEQ ID NO: 2027959 - RNA, 19 nt, Homo sapiens
  misc_RNA (1)...(19): siRNA sense strand
gaaagcacaagacgaacuc

SEQ ID NO: 2027960 - RNA, 19 nt, Homo sapiens
  misc_RNA (1)...(19): siRNA sense strand
uggaggagauuaaacaaaa

SEQ ID NO: 2027961 - RNA, 19 nt, Homo sapiens
  misc_RNA (1)...(19): siRNA sense strand
gaagucguggaggagauua

SEQ ID NO: 2027962 - RNA, 19 nt, Homo sapiens
  misc_RNA (1)...(19): siRNA sense strand
gguuugcagccuuugcuua

SEQ ID NO: 2027963 - RNA, 19 nt, Homo sapiens
  misc_RNA (1)...(19): siRNA sense strand
gucuuucuaucacggauuu

SEQ ID NO: 2027964 - RNA, 19 nt, Homo sapiens
  misc_RNA (1)...(19): siRNA sense strand
ucaaaccucccaguaucua

SEQ ID NO: 2027965 - RNA, 19 nt, Homo sapiens
  misc_RNA (1)...(19): siRNA sense strand
uugcuuacacggucaagua

SEQ ID NO: 2027966 - RNA, 19 nt, Homo sapiens
  misc_RNA (1)...(19): siRNA sense strand
gagaauuuccuuucaaacc

SEQ ID NO: 2027967 - RNA, 19 nt, Homo sapiens
  misc_RNA (1)...(19): siRNA sense strand
cccagagaauuuccuuuca

SEQ ID NO: 2027968 - RNA, 19 nt, Homo sapiens
  misc_RNA (1)...(19): siRNA sense strand
cgaacuuguuugugauagu

SEQ ID NO: 2027969 - RNA, 19 nt, Homo sapiens
  misc_RNA (1)...(19): siRNA sense strand
gugaauuauuuccugaagu

SEQ ID NO: 2027970 - RNA, 19 nt, Homo sapiens
  misc_RNA (1)...(19): siRNA sense strand
guggaggagauuaaacaaa

SEQ ID NO: 2027971 - RNA, 19 nt, Homo sapiens
  misc_RNA (1)...(19): siRNA sense strand
ggcgaacuuguuugugaua

SEQ ID NO: 2027972 - RNA, 19 nt, Homo sapiens
  misc_RNA (1)...(19): siRNA sense strand
caagacgaacucaguagca

SEQ ID NO: 2027973 - RNA, 19 nt, Homo sapiens
  misc_RNA (1)...(19): siRNA sense strand
agugcagaguuuagcauuu

SEQ ID NO: 2027974 - RNA, 19 nt, Homo sapiens
  misc_RNA (1)...(19): siRNA sense strand
gcagaguuuagcauuuaau

SEQ ID NO: 2027975 - RNA, 19 nt, Homo sapiens
  misc_RNA (1)...(19): siRNA sense strand
ccaacgggagguuuaagug

SEQ ID NO: 2027976 - RNA, 19 nt, Homo sapiens
  misc_RNA (1)...(19): siRNA sense strand
gcgaacuuguuugugauag

SEQ ID NO: 2027977 - RNA, 19 nt, Homo sapiens
  misc_RNA (1)...(19): siRNA sense strand
agaauuuccuuucaaaccu

SEQ ID NO: 2027978 - RNA, 19 nt, Homo sapiens
  misc_RNA (1)...(19): siRNA sense strand
ugcagaguuuagcauuuaa

SEQ ID NO: 2027979 - RNA, 19 nt, Homo sapiens
  misc_RNA (1)...(19): siRNA sense strand
gagaugaccccuuaugaag

SEQ ID NO: 2027980 - RNA, 19 nt, Homo sapiens
  misc_RNA (1)...(19): siRNA sense strand
agacgucggacuucacgaa

SEQ ID NO: 2027981 - RNA, 19 nt, Homo sapiens
  misc_RNA (1)...(19): siRNA sense strand
gacgucggacuucacgaaa

SEQ ID NO: 2027982 - RNA, 19 nt, Homo sapiens
  misc_RNA (1)...(19): siRNA sense strand
ugagcuucaugguggagaa

SEQ ID NO: 2027983 - RNA, 19 nt, Homo sapiens
  misc_RNA (1)...(19): siRNA sense strand
caaaccucccaguaucuau

SEQ ID NO: 2027984 - RNA, 19 nt, Homo sapiens
  misc_RNA (1)...(19): siRNA sense strand
auagagacgucggacuuca

SEQ ID NO: 2027985 - RNA, 19 nt, Homo sapiens
  misc_RNA (1)...(19): siRNA sense strand
gugcagaguuuagcauuua

SEQ ID NO: 2027986 - RNA, 19 nt, Homo sapiens
  misc_RNA (1)...(19): siRNA sense strand
gcacaagacgaacucagua

SEQ ID NO: 2027987 - RNA, 19 nt, Homo sapiens
  misc_RNA (1)...(19): siRNA sense strand
cagagaauuuccuuucaaa

SEQ ID NO: 2027988 - RNA, 19 nt, Homo sapiens
  misc_RNA (1)...(19): siRNA sense strand
ccagagaauuuccuuucaa

SEQ ID NO: 2027989 - RNA, 19 nt, Homo sapiens
  misc_RNA (1)...(19): siRNA sense strand
gcccagagaugaccccuua

SEQ ID NO: 2027990 - RNA, 19 nt, Homo sapiens
  misc_RNA (1)...(19): siRNA sense strand
ugaauuauuuccugaaguc

SEQ ID NO: 2027991 - RNA, 19 nt, Homo sapiens
  misc_RNA (1)...(19): siRNA sense strand
acagaaagcacaagacgaa

SEQ ID NO: 2027992 - RNA, 19 nt, Homo sapiens
  misc_RNA (1)...(19): siRNA sense strand
gagcaucgcgcaggaguga

SEQ ID NO: 2027993 - RNA, 19 nt, Homo sapiens
  misc_RNA (1)...(19): siRNA sense strand
cccaguaucuauaugauca

SEQ ID NO: 2027994 - RNA, 19 nt, Homo sapiens
  misc_RNA (1)...(19): siRNA sense strand
guauagagacgucggacuu

SEQ ID NO: 2027995 - RNA, 19 nt, Homo sapiens
  misc_RNA (1)...(19): siRNA sense strand
aaaccucccaguaucuaua

SEQ ID NO: 2027996 - RNA, 19 nt, Homo sapiens
  misc_RNA (1)...(19): siRNA sense strand
uuucaaaccucccaguauc

SEQ ID NO: 2027997 - RNA, 19 nt, Homo sapiens
  misc_RNA (1)...(19): siRNA sense strand
cuggcgaacuuguuuguga

SEQ ID NO: 2027998 - RNA, 19 nt, Homo sapiens
  misc_RNA (1)...(19): siRNA sense strand
gaaagcacaagacgaacuc

SEQ ID NO: 2027999 - RNA, 19 nt, Homo sapiens
  misc_RNA (1)...(19): siRNA sense strand
uggaggagauuaaacaaaa

SEQ ID NO: 2028000 - RNA, 19 nt, Homo sapiens
  misc_RNA (1)...(19): siRNA sense strand
gaagucguggaggagauua

SEQ ID NO: 2028001 - RNA, 19 nt, Homo sapiens
  misc_RNA (1)...(19): siRNA sense strand
gguuugcagccuuugcuua

SEQ ID NO: 2028002 - RNA, 19 nt, Homo sapiens
  misc_RNA (1)...(19): siRNA sense strand
gucuuucuaucacggauuu

SEQ ID NO: 2028003 - RNA, 19 nt, Homo sapiens
  misc_RNA (1)...(19): siRNA sense strand
ucaaaccucccaguaucua

SEQ ID NO: 2028004 - RNA, 19 nt, Homo sapiens
  misc_RNA (1)...(19): siRNA sense strand
uugcuuacacggucaagua

SEQ ID NO: 2028005 - RNA, 19 nt, Homo sapiens
  misc_RNA (1)...(19): siRNA sense strand
gagaauuuccuuucaaacc

SEQ ID NO: 2028006 - RNA, 19 nt, Homo sapiens
  misc_RNA (1)...(19): siRNA sense strand
cccagagaauuuccuuuca

SEQ ID NO: 2028007 - RNA, 19 nt, Homo sapiens
  misc_RNA (1)...(19): siRNA sense strand
cgaacuuguuugugauagu

SEQ ID NO: 2028008 - RNA, 19 nt, Homo sapiens
  misc_RNA (1)...(19): siRNA sense strand
gugaauuauuuccugaagu

SEQ ID NO: 2028009 - RNA, 19 nt, Homo sapiens
  misc_RNA (1)...(19): siRNA sense strand
guggaggagauuaaacaaa

SEQ ID NO: 2028010 - RNA, 19 nt, Homo sapiens
  misc_RNA (1)...(19): siRNA sense strand
ggcgaacuuguuugugaua

SEQ ID NO: 2028011 - RNA, 19 nt, Homo sapiens
  misc_RNA (1)...(19): siRNA sense strand
caagacgaacucaguagca

SEQ ID NO: 2028012 - RNA, 19 nt, Homo sapiens
  misc_RNA (1)...(19): siRNA sense strand
agugcagaguuuagcauuu

SEQ ID NO: 2028013 - RNA, 19 nt, Homo sapiens
  misc_RNA (1)...(19): siRNA sense strand
gcagaguuuagcauuuaau

SEQ ID NO: 2028014 - RNA, 19 nt, Homo sapiens
  misc_RNA (1)...(19): siRNA sense strand
ccaacgggagguuuaagug

SEQ ID NO: 2028015 - RNA, 19 nt, Homo sapiens
  misc_RNA (1)...(19): siRNA sense strand
gcgaacuuguuugugauag

SEQ ID NO: 2028016 - RNA, 19 nt, Homo sapiens
  misc_RNA (1)...(19): siRNA sense strand
agaauuuccuuucaaaccu

SEQ ID NO: 2028017 - RNA, 19 nt, Homo sapiens
  misc_RNA (1)...(19): siRNA sense strand
ugcagaguuuagcauuuaa

SEQ ID NO: 2028018 - RNA, 19 nt, Homo sapiens
  misc_RNA (1)...(19): siRNA sense strand
gagaugaccccuuaugaag

SEQ ID NO: 2028019 - RNA, 19 nt, Homo sapiens
  misc_RNA (1)...(19): siRNA sense strand
agacgucggacuucacgaa

SEQ ID NO: 2028020 - RNA, 19 nt, Homo sapiens
  misc_RNA (1)...(19): siRNA sense strand
gacgucggacuucacgaaa

SEQ ID NO: 2028021 - RNA, 19 nt, Homo sapiens
  misc_RNA (1)...(19): siRNA sense strand
ugagcuucaugguggagaa

SEQ ID NO: 2028022 - RNA, 19 nt, Homo sapiens
  misc_RNA (1)...(19): siRNA sense strand
caaaccucccaguaucuau

SEQ ID NO: 2028023 - RNA, 19 nt, Homo sapiens
  misc_RNA (1)...(19): siRNA sense strand
auagagacgucggacuuca

SEQ ID NO: 2028024 - RNA, 19 nt, Homo sapiens
  misc_RNA (1)...(19): siRNA sense strand
gcccagagaugaccccuua

SEQ ID NO: 2028025 - RNA, 19 nt, Homo sapiens
  misc_RNA (1)...(19): siRNA sense strand
gagaugaccccuuaugaag

SEQ ID NO: 2028026 - RNA, 19 nt, Homo sapiens
  misc_RNA (1)...(19): siRNA sense strand
gugcagaguuuagcauuua

SEQ ID NO: 2028027 - RNA, 19 nt, Homo sapiens
  misc_RNA (1)...(19): siRNA sense strand
gcacaagacgaacucagua

SEQ ID NO: 2028028 - RNA, 19 nt, Homo sapiens
  misc_RNA (1)...(19): siRNA sense strand
cagagaauuuccuuucaaa

SEQ ID NO: 2028029 - RNA, 19 nt, Homo sapiens
  misc_RNA (1)...(19): siRNA sense strand
ccagagaauuuccuuucaa

SEQ ID NO: 2028030 - RNA, 19 nt, Homo sapiens
  misc_RNA (1)...(19): siRNA sense strand
ugaauuauuuccugaaguc

SEQ ID NO: 2028031 - RNA, 19 nt, Homo sapiens
  misc_RNA (1)...(19): siRNA sense strand
acagaaagcacaagacgaa

SEQ ID NO: 2028032 - RNA, 19 nt, Homo sapiens
  misc_RNA (1)...(19): siRNA sense strand
gagcaucgcgcaggaguga

SEQ ID NO: 2028033 - RNA, 19 nt, Homo sapiens
  misc_RNA (1)...(19): siRNA sense strand
cccaguaucuauaugauca

SEQ ID NO: 2028034 - RNA, 19 nt, Homo sapiens
  misc_RNA (1)...(19): siRNA sense strand
guauagagacgucggacuu

SEQ ID NO: 2028035 - RNA, 19 nt, Homo sapiens
  misc_RNA (1)...(19): siRNA sense strand
aaaccucccaguaucuaua

SEQ ID NO: 2028036 - RNA, 19 nt, Homo sapiens
  misc_RNA (1)...(19): siRNA sense strand
uuucaaaccucccaguauc

SEQ ID NO: 2028037 - RNA, 19 nt, Homo sapiens
  misc_RNA (1)...(19): siRNA sense strand
cuggcgaacuuguuuguga

SEQ ID NO: 2028038 - RNA, 19 nt, Homo sapiens
  misc_RNA (1)...(19): siRNA sense strand
gaaagcacaagacgaacuc

SEQ ID NO: 2028039 - RNA, 19 nt, Homo sapiens
  misc_RNA (1)...(19): siRNA sense strand
uggaggagauuaaacaaaa

SEQ ID NO: 2028040 - RNA, 19 nt, Homo sapiens
  misc_RNA (1)...(19): siRNA sense strand
gaagucguggaggagauua

SEQ ID NO: 2028041 - RNA, 19 nt, Homo sapiens
  misc_RNA (1)...(19): siRNA sense strand
gguuugcagccuuugcuua

SEQ ID NO: 2028042 - RNA, 19 nt, Homo sapiens
  misc_RNA (1)...(19): siRNA sense strand
gucuuucuaucacggauuu

SEQ ID NO: 2028043 - RNA, 19 nt, Homo sapiens
  misc_RNA (1)...(19): siRNA sense strand
ucaaaccucccaguaucua

SEQ ID NO: 2028044 - RNA, 19 nt, Homo sapiens
  misc_RNA (1)...(19): siRNA sense strand
uugcuuacacggucaagua

SEQ ID NO: 2028045 - RNA, 19 nt, Homo sapiens
  misc_RNA (1)...(19): siRNA sense strand
cccagagaauuuccuuuca

SEQ ID NO: 2028046 - RNA, 19 nt, Homo sapiens
  misc_RNA (1)...(19): siRNA sense strand
cgaacuuguuugugauagu

SEQ ID NO: 2028047 - RNA, 19 nt, Homo sapiens
  misc_RNA (1)...(19): siRNA sense strand
gagaauuuccuuucaaacc

SEQ ID NO: 2028048 - RNA, 19 nt, Homo sapiens
  misc_RNA (1)...(19): siRNA sense strand
gugaauuauuuccugaagu

SEQ ID NO: 2028049 - RNA, 19 nt, Homo sapiens
  misc_RNA (1)...(19): siRNA sense strand
guggaggagauuaaacaaa

SEQ ID NO: 2028050 - RNA, 19 nt, Homo sapiens
  misc_RNA (1)...(19): siRNA sense strand
ggcgaacuuguuugugaua

SEQ ID NO: 2028051 - RNA, 19 nt, Homo sapiens
  misc_RNA (1)...(19): siRNA sense strand
caagacgaacucaguagca

SEQ ID NO: 2028052 - RNA, 19 nt, Homo sapiens
  misc_RNA (1)...(19): siRNA sense strand
agugcagaguuuagcauuu

SEQ ID NO: 2028053 - RNA, 19 nt, Homo sapiens
  misc_RNA (1)...(19): siRNA sense strand
gcagaguuuagcauuuaau

SEQ ID NO: 2028054 - RNA, 19 nt, Homo sapiens
  misc_RNA (1)...(19): siRNA sense strand
ccaacgggagguuuaagug

SEQ ID NO: 2028055 - RNA, 19 nt, Homo sapiens
  misc_RNA (1)...(19): siRNA sense strand
agaauuuccuuucaaaccu

SEQ ID NO: 2028056 - RNA, 19 nt, Homo sapiens
  misc_RNA (1)...(19): siRNA sense strand
gcgaacuuguuugugauag

SEQ ID NO: 2028057 - RNA, 19 nt, Homo sapiens
  misc_RNA (1)...(19): siRNA sense strand
ugcagaguuuagcauuuaa

SEQ ID NO: 2028058 - RNA, 19 nt, Homo sapiens
  misc_RNA (1)...(19): siRNA sense strand
agacgucggacuucacgaa

SEQ ID NO: 2028059 - RNA, 19 nt, Homo sapiens
  misc_RNA (1)...(19): siRNA sense strand
gacgucggacuucacgaaa

SEQ ID NO: 2028060 - RNA, 19 nt, Homo sapiens
  misc_RNA (1)...(19): siRNA sense strand
ugagcuucaugguggagaa

SEQ ID NO: 2028061 - RNA, 19 nt, Homo sapiens
  misc_RNA (1)...(19): siRNA sense strand
caaaccucccaguaucuau

SEQ ID NO: 2028062 - RNA, 19 nt, Homo sapiens
  misc_RNA (1)...(19): siRNA sense strand
auagagacgucggacuuca

SEQ ID NO: 2028063 - RNA, 19 nt, Homo sapiens
  misc_RNA (1)...(19): siRNA sense strand
gugcagaguuuagcauuua

SEQ ID NO: 2028064 - RNA, 19 nt, Homo sapiens
  misc_RNA (1)...(19): siRNA sense strand
gcacaagacgaacucagua

SEQ ID NO: 2028065 - RNA, 19 nt, Homo sapiens
  misc_RNA (1)...(19): siRNA sense strand
cagagaauuuccuuucaaa

SEQ ID NO: 2028066 - RNA, 19 nt, Homo sapiens
  misc_RNA (1)...(19): siRNA sense strand
ccagagaauuuccuuucaa

SEQ ID NO: 2028067 - RNA, 19 nt, Homo sapiens
  misc_RNA (1)...(19): siRNA sense strand
ugaauuauuuccugaaguc

SEQ ID NO: 2028068 - RNA, 19 nt, Homo sapiens
  misc_RNA (1)...(19): siRNA sense strand
acagaaagcacaagacgaa

SEQ ID NO: 2028069 - RNA, 19 nt, Homo sapiens
  misc_RNA (1)...(19): siRNA sense strand
gagcaucgcgcaggaguga

SEQ ID NO: 2028070 - RNA, 19 nt, Homo sapiens
  misc_RNA (1)...(19): siRNA sense strand
cccaguaucuauaugauca

SEQ ID NO: 2028071 - RNA, 19 nt, Homo sapiens
  misc_RNA (1)...(19): siRNA sense strand
guauagagacgucggacuu

SEQ ID NO: 2028072 - RNA, 19 nt, Homo sapiens
  misc_RNA (1)...(19): siRNA sense strand
aaaccucccaguaucuaua

SEQ ID NO: 2028073 - RNA, 19 nt, Homo sapiens
  misc_RNA (1)...(19): siRNA sense strand
uuucaaaccucccaguauc

SEQ ID NO: 2028074 - RNA, 19 nt, Homo sapiens
  misc_RNA (1)...(19): siRNA sense strand
cuggcgaacuuguuuguga

SEQ ID NO: 2028075 - RNA, 19 nt, Homo sapiens
  misc_RNA (1)...(19): siRNA sense strand
gaaagcacaagacgaacuc

SEQ ID NO: 2028076 - RNA, 19 nt, Homo sapiens
  misc_RNA (1)...(19): siRNA sense strand
uggaggagauuaaacaaaa

SEQ ID NO: 2028077 - RNA, 19 nt, Homo sapiens
  misc_RNA (1)...(19): siRNA sense strand
gaagucguggaggagauua

SEQ ID NO: 2028078 - RNA, 19 nt, Homo sapiens
  misc_RNA (1)...(19): siRNA sense strand
gguuugcagccuuugcuua

SEQ ID NO: 2028079 - RNA, 19 nt, Homo sapiens
  misc_RNA (1)...(19): siRNA sense strand
gucuuucuaucacggauuu

SEQ ID NO: 2028080 - RNA, 19 nt, Homo sapiens
  misc_RNA (1)...(19): siRNA sense strand
ucaaaccucccaguaucua

SEQ ID NO: 2028081 - RNA, 19 nt, Homo sapiens
  misc_RNA (1)...(19): siRNA sense strand
uugcuuacacggucaagua

SEQ ID NO: 2028082 - RNA, 19 nt, Homo sapiens
  misc_RNA (1)...(19): siRNA sense strand
cccagagaauuuccuuuca

SEQ ID NO: 2028083 - RNA, 19 nt, Homo sapiens
  misc_RNA (1)...(19): siRNA sense strand
cgaacuuguuugugauagu

SEQ ID NO: 2028084 - RNA, 19 nt, Homo sapiens
  misc_RNA (1)...(19): siRNA sense strand
gagaauuuccuuucaaacc

SEQ ID NO: 2028085 - RNA, 19 nt, Homo sapiens
  misc_RNA (1)...(19): siRNA sense strand
gugaauuauuuccugaagu

SEQ ID NO: 2028086 - RNA, 19 nt, Homo sapiens
  misc_RNA (1)...(19): siRNA sense strand
guggaggagauuaaacaaa

SEQ ID NO: 2028087 - RNA, 19 nt, Homo sapiens
  misc_RNA (1)...(19): siRNA sense strand
ggcgaacuuguuugugaua

SEQ ID NO: 2028088 - RNA, 19 nt, Homo sapiens
  misc_RNA (1)...(19): siRNA sense strand
caagacgaacucaguagca

SEQ ID NO: 2028089 - RNA, 19 nt, Homo sapiens
  misc_RNA (1)...(19): siRNA sense strand
agugcagaguuuagcauuu

SEQ ID NO: 2028090 - RNA, 19 nt, Homo sapiens
  misc_RNA (1)...(19): siRNA sense strand
gcagaguuuagcauuuaau

SEQ ID NO: 2028091 - RNA, 19 nt, Homo sapiens
  misc_RNA (1)...(19): siRNA sense strand
ccaacgggagguuuaagug

SEQ ID NO: 2028092 - RNA, 19 nt, Homo sapiens
  misc_RNA (1)...(19): siRNA sense strand
agaauuuccuuucaaaccu

SEQ ID NO: 2028093 - RNA, 19 nt, Homo sapiens
  misc_RNA (1)...(19): siRNA sense strand
gcgaacuuguuugugauag

SEQ ID NO: 2028094 - RNA, 19 nt, Homo sapiens
  misc_RNA (1)...(19): siRNA sense strand
ugcagaguuuagcauuuaa

SEQ ID NO: 2028095 - RNA, 19 nt, Homo sapiens
  misc_RNA (1)...(19): siRNA sense strand
agacgucggacuucacgaa

SEQ ID NO: 2028096 - RNA, 19 nt, Homo sapiens
  misc_RNA (1)...(19): siRNA sense strand
gacgucggacuucacgaaa

SEQ ID NO: 2028097 - RNA, 19 nt, Homo sapiens
  misc_RNA (1)...(19): siRNA sense strand
ugagcuucaugguggagaa

SEQ ID NO: 2028098 - RNA, 19 nt, Homo sapiens
  misc_RNA (1)...(19): siRNA sense strand
caaaccucccaguaucuau

SEQ ID NO: 2028099 - RNA, 19 nt, Homo sapiens
  misc_RNA (1)...(19): siRNA sense strand
auagagacgucggacuuca

SEQ ID NO: 2028100 - RNA, 19 nt, Homo sapiens
  misc_RNA (1)...(19): siRNA sense strand
gugcagaguuuagcauuua

SEQ ID NO: 2028101 - RNA, 19 nt, Homo sapiens
  misc_RNA (1)...(19): siRNA sense strand
gcacaagacgaacucagua

SEQ ID NO: 2028102 - RNA, 19 nt, Homo sapiens
  misc_RNA (1)...(19): siRNA sense strand
cagagaauuuccuuucaaa

SEQ ID NO: 2028103 - RNA, 19 nt, Homo sapiens
  misc_RNA (1)...(19): siRNA sense strand
ccagagaauuuccuuucaa

SEQ ID NO: 2028104 - RNA, 19 nt, Homo sapiens
  misc_RNA (1)...(19): siRNA sense strand
gcccagagaugaccccuua

SEQ ID NO: 2028105 - RNA, 19 nt, Homo sapiens
  misc_RNA (1)...(19): siRNA sense strand
ugaauuauuuccugaaguc

SEQ ID NO: 2028106 - RNA, 19 nt, Homo sapiens
  misc_RNA (1)...(19): siRNA sense strand
acagaaagcacaagacgaa

SEQ ID NO: 2028107 - RNA, 19 nt, Homo sapiens
  misc_RNA (1)...(19): siRNA sense strand
gagcaucgcgcaggaguga

SEQ ID NO: 2028108 - RNA, 19 nt, Homo sapiens
  misc_RNA (1)...(19): siRNA sense strand
cccaguaucuauaugauca

SEQ ID NO: 2028109 - RNA, 19 nt, Homo sapiens
  misc_RNA (1)...(19): siRNA sense strand
guauagagacgucggacuu

SEQ ID NO: 2028110 - RNA, 19 nt, Homo sapiens
  misc_RNA (1)...(19): siRNA sense strand
aaaccucccaguaucuaua

SEQ ID NO: 2028111 - RNA, 19 nt, Homo sapiens
  misc_RNA (1)...(19): siRNA sense strand
uuucaaaccucccaguauc

SEQ ID NO: 2028112 - RNA, 19 nt, Homo sapiens
  misc_RNA (1)...(19): siRNA sense strand
cuggcgaacuuguuuguga

SEQ ID NO: 2028113 - RNA, 19 nt, Homo sapiens
  misc_RNA (1)...(19): siRNA sense strand
gaaagcacaagacgaacuc

SEQ ID NO: 2028114 - RNA, 19 nt, Homo sapiens
  misc_RNA (1)...(19): siRNA sense strand
uggaggagauuaaacaaaa

SEQ ID NO: 2028115 - RNA, 19 nt, Homo sapiens
  misc_RNA (1)...(19): siRNA sense strand
gaagucguggaggagauua

SEQ ID NO: 2028116 - RNA, 19 nt, Homo sapiens
  misc_RNA (1)...(19): siRNA sense strand
gguuugcagccuuugcuua

SEQ ID NO: 2028117 - RNA, 19 nt, Homo sapiens
  misc_RNA (1)...(19): siRNA sense strand
gucuuucuaucacggauuu

SEQ ID NO: 2028118 - RNA, 19 nt, Homo sapiens
  misc_RNA (1)...(19): siRNA sense strand
ucaaaccucccaguaucua

SEQ ID NO: 2028119 - RNA, 19 nt, Homo sapiens
  misc_RNA (1)...(19): siRNA sense strand
uugcuuacacggucaagua

SEQ ID NO: 2028120 - RNA, 19 nt, Homo sapiens
  misc_RNA (1)...(19): siRNA sense strand
gagaauuuccuuucaaacc

SEQ ID NO: 2028121 - RNA, 19 nt, Homo sapiens
  misc_RNA (1)...(19): siRNA sense strand
cccagagaauuuccuuuca

SEQ ID NO: 2028122 - RNA, 19 nt, Homo sapiens
  misc_RNA (1)...(19): siRNA sense strand
cgaacuuguuugugauagu

SEQ ID NO: 2028123 - RNA, 19 nt, Homo sapiens
  misc_RNA (1)...(19): siRNA sense strand
gugaauuauuuccugaagu

SEQ ID NO: 2028124 - RNA, 19 nt, Homo sapiens
  misc_RNA (1)...(19): siRNA sense strand
guggaggagauuaaacaaa

SEQ ID NO: 2028125 - RNA, 19 nt, Homo sapiens
  misc_RNA (1)...(19): siRNA sense strand
ggcgaacuuguuugugaua

SEQ ID NO: 2028126 - RNA, 19 nt, Homo sapiens
  misc_RNA (1)...(19): siRNA sense strand
caagacgaacucaguagca

SEQ ID NO: 2028127 - RNA, 19 nt, Homo sapiens
  misc_RNA (1)...(19): siRNA sense strand
agugcagaguuuagcauuu

SEQ ID NO: 2028128 - RNA, 19 nt, Homo sapiens
  misc_RNA (1)...(19): siRNA sense strand
gcagaguuuagcauuuaau

SEQ ID NO: 2028129 - RNA, 19 nt, Homo sapiens
  misc_RNA (1)...(19): siRNA sense strand
ccaacgggagguuuaagug

SEQ ID NO: 2028130 - RNA, 19 nt, Homo sapiens
  misc_RNA (1)...(19): siRNA sense strand
gcgaacuuguuugugauag

SEQ ID NO: 2028131 - RNA, 19 nt, Homo sapiens
  misc_RNA (1)...(19): siRNA sense strand
agaauuuccuuucaaaccu

SEQ ID NO: 2028132 - RNA, 19 nt, Homo sapiens
  misc_RNA (1)...(19): siRNA sense strand
ugcagaguuuagcauuuaa

SEQ ID NO: 2028133 - RNA, 19 nt, Homo sapiens
  misc_RNA (1)...(19): siRNA sense strand
gagaugaccccuuaugaag

SEQ ID NO: 2028134 - RNA, 19 nt, Homo sapiens
  misc_RNA (1)...(19): siRNA sense strand
agacgucggacuucacgaa

SEQ ID NO: 2028135 - RNA, 19 nt, Homo sapiens
  misc_RNA (1)...(19): siRNA sense strand
gacgucggacuucacgaaa

SEQ ID NO: 2028136 - RNA, 19 nt, Homo sapiens
  misc_RNA (1)...(19): siRNA sense strand
ugagcuucaugguggagaa

SEQ ID NO: 2028137 - RNA, 19 nt, Homo sapiens
  misc_RNA (1)...(19): siRNA sense strand
caaaccucccaguaucuau

SEQ ID NO: 2028138 - RNA, 19 nt, Homo sapiens
  misc_RNA (1)...(19): siRNA sense strand
auagagacgucggacuuca

SEQ ID NO: 2028139 - RNA, 19 nt, Homo sapiens
  misc_RNA (1)...(19): siRNA sense strand
gugcagaguuuagcauuua

SEQ ID NO: 2028140 - RNA, 19 nt, Homo sapiens
  misc_RNA (1)...(19): siRNA sense strand
gcacaagacgaacucagua

SEQ ID NO: 2028141 - RNA, 19 nt, Homo sapiens
  misc_RNA (1)...(19): siRNA sense strand
cagagaauuuccuuucaaa

SEQ ID NO: 2028142 - RNA, 19 nt, Homo sapiens
  misc_RNA (1)...(19): siRNA sense strand
ccagagaauuuccuuucaa

SEQ ID NO: 2028143 - RNA, 19 nt, Homo sapiens
  misc_RNA (1)...(19): siRNA sense strand
gcccagagaugaccccuua

SEQ ID NO: 2028144 - RNA, 19 nt, Homo sapiens
  misc_RNA (1)...(19): siRNA sense strand
ugaauuauuuccugaaguc

SEQ ID NO: 2028145 - RNA, 19 nt, Homo sapiens
  misc_RNA (1)...(19): siRNA sense strand
acagaaagcacaagacgaa

SEQ ID NO: 2028146 - RNA, 19 nt, Homo sapiens
  misc_RNA (1)...(19): siRNA sense strand
gagcaucgcgcaggaguga

SEQ ID NO: 2028147 - RNA, 19 nt, Homo sapiens
  misc_RNA (1)...(19): siRNA sense strand
cccaguaucuauaugauca

SEQ ID NO: 2028148 - RNA, 19 nt, Homo sapiens
  misc_RNA (1)...(19): siRNA sense strand
guauagagacgucggacuu

SEQ ID NO: 2028149 - RNA, 19 nt, Homo sapiens
  misc_RNA (1)...(19): siRNA sense strand
aaaccucccaguaucuaua

SEQ ID NO: 2028150 - RNA, 19 nt, Homo sapiens
  misc_RNA (1)...(19): siRNA sense strand
uuucaaaccucccaguauc

SEQ ID NO: 2028151 - RNA, 19 nt, Homo sapiens
  misc_RNA (1)...(19): siRNA sense strand
cuggcgaacuuguuuguga

SEQ ID NO: 2028152 - RNA, 19 nt, Homo sapiens
  misc_RNA (1)...(19): siRNA sense strand
gaaagcacaagacgaacuc

SEQ ID NO: 2028153 - RNA, 19 nt, Homo sapiens
  misc_RNA (1)...(19): siRNA sense strand
uggaggagauuaaacaaaa

SEQ ID NO: 2028154 - RNA, 19 nt, Homo sapiens
  misc_RNA (1)...(19): siRNA sense strand
gaagucguggaggagauua

SEQ ID NO: 2028155 - RNA, 19 nt, Homo sapiens
  misc_RNA (1)...(19): siRNA sense strand
gguuugcagccuuugcuua

SEQ ID NO: 2028156 - RNA, 19 nt, Homo sapiens
  misc_RNA (1)...(19): siRNA sense strand
gucuuucuaucacggauuu

SEQ ID NO: 2028157 - RNA, 19 nt, Homo sapiens
  misc_RNA (1)...(19): siRNA sense strand
ucaaaccucccaguaucua

SEQ ID NO: 2028158 - RNA, 19 nt, Homo sapiens
  misc_RNA (1)...(19): siRNA sense strand
uugcuuacacggucaagua

SEQ ID NO: 2028159 - RNA, 19 nt, Homo sapiens
  misc_RNA (1)...(19): siRNA sense strand
gagaauuuccuuucaaacc

SEQ ID NO: 2028160 - RNA, 19 nt, Homo sapiens
  misc_RNA (1)...(19): siRNA sense strand
cccagagaauuuccuuuca

SEQ ID NO: 2028161 - RNA, 19 nt, Homo sapiens
  misc_RNA (1)...(19): siRNA sense strand
cgaacuuguuugugauagu

SEQ ID NO: 2028162 - RNA, 19 nt, Homo sapiens
  misc_RNA (1)...(19): siRNA sense strand
gugaauuauuuccugaagu

SEQ ID NO: 2028163 - RNA, 19 nt, Homo sapiens
  misc_RNA (1)...(19): siRNA sense strand
guggaggagauuaaacaaa

SEQ ID NO: 2028164 - RNA, 19 nt, Homo sapiens
  misc_RNA (1)...(19): siRNA sense strand
ggcgaacuuguuugugaua

SEQ ID NO: 2028165 - RNA, 19 nt, Homo sapiens
  misc_RNA (1)...(19): siRNA sense strand
caagacgaacucaguagca

SEQ ID NO: 2028166 - RNA, 19 nt, Homo sapiens
  misc_RNA (1)...(19): siRNA sense strand
agugcagaguuuagcauuu

SEQ ID NO: 2028167 - RNA, 19 nt, Homo sapiens
  misc_RNA (1)...(19): siRNA sense strand
gcagaguuuagcauuuaau

SEQ ID NO: 2028168 - RNA, 19 nt, Homo sapiens
  misc_RNA (1)...(19): siRNA sense strand
ccaacgggagguuuaagug

SEQ ID NO: 2028169 - RNA, 19 nt, Homo sapiens
  misc_RNA (1)...(19): siRNA sense strand
gcgaacuuguuugugauag

SEQ ID NO: 2028170 - RNA, 19 nt, Homo sapiens
  misc_RNA (1)...(19): siRNA sense strand
agaauuuccuuucaaaccu

SEQ ID NO: 2028171 - RNA, 19 nt, Homo sapiens
  misc_RNA (1)...(19): siRNA sense strand
ugcagaguuuagcauuuaa

SEQ ID NO: 2028172 - RNA, 19 nt, Homo sapiens
  misc_RNA (1)...(19): siRNA sense strand
gagaugaccccuuaugaag

SEQ ID NO: 2028173 - RNA, 19 nt, Homo sapiens
  misc_RNA (1)...(19): siRNA sense strand
agacgucggacuucacgaa

SEQ ID NO: 2028174 - RNA, 19 nt, Homo sapiens
  misc_RNA (1)...(19): siRNA sense strand
gacgucggacuucacgaaa

SEQ ID NO: 2028175 - RNA, 19 nt, Homo sapiens
  misc_RNA (1)...(19): siRNA sense strand
ugagcuucaugguggagaa

SEQ ID NO: 2028176 - RNA, 19 nt, Homo sapiens
  misc_RNA (1)...(19): siRNA sense strand
caaaccucccaguaucuau

SEQ ID NO: 2028177 - RNA, 19 nt, Homo sapiens
  misc_RNA (1)...(19): siRNA sense strand
auagagacgucggacuuca

SEQ ID NO: 2028178 - RNA, 19 nt, Homo sapiens
  misc_RNA (1)...(19): siRNA sense strand
gcccagagaugaccccuua

SEQ ID NO: 2028179 - RNA, 19 nt, Homo sapiens
  misc_RNA (1)...(19): siRNA sense strand
gagaugaccccuuaugaag

SEQ ID NO: 2028180 - RNA, 19 nt, Homo sapiens
  misc_RNA (1)...(19): siRNA sense strand
gugcagaguuuagcauuua

SEQ ID NO: 2028181 - RNA, 19 nt, Homo sapiens
  misc_RNA (1)...(19): siRNA sense strand
gcacaagacgaacucagua

SEQ ID NO: 2028182 - RNA, 19 nt, Homo sapiens
  misc_RNA (1)...(19): siRNA sense strand
cagagaauuuccuuucaaa

SEQ ID NO: 2028183 - RNA, 19 nt, Homo sapiens
  misc_RNA (1)...(19): siRNA sense strand
ccagagaauuuccuuucaa

SEQ ID NO: 2028184 - RNA, 19 nt, Homo sapiens
  misc_RNA (1)...(19): siRNA sense strand
ugaauuauuuccugaaguc

SEQ ID NO: 2028185 - RNA, 19 nt, Homo sapiens
  misc_RNA (1)...(19): siRNA sense strand
acagaaagcacaagacgaa

SEQ ID NO: 2028186 - RNA, 19 nt, Homo sapiens
  misc_RNA (1)...(19): siRNA sense strand
gagcaucgcgcaggaguga

SEQ ID NO: 2028187 - RNA, 19 nt, Homo sapiens
  misc_RNA (1)...(19): siRNA sense strand
cccaguaucuauaugauca

SEQ ID NO: 2028188 - RNA, 19 nt, Homo sapiens
  misc_RNA (1)...(19): siRNA sense strand
guauagagacgucggacuu

SEQ ID NO: 2028189 - RNA, 19 nt, Homo sapiens
  misc_RNA (1)...(19): siRNA sense strand
aaaccucccaguaucuaua

SEQ ID NO: 2028190 - RNA, 19 nt, Homo sapiens
  misc_RNA (1)...(19): siRNA sense strand
uuucaaaccucccaguauc

SEQ ID NO: 2028191 - RNA, 19 nt, Homo sapiens
  misc_RNA (1)...(19): siRNA sense strand
cuggcgaacuuguuuguga

SEQ ID NO: 2028192 - RNA, 19 nt, Homo sapiens
  misc_RNA (1)...(19): siRNA sense strand
gaaagcacaagacgaacuc

SEQ ID NO: 2028193 - RNA, 19 nt, Homo sapiens
  misc_RNA (1)...(19): siRNA sense strand
uggaggagauuaaacaaaa

SEQ ID NO: 2028194 - RNA, 19 nt, Homo sapiens
  misc_RNA (1)...(19): siRNA sense strand
gaagucguggaggagauua

SEQ ID NO: 2028195 - RNA, 19 nt, Homo sapiens
  misc_RNA (1)...(19): siRNA sense strand
gguuugcagccuuugcuua

SEQ ID NO: 2028196 - RNA, 19 nt, Homo sapiens
  misc_RNA (1)...(19): siRNA sense strand
gucuuucuaucacggauuu

SEQ ID NO: 2028197 - RNA, 19 nt, Homo sapiens
  misc_RNA (1)...(19): siRNA sense strand
ucaaaccucccaguaucua

SEQ ID NO: 2028198 - RNA, 19 nt, Homo sapiens
  misc_RNA (1)...(19): siRNA sense strand
uugcuuacacggucaagua

SEQ ID NO: 2028199 - RNA, 19 nt, Homo sapiens
  misc_RNA (1)...(19): siRNA sense strand
cccagagaauuuccuuuca

SEQ ID NO: 2028200 - RNA, 19 nt, Homo sapiens
  misc_RNA (1)...(19): siRNA sense strand
cgaacuuguuugugauagu

SEQ ID NO: 2028201 - RNA, 19 nt, Homo sapiens
  misc_RNA (1)...(19): siRNA sense strand
gagaauuuccuuucaaacc

SEQ ID NO: 2028202 - RNA, 19 nt, Homo sapiens
  misc_RNA (1)...(19): siRNA sense strand
gugaauuauuuccugaagu

SEQ ID NO: 2028203 - RNA, 19 nt, Homo sapiens
  misc_RNA (1)...(19): siRNA sense strand
guggaggagauuaaacaaa

SEQ ID NO: 2028204 - RNA, 19 nt, Homo sapiens
  misc_RNA (1)...(19): siRNA sense strand
ggcgaacuuguuugugaua

SEQ ID NO: 2028205 - RNA, 19 nt, Homo sapiens
  misc_RNA (1)...(19): siRNA sense strand
caagacgaacucaguagca

SEQ ID NO: 2028206 - RNA, 19 nt, Homo sapiens
  misc_RNA (1)...(19): siRNA sense strand
agugcagaguuuagcauuu

SEQ ID NO: 2028207 - RNA, 19 nt, Homo sapiens
  misc_RNA (1)...(19): siRNA sense strand
gcagaguuuagcauuuaau

SEQ ID NO: 2028208 - RNA, 19 nt, Homo sapiens
  misc_RNA (1)...(19): siRNA sense strand
ccaacgggagguuuaagug

SEQ ID NO: 2028209 - RNA, 19 nt, Homo sapiens
  misc_RNA (1)...(19): siRNA sense strand
agaauuuccuuucaaaccu

SEQ ID NO: 2028210 - RNA, 19 nt, Homo sapiens
  misc_RNA (1)...(19): siRNA sense strand
gcgaacuuguuugugauag

SEQ ID NO: 2028211 - RNA, 19 nt, Homo sapiens
  misc_RNA (1)...(19): siRNA sense strand
ugcagaguuuagcauuuaa

SEQ ID NO: 2028212 - RNA, 19 nt, Homo sapiens
  misc_RNA (1)...(19): siRNA sense strand
agacgucggacuucacgaa

SEQ ID NO: 2028213 - RNA, 19 nt, Homo sapiens
  misc_RNA (1)...(19): siRNA sense strand
gacgucggacuucacgaaa

SEQ ID NO: 2028214 - RNA, 19 nt, Homo sapiens
  misc_RNA (1)...(19): siRNA sense strand
ugagcuucaugguggagaa

SEQ ID NO: 2028215 - RNA, 19 nt, Homo sapiens
  misc_RNA (1)...(19): siRNA sense strand
caaaccucccaguaucuau

SEQ ID NO: 2028216 - RNA, 19 nt, Homo sapiens
  misc_RNA (1)...(19): siRNA sense strand
auagagacgucggacuuca

SEQ ID NO: 2028217 - RNA, 19 nt, Homo sapiens
  misc_RNA (1)...(19): siRNA sense strand
gugcagaguuuagcauuua

SEQ ID NO: 2028218 - RNA, 19 nt, Homo sapiens
  misc_RNA (1)...(19): siRNA sense strand
gcacaagacgaacucagua

SEQ ID NO: 2028219 - RNA, 19 nt, Homo sapiens
  misc_RNA (1)...(19): siRNA sense strand
cagagaauuuccuuucaaa

SEQ ID NO: 2028220 - RNA, 19 nt, Homo sapiens
  misc_RNA (1)...(19): siRNA sense strand
ccagagaauuuccuuucaa

SEQ ID NO: 2028221 - RNA, 19 nt, Homo sapiens
  misc_RNA (1)...(19): siRNA sense strand
ugaauuauuuccugaaguc

SEQ ID NO: 2028222 - RNA, 19 nt, Homo sapiens
  misc_RNA (1)...(19): siRNA sense strand
acagaaagcacaagacgaa

SEQ ID NO: 2028223 - RNA, 19 nt, Homo sapiens
  misc_RNA (1)...(19): siRNA sense strand
gagcaucgcgcaggaguga

SEQ ID NO: 2028224 - RNA, 19 nt, Homo sapiens
  misc_RNA (1)...(19): siRNA sense strand
cccaguaucuauaugauca

SEQ ID NO: 2028225 - RNA, 19 nt, Homo sapiens
  misc_RNA (1)...(19): siRNA sense strand
guauagagacgucggacuu

SEQ ID NO: 2028226 - RNA, 19 nt, Homo sapiens
  misc_RNA (1)...(19): siRNA sense strand
aaaccucccaguaucuaua

SEQ ID NO: 2028227 - RNA, 19 nt, Homo sapiens
  misc_RNA (1)...(19): siRNA sense strand
uuucaaaccucccaguauc

SEQ ID NO: 2028228 - RNA, 19 nt, Homo sapiens
  misc_RNA (1)...(19): siRNA sense strand
cuggcgaacuuguuuguga

SEQ ID NO: 2028229 - RNA, 19 nt, Homo sapiens
  misc_RNA (1)...(19): siRNA sense strand
gaaagcacaagacgaacuc

SEQ ID NO: 2028230 - RNA, 19 nt, Homo sapiens
  misc_RNA (1)...(19): siRNA sense strand
uggaggagauuaaacaaaa

SEQ ID NO: 2028231 - RNA, 19 nt, Homo sapiens
  misc_RNA (1)...(19): siRNA sense strand
gaagucguggaggagauua

SEQ ID NO: 2028232 - RNA, 19 nt, Homo sapiens
  misc_RNA (1)...(19): siRNA sense strand
gguuugcagccuuugcuua

SEQ ID NO: 2028233 - RNA, 19 nt, Homo sapiens
  misc_RNA (1)...(19): siRNA sense strand
gucuuucuaucacggauuu

SEQ ID NO: 2028234 - RNA, 19 nt, Homo sapiens
  misc_RNA (1)...(19): siRNA sense strand
ucaaaccucccaguaucua

SEQ ID NO: 2028235 - RNA, 19 nt, Homo sapiens
  misc_RNA (1)...(19): siRNA sense strand
uugcuuacacggucaagua

SEQ ID NO: 2028236 - RNA, 19 nt, Homo sapiens
  misc_RNA (1)...(19): siRNA sense strand
cccagagaauuuccuuuca

SEQ ID NO: 2028237 - RNA, 19 nt, Homo sapiens
  misc_RNA (1)...(19): siRNA sense strand
cgaacuuguuugugauagu

SEQ ID NO: 2028238 - RNA, 19 nt, Homo sapiens
  misc_RNA (1)...(19): siRNA sense strand
gagaauuuccuuucaaacc

SEQ ID NO: 2028239 - RNA, 19 nt, Homo sapiens
  misc_RNA (1)...(19): siRNA sense strand
gugaauuauuuccugaagu

SEQ ID NO: 2028240 - RNA, 19 nt, Homo sapiens
  misc_RNA (1)...(19): siRNA sense strand
guggaggagauuaaacaaa

SEQ ID NO: 2028241 - RNA, 19 nt, Homo sapiens
  misc_RNA (1)...(19): siRNA sense strand
ggcgaacuuguuugugaua

SEQ ID NO: 2028242 - RNA, 19 nt, Homo sapiens
  misc_RNA (1)...(19): siRNA sense strand
caagacgaacucaguagca

SEQ ID NO: 2028243 - RNA, 19 nt, Homo sapiens
  misc_RNA (1)...(19): siRNA sense strand
agugcagaguuuagcauuu

SEQ ID NO: 2028244 - RNA, 19 nt, Homo sapiens
  misc_RNA (1)...(19): siRNA sense strand
gcagaguuuagcauuuaau

SEQ ID NO: 2028245 - RNA, 19 nt, Homo sapiens
  misc_RNA (1)...(19): siRNA sense strand
ccaacgggagguuuaagug

SEQ ID NO: 2028246 - RNA, 19 nt, Homo sapiens
  misc_RNA (1)...(19): siRNA sense strand
agaauuuccuuucaaaccu

SEQ ID NO: 2028247 - RNA, 19 nt, Homo sapiens
  misc_RNA (1)...(19): siRNA sense strand
gcgaacuuguuugugauag

SEQ ID NO: 2028248 - RNA, 19 nt, Homo sapiens
  misc_RNA (1)...(19): siRNA sense strand
ugcagaguuuagcauuuaa

SEQ ID NO: 2028249 - RNA, 19 nt, Homo sapiens
  misc_RNA (1)...(19): siRNA sense strand
agacgucggacuucacgaa

SEQ ID NO: 2028250 - RNA, 19 nt, Homo sapiens
  misc_RNA (1)...(19): siRNA sense strand
gacgucggacuucacgaaa

SEQ ID NO: 2028251 - RNA, 19 nt, Homo sapiens
  misc_RNA (1)...(19): siRNA sense strand
ugagcuucaugguggagaa

SEQ ID NO: 2028252 - RNA, 19 nt, Homo sapiens
  misc_RNA (1)...(19): siRNA sense strand
caaaccucccaguaucuau

SEQ ID NO: 2028253 - RNA, 19 nt, Homo sapiens
  misc_RNA (1)...(19): siRNA sense strand
auagagacgucggacuuca

SEQ ID NO: 2028254 - RNA, 19 nt, Homo sapiens
  misc_RNA (1)...(19): siRNA sense strand
gugcagaguuuagcauuua

SEQ ID NO: 2028255 - RNA, 19 nt, Homo sapiens
  misc_RNA (1)...(19): siRNA sense strand
gcacaagacgaacucagua

SEQ ID NO: 2028256 - RNA, 19 nt, Homo sapiens
  misc_RNA (1)...(19): siRNA sense strand
cagagaauuuccuuucaaa

SEQ ID NO: 2028257 - RNA, 19 nt, Homo sapiens
  misc_RNA (1)...(19): siRNA sense strand
ccagagaauuuccuuucaa

SEQ ID NO: 2028258 - RNA, 19 nt, Homo sapiens
  misc_RNA (1)...(19): siRNA sense strand
gcccagagaugaccccuua

SEQ ID NO: 2028259 - RNA, 19 nt, Homo sapiens
  misc_RNA (1)...(19): siRNA sense strand
ugaauuauuuccugaaguc

SEQ ID NO: 2028260 - RNA, 19 nt, Homo sapiens
  misc_RNA (1)...(19): siRNA sense strand
acagaaagcacaagacgaa

SEQ ID NO: 2028261 - RNA, 19 nt, Homo sapiens
  misc_RNA (1)...(19): siRNA sense strand
gagcaucgcgcaggaguga

SEQ ID NO: 2028262 - RNA, 19 nt, Homo sapiens
  misc_RNA (1)...(19): siRNA sense strand
cccaguaucuauaugauca

SEQ ID NO: 2028263 - RNA, 19 nt, Homo sapiens
  misc_RNA (1)...(19): siRNA sense strand
guauagagacgucggacuu

SEQ ID NO: 2028264 - RNA, 19 nt, Homo sapiens
  misc_RNA (1)...(19): siRNA sense strand
aaaccucccaguaucuaua

SEQ ID NO: 2028265 - RNA, 19 nt, Homo sapiens
  misc_RNA (1)...(19): siRNA sense strand
uuucaaaccucccaguauc

SEQ ID NO: 2028266 - RNA, 19 nt, Homo sapiens
  misc_RNA (1)...(19): siRNA sense strand
cuggcgaacuuguuuguga

SEQ ID NO: 2028267 - RNA, 19 nt, Homo sapiens
  misc_RNA (1)...(19): siRNA sense strand
gaaagcacaagacgaacuc

SEQ ID NO: 2028268 - RNA, 19 nt, Homo sapiens
  misc_RNA (1)...(19): siRNA sense strand
uggaggagauuaaacaaaa

SEQ ID NO: 2028269 - RNA, 19 nt, Homo sapiens
  misc_RNA (1)...(19): siRNA sense strand
gaagucguggaggagauua

SEQ ID NO: 2028270 - RNA, 19 nt, Homo sapiens
  misc_RNA (1)...(19): siRNA sense strand
gguuugcagccuuugcuua

SEQ ID NO: 2028271 - RNA, 19 nt, Homo sapiens
  misc_RNA (1)...(19): siRNA sense strand
gucuuucuaucacggauuu

SEQ ID NO: 2028272 - RNA, 19 nt, Homo sapiens
  misc_RNA (1)...(19): siRNA sense strand
ucaaaccucccaguaucua

SEQ ID NO: 2028273 - RNA, 19 nt, Homo sapiens
  misc_RNA (1)...(19): siRNA sense strand
uugcuuacacggucaagua

SEQ ID NO: 2028274 - RNA, 19 nt, Homo sapiens
  misc_RNA (1)...(19): siRNA sense strand
gagaauuuccuuucaaacc

SEQ ID NO: 2028275 - RNA, 19 nt, Homo sapiens
  misc_RNA (1)...(19): siRNA sense strand
cccagagaauuuccuuuca

SEQ ID NO: 2028276 - RNA, 19 nt, Homo sapiens
  misc_RNA (1)...(19): siRNA sense strand
cgaacuuguuugugauagu

SEQ ID NO: 2028277 - RNA, 19 nt, Homo sapiens
  misc_RNA (1)...(19): siRNA sense strand
gugaauuauuuccugaagu

SEQ ID NO: 2028278 - RNA, 19 nt, Homo sapiens
  misc_RNA (1)...(19): siRNA sense strand
guggaggagauuaaacaaa

SEQ ID NO: 2028279 - RNA, 19 nt, Homo sapiens
  misc_RNA (1)...(19): siRNA sense strand
ggcgaacuuguuugugaua

SEQ ID NO: 2028280 - RNA, 19 nt, Homo sapiens
  misc_RNA (1)...(19): siRNA sense strand
caagacgaacucaguagca

SEQ ID NO: 2028281 - RNA, 19 nt, Homo sapiens
  misc_RNA (1)...(19): siRNA sense strand
agugcagaguuuagcauuu

SEQ ID NO: 2028282 - RNA, 19 nt, Homo sapiens
  misc_RNA (1)...(19): siRNA sense strand
gcagaguuuagcauuuaau

SEQ ID NO: 2028283 - RNA, 19 nt, Homo sapiens
  misc_RNA (1)...(19): siRNA sense strand
ccaacgggagguuuaagug

SEQ ID NO: 2028284 - RNA, 19 nt, Homo sapiens
  misc_RNA (1)...(19): siRNA sense strand
gcgaacuuguuugugauag

SEQ ID NO: 2028285 - RNA, 19 nt, Homo sapiens
  misc_RNA (1)...(19): siRNA sense strand
agaauuuccuuucaaaccu

SEQ ID NO: 2028286 - RNA, 19 nt, Homo sapiens
  misc_RNA (1)...(19): siRNA sense strand
ugcagaguuuagcauuuaa

SEQ ID NO: 2028287 - RNA, 19 nt, Homo sapiens
  misc_RNA (1)...(19): siRNA sense strand
gagaugaccccuuaugaag

SEQ ID NO: 2028288 - RNA, 19 nt, Homo sapiens
  misc_RNA (1)...(19): siRNA sense strand
agacgucggacuucacgaa

SEQ ID NO: 2028289 - RNA, 19 nt, Homo sapiens
  misc_RNA (1)...(19): siRNA sense strand
gacgucggacuucacgaaa

SEQ ID NO: 2028290 - RNA, 19 nt, Homo sapiens
  misc_RNA (1)...(19): siRNA sense strand
ugagcuucaugguggagaa

SEQ ID NO: 2028291 - RNA, 19 nt, Homo sapiens
  misc_RNA (1)...(19): siRNA sense strand
caaaccucccaguaucuau

SEQ ID NO: 2028292 - RNA, 19 nt, Homo sapiens
  misc_RNA (1)...(19): siRNA sense strand
auagagacgucggacuuca

SEQ ID NO: 2028293 - RNA, 19 nt, Homo sapiens
  misc_RNA (1)...(19): siRNA sense strand
gugcagaguuuagcauuua

SEQ ID NO: 2028294 - RNA, 19 nt, Homo sapiens
  misc_RNA (1)...(19): siRNA sense strand
gcacaagacgaacucagua

SEQ ID NO: 2028295 - RNA, 19 nt, Homo sapiens
  misc_RNA (1)...(19): siRNA sense strand
cagagaauuuccuuucaaa

SEQ ID NO: 2028296 - RNA, 19 nt, Homo sapiens
  misc_RNA (1)...(19): siRNA sense strand
ccagagaauuuccuuucaa

SEQ ID NO: 2028297 - RNA, 19 nt, Homo sapiens
  misc_RNA (1)...(19): siRNA sense strand
gcccagagaugaccccuua

SEQ ID NO: 2028298 - RNA, 19 nt, Homo sapiens
  misc_RNA (1)...(19): siRNA sense strand
ugaauuauuuccugaaguc

SEQ ID NO: 2028299 - RNA, 19 nt, Homo sapiens
  misc_RNA (1)...(19): siRNA sense strand
acagaaagcacaagacgaa

SEQ ID NO: 2028300 - RNA, 19 nt, Homo sapiens
  misc_RNA (1)...(19): siRNA sense strand
gagcaucgcgcaggaguga

SEQ ID NO: 2028301 - RNA, 19 nt, Homo sapiens
  misc_RNA (1)...(19): siRNA sense strand
cccaguaucuauaugauca

SEQ ID NO: 2028302 - RNA, 19 nt, Homo sapiens
  misc_RNA (1)...(19): siRNA sense strand
guauagagacgucggacuu

SEQ ID NO: 2028303 - RNA, 19 nt, Homo sapiens
  misc_RNA (1)...(19): siRNA sense strand
aaaccucccaguaucuaua

SEQ ID NO: 2028304 - RNA, 19 nt, Homo sapiens
  misc_RNA (1)...(19): siRNA sense strand
uuucaaaccucccaguauc

SEQ ID NO: 2028305 - RNA, 19 nt, Homo sapiens
  misc_RNA (1)...(19): siRNA sense strand
cuggcgaacuuguuuguga

SEQ ID NO: 2028306 - RNA, 19 nt, Homo sapiens
  misc_RNA (1)...(19): siRNA sense strand
gaaagcacaagacgaacuc

SEQ ID NO: 2028307 - RNA, 19 nt, Homo sapiens
  misc_RNA (1)...(19): siRNA sense strand
uggaggagauuaaacaaaa

SEQ ID NO: 2028308 - RNA, 19 nt, Homo sapiens
  misc_RNA (1)...(19): siRNA sense strand
gaagucguggaggagauua

SEQ ID NO: 2028309 - RNA, 19 nt, Homo sapiens
  misc_RNA (1)...(19): siRNA sense strand
gguuugcagccuuugcuua

SEQ ID NO: 2028310 - RNA, 19 nt, Homo sapiens
  misc_RNA (1)...(19): siRNA sense strand
gucuuucuaucacggauuu

SEQ ID NO: 2028311 - RNA, 19 nt, Homo sapiens
  misc_RNA (1)...(19): siRNA sense strand
ucaaaccucccaguaucua

SEQ ID NO: 2028312 - RNA, 19 nt, Homo sapiens
  misc_RNA (1)...(19): siRNA sense strand
uugcuuacacggucaagua

SEQ ID NO: 2028313 - RNA, 19 nt, Homo sapiens
  misc_RNA (1)...(19): siRNA sense strand
gagaauuuccuuucaaacc

SEQ ID NO: 2028314 - RNA, 19 nt, Homo sapiens
  misc_RNA (1)...(19): siRNA sense strand
cccagagaauuuccuuuca

SEQ ID NO: 2028315 - RNA, 19 nt, Homo sapiens
  misc_RNA (1)...(19): siRNA sense strand
cgaacuuguuugugauagu

SEQ ID NO: 2028316 - RNA, 19 nt, Homo sapiens
  misc_RNA (1)...(19): siRNA sense strand
gugaauuauuuccugaagu

SEQ ID NO: 2028317 - RNA, 19 nt, Homo sapiens
  misc_RNA (1)...(19): siRNA sense strand
guggaggagauuaaacaaa

SEQ ID NO: 2028318 - RNA, 19 nt, Homo sapiens
  misc_RNA (1)...(19): siRNA sense strand
ggcgaacuuguuugugaua

SEQ ID NO: 2028319 - RNA, 19 nt, Homo sapiens
  misc_RNA (1)...(19): siRNA sense strand
caagacgaacucaguagca

SEQ ID NO: 2028320 - RNA, 19 nt, Homo sapiens
  misc_RNA (1)...(19): siRNA sense strand
agugcagaguuuagcauuu

SEQ ID NO: 2028321 - RNA, 19 nt, Homo sapiens
  misc_RNA (1)...(19): siRNA sense strand
gcagaguuuagcauuuaau

SEQ ID NO: 2028322 - RNA, 19 nt, Homo sapiens
  misc_RNA (1)...(19): siRNA sense strand
ccaacgggagguuuaagug

SEQ ID NO: 2028323 - RNA, 19 nt, Homo sapiens
  misc_RNA (1)...(19): siRNA sense strand
gcgaacuuguuugugauag

SEQ ID NO: 2028324 - RNA, 19 nt, Homo sapiens
  misc_RNA (1)...(19): siRNA sense strand
agaauuuccuuucaaaccu

SEQ ID NO: 2028325 - RNA, 19 nt, Homo sapiens
  misc_RNA (1)...(19): siRNA sense strand
ugcagaguuuagcauuuaa

SEQ ID NO: 2028326 - RNA, 19 nt, Homo sapiens
  misc_RNA (1)...(19): siRNA sense strand
gagaugaccccuuaugaag

SEQ ID NO: 2028327 - RNA, 19 nt, Homo sapiens
  misc_RNA (1)...(19): siRNA sense strand
agacgucggacuucacgaa

SEQ ID NO: 2028328 - RNA, 19 nt, Homo sapiens
  misc_RNA (1)...(19): siRNA sense strand
gacgucggacuucacgaaa

SEQ ID NO: 2028329 - RNA, 19 nt, Homo sapiens
  misc_RNA (1)...(19): siRNA sense strand
ugagcuucaugguggagaa

SEQ ID NO: 2028330 - RNA, 19 nt, Homo sapiens
  misc_RNA (1)...(19): siRNA sense strand
caaaccucccaguaucuau

SEQ ID NO: 2028331 - RNA, 19 nt, Homo sapiens
  misc_RNA (1)...(19): siRNA sense strand
auagagacgucggacuuca

SEQ ID NO: 2028332 - RNA, 19 nt, Homo sapiens
  misc_RNA (1)...(19): siRNA sense strand
gcccagagaugaccccuua

SEQ ID NO: 2028333 - RNA, 19 nt, Homo sapiens
  misc_RNA (1)...(19): siRNA sense strand
gagaugaccccuuaugaag

SEQ ID NO: 2028334 - RNA, 19 nt, Homo sapiens
  misc_RNA (1)...(19): siRNA sense strand
gugcagaguuuagcauuua

SEQ ID NO: 2028335 - RNA, 19 nt, Homo sapiens
  misc_RNA (1)...(19): siRNA sense strand
gcacaagacgaacucagua

SEQ ID NO: 2028336 - RNA, 19 nt, Homo sapiens
  misc_RNA (1)...(19): siRNA sense strand
cagagaauuuccuuucaaa

SEQ ID NO: 2028337 - RNA, 19 nt, Homo sapiens
  misc_RNA (1)...(19): siRNA sense strand
ccagagaauuuccuuucaa

SEQ ID NO: 2028338 - RNA, 19 nt, Homo sapiens
  misc_RNA (1)...(19): siRNA sense strand
ugaauuauuuccugaaguc

SEQ ID NO: 2028339 - RNA, 19 nt, Homo sapiens
  misc_RNA (1)...(19): siRNA sense strand
acagaaagcacaagacgaa

SEQ ID NO: 2028340 - RNA, 19 nt, Homo sapiens
  misc_RNA (1)...(19): siRNA sense strand
gagcaucgcgcaggaguga

SEQ ID NO: 2028341 - RNA, 19 nt, Homo sapiens
  misc_RNA (1)...(19): siRNA sense strand
cccaguaucuauaugauca

SEQ ID NO: 2028342 - RNA, 19 nt, Homo sapiens
  misc_RNA (1)...(19): siRNA sense strand
guauagagacgucggacuu

SEQ ID NO: 2028343 - RNA, 19 nt, Homo sapiens
  misc_RNA (1)...(19): siRNA sense strand
aaaccucccaguaucuaua

SEQ ID NO: 2028344 - RNA, 19 nt, Homo sapiens
  misc_RNA (1)...(19): siRNA sense strand
uuucaaaccucccaguauc

SEQ ID NO: 2028345 - RNA, 19 nt, Homo sapiens
  misc_RNA (1)...(19): siRNA sense strand
cuggcgaacuuguuuguga

SEQ ID NO: 2028346 - RNA, 19 nt, Homo sapiens
  misc_RNA (1)...(19): siRNA sense strand
gaaagcacaagacgaacuc

SEQ ID NO: 2028347 - RNA, 19 nt, Homo sapiens
  misc_RNA (1)...(19): siRNA sense strand
uggaggagauuaaacaaaa

SEQ ID NO: 2028348 - RNA, 19 nt, Homo sapiens
  misc_RNA (1)...(19): siRNA sense strand
gaagucguggaggagauua

SEQ ID NO: 2028349 - RNA, 19 nt, Homo sapiens
  misc_RNA (1)...(19): siRNA sense strand
gguuugcagccuuugcuua

SEQ ID NO: 2028350 - RNA, 19 nt, Homo sapiens
  misc_RNA (1)...(19): siRNA sense strand
gucuuucuaucacggauuu

SEQ ID NO: 2028351 - RNA, 19 nt, Homo sapiens
  misc_RNA (1)...(19): siRNA sense strand
ucaaaccucccaguaucua

SEQ ID NO: 2028352 - RNA, 19 nt, Homo sapiens
  misc_RNA (1)...(19): siRNA sense strand
uugcuuacacggucaagua

SEQ ID NO: 2028353 - RNA, 19 nt, Homo sapiens
  misc_RNA (1)...(19): siRNA sense strand
cccagagaauuuccuuuca

SEQ ID NO: 2028354 - RNA, 19 nt, Homo sapiens
  misc_RNA (1)...(19): siRNA sense strand
cgaacuuguuugugauagu

SEQ ID NO: 2028355 - RNA, 19 nt, Homo sapiens
  misc_RNA (1)...(19): siRNA sense strand
gagaauuuccuuucaaacc

SEQ ID NO: 2028356 - RNA, 19 nt, Homo sapiens
  misc_RNA (1)...(19): siRNA sense strand
gugaauuauuuccugaagu

SEQ ID NO: 2028357 - RNA, 19 nt, Homo sapiens
  misc_RNA (1)...(19): siRNA sense strand
guggaggagauuaaacaaa

SEQ ID NO: 2028358 - RNA, 19 nt, Homo sapiens
  misc_RNA (1)...(19): siRNA sense strand
ggcgaacuuguuugugaua

SEQ ID NO: 2028359 - RNA, 19 nt, Homo sapiens
  misc_RNA (1)...(19): siRNA sense strand
caagacgaacucaguagca

SEQ ID NO: 2028360 - RNA, 19 nt, Homo sapiens
  misc_RNA (1)...(19): siRNA sense strand
agugcagaguuuagcauuu

SEQ ID NO: 2028361 - RNA, 19 nt, Homo sapiens
  misc_RNA (1)...(19): siRNA sense strand
gcagaguuuagcauuuaau

SEQ ID NO: 2028362 - RNA, 19 nt, Homo sapiens
  misc_RNA (1)...(19): siRNA sense strand
ccaacgggagguuuaagug

SEQ ID NO: 2028363 - RNA, 19 nt, Homo sapiens
  misc_RNA (1)...(19): siRNA sense strand
agaauuuccuuucaaaccu

SEQ ID NO: 2028364 - RNA, 19 nt, Homo sapiens
  misc_RNA (1)...(19): siRNA sense strand
gcgaacuuguuugugauag

SEQ ID NO: 2028365 - RNA, 19 nt, Homo sapiens
  misc_RNA (1)...(19): siRNA sense strand
ugcagaguuuagcauuuaa

SEQ ID NO: 2028366 - RNA, 19 nt, Homo sapiens
  misc_RNA (1)...(19): siRNA sense strand
agacgucggacuucacgaa

SEQ ID NO: 2028367 - RNA, 19 nt, Homo sapiens
  misc_RNA (1)...(19): siRNA sense strand
gacgucggacuucacgaaa

SEQ ID NO: 2028368 - RNA, 19 nt, Homo sapiens
  misc_RNA (1)...(19): siRNA sense strand
ugagcuucaugguggagaa

SEQ ID NO: 2028369 - RNA, 19 nt, Homo sapiens
  misc_RNA (1)...(19): siRNA sense strand
caaaccucccaguaucuau

SEQ ID NO: 2028370 - RNA, 19 nt, Homo sapiens
  misc_RNA (1)...(19): siRNA sense strand
auagagacgucggacuuca

SEQ ID NO: 2028371 - RNA, 19 nt, Homo sapiens
  misc_RNA (1)...(19): siRNA sense strand
gugcagaguuuagcauuua

SEQ ID NO: 2028372 - RNA, 19 nt, Homo sapiens
  misc_RNA (1)...(19): siRNA sense strand
gcacaagacgaacucagua

SEQ ID NO: 2028373 - RNA, 19 nt, Homo sapiens
  misc_RNA (1)...(19): siRNA sense strand
cagagaauuuccuuucaaa

SEQ ID NO: 2028374 - RNA, 19 nt, Homo sapiens
  misc_RNA (1)...(19): siRNA sense strand
ccagagaauuuccuuucaa

SEQ ID NO: 2028375 - RNA, 19 nt, Homo sapiens
  misc_RNA (1)...(19): siRNA sense strand
ugaauuauuuccugaaguc

SEQ ID NO: 2028376 - RNA, 19 nt, Homo sapiens
  misc_RNA (1)...(19): siRNA sense strand
acagaaagcacaagacgaa

SEQ ID NO: 2028377 - RNA, 19 nt, Homo sapiens
  misc_RNA (1)...(19): siRNA sense strand
gagcaucgcgcaggaguga

SEQ ID NO: 2028378 - RNA, 19 nt, Homo sapiens
  misc_RNA (1)...(19): siRNA sense strand
cccaguaucuauaugauca

SEQ ID NO: 2028379 - RNA, 19 nt, Homo sapiens
  misc_RNA (1)...(19): siRNA sense strand
guauagagacgucggacuu

SEQ ID NO: 2028380 - RNA, 19 nt, Homo sapiens
  misc_RNA (1)...(19): siRNA sense strand
aaaccucccaguaucuaua

SEQ ID NO: 2028381 - RNA, 19 nt, Homo sapiens
  misc_RNA (1)...(19): siRNA sense strand
uuucaaaccucccaguauc

SEQ ID NO: 2028382 - RNA, 19 nt, Homo sapiens
  misc_RNA (1)...(19): siRNA sense strand
cuggcgaacuuguuuguga

SEQ ID NO: 2028383 - RNA, 19 nt, Homo sapiens
  misc_RNA (1)...(19): siRNA sense strand
gaaagcacaagacgaacuc

SEQ ID NO: 2028384 - RNA, 19 nt, Homo sapiens
  misc_RNA (1)...(19): siRNA sense strand
uggaggagauuaaacaaaa

SEQ ID NO: 2028385 - RNA, 19 nt, Homo sapiens
  misc_RNA (1)...(19): siRNA sense strand
gaagucguggaggagauua

SEQ ID NO: 2028386 - RNA, 19 nt, Homo sapiens
  misc_RNA (1)...(19): siRNA sense strand
gguuugcagccuuugcuua

SEQ ID NO: 2028387 - RNA, 19 nt, Homo sapiens
  misc_RNA (1)...(19): siRNA sense strand
gucuuucuaucacggauuu

SEQ ID NO: 2028388 - RNA, 19 nt, Homo sapiens
  misc_RNA (1)...(19): siRNA sense strand
ucaaaccucccaguaucua

SEQ ID NO: 2028389 - RNA, 19 nt, Homo sapiens
  misc_RNA (1)...(19): siRNA sense strand
uugcuuacacggucaagua

SEQ ID NO: 2028390 - RNA, 19 nt, Homo sapiens
  misc_RNA (1)...(19): siRNA sense strand
cccagagaauuuccuuuca

SEQ ID NO: 2028391 - RNA, 19 nt, Homo sapiens
  misc_RNA (1)...(19): siRNA sense strand
cgaacuuguuugugauagu

SEQ ID NO: 2028392 - RNA, 19 nt, Homo sapiens
  misc_RNA (1)...(19): siRNA sense strand
gagaauuuccuuucaaacc

SEQ ID NO: 2028393 - RNA, 19 nt, Homo sapiens
  misc_RNA (1)...(19): siRNA sense strand
gugaauuauuuccugaagu

SEQ ID NO: 2028394 - RNA, 19 nt, Homo sapiens
  misc_RNA (1)...(19): siRNA sense strand
guggaggagauuaaacaaa

SEQ ID NO: 2028395 - RNA, 19 nt, Homo sapiens
  misc_RNA (1)...(19): siRNA sense strand
ggcgaacuuguuugugaua

SEQ ID NO: 2028396 - RNA, 19 nt, Homo sapiens
  misc_RNA (1)...(19): siRNA sense strand
caagacgaacucaguagca

SEQ ID NO: 2028397 - RNA, 19 nt, Homo sapiens
  misc_RNA (1)...(19): siRNA sense strand
agugcagaguuuagcauuu

SEQ ID NO: 2028398 - RNA, 19 nt, Homo sapiens
  misc_RNA (1)...(19): siRNA sense strand
gcagaguuuagcauuuaau

SEQ ID NO: 2028399 - RNA, 19 nt, Homo sapiens
  misc_RNA (1)...(19): siRNA sense strand
ccaacgggagguuuaagug

SEQ ID NO: 2028400 - RNA, 19 nt, Homo sapiens
  misc_RNA (1)...(19): siRNA sense strand
agaauuuccuuucaaaccu

SEQ ID NO: 2028401 - RNA, 19 nt, Homo sapiens
  misc_RNA (1)...(19): siRNA sense strand
gcgaacuuguuugugauag

SEQ ID NO: 2028402 - RNA, 19 nt, Homo sapiens
  misc_RNA (1)...(19): siRNA sense strand
ugcagaguuuagcauuuaa

SEQ ID NO: 2028403 - RNA, 19 nt, Homo sapiens
  misc_RNA (1)...(19): siRNA sense strand
agacgucggacuucacgaa

SEQ ID NO: 2028404 - RNA, 19 nt, Homo sapiens
  misc_RNA (1)...(19): siRNA sense strand
gacgucggacuucacgaaa

SEQ ID NO: 2028405 - RNA, 19 nt, Homo sapiens
  misc_RNA (1)...(19): siRNA sense strand
ugagcuucaugguggagaa

SEQ ID NO: 2028406 - RNA, 19 nt, Homo sapiens
  misc_RNA (1)...(19): siRNA sense strand
caaaccucccaguaucuau

SEQ ID NO: 2028407 - RNA, 19 nt, Homo sapiens
  misc_RNA (1)...(19): siRNA sense strand
auagagacgucggacuuca

SEQ ID NO: 2028408 - RNA, 19 nt, Homo sapiens
  misc_RNA (1)...(19): siRNA sense strand
gugcagaguuuagcauuua

SEQ ID NO: 2028409 - RNA, 19 nt, Homo sapiens
  misc_RNA (1)...(19): siRNA sense strand
gcacaagacgaacucagua

SEQ ID NO: 2028410 - RNA, 19 nt, Homo sapiens
  misc_RNA (1)...(19): siRNA sense strand
cagagaauuuccuuucaaa

SEQ ID NO: 2028411 - RNA, 19 nt, Homo sapiens
  misc_RNA (1)...(19): siRNA sense strand
ccagagaauuuccuuucaa

SEQ ID NO: 2028412 - RNA, 19 nt, Homo sapiens
  misc_RNA (1)...(19): siRNA sense strand
gcccagagaugaccccuua

SEQ ID NO: 2028413 - RNA, 19 nt, Homo sapiens
  misc_RNA (1)...(19): siRNA sense strand
ugaauuauuuccugaaguc

SEQ ID NO: 2028414 - RNA, 19 nt, Homo sapiens
  misc_RNA (1)...(19): siRNA sense strand
acagaaagcacaagacgaa

SEQ ID NO: 2028415 - RNA, 19 nt, Homo sapiens
  misc_RNA (1)...(19): siRNA sense strand
gagcaucgcgcaggaguga

SEQ ID NO: 2028416 - RNA, 19 nt, Homo sapiens
  misc_RNA (1)...(19): siRNA sense strand
cccaguaucuauaugauca

SEQ ID NO: 2028417 - RNA, 19 nt, Homo sapiens
  misc_RNA (1)...(19): siRNA sense strand
guauagagacgucggacuu

SEQ ID NO: 2028418 - RNA, 19 nt, Homo sapiens
  misc_RNA (1)...(19): siRNA sense strand
aaaccucccaguaucuaua

SEQ ID NO: 2028419 - RNA, 19 nt, Homo sapiens
  misc_RNA (1)...(19): siRNA sense strand
uuucaaaccucccaguauc

SEQ ID NO: 2028420 - RNA, 19 nt, Homo sapiens
  misc_RNA (1)...(19): siRNA sense strand
cuggcgaacuuguuuguga

SEQ ID NO: 2028421 - RNA, 19 nt, Homo sapiens
  misc_RNA (1)...(19): siRNA sense strand
gaaagcacaagacgaacuc

SEQ ID NO: 2028422 - RNA, 19 nt, Homo sapiens
  misc_RNA (1)...(19): siRNA sense strand
uggaggagauuaaacaaaa

SEQ ID NO: 2028423 - RNA, 19 nt, Homo sapiens
  misc_RNA (1)...(19): siRNA sense strand
gaagucguggaggagauua

SEQ ID NO: 2028424 - RNA, 19 nt, Homo sapiens
  misc_RNA (1)...(19): siRNA sense strand
gguuugcagccuuugcuua

SEQ ID NO: 2028425 - RNA, 19 nt, Homo sapiens
  misc_RNA (1)...(19): siRNA sense strand
gucuuucuaucacggauuu

SEQ ID NO: 2028426 - RNA, 19 nt, Homo sapiens
  misc_RNA (1)...(19): siRNA sense strand
ucaaaccucccaguaucua

SEQ ID NO: 2028427 - RNA, 19 nt, Homo sapiens
  misc_RNA (1)...(19): siRNA sense strand
uugcuuacacggucaagua

SEQ ID NO: 2028428 - RNA, 19 nt, Homo sapiens
  misc_RNA (1)...(19): siRNA sense strand
gagaauuuccuuucaaacc

SEQ ID NO: 2028429 - RNA, 19 nt, Homo sapiens
  misc_RNA (1)...(19): siRNA sense strand
cccagagaauuuccuuuca

SEQ ID NO: 2028430 - RNA, 19 nt, Homo sapiens
  misc_RNA (1)...(19): siRNA sense strand
cgaacuuguuugugauagu

SEQ ID NO: 2028431 - RNA, 19 nt, Homo sapiens
  misc_RNA (1)...(19): siRNA sense strand
gugaauuauuuccugaagu

SEQ ID NO: 2028432 - RNA, 19 nt, Homo sapiens
  misc_RNA (1)...(19): siRNA sense strand
guggaggagauuaaacaaa

SEQ ID NO: 2028433 - RNA, 19 nt, Homo sapiens
  misc_RNA (1)...(19): siRNA sense strand
ggcgaacuuguuugugaua

SEQ ID NO: 2028434 - RNA, 19 nt, Homo sapiens
  misc_RNA (1)...(19): siRNA sense strand
caagacgaacucaguagca

SEQ ID NO: 2028435 - RNA, 19 nt, Homo sapiens
  misc_RNA (1)...(19): siRNA sense strand
agugcagaguuuagcauuu

SEQ ID NO: 2028436 - RNA, 19 nt, Homo sapiens
  misc_RNA (1)...(19): siRNA sense strand
gcagaguuuagcauuuaau

SEQ ID NO: 2028437 - RNA, 19 nt, Homo sapiens
  misc_RNA (1)...(19): siRNA sense strand
ccaacgggagguuuaagug

SEQ ID NO: 2028438 - RNA, 19 nt, Homo sapiens
  misc_RNA (1)...(19): siRNA sense strand
gcgaacuuguuugugauag

SEQ ID NO: 2028439 - RNA, 19 nt, Homo sapiens
  misc_RNA (1)...(19): siRNA sense strand
agaauuuccuuucaaaccu

SEQ ID NO: 2028440 - RNA, 19 nt, Homo sapiens
  misc_RNA (1)...(19): siRNA sense strand
ugcagaguuuagcauuuaa

SEQ ID NO: 2028441 - RNA, 19 nt, Homo sapiens
  misc_RNA (1)...(19): siRNA sense strand
gagaugaccccuuaugaag

SEQ ID NO: 2028442 - RNA, 19 nt, Homo sapiens
  misc_RNA (1)...(19): siRNA sense strand
agacgucggacuucacgaa

SEQ ID NO: 2028443 - RNA, 19 nt, Homo sapiens
  misc_RNA (1)...(19): siRNA sense strand
gacgucggacuucacgaaa

SEQ ID NO: 2028444 - RNA, 19 nt, Homo sapiens
  misc_RNA (1)...(19): siRNA sense strand
ugagcuucaugguggagaa

SEQ ID NO: 2028445 - RNA, 19 nt, Homo sapiens
  misc_RNA (1)...(19): siRNA sense strand
caaaccucccaguaucuau

SEQ ID NO: 2028446 - RNA, 19 nt, Homo sapiens
  misc_RNA (1)...(19): siRNA sense strand
auagagacgucggacuuca

SEQ ID NO: 2028447 - RNA, 19 nt, Homo sapiens
  misc_RNA (1)...(19): siRNA sense strand
gugcagaguuuagcauuua

SEQ ID NO: 2028448 - RNA, 19 nt, Homo sapiens
  misc_RNA (1)...(19): siRNA sense strand
gcacaagacgaacucagua

SEQ ID NO: 2028449 - RNA, 19 nt, Homo sapiens
  misc_RNA (1)...(19): siRNA sense strand
cagagaauuuccuuucaaa

SEQ ID NO: 2028450 - RNA, 19 nt, Homo sapiens
  misc_RNA (1)...(19): siRNA sense strand
ccagagaauuuccuuucaa

SEQ ID NO: 2028451 - RNA, 19 nt, Homo sapiens
  misc_RNA (1)...(19): siRNA sense strand
gcccagagaugaccccuua

SEQ ID NO: 2028452 - RNA, 19 nt, Homo sapiens
  misc_RNA (1)...(19): siRNA sense strand
ugaauuauuuccugaaguc

SEQ ID NO: 2028453 - RNA, 19 nt, Homo sapiens
  misc_RNA (1)...(19): siRNA sense strand
acagaaagcacaagacgaa

SEQ ID NO: 2028454 - RNA, 19 nt, Homo sapiens
  misc_RNA (1)...(19): siRNA sense strand
gagcaucgcgcaggaguga

SEQ ID NO: 2028455 - RNA, 19 nt, Homo sapiens
  misc_RNA (1)...(19): siRNA sense strand
cccaguaucuauaugauca

SEQ ID NO: 2028456 - RNA, 19 nt, Homo sapiens
  misc_RNA (1)...(19): siRNA sense strand
guauagagacgucggacuu

SEQ ID NO: 2028457 - RNA, 19 nt, Homo sapiens
  misc_RNA (1)...(19): siRNA sense strand
aaaccucccaguaucuaua

SEQ ID NO: 2028458 - RNA, 19 nt, Homo sapiens
  misc_RNA (1)...(19): siRNA sense strand
uuucaaaccucccaguauc

SEQ ID NO: 2028459 - RNA, 19 nt, Homo sapiens
  misc_RNA (1)...(19): siRNA sense strand
cuggcgaacuuguuuguga

SEQ ID NO: 2028460 - RNA, 19 nt, Homo sapiens
  misc_RNA (1)...(19): siRNA sense strand
gaaagcacaagacgaacuc

SEQ ID NO: 2028461 - RNA, 19 nt, Homo sapiens
  misc_RNA (1)...(19): siRNA sense strand
uggaggagauuaaacaaaa

SEQ ID NO: 2028462 - RNA, 19 nt, Homo sapiens
  misc_RNA (1)...(19): siRNA sense strand
gaagucguggaggagauua

SEQ ID NO: 2028463 - RNA, 19 nt, Homo sapiens
  misc_RNA (1)...(19): siRNA sense strand
gguuugcagccuuugcuua

SEQ ID NO: 2028464 - RNA, 19 nt, Homo sapiens
  misc_RNA (1)...(19): siRNA sense strand
gucuuucuaucacggauuu

SEQ ID NO: 2028465 - RNA, 19 nt, Homo sapiens
  misc_RNA (1)...(19): siRNA sense strand
ucaaaccucccaguaucua

SEQ ID NO: 2028466 - RNA, 19 nt, Homo sapiens
  misc_RNA (1)...(19): siRNA sense strand
uugcuuacacggucaagua

SEQ ID NO: 2028467 - RNA, 19 nt, Homo sapiens
  misc_RNA (1)...(19): siRNA sense strand
gagaauuuccuuucaaacc

SEQ ID NO: 2028468 - RNA, 19 nt, Homo sapiens
  misc_RNA (1)...(19): siRNA sense strand
cccagagaauuuccuuuca

SEQ ID NO: 2028469 - RNA, 19 nt, Homo sapiens
  misc_RNA (1)...(19): siRNA sense strand
cgaacuuguuugugauagu

SEQ ID NO: 2028470 - RNA, 19 nt, Homo sapiens
  misc_RNA (1)...(19): siRNA sense strand
gugaauuauuuccugaagu

SEQ ID NO: 2028471 - RNA, 19 nt, Homo sapiens
  misc_RNA (1)...(19): siRNA sense strand
guggaggagauuaaacaaa

SEQ ID NO: 2028472 - RNA, 19 nt, Homo sapiens
  misc_RNA (1)...(19): siRNA sense strand
ggcgaacuuguuugugaua

SEQ ID NO: 2028473 - RNA, 19 nt, Homo sapiens
  misc_RNA (1)...(19): siRNA sense strand
caagacgaacucaguagca

SEQ ID NO: 2028474 - RNA, 19 nt, Homo sapiens
  misc_RNA (1)...(19): siRNA sense strand
agugcagaguuuagcauuu

SEQ ID NO: 2028475 - RNA, 19 nt, Homo sapiens
  misc_RNA (1)...(19): siRNA sense strand
gcagaguuuagcauuuaau

SEQ ID NO: 2028476 - RNA, 19 nt, Homo sapiens
  misc_RNA (1)...(19): siRNA sense strand
ccaacgggagguuuaagug

SEQ ID NO: 2028477 - RNA, 19 nt, Homo sapiens
  misc_RNA (1)...(19): siRNA sense strand
gcgaacuuguuugugauag

SEQ ID NO: 2028478 - RNA, 19 nt, Homo sapiens
  misc_RNA (1)...(19): siRNA sense strand
agaauuuccuuucaaaccu

SEQ ID NO: 2028479 - RNA, 19 nt, Homo sapiens
  misc_RNA (1)...(19): siRNA sense strand
ugcagaguuuagcauuuaa

SEQ ID NO: 2028480 - RNA, 19 nt, Homo sapiens
  misc_RNA (1)...(19): siRNA sense strand
gagaugaccccuuaugaag

SEQ ID NO: 2028481 - RNA, 19 nt, Homo sapiens
  misc_RNA (1)...(19): siRNA sense strand
agacgucggacuucacgaa

SEQ ID NO: 2028482 - RNA, 19 nt, Homo sapiens
  misc_RNA (1)...(19): siRNA sense strand
gacgucggacuucacgaaa

SEQ ID NO: 2028483 - RNA, 19 nt, Homo sapiens
  misc_RNA (1)...(19): siRNA sense strand
ugagcuucaugguggagaa

SEQ ID NO: 2028484 - RNA, 19 nt, Homo sapiens
  misc_RNA (1)...(19): siRNA sense strand
caaaccucccaguaucuau

SEQ ID NO: 2028485 - RNA, 19 nt, Homo sapiens
  misc_RNA (1)...(19): siRNA sense strand
auagagacgucggacuuca

SEQ ID NO: 2028486 - RNA, 19 nt, Homo sapiens
  misc_RNA (1)...(19): siRNA sense strand
gcccagagaugaccccuua

SEQ ID NO: 2028487 - RNA, 19 nt, Homo sapiens
  misc_RNA (1)...(19): siRNA sense strand
gagaugaccccuuaugaag

SEQ ID NO: 2028488 - RNA, 19 nt, Homo sapiens
  misc_RNA (1)...(19): siRNA sense strand
gugcagaguuuagcauuua

SEQ ID NO: 2028489 - RNA, 19 nt, Homo sapiens
  misc_RNA (1)...(19): siRNA sense strand
gcacaagacgaacucagua

SEQ ID NO: 2028490 - RNA, 19 nt, Homo sapiens
  misc_RNA (1)...(19): siRNA sense strand
cagagaauuuccuuucaaa

SEQ ID NO: 2028491 - RNA, 19 nt, Homo sapiens
  misc_RNA (1)...(19): siRNA sense strand
ccagagaauuuccuuucaa

SEQ ID NO: 2028492 - RNA, 19 nt, Homo sapiens
  misc_RNA (1)...(19): siRNA sense strand
ugaauuauuuccugaaguc

SEQ ID NO: 2028493 - RNA, 19 nt, Homo sapiens
  misc_RNA (1)...(19): siRNA sense strand
acagaaagcacaagacgaa

SEQ ID NO: 2028494 - RNA, 19 nt, Homo sapiens
  misc_RNA (1)...(19): siRNA sense strand
gagcaucgcgcaggaguga

SEQ ID NO: 2028495 - RNA, 19 nt, Homo sapiens
  misc_RNA (1)...(19): siRNA sense strand
cccaguaucuauaugauca

SEQ ID NO: 2028496 - RNA, 19 nt, Homo sapiens
  misc_RNA (1)...(19): siRNA sense strand
guauagagacgucggacuu

SEQ ID NO: 2028497 - RNA, 19 nt, Homo sapiens
  misc_RNA (1)...(19): siRNA sense strand
aaaccucccaguaucuaua

SEQ ID NO: 2028498 - RNA, 19 nt, Homo sapiens
  misc_RNA (1)...(19): siRNA sense strand
uuucaaaccucccaguauc

SEQ ID NO: 2028499 - RNA, 19 nt, Homo sapiens
  misc_RNA (1)...(19): siRNA sense strand
cuggcgaacuuguuuguga

SEQ ID NO: 2028500 - RNA, 19 nt, Homo sapiens
  misc_RNA (1)...(19): siRNA sense strand
gaaagcacaagacgaacuc

SEQ ID NO: 2028501 - RNA, 19 nt, Homo sapiens
  misc_RNA (1)...(19): siRNA sense strand
uggaggagauuaaacaaaa

SEQ ID NO: 2028502 - RNA, 19 nt, Homo sapiens
  misc_RNA (1)...(19): siRNA sense strand
gaagucguggaggagauua

SEQ ID NO: 2028503 - RNA, 19 nt, Homo sapiens
  misc_RNA (1)...(19): siRNA sense strand
gguuugcagccuuugcuua

SEQ ID NO: 2028504 - RNA, 19 nt, Homo sapiens
  misc_RNA (1)...(19): siRNA sense strand
gucuuucuaucacggauuu

SEQ ID NO: 2028505 - RNA, 19 nt, Homo sapiens
  misc_RNA (1)...(19): siRNA sense strand
ucaaaccucccaguaucua

SEQ ID NO: 2028506 - RNA, 19 nt, Homo sapiens
  misc_RNA (1)...(19): siRNA sense strand
uugcuuacacggucaagua

SEQ ID NO: 2028507 - RNA, 19 nt, Homo sapiens
  misc_RNA (1)...(19): siRNA sense strand
cccagagaauuuccuuuca

SEQ ID NO: 2028508 - RNA, 19 nt, Homo sapiens
  misc_RNA (1)...(19): siRNA sense strand
cgaacuuguuugugauagu

SEQ ID NO: 2028509 - RNA, 19 nt, Homo sapiens
  misc_RNA (1)...(19): siRNA sense strand
gagaauuuccuuucaaacc

SEQ ID NO: 2028510 - RNA, 19 nt, Homo sapiens
  misc_RNA (1)...(19): siRNA sense strand
gugaauuauuuccugaagu

SEQ ID NO: 2028511 - RNA, 19 nt, Homo sapiens
  misc_RNA (1)...(19): siRNA sense strand
guggaggagauuaaacaaa

SEQ ID NO: 2028512 - RNA, 19 nt, Homo sapiens
  misc_RNA (1)...(19): siRNA sense strand
ggcgaacuuguuugugaua

SEQ ID NO: 2028513 - RNA, 19 nt, Homo sapiens
  misc_RNA (1)...(19): siRNA sense strand
caagacgaacucaguagca

SEQ ID NO: 2028514 - RNA, 19 nt, Homo sapiens
  misc_RNA (1)...(19): siRNA sense strand
agugcagaguuuagcauuu

SEQ ID NO: 2028515 - RNA, 19 nt, Homo sapiens
  misc_RNA (1)...(19): siRNA sense strand
gcagaguuuagcauuuaau

SEQ ID NO: 2028516 - RNA, 19 nt, Homo sapiens
  misc_RNA (1)...(19): siRNA sense strand
ccaacgggagguuuaagug

SEQ ID NO: 2028517 - RNA, 19 nt, Homo sapiens
  misc_RNA (1)...(19): siRNA sense strand
agaauuuccuuucaaaccu

SEQ ID NO: 2028518 - RNA, 19 nt, Homo sapiens
  misc_RNA (1)...(19): siRNA sense strand
gcgaacuuguuugugauag

SEQ ID NO: 2028519 - RNA, 19 nt, Homo sapiens
  misc_RNA (1)...(19): siRNA sense strand
ugcagaguuuagcauuuaa

SEQ ID NO: 2028520 - RNA, 19 nt, Homo sapiens
  misc_RNA (1)...(19): siRNA sense strand
agacgucggacuucacgaa

SEQ ID NO: 2028521 - RNA, 19 nt, Homo sapiens
  misc_RNA (1)...(19): siRNA sense strand
gacgucggacuucacgaaa

SEQ ID NO: 2028522 - RNA, 19 nt, Homo sapiens
  misc_RNA (1)...(19): siRNA sense strand
ugagcuucaugguggagaa

SEQ ID NO: 2028523 - RNA, 19 nt, Homo sapiens
  misc_RNA (1)...(19): siRNA sense strand
caaaccucccaguaucuau

SEQ ID NO: 2028524 - RNA, 19 nt, Homo sapiens
  misc_RNA (1)...(19): siRNA sense strand
auagagacgucggacuuca

SEQ ID NO: 2028525 - RNA, 19 nt, Homo sapiens
  misc_RNA (1)...(19): siRNA sense strand
gugcagaguuuagcauuua

SEQ ID NO: 2028526 - RNA, 19 nt, Homo sapiens
  misc_RNA (1)...(19): siRNA sense strand
gcacaagacgaacucagua

SEQ ID NO: 2028527 - RNA, 19 nt, Homo sapiens
  misc_RNA (1)...(19): siRNA sense strand
cagagaauuuccuuucaaa

SEQ ID NO: 2028528 - RNA, 19 nt, Homo sapiens
  misc_RNA (1)...(19): siRNA sense strand
ccagagaauuuccuuucaa

SEQ ID NO: 2028529 - RNA, 19 nt, Homo sapiens
  misc_RNA (1)...(19): siRNA sense strand
ugaauuauuuccugaaguc

SEQ ID NO: 2028530 - RNA, 19 nt, Homo sapiens
  misc_RNA (1)...(19): siRNA sense strand
acagaaagcacaagacgaa

SEQ ID NO: 2028531 - RNA, 19 nt, Homo sapiens
  misc_RNA (1)...(19): siRNA sense strand
gagcaucgcgcaggaguga

SEQ ID NO: 2028532 - RNA, 19 nt, Homo sapiens
  misc_RNA (1)...(19): siRNA sense strand
cccaguaucuauaugauca

SEQ ID NO: 2028533 - RNA, 19 nt, Homo sapiens
  misc_RNA (1)...(19): siRNA sense strand
guauagagacgucggacuu

SEQ ID NO: 2028534 - RNA, 19 nt, Homo sapiens
  misc_RNA (1)...(19): siRNA sense strand
aaaccucccaguaucuaua

SEQ ID NO: 2028535 - RNA, 19 nt, Homo sapiens
  misc_RNA (1)...(19): siRNA sense strand
uuucaaaccucccaguauc

SEQ ID NO: 2028536 - RNA, 19 nt, Homo sapiens
  misc_RNA (1)...(19): siRNA sense strand
cuggcgaacuuguuuguga

SEQ ID NO: 2028537 - RNA, 19 nt, Homo sapiens
  misc_RNA (1)...(19): siRNA sense strand
gaaagcacaagacgaacuc

SEQ ID NO: 2028538 - RNA, 19 nt, Homo sapiens
  misc_RNA (1)...(19): siRNA sense strand
uggaggagauuaaacaaaa

SEQ ID NO: 2028539 - RNA, 19 nt, Homo sapiens
  misc_RNA (1)...(19): siRNA sense strand
gaagucguggaggagauua

SEQ ID NO: 2028540 - RNA, 19 nt, Homo sapiens
  misc_RNA (1)...(19): siRNA sense strand
gguuugcagccuuugcuua

SEQ ID NO: 2028541 - RNA, 19 nt, Homo sapiens
  misc_RNA (1)...(19): siRNA sense strand
gucuuucuaucacggauuu

SEQ ID NO: 2028542 - RNA, 19 nt, Homo sapiens
  misc_RNA (1)...(19): siRNA sense strand
ucaaaccucccaguaucua

SEQ ID NO: 2028543 - RNA, 19 nt, Homo sapiens
  misc_RNA (1)...(19): siRNA sense strand
uugcuuacacggucaagua

SEQ ID NO: 2028544 - RNA, 19 nt, Homo sapiens
  misc_RNA (1)...(19): siRNA sense strand
cccagagaauuuccuuuca

SEQ ID NO: 2028545 - RNA, 19 nt, Homo sapiens
  misc_RNA (1)...(19): siRNA sense strand
cgaacuuguuugugauagu

SEQ ID NO: 2028546 - RNA, 19 nt, Homo sapiens
  misc_RNA (1)...(19): siRNA sense strand
gagaauuuccuuucaaacc

SEQ ID NO: 2028547 - RNA, 19 nt, Homo sapiens
  misc_RNA (1)...(19): siRNA sense strand
gugaauuauuuccugaagu

SEQ ID NO: 2028548 - RNA, 19 nt, Homo sapiens
  misc_RNA (1)...(19): siRNA sense strand
guggaggagauuaaacaaa

SEQ ID NO: 2028549 - RNA, 19 nt, Homo sapiens
  misc_RNA (1)...(19): siRNA sense strand
ggcgaacuuguuugugaua

SEQ ID NO: 2028550 - RNA, 19 nt, Homo sapiens
  misc_RNA (1)...(19): siRNA sense strand
caagacgaacucaguagca

SEQ ID NO: 2028551 - RNA, 19 nt, Homo sapiens
  misc_RNA (1)...(19): siRNA sense strand
agugcagaguuuagcauuu

SEQ ID NO: 2028552 - RNA, 19 nt, Homo sapiens
  misc_RNA (1)...(19): siRNA sense strand
gcagaguuuagcauuuaau

SEQ ID NO: 2028553 - RNA, 19 nt, Homo sapiens
  misc_RNA (1)...(19): siRNA sense strand
ccaacgggagguuuaagug

SEQ ID NO: 2028554 - RNA, 19 nt, Homo sapiens
  misc_RNA (1)...(19): siRNA sense strand
agaauuuccuuucaaaccu

SEQ ID NO: 2028555 - RNA, 19 nt, Homo sapiens
  misc_RNA (1)...(19): siRNA sense strand
gcgaacuuguuugugauag

SEQ ID NO: 2028556 - RNA, 19 nt, Homo sapiens
  misc_RNA (1)...(19): siRNA sense strand
ugcagaguuuagcauuuaa

SEQ ID NO: 2028557 - RNA, 19 nt, Homo sapiens
  misc_RNA (1)...(19): siRNA sense strand
agacgucggacuucacgaa

SEQ ID NO: 2028558 - RNA, 19 nt, Homo sapiens
  misc_RNA (1)...(19): siRNA sense strand
gacgucggacuucacgaaa

SEQ ID NO: 2028559 - RNA, 19 nt, Homo sapiens
  misc_RNA (1)...(19): siRNA sense strand
ugagcuucaugguggagaa

SEQ ID NO: 2028560 - RNA, 19 nt, Homo sapiens
  misc_RNA (1)...(19): siRNA sense strand
caaaccucccaguaucuau

SEQ ID NO: 2028561 - RNA, 19 nt, Homo sapiens
  misc_RNA (1)...(19): siRNA sense strand
auagagacgucggacuuca

SEQ ID NO: 2028562 - RNA, 19 nt, Homo sapiens
  misc_RNA (1)...(19): siRNA sense strand
gugcagaguuuagcauuua

SEQ ID NO: 2028563 - RNA, 19 nt, Homo sapiens
  misc_RNA (1)...(19): siRNA sense strand
gcacaagacgaacucagua

SEQ ID NO: 2028564 - RNA, 19 nt, Homo sapiens
  misc_RNA (1)...(19): siRNA sense strand
cagagaauuuccuuucaaa

SEQ ID NO: 2028565 - RNA, 19 nt, Homo sapiens
  misc_RNA (1)...(19): siRNA sense strand
ccagagaauuuccuuucaa

SEQ ID NO: 2028566 - RNA, 19 nt, Homo sapiens
  misc_RNA (1)...(19): siRNA sense strand
gcccagagaugaccccuua

SEQ ID NO: 2028567 - RNA, 19 nt, Homo sapiens
  misc_RNA (1)...(19): siRNA sense strand
ugaauuauuuccugaaguc

SEQ ID NO: 2028568 - RNA, 19 nt, Homo sapiens
  misc_RNA (1)...(19): siRNA sense strand
acagaaagcacaagacgaa

SEQ ID NO: 2028569 - RNA, 19 nt, Homo sapiens
  misc_RNA (1)...(19): siRNA sense strand
gagcaucgcgcaggaguga

SEQ ID NO: 2028570 - RNA, 19 nt, Homo sapiens
  misc_RNA (1)...(19): siRNA sense strand
cccaguaucuauaugauca

SEQ ID NO: 2028571 - RNA, 19 nt, Homo sapiens
  misc_RNA (1)...(19): siRNA sense strand
guauagagacgucggacuu

SEQ ID NO: 2028572 - RNA, 19 nt, Homo sapiens
  misc_RNA (1)...(19): siRNA sense strand
aaaccucccaguaucuaua

SEQ ID NO: 2028573 - RNA, 19 nt, Homo sapiens
  misc_RNA (1)...(19): siRNA sense strand
uuucaaaccucccaguauc

SEQ ID NO: 2028574 - RNA, 19 nt, Homo sapiens
  misc_RNA (1)...(19): siRNA sense strand
cuggcgaacuuguuuguga

SEQ ID NO: 2028575 - RNA, 19 nt, Homo sapiens
  misc_RNA (1)...(19): siRNA sense strand
gaaagcacaagacgaacuc

SEQ ID NO: 2028576 - RNA, 19 nt, Homo sapiens
  misc_RNA (1)...(19): siRNA sense strand
uggaggagauuaaacaaaa

SEQ ID NO: 2028577 - RNA, 19 nt, Homo sapiens
  misc_RNA (1)...(19): siRNA sense strand
gaagucguggaggagauua

SEQ ID NO: 2028578 - RNA, 19 nt, Homo sapiens
  misc_RNA (1)...(19): siRNA sense strand
gguuugcagccuuugcuua

SEQ ID NO: 2028579 - RNA, 19 nt, Homo sapiens
  misc_RNA (1)...(19): siRNA sense strand
gucuuucuaucacggauuu

SEQ ID NO: 2028580 - RNA, 19 nt, Homo sapiens
  misc_RNA (1)...(19): siRNA sense strand
ucaaaccucccaguaucua

SEQ ID NO: 2028581 - RNA, 19 nt, Homo sapiens
  misc_RNA (1)...(19): siRNA sense strand
uugcuuacacggucaagua

SEQ ID NO: 2028582 - RNA, 19 nt, Homo sapiens
  misc_RNA (1)...(19): siRNA sense strand
gagaauuuccuuucaaacc

SEQ ID NO: 2028583 - RNA, 19 nt, Homo sapiens
  misc_RNA (1)...(19): siRNA sense strand
cccagagaauuuccuuuca

SEQ ID NO: 2028584 - RNA, 19 nt, Homo sapiens
  misc_RNA (1)...(19): siRNA sense strand
cgaacuuguuugugauagu

SEQ ID NO: 2028585 - RNA, 19 nt, Homo sapiens
  misc_RNA (1)...(19): siRNA sense strand
gugaauuauuuccugaagu

SEQ ID NO: 2028586 - RNA, 19 nt, Homo sapiens
  misc_RNA (1)...(19): siRNA sense strand
guggaggagauuaaacaaa

SEQ ID NO: 2028587 - RNA, 19 nt, Homo sapiens
  misc_RNA (1)...(19): siRNA sense strand
ggcgaacuuguuugugaua

SEQ ID NO: 2028588 - RNA, 19 nt, Homo sapiens
  misc_RNA (1)...(19): siRNA sense strand
caagacgaacucaguagca

SEQ ID NO: 2028589 - RNA, 19 nt, Homo sapiens
  misc_RNA (1)...(19): siRNA sense strand
agugcagaguuuagcauuu

SEQ ID NO: 2028590 - RNA, 19 nt, Homo sapiens
  misc_RNA (1)...(19): siRNA sense strand
gcagaguuuagcauuuaau

SEQ ID NO: 2028591 - RNA, 19 nt, Homo sapiens
  misc_RNA (1)...(19): siRNA sense strand
ccaacgggagguuuaagug

SEQ ID NO: 2028592 - RNA, 19 nt, Homo sapiens
  misc_RNA (1)...(19): siRNA sense strand
gcgaacuuguuugugauag

SEQ ID NO: 2028593 - RNA, 19 nt, Homo sapiens
  misc_RNA (1)...(19): siRNA sense strand
agaauuuccuuucaaaccu

SEQ ID NO: 2028594 - RNA, 19 nt, Homo sapiens
  misc_RNA (1)...(19): siRNA sense strand
ugcagaguuuagcauuuaa

SEQ ID NO: 2028595 - RNA, 19 nt, Homo sapiens
  misc_RNA (1)...(19): siRNA sense strand
gagaugaccccuuaugaag

SEQ ID NO: 2028596 - RNA, 19 nt, Homo sapiens
  misc_RNA (1)...(19): siRNA sense strand
agacgucggacuucacgaa

SEQ ID NO: 2028597 - RNA, 19 nt, Homo sapiens
  misc_RNA (1)...(19): siRNA sense strand
gacgucggacuucacgaaa

SEQ ID NO: 2028598 - RNA, 19 nt, Homo sapiens
  misc_RNA (1)...(19): siRNA sense strand
ugagcuucaugguggagaa

SEQ ID NO: 2028599 - RNA, 19 nt, Homo sapiens
  misc_RNA (1)...(19): siRNA sense strand
caaaccucccaguaucuau

SEQ ID NO: 2028600 - RNA, 19 nt, Homo sapiens
  misc_RNA (1)...(19): siRNA sense strand
auagagacgucggacuuca

SEQ ID NO: 2028601 - RNA, 19 nt, Homo sapiens
  misc_RNA (1)...(19): siRNA sense strand
gugcagaguuuagcauuua

SEQ ID NO: 2028602 - RNA, 19 nt, Homo sapiens
  misc_RNA (1)...(19): siRNA sense strand
gcacaagacgaacucagua

SEQ ID NO: 2028603 - RNA, 19 nt, Homo sapiens
  misc_RNA (1)...(19): siRNA sense strand
cagagaauuuccuuucaaa

SEQ ID NO: 2028604 - RNA, 19 nt, Homo sapiens
  misc_RNA (1)...(19): siRNA sense strand
ccagagaauuuccuuucaa

SEQ ID NO: 2028605 - RNA, 19 nt, Homo sapiens
  misc_RNA (1)...(19): siRNA sense strand
gcccagagaugaccccuua

SEQ ID NO: 2028606 - RNA, 19 nt, Homo sapiens
  misc_RNA (1)...(19): siRNA sense strand
ugaauuauuuccugaaguc

SEQ ID NO: 2028607 - RNA, 19 nt, Homo sapiens
  misc_RNA (1)...(19): siRNA sense strand
acagaaagcacaagacgaa

SEQ ID NO: 2028608 - RNA, 19 nt, Homo sapiens
  misc_RNA (1)...(19): siRNA sense strand
gagcaucgcgcaggaguga

SEQ ID NO: 2028609 - RNA, 19 nt, Homo sapiens
  misc_RNA (1)...(19): siRNA sense strand
cccaguaucuauaugauca

SEQ ID NO: 2028610 - RNA, 19 nt, Homo sapiens
  misc_RNA (1)...(19): siRNA sense strand
guauagagacgucggacuu

SEQ ID NO: 2028611 - RNA, 19 nt, Homo sapiens
  misc_RNA (1)...(19): siRNA sense strand
aaaccucccaguaucuaua

SEQ ID NO: 2028612 - RNA, 19 nt, Homo sapiens
  misc_RNA (1)...(19): siRNA sense strand
uuucaaaccucccaguauc

SEQ ID NO: 2028613 - RNA, 19 nt, Homo sapiens
  misc_RNA (1)...(19): siRNA sense strand
cuggcgaacuuguuuguga

SEQ ID NO: 2028614 - RNA, 19 nt, Homo sapiens
  misc_RNA (1)...(19): siRNA sense strand
gaaagcacaagacgaacuc

SEQ ID NO: 2028615 - RNA, 19 nt, Homo sapiens
  misc_RNA (1)...(19): siRNA sense strand
uggaggagauuaaacaaaa

SEQ ID NO: 2028616 - RNA, 19 nt, Homo sapiens
  misc_RNA (1)...(19): siRNA sense strand
gaagucguggaggagauua

SEQ ID NO: 2028617 - RNA, 19 nt, Homo sapiens
  misc_RNA (1)...(19): siRNA sense strand
gguuugcagccuuugcuua

SEQ ID NO: 2028618 - RNA, 19 nt, Homo sapiens
  misc_RNA (1)...(19): siRNA sense strand
gucuuucuaucacggauuu

SEQ ID NO: 2028619 - RNA, 19 nt, Homo sapiens
  misc_RNA (1)...(19): siRNA sense strand
ucaaaccucccaguaucua

SEQ ID NO: 2028620 - RNA, 19 nt, Homo sapiens
  misc_RNA (1)...(19): siRNA sense strand
uugcuuacacggucaagua

SEQ ID NO: 2028621 - RNA, 19 nt, Homo sapiens
  misc_RNA (1)...(19): siRNA sense strand
gagaauuuccuuucaaacc

SEQ ID NO: 2028622 - RNA, 19 nt, Homo sapiens
  misc_RNA (1)...(19): siRNA sense strand
cccagagaauuuccuuuca

SEQ ID NO: 2028623 - RNA, 19 nt, Homo sapiens
  misc_RNA (1)...(19): siRNA sense strand
cgaacuuguuugugauagu

SEQ ID NO: 2028624 - RNA, 19 nt, Homo sapiens
  misc_RNA (1)...(19): siRNA sense strand
gugaauuauuuccugaagu

SEQ ID NO: 2028625 - RNA, 19 nt, Homo sapiens
  misc_RNA (1)...(19): siRNA sense strand
guggaggagauuaaacaaa

SEQ ID NO: 2028626 - RNA, 19 nt, Homo sapiens
  misc_RNA (1)...(19): siRNA sense strand
ggcgaacuuguuugugaua

SEQ ID NO: 2028627 - RNA, 19 nt, Homo sapiens
  misc_RNA (1)...(19): siRNA sense strand
caagacgaacucaguagca

SEQ ID NO: 2028628 - RNA, 19 nt, Homo sapiens
  misc_RNA (1)...(19): siRNA sense strand
agugcagaguuuagcauuu

SEQ ID NO: 2028629 - RNA, 19 nt, Homo sapiens
  misc_RNA (1)...(19): siRNA sense strand
gcagaguuuagcauuuaau

SEQ ID NO: 2028630 - RNA, 19 nt, Homo sapiens
  misc_RNA (1)...(19): siRNA sense strand
ccaacgggagguuuaagug

SEQ ID NO: 2028631 - RNA, 19 nt, Homo sapiens
  misc_RNA (1)...(19): siRNA sense strand
gcgaacuuguuugugauag

SEQ ID NO: 2028632 - RNA, 19 nt, Homo sapiens
  misc_RNA (1)...(19): siRNA sense strand
agaauuuccuuucaaaccu

SEQ ID NO: 2028633 - RNA, 19 nt, Homo sapiens
  misc_RNA (1)...(19): siRNA sense strand
ugcagaguuuagcauuuaa

SEQ ID NO: 2028634 - RNA, 19 nt, Homo sapiens
  misc_RNA (1)...(19): siRNA sense strand
gagaugaccccuuaugaag

SEQ ID NO: 2028635 - RNA, 19 nt, Homo sapiens
  misc_RNA (1)...(19): siRNA sense strand
agacgucggacuucacgaa

SEQ ID NO: 2028636 - RNA, 19 nt, Homo sapiens
  misc_RNA (1)...(19): siRNA sense strand
gacgucggacuucacgaaa

SEQ ID NO: 2028637 - RNA, 19 nt, Homo sapiens
  misc_RNA (1)...(19): siRNA sense strand
ugagcuucaugguggagaa

SEQ ID NO: 2028638 - RNA, 19 nt, Homo sapiens
  misc_RNA (1)...(19): siRNA sense strand
caaaccucccaguaucuau

SEQ ID NO: 2028639 - RNA, 19 nt, Homo sapiens
  misc_RNA (1)...(19): siRNA sense strand
auagagacgucggacuuca

SEQ ID NO: 2028640 - RNA, 19 nt, Homo sapiens
  misc_RNA (1)...(19): siRNA sense strand
gcccagagaugaccccuua

SEQ ID NO: 2028641 - RNA, 19 nt, Homo sapiens
  misc_RNA (1)...(19): siRNA sense strand
gagaugaccccuuaugaag

SEQ ID NO: 2028642 - RNA, 19 nt, Homo sapiens
  misc_RNA (1)...(19): siRNA sense strand
gugcagaguuuagcauuua

SEQ ID NO: 2028643 - RNA, 19 nt, Homo sapiens
  misc_RNA (1)...(19): siRNA sense strand
gcacaagacgaacucagua

SEQ ID NO: 2028644 - RNA, 19 nt, Homo sapiens
  misc_RNA (1)...(19): siRNA sense strand
cagagaauuuccuuucaaa

SEQ ID NO: 2028645 - RNA, 19 nt, Homo sapiens
  misc_RNA (1)...(19): siRNA sense strand
ccagagaauuuccuuucaa

SEQ ID NO: 2028646 - RNA, 19 nt, Homo sapiens
  misc_RNA (1)...(19): siRNA sense strand
ugaauuauuuccugaaguc

SEQ ID NO: 2028647 - RNA, 19 nt, Homo sapiens
  misc_RNA (1)...(19): siRNA sense strand
acagaaagcacaagacgaa

SEQ ID NO: 2028648 - RNA, 19 nt, Homo sapiens
  misc_RNA (1)...(19): siRNA sense strand
gagcaucgcgcaggaguga

SEQ ID NO: 2028649 - RNA, 19 nt, Homo sapiens
  misc_RNA (1)...(19): siRNA sense strand
cccaguaucuauaugauca

SEQ ID NO: 2028650 - RNA, 19 nt, Homo sapiens
  misc_RNA (1)...(19): siRNA sense strand
guauagagacgucggacuu

SEQ ID NO: 2028651 - RNA, 19 nt, Homo sapiens
  misc_RNA (1)...(19): siRNA sense strand
aaaccucccaguaucuaua

SEQ ID NO: 2028652 - RNA, 19 nt, Homo sapiens
  misc_RNA (1)...(19): siRNA sense strand
uuucaaaccucccaguauc

SEQ ID NO: 2028653 - RNA, 19 nt, Homo sapiens
  misc_RNA (1)...(19): siRNA sense strand
cuggcgaacuuguuuguga

SEQ ID NO: 2028654 - RNA, 19 nt, Homo sapiens
  misc_RNA (1)...(19): siRNA sense strand
gaaagcacaagacgaacuc

SEQ ID NO: 2028655 - RNA, 19 nt, Homo sapiens
  misc_RNA (1)...(19): siRNA sense strand
uggaggagauuaaacaaaa

SEQ ID NO: 2028656 - RNA, 19 nt, Homo sapiens
  misc_RNA (1)...(19): siRNA sense strand
gaagucguggaggagauua

SEQ ID NO: 2028657 - RNA, 19 nt, Homo sapiens
  misc_RNA (1)...(19): siRNA sense strand
gguuugcagccuuugcuua

SEQ ID NO: 2028658 - RNA, 19 nt, Homo sapiens
  misc_RNA (1)...(19): siRNA sense strand
gucuuucuaucacggauuu

SEQ ID NO: 2028659 - RNA, 19 nt, Homo sapiens
  misc_RNA (1)...(19): siRNA sense strand
ucaaaccucccaguaucua

SEQ ID NO: 2028660 - RNA, 19 nt, Homo sapiens
  misc_RNA (1)...(19): siRNA sense strand
uugcuuacacggucaagua

SEQ ID NO: 2028661 - RNA, 19 nt, Homo sapiens
  misc_RNA (1)...(19): siRNA sense strand
cccagagaauuuccuuuca

SEQ ID NO: 2028662 - RNA, 19 nt, Homo sapiens
  misc_RNA (1)...(19): siRNA sense strand
cgaacuuguuugugauagu

SEQ ID NO: 2028663 - RNA, 19 nt, Homo sapiens
  misc_RNA (1)...(19): siRNA sense strand
gagaauuuccuuucaaacc

SEQ ID NO: 2028664 - RNA, 19 nt, Homo sapiens
  misc_RNA (1)...(19): siRNA sense strand
gugaauuauuuccugaagu

SEQ ID NO: 2028665 - RNA, 19 nt, Homo sapiens
  misc_RNA (1)...(19): siRNA sense strand
guggaggagauuaaacaaa

SEQ ID NO: 2028666 - RNA, 19 nt, Homo sapiens
  misc_RNA (1)...(19): siRNA sense strand
ggcgaacuuguuugugaua

SEQ ID NO: 2028667 - RNA, 19 nt, Homo sapiens
  misc_RNA (1)...(19): siRNA sense strand
caagacgaacucaguagca

SEQ ID NO: 2028668 - RNA, 19 nt, Homo sapiens
  misc_RNA (1)...(19): siRNA sense strand
agugcagaguuuagcauuu

SEQ ID NO: 2028669 - RNA, 19 nt, Homo sapiens
  misc_RNA (1)...(19): siRNA sense strand
gcagaguuuagcauuuaau

SEQ ID NO: 2028670 - RNA, 19 nt, Homo sapiens
  misc_RNA (1)...(19): siRNA sense strand
ccaacgggagguuuaagug

SEQ ID NO: 2028671 - RNA, 19 nt, Homo sapiens
  misc_RNA (1)...(19): siRNA sense strand
agaauuuccuuucaaaccu

SEQ ID NO: 2028672 - RNA, 19 nt, Homo sapiens
  misc_RNA (1)...(19): siRNA sense strand
gcgaacuuguuugugauag

SEQ ID NO: 2028673 - RNA, 19 nt, Homo sapiens
  misc_RNA (1)...(19): siRNA sense strand
ugcagaguuuagcauuuaa

SEQ ID NO: 2028674 - RNA, 19 nt, Homo sapiens
  misc_RNA (1)...(19): siRNA sense strand
agacgucggacuucacgaa

SEQ ID NO: 2028675 - RNA, 19 nt, Homo sapiens
  misc_RNA (1)...(19): siRNA sense strand
gacgucggacuucacgaaa

SEQ ID NO: 2028676 - RNA, 19 nt, Homo sapiens
  misc_RNA (1)...(19): siRNA sense strand
ugagcuucaugguggagaa

SEQ ID NO: 2028677 - RNA, 19 nt, Homo sapiens
  misc_RNA (1)...(19): siRNA sense strand
caaaccucccaguaucuau

SEQ ID NO: 2028678 - RNA, 19 nt, Homo sapiens
  misc_RNA (1)...(19): siRNA sense strand
auagagacgucggacuuca

SEQ ID NO: 2028679 - RNA, 19 nt, Homo sapiens
  misc_RNA (1)...(19): siRNA sense strand
gugcagaguuuagcauuua

SEQ ID NO: 2028680 - RNA, 19 nt, Homo sapiens
  misc_RNA (1)...(19): siRNA sense strand
gcacaagacgaacucagua

SEQ ID NO: 2028681 - RNA, 19 nt, Homo sapiens
  misc_RNA (1)...(19): siRNA sense strand
cagagaauuuccuuucaaa

SEQ ID NO: 2028682 - RNA, 19 nt, Homo sapiens
  misc_RNA (1)...(19): siRNA sense strand
ccagagaauuuccuuucaa

SEQ ID NO: 2028683 - RNA, 19 nt, Homo sapiens
  misc_RNA (1)...(19): siRNA sense strand
ugaauuauuuccugaaguc

SEQ ID NO: 2028684 - RNA, 19 nt, Homo sapiens
  misc_RNA (1)...(19): siRNA sense strand
acagaaagcacaagacgaa

SEQ ID NO: 2028685 - RNA, 19 nt, Homo sapiens
  misc_RNA (1)...(19): siRNA sense strand
gagcaucgcgcaggaguga

SEQ ID NO: 2028686 - RNA, 19 nt, Homo sapiens
  misc_RNA (1)...(19): siRNA sense strand
cccaguaucuauaugauca

SEQ ID NO: 2028687 - RNA, 19 nt, Homo sapiens
  misc_RNA (1)...(19): siRNA sense strand
guauagagacgucggacuu

SEQ ID NO: 2028688 - RNA, 19 nt, Homo sapiens
  misc_RNA (1)...(19): siRNA sense strand
aaaccucccaguaucuaua

SEQ ID NO: 2028689 - RNA, 19 nt, Homo sapiens
  misc_RNA (1)...(19): siRNA sense strand
uuucaaaccucccaguauc

SEQ ID NO: 2028690 - RNA, 19 nt, Homo sapiens
  misc_RNA (1)...(19): siRNA sense strand
cuggcgaacuuguuuguga

SEQ ID NO: 2028691 - RNA, 19 nt, Homo sapiens
  misc_RNA (1)...(19): siRNA sense strand
gaaagcacaagacgaacuc

SEQ ID NO: 2028692 - RNA, 19 nt, Homo sapiens
  misc_RNA (1)...(19): siRNA sense strand
uggaggagauuaaacaaaa

SEQ ID NO: 2028693 - RNA, 19 nt, Homo sapiens
  misc_RNA (1)...(19): siRNA sense strand
gaagucguggaggagauua

SEQ ID NO: 2028694 - RNA, 19 nt, Homo sapiens
  misc_RNA (1)...(19): siRNA sense strand
gguuugcagccuuugcuua

SEQ ID NO: 2028695 - RNA, 19 nt, Homo sapiens
  misc_RNA (1)...(19): siRNA sense strand
gucuuucuaucacggauuu

SEQ ID NO: 2028696 - RNA, 19 nt, Homo sapiens
  misc_RNA (1)...(19): siRNA sense strand
ucaaaccucccaguaucua

SEQ ID NO: 2028697 - RNA, 19 nt, Homo sapiens
  misc_RNA (1)...(19): siRNA sense strand
uugcuuacacggucaagua

SEQ ID NO: 2028698 - RNA, 19 nt, Homo sapiens
  misc_RNA (1)...(19): siRNA sense strand
cccagagaauuuccuuuca

SEQ ID NO: 2028699 - RNA, 19 nt, Homo sapiens
  misc_RNA (1)...(19): siRNA sense strand
cgaacuuguuugugauagu

SEQ ID NO: 2028700 - RNA, 19 nt, Homo sapiens
  misc_RNA (1)...(19): siRNA sense strand
gagaauuuccuuucaaacc

SEQ ID NO: 2028701 - RNA, 19 nt, Homo sapiens
  misc_RNA (1)...(19): siRNA sense strand
gugaauuauuuccugaagu

SEQ ID NO: 2028702 - RNA, 19 nt, Homo sapiens
  misc_RNA (1)...(19): siRNA sense strand
guggaggagauuaaacaaa

SEQ ID NO: 2028703 - RNA, 19 nt, Homo sapiens
  misc_RNA (1)...(19): siRNA sense strand
ggcgaacuuguuugugaua

SEQ ID NO: 2028704 - RNA, 19 nt, Homo sapiens
  misc_RNA (1)...(19): siRNA sense strand
caagacgaacucaguagca

SEQ ID NO: 2028705 - RNA, 19 nt, Homo sapiens
  misc_RNA (1)...(19): siRNA sense strand
agugcagaguuuagcauuu

SEQ ID NO: 2028706 - RNA, 19 nt, Homo sapiens
  misc_RNA (1)...(19): siRNA sense strand
gcagaguuuagcauuuaau

SEQ ID NO: 2028707 - RNA, 19 nt, Homo sapiens
  misc_RNA (1)...(19): siRNA sense strand
ccaacgggagguuuaagug

SEQ ID NO: 2028708 - RNA, 19 nt, Homo sapiens
  misc_RNA (1)...(19): siRNA sense strand
agaauuuccuuucaaaccu

SEQ ID NO: 2028709 - RNA, 19 nt, Homo sapiens
  misc_RNA (1)...(19): siRNA sense strand
gcgaacuuguuugugauag

SEQ ID NO: 2028710 - RNA, 19 nt, Homo sapiens
  misc_RNA (1)...(19): siRNA sense strand
ugcagaguuuagcauuuaa

SEQ ID NO: 2028711 - RNA, 19 nt, Homo sapiens
  misc_RNA (1)...(19): siRNA sense strand
agacgucggacuucacgaa

SEQ ID NO: 2028712 - RNA, 19 nt, Homo sapiens
  misc_RNA (1)...(19): siRNA sense strand
gacgucggacuucacgaaa

SEQ ID NO: 2028713 - RNA, 19 nt, Homo sapiens
  misc_RNA (1)...(19): siRNA sense strand
ugagcuucaugguggagaa

SEQ ID NO: 2028714 - RNA, 19 nt, Homo sapiens
  misc_RNA (1)...(19): siRNA sense strand
caaaccucccaguaucuau

SEQ ID NO: 2028715 - RNA, 19 nt, Homo sapiens
  misc_RNA (1)...(19): siRNA sense strand
auagagacgucggacuuca

SEQ ID NO: 2028716 - RNA, 19 nt, Homo sapiens
  misc_RNA (1)...(19): siRNA sense strand
gaugagggcuucuacaaga

SEQ ID NO: 2028717 - RNA, 19 nt, Homo sapiens
  misc_RNA (1)...(19): siRNA sense strand
ggaaguuuguguucaguuu

SEQ ID NO: 2028718 - RNA, 19 nt, Homo sapiens
  misc_RNA (1)...(19): siRNA sense strand
gauaucagcuucucagauc

SEQ ID NO: 2028719 - RNA, 19 nt, Homo sapiens
  misc_RNA (1)...(19): siRNA sense strand
gagcugaaccugcccaaga

SEQ ID NO: 2028720 - RNA, 19 nt, Homo sapiens
  misc_RNA (1)...(19): siRNA sense strand
cuacaagagugggaaguuu

SEQ ID NO: 2028721 - RNA, 19 nt, Homo sapiens
  misc_RNA (1)...(19): siRNA sense strand
cagacgaccuccucaacuu

SEQ ID NO: 2028722 - RNA, 19 nt, Homo sapiens
  misc_RNA (1)...(19): siRNA sense strand
gaagccaguccuuacgaua

SEQ ID NO: 2028723 - RNA, 19 nt, Homo sapiens
  misc_RNA (1)...(19): siRNA sense strand
ggaagccaguccuuacgau

SEQ ID NO: 2028724 - RNA, 19 nt, Homo sapiens
  misc_RNA (1)...(19): siRNA sense strand
ugaagcagcagaagaagga

SEQ ID NO: 2028725 - RNA, 19 nt, Homo sapiens
  misc_RNA (1)...(19): siRNA sense strand
cagagguccugcagaacaa

SEQ ID NO: 2028726 - RNA, 19 nt, Homo sapiens
  misc_RNA (1)...(19): siRNA sense strand
ggacauaaacgagcugaac

SEQ ID NO: 2028727 - RNA, 19 nt, Homo sapiens
  misc_RNA (1)...(19): siRNA sense strand
ugcaguaucucuucuugga

SEQ ID NO: 2028728 - RNA, 19 nt, Homo sapiens
  misc_RNA (1)...(19): siRNA sense strand
uaauuuauggccugcagua

SEQ ID NO: 2028729 - RNA, 19 nt, Homo sapiens
  misc_RNA (1)...(19): siRNA sense strand
ggugaagugugagacaaug

SEQ ID NO: 2028730 - RNA, 19 nt, Homo sapiens
  misc_RNA (1)...(19): siRNA sense strand
caucggcuccaccuacuuu

SEQ ID NO: 2028731 - RNA, 19 nt, Homo sapiens
  misc_RNA (1)...(19): siRNA sense strand
cccaagacgugugauauca

SEQ ID NO: 2028732 - RNA, 19 nt, Homo sapiens
  misc_RNA (1)...(19): siRNA sense strand
uuugagcgcugccugaaau

SEQ ID NO: 2028733 - RNA, 19 nt, Homo sapiens
  misc_RNA (1)...(19): siRNA sense strand
caacgucugccucaacauc

SEQ ID NO: 2028734 - RNA, 19 nt, Homo sapiens
  misc_RNA (1)...(19): siRNA sense strand
ggauccagaaggacauaaa

SEQ ID NO: 2028735 - RNA, 19 nt, Homo sapiens
  misc_RNA (1)...(19): siRNA sense strand
aagccaguccuuacgauaa

SEQ ID NO: 2028736 - RNA, 19 nt, Homo sapiens
  misc_RNA (1)...(19): siRNA sense strand
agccaguccuuacgauaaa

SEQ ID NO: 2028737 - RNA, 19 nt, Homo sapiens
  misc_RNA (1)...(19): siRNA sense strand
uuuauggccugcaguaucu

SEQ ID NO: 2028738 - RNA, 19 nt, Homo sapiens
  misc_RNA (1)...(19): siRNA sense strand
ccugcaguaucucuucuug

SEQ ID NO: 2028739 - RNA, 19 nt, Homo sapiens
  misc_RNA (1)...(19): siRNA sense strand
gcccaagacgugugauauc

SEQ ID NO: 2028740 - RNA, 19 nt, Homo sapiens
  misc_RNA (1)...(19): siRNA sense strand
ccgaggacccacugaacaa

SEQ ID NO: 2028741 - RNA, 19 nt, Homo sapiens
  misc_RNA (1)...(19): siRNA sense strand
gcaccaagggcagcagcaa

SEQ ID NO: 2028742 - RNA, 19 nt, Homo sapiens
  misc_RNA (1)...(19): siRNA sense strand
uacaagagugggaaguuug

SEQ ID NO: 2028743 - RNA, 19 nt, Homo sapiens
  misc_RNA (1)...(19): siRNA sense strand
gccucaacauccucagaga

SEQ ID NO: 2028744 - RNA, 19 nt, Homo sapiens
  misc_RNA (1)...(19): siRNA sense strand
uuaaggugggccaggguua

SEQ ID NO: 2028745 - RNA, 19 nt, Homo sapiens
  misc_RNA (1)...(19): siRNA sense strand
gacgaccuccucaacuuca

SEQ ID NO: 2028746 - RNA, 19 nt, Homo sapiens
  misc_RNA (1)...(19): siRNA sense strand
ucaagcuguucucgcugaa

SEQ ID NO: 2028747 - RNA, 19 nt, Homo sapiens
  misc_RNA (1)...(19): siRNA sense strand
caaggugaagugugagaca

SEQ ID NO: 2028748 - RNA, 19 nt, Homo sapiens
  misc_RNA (1)...(19): siRNA sense strand
gugggaaguuuguguucag

SEQ ID NO: 2028749 - RNA, 19 nt, Homo sapiens
  misc_RNA (1)...(19): siRNA sense strand
caacgaagcccaagccaua

SEQ ID NO: 2028750 - RNA, 19 nt, Homo sapiens
  misc_RNA (1)...(19): siRNA sense strand
caauccagaugauccauua

SEQ ID NO: 2028751 - RNA, 19 nt, Homo sapiens
  misc_RNA (1)...(19): siRNA sense strand
gcacaguucugcuaucgau

SEQ ID NO: 2028752 - RNA, 19 nt, Homo sapiens
  misc_RNA (1)...(19): siRNA sense strand
guagacaaguugggaagaa

SEQ ID NO: 2028753 - RNA, 19 nt, Homo sapiens
  misc_RNA (1)...(19): siRNA sense strand
caucaaagccgaaccagau

SEQ ID NO: 2028754 - RNA, 19 nt, Homo sapiens
  misc_RNA (1)...(19): siRNA sense strand
gagcauggacuaggcuaua

SEQ ID NO: 2028755 - RNA, 19 nt, Homo sapiens
  misc_RNA (1)...(19): siRNA sense strand
ggcuauaugccaugaauaa

SEQ ID NO: 2028756 - RNA, 19 nt, Homo sapiens
  misc_RNA (1)...(19): siRNA sense strand
cagaugauccauuagcaaa

SEQ ID NO: 2028757 - RNA, 19 nt, Homo sapiens
  misc_RNA (1)...(19): siRNA sense strand
ggagggacuuuuaaacuug

SEQ ID NO: 2028758 - RNA, 19 nt, Homo sapiens
  misc_RNA (1)...(19): siRNA sense strand
ccagaagaauacccaaugg

SEQ ID NO: 2028759 - RNA, 19 nt, Homo sapiens
  misc_RNA (1)...(19): siRNA sense strand
ccuaaaguacguuucauga

SEQ ID NO: 2028760 - RNA, 19 nt, Homo sapiens
  misc_RNA (1)...(19): siRNA sense strand
gggaagaauauguuuagau

SEQ ID NO: 2028761 - RNA, 19 nt, Homo sapiens
  misc_RNA (1)...(19): siRNA sense strand
agacaaguugggaagaaua

SEQ ID NO: 2028762 - RNA, 19 nt, Homo sapiens
  misc_RNA (1)...(19): siRNA sense strand
gggagggacuuuuaaacuu

SEQ ID NO: 2028763 - RNA, 19 nt, Homo sapiens
  misc_RNA (1)...(19): siRNA sense strand
guuaagugcucccaaucca

SEQ ID NO: 2028764 - RNA, 19 nt, Homo sapiens
  misc_RNA (1)...(19): siRNA sense strand
caaguugggaagaauaugu

SEQ ID NO: 2028765 - RNA, 19 nt, Homo sapiens
  misc_RNA (1)...(19): siRNA sense strand
gacaaguugggaagaauau

SEQ ID NO: 2028766 - RNA, 19 nt, Homo sapiens
  misc_RNA (1)...(19): siRNA sense strand
gauccgcacaguucugcua

SEQ ID NO: 2028767 - RNA, 19 nt, Homo sapiens
  misc_RNA (1)...(19): siRNA sense strand
gcaggaucaucaaggaaac

SEQ ID NO: 2028768 - RNA, 19 nt, Homo sapiens
  misc_RNA (1)...(19): siRNA sense strand
gauccaggccuuguuaagu

SEQ ID NO: 2028769 - RNA, 19 nt, Homo sapiens
  misc_RNA (1)...(19): siRNA sense strand
uaggcuauaugccaugaau

SEQ ID NO: 2028770 - RNA, 19 nt, Homo sapiens
  misc_RNA (1)...(19): siRNA sense strand
guugggaagaauauguuua

SEQ ID NO: 2028771 - RNA, 19 nt, Homo sapiens
  misc_RNA (1)...(19): siRNA sense strand
cugcagauccgcacaguuc

SEQ ID NO: 2028772 - RNA, 19 nt, Homo sapiens
  misc_RNA (1)...(19): siRNA sense strand
gaagcccaagccauagaaa

SEQ ID NO: 2028773 - RNA, 19 nt, Homo sapiens
  misc_RNA (1)...(19): siRNA sense strand
ugaacuauuccuuccagaa

SEQ ID NO: 2028774 - RNA, 19 nt, Homo sapiens
  misc_RNA (1)...(19): siRNA sense strand
ucaaagccgaaccagauga

SEQ ID NO: 2028775 - RNA, 19 nt, Homo sapiens
  misc_RNA (1)...(19): siRNA sense strand
uagacaaguugggaagaau

SEQ ID NO: 2028776 - RNA, 19 nt, Homo sapiens
  misc_RNA (1)...(19): siRNA sense strand
ccagaugauccauuagcaa

SEQ ID NO: 2028777 - RNA, 19 nt, Homo sapiens
  misc_RNA (1)...(19): siRNA sense strand
gcauggacuaggcuauaug

SEQ ID NO: 2028778 - RNA, 19 nt, Homo sapiens
  misc_RNA (1)...(19): siRNA sense strand
gcaguggaagaccaacgaa

SEQ ID NO: 2028779 - RNA, 19 nt, Homo sapiens
  misc_RNA (1)...(19): siRNA sense strand
auccaggccuuguuaagug

SEQ ID NO: 2028780 - RNA, 19 nt, Homo sapiens
  misc_RNA (1)...(19): siRNA sense strand
cgcaggaucaucaaggaaa

SEQ ID NO: 2028781 - RNA, 19 nt, Homo sapiens
  misc_RNA (1)...(19): siRNA sense strand
gcuauaugccaugaauaau

SEQ ID NO: 2028782 - RNA, 19 nt, Homo sapiens
  misc_RNA (1)...(19): siRNA sense strand
cgaagcccaagccauagaa

SEQ ID NO: 2028783 - RNA, 19 nt, Homo sapiens
  misc_RNA (1)...(19): siRNA sense strand
cuuguuaagugcucccaau

SEQ ID NO: 2028784 - RNA, 19 nt, Homo sapiens
  misc_RNA (1)...(19): siRNA sense strand
gagggacuuuuaaacuuga

SEQ ID NO: 2028785 - RNA, 19 nt, Homo sapiens
  misc_RNA (1)...(19): siRNA sense strand
acagcuagagcauggacua

SEQ ID NO: 2028786 - RNA, 19 nt, Homo sapiens
  misc_RNA (1)...(19): siRNA sense strand
ccaauccagaugauccauu

SEQ ID NO: 2028787 - RNA, 19 nt, Homo sapiens
  misc_RNA (1)...(19): siRNA sense strand
caaacgggcucaucauaau

SEQ ID NO: 2028788 - RNA, 19 nt, Homo sapiens
  misc_RNA (1)...(19): siRNA sense strand
gacaaacgggcucaucaua

SEQ ID NO: 2028789 - RNA, 19 nt, Homo sapiens
  misc_RNA (1)...(19): siRNA sense strand
guagggaccacaucaaaga

SEQ ID NO: 2028790 - RNA, 19 nt, Homo sapiens
  misc_RNA (1)...(19): siRNA sense strand
auaaugcacuggaacgaaa

SEQ ID NO: 2028791 - RNA, 19 nt, Homo sapiens
  misc_RNA (1)...(19): siRNA sense strand
acaaacgggcucaucauaa

SEQ ID NO: 2028792 - RNA, 19 nt, Homo sapiens
  misc_RNA (1)...(19): siRNA sense strand
agacagcuuucacaguuug

SEQ ID NO: 2028793 - RNA, 19 nt, Homo sapiens
  misc_RNA (1)...(19): siRNA sense strand
gcacuggaacgaaaacgua

SEQ ID NO: 2028794 - RNA, 19 nt, Homo sapiens
  misc_RNA (1)...(19): siRNA sense strand
aagacagcuuucacaguuu

SEQ ID NO: 2028795 - RNA, 19 nt, Homo sapiens
  misc_RNA (1)...(19): siRNA sense strand
aaacguagggaccacauca

SEQ ID NO: 2028796 - RNA, 19 nt, Homo sapiens
  misc_RNA (1)...(19): siRNA sense strand
cauaaugcacuggaacgaa

SEQ ID NO: 2028797 - RNA, 19 nt, Homo sapiens
  misc_RNA (1)...(19): siRNA sense strand
ugacaaacgggcucaucau

SEQ ID NO: 2028798 - RNA, 19 nt, Homo sapiens
  misc_RNA (1)...(19): siRNA sense strand
aaacgggcucaucauaaug

SEQ ID NO: 2028799 - RNA, 19 nt, Homo sapiens
  misc_RNA (1)...(19): siRNA sense strand
caaacgggcucaucauaau

SEQ ID NO: 2028800 - RNA, 19 nt, Homo sapiens
  misc_RNA (1)...(19): siRNA sense strand
gacaaacgggcucaucaua

SEQ ID NO: 2028801 - RNA, 19 nt, Homo sapiens
  misc_RNA (1)...(19): siRNA sense strand
guagggaccacaucaaaga

SEQ ID NO: 2028802 - RNA, 19 nt, Homo sapiens
  misc_RNA (1)...(19): siRNA sense strand
auaaugcacuggaacgaaa

SEQ ID NO: 2028803 - RNA, 19 nt, Homo sapiens
  misc_RNA (1)...(19): siRNA sense strand
acaaacgggcucaucauaa

SEQ ID NO: 2028804 - RNA, 19 nt, Homo sapiens
  misc_RNA (1)...(19): siRNA sense strand
agacagcuuucacaguuug

SEQ ID NO: 2028805 - RNA, 19 nt, Homo sapiens
  misc_RNA (1)...(19): siRNA sense strand
gcacuggaacgaaaacgua

SEQ ID NO: 2028806 - RNA, 19 nt, Homo sapiens
  misc_RNA (1)...(19): siRNA sense strand
aagacagcuuucacaguuu

SEQ ID NO: 2028807 - RNA, 19 nt, Homo sapiens
  misc_RNA (1)...(19): siRNA sense strand
aaacguagggaccacauca

SEQ ID NO: 2028808 - RNA, 19 nt, Homo sapiens
  misc_RNA (1)...(19): siRNA sense strand
cauaaugcacuggaacgaa

SEQ ID NO: 2028809 - RNA, 19 nt, Homo sapiens
  misc_RNA (1)...(19): siRNA sense strand
ugacaaacgggcucaucau

SEQ ID NO: 2028810 - RNA, 19 nt, Homo sapiens
  misc_RNA (1)...(19): siRNA sense strand
aaacgggcucaucauaaug

SEQ ID NO: 2028811 - RNA, 19 nt, Homo sapiens
  misc_RNA (1)...(19): siRNA sense strand
caaacgggcucaucauaau

SEQ ID NO: 2028812 - RNA, 19 nt, Homo sapiens
  misc_RNA (1)...(19): siRNA sense strand
gacaaacgggcucaucaua

SEQ ID NO: 2028813 - RNA, 19 nt, Homo sapiens
  misc_RNA (1)...(19): siRNA sense strand
guagggaccacaucaaaga

SEQ ID NO: 2028814 - RNA, 19 nt, Homo sapiens
  misc_RNA (1)...(19): siRNA sense strand
auaaugcacuggaacgaaa

SEQ ID NO: 2028815 - RNA, 19 nt, Homo sapiens
  misc_RNA (1)...(19): siRNA sense strand
acaaacgggcucaucauaa

SEQ ID NO: 2028816 - RNA, 19 nt, Homo sapiens
  misc_RNA (1)...(19): siRNA sense strand
agacagcuuucacaguuug

SEQ ID NO: 2028817 - RNA, 19 nt, Homo sapiens
  misc_RNA (1)...(19): siRNA sense strand
gcacuggaacgaaaacgua

SEQ ID NO: 2028818 - RNA, 19 nt, Homo sapiens
  misc_RNA (1)...(19): siRNA sense strand
aagacagcuuucacaguuu

SEQ ID NO: 2028819 - RNA, 19 nt, Homo sapiens
  misc_RNA (1)...(19): siRNA sense strand
aaacguagggaccacauca

SEQ ID NO: 2028820 - RNA, 19 nt, Homo sapiens
  misc_RNA (1)...(19): siRNA sense strand
cauaaugcacuggaacgaa

SEQ ID NO: 2028821 - RNA, 19 nt, Homo sapiens
  misc_RNA (1)...(19): siRNA sense strand
ugacaaacgggcucaucau

SEQ ID NO: 2028822 - RNA, 19 nt, Homo sapiens
  misc_RNA (1)...(19): siRNA sense strand
aaacgggcucaucauaaug

SEQ ID NO: 2028823 - RNA, 19 nt, Homo sapiens
  misc_RNA (1)...(19): siRNA sense strand
caaacgggcucaucauaau

SEQ ID NO: 2028824 - RNA, 19 nt, Homo sapiens
  misc_RNA (1)...(19): siRNA sense strand
gacaaacgggcucaucaua

SEQ ID NO: 2028825 - RNA, 19 nt, Homo sapiens
  misc_RNA (1)...(19): siRNA sense strand
guagggaccacaucaaaga

SEQ ID NO: 2028826 - RNA, 19 nt, Homo sapiens
  misc_RNA (1)...(19): siRNA sense strand
auaaugcacuggaacgaaa

SEQ ID NO: 2028827 - RNA, 19 nt, Homo sapiens
  misc_RNA (1)...(19): siRNA sense strand
acaaacgggcucaucauaa

SEQ ID NO: 2028828 - RNA, 19 nt, Homo sapiens
  misc_RNA (1)...(19): siRNA sense strand
agacagcuuucacaguuug

SEQ ID NO: 2028829 - RNA, 19 nt, Homo sapiens
  misc_RNA (1)...(19): siRNA sense strand
gcacuggaacgaaaacgua

SEQ ID NO: 2028830 - RNA, 19 nt, Homo sapiens
  misc_RNA (1)...(19): siRNA sense strand
aagacagcuuucacaguuu

SEQ ID NO: 2028831 - RNA, 19 nt, Homo sapiens
  misc_RNA (1)...(19): siRNA sense strand
aaacguagggaccacauca

SEQ ID NO: 2028832 - RNA, 19 nt, Homo sapiens
  misc_RNA (1)...(19): siRNA sense strand
cauaaugcacuggaacgaa

SEQ ID NO: 2028833 - RNA, 19 nt, Homo sapiens
  misc_RNA (1)...(19): siRNA sense strand
ugacaaacgggcucaucau

SEQ ID NO: 2028834 - RNA, 19 nt, Homo sapiens
  misc_RNA (1)...(19): siRNA sense strand
aaacgggcucaucauaaug

SEQ ID NO: 2028835 - RNA, 19 nt, Homo sapiens
  misc_RNA (1)...(19): siRNA sense strand
caaacgggcucaucauaau

SEQ ID NO: 2028836 - RNA, 19 nt, Homo sapiens
  misc_RNA (1)...(19): siRNA sense strand
gacaaacgggcucaucaua

SEQ ID NO: 2028837 - RNA, 19 nt, Homo sapiens
  misc_RNA (1)...(19): siRNA sense strand
guagggaccacaucaaaga

SEQ ID NO: 2028838 - RNA, 19 nt, Homo sapiens
  misc_RNA (1)...(19): siRNA sense strand
auaaugcacuggaacgaaa

SEQ ID NO: 2028839 - RNA, 19 nt, Homo sapiens
  misc_RNA (1)...(19): siRNA sense strand
acaaacgggcucaucauaa

SEQ ID NO: 2028840 - RNA, 19 nt, Homo sapiens
  misc_RNA (1)...(19): siRNA sense strand
agacagcuuucacaguuug

SEQ ID NO: 2028841 - RNA, 19 nt, Homo sapiens
  misc_RNA (1)...(19): siRNA sense strand
gcacuggaacgaaaacgua

SEQ ID NO: 2028842 - RNA, 19 nt, Homo sapiens
  misc_RNA (1)...(19): siRNA sense strand
aagacagcuuucacaguuu

SEQ ID NO: 2028843 - RNA, 19 nt, Homo sapiens
  misc_RNA (1)...(19): siRNA sense strand
aaacguagggaccacauca

SEQ ID NO: 2028844 - RNA, 19 nt, Homo sapiens
  misc_RNA (1)...(19): siRNA sense strand
cauaaugcacuggaacgaa

SEQ ID NO: 2028845 - RNA, 19 nt, Homo sapiens
  misc_RNA (1)...(19): siRNA sense strand
ugacaaacgggcucaucau

SEQ ID NO: 2028846 - RNA, 19 nt, Homo sapiens
  misc_RNA (1)...(19): siRNA sense strand
aaacgggcucaucauaaug

SEQ ID NO: 2028847 - RNA, 19 nt, Homo sapiens
  misc_RNA (1)...(19): siRNA sense strand
caaacgggcucaucauaau

SEQ ID NO: 2028848 - RNA, 19 nt, Homo sapiens
  misc_RNA (1)...(19): siRNA sense strand
gacaaacgggcucaucaua

SEQ ID NO: 2028849 - RNA, 19 nt, Homo sapiens
  misc_RNA (1)...(19): siRNA sense strand
guagggaccacaucaaaga

SEQ ID NO: 2028850 - RNA, 19 nt, Homo sapiens
  misc_RNA (1)...(19): siRNA sense strand
auaaugcacuggaacgaaa

SEQ ID NO: 2028851 - RNA, 19 nt, Homo sapiens
  misc_RNA (1)...(19): siRNA sense strand
acaaacgggcucaucauaa

SEQ ID NO: 2028852 - RNA, 19 nt, Homo sapiens
  misc_RNA (1)...(19): siRNA sense strand
agacagcuuucacaguuug

SEQ ID NO: 2028853 - RNA, 19 nt, Homo sapiens
  misc_RNA (1)...(19): siRNA sense strand
gcacuggaacgaaaacgua

SEQ ID NO: 2028854 - RNA, 19 nt, Homo sapiens
  misc_RNA (1)...(19): siRNA sense strand
aagacagcuuucacaguuu

SEQ ID NO: 2028855 - RNA, 19 nt, Homo sapiens
  misc_RNA (1)...(19): siRNA sense strand
aaacguagggaccacauca

SEQ ID NO: 2028856 - RNA, 19 nt, Homo sapiens
  misc_RNA (1)...(19): siRNA sense strand
cauaaugcacuggaacgaa

SEQ ID NO: 2028857 - RNA, 19 nt, Homo sapiens
  misc_RNA (1)...(19): siRNA sense strand
ugacaaacgggcucaucau

SEQ ID NO: 2028858 - RNA, 19 nt, Homo sapiens
  misc_RNA (1)...(19): siRNA sense strand
aaacgggcucaucauaaug

SEQ ID NO: 2028859 - RNA, 19 nt, Homo sapiens
  misc_RNA (1)...(19): siRNA sense strand
gaugagaaaucagaacuua

SEQ ID NO: 2028860 - RNA, 19 nt, Homo sapiens
  misc_RNA (1)...(19): siRNA sense strand
ccaaagagauugcaauaga

SEQ ID NO: 2028861 - RNA, 19 nt, Homo sapiens
  misc_RNA (1)...(19): siRNA sense strand
gcagcaaacuugaagaauu

SEQ ID NO: 2028862 - RNA, 19 nt, Homo sapiens
  misc_RNA (1)...(19): siRNA sense strand
ggagaacacugagaaagaa

SEQ ID NO: 2028863 - RNA, 19 nt, Homo sapiens
  misc_RNA (1)...(19): siRNA sense strand
gaugauggcugcagugaug

SEQ ID NO: 2028864 - RNA, 19 nt, Homo sapiens
  misc_RNA (1)...(19): siRNA sense strand
cagcaaacuugaagaauug

SEQ ID NO: 2028865 - RNA, 19 nt, Homo sapiens
  misc_RNA (1)...(19): siRNA sense strand
gcucaggacuccagcauga

SEQ ID NO: 2028866 - RNA, 19 nt, Homo sapiens
  misc_RNA (1)...(19): siRNA sense strand
caaagagauugcaauagaa

SEQ ID NO: 2028867 - RNA, 19 nt, Homo sapiens
  misc_RNA (1)...(19): siRNA sense strand
ccaagaaggucuaaagaag

SEQ ID NO: 2028868 - RNA, 19 nt, Homo sapiens
  misc_RNA (1)...(19): siRNA sense strand
caacuguccuuggccuuua

SEQ ID NO: 2028869 - RNA, 19 nt, Homo sapiens
  misc_RNA (1)...(19): siRNA sense strand
acucuggaaucuagaauua

SEQ ID NO: 2028870 - RNA, 19 nt, Homo sapiens
  misc_RNA (1)...(19): siRNA sense strand
gaaagcaacggaagugaug

SEQ ID NO: 2028871 - RNA, 19 nt, Homo sapiens
  misc_RNA (1)...(19): siRNA sense strand
gaugucaugccuaauauuu

SEQ ID NO: 2028872 - RNA, 19 nt, Homo sapiens
  misc_RNA (1)...(19): siRNA sense strand
caacggaagugaugaugca

SEQ ID NO: 2028873 - RNA, 19 nt, Homo sapiens
  misc_RNA (1)...(19): siRNA sense strand
ggacaguggcccugaagaa

SEQ ID NO: 2028874 - RNA, 19 nt, Homo sapiens
  misc_RNA (1)...(19): siRNA sense strand
guugagaaguccaaagaga

SEQ ID NO: 2028875 - RNA, 19 nt, Homo sapiens
  misc_RNA (1)...(19): siRNA sense strand
ugacagaggagaacacuga

SEQ ID NO: 2028876 - RNA, 19 nt, Homo sapiens
  misc_RNA (1)...(19): siRNA sense strand
ggaagaagagucaaagagu

SEQ ID NO: 2028877 - RNA, 19 nt, Homo sapiens
  misc_RNA (1)...(19): siRNA sense strand
cggaagugaugaugcagua

SEQ ID NO: 2028878 - RNA, 19 nt, Homo sapiens
  misc_RNA (1)...(19): siRNA sense strand
uaaagaggacguaugagaa

SEQ ID NO: 2028879 - RNA, 19 nt, Homo sapiens
  misc_RNA (1)...(19): siRNA sense strand
ugaagcagcugagcaggaa

SEQ ID NO: 2028880 - RNA, 19 nt, Homo sapiens
  misc_RNA (1)...(19): siRNA sense strand
gaaaugacagcuacacucu

SEQ ID NO: 2028881 - RNA, 19 nt, Homo sapiens
  misc_RNA (1)...(19): siRNA sense strand
ggaugccacuucaccagaa

SEQ ID NO: 2028882 - RNA, 19 nt, Homo sapiens
  misc_RNA (1)...(19): siRNA sense strand
caagaaggucuaaagaaga

SEQ ID NO: 2028883 - RNA, 19 nt, Homo sapiens
  misc_RNA (1)...(19): siRNA sense strand
gcuacacucuggaaucuag

SEQ ID NO: 2028884 - RNA, 19 nt, Homo sapiens
  misc_RNA (1)...(19): siRNA sense strand
uugaagaauugguccauuu

SEQ ID NO: 2028885 - RNA, 19 nt, Homo sapiens
  misc_RNA (1)...(19): siRNA sense strand
ggaagcagcucuugaaaac

SEQ ID NO: 2028886 - RNA, 19 nt, Homo sapiens
  misc_RNA (1)...(19): siRNA sense strand
agaaagaacuggaaaacuu

SEQ ID NO: 2028887 - RNA, 19 nt, Homo sapiens
  misc_RNA (1)...(19): siRNA sense strand
gaacguguuugugcaacug

SEQ ID NO: 2028888 - RNA, 19 nt, Homo sapiens
  misc_RNA (1)...(19): siRNA sense strand
gaagugaugaugcaguaug

SEQ ID NO: 2028889 - RNA, 19 nt, Homo sapiens
  misc_RNA (1)...(19): siRNA sense strand
cuaaagaggacguaugaga

SEQ ID NO: 2028890 - RNA, 19 nt, Homo sapiens
  misc_RNA (1)...(19): siRNA sense strand
ucucggagcaacucacuua

SEQ ID NO: 2028891 - RNA, 19 nt, Homo sapiens
  misc_RNA (1)...(19): siRNA sense strand
gaaaagggcccaagaagca

SEQ ID NO: 2028892 - RNA, 19 nt, Homo sapiens
  misc_RNA (1)...(19): siRNA sense strand
uaaagaagaccaaagaacu

SEQ ID NO: 2028893 - RNA, 19 nt, Homo sapiens
  misc_RNA (1)...(19): siRNA sense strand
caucauccauucccuccuu

SEQ ID NO: 2028894 - RNA, 19 nt, Homo sapiens
  misc_RNA (1)...(19): siRNA sense strand
gaauuaaccaggcugaaag

SEQ ID NO: 2028895 - RNA, 19 nt, Homo sapiens
  misc_RNA (1)...(19): siRNA sense strand
ggaaguugagaacguguuu

SEQ ID NO: 2028896 - RNA, 19 nt, Homo sapiens
  misc_RNA (1)...(19): siRNA sense strand
gaaucugccuggccaaacu

SEQ ID NO: 2028897 - RNA, 19 nt, Homo sapiens
  misc_RNA (1)...(19): siRNA sense strand
cagccuaccugucacuuca

SEQ ID NO: 2028898 - RNA, 19 nt, Homo sapiens
  misc_RNA (1)...(19): siRNA sense strand
guccaaagagauugcaaua

SEQ ID NO: 2028899 - RNA, 19 nt, Homo sapiens
  misc_RNA (1)...(19): siRNA sense strand
uagaagaaacugaggaaga

SEQ ID NO: 2028900 - RNA, 19 nt, Homo sapiens
  misc_RNA (1)...(19): siRNA sense strand
gaagaacagaagagugaga

SEQ ID NO: 2028901 - RNA, 19 nt, Homo sapiens
  misc_RNA (1)...(19): siRNA sense strand
uagaugucaugccuaauau

SEQ ID NO: 2028902 - RNA, 19 nt, Homo sapiens
  misc_RNA (1)...(19): siRNA sense strand
cagaggaggacaagaagaa

SEQ ID NO: 2028903 - RNA, 19 nt, Homo sapiens
  misc_RNA (1)...(19): siRNA sense strand
guccauuucuuacaaguca

SEQ ID NO: 2028904 - RNA, 19 nt, Homo sapiens
  misc_RNA (1)...(19): siRNA sense strand
ugagaaguccaaagagauu

SEQ ID NO: 2028905 - RNA, 19 nt, Homo sapiens
  misc_RNA (1)...(19): siRNA sense strand
agaagaaacugaggaagag

SEQ ID NO: 2028906 - RNA, 19 nt, Homo sapiens
  misc_RNA (1)...(19): siRNA sense strand
gaaggaggaggaggaagaa

SEQ ID NO: 2028907 - RNA, 19 nt, Homo sapiens
  misc_RNA (1)...(19): siRNA sense strand
gaaaauggaaagacaaaug

SEQ ID NO: 2028908 - RNA, 19 nt, Homo sapiens
  misc_RNA (1)...(19): siRNA sense strand
ggaaaccuaccagaaguug

SEQ ID NO: 2028909 - RNA, 19 nt, Homo sapiens
  misc_RNA (1)...(19): siRNA sense strand
gcaacuguccuuggccuuu

SEQ ID NO: 2028910 - RNA, 19 nt, Homo sapiens
  misc_RNA (1)...(19): siRNA sense strand
ucaaagaguggcuuagaug

SEQ ID NO: 2028911 - RNA, 19 nt, Homo sapiens
  misc_RNA (1)...(19): siRNA sense strand
gcucaagcuuccagaccuu

SEQ ID NO: 2028912 - RNA, 19 nt, Homo sapiens
  misc_RNA (1)...(19): siRNA sense strand
cagcaagggauuccaagaa

SEQ ID NO: 2028913 - RNA, 19 nt, Homo sapiens
  misc_RNA (1)...(19): siRNA sense strand
uaaguuuaaugcccugaau

SEQ ID NO: 2028914 - RNA, 19 nt, Homo sapiens
  misc_RNA (1)...(19): siRNA sense strand
cuucaaagcuuccauuacg

SEQ ID NO: 2028915 - RNA, 19 nt, Homo sapiens
  misc_RNA (1)...(19): siRNA sense strand
aagaguggcuuagauguca

SEQ ID NO: 2028916 - RNA, 19 nt, Homo sapiens
  misc_RNA (1)...(19): siRNA sense strand
gcucuacaauuccuauaac

SEQ ID NO: 2028917 - RNA, 19 nt, Homo sapiens
  misc_RNA (1)...(19): siRNA sense strand
aaagaagaccaaagaacuu

SEQ ID NO: 2028918 - RNA, 19 nt, Homo sapiens
  misc_RNA (1)...(19): siRNA sense strand
augcggagcucauggaguu

SEQ ID NO: 2028919 - RNA, 19 nt, Homo sapiens
  misc_RNA (1)...(19): siRNA sense strand
gcuggaagaagccaaguug

SEQ ID NO: 2028920 - RNA, 19 nt, Homo sapiens
  misc_RNA (1)...(19): siRNA sense strand
gcguugcugugguuccuaa

SEQ ID NO: 2028921 - RNA, 19 nt, Homo sapiens
  misc_RNA (1)...(19): siRNA sense strand
ugagaaaucagaacuuagu

SEQ ID NO: 2028922 - RNA, 19 nt, Homo sapiens
  misc_RNA (1)...(19): siRNA sense strand
gucaaagaguggcuuagau

SEQ ID NO: 2028923 - RNA, 19 nt, Homo sapiens
  misc_RNA (1)...(19): siRNA sense strand
gaaaagcgcaugucgaaag

SEQ ID NO: 2028924 - RNA, 19 nt, Homo sapiens
  misc_RNA (1)...(19): siRNA sense strand
cagaggagaacacugagaa

SEQ ID NO: 2028925 - RNA, 19 nt, Homo sapiens
  misc_RNA (1)...(19): siRNA sense strand
gcagugaugcuggucuuga

SEQ ID NO: 2028926 - RNA, 19 nt, Homo sapiens
  misc_RNA (1)...(19): siRNA sense strand
gguagaagaaacugaggaa

SEQ ID NO: 2028927 - RNA, 19 nt, Homo sapiens
  misc_RNA (1)...(19): siRNA sense strand
ugaaggaggaggaggaaga

SEQ ID NO: 2028928 - RNA, 19 nt, Homo sapiens
  misc_RNA (1)...(19): siRNA sense strand
ucucagaggaggacaagaa

SEQ ID NO: 2028929 - RNA, 19 nt, Homo sapiens
  misc_RNA (1)...(19): siRNA sense strand
aggaagaacagaagaguga

SEQ ID NO: 2028930 - RNA, 19 nt, Homo sapiens
  misc_RNA (1)...(19): siRNA sense strand
gcugugguuccuaaguuua

SEQ ID NO: 2028931 - RNA, 19 nt, Homo sapiens
  misc_RNA (1)...(19): siRNA sense strand
cagcuacacucuggaaucu

SEQ ID NO: 2028932 - RNA, 19 nt, Homo sapiens
  misc_RNA (1)...(19): siRNA sense strand
ugccuaauauuucugaugu

SEQ ID NO: 2028933 - RNA, 19 nt, Homo sapiens
  misc_RNA (1)...(19): siRNA sense strand
caaagaguggcuuagaugu

SEQ ID NO: 2028934 - RNA, 19 nt, Homo sapiens
  misc_RNA (1)...(19): siRNA sense strand
gcagaaugaccagaggaaa

SEQ ID NO: 2028935 - RNA, 19 nt, Homo sapiens
  misc_RNA (1)...(19): siRNA sense strand
ggaguaucuugcaguccaa

SEQ ID NO: 2028936 - RNA, 19 nt, Homo sapiens
  misc_RNA (1)...(19): siRNA sense strand
gaccaaagaacuucaagac

SEQ ID NO: 2028937 - RNA, 19 nt, Homo sapiens
  misc_RNA (1)...(19): siRNA sense strand
gcggagcucauggaguuua

SEQ ID NO: 2028938 - RNA, 19 nt, Homo sapiens
  misc_RNA (1)...(19): siRNA sense strand
cgggaaaccuaccagaagu

SEQ ID NO: 2028939 - RNA, 19 nt, Homo sapiens
  misc_RNA (1)...(19): siRNA sense strand
ugucaugccuaauauuucu

SEQ ID NO: 2028940 - RNA, 19 nt, Homo sapiens
  misc_RNA (1)...(19): siRNA sense strand
gagauugcaauagaacaaa

SEQ ID NO: 2028941 - RNA, 19 nt, Homo sapiens
  misc_RNA (1)...(19): siRNA sense strand
gaggaagaagagucaaaga

SEQ ID NO: 2028942 - RNA, 19 nt, Homo sapiens
  misc_RNA (1)...(19): siRNA sense strand
agaaggagaaaccgacaaa

SEQ ID NO: 2028943 - RNA, 19 nt, Homo sapiens
  misc_RNA (1)...(19): siRNA sense strand
agaaguugcuggaggacau

SEQ ID NO: 2028944 - RNA, 19 nt, Homo sapiens
  misc_RNA (1)...(19): siRNA sense strand
agaauuaaccaggcugaaa

SEQ ID NO: 2028945 - RNA, 19 nt, Homo sapiens
  misc_RNA (1)...(19): siRNA sense strand
ggaugaggccgacgucucu

SEQ ID NO: 2028946 - RNA, 19 nt, Homo sapiens
  misc_RNA (1)...(19): siRNA sense strand
gaacacugagaaagaacug

SEQ ID NO: 2028947 - RNA, 19 nt, Homo sapiens
  misc_RNA (1)...(19): siRNA sense strand
gagcuuccacccacugugu

SEQ ID NO: 2028948 - RNA, 19 nt, Homo sapiens
  misc_RNA (1)...(19): siRNA sense strand
aggccuagcuccuguuaca

SEQ ID NO: 2028949 - RNA, 19 nt, Homo sapiens
  misc_RNA (1)...(19): siRNA sense strand
gccuagcuccuguuacaaa

SEQ ID NO: 2028950 - RNA, 19 nt, Homo sapiens
  misc_RNA (1)...(19): siRNA sense strand
augcuggucuugacuguug

SEQ ID NO: 2028951 - RNA, 19 nt, Homo sapiens
  misc_RNA (1)...(19): siRNA sense strand
caagucauguaucccaaac

SEQ ID NO: 2028952 - RNA, 19 nt, Homo sapiens
  misc_RNA (1)...(19): siRNA sense strand
gaauugguccauuucuuac

SEQ ID NO: 2028953 - RNA, 19 nt, Homo sapiens
  misc_RNA (1)...(19): siRNA sense strand
aaaccuggccaacagaguu

SEQ ID NO: 2028954 - RNA, 19 nt, Homo sapiens
  misc_RNA (1)...(19): siRNA sense strand
aaacuucaaagcuuccauu

SEQ ID NO: 2028955 - RNA, 19 nt, Homo sapiens
  misc_RNA (1)...(19): siRNA sense strand
guccuuggccuuuagaaau

SEQ ID NO: 2028956 - RNA, 19 nt, Homo sapiens
  misc_RNA (1)...(19): siRNA sense strand
ggaggaggaagaacagaag

SEQ ID NO: 2028957 - RNA, 19 nt, Homo sapiens
  misc_RNA (1)...(19): siRNA sense strand
cugaagagguagaagaaac

SEQ ID NO: 2028958 - RNA, 19 nt, Homo sapiens
  misc_RNA (1)...(19): siRNA sense strand
cuacaauuccuauaacucu

SEQ ID NO: 2028959 - RNA, 19 nt, Homo sapiens
  misc_RNA (1)...(19): siRNA sense strand
gaugagaaaucagaacuua

SEQ ID NO: 2028960 - RNA, 19 nt, Homo sapiens
  misc_RNA (1)...(19): siRNA sense strand
ccaaagagauugcaauaga

SEQ ID NO: 2028961 - RNA, 19 nt, Homo sapiens
  misc_RNA (1)...(19): siRNA sense strand
gcagcaaacuugaagaauu

SEQ ID NO: 2028962 - RNA, 19 nt, Homo sapiens
  misc_RNA (1)...(19): siRNA sense strand
ggagaacacugagaaagaa

SEQ ID NO: 2028963 - RNA, 19 nt, Homo sapiens
  misc_RNA (1)...(19): siRNA sense strand
gaugauggcugcagugaug

SEQ ID NO: 2028964 - RNA, 19 nt, Homo sapiens
  misc_RNA (1)...(19): siRNA sense strand
cagcaaacuugaagaauug

SEQ ID NO: 2028965 - RNA, 19 nt, Homo sapiens
  misc_RNA (1)...(19): siRNA sense strand
gcucaggacuccagcauga

SEQ ID NO: 2028966 - RNA, 19 nt, Homo sapiens
  misc_RNA (1)...(19): siRNA sense strand
caaagagauugcaauagaa

SEQ ID NO: 2028967 - RNA, 19 nt, Homo sapiens
  misc_RNA (1)...(19): siRNA sense strand
ccaagaaggucuaaagaag

SEQ ID NO: 2028968 - RNA, 19 nt, Homo sapiens
  misc_RNA (1)...(19): siRNA sense strand
caacuguccuuggccuuua

SEQ ID NO: 2028969 - RNA, 19 nt, Homo sapiens
  misc_RNA (1)...(19): siRNA sense strand
acucuggaaucuagaauua

SEQ ID NO: 2028970 - RNA, 19 nt, Homo sapiens
  misc_RNA (1)...(19): siRNA sense strand
gaaagcaacggaagugaug

SEQ ID NO: 2028971 - RNA, 19 nt, Homo sapiens
  misc_RNA (1)...(19): siRNA sense strand
gaugucaugccuaauauuu

SEQ ID NO: 2028972 - RNA, 19 nt, Homo sapiens
  misc_RNA (1)...(19): siRNA sense strand
caacggaagugaugaugca

SEQ ID NO: 2028973 - RNA, 19 nt, Homo sapiens
  misc_RNA (1)...(19): siRNA sense strand
ggacaguggcccugaagaa

SEQ ID NO: 2028974 - RNA, 19 nt, Homo sapiens
  misc_RNA (1)...(19): siRNA sense strand
guugagaaguccaaagaga

SEQ ID NO: 2028975 - RNA, 19 nt, Homo sapiens
  misc_RNA (1)...(19): siRNA sense strand
ugacagaggagaacacuga

SEQ ID NO: 2028976 - RNA, 19 nt, Homo sapiens
  misc_RNA (1)...(19): siRNA sense strand
ggaagaagagucaaagagu

SEQ ID NO: 2028977 - RNA, 19 nt, Homo sapiens
  misc_RNA (1)...(19): siRNA sense strand
cggaagugaugaugcagua

SEQ ID NO: 2028978 - RNA, 19 nt, Homo sapiens
  misc_RNA (1)...(19): siRNA sense strand
uaaagaggacguaugagaa

SEQ ID NO: 2028979 - RNA, 19 nt, Homo sapiens
  misc_RNA (1)...(19): siRNA sense strand
ugaagcagcugagcaggaa

SEQ ID NO: 2028980 - RNA, 19 nt, Homo sapiens
  misc_RNA (1)...(19): siRNA sense strand
gaaaugacagcuacacucu

SEQ ID NO: 2028981 - RNA, 19 nt, Homo sapiens
  misc_RNA (1)...(19): siRNA sense strand
caagaaggucuaaagaaga

SEQ ID NO: 2028982 - RNA, 19 nt, Homo sapiens
  misc_RNA (1)...(19): siRNA sense strand
ggaugccacuucaccagaa

SEQ ID NO: 2028983 - RNA, 19 nt, Homo sapiens
  misc_RNA (1)...(19): siRNA sense strand
gcuacacucuggaaucuag

SEQ ID NO: 2028984 - RNA, 19 nt, Homo sapiens
  misc_RNA (1)...(19): siRNA sense strand
uugaagaauugguccauuu

SEQ ID NO: 2028985 - RNA, 19 nt, Homo sapiens
  misc_RNA (1)...(19): siRNA sense strand
ggaagcagcucuugaaaac

SEQ ID NO: 2028986 - RNA, 19 nt, Homo sapiens
  misc_RNA (1)...(19): siRNA sense strand
agaaagaacuggaaaacuu

SEQ ID NO: 2028987 - RNA, 19 nt, Homo sapiens
  misc_RNA (1)...(19): siRNA sense strand
gaacguguuugugcaacug

SEQ ID NO: 2028988 - RNA, 19 nt, Homo sapiens
  misc_RNA (1)...(19): siRNA sense strand
gaagugaugaugcaguaug

SEQ ID NO: 2028989 - RNA, 19 nt, Homo sapiens
  misc_RNA (1)...(19): siRNA sense strand
cuaaagaggacguaugaga

SEQ ID NO: 2028990 - RNA, 19 nt, Homo sapiens
  misc_RNA (1)...(19): siRNA sense strand
ucucggagcaacucacuua

SEQ ID NO: 2028991 - RNA, 19 nt, Homo sapiens
  misc_RNA (1)...(19): siRNA sense strand
gaaaagggcccaagaagca

SEQ ID NO: 2028992 - RNA, 19 nt, Homo sapiens
  misc_RNA (1)...(19): siRNA sense strand
uaaagaagaccaaagaacu

SEQ ID NO: 2028993 - RNA, 19 nt, Homo sapiens
  misc_RNA (1)...(19): siRNA sense strand
caucauccauucccuccuu

SEQ ID NO: 2028994 - RNA, 19 nt, Homo sapiens
  misc_RNA (1)...(19): siRNA sense strand
gaauuaaccaggcugaaag

SEQ ID NO: 2028995 - RNA, 19 nt, Homo sapiens
  misc_RNA (1)...(19): siRNA sense strand
ggaaguugagaacguguuu

SEQ ID NO: 2028996 - RNA, 19 nt, Homo sapiens
  misc_RNA (1)...(19): siRNA sense strand
gaaucugccuggccaaacu

SEQ ID NO: 2028997 - RNA, 19 nt, Homo sapiens
  misc_RNA (1)...(19): siRNA sense strand
cagccuaccugucacuuca

SEQ ID NO: 2028998 - RNA, 19 nt, Homo sapiens
  misc_RNA (1)...(19): siRNA sense strand
guccaaagagauugcaaua

SEQ ID NO: 2028999 - RNA, 19 nt, Homo sapiens
  misc_RNA (1)...(19): siRNA sense strand
uagaagaaacugaggaaga

SEQ ID NO: 2029000 - RNA, 19 nt, Homo sapiens
  misc_RNA (1)...(19): siRNA sense strand
gaagaacagaagagugaga

SEQ ID NO: 2029001 - RNA, 19 nt, Homo sapiens
  misc_RNA (1)...(19): siRNA sense strand
uagaugucaugccuaauau

SEQ ID NO: 2029002 - RNA, 19 nt, Homo sapiens
  misc_RNA (1)...(19): siRNA sense strand
cagaggaggacaagaagaa

SEQ ID NO: 2029003 - RNA, 19 nt, Homo sapiens
  misc_RNA (1)...(19): siRNA sense strand
guccauuucuuacaaguca

SEQ ID NO: 2029004 - RNA, 19 nt, Homo sapiens
  misc_RNA (1)...(19): siRNA sense strand
ugagaaguccaaagagauu

SEQ ID NO: 2029005 - RNA, 19 nt, Homo sapiens
  misc_RNA (1)...(19): siRNA sense strand
agaagaaacugaggaagag

SEQ ID NO: 2029006 - RNA, 19 nt, Homo sapiens
  misc_RNA (1)...(19): siRNA sense strand
gaaggaggaggaggaagaa

SEQ ID NO: 2029007 - RNA, 19 nt, Homo sapiens
  misc_RNA (1)...(19): siRNA sense strand
gaaaauggaaagacaaaug

SEQ ID NO: 2029008 - RNA, 19 nt, Homo sapiens
  misc_RNA (1)...(19): siRNA sense strand
ggaaaccuaccagaaguug

SEQ ID NO: 2029009 - RNA, 19 nt, Homo sapiens
  misc_RNA (1)...(19): siRNA sense strand
gcaacuguccuuggccuuu

SEQ ID NO: 2029010 - RNA, 19 nt, Homo sapiens
  misc_RNA (1)...(19): siRNA sense strand
ucaaagaguggcuuagaug

SEQ ID NO: 2029011 - RNA, 19 nt, Homo sapiens
  misc_RNA (1)...(19): siRNA sense strand
gcucaagcuuccagaccuu

SEQ ID NO: 2029012 - RNA, 19 nt, Homo sapiens
  misc_RNA (1)...(19): siRNA sense strand
cagcaagggauuccaagaa

SEQ ID NO: 2029013 - RNA, 19 nt, Homo sapiens
  misc_RNA (1)...(19): siRNA sense strand
uaaguuuaaugcccugaau

SEQ ID NO: 2029014 - RNA, 19 nt, Homo sapiens
  misc_RNA (1)...(19): siRNA sense strand
cuucaaagcuuccauuacg

SEQ ID NO: 2029015 - RNA, 19 nt, Homo sapiens
  misc_RNA (1)...(19): siRNA sense strand
aagaguggcuuagauguca

SEQ ID NO: 2029016 - RNA, 19 nt, Homo sapiens
  misc_RNA (1)...(19): siRNA sense strand
gcucuacaauuccuauaac

SEQ ID NO: 2029017 - RNA, 19 nt, Homo sapiens
  misc_RNA (1)...(19): siRNA sense strand
aaagaagaccaaagaacuu

SEQ ID NO: 2029018 - RNA, 19 nt, Homo sapiens
  misc_RNA (1)...(19): siRNA sense strand
augcggagcucauggaguu

SEQ ID NO: 2029019 - RNA, 19 nt, Homo sapiens
  misc_RNA (1)...(19): siRNA sense strand
gcuggaagaagccaaguug

SEQ ID NO: 2029020 - RNA, 19 nt, Homo sapiens
  misc_RNA (1)...(19): siRNA sense strand
gcguugcugugguuccuaa

SEQ ID NO: 2029021 - RNA, 19 nt, Homo sapiens
  misc_RNA (1)...(19): siRNA sense strand
ugagaaaucagaacuuagu

SEQ ID NO: 2029022 - RNA, 19 nt, Homo sapiens
  misc_RNA (1)...(19): siRNA sense strand
gucaaagaguggcuuagau

SEQ ID NO: 2029023 - RNA, 19 nt, Homo sapiens
  misc_RNA (1)...(19): siRNA sense strand
gaaaagcgcaugucgaaag

SEQ ID NO: 2029024 - RNA, 19 nt, Homo sapiens
  misc_RNA (1)...(19): siRNA sense strand
cagaggagaacacugagaa

SEQ ID NO: 2029025 - RNA, 19 nt, Homo sapiens
  misc_RNA (1)...(19): siRNA sense strand
gcagugaugcuggucuuga

SEQ ID NO: 2029026 - RNA, 19 nt, Homo sapiens
  misc_RNA (1)...(19): siRNA sense strand
gguagaagaaacugaggaa

SEQ ID NO: 2029027 - RNA, 19 nt, Homo sapiens
  misc_RNA (1)...(19): siRNA sense strand
ugaaggaggaggaggaaga

SEQ ID NO: 2029028 - RNA, 19 nt, Homo sapiens
  misc_RNA (1)...(19): siRNA sense strand
ucucagaggaggacaagaa

SEQ ID NO: 2029029 - RNA, 19 nt, Homo sapiens
  misc_RNA (1)...(19): siRNA sense strand
aggaagaacagaagaguga

SEQ ID NO: 2029030 - RNA, 19 nt, Homo sapiens
  misc_RNA (1)...(19): siRNA sense strand
gcugugguuccuaaguuua

SEQ ID NO: 2029031 - RNA, 19 nt, Homo sapiens
  misc_RNA (1)...(19): siRNA sense strand
cagcuacacucuggaaucu

SEQ ID NO: 2029032 - RNA, 19 nt, Homo sapiens
  misc_RNA (1)...(19): siRNA sense strand
ugccuaauauuucugaugu

SEQ ID NO: 2029033 - RNA, 19 nt, Homo sapiens
  misc_RNA (1)...(19): siRNA sense strand
caaagaguggcuuagaugu

SEQ ID NO: 2029034 - RNA, 19 nt, Homo sapiens
  misc_RNA (1)...(19): siRNA sense strand
gcagaaugaccagaggaaa

SEQ ID NO: 2029035 - RNA, 19 nt, Homo sapiens
  misc_RNA (1)...(19): siRNA sense strand
gaccaaagaacuucaagac

SEQ ID NO: 2029036 - RNA, 19 nt, Homo sapiens
  misc_RNA (1)...(19): siRNA sense strand
gcggagcucauggaguuua

SEQ ID NO: 2029037 - RNA, 19 nt, Homo sapiens
  misc_RNA (1)...(19): siRNA sense strand
cgggaaaccuaccagaagu

SEQ ID NO: 2029038 - RNA, 19 nt, Homo sapiens
  misc_RNA (1)...(19): siRNA sense strand
ugucaugccuaauauuucu

SEQ ID NO: 2029039 - RNA, 19 nt, Homo sapiens
  misc_RNA (1)...(19): siRNA sense strand
gagauugcaauagaacaaa

SEQ ID NO: 2029040 - RNA, 19 nt, Homo sapiens
  misc_RNA (1)...(19): siRNA sense strand
gaggaagaagagucaaaga

SEQ ID NO: 2029041 - RNA, 19 nt, Homo sapiens
  misc_RNA (1)...(19): siRNA sense strand
agaaggagaaaccgacaaa

SEQ ID NO: 2029042 - RNA, 19 nt, Homo sapiens
  misc_RNA (1)...(19): siRNA sense strand
agaaguugcuggaggacau

SEQ ID NO: 2029043 - RNA, 19 nt, Homo sapiens
  misc_RNA (1)...(19): siRNA sense strand
agaauuaaccaggcugaaa

SEQ ID NO: 2029044 - RNA, 19 nt, Homo sapiens
  misc_RNA (1)...(19): siRNA sense strand
ggaugaggccgacgucucu

SEQ ID NO: 2029045 - RNA, 19 nt, Homo sapiens
  misc_RNA (1)...(19): siRNA sense strand
gaacacugagaaagaacug

SEQ ID NO: 2029046 - RNA, 19 nt, Homo sapiens
  misc_RNA (1)...(19): siRNA sense strand
gagcuuccacccacugugu

SEQ ID NO: 2029047 - RNA, 19 nt, Homo sapiens
  misc_RNA (1)...(19): siRNA sense strand
aggccuagcuccuguuaca

SEQ ID NO: 2029048 - RNA, 19 nt, Homo sapiens
  misc_RNA (1)...(19): siRNA sense strand
gccuagcuccuguuacaaa

SEQ ID NO: 2029049 - RNA, 19 nt, Homo sapiens
  misc_RNA (1)...(19): siRNA sense strand
augcuggucuugacuguug

SEQ ID NO: 2029050 - RNA, 19 nt, Homo sapiens
  misc_RNA (1)...(19): siRNA sense strand
caagucauguaucccaaac

SEQ ID NO: 2029051 - RNA, 19 nt, Homo sapiens
  misc_RNA (1)...(19): siRNA sense strand
gaauugguccauuucuuac

SEQ ID NO: 2029052 - RNA, 19 nt, Homo sapiens
  misc_RNA (1)...(19): siRNA sense strand
aaaccuggccaacagaguu

SEQ ID NO: 2029053 - RNA, 19 nt, Homo sapiens
  misc_RNA (1)...(19): siRNA sense strand
aaacuucaaagcuuccauu

SEQ ID NO: 2029054 - RNA, 19 nt, Homo sapiens
  misc_RNA (1)...(19): siRNA sense strand
guccuuggccuuuagaaau

SEQ ID NO: 2029055 - RNA, 19 nt, Homo sapiens
  misc_RNA (1)...(19): siRNA sense strand
ggaggaggaagaacagaag

SEQ ID NO: 2029056 - RNA, 19 nt, Homo sapiens
  misc_RNA (1)...(19): siRNA sense strand
ggaggaagaacagaagagu

SEQ ID NO: 2029057 - RNA, 19 nt, Homo sapiens
  misc_RNA (1)...(19): siRNA sense strand
cuacaauuccuauaacucu

SEQ ID NO: 2029058 - RNA, 19 nt, Homo sapiens
  misc_RNA (1)...(19): siRNA sense strand
cugaagagguagaagaaac

SEQ ID NO: 2029059 - RNA, 19 nt, Homo sapiens
  misc_RNA (1)...(19): siRNA sense strand
gaugagaaaucagaacuua

SEQ ID NO: 2029060 - RNA, 19 nt, Homo sapiens
  misc_RNA (1)...(19): siRNA sense strand
ccaaagagauugcaauaga

SEQ ID NO: 2029061 - RNA, 19 nt, Homo sapiens
  misc_RNA (1)...(19): siRNA sense strand
gcagcaaacuugaagaauu

SEQ ID NO: 2029062 - RNA, 19 nt, Homo sapiens
  misc_RNA (1)...(19): siRNA sense strand
ggagaacacugagaaagaa

SEQ ID NO: 2029063 - RNA, 19 nt, Homo sapiens
  misc_RNA (1)...(19): siRNA sense strand
gaugauggcugcagugaug

SEQ ID NO: 2029064 - RNA, 19 nt, Homo sapiens
  misc_RNA (1)...(19): siRNA sense strand
cagcaaacuugaagaauug

SEQ ID NO: 2029065 - RNA, 19 nt, Homo sapiens
  misc_RNA (1)...(19): siRNA sense strand
gcucaggacuccagcauga

SEQ ID NO: 2029066 - RNA, 19 nt, Homo sapiens
  misc_RNA (1)...(19): siRNA sense strand
caaagagauugcaauagaa

SEQ ID NO: 2029067 - RNA, 19 nt, Homo sapiens
  misc_RNA (1)...(19): siRNA sense strand
ccaagaaggucuaaagaag

SEQ ID NO: 2029068 - RNA, 19 nt, Homo sapiens
  misc_RNA (1)...(19): siRNA sense strand
caacuguccuuggccuuua

SEQ ID NO: 2029069 - RNA, 19 nt, Homo sapiens
  misc_RNA (1)...(19): siRNA sense strand
acucuggaaucuagaauua

SEQ ID NO: 2029070 - RNA, 19 nt, Homo sapiens
  misc_RNA (1)...(19): siRNA sense strand
gaaagcaacggaagugaug

SEQ ID NO: 2029071 - RNA, 19 nt, Homo sapiens
  misc_RNA (1)...(19): siRNA sense strand
gaugucaugccuaauauuu

SEQ ID NO: 2029072 - RNA, 19 nt, Homo sapiens
  misc_RNA (1)...(19): siRNA sense strand
caacggaagugaugaugca

SEQ ID NO: 2029073 - RNA, 19 nt, Homo sapiens
  misc_RNA (1)...(19): siRNA sense strand
ggacaguggcccugaagaa

SEQ ID NO: 2029074 - RNA, 19 nt, Homo sapiens
  misc_RNA (1)...(19): siRNA sense strand
guugagaaguccaaagaga

SEQ ID NO: 2029075 - RNA, 19 nt, Homo sapiens
  misc_RNA (1)...(19): siRNA sense strand
ugacagaggagaacacuga

SEQ ID NO: 2029076 - RNA, 19 nt, Homo sapiens
  misc_RNA (1)...(19): siRNA sense strand
ggaagaagagucaaagagu

SEQ ID NO: 2029077 - RNA, 19 nt, Homo sapiens
  misc_RNA (1)...(19): siRNA sense strand
cggaagugaugaugcagua

SEQ ID NO: 2029078 - RNA, 19 nt, Homo sapiens
  misc_RNA (1)...(19): siRNA sense strand
uaaagaggacguaugagaa

SEQ ID NO: 2029079 - RNA, 19 nt, Homo sapiens
  misc_RNA (1)...(19): siRNA sense strand
ugaagcagcugagcaggaa

SEQ ID NO: 2029080 - RNA, 19 nt, Homo sapiens
  misc_RNA (1)...(19): siRNA sense strand
gaaaugacagcuacacucu

SEQ ID NO: 2029081 - RNA, 19 nt, Homo sapiens
  misc_RNA (1)...(19): siRNA sense strand
ggaugccacuucaccagaa

SEQ ID NO: 2029082 - RNA, 19 nt, Homo sapiens
  misc_RNA (1)...(19): siRNA sense strand
caagaaggucuaaagaaga

SEQ ID NO: 2029083 - RNA, 19 nt, Homo sapiens
  misc_RNA (1)...(19): siRNA sense strand
gcuacacucuggaaucuag

SEQ ID NO: 2029084 - RNA, 19 nt, Homo sapiens
  misc_RNA (1)...(19): siRNA sense strand
uugaagaauugguccauuu

SEQ ID NO: 2029085 - RNA, 19 nt, Homo sapiens
  misc_RNA (1)...(19): siRNA sense strand
ggaagcagcucuugaaaac

SEQ ID NO: 2029086 - RNA, 19 nt, Homo sapiens
  misc_RNA (1)...(19): siRNA sense strand
agaaagaacuggaaaacuu

SEQ ID NO: 2029087 - RNA, 19 nt, Homo sapiens
  misc_RNA (1)...(19): siRNA sense strand
gaacguguuugugcaacug

SEQ ID NO: 2029088 - RNA, 19 nt, Homo sapiens
  misc_RNA (1)...(19): siRNA sense strand
gaagugaugaugcaguaug

SEQ ID NO: 2029089 - RNA, 19 nt, Homo sapiens
  misc_RNA (1)...(19): siRNA sense strand
cuaaagaggacguaugaga

SEQ ID NO: 2029090 - RNA, 19 nt, Homo sapiens
  misc_RNA (1)...(19): siRNA sense strand
ucucggagcaacucacuua

SEQ ID NO: 2029091 - RNA, 19 nt, Homo sapiens
  misc_RNA (1)...(19): siRNA sense strand
gaaaagggcccaagaagca

SEQ ID NO: 2029092 - RNA, 19 nt, Homo sapiens
  misc_RNA (1)...(19): siRNA sense strand
uaaagaagaccaaagaacu

SEQ ID NO: 2029093 - RNA, 19 nt, Homo sapiens
  misc_RNA (1)...(19): siRNA sense strand
caucauccauucccuccuu

SEQ ID NO: 2029094 - RNA, 19 nt, Homo sapiens
  misc_RNA (1)...(19): siRNA sense strand
gaauuaaccaggcugaaag

SEQ ID NO: 2029095 - RNA, 19 nt, Homo sapiens
  misc_RNA (1)...(19): siRNA sense strand
ggaaguugagaacguguuu

SEQ ID NO: 2029096 - RNA, 19 nt, Homo sapiens
  misc_RNA (1)...(19): siRNA sense strand
gaaucugccuggccaaacu

SEQ ID NO: 2029097 - RNA, 19 nt, Homo sapiens
  misc_RNA (1)...(19): siRNA sense strand
cagccuaccugucacuuca

SEQ ID NO: 2029098 - RNA, 19 nt, Homo sapiens
  misc_RNA (1)...(19): siRNA sense strand
guccaaagagauugcaaua

SEQ ID NO: 2029099 - RNA, 19 nt, Homo sapiens
  misc_RNA (1)...(19): siRNA sense strand
uagaagaaacugaggaaga

SEQ ID NO: 2029100 - RNA, 19 nt, Homo sapiens
  misc_RNA (1)...(19): siRNA sense strand
gaagaacagaagagugaga

SEQ ID NO: 2029101 - RNA, 19 nt, Homo sapiens
  misc_RNA (1)...(19): siRNA sense strand
uagaugucaugccuaauau

SEQ ID NO: 2029102 - RNA, 19 nt, Homo sapiens
  misc_RNA (1)...(19): siRNA sense strand
cagaggaggacaagaagaa

SEQ ID NO: 2029103 - RNA, 19 nt, Homo sapiens
  misc_RNA (1)...(19): siRNA sense strand
guccauuucuuacaaguca

SEQ ID NO: 2029104 - RNA, 19 nt, Homo sapiens
  misc_RNA (1)...(19): siRNA sense strand
ugagaaguccaaagagauu

SEQ ID NO: 2029105 - RNA, 19 nt, Homo sapiens
  misc_RNA (1)...(19): siRNA sense strand
agaagaaacugaggaagag

SEQ ID NO: 2029106 - RNA, 19 nt, Homo sapiens
  misc_RNA (1)...(19): siRNA sense strand
gaaggaggaggaggaagaa

SEQ ID NO: 2029107 - RNA, 19 nt, Homo sapiens
  misc_RNA (1)...(19): siRNA sense strand
gaaaauggaaagacaaaug

SEQ ID NO: 2029108 - RNA, 19 nt, Homo sapiens
  misc_RNA (1)...(19): siRNA sense strand
ggaaaccuaccagaaguug

SEQ ID NO: 2029109 - RNA, 19 nt, Homo sapiens
  misc_RNA (1)...(19): siRNA sense strand
gcaacuguccuuggccuuu

SEQ ID NO: 2029110 - RNA, 19 nt, Homo sapiens
  misc_RNA (1)...(19): siRNA sense strand
ucaaagaguggcuuagaug

SEQ ID NO: 2029111 - RNA, 19 nt, Homo sapiens
  misc_RNA (1)...(19): siRNA sense strand
gcucaagcuuccagaccuu

SEQ ID NO: 2029112 - RNA, 19 nt, Homo sapiens
  misc_RNA (1)...(19): siRNA sense strand
cagcaagggauuccaagaa

SEQ ID NO: 2029113 - RNA, 19 nt, Homo sapiens
  misc_RNA (1)...(19): siRNA sense strand
uaaguuuaaugcccugaau

SEQ ID NO: 2029114 - RNA, 19 nt, Homo sapiens
  misc_RNA (1)...(19): siRNA sense strand
cuucaaagcuuccauuacg

SEQ ID NO: 2029115 - RNA, 19 nt, Homo sapiens
  misc_RNA (1)...(19): siRNA sense strand
aagaguggcuuagauguca

SEQ ID NO: 2029116 - RNA, 19 nt, Homo sapiens
  misc_RNA (1)...(19): siRNA sense strand
gcucuacaauuccuauaac

SEQ ID NO: 2029117 - RNA, 19 nt, Homo sapiens
  misc_RNA (1)...(19): siRNA sense strand
aaagaagaccaaagaacuu

SEQ ID NO: 2029118 - RNA, 19 nt, Homo sapiens
  misc_RNA (1)...(19): siRNA sense strand
augcggagcucauggaguu

SEQ ID NO: 2029119 - RNA, 19 nt, Homo sapiens
  misc_RNA (1)...(19): siRNA sense strand
gcuggaagaagccaaguug

SEQ ID NO: 2029120 - RNA, 19 nt, Homo sapiens
  misc_RNA (1)...(19): siRNA sense strand
gcguugcugugguuccuaa

SEQ ID NO: 2029121 - RNA, 19 nt, Homo sapiens
  misc_RNA (1)...(19): siRNA sense strand
ugagaaaucagaacuuagu

SEQ ID NO: 2029122 - RNA, 19 nt, Homo sapiens
  misc_RNA (1)...(19): siRNA sense strand
gucaaagaguggcuuagau

SEQ ID NO: 2029123 - RNA, 19 nt, Homo sapiens
  misc_RNA (1)...(19): siRNA sense strand
gaaaagcgcaugucgaaag

SEQ ID NO: 2029124 - RNA, 19 nt, Homo sapiens
  misc_RNA (1)...(19): siRNA sense strand
cagaggagaacacugagaa

SEQ ID NO: 2029125 - RNA, 19 nt, Homo sapiens
  misc_RNA (1)...(19): siRNA sense strand
gcagugaugcuggucuuga

SEQ ID NO: 2029126 - RNA, 19 nt, Homo sapiens
  misc_RNA (1)...(19): siRNA sense strand
gguagaagaaacugaggaa

SEQ ID NO: 2029127 - RNA, 19 nt, Homo sapiens
  misc_RNA (1)...(19): siRNA sense strand
ugaaggaggaggaggaaga

SEQ ID NO: 2029128 - RNA, 19 nt, Homo sapiens
  misc_RNA (1)...(19): siRNA sense strand
ucucagaggaggacaagaa

SEQ ID NO: 2029129 - RNA, 19 nt, Homo sapiens
  misc_RNA (1)...(19): siRNA sense strand
aggaagaacagaagaguga

SEQ ID NO: 2029130 - RNA, 19 nt, Homo sapiens
  misc_RNA (1)...(19): siRNA sense strand
gcugugguuccuaaguuua

SEQ ID NO: 2029131 - RNA, 19 nt, Homo sapiens
  misc_RNA (1)...(19): siRNA sense strand
cagcuacacucuggaaucu

SEQ ID NO: 2029132 - RNA, 19 nt, Homo sapiens
  misc_RNA (1)...(19): siRNA sense strand
ugccuaauauuucugaugu

SEQ ID NO: 2029133 - RNA, 19 nt, Homo sapiens
  misc_RNA (1)...(19): siRNA sense strand
caaagaguggcuuagaugu

SEQ ID NO: 2029134 - RNA, 19 nt, Homo sapiens
  misc_RNA (1)...(19): siRNA sense strand
gcagaaugaccagaggaaa

SEQ ID NO: 2029135 - RNA, 19 nt, Homo sapiens
  misc_RNA (1)...(19): siRNA sense strand
ggaguaucuugcaguccaa

SEQ ID NO: 2029136 - RNA, 19 nt, Homo sapiens
  misc_RNA (1)...(19): siRNA sense strand
gaccaaagaacuucaagac

SEQ ID NO: 2029137 - RNA, 19 nt, Homo sapiens
  misc_RNA (1)...(19): siRNA sense strand
gcggagcucauggaguuua

SEQ ID NO: 2029138 - RNA, 19 nt, Homo sapiens
  misc_RNA (1)...(19): siRNA sense strand
cgggaaaccuaccagaagu

SEQ ID NO: 2029139 - RNA, 19 nt, Homo sapiens
  misc_RNA (1)...(19): siRNA sense strand
ugucaugccuaauauuucu

SEQ ID NO: 2029140 - RNA, 19 nt, Homo sapiens
  misc_RNA (1)...(19): siRNA sense strand
gagauugcaauagaacaaa

SEQ ID NO: 2029141 - RNA, 19 nt, Homo sapiens
  misc_RNA (1)...(19): siRNA sense strand
gaggaagaagagucaaaga

SEQ ID NO: 2029142 - RNA, 19 nt, Homo sapiens
  misc_RNA (1)...(19): siRNA sense strand
agaaggagaaaccgacaaa

SEQ ID NO: 2029143 - RNA, 19 nt, Homo sapiens
  misc_RNA (1)...(19): siRNA sense strand
agaaguugcuggaggacau

SEQ ID NO: 2029144 - RNA, 19 nt, Homo sapiens
  misc_RNA (1)...(19): siRNA sense strand
agaauuaaccaggcugaaa

SEQ ID NO: 2029145 - RNA, 19 nt, Homo sapiens
  misc_RNA (1)...(19): siRNA sense strand
ggaugaggccgacgucucu

SEQ ID NO: 2029146 - RNA, 19 nt, Homo sapiens
  misc_RNA (1)...(19): siRNA sense strand
gaacacugagaaagaacug

SEQ ID NO: 2029147 - RNA, 19 nt, Homo sapiens
  misc_RNA (1)...(19): siRNA sense strand
gagcuuccacccacugugu

SEQ ID NO: 2029148 - RNA, 19 nt, Homo sapiens
  misc_RNA (1)...(19): siRNA sense strand
aggccuagcuccuguuaca

SEQ ID NO: 2029149 - RNA, 19 nt, Homo sapiens
  misc_RNA (1)...(19): siRNA sense strand
gccuagcuccuguuacaaa

SEQ ID NO: 2029150 - RNA, 19 nt, Homo sapiens
  misc_RNA (1)...(19): siRNA sense strand
augcuggucuugacuguug

SEQ ID NO: 2029151 - RNA, 19 nt, Homo sapiens
  misc_RNA (1)...(19): siRNA sense strand
caagucauguaucccaaac

SEQ ID NO: 2029152 - RNA, 19 nt, Homo sapiens
  misc_RNA (1)...(19): siRNA sense strand
gaauugguccauuucuuac

SEQ ID NO: 2029153 - RNA, 19 nt, Homo sapiens
  misc_RNA (1)...(19): siRNA sense strand
aaaccuggccaacagaguu

SEQ ID NO: 2029154 - RNA, 19 nt, Homo sapiens
  misc_RNA (1)...(19): siRNA sense strand
aaacuucaaagcuuccauu

SEQ ID NO: 2029155 - RNA, 19 nt, Homo sapiens
  misc_RNA (1)...(19): siRNA sense strand
guccuuggccuuuagaaau

SEQ ID NO: 2029156 - RNA, 19 nt, Homo sapiens
  misc_RNA (1)...(19): siRNA sense strand
ggaggaggaagaacagaag

SEQ ID NO: 2029157 - RNA, 19 nt, Homo sapiens
  misc_RNA (1)...(19): siRNA sense strand
cugaagagguagaagaaac

SEQ ID NO: 2029158 - RNA, 19 nt, Homo sapiens
  misc_RNA (1)...(19): siRNA sense strand
cuacaauuccuauaacucu

SEQ ID NO: 2029159 - RNA, 19 nt, Homo sapiens
  misc_RNA (1)...(19): siRNA sense strand
gaugagaaaucagaacuua

SEQ ID NO: 2029160 - RNA, 19 nt, Homo sapiens
  misc_RNA (1)...(19): siRNA sense strand
ccaaagagauugcaauaga

SEQ ID NO: 2029161 - RNA, 19 nt, Homo sapiens
  misc_RNA (1)...(19): siRNA sense strand
gcagcaaacuugaagaauu

SEQ ID NO: 2029162 - RNA, 19 nt, Homo sapiens
  misc_RNA (1)...(19): siRNA sense strand
ggagaacacugagaaagaa

SEQ ID NO: 2029163 - RNA, 19 nt, Homo sapiens
  misc_RNA (1)...(19): siRNA sense strand
gaugauggcugcagugaug

SEQ ID NO: 2029164 - RNA, 19 nt, Homo sapiens
  misc_RNA (1)...(19): siRNA sense strand
cagcaaacuugaagaauug

SEQ ID NO: 2029165 - RNA, 19 nt, Homo sapiens
  misc_RNA (1)...(19): siRNA sense strand
gcucaggacuccagcauga

SEQ ID NO: 2029166 - RNA, 19 nt, Homo sapiens
  misc_RNA (1)...(19): siRNA sense strand
caaagagauugcaauagaa

SEQ ID NO: 2029167 - RNA, 19 nt, Homo sapiens
  misc_RNA (1)...(19): siRNA sense strand
ccaagaaggucuaaagaag

SEQ ID NO: 2029168 - RNA, 19 nt, Homo sapiens
  misc_RNA (1)...(19): siRNA sense strand
caacuguccuuggccuuua

SEQ ID NO: 2029169 - RNA, 19 nt, Homo sapiens
  misc_RNA (1)...(19): siRNA sense strand
acucuggaaucuagaauua

SEQ ID NO: 2029170 - RNA, 19 nt, Homo sapiens
  misc_RNA (1)...(19): siRNA sense strand
gaaagcaacggaagugaug

SEQ ID NO: 2029171 - RNA, 19 nt, Homo sapiens
  misc_RNA (1)...(19): siRNA sense strand
gaugucaugccuaauauuu

SEQ ID NO: 2029172 - RNA, 19 nt, Homo sapiens
  misc_RNA (1)...(19): siRNA sense strand
caacggaagugaugaugca

SEQ ID NO: 2029173 - RNA, 19 nt, Homo sapiens
  misc_RNA (1)...(19): siRNA sense strand
ggacaguggcccugaagaa

SEQ ID NO: 2029174 - RNA, 19 nt, Homo sapiens
  misc_RNA (1)...(19): siRNA sense strand
guugagaaguccaaagaga

SEQ ID NO: 2029175 - RNA, 19 nt, Homo sapiens
  misc_RNA (1)...(19): siRNA sense strand
ugacagaggagaacacuga

SEQ ID NO: 2029176 - RNA, 19 nt, Homo sapiens
  misc_RNA (1)...(19): siRNA sense strand
ggaagaagagucaaagagu

SEQ ID NO: 2029177 - RNA, 19 nt, Homo sapiens
  misc_RNA (1)...(19): siRNA sense strand
cggaagugaugaugcagua

SEQ ID NO: 2029178 - RNA, 19 nt, Homo sapiens
  misc_RNA (1)...(19): siRNA sense strand
uaaagaggacguaugagaa

SEQ ID NO: 2029179 - RNA, 19 nt, Homo sapiens
  misc_RNA (1)...(19): siRNA sense strand
ugaagcagcugagcaggaa

SEQ ID NO: 2029180 - RNA, 19 nt, Homo sapiens
  misc_RNA (1)...(19): siRNA sense strand
gaaaugacagcuacacucu

SEQ ID NO: 2029181 - RNA, 19 nt, Homo sapiens
  misc_RNA (1)...(19): siRNA sense strand
caagaaggucuaaagaaga

SEQ ID NO: 2029182 - RNA, 19 nt, Homo sapiens
  misc_RNA (1)...(19): siRNA sense strand
ggaugccacuucaccagaa

SEQ ID NO: 2029183 - RNA, 19 nt, Homo sapiens
  misc_RNA (1)...(19): siRNA sense strand
gcuacacucuggaaucuag

SEQ ID NO: 2029184 - RNA, 19 nt, Homo sapiens
  misc_RNA (1)...(19): siRNA sense strand
uugaagaauugguccauuu

SEQ ID NO: 2029185 - RNA, 19 nt, Homo sapiens
  misc_RNA (1)...(19): siRNA sense strand
ggaagcagcucuugaaaac

SEQ ID NO: 2029186 - RNA, 19 nt, Homo sapiens
  misc_RNA (1)...(19): siRNA sense strand
agaaagaacuggaaaacuu

SEQ ID NO: 2029187 - RNA, 19 nt, Homo sapiens
  misc_RNA (1)...(19): siRNA sense strand
gaacguguuugugcaacug

SEQ ID NO: 2029188 - RNA, 19 nt, Homo sapiens
  misc_RNA (1)...(19): siRNA sense strand
gaagugaugaugcaguaug

SEQ ID NO: 2029189 - RNA, 19 nt, Homo sapiens
  misc_RNA (1)...(19): siRNA sense strand
cuaaagaggacguaugaga

SEQ ID NO: 2029190 - RNA, 19 nt, Homo sapiens
  misc_RNA (1)...(19): siRNA sense strand
ucucggagcaacucacuua

SEQ ID NO: 2029191 - RNA, 19 nt, Homo sapiens
  misc_RNA (1)...(19): siRNA sense strand
gaaaagggcccaagaagca

SEQ ID NO: 2029192 - RNA, 19 nt, Homo sapiens
  misc_RNA (1)...(19): siRNA sense strand
uaaagaagaccaaagaacu

SEQ ID NO: 2029193 - RNA, 19 nt, Homo sapiens
  misc_RNA (1)...(19): siRNA sense strand
caucauccauucccuccuu

SEQ ID NO: 2029194 - RNA, 19 nt, Homo sapiens
  misc_RNA (1)...(19): siRNA sense strand
gaauuaaccaggcugaaag

SEQ ID NO: 2029195 - RNA, 19 nt, Homo sapiens
  misc_RNA (1)...(19): siRNA sense strand
ggaaguugagaacguguuu

SEQ ID NO: 2029196 - RNA, 19 nt, Homo sapiens
  misc_RNA (1)...(19): siRNA sense strand
gaaucugccuggccaaacu

SEQ ID NO: 2029197 - RNA, 19 nt, Homo sapiens
  misc_RNA (1)...(19): siRNA sense strand
cagccuaccugucacuuca

SEQ ID NO: 2029198 - RNA, 19 nt, Homo sapiens
  misc_RNA (1)...(19): siRNA sense strand
guccaaagagauugcaaua

SEQ ID NO: 2029199 - RNA, 19 nt, Homo sapiens
  misc_RNA (1)...(19): siRNA sense strand
uagaagaaacugaggaaga

SEQ ID NO: 2029200 - RNA, 19 nt, Homo sapiens
  misc_RNA (1)...(19): siRNA sense strand
gaagaacagaagagugaga

SEQ ID NO: 2029201 - RNA, 19 nt, Homo sapiens
  misc_RNA (1)...(19): siRNA sense strand
uagaugucaugccuaauau

SEQ ID NO: 2029202 - RNA, 19 nt, Homo sapiens
  misc_RNA (1)...(19): siRNA sense strand
cagaggaggacaagaagaa

SEQ ID NO: 2029203 - RNA, 19 nt, Homo sapiens
  misc_RNA (1)...(19): siRNA sense strand
guccauuucuuacaaguca

SEQ ID NO: 2029204 - RNA, 19 nt, Homo sapiens
  misc_RNA (1)...(19): siRNA sense strand
ugagaaguccaaagagauu

SEQ ID NO: 2029205 - RNA, 19 nt, Homo sapiens
  misc_RNA (1)...(19): siRNA sense strand
agaagaaacugaggaagag

SEQ ID NO: 2029206 - RNA, 19 nt, Homo sapiens
  misc_RNA (1)...(19): siRNA sense strand
gaaggaggaggaggaagaa

SEQ ID NO: 2029207 - RNA, 19 nt, Homo sapiens
  misc_RNA (1)...(19): siRNA sense strand
gaaaauggaaagacaaaug

SEQ ID NO: 2029208 - RNA, 19 nt, Homo sapiens
  misc_RNA (1)...(19): siRNA sense strand
ggaaaccuaccagaaguug

SEQ ID NO: 2029209 - RNA, 19 nt, Homo sapiens
  misc_RNA (1)...(19): siRNA sense strand
gcaacuguccuuggccuuu

SEQ ID NO: 2029210 - RNA, 19 nt, Homo sapiens
  misc_RNA (1)...(19): siRNA sense strand
ucaaagaguggcuuagaug

SEQ ID NO: 2029211 - RNA, 19 nt, Homo sapiens
  misc_RNA (1)...(19): siRNA sense strand
gcucaagcuuccagaccuu

SEQ ID NO: 2029212 - RNA, 19 nt, Homo sapiens
  misc_RNA (1)...(19): siRNA sense strand
cagcaagggauuccaagaa

SEQ ID NO: 2029213 - RNA, 19 nt, Homo sapiens
  misc_RNA (1)...(19): siRNA sense strand
uaaguuuaaugcccugaau

SEQ ID NO: 2029214 - RNA, 19 nt, Homo sapiens
  misc_RNA (1)...(19): siRNA sense strand
cuucaaagcuuccauuacg

SEQ ID NO: 2029215 - RNA, 19 nt, Homo sapiens
  misc_RNA (1)...(19): siRNA sense strand
aagaguggcuuagauguca

SEQ ID NO: 2029216 - RNA, 19 nt, Homo sapiens
  misc_RNA (1)...(19): siRNA sense strand
gcucuacaauuccuauaac

SEQ ID NO: 2029217 - RNA, 19 nt, Homo sapiens
  misc_RNA (1)...(19): siRNA sense strand
aaagaagaccaaagaacuu

SEQ ID NO: 2029218 - RNA, 19 nt, Homo sapiens
  misc_RNA (1)...(19): siRNA sense strand
augcggagcucauggaguu

SEQ ID NO: 2029219 - RNA, 19 nt, Homo sapiens
  misc_RNA (1)...(19): siRNA sense strand
gcuggaagaagccaaguug

SEQ ID NO: 2029220 - RNA, 19 nt, Homo sapiens
  misc_RNA (1)...(19): siRNA sense strand
gcguugcugugguuccuaa

SEQ ID NO: 2029221 - RNA, 19 nt, Homo sapiens
  misc_RNA (1)...(19): siRNA sense strand
ugagaaaucagaacuuagu

SEQ ID NO: 2029222 - RNA, 19 nt, Homo sapiens
  misc_RNA (1)...(19): siRNA sense strand
gucaaagaguggcuuagau

SEQ ID NO: 2029223 - RNA, 19 nt, Homo sapiens
  misc_RNA (1)...(19): siRNA sense strand
gaaaagcgcaugucgaaag

SEQ ID NO: 2029224 - RNA, 19 nt, Homo sapiens
  misc_RNA (1)...(19): siRNA sense strand
cagaggagaacacugagaa

SEQ ID NO: 2029225 - RNA, 19 nt, Homo sapiens
  misc_RNA (1)...(19): siRNA sense strand
gcagugaugcuggucuuga

SEQ ID NO: 2029226 - RNA, 19 nt, Homo sapiens
  misc_RNA (1)...(19): siRNA sense strand
gguagaagaaacugaggaa

SEQ ID NO: 2029227 - RNA, 19 nt, Homo sapiens
  misc_RNA (1)...(19): siRNA sense strand
ugaaggaggaggaggaaga

SEQ ID NO: 2029228 - RNA, 19 nt, Homo sapiens
  misc_RNA (1)...(19): siRNA sense strand
ucucagaggaggacaagaa

SEQ ID NO: 2029229 - RNA, 19 nt, Homo sapiens
  misc_RNA (1)...(19): siRNA sense strand
aggaagaacagaagaguga

SEQ ID NO: 2029230 - RNA, 19 nt, Homo sapiens
  misc_RNA (1)...(19): siRNA sense strand
gcugugguuccuaaguuua

SEQ ID NO: 2029231 - RNA, 19 nt, Homo sapiens
  misc_RNA (1)...(19): siRNA sense strand
cagcuacacucuggaaucu

SEQ ID NO: 2029232 - RNA, 19 nt, Homo sapiens
  misc_RNA (1)...(19): siRNA sense strand
ugccuaauauuucugaugu

SEQ ID NO: 2029233 - RNA, 19 nt, Homo sapiens
  misc_RNA (1)...(19): siRNA sense strand
caaagaguggcuuagaugu

SEQ ID NO: 2029234 - RNA, 19 nt, Homo sapiens
  misc_RNA (1)...(19): siRNA sense strand
gcagaaugaccagaggaaa

SEQ ID NO: 2029235 - RNA, 19 nt, Homo sapiens
  misc_RNA (1)...(19): siRNA sense strand
gaccaaagaacuucaagac

SEQ ID NO: 2029236 - RNA, 19 nt, Homo sapiens
  misc_RNA (1)...(19): siRNA sense strand
gcggagcucauggaguuua

SEQ ID NO: 2029237 - RNA, 19 nt, Homo sapiens
  misc_RNA (1)...(19): siRNA sense strand
cgggaaaccuaccagaagu

SEQ ID NO: 2029238 - RNA, 19 nt, Homo sapiens
  misc_RNA (1)...(19): siRNA sense strand
ugucaugccuaauauuucu

SEQ ID NO: 2029239 - RNA, 19 nt, Homo sapiens
  misc_RNA (1)...(19): siRNA sense strand
gagauugcaauagaacaaa

SEQ ID NO: 2029240 - RNA, 19 nt, Homo sapiens
  misc_RNA (1)...(19): siRNA sense strand
gaggaagaagagucaaaga

SEQ ID NO: 2029241 - RNA, 19 nt, Homo sapiens
  misc_RNA (1)...(19): siRNA sense strand
agaaggagaaaccgacaaa

SEQ ID NO: 2029242 - RNA, 19 nt, Homo sapiens
  misc_RNA (1)...(19): siRNA sense strand
agaaguugcuggaggacau

SEQ ID NO: 2029243 - RNA, 19 nt, Homo sapiens
  misc_RNA (1)...(19): siRNA sense strand
agaauuaaccaggcugaaa

SEQ ID NO: 2029244 - RNA, 19 nt, Homo sapiens
  misc_RNA (1)...(19): siRNA sense strand
ggaugaggccgacgucucu

SEQ ID NO: 2029245 - RNA, 19 nt, Homo sapiens
  misc_RNA (1)...(19): siRNA sense strand
gaacacugagaaagaacug

SEQ ID NO: 2029246 - RNA, 19 nt, Homo sapiens
  misc_RNA (1)...(19): siRNA sense strand
gagcuuccacccacugugu

SEQ ID NO: 2029247 - RNA, 19 nt, Homo sapiens
  misc_RNA (1)...(19): siRNA sense strand
aggccuagcuccuguuaca

SEQ ID NO: 2029248 - RNA, 19 nt, Homo sapiens
  misc_RNA (1)...(19): siRNA sense strand
gccuagcuccuguuacaaa

SEQ ID NO: 2029249 - RNA, 19 nt, Homo sapiens
  misc_RNA (1)...(19): siRNA sense strand
augcuggucuugacuguug

SEQ ID NO: 2029250 - RNA, 19 nt, Homo sapiens
  misc_RNA (1)...(19): siRNA sense strand
caagucauguaucccaaac

SEQ ID NO: 2029251 - RNA, 19 nt, Homo sapiens
  misc_RNA (1)...(19): siRNA sense strand
gaauugguccauuucuuac

SEQ ID NO: 2029252 - RNA, 19 nt, Homo sapiens
  misc_RNA (1)...(19): siRNA sense strand
aaaccuggccaacagaguu

SEQ ID NO: 2029253 - RNA, 19 nt, Homo sapiens
  misc_RNA (1)...(19): siRNA sense strand
aaacuucaaagcuuccauu

SEQ ID NO: 2029254 - RNA, 19 nt, Homo sapiens
  misc_RNA (1)...(19): siRNA sense strand
guccuuggccuuuagaaau

SEQ ID NO: 2029255 - RNA, 19 nt, Homo sapiens
  misc_RNA (1)...(19): siRNA sense strand
ggaggaggaagaacagaag

SEQ ID NO: 2029256 - RNA, 19 nt, Homo sapiens
  misc_RNA (1)...(19): siRNA sense strand
ggaggaagaacagaagagu

SEQ ID NO: 2029257 - RNA, 19 nt, Homo sapiens
  misc_RNA (1)...(19): siRNA sense strand
cuacaauuccuauaacucu

SEQ ID NO: 2029258 - RNA, 19 nt, Homo sapiens
  misc_RNA (1)...(19): siRNA sense strand
cugaagagguagaagaaac

SEQ ID NO: 2029259 - RNA, 19 nt, Homo sapiens
  misc_RNA (1)...(19): siRNA sense strand
gaaacgaguucgagucugu

SEQ ID NO: 2029260 - RNA, 19 nt, Homo sapiens
  misc_RNA (1)...(19): siRNA sense strand
uagaggagcugcugcauau

SEQ ID NO: 2029261 - RNA, 19 nt, Homo sapiens
  misc_RNA (1)...(19): siRNA sense strand
gcacaucgcagaccuguca

SEQ ID NO: 2029262 - RNA, 19 nt, Homo sapiens
  misc_RNA (1)...(19): siRNA sense strand
gaagaaguggcaacuggua

SEQ ID NO: 2029263 - RNA, 19 nt, Homo sapiens
  misc_RNA (1)...(19): siRNA sense strand
ggccacagcugccaucuuc

SEQ ID NO: 2029264 - RNA, 19 nt, Homo sapiens
  misc_RNA (1)...(19): siRNA sense strand
gcaguugggcacuauauga

SEQ ID NO: 2029265 - RNA, 19 nt, Homo sapiens
  misc_RNA (1)...(19): siRNA sense strand
cgagagaugugcaaggaau

SEQ ID NO: 2029266 - RNA, 19 nt, Homo sapiens
  misc_RNA (1)...(19): siRNA sense strand
gagacaagcugcgcaugga

SEQ ID NO: 2029267 - RNA, 19 nt, Homo sapiens
  misc_RNA (1)...(19): siRNA sense strand
cgagggacaugcagacaga

SEQ ID NO: 2029268 - RNA, 19 nt, Homo sapiens
  misc_RNA (1)...(19): siRNA sense strand
gugcgcaucuucaaacaug

SEQ ID NO: 2029269 - RNA, 19 nt, Homo sapiens
  misc_RNA (1)...(19): siRNA sense strand
cagcacagccuacccaguu

SEQ ID NO: 2029270 - RNA, 19 nt, Homo sapiens
  misc_RNA (1)...(19): siRNA sense strand
ccagauggaccgcaugauu

SEQ ID NO: 2029271 - RNA, 19 nt, Homo sapiens
  misc_RNA (1)...(19): siRNA sense strand
gcaaacacgccaaugucaa

SEQ ID NO: 2029272 - RNA, 19 nt, Homo sapiens
  misc_RNA (1)...(19): siRNA sense strand
caucgaggcuguacacaac

SEQ ID NO: 2029273 - RNA, 19 nt, Homo sapiens
  misc_RNA (1)...(19): siRNA sense strand
gaggagcugcugcauauuc

SEQ ID NO: 2029274 - RNA, 19 nt, Homo sapiens
  misc_RNA (1)...(19): siRNA sense strand
ccacagcugccaucuucua

SEQ ID NO: 2029275 - RNA, 19 nt, Homo sapiens
  misc_RNA (1)...(19): siRNA sense strand
gcaaguacagccuggaaca

SEQ ID NO: 2029276 - RNA, 19 nt, Homo sapiens
  misc_RNA (1)...(19): siRNA sense strand
gagcaaacacgccaauguc

SEQ ID NO: 2029277 - RNA, 19 nt, Homo sapiens
  misc_RNA (1)...(19): siRNA sense strand
gcacgccuuucgcccaguu

SEQ ID NO: 2029278 - RNA, 19 nt, Homo sapiens
  misc_RNA (1)...(19): siRNA sense strand
cagauggaccgcaugauug

SEQ ID NO: 2029279 - RNA, 19 nt, Homo sapiens
  misc_RNA (1)...(19): siRNA sense strand
gguggccuauuaccaaaug

SEQ ID NO: 2029280 - RNA, 19 nt, Homo sapiens
  misc_RNA (1)...(19): siRNA sense strand
gagcugcugcauauucuga

SEQ ID NO: 2029281 - RNA, 19 nt, Homo sapiens
  misc_RNA (1)...(19): siRNA sense strand
gagaaacgaguucgagucu

SEQ ID NO: 2029282 - RNA, 19 nt, Homo sapiens
  misc_RNA (1)...(19): siRNA sense strand
ccgagaagcuguuguugcu

SEQ ID NO: 2029283 - RNA, 19 nt, Homo sapiens
  misc_RNA (1)...(19): siRNA sense strand
caaacacgccaaugucaag

SEQ ID NO: 2029284 - RNA, 19 nt, Homo sapiens
  misc_RNA (1)...(19): siRNA sense strand
gagcuggugcggagaaaca

SEQ ID NO: 2029285 - RNA, 19 nt, Homo sapiens
  misc_RNA (1)...(19): siRNA sense strand
gaugcagacccugaaguuu

SEQ ID NO: 2029286 - RNA, 19 nt, Homo sapiens
  misc_RNA (1)...(19): siRNA sense strand
cuagaggagcugcugcaua

SEQ ID NO: 2029287 - RNA, 19 nt, Homo sapiens
  misc_RNA (1)...(19): siRNA sense strand
gcagcgcaguugggcacua

SEQ ID NO: 2029288 - RNA, 19 nt, Homo sapiens
  misc_RNA (1)...(19): siRNA sense strand
cauccgugcugccuguaga

SEQ ID NO: 2029289 - RNA, 19 nt, Homo sapiens
  misc_RNA (1)...(19): siRNA sense strand
cacacucuguccucaaguu

SEQ ID NO: 2029290 - RNA, 19 nt, Homo sapiens
  misc_RNA (1)...(19): siRNA sense strand
gaagaagaaguggcaacug

SEQ ID NO: 2029291 - RNA, 19 nt, Homo sapiens
  misc_RNA (1)...(19): siRNA sense strand
gagagaugugcaaggaauu

SEQ ID NO: 2029292 - RNA, 19 nt, Homo sapiens
  misc_RNA (1)...(19): siRNA sense strand
ccugaugcaugcuauaguc

SEQ ID NO: 2029293 - RNA, 19 nt, Homo sapiens
  misc_RNA (1)...(19): siRNA sense strand
ucuccacgcuugugucauc

SEQ ID NO: 2029294 - RNA, 19 nt, Homo sapiens
  misc_RNA (1)...(19): siRNA sense strand
aagaaaaugugcaagagaa

SEQ ID NO: 2029295 - RNA, 19 nt, Homo sapiens
  misc_RNA (1)...(19): siRNA sense strand
caucauagugggucacauc

SEQ ID NO: 2029296 - RNA, 19 nt, Homo sapiens
  misc_RNA (1)...(19): siRNA sense strand
gcaagagaaacgaguucga

SEQ ID NO: 2029297 - RNA, 19 nt, Homo sapiens
  misc_RNA (1)...(19): siRNA sense strand
gcaagaaaaugugcaagag

SEQ ID NO: 2029298 - RNA, 19 nt, Homo sapiens
  misc_RNA (1)...(19): siRNA sense strand
cccugaaguuugcaagaaa

SEQ ID NO: 2029299 - RNA, 19 nt, Homo sapiens
  misc_RNA (1)...(19): siRNA sense strand
gaaguggcaacugguacaa

SEQ ID NO: 2029300 - RNA, 19 nt, Homo sapiens
  misc_RNA (1)...(19): siRNA sense strand
cagcgcaguugggcacuau

SEQ ID NO: 2029301 - RNA, 19 nt, Homo sapiens
  misc_RNA (1)...(19): siRNA sense strand
gcugauccaccaccggaaa

SEQ ID NO: 2029302 - RNA, 19 nt, Homo sapiens
  misc_RNA (1)...(19): siRNA sense strand
ggccugagccacgaauuau

SEQ ID NO: 2029303 - RNA, 19 nt, Homo sapiens
  misc_RNA (1)...(19): siRNA sense strand
gcgcaguugggcacuauau

SEQ ID NO: 2029304 - RNA, 19 nt, Homo sapiens
  misc_RNA (1)...(19): siRNA sense strand
ugauggcucucauugacau

SEQ ID NO: 2029305 - RNA, 19 nt, Homo sapiens
  misc_RNA (1)...(19): siRNA sense strand
cagcugccaucuucuacca

SEQ ID NO: 2029306 - RNA, 19 nt, Homo sapiens
  misc_RNA (1)...(19): siRNA sense strand
ugaugcagacccugaaguu

SEQ ID NO: 2029307 - RNA, 19 nt, Homo sapiens
  misc_RNA (1)...(19): siRNA sense strand
ugagcaaacacgccaaugu

SEQ ID NO: 2029308 - RNA, 19 nt, Homo sapiens
  misc_RNA (1)...(19): siRNA sense strand
gaagcccuggguacacuga

SEQ ID NO: 2029309 - RNA, 19 nt, Homo sapiens
  misc_RNA (1)...(19): siRNA sense strand
acacgccaaugucaagauc

SEQ ID NO: 2029310 - RNA, 19 nt, Homo sapiens
  misc_RNA (1)...(19): siRNA sense strand
gcugugcccaggaccauug

SEQ ID NO: 2029311 - RNA, 19 nt, Homo sapiens
  misc_RNA (1)...(19): siRNA sense strand
ggccaucggcaucauagug

SEQ ID NO: 2029312 - RNA, 19 nt, Homo sapiens
  misc_RNA (1)...(19): siRNA sense strand
ggccagcucaccagucaug

SEQ ID NO: 2029313 - RNA, 19 nt, Homo sapiens
  misc_RNA (1)...(19): siRNA sense strand
ccuccaguguugcaguuau

SEQ ID NO: 2029314 - RNA, 19 nt, Homo sapiens
  misc_RNA (1)...(19): siRNA sense strand
uccgagagaugugcaagga

SEQ ID NO: 2029315 - RNA, 19 nt, Homo sapiens
  misc_RNA (1)...(19): siRNA sense strand
augcagacccugaaguuug

SEQ ID NO: 2029316 - RNA, 19 nt, Homo sapiens
  misc_RNA (1)...(19): siRNA sense strand
agaccuuccuggugcuaga

SEQ ID NO: 2029317 - RNA, 19 nt, Homo sapiens
  misc_RNA (1)...(19): siRNA sense strand
gcgggaugguggcaaguac

SEQ ID NO: 2029318 - RNA, 19 nt, Homo sapiens
  misc_RNA (1)...(19): siRNA sense strand
gaaguuugcaagaaaaugu

SEQ ID NO: 2029319 - RNA, 19 nt, Homo sapiens
  misc_RNA (1)...(19): siRNA sense strand
ccuucagccuccaguguug

SEQ ID NO: 2029320 - RNA, 19 nt, Homo sapiens
  misc_RNA (1)...(19): siRNA sense strand
acaagcugcgcauggagua

SEQ ID NO: 2029321 - RNA, 19 nt, Homo sapiens
  misc_RNA (1)...(19): siRNA sense strand
gaggcuggaggugaucuuu

SEQ ID NO: 2029322 - RNA, 19 nt, Homo sapiens
  misc_RNA (1)...(19): siRNA sense strand
acccugaaguuugcaagaa

SEQ ID NO: 2029323 - RNA, 19 nt, Homo sapiens
  misc_RNA (1)...(19): siRNA sense strand
ugucauccgcugcuaccua

SEQ ID NO: 2029324 - RNA, 19 nt, Homo sapiens
  misc_RNA (1)...(19): siRNA sense strand
uccagcggcuccucaguca

SEQ ID NO: 2029325 - RNA, 19 nt, Homo sapiens
  misc_RNA (1)...(19): siRNA sense strand
ggcuggaggugaucuuugc

SEQ ID NO: 2029326 - RNA, 19 nt, Homo sapiens
  misc_RNA (1)...(19): siRNA sense strand
gguccuccucucacucgua

SEQ ID NO: 2029327 - RNA, 19 nt, Homo sapiens
  misc_RNA (1)...(19): siRNA sense strand
acgccaaugucaagaucuu

SEQ ID NO: 2029328 - RNA, 19 nt, Homo sapiens
  misc_RNA (1)...(19): siRNA sense strand
uggcugcccugagcaaaca

SEQ ID NO: 2029329 - RNA, 19 nt, Homo sapiens
  misc_RNA (1)...(19): siRNA sense strand
cugcauauucugacugaug

SEQ ID NO: 2029330 - RNA, 19 nt, Homo sapiens
  misc_RNA (1)...(19): siRNA sense strand
gaaacgaguucgagucugu

SEQ ID NO: 2029331 - RNA, 19 nt, Homo sapiens
  misc_RNA (1)...(19): siRNA sense strand
uagaggagcugcugcauau

SEQ ID NO: 2029332 - RNA, 19 nt, Homo sapiens
  misc_RNA (1)...(19): siRNA sense strand
gcacaucgcagaccuguca

SEQ ID NO: 2029333 - RNA, 19 nt, Homo sapiens
  misc_RNA (1)...(19): siRNA sense strand
gaagaaguggcaacuggua

SEQ ID NO: 2029334 - RNA, 19 nt, Homo sapiens
  misc_RNA (1)...(19): siRNA sense strand
ggccacagcugccaucuuc

SEQ ID NO: 2029335 - RNA, 19 nt, Homo sapiens
  misc_RNA (1)...(19): siRNA sense strand
gcaguugggcacuauauga

SEQ ID NO: 2029336 - RNA, 19 nt, Homo sapiens
  misc_RNA (1)...(19): siRNA sense strand
cgagagaugugcaaggaau

SEQ ID NO: 2029337 - RNA, 19 nt, Homo sapiens
  misc_RNA (1)...(19): siRNA sense strand
gagacaagcugcgcaugga

SEQ ID NO: 2029338 - RNA, 19 nt, Homo sapiens
  misc_RNA (1)...(19): siRNA sense strand
cgagggacaugcagacaga

SEQ ID NO: 2029339 - RNA, 19 nt, Homo sapiens
  misc_RNA (1)...(19): siRNA sense strand
gugcgcaucuucaaacaug

SEQ ID NO: 2029340 - RNA, 19 nt, Homo sapiens
  misc_RNA (1)...(19): siRNA sense strand
cagcacagccuacccaguu

SEQ ID NO: 2029341 - RNA, 19 nt, Homo sapiens
  misc_RNA (1)...(19): siRNA sense strand
ccagauggaccgcaugauu

SEQ ID NO: 2029342 - RNA, 19 nt, Homo sapiens
  misc_RNA (1)...(19): siRNA sense strand
gcaaacacgccaaugucaa

SEQ ID NO: 2029343 - RNA, 19 nt, Homo sapiens
  misc_RNA (1)...(19): siRNA sense strand
caucgaggcuguacacaac

SEQ ID NO: 2029344 - RNA, 19 nt, Homo sapiens
  misc_RNA (1)...(19): siRNA sense strand
gaggagcugcugcauauuc

SEQ ID NO: 2029345 - RNA, 19 nt, Homo sapiens
  misc_RNA (1)...(19): siRNA sense strand
ccacagcugccaucuucua

SEQ ID NO: 2029346 - RNA, 19 nt, Homo sapiens
  misc_RNA (1)...(19): siRNA sense strand
gcaaguacagccuggaaca

SEQ ID NO: 2029347 - RNA, 19 nt, Homo sapiens
  misc_RNA (1)...(19): siRNA sense strand
gagcaaacacgccaauguc

SEQ ID NO: 2029348 - RNA, 19 nt, Homo sapiens
  misc_RNA (1)...(19): siRNA sense strand
gcacgccuuucgcccaguu

SEQ ID NO: 2029349 - RNA, 19 nt, Homo sapiens
  misc_RNA (1)...(19): siRNA sense strand
cagauggaccgcaugauug

SEQ ID NO: 2029350 - RNA, 19 nt, Homo sapiens
  misc_RNA (1)...(19): siRNA sense strand
gguggccuauuaccaaaug

SEQ ID NO: 2029351 - RNA, 19 nt, Homo sapiens
  misc_RNA (1)...(19): siRNA sense strand
gagcugcugcauauucuga

SEQ ID NO: 2029352 - RNA, 19 nt, Homo sapiens
  misc_RNA (1)...(19): siRNA sense strand
gagaaacgaguucgagucu

SEQ ID NO: 2029353 - RNA, 19 nt, Homo sapiens
  misc_RNA (1)...(19): siRNA sense strand
ccgagaagcuguuguugcu

SEQ ID NO: 2029354 - RNA, 19 nt, Homo sapiens
  misc_RNA (1)...(19): siRNA sense strand
caaacacgccaaugucaag

SEQ ID NO: 2029355 - RNA, 19 nt, Homo sapiens
  misc_RNA (1)...(19): siRNA sense strand
gagcuggugcggagaaaca

SEQ ID NO: 2029356 - RNA, 19 nt, Homo sapiens
  misc_RNA (1)...(19): siRNA sense strand
gaugcagacccugaaguuu

SEQ ID NO: 2029357 - RNA, 19 nt, Homo sapiens
  misc_RNA (1)...(19): siRNA sense strand
cuagaggagcugcugcaua

SEQ ID NO: 2029358 - RNA, 19 nt, Homo sapiens
  misc_RNA (1)...(19): siRNA sense strand
gcagcgcaguugggcacua

SEQ ID NO: 2029359 - RNA, 19 nt, Homo sapiens
  misc_RNA (1)...(19): siRNA sense strand
cauccgugcugccuguaga

SEQ ID NO: 2029360 - RNA, 19 nt, Homo sapiens
  misc_RNA (1)...(19): siRNA sense strand
cacacucuguccucaaguu

SEQ ID NO: 2029361 - RNA, 19 nt, Homo sapiens
  misc_RNA (1)...(19): siRNA sense strand
gaagaagaaguggcaacug

SEQ ID NO: 2029362 - RNA, 19 nt, Homo sapiens
  misc_RNA (1)...(19): siRNA sense strand
gagagaugugcaaggaauu

SEQ ID NO: 2029363 - RNA, 19 nt, Homo sapiens
  misc_RNA (1)...(19): siRNA sense strand
ccugaugcaugcuauaguc

SEQ ID NO: 2029364 - RNA, 19 nt, Homo sapiens
  misc_RNA (1)...(19): siRNA sense strand
ucuccacgcuugugucauc

SEQ ID NO: 2029365 - RNA, 19 nt, Homo sapiens
  misc_RNA (1)...(19): siRNA sense strand
aagaaaaugugcaagagaa

SEQ ID NO: 2029366 - RNA, 19 nt, Homo sapiens
  misc_RNA (1)...(19): siRNA sense strand
caucauagugggucacauc

SEQ ID NO: 2029367 - RNA, 19 nt, Homo sapiens
  misc_RNA (1)...(19): siRNA sense strand
gcaagagaaacgaguucga

SEQ ID NO: 2029368 - RNA, 19 nt, Homo sapiens
  misc_RNA (1)...(19): siRNA sense strand
gcaagaaaaugugcaagag

SEQ ID NO: 2029369 - RNA, 19 nt, Homo sapiens
  misc_RNA (1)...(19): siRNA sense strand
cccugaaguuugcaagaaa

SEQ ID NO: 2029370 - RNA, 19 nt, Homo sapiens
  misc_RNA (1)...(19): siRNA sense strand
gaaguggcaacugguacaa

SEQ ID NO: 2029371 - RNA, 19 nt, Homo sapiens
  misc_RNA (1)...(19): siRNA sense strand
cagcgcaguugggcacuau

SEQ ID NO: 2029372 - RNA, 19 nt, Homo sapiens
  misc_RNA (1)...(19): siRNA sense strand
gcugauccaccaccggaaa

SEQ ID NO: 2029373 - RNA, 19 nt, Homo sapiens
  misc_RNA (1)...(19): siRNA sense strand
ggccugagccacgaauuau

SEQ ID NO: 2029374 - RNA, 19 nt, Homo sapiens
  misc_RNA (1)...(19): siRNA sense strand
gcgcaguugggcacuauau

SEQ ID NO: 2029375 - RNA, 19 nt, Homo sapiens
  misc_RNA (1)...(19): siRNA sense strand
ugauggcucucauugacau

SEQ ID NO: 2029376 - RNA, 19 nt, Homo sapiens
  misc_RNA (1)...(19): siRNA sense strand
cagcugccaucuucuacca

SEQ ID NO: 2029377 - RNA, 19 nt, Homo sapiens
  misc_RNA (1)...(19): siRNA sense strand
ugaugcagacccugaaguu

SEQ ID NO: 2029378 - RNA, 19 nt, Homo sapiens
  misc_RNA (1)...(19): siRNA sense strand
ugagcaaacacgccaaugu

SEQ ID NO: 2029379 - RNA, 19 nt, Homo sapiens
  misc_RNA (1)...(19): siRNA sense strand
gaagcccuggguacacuga

SEQ ID NO: 2029380 - RNA, 19 nt, Homo sapiens
  misc_RNA (1)...(19): siRNA sense strand
acacgccaaugucaagauc

SEQ ID NO: 2029381 - RNA, 19 nt, Homo sapiens
  misc_RNA (1)...(19): siRNA sense strand
gcugugcccaggaccauug

SEQ ID NO: 2029382 - RNA, 19 nt, Homo sapiens
  misc_RNA (1)...(19): siRNA sense strand
ggccaucggcaucauagug

SEQ ID NO: 2029383 - RNA, 19 nt, Homo sapiens
  misc_RNA (1)...(19): siRNA sense strand
ggccagcucaccagucaug

SEQ ID NO: 2029384 - RNA, 19 nt, Homo sapiens
  misc_RNA (1)...(19): siRNA sense strand
ccuccaguguugcaguuau

SEQ ID NO: 2029385 - RNA, 19 nt, Homo sapiens
  misc_RNA (1)...(19): siRNA sense strand
uccgagagaugugcaagga

SEQ ID NO: 2029386 - RNA, 19 nt, Homo sapiens
  misc_RNA (1)...(19): siRNA sense strand
augcagacccugaaguuug

SEQ ID NO: 2029387 - RNA, 19 nt, Homo sapiens
  misc_RNA (1)...(19): siRNA sense strand
agaccuuccuggugcuaga

SEQ ID NO: 2029388 - RNA, 19 nt, Homo sapiens
  misc_RNA (1)...(19): siRNA sense strand
gcgggaugguggcaaguac

SEQ ID NO: 2029389 - RNA, 19 nt, Homo sapiens
  misc_RNA (1)...(19): siRNA sense strand
gaaguuugcaagaaaaugu

SEQ ID NO: 2029390 - RNA, 19 nt, Homo sapiens
  misc_RNA (1)...(19): siRNA sense strand
ccuucagccuccaguguug

SEQ ID NO: 2029391 - RNA, 19 nt, Homo sapiens
  misc_RNA (1)...(19): siRNA sense strand
acaagcugcgcauggagua

SEQ ID NO: 2029392 - RNA, 19 nt, Homo sapiens
  misc_RNA (1)...(19): siRNA sense strand
gaggcuggaggugaucuuu

SEQ ID NO: 2029393 - RNA, 19 nt, Homo sapiens
  misc_RNA (1)...(19): siRNA sense strand
acccugaaguuugcaagaa

SEQ ID NO: 2029394 - RNA, 19 nt, Homo sapiens
  misc_RNA (1)...(19): siRNA sense strand
ugucauccgcugcuaccua

SEQ ID NO: 2029395 - RNA, 19 nt, Homo sapiens
  misc_RNA (1)...(19): siRNA sense strand
uccagcggcuccucaguca

SEQ ID NO: 2029396 - RNA, 19 nt, Homo sapiens
  misc_RNA (1)...(19): siRNA sense strand
ggcuggaggugaucuuugc

SEQ ID NO: 2029397 - RNA, 19 nt, Homo sapiens
  misc_RNA (1)...(19): siRNA sense strand
gguccuccucucacucgua

SEQ ID NO: 2029398 - RNA, 19 nt, Homo sapiens
  misc_RNA (1)...(19): siRNA sense strand
acgccaaugucaagaucuu

SEQ ID NO: 2029399 - RNA, 19 nt, Homo sapiens
  misc_RNA (1)...(19): siRNA sense strand
uggcugcccugagcaaaca

SEQ ID NO: 2029400 - RNA, 19 nt, Homo sapiens
  misc_RNA (1)...(19): siRNA sense strand
cugcauauucugacugaug

SEQ ID NO: 2029401 - RNA, 19 nt, Homo sapiens
  misc_RNA (1)...(19): siRNA sense strand
gaaacgaguucgagucugu

SEQ ID NO: 2029402 - RNA, 19 nt, Homo sapiens
  misc_RNA (1)...(19): siRNA sense strand
uagaggagcugcugcauau

SEQ ID NO: 2029403 - RNA, 19 nt, Homo sapiens
  misc_RNA (1)...(19): siRNA sense strand
gcacaucgcagaccuguca

SEQ ID NO: 2029404 - RNA, 19 nt, Homo sapiens
  misc_RNA (1)...(19): siRNA sense strand
gaagaaguggcaacuggua

SEQ ID NO: 2029405 - RNA, 19 nt, Homo sapiens
  misc_RNA (1)...(19): siRNA sense strand
ggccacagcugccaucuuc

SEQ ID NO: 2029406 - RNA, 19 nt, Homo sapiens
  misc_RNA (1)...(19): siRNA sense strand
gcaguugggcacuauauga

SEQ ID NO: 2029407 - RNA, 19 nt, Homo sapiens
  misc_RNA (1)...(19): siRNA sense strand
cgagagaugugcaaggaau

SEQ ID NO: 2029408 - RNA, 19 nt, Homo sapiens
  misc_RNA (1)...(19): siRNA sense strand
gagacaagcugcgcaugga

SEQ ID NO: 2029409 - RNA, 19 nt, Homo sapiens
  misc_RNA (1)...(19): siRNA sense strand
cgagggacaugcagacaga

SEQ ID NO: 2029410 - RNA, 19 nt, Homo sapiens
  misc_RNA (1)...(19): siRNA sense strand
gugcgcaucuucaaacaug

SEQ ID NO: 2029411 - RNA, 19 nt, Homo sapiens
  misc_RNA (1)...(19): siRNA sense strand
cagcacagccuacccaguu

SEQ ID NO: 2029412 - RNA, 19 nt, Homo sapiens
  misc_RNA (1)...(19): siRNA sense strand
ccagauggaccgcaugauu

SEQ ID NO: 2029413 - RNA, 19 nt, Homo sapiens
  misc_RNA (1)...(19): siRNA sense strand
gcaaacacgccaaugucaa

SEQ ID NO: 2029414 - RNA, 19 nt, Homo sapiens
  misc_RNA (1)...(19): siRNA sense strand
caucgaggcuguacacaac

SEQ ID NO: 2029415 - RNA, 19 nt, Homo sapiens
  misc_RNA (1)...(19): siRNA sense strand
gaggagcugcugcauauuc

SEQ ID NO: 2029416 - RNA, 19 nt, Homo sapiens
  misc_RNA (1)...(19): siRNA sense strand
ccacagcugccaucuucua

SEQ ID NO: 2029417 - RNA, 19 nt, Homo sapiens
  misc_RNA (1)...(19): siRNA sense strand
gcaaguacagccuggaaca

SEQ ID NO: 2029418 - RNA, 19 nt, Homo sapiens
  misc_RNA (1)...(19): siRNA sense strand
gagcaaacacgccaauguc

SEQ ID NO: 2029419 - RNA, 19 nt, Homo sapiens
  misc_RNA (1)...(19): siRNA sense strand
gcacgccuuucgcccaguu

SEQ ID NO: 2029420 - RNA, 19 nt, Homo sapiens
  misc_RNA (1)...(19): siRNA sense strand
cagauggaccgcaugauug

SEQ ID NO: 2029421 - RNA, 19 nt, Homo sapiens
  misc_RNA (1)...(19): siRNA sense strand
gguggccuauuaccaaaug

SEQ ID NO: 2029422 - RNA, 19 nt, Homo sapiens
  misc_RNA (1)...(19): siRNA sense strand
gagcugcugcauauucuga

SEQ ID NO: 2029423 - RNA, 19 nt, Homo sapiens
  misc_RNA (1)...(19): siRNA sense strand
gagaaacgaguucgagucu

SEQ ID NO: 2029424 - RNA, 19 nt, Homo sapiens
  misc_RNA (1)...(19): siRNA sense strand
ccgagaagcuguuguugcu

SEQ ID NO: 2029425 - RNA, 19 nt, Homo sapiens
  misc_RNA (1)...(19): siRNA sense strand
caaacacgccaaugucaag

SEQ ID NO: 2029426 - RNA, 19 nt, Homo sapiens
  misc_RNA (1)...(19): siRNA sense strand
gagcuggugcggagaaaca

SEQ ID NO: 2029427 - RNA, 19 nt, Homo sapiens
  misc_RNA (1)...(19): siRNA sense strand
gaugcagacccugaaguuu

SEQ ID NO: 2029428 - RNA, 19 nt, Homo sapiens
  misc_RNA (1)...(19): siRNA sense strand
cuagaggagcugcugcaua

SEQ ID NO: 2029429 - RNA, 19 nt, Homo sapiens
  misc_RNA (1)...(19): siRNA sense strand
gcagcgcaguugggcacua

SEQ ID NO: 2029430 - RNA, 19 nt, Homo sapiens
  misc_RNA (1)...(19): siRNA sense strand
cauccgugcugccuguaga

SEQ ID NO: 2029431 - RNA, 19 nt, Homo sapiens
  misc_RNA (1)...(19): siRNA sense strand
cacacucuguccucaaguu

SEQ ID NO: 2029432 - RNA, 19 nt, Homo sapiens
  misc_RNA (1)...(19): siRNA sense strand
gaagaagaaguggcaacug

SEQ ID NO: 2029433 - RNA, 19 nt, Homo sapiens
  misc_RNA (1)...(19): siRNA sense strand
gagagaugugcaaggaauu

SEQ ID NO: 2029434 - RNA, 19 nt, Homo sapiens
  misc_RNA (1)...(19): siRNA sense strand
ccugaugcaugcuauaguc

SEQ ID NO: 2029435 - RNA, 19 nt, Homo sapiens
  misc_RNA (1)...(19): siRNA sense strand
ucuccacgcuugugucauc

SEQ ID NO: 2029436 - RNA, 19 nt, Homo sapiens
  misc_RNA (1)...(19): siRNA sense strand
aagaaaaugugcaagagaa

SEQ ID NO: 2029437 - RNA, 19 nt, Homo sapiens
  misc_RNA (1)...(19): siRNA sense strand
caucauagugggucacauc

SEQ ID NO: 2029438 - RNA, 19 nt, Homo sapiens
  misc_RNA (1)...(19): siRNA sense strand
gcaagagaaacgaguucga

SEQ ID NO: 2029439 - RNA, 19 nt, Homo sapiens
  misc_RNA (1)...(19): siRNA sense strand
gcaagaaaaugugcaagag

SEQ ID NO: 2029440 - RNA, 19 nt, Homo sapiens
  misc_RNA (1)...(19): siRNA sense strand
cccugaaguuugcaagaaa

SEQ ID NO: 2029441 - RNA, 19 nt, Homo sapiens
  misc_RNA (1)...(19): siRNA sense strand
gaaguggcaacugguacaa

SEQ ID NO: 2029442 - RNA, 19 nt, Homo sapiens
  misc_RNA (1)...(19): siRNA sense strand
cagcgcaguugggcacuau

SEQ ID NO: 2029443 - RNA, 19 nt, Homo sapiens
  misc_RNA (1)...(19): siRNA sense strand
gcugauccaccaccggaaa

SEQ ID NO: 2029444 - RNA, 19 nt, Homo sapiens
  misc_RNA (1)...(19): siRNA sense strand
ggccugagccacgaauuau

SEQ ID NO: 2029445 - RNA, 19 nt, Homo sapiens
  misc_RNA (1)...(19): siRNA sense strand
gcgcaguugggcacuauau

SEQ ID NO: 2029446 - RNA, 19 nt, Homo sapiens
  misc_RNA (1)...(19): siRNA sense strand
ugauggcucucauugacau

SEQ ID NO: 2029447 - RNA, 19 nt, Homo sapiens
  misc_RNA (1)...(19): siRNA sense strand
cagcugccaucuucuacca

SEQ ID NO: 2029448 - RNA, 19 nt, Homo sapiens
  misc_RNA (1)...(19): siRNA sense strand
ugaugcagacccugaaguu

SEQ ID NO: 2029449 - RNA, 19 nt, Homo sapiens
  misc_RNA (1)...(19): siRNA sense strand
ugagcaaacacgccaaugu

SEQ ID NO: 2029450 - RNA, 19 nt, Homo sapiens
  misc_RNA (1)...(19): siRNA sense strand
gaagcccuggguacacuga

SEQ ID NO: 2029451 - RNA, 19 nt, Homo sapiens
  misc_RNA (1)...(19): siRNA sense strand
acacgccaaugucaagauc

SEQ ID NO: 2029452 - RNA, 19 nt, Homo sapiens
  misc_RNA (1)...(19): siRNA sense strand
gcugugcccaggaccauug

SEQ ID NO: 2029453 - RNA, 19 nt, Homo sapiens
  misc_RNA (1)...(19): siRNA sense strand
ggccaucggcaucauagug

SEQ ID NO: 2029454 - RNA, 19 nt, Homo sapiens
  misc_RNA (1)...(19): siRNA sense strand
ggccagcucaccagucaug

SEQ ID NO: 2029455 - RNA, 19 nt, Homo sapiens
  misc_RNA (1)...(19): siRNA sense strand
ccuccaguguugcaguuau

SEQ ID NO: 2029456 - RNA, 19 nt, Homo sapiens
  misc_RNA (1)...(19): siRNA sense strand
uccgagagaugugcaagga

SEQ ID NO: 2029457 - RNA, 19 nt, Homo sapiens
  misc_RNA (1)...(19): siRNA sense strand
augcagacccugaaguuug

SEQ ID NO: 2029458 - RNA, 19 nt, Homo sapiens
  misc_RNA (1)...(19): siRNA sense strand
agaccuuccuggugcuaga

SEQ ID NO: 2029459 - RNA, 19 nt, Homo sapiens
  misc_RNA (1)...(19): siRNA sense strand
gcgggaugguggcaaguac

SEQ ID NO: 2029460 - RNA, 19 nt, Homo sapiens
  misc_RNA (1)...(19): siRNA sense strand
gaaguuugcaagaaaaugu

SEQ ID NO: 2029461 - RNA, 19 nt, Homo sapiens
  misc_RNA (1)...(19): siRNA sense strand
ccuucagccuccaguguug

SEQ ID NO: 2029462 - RNA, 19 nt, Homo sapiens
  misc_RNA (1)...(19): siRNA sense strand
acaagcugcgcauggagua

SEQ ID NO: 2029463 - RNA, 19 nt, Homo sapiens
  misc_RNA (1)...(19): siRNA sense strand
gaggcuggaggugaucuuu

SEQ ID NO: 2029464 - RNA, 19 nt, Homo sapiens
  misc_RNA (1)...(19): siRNA sense strand
acccugaaguuugcaagaa

SEQ ID NO: 2029465 - RNA, 19 nt, Homo sapiens
  misc_RNA (1)...(19): siRNA sense strand
ugucauccgcugcuaccua

SEQ ID NO: 2029466 - RNA, 19 nt, Homo sapiens
  misc_RNA (1)...(19): siRNA sense strand
uccagcggcuccucaguca

SEQ ID NO: 2029467 - RNA, 19 nt, Homo sapiens
  misc_RNA (1)...(19): siRNA sense strand
ggcuggaggugaucuuugc

SEQ ID NO: 2029468 - RNA, 19 nt, Homo sapiens
  misc_RNA (1)...(19): siRNA sense strand
gguccuccucucacucgua

SEQ ID NO: 2029469 - RNA, 19 nt, Homo sapiens
  misc_RNA (1)...(19): siRNA sense strand
acgccaaugucaagaucuu

SEQ ID NO: 2029470 - RNA, 19 nt, Homo sapiens
  misc_RNA (1)...(19): siRNA sense strand
uggcugcccugagcaaaca

SEQ ID NO: 2029471 - RNA, 19 nt, Homo sapiens
  misc_RNA (1)...(19): siRNA sense strand
cugcauauucugacugaug

SEQ ID NO: 2029472 - RNA, 19 nt, Homo sapiens
  misc_RNA (1)...(19): siRNA sense strand
gaaacgaguucgagucugu

SEQ ID NO: 2029473 - RNA, 19 nt, Homo sapiens
  misc_RNA (1)...(19): siRNA sense strand
uagaggagcugcugcauau

SEQ ID NO: 2029474 - RNA, 19 nt, Homo sapiens
  misc_RNA (1)...(19): siRNA sense strand
gcacaucgcagaccuguca

SEQ ID NO: 2029475 - RNA, 19 nt, Homo sapiens
  misc_RNA (1)...(19): siRNA sense strand
gaagaaguggcaacuggua

SEQ ID NO: 2029476 - RNA, 19 nt, Homo sapiens
  misc_RNA (1)...(19): siRNA sense strand
ggccacagcugccaucuuc

SEQ ID NO: 2029477 - RNA, 19 nt, Homo sapiens
  misc_RNA (1)...(19): siRNA sense strand
gcaguugggcacuauauga

SEQ ID NO: 2029478 - RNA, 19 nt, Homo sapiens
  misc_RNA (1)...(19): siRNA sense strand
cgagagaugugcaaggaau

SEQ ID NO: 2029479 - RNA, 19 nt, Homo sapiens
  misc_RNA (1)...(19): siRNA sense strand
gagacaagcugcgcaugga

SEQ ID NO: 2029480 - RNA, 19 nt, Homo sapiens
  misc_RNA (1)...(19): siRNA sense strand
cgagggacaugcagacaga

SEQ ID NO: 2029481 - RNA, 19 nt, Homo sapiens
  misc_RNA (1)...(19): siRNA sense strand
gugcgcaucuucaaacaug

SEQ ID NO: 2029482 - RNA, 19 nt, Homo sapiens
  misc_RNA (1)...(19): siRNA sense strand
cagcacagccuacccaguu

SEQ ID NO: 2029483 - RNA, 19 nt, Homo sapiens
  misc_RNA (1)...(19): siRNA sense strand
ccagauggaccgcaugauu

SEQ ID NO: 2029484 - RNA, 19 nt, Homo sapiens
  misc_RNA (1)...(19): siRNA sense strand
gcaaacacgccaaugucaa

SEQ ID NO: 2029485 - RNA, 19 nt, Homo sapiens
  misc_RNA (1)...(19): siRNA sense strand
caucgaggcuguacacaac

SEQ ID NO: 2029486 - RNA, 19 nt, Homo sapiens
  misc_RNA (1)...(19): siRNA sense strand
gaggagcugcugcauauuc

SEQ ID NO: 2029487 - RNA, 19 nt, Homo sapiens
  misc_RNA (1)...(19): siRNA sense strand
ccacagcugccaucuucua

SEQ ID NO: 2029488 - RNA, 19 nt, Homo sapiens
  misc_RNA (1)...(19): siRNA sense strand
gcaaguacagccuggaaca

SEQ ID NO: 2029489 - RNA, 19 nt, Homo sapiens
  misc_RNA (1)...(19): siRNA sense strand
gagcaaacacgccaauguc

SEQ ID NO: 2029490 - RNA, 19 nt, Homo sapiens
  misc_RNA (1)...(19): siRNA sense strand
gcacgccuuucgcccaguu

SEQ ID NO: 2029491 - RNA, 19 nt, Homo sapiens
  misc_RNA (1)...(19): siRNA sense strand
cagauggaccgcaugauug

SEQ ID NO: 2029492 - RNA, 19 nt, Homo sapiens
  misc_RNA (1)...(19): siRNA sense strand
gguggccuauuaccaaaug

SEQ ID NO: 2029493 - RNA, 19 nt, Homo sapiens
  misc_RNA (1)...(19): siRNA sense strand
gagcugcugcauauucuga

SEQ ID NO: 2029494 - RNA, 19 nt, Homo sapiens
  misc_RNA (1)...(19): siRNA sense strand
gagaaacgaguucgagucu

SEQ ID NO: 2029495 - RNA, 19 nt, Homo sapiens
  misc_RNA (1)...(19): siRNA sense strand
ccgagaagcuguuguugcu

SEQ ID NO: 2029496 - RNA, 19 nt, Homo sapiens
  misc_RNA (1)...(19): siRNA sense strand
caaacacgccaaugucaag

SEQ ID NO: 2029497 - RNA, 19 nt, Homo sapiens
  misc_RNA (1)...(19): siRNA sense strand
gagcuggugcggagaaaca

SEQ ID NO: 2029498 - RNA, 19 nt, Homo sapiens
  misc_RNA (1)...(19): siRNA sense strand
gaugcagacccugaaguuu

SEQ ID NO: 2029499 - RNA, 19 nt, Homo sapiens
  misc_RNA (1)...(19): siRNA sense strand
cuagaggagcugcugcaua

SEQ ID NO: 2029500 - RNA, 19 nt, Homo sapiens
  misc_RNA (1)...(19): siRNA sense strand
gcagcgcaguugggcacua

SEQ ID NO: 2029501 - RNA, 19 nt, Homo sapiens
  misc_RNA (1)...(19): siRNA sense strand
cauccgugcugccuguaga

SEQ ID NO: 2029502 - RNA, 19 nt, Homo sapiens
  misc_RNA (1)...(19): siRNA sense strand
cacacucuguccucaaguu

SEQ ID NO: 2029503 - RNA, 19 nt, Homo sapiens
  misc_RNA (1)...(19): siRNA sense strand
gaagaagaaguggcaacug

SEQ ID NO: 2029504 - RNA, 19 nt, Homo sapiens
  misc_RNA (1)...(19): siRNA sense strand
gagagaugugcaaggaauu

SEQ ID NO: 2029505 - RNA, 19 nt, Homo sapiens
  misc_RNA (1)...(19): siRNA sense strand
ccugaugcaugcuauaguc

SEQ ID NO: 2029506 - RNA, 19 nt, Homo sapiens
  misc_RNA (1)...(19): siRNA sense strand
ucuccacgcuugugucauc

SEQ ID NO: 2029507 - RNA, 19 nt, Homo sapiens
  misc_RNA (1)...(19): siRNA sense strand
aagaaaaugugcaagagaa

SEQ ID NO: 2029508 - RNA, 19 nt, Homo sapiens
  misc_RNA (1)...(19): siRNA sense strand
caucauagugggucacauc

SEQ ID NO: 2029509 - RNA, 19 nt, Homo sapiens
  misc_RNA (1)...(19): siRNA sense strand
gcaagagaaacgaguucga

SEQ ID NO: 2029510 - RNA, 19 nt, Homo sapiens
  misc_RNA (1)...(19): siRNA sense strand
gcaagaaaaugugcaagag

SEQ ID NO: 2029511 - RNA, 19 nt, Homo sapiens
  misc_RNA (1)...(19): siRNA sense strand
cccugaaguuugcaagaaa

SEQ ID NO: 2029512 - RNA, 19 nt, Homo sapiens
  misc_RNA (1)...(19): siRNA sense strand
gaaguggcaacugguacaa

SEQ ID NO: 2029513 - RNA, 19 nt, Homo sapiens
  misc_RNA (1)...(19): siRNA sense strand
cagcgcaguugggcacuau

SEQ ID NO: 2029514 - RNA, 19 nt, Homo sapiens
  misc_RNA (1)...(19): siRNA sense strand
gcugauccaccaccggaaa

SEQ ID NO: 2029515 - RNA, 19 nt, Homo sapiens
  misc_RNA (1)...(19): siRNA sense strand
ggccugagccacgaauuau

SEQ ID NO: 2029516 - RNA, 19 nt, Homo sapiens
  misc_RNA (1)...(19): siRNA sense strand
gcgcaguugggcacuauau

SEQ ID NO: 2029517 - RNA, 19 nt, Homo sapiens
  misc_RNA (1)...(19): siRNA sense strand
ugauggcucucauugacau

SEQ ID NO: 2029518 - RNA, 19 nt, Homo sapiens
  misc_RNA (1)...(19): siRNA sense strand
cagcugccaucuucuacca

SEQ ID NO: 2029519 - RNA, 19 nt, Homo sapiens
  misc_RNA (1)...(19): siRNA sense strand
ugaugcagacccugaaguu

SEQ ID NO: 2029520 - RNA, 19 nt, Homo sapiens
  misc_RNA (1)...(19): siRNA sense strand
ugagcaaacacgccaaugu

SEQ ID NO: 2029521 - RNA, 19 nt, Homo sapiens
  misc_RNA (1)...(19): siRNA sense strand
gaagcccuggguacacuga

SEQ ID NO: 2029522 - RNA, 19 nt, Homo sapiens
  misc_RNA (1)...(19): siRNA sense strand
acacgccaaugucaagauc

SEQ ID NO: 2029523 - RNA, 19 nt, Homo sapiens
  misc_RNA (1)...(19): siRNA sense strand
gcugugcccaggaccauug

SEQ ID NO: 2029524 - RNA, 19 nt, Homo sapiens
  misc_RNA (1)...(19): siRNA sense strand
ggccaucggcaucauagug

SEQ ID NO: 2029525 - RNA, 19 nt, Homo sapiens
  misc_RNA (1)...(19): siRNA sense strand
ggccagcucaccagucaug

SEQ ID NO: 2029526 - RNA, 19 nt, Homo sapiens
  misc_RNA (1)...(19): siRNA sense strand
ccuccaguguugcaguuau

SEQ ID NO: 2029527 - RNA, 19 nt, Homo sapiens
  misc_RNA (1)...(19): siRNA sense strand
uccgagagaugugcaagga

SEQ ID NO: 2029528 - RNA, 19 nt, Homo sapiens
  misc_RNA (1)...(19): siRNA sense strand
augcagacccugaaguuug

SEQ ID NO: 2029529 - RNA, 19 nt, Homo sapiens
  misc_RNA (1)...(19): siRNA sense strand
agaccuuccuggugcuaga

SEQ ID NO: 2029530 - RNA, 19 nt, Homo sapiens
  misc_RNA (1)...(19): siRNA sense strand
gcgggaugguggcaaguac

SEQ ID NO: 2029531 - RNA, 19 nt, Homo sapiens
  misc_RNA (1)...(19): siRNA sense strand
gaaguuugcaagaaaaugu

SEQ ID NO: 2029532 - RNA, 19 nt, Homo sapiens
  misc_RNA (1)...(19): siRNA sense strand
ccuucagccuccaguguug

SEQ ID NO: 2029533 - RNA, 19 nt, Homo sapiens
  misc_RNA (1)...(19): siRNA sense strand
acaagcugcgcauggagua

SEQ ID NO: 2029534 - RNA, 19 nt, Homo sapiens
  misc_RNA (1)...(19): siRNA sense strand
gaggcuggaggugaucuuu

SEQ ID NO: 2029535 - RNA, 19 nt, Homo sapiens
  misc_RNA (1)...(19): siRNA sense strand
acccugaaguuugcaagaa

SEQ ID NO: 2029536 - RNA, 19 nt, Homo sapiens
  misc_RNA (1)...(19): siRNA sense strand
ugucauccgcugcuaccua

SEQ ID NO: 2029537 - RNA, 19 nt, Homo sapiens
  misc_RNA (1)...(19): siRNA sense strand
uccagcggcuccucaguca

SEQ ID NO: 2029538 - RNA, 19 nt, Homo sapiens
  misc_RNA (1)...(19): siRNA sense strand
ggcuggaggugaucuuugc

SEQ ID NO: 2029539 - RNA, 19 nt, Homo sapiens
  misc_RNA (1)...(19): siRNA sense strand
gguccuccucucacucgua

SEQ ID NO: 2029540 - RNA, 19 nt, Homo sapiens
  misc_RNA (1)...(19): siRNA sense strand
acgccaaugucaagaucuu

SEQ ID NO: 2029541 - RNA, 19 nt, Homo sapiens
  misc_RNA (1)...(19): siRNA sense strand
uggcugcccugagcaaaca

SEQ ID NO: 2029542 - RNA, 19 nt, Homo sapiens
  misc_RNA (1)...(19): siRNA sense strand
cugcauauucugacugaug

SEQ ID NO: 2029543 - RNA, 19 nt, Homo sapiens
  misc_RNA (1)...(19): siRNA sense strand
gagagaagaugcaaauuaa

SEQ ID NO: 2029544 - RNA, 19 nt, Homo sapiens
  misc_RNA (1)...(19): siRNA sense strand
ggagagaagaugcaaauua

SEQ ID NO: 2029545 - RNA, 19 nt, Homo sapiens
  misc_RNA (1)...(19): siRNA sense strand
gagauucccuuuaauucua

SEQ ID NO: 2029546 - RNA, 19 nt, Homo sapiens
  misc_RNA (1)...(19): siRNA sense strand
gccaagagcuccaagauca

SEQ ID NO: 2029547 - RNA, 19 nt, Homo sapiens
  misc_RNA (1)...(19): siRNA sense strand
cauggaugaucacaaauua

SEQ ID NO: 2029548 - RNA, 19 nt, Homo sapiens
  misc_RNA (1)...(19): siRNA sense strand
uggcagagauucccuuuaa

SEQ ID NO: 2029549 - RNA, 19 nt, Homo sapiens
  misc_RNA (1)...(19): siRNA sense strand
gcagagauucccuuuaauu

SEQ ID NO: 2029550 - RNA, 19 nt, Homo sapiens
  misc_RNA (1)...(19): siRNA sense strand
gaauuaaggugaucauggu

SEQ ID NO: 2029551 - RNA, 19 nt, Homo sapiens
  misc_RNA (1)...(19): siRNA sense strand
gaagaaauccaucauguac

SEQ ID NO: 2029552 - RNA, 19 nt, Homo sapiens
  misc_RNA (1)...(19): siRNA sense strand
gcaaauuaauguacaagag

SEQ ID NO: 2029553 - RNA, 19 nt, Homo sapiens
  misc_RNA (1)...(19): siRNA sense strand
ggacagcaguggaccuaug

SEQ ID NO: 2029554 - RNA, 19 nt, Homo sapiens
  misc_RNA (1)...(19): siRNA sense strand
gagaagaugcaaauuaaug

SEQ ID NO: 2029555 - RNA, 19 nt, Homo sapiens
  misc_RNA (1)...(19): siRNA sense strand
gcauugaucucggcacuga

SEQ ID NO: 2029556 - RNA, 19 nt, Homo sapiens
  misc_RNA (1)...(19): siRNA sense strand
ucagcaagcucugguaauu

SEQ ID NO: 2029557 - RNA, 19 nt, Homo sapiens
  misc_RNA (1)...(19): siRNA sense strand
gggcaggaguacucaauga

SEQ ID NO: 2029558 - RNA, 19 nt, Homo sapiens
  misc_RNA (1)...(19): siRNA sense strand
gggcugacuuuaaggcuaa

SEQ ID NO: 2029559 - RNA, 19 nt, Homo sapiens
  misc_RNA (1)...(19): siRNA sense strand
caaccgggcugacuuuaag

SEQ ID NO: 2029560 - RNA, 19 nt, Homo sapiens
  misc_RNA (1)...(19): siRNA sense strand
caugagaaacaaagucuua

SEQ ID NO: 2029561 - RNA, 19 nt, Homo sapiens
  misc_RNA (1)...(19): siRNA sense strand
gaacacuucauccaucuga

SEQ ID NO: 2029562 - RNA, 19 nt, Homo sapiens
  misc_RNA (1)...(19): siRNA sense strand
gaucaucccauuacagcua

SEQ ID NO: 2029563 - RNA, 19 nt, Homo sapiens
  misc_RNA (1)...(19): siRNA sense strand
ccagauauauuucaaugag

SEQ ID NO: 2029564 - RNA, 19 nt, Homo sapiens
  misc_RNA (1)...(19): siRNA sense strand
gauguaagguggacaacuc

SEQ ID NO: 2029565 - RNA, 19 nt, Homo sapiens
  misc_RNA (1)...(19): siRNA sense strand
cgaaacaucugcuucuuuu

SEQ ID NO: 2029566 - RNA, 19 nt, Homo sapiens
  misc_RNA (1)...(19): siRNA sense strand
gaaagcgacaucaugaaga

SEQ ID NO: 2029567 - RNA, 19 nt, Homo sapiens
  misc_RNA (1)...(19): siRNA sense strand
aaagggagacguacuacua

SEQ ID NO: 2029568 - RNA, 19 nt, Homo sapiens
  misc_RNA (1)...(19): siRNA sense strand
gcuuaucucugcacaagga

SEQ ID NO: 2029569 - RNA, 19 nt, Homo sapiens
  misc_RNA (1)...(19): siRNA sense strand
guggacaacucauccuuga

SEQ ID NO: 2029570 - RNA, 19 nt, Homo sapiens
  misc_RNA (1)...(19): siRNA sense strand
gcugaaagcgacaucauga

SEQ ID NO: 2029571 - RNA, 19 nt, Homo sapiens
  misc_RNA (1)...(19): siRNA sense strand
gugcagaacugaaggacau

SEQ ID NO: 2029572 - RNA, 19 nt, Homo sapiens
  misc_RNA (1)...(19): siRNA sense strand
uggaggaacugaagaagga

SEQ ID NO: 2029573 - RNA, 19 nt, Homo sapiens
  misc_RNA (1)...(19): siRNA sense strand
gguuugauaugaccgugua

SEQ ID NO: 2029574 - RNA, 19 nt, Homo sapiens
  misc_RNA (1)...(19): siRNA sense strand
gaauguacccacucaagau

SEQ ID NO: 2029575 - RNA, 19 nt, Homo sapiens
  misc_RNA (1)...(19): siRNA sense strand
gcucugacgucucuaagca

SEQ ID NO: 2029576 - RNA, 19 nt, Homo sapiens
  misc_RNA (1)...(19): siRNA sense strand
cagcagaagcucaucauug

SEQ ID NO: 2029577 - RNA, 19 nt, Homo sapiens
  misc_RNA (1)...(19): siRNA sense strand
gaacauggugccucagcaa

SEQ ID NO: 2029578 - RNA, 19 nt, Homo sapiens
  misc_RNA (1)...(19): siRNA sense strand
gcaaccgggcugacuuuaa

SEQ ID NO: 2029579 - RNA, 19 nt, Homo sapiens
  misc_RNA (1)...(19): siRNA sense strand
agaacugccuggugaagaa

SEQ ID NO: 2029580 - RNA, 19 nt, Homo sapiens
  misc_RNA (1)...(19): siRNA sense strand
gaggagagaagaugcaaau

SEQ ID NO: 2029581 - RNA, 19 nt, Homo sapiens
  misc_RNA (1)...(19): siRNA sense strand
aaacagaagcgcaauaugg

SEQ ID NO: 2029582 - RNA, 19 nt, Homo sapiens
  misc_RNA (1)...(19): siRNA sense strand
gccauucccuacaguauuc

SEQ ID NO: 2029583 - RNA, 19 nt, Homo sapiens
  misc_RNA (1)...(19): siRNA sense strand
ugaagaaauccaucaugua

SEQ ID NO: 2029584 - RNA, 19 nt, Homo sapiens
  misc_RNA (1)...(19): siRNA sense strand
caaauuaaccuuggaagag

SEQ ID NO: 2029585 - RNA, 19 nt, Homo sapiens
  misc_RNA (1)...(19): siRNA sense strand
gaucucaucaucuccaaga

SEQ ID NO: 2029586 - RNA, 19 nt, Homo sapiens
  misc_RNA (1)...(19): siRNA sense strand
cugaagaaauccaucaugu

SEQ ID NO: 2029587 - RNA, 19 nt, Homo sapiens
  misc_RNA (1)...(19): siRNA sense strand
gcaggcagccgacaugauc

SEQ ID NO: 2029588 - RNA, 19 nt, Homo sapiens
  misc_RNA (1)...(19): siRNA sense strand
gaccagaguccaagacgaa

SEQ ID NO: 2029589 - RNA, 19 nt, Homo sapiens
  misc_RNA (1)...(19): siRNA sense strand
ccuacagcauccagauaua

SEQ ID NO: 2029590 - RNA, 19 nt, Homo sapiens
  misc_RNA (1)...(19): siRNA sense strand
gggcggaucucaucaucuc

SEQ ID NO: 2029591 - RNA, 19 nt, Homo sapiens
  misc_RNA (1)...(19): siRNA sense strand
gagaggaucuuggaguuuu

SEQ ID NO: 2029592 - RNA, 19 nt, Homo sapiens
  misc_RNA (1)...(19): siRNA sense strand
agucagcccuccucaaguu

SEQ ID NO: 2029593 - RNA, 19 nt, Homo sapiens
  misc_RNA (1)...(19): siRNA sense strand
agaaggaaguggucaugga

SEQ ID NO: 2029594 - RNA, 19 nt, Homo sapiens
  misc_RNA (1)...(19): siRNA sense strand
gaagaaggaaguggucaug

SEQ ID NO: 2029595 - RNA, 19 nt, Homo sapiens
  misc_RNA (1)...(19): siRNA sense strand
gcaguggaccuaugagcaa

SEQ ID NO: 2029596 - RNA, 19 nt, Homo sapiens
  misc_RNA (1)...(19): siRNA sense strand
uggaagagcugagcaccaa

SEQ ID NO: 2029597 - RNA, 19 nt, Homo sapiens
  misc_RNA (1)...(19): siRNA sense strand
ugggagaccugguggaaau

SEQ ID NO: 2029598 - RNA, 19 nt, Homo sapiens
  misc_RNA (1)...(19): siRNA sense strand
ggcucuggcuggauucuuu

SEQ ID NO: 2029599 - RNA, 19 nt, Homo sapiens
  misc_RNA (1)...(19): siRNA sense strand
aacaggagaucaucccauu

SEQ ID NO: 2029600 - RNA, 19 nt, Homo sapiens
  misc_RNA (1)...(19): siRNA sense strand
ucugauaccugguuuaugc

SEQ ID NO: 2029601 - RNA, 19 nt, Homo sapiens
  misc_RNA (1)...(19): siRNA sense strand
gagcucugauaccugguuu

SEQ ID NO: 2029602 - RNA, 19 nt, Homo sapiens
  misc_RNA (1)...(19): siRNA sense strand
cgacaccacugaagaacag

SEQ ID NO: 2029603 - RNA, 19 nt, Homo sapiens
  misc_RNA (1)...(19): siRNA sense strand
gcauccagauauauuucaa

SEQ ID NO: 2029604 - RNA, 19 nt, Homo sapiens
  misc_RNA (1)...(19): siRNA sense strand
ggaccuaugagcaacgaaa

SEQ ID NO: 2029605 - RNA, 19 nt, Homo sapiens
  misc_RNA (1)...(19): siRNA sense strand
agcagaagcucaucauugu

SEQ ID NO: 2029606 - RNA, 19 nt, Homo sapiens
  misc_RNA (1)...(19): siRNA sense strand
cggagaggaucuuggaguu

SEQ ID NO: 2029607 - RNA, 19 nt, Homo sapiens
  misc_RNA (1)...(19): siRNA sense strand
gaaggaaguggucauggau

SEQ ID NO: 2029608 - RNA, 19 nt, Homo sapiens
  misc_RNA (1)...(19): siRNA sense strand
ggucaaauucuguaagcaa

SEQ ID NO: 2029609 - RNA, 19 nt, Homo sapiens
  misc_RNA (1)...(19): siRNA sense strand
ggacaacucauccuugacu

SEQ ID NO: 2029610 - RNA, 19 nt, Homo sapiens
  misc_RNA (1)...(19): siRNA sense strand
ggagaggaucuuggaguuu

SEQ ID NO: 2029611 - RNA, 19 nt, Homo sapiens
  misc_RNA (1)...(19): siRNA sense strand
gggaagauaaauacuugaa

SEQ ID NO: 2029612 - RNA, 19 nt, Homo sapiens
  misc_RNA (1)...(19): siRNA sense strand
uaaccauccucugcauuga

SEQ ID NO: 2029613 - RNA, 19 nt, Homo sapiens
  misc_RNA (1)...(19): siRNA sense strand
ccugcuggaugacaacuuu

SEQ ID NO: 2029614 - RNA, 19 nt, Homo sapiens
  misc_RNA (1)...(19): siRNA sense strand
ucaaugaacgaugaaauga

SEQ ID NO: 2029615 - RNA, 19 nt, Homo sapiens
  misc_RNA (1)...(19): siRNA sense strand
aaugaacgaugaaaugaag

SEQ ID NO: 2029616 - RNA, 19 nt, Homo sapiens
  misc_RNA (1)...(19): siRNA sense strand
cagcagggcaugagaaaca

SEQ ID NO: 2029617 - RNA, 19 nt, Homo sapiens
  misc_RNA (1)...(19): siRNA sense strand
cugggaagauaaauacuug

SEQ ID NO: 2029618 - RNA, 19 nt, Homo sapiens
  misc_RNA (1)...(19): siRNA sense strand
ccacagugaugggcagaau

SEQ ID NO: 2029619 - RNA, 19 nt, Homo sapiens
  misc_RNA (1)...(19): siRNA sense strand
gcagugggcggaucucauc

SEQ ID NO: 2029620 - RNA, 19 nt, Homo sapiens
  misc_RNA (1)...(19): siRNA sense strand
gugcuaggcuucugcuucu

SEQ ID NO: 2029621 - RNA, 19 nt, Homo sapiens
  misc_RNA (1)...(19): siRNA sense strand
caaauucuguaagcaacug

SEQ ID NO: 2029622 - RNA, 19 nt, Homo sapiens
  misc_RNA (1)...(19): siRNA sense strand
gcuuaugagucagcugaaa

SEQ ID NO: 2029623 - RNA, 19 nt, Homo sapiens
  misc_RNA (1)...(19): siRNA sense strand
ugaagaaggcugacauugg

SEQ ID NO: 2029624 - RNA, 19 nt, Homo sapiens
  misc_RNA (1)...(19): siRNA sense strand
cacaugugguuugauauga

SEQ ID NO: 2029625 - RNA, 19 nt, Homo sapiens
  misc_RNA (1)...(19): siRNA sense strand
ucacuucucuugggcuaug

SEQ ID NO: 2029626 - RNA, 19 nt, Homo sapiens
  misc_RNA (1)...(19): siRNA sense strand
cugcugagaucgaacacuu

SEQ ID NO: 2029627 - RNA, 19 nt, Homo sapiens
  misc_RNA (1)...(19): siRNA sense strand
gaagcgcaauauggaggaa

SEQ ID NO: 2029628 - RNA, 19 nt, Homo sapiens
  misc_RNA (1)...(19): siRNA sense strand
cuacaguauucucaucuuc

SEQ ID NO: 2029629 - RNA, 19 nt, Homo sapiens
  misc_RNA (1)...(19): siRNA sense strand
gaagagcugagcaccaagu

SEQ ID NO: 2029630 - RNA, 19 nt, Homo sapiens
  misc_RNA (1)...(19): siRNA sense strand
uguucuaccuuucuucuga

SEQ ID NO: 2029631 - RNA, 19 nt, Homo sapiens
  misc_RNA (1)...(19): siRNA sense strand
cagagauucccuuuaauuc

SEQ ID NO: 2029632 - RNA, 19 nt, Homo sapiens
  misc_RNA (1)...(19): siRNA sense strand
gaucgaacacuucauccau

SEQ ID NO: 2029633 - RNA, 19 nt, Homo sapiens
  misc_RNA (1)...(19): siRNA sense strand
caaugaacgaugaaaugaa

SEQ ID NO: 2029634 - RNA, 19 nt, Homo sapiens
  misc_RNA (1)...(19): siRNA sense strand
cgaauguacccacucaaga

SEQ ID NO: 2029635 - RNA, 19 nt, Homo sapiens
  misc_RNA (1)...(19): siRNA sense strand
ggaacccaaagacggauaa

SEQ ID NO: 2029636 - RNA, 19 nt, Homo sapiens
  misc_RNA (1)...(19): siRNA sense strand
gcaauauggaggaacugaa

SEQ ID NO: 2029637 - RNA, 19 nt, Homo sapiens
  misc_RNA (1)...(19): siRNA sense strand
caccaaagggcaaaggaaa

SEQ ID NO: 2029638 - RNA, 19 nt, Homo sapiens
  misc_RNA (1)...(19): siRNA sense strand
cuccuuggcuuaugaguca

SEQ ID NO: 2029639 - RNA, 19 nt, Homo sapiens
  misc_RNA (1)...(19): siRNA sense strand
ccggauggcuggguggaaa

SEQ ID NO: 2029640 - RNA, 19 nt, Homo sapiens
  misc_RNA (1)...(19): siRNA sense strand
ccacugggaagauaaauac

SEQ ID NO: 2029641 - RNA, 19 nt, Homo sapiens
  misc_RNA (1)...(19): siRNA sense strand
gugaaccaccgucucauug

SEQ ID NO: 2029642 - RNA, 19 nt, Homo sapiens
  misc_RNA (1)...(19): siRNA sense strand
aaagcgacaucaugaagag

SEQ ID NO: 2029643 - RNA, 19 nt, Homo sapiens
  misc_RNA (1)...(19): siRNA sense strand
gagagaagaugcaaauuaa

SEQ ID NO: 2029644 - RNA, 19 nt, Homo sapiens
  misc_RNA (1)...(19): siRNA sense strand
ggagagaagaugcaaauua

SEQ ID NO: 2029645 - RNA, 19 nt, Homo sapiens
  misc_RNA (1)...(19): siRNA sense strand
gagauucccuuuaauucua

SEQ ID NO: 2029646 - RNA, 19 nt, Homo sapiens
  misc_RNA (1)...(19): siRNA sense strand
gccaagagcuccaagauca

SEQ ID NO: 2029647 - RNA, 19 nt, Homo sapiens
  misc_RNA (1)...(19): siRNA sense strand
cauggaugaucacaaauua

SEQ ID NO: 2029648 - RNA, 19 nt, Homo sapiens
  misc_RNA (1)...(19): siRNA sense strand
uggcagagauucccuuuaa

SEQ ID NO: 2029649 - RNA, 19 nt, Homo sapiens
  misc_RNA (1)...(19): siRNA sense strand
gcagagauucccuuuaauu

SEQ ID NO: 2029650 - RNA, 19 nt, Homo sapiens
  misc_RNA (1)...(19): siRNA sense strand
gaauuaaggugaucauggu

SEQ ID NO: 2029651 - RNA, 19 nt, Homo sapiens
  misc_RNA (1)...(19): siRNA sense strand
gaagaaauccaucauguac

SEQ ID NO: 2029652 - RNA, 19 nt, Homo sapiens
  misc_RNA (1)...(19): siRNA sense strand
gcaaauuaauguacaagag

SEQ ID NO: 2029653 - RNA, 19 nt, Homo sapiens
  misc_RNA (1)...(19): siRNA sense strand
ggacagcaguggaccuaug

SEQ ID NO: 2029654 - RNA, 19 nt, Homo sapiens
  misc_RNA (1)...(19): siRNA sense strand
gagaagaugcaaauuaaug

SEQ ID NO: 2029655 - RNA, 19 nt, Homo sapiens
  misc_RNA (1)...(19): siRNA sense strand
gcauugaucucggcacuga

SEQ ID NO: 2029656 - RNA, 19 nt, Homo sapiens
  misc_RNA (1)...(19): siRNA sense strand
ucagcaagcucugguaauu

SEQ ID NO: 2029657 - RNA, 19 nt, Homo sapiens
  misc_RNA (1)...(19): siRNA sense strand
gggcaggaguacucaauga

SEQ ID NO: 2029658 - RNA, 19 nt, Homo sapiens
  misc_RNA (1)...(19): siRNA sense strand
gggcugacuuuaaggcuaa

SEQ ID NO: 2029659 - RNA, 19 nt, Homo sapiens
  misc_RNA (1)...(19): siRNA sense strand
caaccgggcugacuuuaag

SEQ ID NO: 2029660 - RNA, 19 nt, Homo sapiens
  misc_RNA (1)...(19): siRNA sense strand
caugagaaacaaagucuua

SEQ ID NO: 2029661 - RNA, 19 nt, Homo sapiens
  misc_RNA (1)...(19): siRNA sense strand
gaacacuucauccaucuga

SEQ ID NO: 2029662 - RNA, 19 nt, Homo sapiens
  misc_RNA (1)...(19): siRNA sense strand
gaucaucccauuacagcua

SEQ ID NO: 2029663 - RNA, 19 nt, Homo sapiens
  misc_RNA (1)...(19): siRNA sense strand
ccagauauauuucaaugag

SEQ ID NO: 2029664 - RNA, 19 nt, Homo sapiens
  misc_RNA (1)...(19): siRNA sense strand
gauguaagguggacaacuc

SEQ ID NO: 2029665 - RNA, 19 nt, Homo sapiens
  misc_RNA (1)...(19): siRNA sense strand
cgaaacaucugcuucuuuu

SEQ ID NO: 2029666 - RNA, 19 nt, Homo sapiens
  misc_RNA (1)...(19): siRNA sense strand
gaaagcgacaucaugaaga

SEQ ID NO: 2029667 - RNA, 19 nt, Homo sapiens
  misc_RNA (1)...(19): siRNA sense strand
aaagggagacguacuacua

SEQ ID NO: 2029668 - RNA, 19 nt, Homo sapiens
  misc_RNA (1)...(19): siRNA sense strand
gcuuaucucugcacaagga

SEQ ID NO: 2029669 - RNA, 19 nt, Homo sapiens
  misc_RNA (1)...(19): siRNA sense strand
guggacaacucauccuuga

SEQ ID NO: 2029670 - RNA, 19 nt, Homo sapiens
  misc_RNA (1)...(19): siRNA sense strand
gcugaaagcgacaucauga

SEQ ID NO: 2029671 - RNA, 19 nt, Homo sapiens
  misc_RNA (1)...(19): siRNA sense strand
gugcagaacugaaggacau

SEQ ID NO: 2029672 - RNA, 19 nt, Homo sapiens
  misc_RNA (1)...(19): siRNA sense strand
uggaggaacugaagaagga

SEQ ID NO: 2029673 - RNA, 19 nt, Homo sapiens
  misc_RNA (1)...(19): siRNA sense strand
gguuugauaugaccgugua

SEQ ID NO: 2029674 - RNA, 19 nt, Homo sapiens
  misc_RNA (1)...(19): siRNA sense strand
gaauguacccacucaagau

SEQ ID NO: 2029675 - RNA, 19 nt, Homo sapiens
  misc_RNA (1)...(19): siRNA sense strand
gcucugacgucucuaagca

SEQ ID NO: 2029676 - RNA, 19 nt, Homo sapiens
  misc_RNA (1)...(19): siRNA sense strand
cagcagaagcucaucauug

SEQ ID NO: 2029677 - RNA, 19 nt, Homo sapiens
  misc_RNA (1)...(19): siRNA sense strand
gaacauggugccucagcaa

SEQ ID NO: 2029678 - RNA, 19 nt, Homo sapiens
  misc_RNA (1)...(19): siRNA sense strand
gcaaccgggcugacuuuaa

SEQ ID NO: 2029679 - RNA, 19 nt, Homo sapiens
  misc_RNA (1)...(19): siRNA sense strand
agaacugccuggugaagaa

SEQ ID NO: 2029680 - RNA, 19 nt, Homo sapiens
  misc_RNA (1)...(19): siRNA sense strand
gaggagagaagaugcaaau

SEQ ID NO: 2029681 - RNA, 19 nt, Homo sapiens
  misc_RNA (1)...(19): siRNA sense strand
aaacagaagcgcaauaugg

SEQ ID NO: 2029682 - RNA, 19 nt, Homo sapiens
  misc_RNA (1)...(19): siRNA sense strand
gccauucccuacaguauuc

SEQ ID NO: 2029683 - RNA, 19 nt, Homo sapiens
  misc_RNA (1)...(19): siRNA sense strand
ugaagaaauccaucaugua

SEQ ID NO: 2029684 - RNA, 19 nt, Homo sapiens
  misc_RNA (1)...(19): siRNA sense strand
caaauuaaccuuggaagag

SEQ ID NO: 2029685 - RNA, 19 nt, Homo sapiens
  misc_RNA (1)...(19): siRNA sense strand
gaucucaucaucuccaaga

SEQ ID NO: 2029686 - RNA, 19 nt, Homo sapiens
  misc_RNA (1)...(19): siRNA sense strand
cugaagaaauccaucaugu

SEQ ID NO: 2029687 - RNA, 19 nt, Homo sapiens
  misc_RNA (1)...(19): siRNA sense strand
gcaggcagccgacaugauc

SEQ ID NO: 2029688 - RNA, 19 nt, Homo sapiens
  misc_RNA (1)...(19): siRNA sense strand
ccuacagcauccagauaua

SEQ ID NO: 2029689 - RNA, 19 nt, Homo sapiens
  misc_RNA (1)...(19): siRNA sense strand
gggcggaucucaucaucuc

SEQ ID NO: 2029690 - RNA, 19 nt, Homo sapiens
  misc_RNA (1)...(19): siRNA sense strand
agaaggaaguggucaugga

SEQ ID NO: 2029691 - RNA, 19 nt, Homo sapiens
  misc_RNA (1)...(19): siRNA sense strand
gagaggaucuuggaguuuu

SEQ ID NO: 2029692 - RNA, 19 nt, Homo sapiens
  misc_RNA (1)...(19): siRNA sense strand
agucagcccuccucaaguu

SEQ ID NO: 2029693 - RNA, 19 nt, Homo sapiens
  misc_RNA (1)...(19): siRNA sense strand
uggaagagcugagcaccaa

SEQ ID NO: 2029694 - RNA, 19 nt, Homo sapiens
  misc_RNA (1)...(19): siRNA sense strand
gcaguggaccuaugagcaa

SEQ ID NO: 2029695 - RNA, 19 nt, Homo sapiens
  misc_RNA (1)...(19): siRNA sense strand
gaagaaggaaguggucaug

SEQ ID NO: 2029696 - RNA, 19 nt, Homo sapiens
  misc_RNA (1)...(19): siRNA sense strand
ugggagaccugguggaaau

SEQ ID NO: 2029697 - RNA, 19 nt, Homo sapiens
  misc_RNA (1)...(19): siRNA sense strand
ggcucuggcuggauucuuu

SEQ ID NO: 2029698 - RNA, 19 nt, Homo sapiens
  misc_RNA (1)...(19): siRNA sense strand
aacaggagaucaucccauu

SEQ ID NO: 2029699 - RNA, 19 nt, Homo sapiens
  misc_RNA (1)...(19): siRNA sense strand
ucugauaccugguuuaugc

SEQ ID NO: 2029700 - RNA, 19 nt, Homo sapiens
  misc_RNA (1)...(19): siRNA sense strand
gagcucugauaccugguuu

SEQ ID NO: 2029701 - RNA, 19 nt, Homo sapiens
  misc_RNA (1)...(19): siRNA sense strand
cgacaccacugaagaacag

SEQ ID NO: 2029702 - RNA, 19 nt, Homo sapiens
  misc_RNA (1)...(19): siRNA sense strand
gcauccagauauauuucaa

SEQ ID NO: 2029703 - RNA, 19 nt, Homo sapiens
  misc_RNA (1)...(19): siRNA sense strand
ggaccuaugagcaacgaaa

SEQ ID NO: 2029704 - RNA, 19 nt, Homo sapiens
  misc_RNA (1)...(19): siRNA sense strand
agcagaagcucaucauugu

SEQ ID NO: 2029705 - RNA, 19 nt, Homo sapiens
  misc_RNA (1)...(19): siRNA sense strand
cggagaggaucuuggaguu

SEQ ID NO: 2029706 - RNA, 19 nt, Homo sapiens
  misc_RNA (1)...(19): siRNA sense strand
gaaggaaguggucauggau

SEQ ID NO: 2029707 - RNA, 19 nt, Homo sapiens
  misc_RNA (1)...(19): siRNA sense strand
ggucaaauucuguaagcaa

SEQ ID NO: 2029708 - RNA, 19 nt, Homo sapiens
  misc_RNA (1)...(19): siRNA sense strand
ggacaacucauccuugacu

SEQ ID NO: 2029709 - RNA, 19 nt, Homo sapiens
  misc_RNA (1)...(19): siRNA sense strand
ggagaggaucuuggaguuu

SEQ ID NO: 2029710 - RNA, 19 nt, Homo sapiens
  misc_RNA (1)...(19): siRNA sense strand
gggaagauaaauacuugaa

SEQ ID NO: 2029711 - RNA, 19 nt, Homo sapiens
  misc_RNA (1)...(19): siRNA sense strand
uaaccauccucugcauuga

SEQ ID NO: 2029712 - RNA, 19 nt, Homo sapiens
  misc_RNA (1)...(19): siRNA sense strand
ccugcuggaugacaacuuu

SEQ ID NO: 2029713 - RNA, 19 nt, Homo sapiens
  misc_RNA (1)...(19): siRNA sense strand
ucaaugaacgaugaaauga

SEQ ID NO: 2029714 - RNA, 19 nt, Homo sapiens
  misc_RNA (1)...(19): siRNA sense strand
aaugaacgaugaaaugaag

SEQ ID NO: 2029715 - RNA, 19 nt, Homo sapiens
  misc_RNA (1)...(19): siRNA sense strand
cagcagggcaugagaaaca

SEQ ID NO: 2029716 - RNA, 19 nt, Homo sapiens
  misc_RNA (1)...(19): siRNA sense strand
cugggaagauaaauacuug

SEQ ID NO: 2029717 - RNA, 19 nt, Homo sapiens
  misc_RNA (1)...(19): siRNA sense strand
ccacagugaugggcagaau

SEQ ID NO: 2029718 - RNA, 19 nt, Homo sapiens
  misc_RNA (1)...(19): siRNA sense strand
gcagugggcggaucucauc

SEQ ID NO: 2029719 - RNA, 19 nt, Homo sapiens
  misc_RNA (1)...(19): siRNA sense strand
gugcuaggcuucugcuucu

SEQ ID NO: 2029720 - RNA, 19 nt, Homo sapiens
  misc_RNA (1)...(19): siRNA sense strand
cugcugagaucgaacacuu

SEQ ID NO: 2029721 - RNA, 19 nt, Homo sapiens
  misc_RNA (1)...(19): siRNA sense strand
gcuuaugagucagcugaaa

SEQ ID NO: 2029722 - RNA, 19 nt, Homo sapiens
  misc_RNA (1)...(19): siRNA sense strand
caaauucuguaagcaacug

SEQ ID NO: 2029723 - RNA, 19 nt, Homo sapiens
  misc_RNA (1)...(19): siRNA sense strand
ugaagaaggcugacauugg

SEQ ID NO: 2029724 - RNA, 19 nt, Homo sapiens
  misc_RNA (1)...(19): siRNA sense strand
cacaugugguuugauauga

SEQ ID NO: 2029725 - RNA, 19 nt, Homo sapiens
  misc_RNA (1)...(19): siRNA sense strand
ucacuucucuugggcuaug

SEQ ID NO: 2029726 - RNA, 19 nt, Homo sapiens
  misc_RNA (1)...(19): siRNA sense strand
gaagcgcaauauggaggaa

SEQ ID NO: 2029727 - RNA, 19 nt, Homo sapiens
  misc_RNA (1)...(19): siRNA sense strand
cuacaguauucucaucuuc

SEQ ID NO: 2029728 - RNA, 19 nt, Homo sapiens
  misc_RNA (1)...(19): siRNA sense strand
uguucuaccuuucuucuga

SEQ ID NO: 2029729 - RNA, 19 nt, Homo sapiens
  misc_RNA (1)...(19): siRNA sense strand
cagagauucccuuuaauuc

SEQ ID NO: 2029730 - RNA, 19 nt, Homo sapiens
  misc_RNA (1)...(19): siRNA sense strand
gaucgaacacuucauccau

SEQ ID NO: 2029731 - RNA, 19 nt, Homo sapiens
  misc_RNA (1)...(19): siRNA sense strand
gaagagcugagcaccaagu

SEQ ID NO: 2029732 - RNA, 19 nt, Homo sapiens
  misc_RNA (1)...(19): siRNA sense strand
caccaaagggcaaaggaaa

SEQ ID NO: 2029733 - RNA, 19 nt, Homo sapiens
  misc_RNA (1)...(19): siRNA sense strand
cgaauguacccacucaaga

SEQ ID NO: 2029734 - RNA, 19 nt, Homo sapiens
  misc_RNA (1)...(19): siRNA sense strand
ggaacccaaagacggauaa

SEQ ID NO: 2029735 - RNA, 19 nt, Homo sapiens
  misc_RNA (1)...(19): siRNA sense strand
gcaauauggaggaacugaa

SEQ ID NO: 2029736 - RNA, 19 nt, Homo sapiens
  misc_RNA (1)...(19): siRNA sense strand
caaugaacgaugaaaugaa

SEQ ID NO: 2029737 - RNA, 19 nt, Homo sapiens
  misc_RNA (1)...(19): siRNA sense strand
uugacaaccugaagaaauc

SEQ ID NO: 2029738 - RNA, 19 nt, Homo sapiens
  misc_RNA (1)...(19): siRNA sense strand
ccggauggcuggguggaaa

SEQ ID NO: 2029739 - RNA, 19 nt, Homo sapiens
  misc_RNA (1)...(19): siRNA sense strand
ccacugggaagauaaauac

SEQ ID NO: 2029740 - RNA, 19 nt, Homo sapiens
  misc_RNA (1)...(19): siRNA sense strand
gugaaccaccgucucauug

SEQ ID NO: 2029741 - RNA, 19 nt, Homo sapiens
  misc_RNA (1)...(19): siRNA sense strand
aaagcgacaucaugaagag

SEQ ID NO: 2029742 - RNA, 19 nt, Homo sapiens
  misc_RNA (1)...(19): siRNA sense strand
cuccuuggcuuaugaguca

SEQ ID NO: 2029743 - RNA, 19 nt, Homo sapiens
  misc_RNA (1)...(19): siRNA sense strand
gauccaggcuuucaacgua

SEQ ID NO: 2029744 - RNA, 19 nt, Homo sapiens
  misc_RNA (1)...(19): siRNA sense strand
gcagcucucuaccuacuua

SEQ ID NO: 2029745 - RNA, 19 nt, Homo sapiens
  misc_RNA (1)...(19): siRNA sense strand
ccacuuaccugcaggagaa

SEQ ID NO: 2029746 - RNA, 19 nt, Homo sapiens
  misc_RNA (1)...(19): siRNA sense strand
gaacgacucuuugguacca

SEQ ID NO: 2029747 - RNA, 19 nt, Homo sapiens
  misc_RNA (1)...(19): siRNA sense strand
gaccauggaucgcuuugau

SEQ ID NO: 2029748 - RNA, 19 nt, Homo sapiens
  misc_RNA (1)...(19): siRNA sense strand
ccaggaaugugcugcuguu

SEQ ID NO: 2029749 - RNA, 19 nt, Homo sapiens
  misc_RNA (1)...(19): siRNA sense strand
ccacaucaccagcgacuug

SEQ ID NO: 2029750 - RNA, 19 nt, Homo sapiens
  misc_RNA (1)...(19): siRNA sense strand
uaugaacgacucuuuggua

SEQ ID NO: 2029751 - RNA, 19 nt, Homo sapiens
  misc_RNA (1)...(19): siRNA sense strand
guaccacagugacauucaa

SEQ ID NO: 2029752 - RNA, 19 nt, Homo sapiens
  misc_RNA (1)...(19): siRNA sense strand
acagugacauucaaguuca

SEQ ID NO: 2029753 - RNA, 19 nt, Homo sapiens
  misc_RNA (1)...(19): siRNA sense strand
ccacagugacauucaaguu

SEQ ID NO: 2029754 - RNA, 19 nt, Homo sapiens
  misc_RNA (1)...(19): siRNA sense strand
ucacagggcccagcaucua

SEQ ID NO: 2029755 - RNA, 19 nt, Homo sapiens
  misc_RNA (1)...(19): siRNA sense strand
caggguggcccgugaugua

SEQ ID NO: 2029756 - RNA, 19 nt, Homo sapiens
  misc_RNA (1)...(19): siRNA sense strand
ccauggaucgcuuugauga

SEQ ID NO: 2029757 - RNA, 19 nt, Homo sapiens
  misc_RNA (1)...(19): siRNA sense strand
aggacaagcugagcauuga

SEQ ID NO: 2029758 - RNA, 19 nt, Homo sapiens
  misc_RNA (1)...(19): siRNA sense strand
gaugaugcuucaggacuuc

SEQ ID NO: 2029759 - RNA, 19 nt, Homo sapiens
  misc_RNA (1)...(19): siRNA sense strand
guccgaagaugucccauac

SEQ ID NO: 2029760 - RNA, 19 nt, Homo sapiens
  misc_RNA (1)...(19): siRNA sense strand
uugaggauuucacagcaua

SEQ ID NO: 2029761 - RNA, 19 nt, Homo sapiens
  misc_RNA (1)...(19): siRNA sense strand
gcauauggcgguguguuug

SEQ ID NO: 2029762 - RNA, 19 nt, Homo sapiens
  misc_RNA (1)...(19): siRNA sense strand
ggcucucacugaccuauga

SEQ ID NO: 2029763 - RNA, 19 nt, Homo sapiens
  misc_RNA (1)...(19): siRNA sense strand
cuucuggaaugacuccuuu

SEQ ID NO: 2029764 - RNA, 19 nt, Homo sapiens
  misc_RNA (1)...(19): siRNA sense strand
gauccauccuccugugagu

SEQ ID NO: 2029765 - RNA, 19 nt, Homo sapiens
  misc_RNA (1)...(19): siRNA sense strand
gaccuaugaacgacucuuu

SEQ ID NO: 2029766 - RNA, 19 nt, Homo sapiens
  misc_RNA (1)...(19): siRNA sense strand
ccuauggccugcacaugau

SEQ ID NO: 2029767 - RNA, 19 nt, Homo sapiens
  misc_RNA (1)...(19): siRNA sense strand
gagcauugaggauuucaca

SEQ ID NO: 2029768 - RNA, 19 nt, Homo sapiens
  misc_RNA (1)...(19): siRNA sense strand
caggacaagcugagcauug

SEQ ID NO: 2029769 - RNA, 19 nt, Homo sapiens
  misc_RNA (1)...(19): siRNA sense strand
acuugcagcucucuaccua

SEQ ID NO: 2029770 - RNA, 19 nt, Homo sapiens
  misc_RNA (1)...(19): siRNA sense strand
gcugagcauugaggauuuc

SEQ ID NO: 2029771 - RNA, 19 nt, Homo sapiens
  misc_RNA (1)...(19): siRNA sense strand
cgacugugccagcuucuuc

SEQ ID NO: 2029772 - RNA, 19 nt, Homo sapiens
  misc_RNA (1)...(19): siRNA sense strand
agaugaugcuucaggacuu

SEQ ID NO: 2029773 - RNA, 19 nt, Homo sapiens
  misc_RNA (1)...(19): siRNA sense strand
ccgaagaugucccauacac

SEQ ID NO: 2029774 - RNA, 19 nt, Homo sapiens
  misc_RNA (1)...(19): siRNA sense strand
acacucaaguccgaagaug

SEQ ID NO: 2029775 - RNA, 19 nt, Homo sapiens
  misc_RNA (1)...(19): siRNA sense strand
ccuggcagaugaugcuuca

SEQ ID NO: 2029776 - RNA, 19 nt, Homo sapiens
  misc_RNA (1)...(19): siRNA sense strand
caagcaggacagcgccuuu

SEQ ID NO: 2029777 - RNA, 19 nt, Homo sapiens
  misc_RNA (1)...(19): siRNA sense strand
uccauccuccugugaguua

SEQ ID NO: 2029778 - RNA, 19 nt, Homo sapiens
  misc_RNA (1)...(19): siRNA sense strand
gcacacucaaguccgaaga

SEQ ID NO: 2029779 - RNA, 19 nt, Homo sapiens
  misc_RNA (1)...(19): siRNA sense strand
cgagugaccgggacuugug

SEQ ID NO: 2029780 - RNA, 19 nt, Homo sapiens
  misc_RNA (1)...(19): siRNA sense strand
ggucgccagcugcuacaaa

SEQ ID NO: 2029781 - RNA, 19 nt, Homo sapiens
  misc_RNA (1)...(19): siRNA sense strand
caagaccauggaucgcuuu

SEQ ID NO: 2029782 - RNA, 19 nt, Homo sapiens
  misc_RNA (1)...(19): siRNA sense strand
gcucuucaucuucaccuau

SEQ ID NO: 2029783 - RNA, 19 nt, Homo sapiens
  misc_RNA (1)...(19): siRNA sense strand
guucaugcucuucaucuuc

SEQ ID NO: 2029784 - RNA, 19 nt, Homo sapiens
  misc_RNA (1)...(19): siRNA sense strand
ccugugaguuacaaugaca

SEQ ID NO: 2029785 - RNA, 19 nt, Homo sapiens
  misc_RNA (1)...(19): siRNA sense strand
gguaugcagucagcacucu

SEQ ID NO: 2029786 - RNA, 19 nt, Homo sapiens
  misc_RNA (1)...(19): siRNA sense strand
cugcucaccucccuguuca

SEQ ID NO: 2029787 - RNA, 19 nt, Homo sapiens
  misc_RNA (1)...(19): siRNA sense strand
aagcugagcauugaggauu

SEQ ID NO: 2029788 - RNA, 19 nt, Homo sapiens
  misc_RNA (1)...(19): siRNA sense strand
ggacagcgccuuuucuaac

SEQ ID NO: 2029789 - RNA, 19 nt, Homo sapiens
  misc_RNA (1)...(19): siRNA sense strand
gcucaccucccuguucaug

SEQ ID NO: 2029790 - RNA, 19 nt, Homo sapiens
  misc_RNA (1)...(19): siRNA sense strand
cacagugacauucaaguuc

SEQ ID NO: 2029791 - RNA, 19 nt, Homo sapiens
  misc_RNA (1)...(19): siRNA sense strand
ccauggagcgccucgaagu

SEQ ID NO: 2029792 - RNA, 19 nt, Homo sapiens
  misc_RNA (1)...(19): siRNA sense strand
ucaccucccuguucaugcu

SEQ ID NO: 2029793 - RNA, 19 nt, Homo sapiens
  misc_RNA (1)...(19): siRNA sense strand
ggcccagcaucuacuccuu

SEQ ID NO: 2029794 - RNA, 19 nt, Homo sapiens
  misc_RNA (1)...(19): siRNA sense strand
gaggauuucacagcauaug

SEQ ID NO: 2029795 - RNA, 19 nt, Homo sapiens
  misc_RNA (1)...(19): siRNA sense strand
gaacacaacuaccgauuga

SEQ ID NO: 2029796 - RNA, 19 nt, Homo sapiens
  misc_RNA (1)...(19): siRNA sense strand
ggaauaauggguacucuuu

SEQ ID NO: 2029797 - RNA, 19 nt, Homo sapiens
  misc_RNA (1)...(19): siRNA sense strand
auaaggagcuacagaaauu

SEQ ID NO: 2029798 - RNA, 19 nt, Homo sapiens
  misc_RNA (1)...(19): siRNA sense strand
gaaauuaguggauacuuug

SEQ ID NO: 2029799 - RNA, 19 nt, Homo sapiens
  misc_RNA (1)...(19): siRNA sense strand
cuacagaaauuaguggaua

SEQ ID NO: 2029800 - RNA, 19 nt, Homo sapiens
  misc_RNA (1)...(19): siRNA sense strand
caguagagguugaucauga

SEQ ID NO: 2029801 - RNA, 19 nt, Homo sapiens
  misc_RNA (1)...(19): siRNA sense strand
gauugaagcaguuccauuu

SEQ ID NO: 2029802 - RNA, 19 nt, Homo sapiens
  misc_RNA (1)...(19): siRNA sense strand
ucugucaccuggaucauua

SEQ ID NO: 2029803 - RNA, 19 nt, Homo sapiens
  misc_RNA (1)...(19): siRNA sense strand
ucaccuggaucauuaagaa

SEQ ID NO: 2029804 - RNA, 19 nt, Homo sapiens
  misc_RNA (1)...(19): siRNA sense strand
ggagggacaguguuuauga

SEQ ID NO: 2029805 - RNA, 19 nt, Homo sapiens
  misc_RNA (1)...(19): siRNA sense strand
gauacuuugccgucaauua

SEQ ID NO: 2029806 - RNA, 19 nt, Homo sapiens
  misc_RNA (1)...(19): siRNA sense strand
ggagaaaguuccagauucc

SEQ ID NO: 2029807 - RNA, 19 nt, Homo sapiens
  misc_RNA (1)...(19): siRNA sense strand
ggaacgcagucagauuuga

SEQ ID NO: 2029808 - RNA, 19 nt, Homo sapiens
  misc_RNA (1)...(19): siRNA sense strand
gaaucgcacuguucguuca

SEQ ID NO: 2029809 - RNA, 19 nt, Homo sapiens
  misc_RNA (1)...(19): siRNA sense strand
ggacgcccuuguggaauuu

SEQ ID NO: 2029810 - RNA, 19 nt, Homo sapiens
  misc_RNA (1)...(19): siRNA sense strand
gaaaaugguuuggcuguga

SEQ ID NO: 2029811 - RNA, 19 nt, Homo sapiens
  misc_RNA (1)...(19): siRNA sense strand
gaacgcagucagauuugaa

SEQ ID NO: 2029812 - RNA, 19 nt, Homo sapiens
  misc_RNA (1)...(19): siRNA sense strand
aaagaaugguggacaacuu

SEQ ID NO: 2029813 - RNA, 19 nt, Homo sapiens
  misc_RNA (1)...(19): siRNA sense strand
ggaacacaacuaccgauug

SEQ ID NO: 2029814 - RNA, 19 nt, Homo sapiens
  misc_RNA (1)...(19): siRNA sense strand
ccacugaccaucucuuaug

SEQ ID NO: 2029815 - RNA, 19 nt, Homo sapiens
  misc_RNA (1)...(19): siRNA sense strand
augaucagcuugagcaauu

SEQ ID NO: 2029816 - RNA, 19 nt, Homo sapiens
  misc_RNA (1)...(19): siRNA sense strand
gagggacaguguuuaugau

SEQ ID NO: 2029817 - RNA, 19 nt, Homo sapiens
  misc_RNA (1)...(19): siRNA sense strand
gaucgccagucacccauca

SEQ ID NO: 2029818 - RNA, 19 nt, Homo sapiens
  misc_RNA (1)...(19): siRNA sense strand
auacuuugccgucaauuaa

SEQ ID NO: 2029819 - RNA, 19 nt, Homo sapiens
  misc_RNA (1)...(19): siRNA sense strand
ugccgucaauuaagcauaa

SEQ ID NO: 2029820 - RNA, 19 nt, Homo sapiens
  misc_RNA (1)...(19): siRNA sense strand
gaaccgagccuugcaucca

SEQ ID NO: 2029821 - RNA, 19 nt, Homo sapiens
  misc_RNA (1)...(19): siRNA sense strand
aagcuaggcaaacaucaua

SEQ ID NO: 2029822 - RNA, 19 nt, Homo sapiens
  misc_RNA (1)...(19): siRNA sense strand
gaauaauggguacucuuuc

SEQ ID NO: 2029823 - RNA, 19 nt, Homo sapiens
  misc_RNA (1)...(19): siRNA sense strand
gcacaccguggacagcaaa

SEQ ID NO: 2029824 - RNA, 19 nt, Homo sapiens
  misc_RNA (1)...(19): siRNA sense strand
uaaggagcuacagaaauua

SEQ ID NO: 2029825 - RNA, 19 nt, Homo sapiens
  misc_RNA (1)...(19): siRNA sense strand
cauaaggagcuacagaaau

SEQ ID NO: 2029826 - RNA, 19 nt, Homo sapiens
  misc_RNA (1)...(19): siRNA sense strand
ccagucacccaucaacauu

SEQ ID NO: 2029827 - RNA, 19 nt, Homo sapiens
  misc_RNA (1)...(19): siRNA sense strand
augauuaugugcugaaugu

SEQ ID NO: 2029828 - RNA, 19 nt, Homo sapiens
  misc_RNA (1)...(19): siRNA sense strand
gcacuguucguucauccuu

SEQ ID NO: 2029829 - RNA, 19 nt, Homo sapiens
  misc_RNA (1)...(19): siRNA sense strand
cacugaccaucucuuauga

SEQ ID NO: 2029830 - RNA, 19 nt, Homo sapiens
  misc_RNA (1)...(19): siRNA sense strand
ccugcagccucuauacuug

SEQ ID NO: 2029831 - RNA, 19 nt, Homo sapiens
  misc_RNA (1)...(19): siRNA sense strand
ggagagcguggaccugguu

SEQ ID NO: 2029832 - RNA, 19 nt, Homo sapiens
  misc_RNA (1)...(19): siRNA sense strand
aaauugcuguggagaaagu

SEQ ID NO: 2029833 - RNA, 19 nt, Homo sapiens
  misc_RNA (1)...(19): siRNA sense strand
ggaugcagcacuggaagaa

SEQ ID NO: 2029834 - RNA, 19 nt, Homo sapiens
  misc_RNA (1)...(19): siRNA sense strand
ucauaaggagcuacagaaa

SEQ ID NO: 2029835 - RNA, 19 nt, Homo sapiens
  misc_RNA (1)...(19): siRNA sense strand
caauuucggacccugcuuu

SEQ ID NO: 2029836 - RNA, 19 nt, Homo sapiens
  misc_RNA (1)...(19): siRNA sense strand
gcauuggaacgcagucaga

SEQ ID NO: 2029837 - RNA, 19 nt, Homo sapiens
  misc_RNA (1)...(19): siRNA sense strand
cauccuuccggcaugauua

SEQ ID NO: 2029838 - RNA, 19 nt, Homo sapiens
  misc_RNA (1)...(19): siRNA sense strand
uguuuaugaucccggcuua

SEQ ID NO: 2029839 - RNA, 19 nt, Homo sapiens
  misc_RNA (1)...(19): siRNA sense strand
caucauaaggagcuacaga

SEQ ID NO: 2029840 - RNA, 19 nt, Homo sapiens
  misc_RNA (1)...(19): siRNA sense strand
gaacagccugagggucauu

SEQ ID NO: 2029841 - RNA, 19 nt, Homo sapiens
  misc_RNA (1)...(19): siRNA sense strand
uuaagaagcaaccaguaga

SEQ ID NO: 2029842 - RNA, 19 nt, Homo sapiens
  misc_RNA (1)...(19): siRNA sense strand
guggauacuuugccgucaa

SEQ ID NO: 2029843 - RNA, 19 nt, Homo sapiens
  misc_RNA (1)...(19): siRNA sense strand
ggagcuacagaaauuagug

SEQ ID NO: 2029844 - RNA, 19 nt, Homo sapiens
  misc_RNA (1)...(19): siRNA sense strand
gcaugauuaugugcugaau

SEQ ID NO: 2029845 - RNA, 19 nt, Homo sapiens
  misc_RNA (1)...(19): siRNA sense strand
ggagaaagagaaaagaaug

SEQ ID NO: 2029846 - RNA, 19 nt, Homo sapiens
  misc_RNA (1)...(19): siRNA sense strand
uguggaauuugggucauuu

SEQ ID NO: 2029847 - RNA, 19 nt, Homo sapiens
  misc_RNA (1)...(19): siRNA sense strand
aggacgcccuuguggaauu

SEQ ID NO: 2029848 - RNA, 19 nt, Homo sapiens
  misc_RNA (1)...(19): siRNA sense strand
uuggaacgcagucagauuu

SEQ ID NO: 2029849 - RNA, 19 nt, Homo sapiens
  misc_RNA (1)...(19): siRNA sense strand
gauuaugugcugaauguac

SEQ ID NO: 2029850 - RNA, 19 nt, Homo sapiens
  misc_RNA (1)...(19): siRNA sense strand
augccuaccugcccagauu

SEQ ID NO: 2029851 - RNA, 19 nt, Homo sapiens
  misc_RNA (1)...(19): siRNA sense strand
caaacaucauaaggagcua

SEQ ID NO: 2029852 - RNA, 19 nt, Homo sapiens
  misc_RNA (1)...(19): siRNA sense strand
aaccacugaccaucucuua

SEQ ID NO: 2029853 - RNA, 19 nt, Homo sapiens
  misc_RNA (1)...(19): siRNA sense strand
gguggagggacaguguuua

SEQ ID NO: 2029854 - RNA, 19 nt, Homo sapiens
  misc_RNA (1)...(19): siRNA sense strand
ggacccugcuuuucacuuc

SEQ ID NO: 2029855 - RNA, 19 nt, Homo sapiens
  misc_RNA (1)...(19): siRNA sense strand
cauuaagaagcaaccagua

SEQ ID NO: 2029856 - RNA, 19 nt, Homo sapiens
  misc_RNA (1)...(19): siRNA sense strand
ccucuauacuuguacuuac

SEQ ID NO: 2029857 - RNA, 19 nt, Homo sapiens
  misc_RNA (1)...(19): siRNA sense strand
acacaacuaccgauugaag

SEQ ID NO: 2029858 - RNA, 19 nt, Homo sapiens
  misc_RNA (1)...(19): siRNA sense strand
gaucagcuugagcaauuuc

SEQ ID NO: 2029859 - RNA, 19 nt, Homo sapiens
  misc_RNA (1)...(19): siRNA sense strand
ugcagccucuauacuugua

SEQ ID NO: 2029860 - RNA, 19 nt, Homo sapiens
  misc_RNA (1)...(19): siRNA sense strand
guggagggacaguguuuau

SEQ ID NO: 2029861 - RNA, 19 nt, Homo sapiens
  misc_RNA (1)...(19): siRNA sense strand
gccugagggucauucuuca

SEQ ID NO: 2029862 - RNA, 19 nt, Homo sapiens
  misc_RNA (1)...(19): siRNA sense strand
ugaucagcuugagcaauuu

SEQ ID NO: 2029863 - RNA, 19 nt, Homo sapiens
  misc_RNA (1)...(19): siRNA sense strand
cgauugaagcaguuccauu

SEQ ID NO: 2029864 - RNA, 19 nt, Homo sapiens
  misc_RNA (1)...(19): siRNA sense strand
uaagaagcaaccaguagag

SEQ ID NO: 2029865 - RNA, 19 nt, Homo sapiens
  misc_RNA (1)...(19): siRNA sense strand
ccgagucugucaccuggau

SEQ ID NO: 2029866 - RNA, 19 nt, Homo sapiens
  misc_RNA (1)...(19): siRNA sense strand
gccucuauacuuguacuua

SEQ ID NO: 2029867 - RNA, 19 nt, Homo sapiens
  misc_RNA (1)...(19): siRNA sense strand
gcagucagauuugaaaacu

SEQ ID NO: 2029868 - RNA, 19 nt, Homo sapiens
  misc_RNA (1)...(19): siRNA sense strand
acugaugaaucgcacuguu

SEQ ID NO: 2029869 - RNA, 19 nt, Homo sapiens
  misc_RNA (1)...(19): siRNA sense strand
agaaaagaaugguggacaa

SEQ ID NO: 2029870 - RNA, 19 nt, Homo sapiens
  misc_RNA (1)...(19): siRNA sense strand
uggauacuuugccgucaau

SEQ ID NO: 2029871 - RNA, 19 nt, Homo sapiens
  misc_RNA (1)...(19): siRNA sense strand
gccagucacccaucaacau

SEQ ID NO: 2029872 - RNA, 19 nt, Homo sapiens
  misc_RNA (1)...(19): siRNA sense strand
uaggcaaacaucauaagga

SEQ ID NO: 2029873 - RNA, 19 nt, Homo sapiens
  misc_RNA (1)...(19): siRNA sense strand
gaggaccccuggaacacaa

SEQ ID NO: 2029874 - RNA, 19 nt, Homo sapiens
  misc_RNA (1)...(19): siRNA sense strand
aguagagguugaucaugau

SEQ ID NO: 2029875 - RNA, 19 nt, Homo sapiens
  misc_RNA (1)...(19): siRNA sense strand
ugguuuggcugugauagga

SEQ ID NO: 2029876 - RNA, 19 nt, Homo sapiens
  misc_RNA (1)...(19): siRNA sense strand
aauaauggguacucuuucc

SEQ ID NO: 2029877 - RNA, 19 nt, Homo sapiens
  misc_RNA (1)...(19): siRNA sense strand
ggagaaggccuaugccaaa

SEQ ID NO: 2029878 - RNA, 19 nt, Homo sapiens
  misc_RNA (1)...(19): siRNA sense strand
ucaagaagccagaagauga

SEQ ID NO: 2029879 - RNA, 19 nt, Homo sapiens
  misc_RNA (1)...(19): siRNA sense strand
ucacggacaucaucaagug

SEQ ID NO: 2029880 - RNA, 19 nt, Homo sapiens
  misc_RNA (1)...(19): siRNA sense strand
ucagagaaguuggacauga

SEQ ID NO: 2029881 - RNA, 19 nt, Homo sapiens
  misc_RNA (1)...(19): siRNA sense strand
caacaggggcuaacucuua

SEQ ID NO: 2029882 - RNA, 19 nt, Homo sapiens
  misc_RNA (1)...(19): siRNA sense strand
acgacucacucuacuauaa

SEQ ID NO: 2029883 - RNA, 19 nt, Homo sapiens
  misc_RNA (1)...(19): siRNA sense strand
gaaggccuaugccaaacug

SEQ ID NO: 2029884 - RNA, 19 nt, Homo sapiens
  misc_RNA (1)...(19): siRNA sense strand
gcugaaggaugaauuucug

SEQ ID NO: 2029885 - RNA, 19 nt, Homo sapiens
  misc_RNA (1)...(19): siRNA sense strand
caagaagccagaagaugaa

SEQ ID NO: 2029886 - RNA, 19 nt, Homo sapiens
  misc_RNA (1)...(19): siRNA sense strand
ucacugaugugcccuccaa

SEQ ID NO: 2029887 - RNA, 19 nt, Homo sapiens
  misc_RNA (1)...(19): siRNA sense strand
cagagaaguuggacaugau

SEQ ID NO: 2029888 - RNA, 19 nt, Homo sapiens
  misc_RNA (1)...(19): siRNA sense strand
gacggugaguucuggauga

SEQ ID NO: 2029889 - RNA, 19 nt, Homo sapiens
  misc_RNA (1)...(19): siRNA sense strand
gugagaaccuggccauugg

SEQ ID NO: 2029890 - RNA, 19 nt, Homo sapiens
  misc_RNA (1)...(19): siRNA sense strand
acaaccagcucaucuacug

SEQ ID NO: 2029891 - RNA, 19 nt, Homo sapiens
  misc_RNA (1)...(19): siRNA sense strand
cuacuggccuucuucaagu

SEQ ID NO: 2029892 - RNA, 19 nt, Homo sapiens
  misc_RNA (1)...(19): siRNA sense strand
gcaggacgacggugaguuc

SEQ ID NO: 2029893 - RNA, 19 nt, Homo sapiens
  misc_RNA (1)...(19): siRNA sense strand
ggacuucacgggugguguu

SEQ ID NO: 2029894 - RNA, 19 nt, Homo sapiens
  misc_RNA (1)...(19): siRNA sense strand
ggugagaaccuggccauug

SEQ ID NO: 2029895 - RNA, 19 nt, Homo sapiens
  misc_RNA (1)...(19): siRNA sense strand
gaacccacaguacaucuuc

SEQ ID NO: 2029896 - RNA, 19 nt, Homo sapiens
  misc_RNA (1)...(19): siRNA sense strand
ucuacaagguggaggagaa

SEQ ID NO: 2029897 - RNA, 19 nt, Homo sapiens
  misc_RNA (1)...(19): siRNA sense strand
ggcuaacucuuaugugauc

SEQ ID NO: 2029898 - RNA, 19 nt, Homo sapiens
  misc_RNA (1)...(19): siRNA sense strand
gugggcaacugcugguuug

SEQ ID NO: 2029899 - RNA, 19 nt, Homo sapiens
  misc_RNA (1)...(19): siRNA sense strand
cacaguacaucuucgaagu

SEQ ID NO: 2029900 - RNA, 19 nt, Homo sapiens
  misc_RNA (1)...(19): siRNA sense strand
ccuaugaggaccagaacua

SEQ ID NO: 2029901 - RNA, 19 nt, Homo sapiens
  misc_RNA (1)...(19): siRNA sense strand
ucaacaaccagcucaucua

SEQ ID NO: 2029902 - RNA, 19 nt, Homo sapiens
  misc_RNA (1)...(19): siRNA sense strand
gcuuugacaucuacaaggu

SEQ ID NO: 2029903 - RNA, 19 nt, Homo sapiens
  misc_RNA (1)...(19): siRNA sense strand
ugacgacucacucuacuau

SEQ ID NO: 2029904 - RNA, 19 nt, Homo sapiens
  misc_RNA (1)...(19): siRNA sense strand
guacuucacggacaucauc

SEQ ID NO: 2029905 - RNA, 19 nt, Homo sapiens
  misc_RNA (1)...(19): siRNA sense strand
cagcagcaccucccucaug

SEQ ID NO: 2029906 - RNA, 19 nt, Homo sapiens
  misc_RNA (1)...(19): siRNA sense strand
gcaccuccacaccagagua

SEQ ID NO: 2029907 - RNA, 19 nt, Homo sapiens
  misc_RNA (1)...(19): siRNA sense strand
gagaaggccuaugccaaac

SEQ ID NO: 2029908 - RNA, 19 nt, Homo sapiens
  misc_RNA (1)...(19): siRNA sense strand
caccugagcauccacaaga

SEQ ID NO: 2029909 - RNA, 19 nt, Homo sapiens
  misc_RNA (1)...(19): siRNA sense strand
caacaaccagcucaucuac

SEQ ID NO: 2029910 - RNA, 19 nt, Homo sapiens
  misc_RNA (1)...(19): siRNA sense strand
ccauuggcuuugacaucua

SEQ ID NO: 2029911 - RNA, 19 nt, Homo sapiens
  misc_RNA (1)...(19): siRNA sense strand
gaagccagaagaugaaguc

SEQ ID NO: 2029912 - RNA, 19 nt, Homo sapiens
  misc_RNA (1)...(19): siRNA sense strand
caguacaucuucgaaguca

SEQ ID NO: 2029913 - RNA, 19 nt, Homo sapiens
  misc_RNA (1)...(19): siRNA sense strand
gguaaagggccacgcauac

SEQ ID NO: 2029914 - RNA, 19 nt, Homo sapiens
  misc_RNA (1)...(19): siRNA sense strand
cagacgcacugguggacuu

SEQ ID NO: 2029915 - RNA, 19 nt, Homo sapiens
  misc_RNA (1)...(19): siRNA sense strand
acaccagaguacaauguga

SEQ ID NO: 2029916 - RNA, 19 nt, Homo sapiens
  misc_RNA (1)...(19): siRNA sense strand
ggggcuaacucuuauguga

SEQ ID NO: 2029917 - RNA, 19 nt, Homo sapiens
  misc_RNA (1)...(19): siRNA sense strand
gcagaaagugagcaagagu

SEQ ID NO: 2029918 - RNA, 19 nt, Homo sapiens
  misc_RNA (1)...(19): siRNA sense strand
gaggaguggcagaaaguga

SEQ ID NO: 2029919 - RNA, 19 nt, Homo sapiens
  misc_RNA (1)...(19): siRNA sense strand
guacaucuucgaagucaag

SEQ ID NO: 2029920 - RNA, 19 nt, Homo sapiens
  misc_RNA (1)...(19): siRNA sense strand
caagugugagggagacaaa

SEQ ID NO: 2029921 - RNA, 19 nt, Homo sapiens
  misc_RNA (1)...(19): siRNA sense strand
ccacugacgacucacucua

SEQ ID NO: 2029922 - RNA, 19 nt, Homo sapiens
  misc_RNA (1)...(19): siRNA sense strand
agaaagugagcaagaguga

SEQ ID NO: 2029923 - RNA, 19 nt, Homo sapiens
  misc_RNA (1)...(19): siRNA sense strand
ucacugaugugcgcaaggu

SEQ ID NO: 2029924 - RNA, 19 nt, Homo sapiens
  misc_RNA (1)...(19): siRNA sense strand
agagugagcgggagaagau

SEQ ID NO: 2029925 - RNA, 19 nt, Homo sapiens
  misc_RNA (1)...(19): siRNA sense strand
gagccagcccaucacugua

SEQ ID NO: 2029926 - RNA, 19 nt, Homo sapiens
  misc_RNA (1)...(19): siRNA sense strand
ccagcuccaucuacaucaa

SEQ ID NO: 2029927 - RNA, 19 nt, Homo sapiens
  misc_RNA (1)...(19): siRNA sense strand
gggagucgcuguggcaaaa

SEQ ID NO: 2029928 - RNA, 19 nt, Homo sapiens
  misc_RNA (1)...(19): siRNA sense strand
caugaggacccgcgacaga

SEQ ID NO: 2029929 - RNA, 19 nt, Homo sapiens
  misc_RNA (1)...(19): siRNA sense strand
cauacgccgucacugaugu

SEQ ID NO: 2029930 - RNA, 19 nt, Homo sapiens
  misc_RNA (1)...(19): siRNA sense strand
caucagugccuccaucaag

SEQ ID NO: 2029931 - RNA, 19 nt, Homo sapiens
  misc_RNA (1)...(19): siRNA sense strand
ccaaacuggcaggcuguua

SEQ ID NO: 2029932 - RNA, 19 nt, Homo sapiens
  misc_RNA (1)...(19): siRNA sense strand
ccacaccagaguacaaugu

SEQ ID NO: 2029933 - RNA, 19 nt, Homo sapiens
  misc_RNA (1)...(19): siRNA sense strand
ggacgugugccgguacuuc

SEQ ID NO: 2029934 - RNA, 19 nt, Homo sapiens
  misc_RNA (1)...(19): siRNA sense strand
gcauacgccgucacugaug

SEQ ID NO: 2029935 - RNA, 19 nt, Homo sapiens
  misc_RNA (1)...(19): siRNA sense strand
acgaugagacuaagaggaa

SEQ ID NO: 2029936 - RNA, 19 nt, Homo sapiens
  misc_RNA (1)...(19): siRNA sense strand
ggugcgcccuaguggagaa

SEQ ID NO: 2029937 - RNA, 19 nt, Homo sapiens
  misc_RNA (1)...(19): siRNA sense strand
accgagugcugaaggauga

SEQ ID NO: 2029938 - RNA, 19 nt, Homo sapiens
  misc_RNA (1)...(19): siRNA sense strand
ucuuugagcgcauguuaaa

SEQ ID NO: 2029939 - RNA, 19 nt, Homo sapiens
  misc_RNA (1)...(19): siRNA sense strand
ggugggcaacugcugguuu

SEQ ID NO: 2029940 - RNA, 19 nt, Homo sapiens
  misc_RNA (1)...(19): siRNA sense strand
caucuuccacuuccacuuc

SEQ ID NO: 2029941 - RNA, 19 nt, Homo sapiens
  misc_RNA (1)...(19): siRNA sense strand
ucacgggugguguuucuga

SEQ ID NO: 2029942 - RNA, 19 nt, Homo sapiens
  misc_RNA (1)...(19): siRNA sense strand
caaacuggcaggcuguuac

SEQ ID NO: 2029943 - RNA, 19 nt, Homo sapiens
  misc_RNA (1)...(19): siRNA sense strand
gagcugcuggccucaagga

SEQ ID NO: 2029944 - RNA, 19 nt, Homo sapiens
  misc_RNA (1)...(19): siRNA sense strand
ggcagaaagugagcaagag

SEQ ID NO: 2029945 - RNA, 19 nt, Homo sapiens
  misc_RNA (1)...(19): siRNA sense strand
acgcauacgccgucacuga

SEQ ID NO: 2029946 - RNA, 19 nt, Homo sapiens
  misc_RNA (1)...(19): siRNA sense strand
ggaggagaaccgccaguac

SEQ ID NO: 2029947 - RNA, 19 nt, Homo sapiens
  misc_RNA (1)...(19): siRNA sense strand
cuccgagucuucacugaug

SEQ ID NO: 2029948 - RNA, 19 nt, Homo sapiens
  misc_RNA (1)...(19): siRNA sense strand
gcaagagugagcgggagaa

SEQ ID NO: 2029949 - RNA, 19 nt, Homo sapiens
  misc_RNA (1)...(19): siRNA sense strand
uggcagaaagugagcaaga

SEQ ID NO: 2029950 - RNA, 19 nt, Homo sapiens
  misc_RNA (1)...(19): siRNA sense strand
ggaaccaccgagugcugaa

SEQ ID NO: 2029951 - RNA, 19 nt, Homo sapiens
  misc_RNA (1)...(19): siRNA sense strand
ugagccagcccaucacugu

SEQ ID NO: 2029952 - RNA, 19 nt, Homo sapiens
  misc_RNA (1)...(19): siRNA sense strand
caccagaguacaaugugaa

SEQ ID NO: 2029953 - RNA, 19 nt, Homo sapiens
  misc_RNA (1)...(19): siRNA sense strand
uaacucuuaugugaucauc

SEQ ID NO: 2029954 - RNA, 19 nt, Homo sapiens
  misc_RNA (1)...(19): siRNA sense strand
gacgacucacucuacuaua

SEQ ID NO: 2029955 - RNA, 19 nt, Homo sapiens
  misc_RNA (1)...(19): siRNA sense strand
gaagucaagaagccagaag

SEQ ID NO: 2029956 - RNA, 19 nt, Homo sapiens
  misc_RNA (1)...(19): siRNA sense strand
gcggcugcaucaaccacaa

SEQ ID NO: 2029957 - RNA, 19 nt, Homo sapiens
  misc_RNA (1)...(19): siRNA sense strand
ucaagugccgcgugaucaa

SEQ ID NO: 2029958 - RNA, 19 nt, Homo sapiens
  misc_RNA (1)...(19): siRNA sense strand
ggguggacguggucaucga

SEQ ID NO: 2029959 - RNA, 19 nt, Homo sapiens
  misc_RNA (1)...(19): siRNA sense strand
ugguaaagggccacgcaua

SEQ ID NO: 2029960 - RNA, 19 nt, Homo sapiens
  misc_RNA (1)...(19): siRNA sense strand
ucacuguacaggucuggaa

SEQ ID NO: 2029961 - RNA, 19 nt, Homo sapiens
  misc_RNA (1)...(19): siRNA sense strand
caaugugaaaggcaucuuc

SEQ ID NO: 2029962 - RNA, 19 nt, Homo sapiens
  misc_RNA (1)...(19): siRNA sense strand
cagaguacaaugugaaagg

SEQ ID NO: 2029963 - RNA, 19 nt, Homo sapiens
  misc_RNA (1)...(19): siRNA sense strand
gggcuaacucuuaugugau

SEQ ID NO: 2029964 - RNA, 19 nt, Homo sapiens
  misc_RNA (1)...(19): siRNA sense strand
gccgccagcuccaucuaca

SEQ ID NO: 2029965 - RNA, 19 nt, Homo sapiens
  misc_RNA (1)...(19): siRNA sense strand
ggaaugggaccccgaaaag

SEQ ID NO: 2029966 - RNA, 19 nt, Homo sapiens
  misc_RNA (1)...(19): siRNA sense strand
cgacucacucuacuauaag

SEQ ID NO: 2029967 - RNA, 19 nt, Homo sapiens
  misc_RNA (1)...(19): siRNA sense strand
uaaaggcugacccggacaa

SEQ ID NO: 2029968 - RNA, 19 nt, Homo sapiens
  misc_RNA (1)...(19): siRNA sense strand
ggaaaugacuggcaugaau

SEQ ID NO: 2029969 - RNA, 19 nt, Homo sapiens
  misc_RNA (1)...(19): siRNA sense strand
gcaugagccuggacaagua

SEQ ID NO: 2029970 - RNA, 19 nt, Homo sapiens
  misc_RNA (1)...(19): siRNA sense strand
gccaguaccugaaggcuuu

SEQ ID NO: 2029971 - RNA, 19 nt, Homo sapiens
  misc_RNA (1)...(19): siRNA sense strand
gauauggucuuuguacaga

SEQ ID NO: 2029972 - RNA, 19 nt, Homo sapiens
  misc_RNA (1)...(19): siRNA sense strand
gaaccuccuucuucucaug

SEQ ID NO: 2029973 - RNA, 19 nt, Homo sapiens
  misc_RNA (1)...(19): siRNA sense strand
ucugagagcagcauacuua

SEQ ID NO: 2029974 - RNA, 19 nt, Homo sapiens
  misc_RNA (1)...(19): siRNA sense strand
gcuccuugcuaccauagua

SEQ ID NO: 2029975 - RNA, 19 nt, Homo sapiens
  misc_RNA (1)...(19): siRNA sense strand
gaaaugacuggcaugaaug

SEQ ID NO: 2029976 - RNA, 19 nt, Homo sapiens
  misc_RNA (1)...(19): siRNA sense strand
ggagagaggcagucugaga

SEQ ID NO: 2029977 - RNA, 19 nt, Homo sapiens
  misc_RNA (1)...(19): siRNA sense strand
ugagcacucuuuauacuau

SEQ ID NO: 2029978 - RNA, 19 nt, Homo sapiens
  misc_RNA (1)...(19): siRNA sense strand
gcacugcccaggccucauu

SEQ ID NO: 2029979 - RNA, 19 nt, Homo sapiens
  misc_RNA (1)...(19): siRNA sense strand
gagagaggcagucugagaa

SEQ ID NO: 2029980 - RNA, 19 nt, Homo sapiens
  misc_RNA (1)...(19): siRNA sense strand
ggugagcacucuuuauacu

SEQ ID NO: 2029981 - RNA, 19 nt, Homo sapiens
  misc_RNA (1)...(19): siRNA sense strand
gcaggcggaugguugagau

SEQ ID NO: 2029982 - RNA, 19 nt, Homo sapiens
  misc_RNA (1)...(19): siRNA sense strand
gagagcagcauacuuacug

SEQ ID NO: 2029983 - RNA, 19 nt, Homo sapiens
  misc_RNA (1)...(19): siRNA sense strand
gagcacucuuuauacuauu

SEQ ID NO: 2029984 - RNA, 19 nt, Homo sapiens
  misc_RNA (1)...(19): siRNA sense strand
agacuacgcacuccaggua

SEQ ID NO: 2029985 - RNA, 19 nt, Homo sapiens
  misc_RNA (1)...(19): siRNA sense strand
ucugagaacuacccuaaca

SEQ ID NO: 2029986 - RNA, 19 nt, Homo sapiens
  misc_RNA (1)...(19): siRNA sense strand
gcggaugguugagaucuau

SEQ ID NO: 2029987 - RNA, 19 nt, Homo sapiens
  misc_RNA (1)...(19): siRNA sense strand
gcgggaaccuccuucuucu

SEQ ID NO: 2029988 - RNA, 19 nt, Homo sapiens
  misc_RNA (1)...(19): siRNA sense strand
ccacugaggaugccgauuc

SEQ ID NO: 2029989 - RNA, 19 nt, Homo sapiens
  misc_RNA (1)...(19): siRNA sense strand
gccaugaucuucuucuacu

SEQ ID NO: 2029990 - RNA, 19 nt, Homo sapiens
  misc_RNA (1)...(19): siRNA sense strand
acaaguaccuggagaucgu

SEQ ID NO: 2029991 - RNA, 19 nt, Homo sapiens
  misc_RNA (1)...(19): siRNA sense strand
gggaaccuccuucuucuca

SEQ ID NO: 2029992 - RNA, 19 nt, Homo sapiens
  misc_RNA (1)...(19): siRNA sense strand
agaacuacccuaacaagga

SEQ ID NO: 2029993 - RNA, 19 nt, Homo sapiens
  misc_RNA (1)...(19): siRNA sense strand
gcaagauggugagcacucu

SEQ ID NO: 2029994 - RNA, 19 nt, Homo sapiens
  misc_RNA (1)...(19): siRNA sense strand
gaggaaaugacuggcauga

SEQ ID NO: 2029995 - RNA, 19 nt, Homo sapiens
  misc_RNA (1)...(19): siRNA sense strand
ggacaaguaccuggagauc

SEQ ID NO: 2029996 - RNA, 19 nt, Homo sapiens
  misc_RNA (1)...(19): siRNA sense strand
gcaaguauucgggaacugu

SEQ ID NO: 2029997 - RNA, 19 nt, Homo sapiens
  misc_RNA (1)...(19): siRNA sense strand
uguuggaccugcaaguauu

SEQ ID NO: 2029998 - RNA, 19 nt, Homo sapiens
  misc_RNA (1)...(19): siRNA sense strand
gcuguuggaccugcaagua

SEQ ID NO: 2029999 - RNA, 19 nt, Homo sapiens
  misc_RNA (1)...(19): siRNA sense strand
gaggucagccagcaucuag

SEQ ID NO: 2030000 - RNA, 19 nt, Homo sapiens
  misc_RNA (1)...(19): siRNA sense strand
gcccaggccucauuaucca

SEQ ID NO: 2030001 - RNA, 19 nt, Homo sapiens
  misc_RNA (1)...(19): siRNA sense strand
uuauccagcuguucugaga

SEQ ID NO: 2030002 - RNA, 19 nt, Homo sapiens
  misc_RNA (1)...(19): siRNA sense strand
caucuccaaccuucuguuu

SEQ ID NO: 2030003 - RNA, 19 nt, Homo sapiens
  misc_RNA (1)...(19): siRNA sense strand
uggcaugaaugaccuugga

SEQ ID NO: 2030004 - RNA, 19 nt, Homo sapiens
  misc_RNA (1)...(19): siRNA sense strand
gagcaucgccuuccuucac

SEQ ID NO: 2030005 - RNA, 19 nt, Homo sapiens
  misc_RNA (1)...(19): siRNA sense strand
gaggaugccgauucugaga

SEQ ID NO: 2030006 - RNA, 19 nt, Homo sapiens
  misc_RNA (1)...(19): siRNA sense strand
ggcggaugguugagaucua

SEQ ID NO: 2030007 - RNA, 19 nt, Homo sapiens
  misc_RNA (1)...(19): siRNA sense strand
gcacuccagguaacagaga

SEQ ID NO: 2030008 - RNA, 19 nt, Homo sapiens
  misc_RNA (1)...(19): siRNA sense strand
ccguauugguugugucuug

SEQ ID NO: 2030009 - RNA, 19 nt, Homo sapiens
  misc_RNA (1)...(19): siRNA sense strand
ucuccaaccuucuguuucu

SEQ ID NO: 2030010 - RNA, 19 nt, Homo sapiens
  misc_RNA (1)...(19): siRNA sense strand
uagcagcuucuauuacuau

SEQ ID NO: 2030011 - RNA, 19 nt, Homo sapiens
  misc_RNA (1)...(19): siRNA sense strand
auggugagcacucuuuaua

SEQ ID NO: 2030012 - RNA, 19 nt, Homo sapiens
  misc_RNA (1)...(19): siRNA sense strand
ucccugauauggucuuugu

SEQ ID NO: 2030013 - RNA, 19 nt, Homo sapiens
  misc_RNA (1)...(19): siRNA sense strand
gugagcacucuuuauacua

SEQ ID NO: 2030014 - RNA, 19 nt, Homo sapiens
  misc_RNA (1)...(19): siRNA sense strand
ggucuucgggaguuucuug

SEQ ID NO: 2030015 - RNA, 19 nt, Homo sapiens
  misc_RNA (1)...(19): siRNA sense strand
ccaaggguguguggaacug

SEQ ID NO: 2030016 - RNA, 19 nt, Homo sapiens
  misc_RNA (1)...(19): siRNA sense strand
gauggugagcacucuuuau

SEQ ID NO: 2030017 - RNA, 19 nt, Homo sapiens
  misc_RNA (1)...(19): siRNA sense strand
ucauggucuugcuccguua

SEQ ID NO: 2030018 - RNA, 19 nt, Homo sapiens
  misc_RNA (1)...(19): siRNA sense strand
cagcuucuauuacuaugac

SEQ ID NO: 2030019 - RNA, 19 nt, Homo sapiens
  misc_RNA (1)...(19): siRNA sense strand
agucuucuauagccugauu

SEQ ID NO: 2030020 - RNA, 19 nt, Homo sapiens
  misc_RNA (1)...(19): siRNA sense strand
agucugagaacuacccuaa

SEQ ID NO: 2030021 - RNA, 19 nt, Homo sapiens
  misc_RNA (1)...(19): siRNA sense strand
gaggcagucugagaacuac

SEQ ID NO: 2030022 - RNA, 19 nt, Homo sapiens
  misc_RNA (1)...(19): siRNA sense strand
ucagccagcaucuagacua

SEQ ID NO: 2030023 - RNA, 19 nt, Homo sapiens
  misc_RNA (1)...(19): siRNA sense strand
ggaaccuccuucuucucau

SEQ ID NO: 2030024 - RNA, 19 nt, Homo sapiens
  misc_RNA (1)...(19): siRNA sense strand
agaggcagucugagaacua

SEQ ID NO: 2030025 - RNA, 19 nt, Homo sapiens
  misc_RNA (1)...(19): siRNA sense strand
aaaugacuggcaugaauga

SEQ ID NO: 2030026 - RNA, 19 nt, Homo sapiens
  misc_RNA (1)...(19): siRNA sense strand
cauacuuacugcccaagag

SEQ ID NO: 2030027 - RNA, 19 nt, Homo sapiens
  misc_RNA (1)...(19): siRNA sense strand
gagaggcagucugagaacu

SEQ ID NO: 2030028 - RNA, 19 nt, Homo sapiens
  misc_RNA (1)...(19): siRNA sense strand
gcagcuucuauuacuauga

SEQ ID NO: 2030029 - RNA, 19 nt, Homo sapiens
  misc_RNA (1)...(19): siRNA sense strand
cugaggaugccgauucuga

SEQ ID NO: 2030030 - RNA, 19 nt, Homo sapiens
  misc_RNA (1)...(19): siRNA sense strand
ugagaacuacccuaacaag

SEQ ID NO: 2030031 - RNA, 19 nt, Homo sapiens
  misc_RNA (1)...(19): siRNA sense strand
cagccagcaucuagacuac

SEQ ID NO: 2030032 - RNA, 19 nt, Homo sapiens
  misc_RNA (1)...(19): siRNA sense strand
cauugggucuucgggaguu

SEQ ID NO: 2030033 - RNA, 19 nt, Homo sapiens
  misc_RNA (1)...(19): siRNA sense strand
uguaugccuucuccaguca

SEQ ID NO: 2030034 - RNA, 19 nt, Homo sapiens
  misc_RNA (1)...(19): siRNA sense strand
gcauacuuacugcccaaga

SEQ ID NO: 2030035 - RNA, 19 nt, Homo sapiens
  misc_RNA (1)...(19): siRNA sense strand
ggccuggcauugggucuuc

SEQ ID NO: 2030036 - RNA, 19 nt, Homo sapiens
  misc_RNA (1)...(19): siRNA sense strand
ucaccuuguuucugcauac

SEQ ID NO: 2030037 - RNA, 19 nt, Homo sapiens
  misc_RNA (1)...(19): siRNA sense strand
gaucagauguggaaauuaa

SEQ ID NO: 2030038 - RNA, 19 nt, Homo sapiens
  misc_RNA (1)...(19): siRNA sense strand
cuaacaagcuguaaagaua

SEQ ID NO: 2030039 - RNA, 19 nt, Homo sapiens
  misc_RNA (1)...(19): siRNA sense strand
gaaaggaaauauuguggaa

SEQ ID NO: 2030040 - RNA, 19 nt, Homo sapiens
  misc_RNA (1)...(19): siRNA sense strand
gaacauauauggacuugca

SEQ ID NO: 2030041 - RNA, 19 nt, Homo sapiens
  misc_RNA (1)...(19): siRNA sense strand
gaauugagcccuugacauu

SEQ ID NO: 2030042 - RNA, 19 nt, Homo sapiens
  misc_RNA (1)...(19): siRNA sense strand
gcaugaaacuuuacccuau

SEQ ID NO: 2030043 - RNA, 19 nt, Homo sapiens
  misc_RNA (1)...(19): siRNA sense strand
ccaacucacuucuuuauug

SEQ ID NO: 2030044 - RNA, 19 nt, Homo sapiens
  misc_RNA (1)...(19): siRNA sense strand
ugaaagagcugaacuugca

SEQ ID NO: 2030045 - RNA, 19 nt, Homo sapiens
  misc_RNA (1)...(19): siRNA sense strand
ggacucagcuucuaucaac

SEQ ID NO: 2030046 - RNA, 19 nt, Homo sapiens
  misc_RNA (1)...(19): siRNA sense strand
gagcugaacuugcacagau

SEQ ID NO: 2030047 - RNA, 19 nt, Homo sapiens
  misc_RNA (1)...(19): siRNA sense strand
gcagaagagaagauuauua

SEQ ID NO: 2030048 - RNA, 19 nt, Homo sapiens
  misc_RNA (1)...(19): siRNA sense strand
guacaaaggagaaccaauu

SEQ ID NO: 2030049 - RNA, 19 nt, Homo sapiens
  misc_RNA (1)...(19): siRNA sense strand
gcgaaaguaugcugaagaa

SEQ ID NO: 2030050 - RNA, 19 nt, Homo sapiens
  misc_RNA (1)...(19): siRNA sense strand
caaauauagugccaaugua

SEQ ID NO: 2030051 - RNA, 19 nt, Homo sapiens
  misc_RNA (1)...(19): siRNA sense strand
uaacggaacucauggaagu

SEQ ID NO: 2030052 - RNA, 19 nt, Homo sapiens
  misc_RNA (1)...(19): siRNA sense strand
ccucaagucuggcacauuu

SEQ ID NO: 2030053 - RNA, 19 nt, Homo sapiens
  misc_RNA (1)...(19): siRNA sense strand
gcugauggauggucugaaa

SEQ ID NO: 2030054 - RNA, 19 nt, Homo sapiens
  misc_RNA (1)...(19): siRNA sense strand
caaacacaguucaaucuga

SEQ ID NO: 2030055 - RNA, 19 nt, Homo sapiens
  misc_RNA (1)...(19): siRNA sense strand
aaaguaugcugaagaaaga

SEQ ID NO: 2030056 - RNA, 19 nt, Homo sapiens
  misc_RNA (1)...(19): siRNA sense strand
uauauggacuugcaacaaa

SEQ ID NO: 2030057 - RNA, 19 nt, Homo sapiens
  misc_RNA (1)...(19): siRNA sense strand
agaaagaaauggugucaau

SEQ ID NO: 2030058 - RNA, 19 nt, Homo sapiens
  misc_RNA (1)...(19): siRNA sense strand
gaaaguaugcugaagaaag

SEQ ID NO: 2030059 - RNA, 19 nt, Homo sapiens
  misc_RNA (1)...(19): siRNA sense strand
aaccuuaccugaaacauuu

SEQ ID NO: 2030060 - RNA, 19 nt, Homo sapiens
  misc_RNA (1)...(19): siRNA sense strand
caauuugggucacagcuaa

SEQ ID NO: 2030061 - RNA, 19 nt, Homo sapiens
  misc_RNA (1)...(19): siRNA sense strand
ggacuucuuccuguuauua

SEQ ID NO: 2030062 - RNA, 19 nt, Homo sapiens
  misc_RNA (1)...(19): siRNA sense strand
aaagaagagucauccguaa

SEQ ID NO: 2030063 - RNA, 19 nt, Homo sapiens
  misc_RNA (1)...(19): siRNA sense strand
cauagaaccagaacauaua

SEQ ID NO: 2030064 - RNA, 19 nt, Homo sapiens
  misc_RNA (1)...(19): siRNA sense strand
ccucauggguugaagaauu

SEQ ID NO: 2030065 - RNA, 19 nt, Homo sapiens
  misc_RNA (1)...(19): siRNA sense strand
gauuccaacucacuucuuu

SEQ ID NO: 2030066 - RNA, 19 nt, Homo sapiens
  misc_RNA (1)...(19): siRNA sense strand
gcauagaaccagaacauau

SEQ ID NO: 2030067 - RNA, 19 nt, Homo sapiens
  misc_RNA (1)...(19): siRNA sense strand
gagaaaagguugaccagaa

SEQ ID NO: 2030068 - RNA, 19 nt, Homo sapiens
  misc_RNA (1)...(19): siRNA sense strand
cagaauauuuacacacuug

SEQ ID NO: 2030069 - RNA, 19 nt, Homo sapiens
  misc_RNA (1)...(19): siRNA sense strand
gcagaggguugaugguaug

SEQ ID NO: 2030070 - RNA, 19 nt, Homo sapiens
  misc_RNA (1)...(19): siRNA sense strand
ccaaagaaguuaaaaguug

SEQ ID NO: 2030071 - RNA, 19 nt, Homo sapiens
  misc_RNA (1)...(19): siRNA sense strand
caacucacuucuuuauugu

SEQ ID NO: 2030072 - RNA, 19 nt, Homo sapiens
  misc_RNA (1)...(19): siRNA sense strand
uaccaggacuuuagaauuc

SEQ ID NO: 2030073 - RNA, 19 nt, Homo sapiens
  misc_RNA (1)...(19): siRNA sense strand
ggcuacagcuuccuaaaga

SEQ ID NO: 2030074 - RNA, 19 nt, Homo sapiens
  misc_RNA (1)...(19): siRNA sense strand
cagcuucuaucaacaaaga

SEQ ID NO: 2030075 - RNA, 19 nt, Homo sapiens
  misc_RNA (1)...(19): siRNA sense strand
caaaaugaaugcuuccuuu

SEQ ID NO: 2030076 - RNA, 19 nt, Homo sapiens
  misc_RNA (1)...(19): siRNA sense strand
gccaaagcaucccaaagaa

SEQ ID NO: 2030077 - RNA, 19 nt, Homo sapiens
  misc_RNA (1)...(19): siRNA sense strand
caaggcaguuguaagaaau

SEQ ID NO: 2030078 - RNA, 19 nt, Homo sapiens
  misc_RNA (1)...(19): siRNA sense strand
ugacaccggcuccuaauaa

SEQ ID NO: 2030079 - RNA, 19 nt, Homo sapiens
  misc_RNA (1)...(19): siRNA sense strand
gacuuuagaauuccucuua

SEQ ID NO: 2030080 - RNA, 19 nt, Homo sapiens
  misc_RNA (1)...(19): siRNA sense strand
uccagaaucucauggcaua

SEQ ID NO: 2030081 - RNA, 19 nt, Homo sapiens
  misc_RNA (1)...(19): siRNA sense strand
gcagugaagucaucaaagc

SEQ ID NO: 2030082 - RNA, 19 nt, Homo sapiens
  misc_RNA (1)...(19): siRNA sense strand
ucauggcucugacaaugua

SEQ ID NO: 2030083 - RNA, 19 nt, Homo sapiens
  misc_RNA (1)...(19): siRNA sense strand
cauugaggcugacaccuuu

SEQ ID NO: 2030084 - RNA, 19 nt, Homo sapiens
  misc_RNA (1)...(19): siRNA sense strand
aaaguacucucgcugguau

SEQ ID NO: 2030085 - RNA, 19 nt, Homo sapiens
  misc_RNA (1)...(19): siRNA sense strand
ggucacagcuaaguaucaa

SEQ ID NO: 2030086 - RNA, 19 nt, Homo sapiens
  misc_RNA (1)...(19): siRNA sense strand
cgucagugguccuguguuu

SEQ ID NO: 2030087 - RNA, 19 nt, Homo sapiens
  misc_RNA (1)...(19): siRNA sense strand
gaagagaagauuauuaagc

SEQ ID NO: 2030088 - RNA, 19 nt, Homo sapiens
  misc_RNA (1)...(19): siRNA sense strand
aaccuuggcugcucaugua

SEQ ID NO: 2030089 - RNA, 19 nt, Homo sapiens
  misc_RNA (1)...(19): siRNA sense strand
gcuaagagugauagaauug

SEQ ID NO: 2030090 - RNA, 19 nt, Homo sapiens
  misc_RNA (1)...(19): siRNA sense strand
gaaccaaaccagcacuuca

SEQ ID NO: 2030091 - RNA, 19 nt, Homo sapiens
  misc_RNA (1)...(19): siRNA sense strand
gcagaauauuuacacacuu

SEQ ID NO: 2030092 - RNA, 19 nt, Homo sapiens
  misc_RNA (1)...(19): siRNA sense strand
cuacaaauauagugccaau

SEQ ID NO: 2030093 - RNA, 19 nt, Homo sapiens
  misc_RNA (1)...(19): siRNA sense strand
guaccaggacuuuagaauu

SEQ ID NO: 2030094 - RNA, 19 nt, Homo sapiens
  misc_RNA (1)...(19): siRNA sense strand
ucauguaacccuucgauuu

SEQ ID NO: 2030095 - RNA, 19 nt, Homo sapiens
  misc_RNA (1)...(19): siRNA sense strand
ggaacucauggaagucuua

SEQ ID NO: 2030096 - RNA, 19 nt, Homo sapiens
  misc_RNA (1)...(19): siRNA sense strand
gaaaccaagcugugccaaa

SEQ ID NO: 2030097 - RNA, 19 nt, Homo sapiens
  misc_RNA (1)...(19): siRNA sense strand
gaagaaagaaaugguguca

SEQ ID NO: 2030098 - RNA, 19 nt, Homo sapiens
  misc_RNA (1)...(19): siRNA sense strand
caugugagagcauuaauga

SEQ ID NO: 2030099 - RNA, 19 nt, Homo sapiens
  misc_RNA (1)...(19): siRNA sense strand
uaccagaguuuucaaguua

SEQ ID NO: 2030100 - RNA, 19 nt, Homo sapiens
  misc_RNA (1)...(19): siRNA sense strand
gaggguugaugguaugguu

SEQ ID NO: 2030101 - RNA, 19 nt, Homo sapiens
  misc_RNA (1)...(19): siRNA sense strand
caaagcaucccaaagaagu

SEQ ID NO: 2030102 - RNA, 19 nt, Homo sapiens
  misc_RNA (1)...(19): siRNA sense strand
aaacacauuugccaaccuu

SEQ ID NO: 2030103 - RNA, 19 nt, Homo sapiens
  misc_RNA (1)...(19): siRNA sense strand
ucacuggacucagcuucua

SEQ ID NO: 2030104 - RNA, 19 nt, Homo sapiens
  misc_RNA (1)...(19): siRNA sense strand
ugacuuugauuaugaugga

SEQ ID NO: 2030105 - RNA, 19 nt, Homo sapiens
  misc_RNA (1)...(19): siRNA sense strand
ccucagaaaggaaauauug

SEQ ID NO: 2030106 - RNA, 19 nt, Homo sapiens
  misc_RNA (1)...(19): siRNA sense strand
caccuuagcuuucauuuug

SEQ ID NO: 2030107 - RNA, 19 nt, Homo sapiens
  misc_RNA (1)...(19): siRNA sense strand
gaaccaugugagagcauua

SEQ ID NO: 2030108 - RNA, 19 nt, Homo sapiens
  misc_RNA (1)...(19): siRNA sense strand
aaaccaagcugugccaaag

SEQ ID NO: 2030109 - RNA, 19 nt, Homo sapiens
  misc_RNA (1)...(19): siRNA sense strand
ccuaagcguuugcacuuug

SEQ ID NO: 2030110 - RNA, 19 nt, Homo sapiens
  misc_RNA (1)...(19): siRNA sense strand
aaagaaauggugucaaugu

SEQ ID NO: 2030111 - RNA, 19 nt, Homo sapiens
  misc_RNA (1)...(19): siRNA sense strand
acaaauauagugccaaugu

SEQ ID NO: 2030112 - RNA, 19 nt, Homo sapiens
  misc_RNA (1)...(19): siRNA sense strand
caugaaacuuuacccuaug

SEQ ID NO: 2030113 - RNA, 19 nt, Homo sapiens
  misc_RNA (1)...(19): siRNA sense strand
gagaacauuugggaacugu

SEQ ID NO: 2030114 - RNA, 19 nt, Homo sapiens
  misc_RNA (1)...(19): siRNA sense strand
guagaagaaccaugugaga

SEQ ID NO: 2030115 - RNA, 19 nt, Homo sapiens
  misc_RNA (1)...(19): siRNA sense strand
gaaagaaauggugucaaug

SEQ ID NO: 2030116 - RNA, 19 nt, Homo sapiens
  misc_RNA (1)...(19): siRNA sense strand
ccuauaccguggacagaaa

SEQ ID NO: 2030117 - RNA, 19 nt, Homo sapiens
  misc_RNA (1)...(19): siRNA sense strand
gaaacuuuacccuauggaa

SEQ ID NO: 2030118 - RNA, 19 nt, Homo sapiens
  misc_RNA (1)...(19): siRNA sense strand
gcauugaaucccucagaaa

SEQ ID NO: 2030119 - RNA, 19 nt, Homo sapiens
  misc_RNA (1)...(19): siRNA sense strand
gaaccucauccuuauuuca

SEQ ID NO: 2030120 - RNA, 19 nt, Homo sapiens
  misc_RNA (1)...(19): siRNA sense strand
caacaccuauaaaguacuc

SEQ ID NO: 2030121 - RNA, 19 nt, Homo sapiens
  misc_RNA (1)...(19): siRNA sense strand
gagccaguuucagacauuu

SEQ ID NO: 2030122 - RNA, 19 nt, Homo sapiens
  misc_RNA (1)...(19): siRNA sense strand
gcuaacaagcuguaaagau

SEQ ID NO: 2030123 - RNA, 19 nt, Homo sapiens
  misc_RNA (1)...(19): siRNA sense strand
cagaacauauauggacuug

SEQ ID NO: 2030124 - RNA, 19 nt, Homo sapiens
  misc_RNA (1)...(19): siRNA sense strand
acacauuugccaaccuuua

SEQ ID NO: 2030125 - RNA, 19 nt, Homo sapiens
  misc_RNA (1)...(19): siRNA sense strand
cuagacaccuuagcuuuca

SEQ ID NO: 2030126 - RNA, 19 nt, Homo sapiens
  misc_RNA (1)...(19): siRNA sense strand
ucacuucuuuauugugcua

SEQ ID NO: 2030127 - RNA, 19 nt, Homo sapiens
  misc_RNA (1)...(19): siRNA sense strand
caaguuauauggcgcuacu

SEQ ID NO: 2030128 - RNA, 19 nt, Homo sapiens
  misc_RNA (1)...(19): siRNA sense strand
aacaccaucugucuucuuu

SEQ ID NO: 2030129 - RNA, 19 nt, Homo sapiens
  misc_RNA (1)...(19): siRNA sense strand
gaaaacaccaucugucuuc

SEQ ID NO: 2030130 - RNA, 19 nt, Homo sapiens
  misc_RNA (1)...(19): siRNA sense strand
ccuaauaacggaacucaug

SEQ ID NO: 2030131 - RNA, 19 nt, Homo sapiens
  misc_RNA (1)...(19): siRNA sense strand
gcauugaggcugacaccuu

SEQ ID NO: 2030132 - RNA, 19 nt, Homo sapiens
  misc_RNA (1)...(19): siRNA sense strand
ucaguaccauuugaagaaa

SEQ ID NO: 2030133 - RNA, 19 nt, Homo sapiens
  misc_RNA (1)...(19): siRNA sense strand
gccugaaccucauccuuau

SEQ ID NO: 2030134 - RNA, 19 nt, Homo sapiens
  misc_RNA (1)...(19): siRNA sense strand
cgccaaagcaucccaaaga

SEQ ID NO: 2030135 - RNA, 19 nt, Homo sapiens
  misc_RNA (1)...(19): siRNA sense strand
aaggaaauauuguggaagu

SEQ ID NO: 2030136 - RNA, 19 nt, Homo sapiens
  misc_RNA (1)...(19): siRNA sense strand
gacccucaguggcaacuug

SEQ ID NO: 2030137 - RNA, 19 nt, Homo sapiens
  misc_RNA (1)...(19): siRNA sense strand
gacaagcucucaaugaaau

SEQ ID NO: 2030138 - RNA, 19 nt, Homo sapiens
  misc_RNA (1)...(19): siRNA sense strand
guuaaaggcuauugaacaa

SEQ ID NO: 2030139 - RNA, 19 nt, Homo sapiens
  misc_RNA (1)...(19): siRNA sense strand
gaaaugaucaacaacauag

SEQ ID NO: 2030140 - RNA, 19 nt, Homo sapiens
  misc_RNA (1)...(19): siRNA sense strand
gaaccggacuucaguggau

SEQ ID NO: 2030141 - RNA, 19 nt, Homo sapiens
  misc_RNA (1)...(19): siRNA sense strand
caucuucacuuccgacauu

SEQ ID NO: 2030142 - RNA, 19 nt, Homo sapiens
  misc_RNA (1)...(19): siRNA sense strand
aagaagagcuugaagaucu

SEQ ID NO: 2030143 - RNA, 19 nt, Homo sapiens
  misc_RNA (1)...(19): siRNA sense strand
ggaauuauccuagcaacaa

SEQ ID NO: 2030144 - RNA, 19 nt, Homo sapiens
  misc_RNA (1)...(19): siRNA sense strand
uagacaagcucucaaugaa

SEQ ID NO: 2030145 - RNA, 19 nt, Homo sapiens
  misc_RNA (1)...(19): siRNA sense strand
uugaagaucugaacaaaga

SEQ ID NO: 2030146 - RNA, 19 nt, Homo sapiens
  misc_RNA (1)...(19): siRNA sense strand
gagauuagaaacaguauug

SEQ ID NO: 2030147 - RNA, 19 nt, Homo sapiens
  misc_RNA (1)...(19): siRNA sense strand
gaaaucgagucacgucaca

SEQ ID NO: 2030148 - RNA, 19 nt, Homo sapiens
  misc_RNA (1)...(19): siRNA sense strand
gaagaucugaacaaagaaa

SEQ ID NO: 2030149 - RNA, 19 nt, Homo sapiens
  misc_RNA (1)...(19): siRNA sense strand
caagaaaacugcgaauaaa

SEQ ID NO: 2030150 - RNA, 19 nt, Homo sapiens
  misc_RNA (1)...(19): siRNA sense strand
agaacacgcuaaagaagaa

SEQ ID NO: 2030151 - RNA, 19 nt, Homo sapiens
  misc_RNA (1)...(19): siRNA sense strand
gaucaacaacauagaaaga

SEQ ID NO: 2030152 - RNA, 19 nt, Homo sapiens
  misc_RNA (1)...(19): siRNA sense strand
uaaaggcuauugaacaaag

SEQ ID NO: 2030153 - RNA, 19 nt, Homo sapiens
  misc_RNA (1)...(19): siRNA sense strand
gaaugaugauggagacaca

SEQ ID NO: 2030154 - RNA, 19 nt, Homo sapiens
  misc_RNA (1)...(19): siRNA sense strand
gcuugaagaucugaacaaa

SEQ ID NO: 2030155 - RNA, 19 nt, Homo sapiens
  misc_RNA (1)...(19): siRNA sense strand
gagcaaggcaagaaggaaa

SEQ ID NO: 2030156 - RNA, 19 nt, Homo sapiens
  misc_RNA (1)...(19): siRNA sense strand
gaggagauuagaaacagua

SEQ ID NO: 2030157 - RNA, 19 nt, Homo sapiens
  misc_RNA (1)...(19): siRNA sense strand
caaguuaaaggcuauugaa

SEQ ID NO: 2030158 - RNA, 19 nt, Homo sapiens
  misc_RNA (1)...(19): siRNA sense strand
gaaugccacagacuaugua

SEQ ID NO: 2030159 - RNA, 19 nt, Homo sapiens
  misc_RNA (1)...(19): siRNA sense strand
gugaaaugaucaacaacau

SEQ ID NO: 2030160 - RNA, 19 nt, Homo sapiens
  misc_RNA (1)...(19): siRNA sense strand
gcaccaaacccggaaggaa

SEQ ID NO: 2030161 - RNA, 19 nt, Homo sapiens
  misc_RNA (1)...(19): siRNA sense strand
uggaagccauggcggagua

SEQ ID NO: 2030162 - RNA, 19 nt, Homo sapiens
  misc_RNA (1)...(19): siRNA sense strand
gaucugaacaaagaaauca

SEQ ID NO: 2030163 - RNA, 19 nt, Homo sapiens
  misc_RNA (1)...(19): siRNA sense strand
caccaaacccggaaggaaa

SEQ ID NO: 2030164 - RNA, 19 nt, Homo sapiens
  misc_RNA (1)...(19): siRNA sense strand
cuagacaagcucucaauga

SEQ ID NO: 2030165 - RNA, 19 nt, Homo sapiens
  misc_RNA (1)...(19): siRNA sense strand
cuugugauccuuggaauua

SEQ ID NO: 2030166 - RNA, 19 nt, Homo sapiens
  misc_RNA (1)...(19): siRNA sense strand
gagaguugcaugagauguu

SEQ ID NO: 2030167 - RNA, 19 nt, Homo sapiens
  misc_RNA (1)...(19): siRNA sense strand
aaccacagcaucauucuuu

SEQ ID NO: 2030168 - RNA, 19 nt, Homo sapiens
  misc_RNA (1)...(19): siRNA sense strand
ggugcugucucggaaguuu

SEQ ID NO: 2030169 - RNA, 19 nt, Homo sapiens
  misc_RNA (1)...(19): siRNA sense strand
gaugauggagacacaguug

SEQ ID NO: 2030170 - RNA, 19 nt, Homo sapiens
  misc_RNA (1)...(19): siRNA sense strand
ucaagaaaacugcgaauaa

SEQ ID NO: 2030171 - RNA, 19 nt, Homo sapiens
  misc_RNA (1)...(19): siRNA sense strand
gaauuauccuagcaacaac

SEQ ID NO: 2030172 - RNA, 19 nt, Homo sapiens
  misc_RNA (1)...(19): siRNA sense strand
uaggaagaaugaugaugga

SEQ ID NO: 2030173 - RNA, 19 nt, Homo sapiens
  misc_RNA (1)...(19): siRNA sense strand
guaauuguuuugcuuguga

SEQ ID NO: 2030174 - RNA, 19 nt, Homo sapiens
  misc_RNA (1)...(19): siRNA sense strand
ggaggagauuagaaacagu

SEQ ID NO: 2030175 - RNA, 19 nt, Homo sapiens
  misc_RNA (1)...(19): siRNA sense strand
guagaacacgcuaaagaag

SEQ ID NO: 2030176 - RNA, 19 nt, Homo sapiens
  misc_RNA (1)...(19): siRNA sense strand
acaaggacaucaugaagcu

SEQ ID NO: 2030177 - RNA, 19 nt, Homo sapiens
  misc_RNA (1)...(19): siRNA sense strand
agacaagcucucaaugaaa

SEQ ID NO: 2030178 - RNA, 19 nt, Homo sapiens
  misc_RNA (1)...(19): siRNA sense strand
uguagaacacgcuaaagaa

SEQ ID NO: 2030179 - RNA, 19 nt, Homo sapiens
  misc_RNA (1)...(19): siRNA sense strand
uaucagagcaaggcaagaa

SEQ ID NO: 2030180 - RNA, 19 nt, Homo sapiens
  misc_RNA (1)...(19): siRNA sense strand
uagaacacgcuaaagaaga

SEQ ID NO: 2030181 - RNA, 19 nt, Homo sapiens
  misc_RNA (1)...(19): siRNA sense strand
ccacagacgacgagcuaga

SEQ ID NO: 2030182 - RNA, 19 nt, Homo sapiens
  misc_RNA (1)...(19): siRNA sense strand
uauccuagcaacaacauug

SEQ ID NO: 2030183 - RNA, 19 nt, Homo sapiens
  misc_RNA (1)...(19): siRNA sense strand
cuuccgacauuauaucaga

SEQ ID NO: 2030184 - RNA, 19 nt, Homo sapiens
  misc_RNA (1)...(19): siRNA sense strand
uucaguggaucuucggaua

SEQ ID NO: 2030185 - RNA, 19 nt, Homo sapiens
  misc_RNA (1)...(19): siRNA sense strand
ggugaaaugaucaacaaca

SEQ ID NO: 2030186 - RNA, 19 nt, Homo sapiens
  misc_RNA (1)...(19): siRNA sense strand
agggugaaaugaucaacaa

SEQ ID NO: 2030187 - RNA, 19 nt, Homo sapiens
  misc_RNA (1)...(19): siRNA sense strand
caccacagacgacgagcua

SEQ ID NO: 2030188 - RNA, 19 nt, Homo sapiens
  misc_RNA (1)...(19): siRNA sense strand
ccacagacuauguagaaca

SEQ ID NO: 2030189 - RNA, 19 nt, Homo sapiens
  misc_RNA (1)...(19): siRNA sense strand
gaccagcauccgagaguug

SEQ ID NO: 2030190 - RNA, 19 nt, Homo sapiens
  misc_RNA (1)...(19): siRNA sense strand
gcgggaagccauccaucuu

SEQ ID NO: 2030191 - RNA, 19 nt, Homo sapiens
  misc_RNA (1)...(19): siRNA sense strand
gaagagcuugaagaucuga

SEQ ID NO: 2030192 - RNA, 19 nt, Homo sapiens
  misc_RNA (1)...(19): siRNA sense strand
ucacaaggacaucaugaag

SEQ ID NO: 2030193 - RNA, 19 nt, Homo sapiens
  misc_RNA (1)...(19): siRNA sense strand
acaaauuacuagacaagcu

SEQ ID NO: 2030194 - RNA, 19 nt, Homo sapiens
  misc_RNA (1)...(19): siRNA sense strand
ccauggcggaguacaauga

SEQ ID NO: 2030195 - RNA, 19 nt, Homo sapiens
  misc_RNA (1)...(19): siRNA sense strand
ccaaguuaaaggcuauuga

SEQ ID NO: 2030196 - RNA, 19 nt, Homo sapiens
  misc_RNA (1)...(19): siRNA sense strand
gaacacgcuaaagaagaaa

SEQ ID NO: 2030197 - RNA, 19 nt, Homo sapiens
  misc_RNA (1)...(19): siRNA sense strand
ugccacagacuauguagaa

SEQ ID NO: 2030198 - RNA, 19 nt, Homo sapiens
  misc_RNA (1)...(19): siRNA sense strand
gauggagacacaguuguug

SEQ ID NO: 2030199 - RNA, 19 nt, Homo sapiens
  misc_RNA (1)...(19): siRNA sense strand
ggagauuagaaacaguauu

SEQ ID NO: 2030200 - RNA, 19 nt, Homo sapiens
  misc_RNA (1)...(19): siRNA sense strand
ucacaaauuacuagacaag

SEQ ID NO: 2030201 - RNA, 19 nt, Homo sapiens
  misc_RNA (1)...(19): siRNA sense strand
uaaaauucgagccaaguua

SEQ ID NO: 2030202 - RNA, 19 nt, Homo sapiens
  misc_RNA (1)...(19): siRNA sense strand
uaaaagaagagcuugaaga

SEQ ID NO: 2030203 - RNA, 19 nt, Homo sapiens
  misc_RNA (1)...(19): siRNA sense strand
caucagguggaggagauua

SEQ ID NO: 2030204 - RNA, 19 nt, Homo sapiens
  misc_RNA (1)...(19): siRNA sense strand
uaugaaugccacagacuau

SEQ ID NO: 2030205 - RNA, 19 nt, Homo sapiens
  misc_RNA (1)...(19): siRNA sense strand
gagaccagcauccgagagu

SEQ ID NO: 2030206 - RNA, 19 nt, Homo sapiens
  misc_RNA (1)...(19): siRNA sense strand
cuucacuuccgacauuaua

SEQ ID NO: 2030207 - RNA, 19 nt, Homo sapiens
  misc_RNA (1)...(19): siRNA sense strand
auacgaagaacccagcauu

SEQ ID NO: 2030208 - RNA, 19 nt, Homo sapiens
  misc_RNA (1)...(19): siRNA sense strand
ugaaugccacagacuaugu

SEQ ID NO: 2030209 - RNA, 19 nt, Homo sapiens
  misc_RNA (1)...(19): siRNA sense strand
gaccugacggcguguagga

SEQ ID NO: 2030210 - RNA, 19 nt, Homo sapiens
  misc_RNA (1)...(19): siRNA sense strand
acgacgagcuagaagagau

SEQ ID NO: 2030211 - RNA, 19 nt, Homo sapiens
  misc_RNA (1)...(19): siRNA sense strand
gacucagggugaaaugauc

SEQ ID NO: 2030212 - RNA, 19 nt, Homo sapiens
  misc_RNA (1)...(19): siRNA sense strand
ggagacucagggugaaaug

SEQ ID NO: 2030213 - RNA, 19 nt, Homo sapiens
  misc_RNA (1)...(19): siRNA sense strand
cagauucacaaauuacuag

SEQ ID NO: 2030214 - RNA, 19 nt, Homo sapiens
  misc_RNA (1)...(19): siRNA sense strand
gacauuauaucagauucac

SEQ ID NO: 2030215 - RNA, 19 nt, Homo sapiens
  misc_RNA (1)...(19): siRNA sense strand
agaguugcaugagauguuc

SEQ ID NO: 2030216 - RNA, 19 nt, Homo sapiens
  misc_RNA (1)...(19): siRNA sense strand
cuauguagaacacgcuaaa

SEQ ID NO: 2030217 - RNA, 19 nt, Homo sapiens
  misc_RNA (1)...(19): siRNA sense strand
gagacucagggugaaauga

SEQ ID NO: 2030218 - RNA, 19 nt, Homo sapiens
  misc_RNA (1)...(19): siRNA sense strand
agccauccaucuucacuuc

SEQ ID NO: 2030219 - RNA, 19 nt, Homo sapiens
  misc_RNA (1)...(19): siRNA sense strand
ugauggagacacaguuguu

SEQ ID NO: 2030220 - RNA, 19 nt, Homo sapiens
  misc_RNA (1)...(19): siRNA sense strand
agaagagcuugaagaucug

SEQ ID NO: 2030221 - RNA, 19 nt, Homo sapiens
  misc_RNA (1)...(19): siRNA sense strand
cgacauuauaucagauuca

SEQ ID NO: 2030222 - RNA, 19 nt, Homo sapiens
  misc_RNA (1)...(19): siRNA sense strand
uggaggagauuagaaacag

SEQ ID NO: 2030223 - RNA, 19 nt, Homo sapiens
  misc_RNA (1)...(19): siRNA sense strand
cguguaggaagaaugauga

SEQ ID NO: 2030224 - RNA, 19 nt, Homo sapiens
  misc_RNA (1)...(19): siRNA sense strand
cggcguguaggaagaauga

SEQ ID NO: 2030225 - RNA, 19 nt, Homo sapiens
  misc_RNA (1)...(19): siRNA sense strand
acaaugaggcacagacucu

SEQ ID NO: 2030226 - RNA, 19 nt, Homo sapiens
  misc_RNA (1)...(19): siRNA sense strand
uuaugaaugccacagacua

SEQ ID NO: 2030227 - RNA, 19 nt, Homo sapiens
  misc_RNA (1)...(19): siRNA sense strand
uccgagaguugcaugagau

SEQ ID NO: 2030228 - RNA, 19 nt, Homo sapiens
  misc_RNA (1)...(19): siRNA sense strand
gagauaacugggagaacca

SEQ ID NO: 2030229 - RNA, 19 nt, Homo sapiens
  misc_RNA (1)...(19): siRNA sense strand
gauccuuggaauuauccua

SEQ ID NO: 2030230 - RNA, 19 nt, Homo sapiens
  misc_RNA (1)...(19): siRNA sense strand
ugugauccuuggaauuauc

SEQ ID NO: 2030231 - RNA, 19 nt, Homo sapiens
  misc_RNA (1)...(19): siRNA sense strand
caguuguugugguugagaa

SEQ ID NO: 2030232 - RNA, 19 nt, Homo sapiens
  misc_RNA (1)...(19): siRNA sense strand
gacaagcucucaaugaaau

SEQ ID NO: 2030233 - RNA, 19 nt, Homo sapiens
  misc_RNA (1)...(19): siRNA sense strand
guuaaaggcuauugaacaa

SEQ ID NO: 2030234 - RNA, 19 nt, Homo sapiens
  misc_RNA (1)...(19): siRNA sense strand
gaaaugaucaacaacauag

SEQ ID NO: 2030235 - RNA, 19 nt, Homo sapiens
  misc_RNA (1)...(19): siRNA sense strand
gaaccggacuucaguggau

SEQ ID NO: 2030236 - RNA, 19 nt, Homo sapiens
  misc_RNA (1)...(19): siRNA sense strand
caucuucacuuccgacauu

SEQ ID NO: 2030237 - RNA, 19 nt, Homo sapiens
  misc_RNA (1)...(19): siRNA sense strand
aagaagagcuugaagaucu

SEQ ID NO: 2030238 - RNA, 19 nt, Homo sapiens
  misc_RNA (1)...(19): siRNA sense strand
uagacaagcucucaaugaa

SEQ ID NO: 2030239 - RNA, 19 nt, Homo sapiens
  misc_RNA (1)...(19): siRNA sense strand
uugaagaucugaacaaaga

SEQ ID NO: 2030240 - RNA, 19 nt, Homo sapiens
  misc_RNA (1)...(19): siRNA sense strand
gagauuagaaacaguauug

SEQ ID NO: 2030241 - RNA, 19 nt, Homo sapiens
  misc_RNA (1)...(19): siRNA sense strand
gaaaucgagucacgucaca

SEQ ID NO: 2030242 - RNA, 19 nt, Homo sapiens
  misc_RNA (1)...(19): siRNA sense strand
gaagaucugaacaaagaaa

SEQ ID NO: 2030243 - RNA, 19 nt, Homo sapiens
  misc_RNA (1)...(19): siRNA sense strand
caagaaaacugcgaauaaa

SEQ ID NO: 2030244 - RNA, 19 nt, Homo sapiens
  misc_RNA (1)...(19): siRNA sense strand
agaacacgcuaaagaagaa

SEQ ID NO: 2030245 - RNA, 19 nt, Homo sapiens
  misc_RNA (1)...(19): siRNA sense strand
gaucaacaacauagaaaga

SEQ ID NO: 2030246 - RNA, 19 nt, Homo sapiens
  misc_RNA (1)...(19): siRNA sense strand
uaaaggcuauugaacaaag

SEQ ID NO: 2030247 - RNA, 19 nt, Homo sapiens
  misc_RNA (1)...(19): siRNA sense strand
gaaugaugauggagacaca

SEQ ID NO: 2030248 - RNA, 19 nt, Homo sapiens
  misc_RNA (1)...(19): siRNA sense strand
gcuugaagaucugaacaaa

SEQ ID NO: 2030249 - RNA, 19 nt, Homo sapiens
  misc_RNA (1)...(19): siRNA sense strand
gagcaaggcaagaaggaaa

SEQ ID NO: 2030250 - RNA, 19 nt, Homo sapiens
  misc_RNA (1)...(19): siRNA sense strand
gaggagauuagaaacagua

SEQ ID NO: 2030251 - RNA, 19 nt, Homo sapiens
  misc_RNA (1)...(19): siRNA sense strand
caaguuaaaggcuauugaa

SEQ ID NO: 2030252 - RNA, 19 nt, Homo sapiens
  misc_RNA (1)...(19): siRNA sense strand
gaaugccacagacuaugua

SEQ ID NO: 2030253 - RNA, 19 nt, Homo sapiens
  misc_RNA (1)...(19): siRNA sense strand
gugaaaugaucaacaacau

SEQ ID NO: 2030254 - RNA, 19 nt, Homo sapiens
  misc_RNA (1)...(19): siRNA sense strand
gcaccaaacccggaaggaa

SEQ ID NO: 2030255 - RNA, 19 nt, Homo sapiens
  misc_RNA (1)...(19): siRNA sense strand
uggaagccauggcggagua

SEQ ID NO: 2030256 - RNA, 19 nt, Homo sapiens
  misc_RNA (1)...(19): siRNA sense strand
gaucugaacaaagaaauca

SEQ ID NO: 2030257 - RNA, 19 nt, Homo sapiens
  misc_RNA (1)...(19): siRNA sense strand
caccaaacccggaaggaaa

SEQ ID NO: 2030258 - RNA, 19 nt, Homo sapiens
  misc_RNA (1)...(19): siRNA sense strand
cuagacaagcucucaauga

SEQ ID NO: 2030259 - RNA, 19 nt, Homo sapiens
  misc_RNA (1)...(19): siRNA sense strand
gagaguugcaugagauguu

SEQ ID NO: 2030260 - RNA, 19 nt, Homo sapiens
  misc_RNA (1)...(19): siRNA sense strand
aaccacagcaucauucuuu

SEQ ID NO: 2030261 - RNA, 19 nt, Homo sapiens
  misc_RNA (1)...(19): siRNA sense strand
ggugcugucucggaaguuu

SEQ ID NO: 2030262 - RNA, 19 nt, Homo sapiens
  misc_RNA (1)...(19): siRNA sense strand
gaugauggagacacaguug

SEQ ID NO: 2030263 - RNA, 19 nt, Homo sapiens
  misc_RNA (1)...(19): siRNA sense strand
ucaagaaaacugcgaauaa

SEQ ID NO: 2030264 - RNA, 19 nt, Homo sapiens
  misc_RNA (1)...(19): siRNA sense strand
uaggaagaaugaugaugga

SEQ ID NO: 2030265 - RNA, 19 nt, Homo sapiens
  misc_RNA (1)...(19): siRNA sense strand
ggaggagauuagaaacagu

SEQ ID NO: 2030266 - RNA, 19 nt, Homo sapiens
  misc_RNA (1)...(19): siRNA sense strand
guagaacacgcuaaagaag

SEQ ID NO: 2030267 - RNA, 19 nt, Homo sapiens
  misc_RNA (1)...(19): siRNA sense strand
acaaggacaucaugaagcu

SEQ ID NO: 2030268 - RNA, 19 nt, Homo sapiens
  misc_RNA (1)...(19): siRNA sense strand
agacaagcucucaaugaaa

SEQ ID NO: 2030269 - RNA, 19 nt, Homo sapiens
  misc_RNA (1)...(19): siRNA sense strand
uguagaacacgcuaaagaa

SEQ ID NO: 2030270 - RNA, 19 nt, Homo sapiens
  misc_RNA (1)...(19): siRNA sense strand
uaucagagcaaggcaagaa

SEQ ID NO: 2030271 - RNA, 19 nt, Homo sapiens
  misc_RNA (1)...(19): siRNA sense strand
uagaacacgcuaaagaaga

SEQ ID NO: 2030272 - RNA, 19 nt, Homo sapiens
  misc_RNA (1)...(19): siRNA sense strand
ccacagacgacgagcuaga

SEQ ID NO: 2030273 - RNA, 19 nt, Homo sapiens
  misc_RNA (1)...(19): siRNA sense strand
cuuccgacauuauaucaga

SEQ ID NO: 2030274 - RNA, 19 nt, Homo sapiens
  misc_RNA (1)...(19): siRNA sense strand
uucaguggaucuucggaua

SEQ ID NO: 2030275 - RNA, 19 nt, Homo sapiens
  misc_RNA (1)...(19): siRNA sense strand
ggugaaaugaucaacaaca

SEQ ID NO: 2030276 - RNA, 19 nt, Homo sapiens
  misc_RNA (1)...(19): siRNA sense strand
agggugaaaugaucaacaa

SEQ ID NO: 2030277 - RNA, 19 nt, Homo sapiens
  misc_RNA (1)...(19): siRNA sense strand
caccacagacgacgagcua

SEQ ID NO: 2030278 - RNA, 19 nt, Homo sapiens
  misc_RNA (1)...(19): siRNA sense strand
ccacagacuauguagaaca

SEQ ID NO: 2030279 - RNA, 19 nt, Homo sapiens
  misc_RNA (1)...(19): siRNA sense strand
gaccagcauccgagaguug

SEQ ID NO: 2030280 - RNA, 19 nt, Homo sapiens
  misc_RNA (1)...(19): siRNA sense strand
gcgggaagccauccaucuu

SEQ ID NO: 2030281 - RNA, 19 nt, Homo sapiens
  misc_RNA (1)...(19): siRNA sense strand
gaagagcuugaagaucuga

SEQ ID NO: 2030282 - RNA, 19 nt, Homo sapiens
  misc_RNA (1)...(19): siRNA sense strand
ucacaaggacaucaugaag

SEQ ID NO: 2030283 - RNA, 19 nt, Homo sapiens
  misc_RNA (1)...(19): siRNA sense strand
acaaauuacuagacaagcu

SEQ ID NO: 2030284 - RNA, 19 nt, Homo sapiens
  misc_RNA (1)...(19): siRNA sense strand
ccauggcggaguacaauga

SEQ ID NO: 2030285 - RNA, 19 nt, Homo sapiens
  misc_RNA (1)...(19): siRNA sense strand
ccaaguuaaaggcuauuga

SEQ ID NO: 2030286 - RNA, 19 nt, Homo sapiens
  misc_RNA (1)...(19): siRNA sense strand
gaacacgcuaaagaagaaa

SEQ ID NO: 2030287 - RNA, 19 nt, Homo sapiens
  misc_RNA (1)...(19): siRNA sense strand
ugccacagacuauguagaa

SEQ ID NO: 2030288 - RNA, 19 nt, Homo sapiens
  misc_RNA (1)...(19): siRNA sense strand
ucacaaauuacuagacaag

SEQ ID NO: 2030289 - RNA, 19 nt, Homo sapiens
  misc_RNA (1)...(19): siRNA sense strand
ggagauuagaaacaguauu

SEQ ID NO: 2030290 - RNA, 19 nt, Homo sapiens
  misc_RNA (1)...(19): siRNA sense strand
gauggagacacaguuguug

SEQ ID NO: 2030291 - RNA, 19 nt, Homo sapiens
  misc_RNA (1)...(19): siRNA sense strand
uaaaauucgagccaaguua

SEQ ID NO: 2030292 - RNA, 19 nt, Homo sapiens
  misc_RNA (1)...(19): siRNA sense strand
uaaaagaagagcuugaaga

SEQ ID NO: 2030293 - RNA, 19 nt, Homo sapiens
  misc_RNA (1)...(19): siRNA sense strand
uaugaaugccacagacuau

SEQ ID NO: 2030294 - RNA, 19 nt, Homo sapiens
  misc_RNA (1)...(19): siRNA sense strand
gagaccagcauccgagagu

SEQ ID NO: 2030295 - RNA, 19 nt, Homo sapiens
  misc_RNA (1)...(19): siRNA sense strand
caucagguggaggagauua

SEQ ID NO: 2030296 - RNA, 19 nt, Homo sapiens
  misc_RNA (1)...(19): siRNA sense strand
cuucacuuccgacauuaua

SEQ ID NO: 2030297 - RNA, 19 nt, Homo sapiens
  misc_RNA (1)...(19): siRNA sense strand
auacgaagaacccagcauu

SEQ ID NO: 2030298 - RNA, 19 nt, Homo sapiens
  misc_RNA (1)...(19): siRNA sense strand
ugaaugccacagacuaugu

SEQ ID NO: 2030299 - RNA, 19 nt, Homo sapiens
  misc_RNA (1)...(19): siRNA sense strand
gaccugacggcguguagga

SEQ ID NO: 2030300 - RNA, 19 nt, Homo sapiens
  misc_RNA (1)...(19): siRNA sense strand
acgacgagcuagaagagau

SEQ ID NO: 2030301 - RNA, 19 nt, Homo sapiens
  misc_RNA (1)...(19): siRNA sense strand
gacucagggugaaaugauc

SEQ ID NO: 2030302 - RNA, 19 nt, Homo sapiens
  misc_RNA (1)...(19): siRNA sense strand
ggagacucagggugaaaug

SEQ ID NO: 2030303 - RNA, 19 nt, Homo sapiens
  misc_RNA (1)...(19): siRNA sense strand
cagauucacaaauuacuag

SEQ ID NO: 2030304 - RNA, 19 nt, Homo sapiens
  misc_RNA (1)...(19): siRNA sense strand
gacauuauaucagauucac

SEQ ID NO: 2030305 - RNA, 19 nt, Homo sapiens
  misc_RNA (1)...(19): siRNA sense strand
agaguugcaugagauguuc

SEQ ID NO: 2030306 - RNA, 19 nt, Homo sapiens
  misc_RNA (1)...(19): siRNA sense strand
cuauguagaacacgcuaaa

SEQ ID NO: 2030307 - RNA, 19 nt, Homo sapiens
  misc_RNA (1)...(19): siRNA sense strand
gagacucagggugaaauga

SEQ ID NO: 2030308 - RNA, 19 nt, Homo sapiens
  misc_RNA (1)...(19): siRNA sense strand
agccauccaucuucacuuc

SEQ ID NO: 2030309 - RNA, 19 nt, Homo sapiens
  misc_RNA (1)...(19): siRNA sense strand
ugauggagacacaguuguu

SEQ ID NO: 2030310 - RNA, 19 nt, Homo sapiens
  misc_RNA (1)...(19): siRNA sense strand
agaagagcuugaagaucug

SEQ ID NO: 2030311 - RNA, 19 nt, Homo sapiens
  misc_RNA (1)...(19): siRNA sense strand
cggcguguaggaagaauga

SEQ ID NO: 2030312 - RNA, 19 nt, Homo sapiens
  misc_RNA (1)...(19): siRNA sense strand
cguguaggaagaaugauga

SEQ ID NO: 2030313 - RNA, 19 nt, Homo sapiens
  misc_RNA (1)...(19): siRNA sense strand
uggaggagauuagaaacag

SEQ ID NO: 2030314 - RNA, 19 nt, Homo sapiens
  misc_RNA (1)...(19): siRNA sense strand
cgacauuauaucagauuca

SEQ ID NO: 2030315 - RNA, 19 nt, Homo sapiens
  misc_RNA (1)...(19): siRNA sense strand
acaaugaggcacagacucu

SEQ ID NO: 2030316 - RNA, 19 nt, Homo sapiens
  misc_RNA (1)...(19): siRNA sense strand
uuaugaaugccacagacua

SEQ ID NO: 2030317 - RNA, 19 nt, Homo sapiens
  misc_RNA (1)...(19): siRNA sense strand
uccgagaguugcaugagau

SEQ ID NO: 2030318 - RNA, 19 nt, Homo sapiens
  misc_RNA (1)...(19): siRNA sense strand
gagauaacugggagaacca

SEQ ID NO: 2030319 - RNA, 19 nt, Homo sapiens
  misc_RNA (1)...(19): siRNA sense strand
caguuguugugguugagaa

SEQ ID NO: 2030320 - RNA, 19 nt, Homo sapiens
  misc_RNA (1)...(19): siRNA sense strand
gaccagaccuucaagauuu

SEQ ID NO: 2030321 - RNA, 19 nt, Homo sapiens
  misc_RNA (1)...(19): siRNA sense strand
gaagcucgaugucccaaua

SEQ ID NO: 2030322 - RNA, 19 nt, Homo sapiens
  misc_RNA (1)...(19): siRNA sense strand
gcaaguauaugcaacaaug

SEQ ID NO: 2030323 - RNA, 19 nt, Homo sapiens
  misc_RNA (1)...(19): siRNA sense strand
gcaaagaccguaucauauu

SEQ ID NO: 2030324 - RNA, 19 nt, Homo sapiens
  misc_RNA (1)...(19): siRNA sense strand
ggagaaagguuaagacuac

SEQ ID NO: 2030325 - RNA, 19 nt, Homo sapiens
  misc_RNA (1)...(19): siRNA sense strand
caaagaccguaucauauuu

SEQ ID NO: 2030326 - RNA, 19 nt, Homo sapiens
  misc_RNA (1)...(19): siRNA sense strand
uacaagagguugcagauuu

SEQ ID NO: 2030327 - RNA, 19 nt, Homo sapiens
  misc_RNA (1)...(19): siRNA sense strand
ccagaaaggagaaagguua

SEQ ID NO: 2030328 - RNA, 19 nt, Homo sapiens
  misc_RNA (1)...(19): siRNA sense strand
caaaggcaauugcagaaug

SEQ ID NO: 2030329 - RNA, 19 nt, Homo sapiens
  misc_RNA (1)...(19): siRNA sense strand
gaggugaucucaaagcaau

SEQ ID NO: 2030330 - RNA, 19 nt, Homo sapiens
  misc_RNA (1)...(19): siRNA sense strand
gcaccugggaugaauauaa

SEQ ID NO: 2030331 - RNA, 19 nt, Homo sapiens
  misc_RNA (1)...(19): siRNA sense strand
gauguagacugcuugacuu

SEQ ID NO: 2030332 - RNA, 19 nt, Homo sapiens
  misc_RNA (1)...(19): siRNA sense strand
ggaccagaccuucaagauu

SEQ ID NO: 2030333 - RNA, 19 nt, Homo sapiens
  misc_RNA (1)...(19): siRNA sense strand
cgagaaugaugagcaagua

SEQ ID NO: 2030334 - RNA, 19 nt, Homo sapiens
  misc_RNA (1)...(19): siRNA sense strand
gaaaggagaaagguuaaga

SEQ ID NO: 2030335 - RNA, 19 nt, Homo sapiens
  misc_RNA (1)...(19): siRNA sense strand
gagcugaacacauugcaaa

SEQ ID NO: 2030336 - RNA, 19 nt, Homo sapiens
  misc_RNA (1)...(19): siRNA sense strand
caccugggaugaauauaaa

SEQ ID NO: 2030337 - RNA, 19 nt, Homo sapiens
  misc_RNA (1)...(19): siRNA sense strand
guagacugcuugacuuuag

SEQ ID NO: 2030338 - RNA, 19 nt, Homo sapiens
  misc_RNA (1)...(19): siRNA sense strand
uagaaacagucccggaauu

SEQ ID NO: 2030339 - RNA, 19 nt, Homo sapiens
  misc_RNA (1)...(19): siRNA sense strand
ccagugagcccuacaauac

SEQ ID NO: 2030340 - RNA, 19 nt, Homo sapiens
  misc_RNA (1)...(19): siRNA sense strand
uugcaaagaccguaucaua

SEQ ID NO: 2030341 - RNA, 19 nt, Homo sapiens
  misc_RNA (1)...(19): siRNA sense strand
gagcaaguauaugcaacaa

SEQ ID NO: 2030342 - RNA, 19 nt, Homo sapiens
  misc_RNA (1)...(19): siRNA sense strand
agaaacagucccggaauua

SEQ ID NO: 2030343 - RNA, 19 nt, Homo sapiens
  misc_RNA (1)...(19): siRNA sense strand
uaaaggaaaggaauccaaa

SEQ ID NO: 2030344 - RNA, 19 nt, Homo sapiens
  misc_RNA (1)...(19): siRNA sense strand
caucuauaauguuggguuu

SEQ ID NO: 2030345 - RNA, 19 nt, Homo sapiens
  misc_RNA (1)...(19): siRNA sense strand
gaucucaaagcaauagaaa

SEQ ID NO: 2030346 - RNA, 19 nt, Homo sapiens
  misc_RNA (1)...(19): siRNA sense strand
gaccguaucauauuuaaag

SEQ ID NO: 2030347 - RNA, 19 nt, Homo sapiens
  misc_RNA (1)...(19): siRNA sense strand
gaaugaugagcaaguauau

SEQ ID NO: 2030348 - RNA, 19 nt, Homo sapiens
  misc_RNA (1)...(19): siRNA sense strand
guugaugggugacacaugu

SEQ ID NO: 2030349 - RNA, 19 nt, Homo sapiens
  misc_RNA (1)...(19): siRNA sense strand
agccugauguuauuucuaa

SEQ ID NO: 2030350 - RNA, 19 nt, Homo sapiens
  misc_RNA (1)...(19): siRNA sense strand
uuaagcuccuugccagaua

SEQ ID NO: 2030351 - RNA, 19 nt, Homo sapiens
  misc_RNA (1)...(19): siRNA sense strand
gaauggaccagaccuucaa

SEQ ID NO: 2030352 - RNA, 19 nt, Homo sapiens
  misc_RNA (1)...(19): siRNA sense strand
uaagcuccuugccagauaa

SEQ ID NO: 2030353 - RNA, 19 nt, Homo sapiens
  misc_RNA (1)...(19): siRNA sense strand
ggaugaauauaaaggaaac

SEQ ID NO: 2030354 - RNA, 19 nt, Homo sapiens
  misc_RNA (1)...(19): siRNA sense strand
agaaugaugagcaaguaua

SEQ ID NO: 2030355 - RNA, 19 nt, Homo sapiens
  misc_RNA (1)...(19): siRNA sense strand
ggugacacauguacaagag

SEQ ID NO: 2030356 - RNA, 19 nt, Homo sapiens
  misc_RNA (1)...(19): siRNA sense strand
cuaccuccauggcuaaaga

SEQ ID NO: 2030357 - RNA, 19 nt, Homo sapiens
  misc_RNA (1)...(19): siRNA sense strand
gagcaccugggaugaauau

SEQ ID NO: 2030358 - RNA, 19 nt, Homo sapiens
  misc_RNA (1)...(19): siRNA sense strand
caauauaugcagccaacaa

SEQ ID NO: 2030359 - RNA, 19 nt, Homo sapiens
  misc_RNA (1)...(19): siRNA sense strand
ccacagccacgaucauguu

SEQ ID NO: 2030360 - RNA, 19 nt, Homo sapiens
  misc_RNA (1)...(19): siRNA sense strand
cagaaaggagaaagguuaa

SEQ ID NO: 2030361 - RNA, 19 nt, Homo sapiens
  misc_RNA (1)...(19): siRNA sense strand
gucccuacguguacugaaa

SEQ ID NO: 2030362 - RNA, 19 nt, Homo sapiens
  misc_RNA (1)...(19): siRNA sense strand
gccagugagcccuacaaua

SEQ ID NO: 2030363 - RNA, 19 nt, Homo sapiens
  misc_RNA (1)...(19): siRNA sense strand
uguuaagacugcaagaaau

SEQ ID NO: 2030364 - RNA, 19 nt, Homo sapiens
  misc_RNA (1)...(19): siRNA sense strand
gaaacaugccaagaagguu

SEQ ID NO: 2030365 - RNA, 19 nt, Homo sapiens
  misc_RNA (1)...(19): siRNA sense strand
cuccauggcuaaagacaga

SEQ ID NO: 2030366 - RNA, 19 nt, Homo sapiens
  misc_RNA (1)...(19): siRNA sense strand
gaucagucccuacguguac

SEQ ID NO: 2030367 - RNA, 19 nt, Homo sapiens
  misc_RNA (1)...(19): siRNA sense strand
gaaacagucccggaauuac

SEQ ID NO: 2030368 - RNA, 19 nt, Homo sapiens
  misc_RNA (1)...(19): siRNA sense strand
guacaagagguugcagauu

SEQ ID NO: 2030369 - RNA, 19 nt, Homo sapiens
  misc_RNA (1)...(19): siRNA sense strand
gggaugaauauaaaggaaa

SEQ ID NO: 2030370 - RNA, 19 nt, Homo sapiens
  misc_RNA (1)...(19): siRNA sense strand
gcucgaugucccaauauug

SEQ ID NO: 2030371 - RNA, 19 nt, Homo sapiens
  misc_RNA (1)...(19): siRNA sense strand
cugcuugacuuuaggacaa

SEQ ID NO: 2030372 - RNA, 19 nt, Homo sapiens
  misc_RNA (1)...(19): siRNA sense strand
aaaggcaauugcagaaugg

SEQ ID NO: 2030373 - RNA, 19 nt, Homo sapiens
  misc_RNA (1)...(19): siRNA sense strand
gaugagcaaguauaugcaa

SEQ ID NO: 2030374 - RNA, 19 nt, Homo sapiens
  misc_RNA (1)...(19): siRNA sense strand
guagaaacagucccggaau

SEQ ID NO: 2030375 - RNA, 19 nt, Homo sapiens
  misc_RNA (1)...(19): siRNA sense strand
gucccggaauuacagagua

SEQ ID NO: 2030376 - RNA, 19 nt, Homo sapiens
  misc_RNA (1)...(19): siRNA sense strand
aaacagucccggaauuaca

SEQ ID NO: 2030377 - RNA, 19 nt, Homo sapiens
  misc_RNA (1)...(19): siRNA sense strand
gcugaacacauugcaaaga

SEQ ID NO: 2030378 - RNA, 19 nt, Homo sapiens
  misc_RNA (1)...(19): siRNA sense strand
gacuuuaggacaauauaug

SEQ ID NO: 2030379 - RNA, 19 nt, Homo sapiens
  misc_RNA (1)...(19): siRNA sense strand
gagaaugaugagcaaguau

SEQ ID NO: 2030380 - RNA, 19 nt, Homo sapiens
  misc_RNA (1)...(19): siRNA sense strand
ucuauaauguuggguuuag

SEQ ID NO: 2030381 - RNA, 19 nt, Homo sapiens
  misc_RNA (1)...(19): siRNA sense strand
gugauccucgggccaauuu

SEQ ID NO: 2030382 - RNA, 19 nt, Homo sapiens
  misc_RNA (1)...(19): siRNA sense strand
ggagcaccugggaugaaua

SEQ ID NO: 2030383 - RNA, 19 nt, Homo sapiens
  misc_RNA (1)...(19): siRNA sense strand
caaguauaugcaacaauga

SEQ ID NO: 2030384 - RNA, 19 nt, Homo sapiens
  misc_RNA (1)...(19): siRNA sense strand
ugaaacaugccaagaaggu

SEQ ID NO: 2030385 - RNA, 19 nt, Homo sapiens
  misc_RNA (1)...(19): siRNA sense strand
guacugaaacaugccaaga

SEQ ID NO: 2030386 - RNA, 19 nt, Homo sapiens
  misc_RNA (1)...(19): siRNA sense strand
ugggaugaauauaaaggaa

SEQ ID NO: 2030387 - RNA, 19 nt, Homo sapiens
  misc_RNA (1)...(19): siRNA sense strand
acaagagguugcagauuuu

SEQ ID NO: 2030388 - RNA, 19 nt, Homo sapiens
  misc_RNA (1)...(19): siRNA sense strand
ggaauuuaaaucuccauac

SEQ ID NO: 2030389 - RNA, 19 nt, Homo sapiens
  misc_RNA (1)...(19): siRNA sense strand
ugucaggauuagaugugua

SEQ ID NO: 2030390 - RNA, 19 nt, Homo sapiens
  misc_RNA (1)...(19): siRNA sense strand
ugcaaagaccguaucauau

SEQ ID NO: 2030391 - RNA, 19 nt, Homo sapiens
  misc_RNA (1)...(19): siRNA sense strand
guuaagacugcaagaaauc

SEQ ID NO: 2030392 - RNA, 19 nt, Homo sapiens
  misc_RNA (1)...(19): siRNA sense strand
cuacguguacugaaacaug

SEQ ID NO: 2030393 - RNA, 19 nt, Homo sapiens
  misc_RNA (1)...(19): siRNA sense strand
aaguugcucugucaggauu

SEQ ID NO: 2030394 - RNA, 19 nt, Homo sapiens
  misc_RNA (1)...(19): siRNA sense strand
acugaaacaugccaagaag

SEQ ID NO: 2030395 - RNA, 19 nt, Homo sapiens
  misc_RNA (1)...(19): siRNA sense strand
ucuaguggcuaaaagaaaa

SEQ ID NO: 2030396 - RNA, 19 nt, Homo sapiens
  misc_RNA (1)...(19): siRNA sense strand
gcgagaaugaugagcaagu

SEQ ID NO: 2030397 - RNA, 19 nt, Homo sapiens
  misc_RNA (1)...(19): siRNA sense strand
gcuugacuuuaggacaaua

SEQ ID NO: 2030398 - RNA, 19 nt, Homo sapiens
  misc_RNA (1)...(19): siRNA sense strand
agacuaccuccauggcuaa

SEQ ID NO: 2030399 - RNA, 19 nt, Homo sapiens
  misc_RNA (1)...(19): siRNA sense strand
gcccuacaauacugcaaag

SEQ ID NO: 2030400 - RNA, 19 nt, Homo sapiens
  misc_RNA (1)...(19): siRNA sense strand
cuguuaagacugcaagaaa

SEQ ID NO: 2030401 - RNA, 19 nt, Homo sapiens
  misc_RNA (1)...(19): siRNA sense strand
gcaacaaugaaagcacuuc

SEQ ID NO: 2030402 - RNA, 19 nt, Homo sapiens
  misc_RNA (1)...(19): siRNA sense strand
cagaguaagguucgugauc

SEQ ID NO: 2030403 - RNA, 19 nt, Homo sapiens
  misc_RNA (1)...(19): siRNA sense strand
cugaacacauugcaaagac

SEQ ID NO: 2030404 - RNA, 19 nt, Homo sapiens
  misc_RNA (1)...(19): siRNA sense strand
uguagacugcuugacuuua

SEQ ID NO: 2030405 - RNA, 19 nt, Homo sapiens
  misc_RNA (1)...(19): siRNA sense strand
guauaugcaacaaugaaag

SEQ ID NO: 2030406 - RNA, 19 nt, Homo sapiens
  misc_RNA (1)...(19): siRNA sense strand
aggauuagauguguaugca

SEQ ID NO: 2030407 - RNA, 19 nt, Homo sapiens
  misc_RNA (1)...(19): siRNA sense strand
uuaaaggaaaggaauccaa

SEQ ID NO: 2030408 - RNA, 19 nt, Homo sapiens
  misc_RNA (1)...(19): siRNA sense strand
ccggguauuugggagauau

SEQ ID NO: 2030409 - RNA, 19 nt, Homo sapiens
  misc_RNA (1)...(19): siRNA sense strand
ucgaggugaucucaaagca

SEQ ID NO: 2030410 - RNA, 19 nt, Homo sapiens
  misc_RNA (1)...(19): siRNA sense strand
gggucuggauuauguuguc

SEQ ID NO: 2030411 - RNA, 19 nt, Homo sapiens
  misc_RNA (1)...(19): siRNA sense strand
gaccagaccuucaagauuu

SEQ ID NO: 2030412 - RNA, 19 nt, Homo sapiens
  misc_RNA (1)...(19): siRNA sense strand
gaagcucgaugucccaaua

SEQ ID NO: 2030413 - RNA, 19 nt, Homo sapiens
  misc_RNA (1)...(19): siRNA sense strand
gcaaguauaugcaacaaug

SEQ ID NO: 2030414 - RNA, 19 nt, Homo sapiens
  misc_RNA (1)...(19): siRNA sense strand
gcaaagaccguaucauauu

SEQ ID NO: 2030415 - RNA, 19 nt, Homo sapiens
  misc_RNA (1)...(19): siRNA sense strand
ggagaaagguuaagacuac

SEQ ID NO: 2030416 - RNA, 19 nt, Homo sapiens
  misc_RNA (1)...(19): siRNA sense strand
caaagaccguaucauauuu

SEQ ID NO: 2030417 - RNA, 19 nt, Homo sapiens
  misc_RNA (1)...(19): siRNA sense strand
uacaagagguugcagauuu

SEQ ID NO: 2030418 - RNA, 19 nt, Homo sapiens
  misc_RNA (1)...(19): siRNA sense strand
ccagaaaggagaaagguua

SEQ ID NO: 2030419 - RNA, 19 nt, Homo sapiens
  misc_RNA (1)...(19): siRNA sense strand
caaaggcaauugcagaaug

SEQ ID NO: 2030420 - RNA, 19 nt, Homo sapiens
  misc_RNA (1)...(19): siRNA sense strand
gaggugaucucaaagcaau

SEQ ID NO: 2030421 - RNA, 19 nt, Homo sapiens
  misc_RNA (1)...(19): siRNA sense strand
gcaccugggaugaauauaa

SEQ ID NO: 2030422 - RNA, 19 nt, Homo sapiens
  misc_RNA (1)...(19): siRNA sense strand
gauguagacugcuugacuu

SEQ ID NO: 2030423 - RNA, 19 nt, Homo sapiens
  misc_RNA (1)...(19): siRNA sense strand
ggaccagaccuucaagauu

SEQ ID NO: 2030424 - RNA, 19 nt, Homo sapiens
  misc_RNA (1)...(19): siRNA sense strand
cgagaaugaugagcaagua

SEQ ID NO: 2030425 - RNA, 19 nt, Homo sapiens
  misc_RNA (1)...(19): siRNA sense strand
gaaaggagaaagguuaaga

SEQ ID NO: 2030426 - RNA, 19 nt, Homo sapiens
  misc_RNA (1)...(19): siRNA sense strand
gagcugaacacauugcaaa

SEQ ID NO: 2030427 - RNA, 19 nt, Homo sapiens
  misc_RNA (1)...(19): siRNA sense strand
caccugggaugaauauaaa

SEQ ID NO: 2030428 - RNA, 19 nt, Homo sapiens
  misc_RNA (1)...(19): siRNA sense strand
guagacugcuugacuuuag

SEQ ID NO: 2030429 - RNA, 19 nt, Homo sapiens
  misc_RNA (1)...(19): siRNA sense strand
uagaaacagucccggaauu

SEQ ID NO: 2030430 - RNA, 19 nt, Homo sapiens
  misc_RNA (1)...(19): siRNA sense strand
ccagugagcccuacaauac

SEQ ID NO: 2030431 - RNA, 19 nt, Homo sapiens
  misc_RNA (1)...(19): siRNA sense strand
uugcaaagaccguaucaua

SEQ ID NO: 2030432 - RNA, 19 nt, Homo sapiens
  misc_RNA (1)...(19): siRNA sense strand
gagcaaguauaugcaacaa

SEQ ID NO: 2030433 - RNA, 19 nt, Homo sapiens
  misc_RNA (1)...(19): siRNA sense strand
agaaacagucccggaauua

SEQ ID NO: 2030434 - RNA, 19 nt, Homo sapiens
  misc_RNA (1)...(19): siRNA sense strand
uaaaggaaaggaauccaaa

SEQ ID NO: 2030435 - RNA, 19 nt, Homo sapiens
  misc_RNA (1)...(19): siRNA sense strand
caucuauaauguuggguuu

SEQ ID NO: 2030436 - RNA, 19 nt, Homo sapiens
  misc_RNA (1)...(19): siRNA sense strand
gaucucaaagcaauagaaa

SEQ ID NO: 2030437 - RNA, 19 nt, Homo sapiens
  misc_RNA (1)...(19): siRNA sense strand
gaccguaucauauuuaaag

SEQ ID NO: 2030438 - RNA, 19 nt, Homo sapiens
  misc_RNA (1)...(19): siRNA sense strand
gaaugaugagcaaguauau

SEQ ID NO: 2030439 - RNA, 19 nt, Homo sapiens
  misc_RNA (1)...(19): siRNA sense strand
guugaugggugacacaugu

SEQ ID NO: 2030440 - RNA, 19 nt, Homo sapiens
  misc_RNA (1)...(19): siRNA sense strand
agccugauguuauuucuaa

SEQ ID NO: 2030441 - RNA, 19 nt, Homo sapiens
  misc_RNA (1)...(19): siRNA sense strand
uuaagcuccuugccagaua

SEQ ID NO: 2030442 - RNA, 19 nt, Homo sapiens
  misc_RNA (1)...(19): siRNA sense strand
gaauggaccagaccuucaa

SEQ ID NO: 2030443 - RNA, 19 nt, Homo sapiens
  misc_RNA (1)...(19): siRNA sense strand
uaagcuccuugccagauaa

SEQ ID NO: 2030444 - RNA, 19 nt, Homo sapiens
  misc_RNA (1)...(19): siRNA sense strand
ggaugaauauaaaggaaac

SEQ ID NO: 2030445 - RNA, 19 nt, Homo sapiens
  misc_RNA (1)...(19): siRNA sense strand
agaaugaugagcaaguaua

SEQ ID NO: 2030446 - RNA, 19 nt, Homo sapiens
  misc_RNA (1)...(19): siRNA sense strand
ggugacacauguacaagag

SEQ ID NO: 2030447 - RNA, 19 nt, Homo sapiens
  misc_RNA (1)...(19): siRNA sense strand
cuaccuccauggcuaaaga

SEQ ID NO: 2030448 - RNA, 19 nt, Homo sapiens
  misc_RNA (1)...(19): siRNA sense strand
gagcaccugggaugaauau

SEQ ID NO: 2030449 - RNA, 19 nt, Homo sapiens
  misc_RNA (1)...(19): siRNA sense strand
caauauaugcagccaacaa

SEQ ID NO: 2030450 - RNA, 19 nt, Homo sapiens
  misc_RNA (1)...(19): siRNA sense strand
ccacagccacgaucauguu

SEQ ID NO: 2030451 - RNA, 19 nt, Homo sapiens
  misc_RNA (1)...(19): siRNA sense strand
cagaaaggagaaagguuaa

SEQ ID NO: 2030452 - RNA, 19 nt, Homo sapiens
  misc_RNA (1)...(19): siRNA sense strand
gucccuacguguacugaaa

SEQ ID NO: 2030453 - RNA, 19 nt, Homo sapiens
  misc_RNA (1)...(19): siRNA sense strand
gccagugagcccuacaaua

SEQ ID NO: 2030454 - RNA, 19 nt, Homo sapiens
  misc_RNA (1)...(19): siRNA sense strand
uguuaagacugcaagaaau

SEQ ID NO: 2030455 - RNA, 19 nt, Homo sapiens
  misc_RNA (1)...(19): siRNA sense strand
gaaacaugccaagaagguu

SEQ ID NO: 2030456 - RNA, 19 nt, Homo sapiens
  misc_RNA (1)...(19): siRNA sense strand
cuccauggcuaaagacaga

SEQ ID NO: 2030457 - RNA, 19 nt, Homo sapiens
  misc_RNA (1)...(19): siRNA sense strand
gaucagucccuacguguac

SEQ ID NO: 2030458 - RNA, 19 nt, Homo sapiens
  misc_RNA (1)...(19): siRNA sense strand
gaaacagucccggaauuac

SEQ ID NO: 2030459 - RNA, 19 nt, Homo sapiens
  misc_RNA (1)...(19): siRNA sense strand
guacaagagguugcagauu

SEQ ID NO: 2030460 - RNA, 19 nt, Homo sapiens
  misc_RNA (1)...(19): siRNA sense strand
gggaugaauauaaaggaaa

SEQ ID NO: 2030461 - RNA, 19 nt, Homo sapiens
  misc_RNA (1)...(19): siRNA sense strand
gcucgaugucccaauauug

SEQ ID NO: 2030462 - RNA, 19 nt, Homo sapiens
  misc_RNA (1)...(19): siRNA sense strand
cugcuugacuuuaggacaa

SEQ ID NO: 2030463 - RNA, 19 nt, Homo sapiens
  misc_RNA (1)...(19): siRNA sense strand
aaaggcaauugcagaaugg

SEQ ID NO: 2030464 - RNA, 19 nt, Homo sapiens
  misc_RNA (1)...(19): siRNA sense strand
gaugagcaaguauaugcaa

SEQ ID NO: 2030465 - RNA, 19 nt, Homo sapiens
  misc_RNA (1)...(19): siRNA sense strand
guagaaacagucccggaau

SEQ ID NO: 2030466 - RNA, 19 nt, Homo sapiens
  misc_RNA (1)...(19): siRNA sense strand
gucccggaauuacagagua

SEQ ID NO: 2030467 - RNA, 19 nt, Homo sapiens
  misc_RNA (1)...(19): siRNA sense strand
aaacagucccggaauuaca

SEQ ID NO: 2030468 - RNA, 19 nt, Homo sapiens
  misc_RNA (1)...(19): siRNA sense strand
gcugaacacauugcaaaga

SEQ ID NO: 2030469 - RNA, 19 nt, Homo sapiens
  misc_RNA (1)...(19): siRNA sense strand
gacuuuaggacaauauaug

SEQ ID NO: 2030470 - RNA, 19 nt, Homo sapiens
  misc_RNA (1)...(19): siRNA sense strand
gagaaugaugagcaaguau

SEQ ID NO: 2030471 - RNA, 19 nt, Homo sapiens
  misc_RNA (1)...(19): siRNA sense strand
ucuauaauguuggguuuag

SEQ ID NO: 2030472 - RNA, 19 nt, Homo sapiens
  misc_RNA (1)...(19): siRNA sense strand
gugauccucgggccaauuu

SEQ ID NO: 2030473 - RNA, 19 nt, Homo sapiens
  misc_RNA (1)...(19): siRNA sense strand
ggagcaccugggaugaaua

SEQ ID NO: 2030474 - RNA, 19 nt, Homo sapiens
  misc_RNA (1)...(19): siRNA sense strand
caaguauaugcaacaauga

SEQ ID NO: 2030475 - RNA, 19 nt, Homo sapiens
  misc_RNA (1)...(19): siRNA sense strand
ugaaacaugccaagaaggu

SEQ ID NO: 2030476 - RNA, 19 nt, Homo sapiens
  misc_RNA (1)...(19): siRNA sense strand
guacugaaacaugccaaga

SEQ ID NO: 2030477 - RNA, 19 nt, Homo sapiens
  misc_RNA (1)...(19): siRNA sense strand
ugggaugaauauaaaggaa

SEQ ID NO: 2030478 - RNA, 19 nt, Homo sapiens
  misc_RNA (1)...(19): siRNA sense strand
acaagagguugcagauuuu

SEQ ID NO: 2030479 - RNA, 19 nt, Homo sapiens
  misc_RNA (1)...(19): siRNA sense strand
ggaauuuaaaucuccauac

SEQ ID NO: 2030480 - RNA, 19 nt, Homo sapiens
  misc_RNA (1)...(19): siRNA sense strand
ugucaggauuagaugugua

SEQ ID NO: 2030481 - RNA, 19 nt, Homo sapiens
  misc_RNA (1)...(19): siRNA sense strand
ugcaaagaccguaucauau

SEQ ID NO: 2030482 - RNA, 19 nt, Homo sapiens
  misc_RNA (1)...(19): siRNA sense strand
guuaagacugcaagaaauc

SEQ ID NO: 2030483 - RNA, 19 nt, Homo sapiens
  misc_RNA (1)...(19): siRNA sense strand
cuacguguacugaaacaug

SEQ ID NO: 2030484 - RNA, 19 nt, Homo sapiens
  misc_RNA (1)...(19): siRNA sense strand
aaguugcucugucaggauu

SEQ ID NO: 2030485 - RNA, 19 nt, Homo sapiens
  misc_RNA (1)...(19): siRNA sense strand
acugaaacaugccaagaag

SEQ ID NO: 2030486 - RNA, 19 nt, Homo sapiens
  misc_RNA (1)...(19): siRNA sense strand
gcgagaaugaugagcaagu

SEQ ID NO: 2030487 - RNA, 19 nt, Homo sapiens
  misc_RNA (1)...(19): siRNA sense strand
gcuugacuuuaggacaaua

SEQ ID NO: 2030488 - RNA, 19 nt, Homo sapiens
  misc_RNA (1)...(19): siRNA sense strand
agacuaccuccauggcuaa

SEQ ID NO: 2030489 - RNA, 19 nt, Homo sapiens
  misc_RNA (1)...(19): siRNA sense strand
gcccuacaauacugcaaag

SEQ ID NO: 2030490 - RNA, 19 nt, Homo sapiens
  misc_RNA (1)...(19): siRNA sense strand
cuguuaagacugcaagaaa

SEQ ID NO: 2030491 - RNA, 19 nt, Homo sapiens
  misc_RNA (1)...(19): siRNA sense strand
gcaacaaugaaagcacuuc

SEQ ID NO: 2030492 - RNA, 19 nt, Homo sapiens
  misc_RNA (1)...(19): siRNA sense strand
cagaguaagguucgugauc

SEQ ID NO: 2030493 - RNA, 19 nt, Homo sapiens
  misc_RNA (1)...(19): siRNA sense strand
cugaacacauugcaaagac

SEQ ID NO: 2030494 - RNA, 19 nt, Homo sapiens
  misc_RNA (1)...(19): siRNA sense strand
uguagacugcuugacuuua

SEQ ID NO: 2030495 - RNA, 19 nt, Homo sapiens
  misc_RNA (1)...(19): siRNA sense strand
guauaugcaacaaugaaag

SEQ ID NO: 2030496 - RNA, 19 nt, Homo sapiens
  misc_RNA (1)...(19): siRNA sense strand
aggauuagauguguaugca

SEQ ID NO: 2030497 - RNA, 19 nt, Homo sapiens
  misc_RNA (1)...(19): siRNA sense strand
uuaaaggaaaggaauccaa

SEQ ID NO: 2030498 - RNA, 19 nt, Homo sapiens
  misc_RNA (1)...(19): siRNA sense strand
ccggguauuugggagauau

SEQ ID NO: 2030499 - RNA, 19 nt, Homo sapiens
  misc_RNA (1)...(19): siRNA sense strand
ucgaggugaucucaaagca

SEQ ID NO: 2030500 - RNA, 19 nt, Homo sapiens
  misc_RNA (1)...(19): siRNA sense strand
gggucuggauuauguuguc

SEQ ID NO: 2030501 - RNA, 19 nt, Homo sapiens
  misc_RNA (1)...(19): siRNA sense strand
gaccagaccuucaagauuu

SEQ ID NO: 2030502 - RNA, 19 nt, Homo sapiens
  misc_RNA (1)...(19): siRNA sense strand
gaagcucgaugucccaaua

SEQ ID NO: 2030503 - RNA, 19 nt, Homo sapiens
  misc_RNA (1)...(19): siRNA sense strand
gcaaguauaugcaacaaug

SEQ ID NO: 2030504 - RNA, 19 nt, Homo sapiens
  misc_RNA (1)...(19): siRNA sense strand
gcaaagaccguaucauauu

SEQ ID NO: 2030505 - RNA, 19 nt, Homo sapiens
  misc_RNA (1)...(19): siRNA sense strand
ggagaaagguuaagacuac

SEQ ID NO: 2030506 - RNA, 19 nt, Homo sapiens
  misc_RNA (1)...(19): siRNA sense strand
caaagaccguaucauauuu

SEQ ID NO: 2030507 - RNA, 19 nt, Homo sapiens
  misc_RNA (1)...(19): siRNA sense strand
uacaagagguugcagauuu

SEQ ID NO: 2030508 - RNA, 19 nt, Homo sapiens
  misc_RNA (1)...(19): siRNA sense strand
ccagaaaggagaaagguua

SEQ ID NO: 2030509 - RNA, 19 nt, Homo sapiens
  misc_RNA (1)...(19): siRNA sense strand
caaaggcaauugcagaaug

SEQ ID NO: 2030510 - RNA, 19 nt, Homo sapiens
  misc_RNA (1)...(19): siRNA sense strand
gaggugaucucaaagcaau

SEQ ID NO: 2030511 - RNA, 19 nt, Homo sapiens
  misc_RNA (1)...(19): siRNA sense strand
gcaccugggaugaauauaa

SEQ ID NO: 2030512 - RNA, 19 nt, Homo sapiens
  misc_RNA (1)...(19): siRNA sense strand
gauguagacugcuugacuu

SEQ ID NO: 2030513 - RNA, 19 nt, Homo sapiens
  misc_RNA (1)...(19): siRNA sense strand
ggaccagaccuucaagauu

SEQ ID NO: 2030514 - RNA, 19 nt, Homo sapiens
  misc_RNA (1)...(19): siRNA sense strand
cgagaaugaugagcaagua

SEQ ID NO: 2030515 - RNA, 19 nt, Homo sapiens
  misc_RNA (1)...(19): siRNA sense strand
gaaaggagaaagguuaaga

SEQ ID NO: 2030516 - RNA, 19 nt, Homo sapiens
  misc_RNA (1)...(19): siRNA sense strand
gagcugaacacauugcaaa

SEQ ID NO: 2030517 - RNA, 19 nt, Homo sapiens
  misc_RNA (1)...(19): siRNA sense strand
caccugggaugaauauaaa

SEQ ID NO: 2030518 - RNA, 19 nt, Homo sapiens
  misc_RNA (1)...(19): siRNA sense strand
guagacugcuugacuuuag

SEQ ID NO: 2030519 - RNA, 19 nt, Homo sapiens
  misc_RNA (1)...(19): siRNA sense strand
uagaaacagucccggaauu

SEQ ID NO: 2030520 - RNA, 19 nt, Homo sapiens
  misc_RNA (1)...(19): siRNA sense strand
ccagugagcccuacaauac

SEQ ID NO: 2030521 - RNA, 19 nt, Homo sapiens
  misc_RNA (1)...(19): siRNA sense strand
uugcaaagaccguaucaua

SEQ ID NO: 2030522 - RNA, 19 nt, Homo sapiens
  misc_RNA (1)...(19): siRNA sense strand
gagcaaguauaugcaacaa

SEQ ID NO: 2030523 - RNA, 19 nt, Homo sapiens
  misc_RNA (1)...(19): siRNA sense strand
agaaacagucccggaauua

SEQ ID NO: 2030524 - RNA, 19 nt, Homo sapiens
  misc_RNA (1)...(19): siRNA sense strand
uaaaggaaaggaauccaaa

SEQ ID NO: 2030525 - RNA, 19 nt, Homo sapiens
  misc_RNA (1)...(19): siRNA sense strand
caucuauaauguuggguuu

SEQ ID NO: 2030526 - RNA, 19 nt, Homo sapiens
  misc_RNA (1)...(19): siRNA sense strand
gaucucaaagcaauagaaa

SEQ ID NO: 2030527 - RNA, 19 nt, Homo sapiens
  misc_RNA (1)...(19): siRNA sense strand
gaccguaucauauuuaaag

SEQ ID NO: 2030528 - RNA, 19 nt, Homo sapiens
  misc_RNA (1)...(19): siRNA sense strand
gaaugaugagcaaguauau

SEQ ID NO: 2030529 - RNA, 19 nt, Homo sapiens
  misc_RNA (1)...(19): siRNA sense strand
guugaugggugacacaugu

SEQ ID NO: 2030530 - RNA, 19 nt, Homo sapiens
  misc_RNA (1)...(19): siRNA sense strand
agccugauguuauuucuaa

SEQ ID NO: 2030531 - RNA, 19 nt, Homo sapiens
  misc_RNA (1)...(19): siRNA sense strand
uuaagcuccuugccagaua

SEQ ID NO: 2030532 - RNA, 19 nt, Homo sapiens
  misc_RNA (1)...(19): siRNA sense strand
gaauggaccagaccuucaa

SEQ ID NO: 2030533 - RNA, 19 nt, Homo sapiens
  misc_RNA (1)...(19): siRNA sense strand
uaagcuccuugccagauaa

SEQ ID NO: 2030534 - RNA, 19 nt, Homo sapiens
  misc_RNA (1)...(19): siRNA sense strand
ggaugaauauaaaggaaac

SEQ ID NO: 2030535 - RNA, 19 nt, Homo sapiens
  misc_RNA (1)...(19): siRNA sense strand
agaaugaugagcaaguaua

SEQ ID NO: 2030536 - RNA, 19 nt, Homo sapiens
  misc_RNA (1)...(19): siRNA sense strand
ggugacacauguacaagag

SEQ ID NO: 2030537 - RNA, 19 nt, Homo sapiens
  misc_RNA (1)...(19): siRNA sense strand
cuaccuccauggcuaaaga

SEQ ID NO: 2030538 - RNA, 19 nt, Homo sapiens
  misc_RNA (1)...(19): siRNA sense strand
gagcaccugggaugaauau

SEQ ID NO: 2030539 - RNA, 19 nt, Homo sapiens
  misc_RNA (1)...(19): siRNA sense strand
caauauaugcagccaacaa

SEQ ID NO: 2030540 - RNA, 19 nt, Homo sapiens
  misc_RNA (1)...(19): siRNA sense strand
ccacagccacgaucauguu

SEQ ID NO: 2030541 - RNA, 19 nt, Homo sapiens
  misc_RNA (1)...(19): siRNA sense strand
cagaaaggagaaagguuaa

SEQ ID NO: 2030542 - RNA, 19 nt, Homo sapiens
  misc_RNA (1)...(19): siRNA sense strand
gucccuacguguacugaaa

SEQ ID NO: 2030543 - RNA, 19 nt, Homo sapiens
  misc_RNA (1)...(19): siRNA sense strand
gccagugagcccuacaaua

SEQ ID NO: 2030544 - RNA, 19 nt, Homo sapiens
  misc_RNA (1)...(19): siRNA sense strand
uguuaagacugcaagaaau

SEQ ID NO: 2030545 - RNA, 19 nt, Homo sapiens
  misc_RNA (1)...(19): siRNA sense strand
gaaacaugccaagaagguu

SEQ ID NO: 2030546 - RNA, 19 nt, Homo sapiens
  misc_RNA (1)...(19): siRNA sense strand
cuccauggcuaaagacaga

SEQ ID NO: 2030547 - RNA, 19 nt, Homo sapiens
  misc_RNA (1)...(19): siRNA sense strand
gaucagucccuacguguac

SEQ ID NO: 2030548 - RNA, 19 nt, Homo sapiens
  misc_RNA (1)...(19): siRNA sense strand
gaaacagucccggaauuac

SEQ ID NO: 2030549 - RNA, 19 nt, Homo sapiens
  misc_RNA (1)...(19): siRNA sense strand
guacaagagguugcagauu

SEQ ID NO: 2030550 - RNA, 19 nt, Homo sapiens
  misc_RNA (1)...(19): siRNA sense strand
gggaugaauauaaaggaaa

SEQ ID NO: 2030551 - RNA, 19 nt, Homo sapiens
  misc_RNA (1)...(19): siRNA sense strand
gcucgaugucccaauauug

SEQ ID NO: 2030552 - RNA, 19 nt, Homo sapiens
  misc_RNA (1)...(19): siRNA sense strand
cugcuugacuuuaggacaa

SEQ ID NO: 2030553 - RNA, 19 nt, Homo sapiens
  misc_RNA (1)...(19): siRNA sense strand
aaaggcaauugcagaaugg

SEQ ID NO: 2030554 - RNA, 19 nt, Homo sapiens
  misc_RNA (1)...(19): siRNA sense strand
gaugagcaaguauaugcaa

SEQ ID NO: 2030555 - RNA, 19 nt, Homo sapiens
  misc_RNA (1)...(19): siRNA sense strand
guagaaacagucccggaau

SEQ ID NO: 2030556 - RNA, 19 nt, Homo sapiens
  misc_RNA (1)...(19): siRNA sense strand
gucccggaauuacagagua

SEQ ID NO: 2030557 - RNA, 19 nt, Homo sapiens
  misc_RNA (1)...(19): siRNA sense strand
aaacagucccggaauuaca

SEQ ID NO: 2030558 - RNA, 19 nt, Homo sapiens
  misc_RNA (1)...(19): siRNA sense strand
gcugaacacauugcaaaga

SEQ ID NO: 2030559 - RNA, 19 nt, Homo sapiens
  misc_RNA (1)...(19): siRNA sense strand
gacuuuaggacaauauaug

SEQ ID NO: 2030560 - RNA, 19 nt, Homo sapiens
  misc_RNA (1)...(19): siRNA sense strand
gagaaugaugagcaaguau

SEQ ID NO: 2030561 - RNA, 19 nt, Homo sapiens
  misc_RNA (1)...(19): siRNA sense strand
ucuauaauguuggguuuag

SEQ ID NO: 2030562 - RNA, 19 nt, Homo sapiens
  misc_RNA (1)...(19): siRNA sense strand
gugauccucgggccaauuu

SEQ ID NO: 2030563 - RNA, 19 nt, Homo sapiens
  misc_RNA (1)...(19): siRNA sense strand
ggagcaccugggaugaaua

SEQ ID NO: 2030564 - RNA, 19 nt, Homo sapiens
  misc_RNA (1)...(19): siRNA sense strand
caaguauaugcaacaauga

SEQ ID NO: 2030565 - RNA, 19 nt, Homo sapiens
  misc_RNA (1)...(19): siRNA sense strand
ugaaacaugccaagaaggu

SEQ ID NO: 2030566 - RNA, 19 nt, Homo sapiens
  misc_RNA (1)...(19): siRNA sense strand
guacugaaacaugccaaga

SEQ ID NO: 2030567 - RNA, 19 nt, Homo sapiens
  misc_RNA (1)...(19): siRNA sense strand
ugggaugaauauaaaggaa

SEQ ID NO: 2030568 - RNA, 19 nt, Homo sapiens
  misc_RNA (1)...(19): siRNA sense strand
acaagagguugcagauuuu

SEQ ID NO: 2030569 - RNA, 19 nt, Homo sapiens
  misc_RNA (1)...(19): siRNA sense strand
ggaauuuaaaucuccauac

SEQ ID NO: 2030570 - RNA, 19 nt, Homo sapiens
  misc_RNA (1)...(19): siRNA sense strand
ugucaggauuagaugugua

SEQ ID NO: 2030571 - RNA, 19 nt, Homo sapiens
  misc_RNA (1)...(19): siRNA sense strand
ugcaaagaccguaucauau

SEQ ID NO: 2030572 - RNA, 19 nt, Homo sapiens
  misc_RNA (1)...(19): siRNA sense strand
guuaagacugcaagaaauc

SEQ ID NO: 2030573 - RNA, 19 nt, Homo sapiens
  misc_RNA (1)...(19): siRNA sense strand
cuacguguacugaaacaug

SEQ ID NO: 2030574 - RNA, 19 nt, Homo sapiens
  misc_RNA (1)...(19): siRNA sense strand
aaguugcucugucaggauu

SEQ ID NO: 2030575 - RNA, 19 nt, Homo sapiens
  misc_RNA (1)...(19): siRNA sense strand
acugaaacaugccaagaag

SEQ ID NO: 2030576 - RNA, 19 nt, Homo sapiens
  misc_RNA (1)...(19): siRNA sense strand
ucuaguggcuaaaagaaaa

SEQ ID NO: 2030577 - RNA, 19 nt, Homo sapiens
  misc_RNA (1)...(19): siRNA sense strand
gcgagaaugaugagcaagu

SEQ ID NO: 2030578 - RNA, 19 nt, Homo sapiens
  misc_RNA (1)...(19): siRNA sense strand
gcuugacuuuaggacaaua

SEQ ID NO: 2030579 - RNA, 19 nt, Homo sapiens
  misc_RNA (1)...(19): siRNA sense strand
agacuaccuccauggcuaa

SEQ ID NO: 2030580 - RNA, 19 nt, Homo sapiens
  misc_RNA (1)...(19): siRNA sense strand
gcccuacaauacugcaaag

SEQ ID NO: 2030581 - RNA, 19 nt, Homo sapiens
  misc_RNA (1)...(19): siRNA sense strand
cuguuaagacugcaagaaa

SEQ ID NO: 2030582 - RNA, 19 nt, Homo sapiens
  misc_RNA (1)...(19): siRNA sense strand
gcaacaaugaaagcacuuc

SEQ ID NO: 2030583 - RNA, 19 nt, Homo sapiens
  misc_RNA (1)...(19): siRNA sense strand
cagaguaagguucgugauc

SEQ ID NO: 2030584 - RNA, 19 nt, Homo sapiens
  misc_RNA (1)...(19): siRNA sense strand
cugaacacauugcaaagac

SEQ ID NO: 2030585 - RNA, 19 nt, Homo sapiens
  misc_RNA (1)...(19): siRNA sense strand
uguagacugcuugacuuua

SEQ ID NO: 2030586 - RNA, 19 nt, Homo sapiens
  misc_RNA (1)...(19): siRNA sense strand
guauaugcaacaaugaaag

SEQ ID NO: 2030587 - RNA, 19 nt, Homo sapiens
  misc_RNA (1)...(19): siRNA sense strand
aggauuagauguguaugca

SEQ ID NO: 2030588 - RNA, 19 nt, Homo sapiens
  misc_RNA (1)...(19): siRNA sense strand
uuaaaggaaaggaauccaa

SEQ ID NO: 2030589 - RNA, 19 nt, Homo sapiens
  misc_RNA (1)...(19): siRNA sense strand
ccggguauuugggagauau

SEQ ID NO: 2030590 - RNA, 19 nt, Homo sapiens
  misc_RNA (1)...(19): siRNA sense strand
ucgaggugaucucaaagca

SEQ ID NO: 2030591 - RNA, 19 nt, Homo sapiens
  misc_RNA (1)...(19): siRNA sense strand
gggucuggauuauguuguc

SEQ ID NO: 2030592 - RNA, 19 nt, Homo sapiens
  misc_RNA (1)...(19): siRNA sense strand
gaccagaccuucaagauuu

SEQ ID NO: 2030593 - RNA, 19 nt, Homo sapiens
  misc_RNA (1)...(19): siRNA sense strand
gaagcucgaugucccaaua

SEQ ID NO: 2030594 - RNA, 19 nt, Homo sapiens
  misc_RNA (1)...(19): siRNA sense strand
gcaaguauaugcaacaaug

SEQ ID NO: 2030595 - RNA, 19 nt, Homo sapiens
  misc_RNA (1)...(19): siRNA sense strand
gcaaagaccguaucauauu

SEQ ID NO: 2030596 - RNA, 19 nt, Homo sapiens
  misc_RNA (1)...(19): siRNA sense strand
ggagaaagguuaagacuac

SEQ ID NO: 2030597 - RNA, 19 nt, Homo sapiens
  misc_RNA (1)...(19): siRNA sense strand
caaagaccguaucauauuu

SEQ ID NO: 2030598 - RNA, 19 nt, Homo sapiens
  misc_RNA (1)...(19): siRNA sense strand
uacaagagguugcagauuu

SEQ ID NO: 2030599 - RNA, 19 nt, Homo sapiens
  misc_RNA (1)...(19): siRNA sense strand
ccagaaaggagaaagguua

SEQ ID NO: 2030600 - RNA, 19 nt, Homo sapiens
  misc_RNA (1)...(19): siRNA sense strand
caaaggcaauugcagaaug

SEQ ID NO: 2030601 - RNA, 19 nt, Homo sapiens
  misc_RNA (1)...(19): siRNA sense strand
gaggugaucucaaagcaau

SEQ ID NO: 2030602 - RNA, 19 nt, Homo sapiens
  misc_RNA (1)...(19): siRNA sense strand
gcaccugggaugaauauaa

SEQ ID NO: 2030603 - RNA, 19 nt, Homo sapiens
  misc_RNA (1)...(19): siRNA sense strand
gauguagacugcuugacuu

SEQ ID NO: 2030604 - RNA, 19 nt, Homo sapiens
  misc_RNA (1)...(19): siRNA sense strand
ggaccagaccuucaagauu

SEQ ID NO: 2030605 - RNA, 19 nt, Homo sapiens
  misc_RNA (1)...(19): siRNA sense strand
cgagaaugaugagcaagua

SEQ ID NO: 2030606 - RNA, 19 nt, Homo sapiens
  misc_RNA (1)...(19): siRNA sense strand
gaaaggagaaagguuaaga

SEQ ID NO: 2030607 - RNA, 19 nt, Homo sapiens
  misc_RNA (1)...(19): siRNA sense strand
gagcugaacacauugcaaa

SEQ ID NO: 2030608 - RNA, 19 nt, Homo sapiens
  misc_RNA (1)...(19): siRNA sense strand
caccugggaugaauauaaa

SEQ ID NO: 2030609 - RNA, 19 nt, Homo sapiens
  misc_RNA (1)...(19): siRNA sense strand
guagacugcuugacuuuag

SEQ ID NO: 2030610 - RNA, 19 nt, Homo sapiens
  misc_RNA (1)...(19): siRNA sense strand
uagaaacagucccggaauu

SEQ ID NO: 2030611 - RNA, 19 nt, Homo sapiens
  misc_RNA (1)...(19): siRNA sense strand
ccagugagcccuacaauac

SEQ ID NO: 2030612 - RNA, 19 nt, Homo sapiens
  misc_RNA (1)...(19): siRNA sense strand
uugcaaagaccguaucaua

SEQ ID NO: 2030613 - RNA, 19 nt, Homo sapiens
  misc_RNA (1)...(19): siRNA sense strand
gagcaaguauaugcaacaa

SEQ ID NO: 2030614 - RNA, 19 nt, Homo sapiens
  misc_RNA (1)...(19): siRNA sense strand
agaaacagucccggaauua

SEQ ID NO: 2030615 - RNA, 19 nt, Homo sapiens
  misc_RNA (1)...(19): siRNA sense strand
uaaaggaaaggaauccaaa

SEQ ID NO: 2030616 - RNA, 19 nt, Homo sapiens
  misc_RNA (1)...(19): siRNA sense strand
caucuauaauguuggguuu

SEQ ID NO: 2030617 - RNA, 19 nt, Homo sapiens
  misc_RNA (1)...(19): siRNA sense strand
gaucucaaagcaauagaaa

SEQ ID NO: 2030618 - RNA, 19 nt, Homo sapiens
  misc_RNA (1)...(19): siRNA sense strand
gaccguaucauauuuaaag

SEQ ID NO: 2030619 - RNA, 19 nt, Homo sapiens
  misc_RNA (1)...(19): siRNA sense strand
gaaugaugagcaaguauau

SEQ ID NO: 2030620 - RNA, 19 nt, Homo sapiens
  misc_RNA (1)...(19): siRNA sense strand
guugaugggugacacaugu

SEQ ID NO: 2030621 - RNA, 19 nt, Homo sapiens
  misc_RNA (1)...(19): siRNA sense strand
agccugauguuauuucuaa

SEQ ID NO: 2030622 - RNA, 19 nt, Homo sapiens
  misc_RNA (1)...(19): siRNA sense strand
uuaagcuccuugccagaua

SEQ ID NO: 2030623 - RNA, 19 nt, Homo sapiens
  misc_RNA (1)...(19): siRNA sense strand
gaauggaccagaccuucaa

SEQ ID NO: 2030624 - RNA, 19 nt, Homo sapiens
  misc_RNA (1)...(19): siRNA sense strand
uaagcuccuugccagauaa

SEQ ID NO: 2030625 - RNA, 19 nt, Homo sapiens
  misc_RNA (1)...(19): siRNA sense strand
ggaugaauauaaaggaaac

SEQ ID NO: 2030626 - RNA, 19 nt, Homo sapiens
  misc_RNA (1)...(19): siRNA sense strand
agaaugaugagcaaguaua

SEQ ID NO: 2030627 - RNA, 19 nt, Homo sapiens
  misc_RNA (1)...(19): siRNA sense strand
ggugacacauguacaagag

SEQ ID NO: 2030628 - RNA, 19 nt, Homo sapiens
  misc_RNA (1)...(19): siRNA sense strand
cuaccuccauggcuaaaga

SEQ ID NO: 2030629 - RNA, 19 nt, Homo sapiens
  misc_RNA (1)...(19): siRNA sense strand
gagcaccugggaugaauau

SEQ ID NO: 2030630 - RNA, 19 nt, Homo sapiens
  misc_RNA (1)...(19): siRNA sense strand
caauauaugcagccaacaa

SEQ ID NO: 2030631 - RNA, 19 nt, Homo sapiens
  misc_RNA (1)...(19): siRNA sense strand
ccacagccacgaucauguu

SEQ ID NO: 2030632 - RNA, 19 nt, Homo sapiens
  misc_RNA (1)...(19): siRNA sense strand
cagaaaggagaaagguuaa

SEQ ID NO: 2030633 - RNA, 19 nt, Homo sapiens
  misc_RNA (1)...(19): siRNA sense strand
gucccuacguguacugaaa

SEQ ID NO: 2030634 - RNA, 19 nt, Homo sapiens
  misc_RNA (1)...(19): siRNA sense strand
gccagugagcccuacaaua

SEQ ID NO: 2030635 - RNA, 19 nt, Homo sapiens
  misc_RNA (1)...(19): siRNA sense strand
uguuaagacugcaagaaau

SEQ ID NO: 2030636 - RNA, 19 nt, Homo sapiens
  misc_RNA (1)...(19): siRNA sense strand
gaaacaugccaagaagguu

SEQ ID NO: 2030637 - RNA, 19 nt, Homo sapiens
  misc_RNA (1)...(19): siRNA sense strand
cuccauggcuaaagacaga

SEQ ID NO: 2030638 - RNA, 19 nt, Homo sapiens
  misc_RNA (1)...(19): siRNA sense strand
gaucagucccuacguguac

SEQ ID NO: 2030639 - RNA, 19 nt, Homo sapiens
  misc_RNA (1)...(19): siRNA sense strand
gaaacagucccggaauuac

SEQ ID NO: 2030640 - RNA, 19 nt, Homo sapiens
  misc_RNA (1)...(19): siRNA sense strand
guacaagagguugcagauu

SEQ ID NO: 2030641 - RNA, 19 nt, Homo sapiens
  misc_RNA (1)...(19): siRNA sense strand
gggaugaauauaaaggaaa

SEQ ID NO: 2030642 - RNA, 19 nt, Homo sapiens
  misc_RNA (1)...(19): siRNA sense strand
gcucgaugucccaauauug

SEQ ID NO: 2030643 - RNA, 19 nt, Homo sapiens
  misc_RNA (1)...(19): siRNA sense strand
cugcuugacuuuaggacaa

SEQ ID NO: 2030644 - RNA, 19 nt, Homo sapiens
  misc_RNA (1)...(19): siRNA sense strand
aaaggcaauugcagaaugg

SEQ ID NO: 2030645 - RNA, 19 nt, Homo sapiens
  misc_RNA (1)...(19): siRNA sense strand
gaugagcaaguauaugcaa

SEQ ID NO: 2030646 - RNA, 19 nt, Homo sapiens
  misc_RNA (1)...(19): siRNA sense strand
guagaaacagucccggaau

SEQ ID NO: 2030647 - RNA, 19 nt, Homo sapiens
  misc_RNA (1)...(19): siRNA sense strand
gucccggaauuacagagua

SEQ ID NO: 2030648 - RNA, 19 nt, Homo sapiens
  misc_RNA (1)...(19): siRNA sense strand
aaacagucccggaauuaca

SEQ ID NO: 2030649 - RNA, 19 nt, Homo sapiens
  misc_RNA (1)...(19): siRNA sense strand
gcugaacacauugcaaaga

SEQ ID NO: 2030650 - RNA, 19 nt, Homo sapiens
  misc_RNA (1)...(19): siRNA sense strand
gacuuuaggacaauauaug

SEQ ID NO: 2030651 - RNA, 19 nt, Homo sapiens
  misc_RNA (1)...(19): siRNA sense strand
gagaaugaugagcaaguau

SEQ ID NO: 2030652 - RNA, 19 nt, Homo sapiens
  misc_RNA (1)...(19): siRNA sense strand
ucuauaauguuggguuuag

SEQ ID NO: 2030653 - RNA, 19 nt, Homo sapiens
  misc_RNA (1)...(19): siRNA sense strand
gugauccucgggccaauuu

SEQ ID NO: 2030654 - RNA, 19 nt, Homo sapiens
  misc_RNA (1)...(19): siRNA sense strand
ggagcaccugggaugaaua

SEQ ID NO: 2030655 - RNA, 19 nt, Homo sapiens
  misc_RNA (1)...(19): siRNA sense strand
caaguauaugcaacaauga

SEQ ID NO: 2030656 - RNA, 19 nt, Homo sapiens
  misc_RNA (1)...(19): siRNA sense strand
ugaaacaugccaagaaggu

SEQ ID NO: 2030657 - RNA, 19 nt, Homo sapiens
  misc_RNA (1)...(19): siRNA sense strand
guacugaaacaugccaaga

SEQ ID NO: 2030658 - RNA, 19 nt, Homo sapiens
  misc_RNA (1)...(19): siRNA sense strand
ugggaugaauauaaaggaa

SEQ ID NO: 2030659 - RNA, 19 nt, Homo sapiens
  misc_RNA (1)...(19): siRNA sense strand
acaagagguugcagauuuu

SEQ ID NO: 2030660 - RNA, 19 nt, Homo sapiens
  misc_RNA (1)...(19): siRNA sense strand
ggaauuuaaaucuccauac

SEQ ID NO: 2030661 - RNA, 19 nt, Homo sapiens
  misc_RNA (1)...(19): siRNA sense strand
ugucaggauuagaugugua

SEQ ID NO: 2030662 - RNA, 19 nt, Homo sapiens
  misc_RNA (1)...(19): siRNA sense strand
ugcaaagaccguaucauau

SEQ ID NO: 2030663 - RNA, 19 nt, Homo sapiens
  misc_RNA (1)...(19): siRNA sense strand
guuaagacugcaagaaauc

SEQ ID NO: 2030664 - RNA, 19 nt, Homo sapiens
  misc_RNA (1)...(19): siRNA sense strand
cuacguguacugaaacaug

SEQ ID NO: 2030665 - RNA, 19 nt, Homo sapiens
  misc_RNA (1)...(19): siRNA sense strand
aaguugcucugucaggauu

SEQ ID NO: 2030666 - RNA, 19 nt, Homo sapiens
  misc_RNA (1)...(19): siRNA sense strand
acugaaacaugccaagaag

SEQ ID NO: 2030667 - RNA, 19 nt, Homo sapiens
  misc_RNA (1)...(19): siRNA sense strand
gcgagaaugaugagcaagu

SEQ ID NO: 2030668 - RNA, 19 nt, Homo sapiens
  misc_RNA (1)...(19): siRNA sense strand
gcuugacuuuaggacaaua

SEQ ID NO: 2030669 - RNA, 19 nt, Homo sapiens
  misc_RNA (1)...(19): siRNA sense strand
agacuaccuccauggcuaa

SEQ ID NO: 2030670 - RNA, 19 nt, Homo sapiens
  misc_RNA (1)...(19): siRNA sense strand
gcccuacaauacugcaaag

SEQ ID NO: 2030671 - RNA, 19 nt, Homo sapiens
  misc_RNA (1)...(19): siRNA sense strand
cuguuaagacugcaagaaa

SEQ ID NO: 2030672 - RNA, 19 nt, Homo sapiens
  misc_RNA (1)...(19): siRNA sense strand
gcaacaaugaaagcacuuc

SEQ ID NO: 2030673 - RNA, 19 nt, Homo sapiens
  misc_RNA (1)...(19): siRNA sense strand
cagaguaagguucgugauc

SEQ ID NO: 2030674 - RNA, 19 nt, Homo sapiens
  misc_RNA (1)...(19): siRNA sense strand
cugaacacauugcaaagac

SEQ ID NO: 2030675 - RNA, 19 nt, Homo sapiens
  misc_RNA (1)...(19): siRNA sense strand
uguagacugcuugacuuua

SEQ ID NO: 2030676 - RNA, 19 nt, Homo sapiens
  misc_RNA (1)...(19): siRNA sense strand
guauaugcaacaaugaaag

SEQ ID NO: 2030677 - RNA, 19 nt, Homo sapiens
  misc_RNA (1)...(19): siRNA sense strand
aggauuagauguguaugca

SEQ ID NO: 2030678 - RNA, 19 nt, Homo sapiens
  misc_RNA (1)...(19): siRNA sense strand
uuaaaggaaaggaauccaa

SEQ ID NO: 2030679 - RNA, 19 nt, Homo sapiens
  misc_RNA (1)...(19): siRNA sense strand
ccggguauuugggagauau

SEQ ID NO: 2030680 - RNA, 19 nt, Homo sapiens
  misc_RNA (1)...(19): siRNA sense strand
ucgaggugaucucaaagca

SEQ ID NO: 2030681 - RNA, 19 nt, Homo sapiens
  misc_RNA (1)...(19): siRNA sense strand
gggucuggauuauguuguc

SEQ ID NO: 2030682 - RNA, 19 nt, Homo sapiens
  misc_RNA (1)...(19): siRNA sense strand
gcaaagaugugaauaaagu

SEQ ID NO: 2030683 - RNA, 19 nt, Homo sapiens
  misc_RNA (1)...(19): siRNA sense strand
ggacuacagugguuguuua

SEQ ID NO: 2030684 - RNA, 19 nt, Homo sapiens
  misc_RNA (1)...(19): siRNA sense strand
gaaagcaaaugugacagua

SEQ ID NO: 2030685 - RNA, 19 nt, Homo sapiens
  misc_RNA (1)...(19): siRNA sense strand
agacagauguguuguaaga

SEQ ID NO: 2030686 - RNA, 19 nt, Homo sapiens
  misc_RNA (1)...(19): siRNA sense strand
gugcaaagaugugaauaaa

SEQ ID NO: 2030687 - RNA, 19 nt, Homo sapiens
  misc_RNA (1)...(19): siRNA sense strand
gcagugaccuuucuaagac

SEQ ID NO: 2030688 - RNA, 19 nt, Homo sapiens
  misc_RNA (1)...(19): siRNA sense strand
ucagacagauguguuguaa

SEQ ID NO: 2030689 - RNA, 19 nt, Homo sapiens
  misc_RNA (1)...(19): siRNA sense strand
ggacaggcaucuagugacu

SEQ ID NO: 2030690 - RNA, 19 nt, Homo sapiens
  misc_RNA (1)...(19): siRNA sense strand
gcagcagugugaaagcaaa

SEQ ID NO: 2030691 - RNA, 19 nt, Homo sapiens
  misc_RNA (1)...(19): siRNA sense strand
caagagcagugaccuuucu

SEQ ID NO: 2030692 - RNA, 19 nt, Homo sapiens
  misc_RNA (1)...(19): siRNA sense strand
gacaguaagccaccugaaa

SEQ ID NO: 2030693 - RNA, 19 nt, Homo sapiens
  misc_RNA (1)...(19): siRNA sense strand
gagcauacuucagacagau

SEQ ID NO: 2030694 - RNA, 19 nt, Homo sapiens
  misc_RNA (1)...(19): siRNA sense strand
ucaaagagccugcaacacu

SEQ ID NO: 2030695 - RNA, 19 nt, Homo sapiens
  misc_RNA (1)...(19): siRNA sense strand
gaagagugcaaagauguga

SEQ ID NO: 2030696 - RNA, 19 nt, Homo sapiens
  misc_RNA (1)...(19): siRNA sense strand
ccagaacaauuacugugau

SEQ ID NO: 2030697 - RNA, 19 nt, Homo sapiens
  misc_RNA (1)...(19): siRNA sense strand
caucaaugcagcaguguga

SEQ ID NO: 2030698 - RNA, 19 nt, Homo sapiens
  misc_RNA (1)...(19): siRNA sense strand
ccaguguucugcucagugu

SEQ ID NO: 2030699 - RNA, 19 nt, Homo sapiens
  misc_RNA (1)...(19): siRNA sense strand
ggacagcagaugagaacug

SEQ ID NO: 2030700 - RNA, 19 nt, Homo sapiens
  misc_RNA (1)...(19): siRNA sense strand
ggacuggucugaguguacu

SEQ ID NO: 2030701 - RNA, 19 nt, Homo sapiens
  misc_RNA (1)...(19): siRNA sense strand
gcccacuggugcugaaguu

SEQ ID NO: 2030702 - RNA, 19 nt, Homo sapiens
  misc_RNA (1)...(19): siRNA sense strand
guaaaagguuggaugacaa

SEQ ID NO: 2030703 - RNA, 19 nt, Homo sapiens
  misc_RNA (1)...(19): siRNA sense strand
cgagcauacuucagacaga

SEQ ID NO: 2030704 - RNA, 19 nt, Homo sapiens
  misc_RNA (1)...(19): siRNA sense strand
gcacaauguccagaggaaa

SEQ ID NO: 2030705 - RNA, 19 nt, Homo sapiens
  misc_RNA (1)...(19): siRNA sense strand
gcaagagcagugaccuuuc

SEQ ID NO: 2030706 - RNA, 19 nt, Homo sapiens
  misc_RNA (1)...(19): siRNA sense strand
cagaacaauuacugugauc

SEQ ID NO: 2030707 - RNA, 19 nt, Homo sapiens
  misc_RNA (1)...(19): siRNA sense strand
gacuacagugguuguuuaa

SEQ ID NO: 2030708 - RNA, 19 nt, Homo sapiens
  misc_RNA (1)...(19): siRNA sense strand
gugacugucuagaaacugu

SEQ ID NO: 2030709 - RNA, 19 nt, Homo sapiens
  misc_RNA (1)...(19): siRNA sense strand
gcuuuggacuggucugagu

SEQ ID NO: 2030710 - RNA, 19 nt, Homo sapiens
  misc_RNA (1)...(19): siRNA sense strand
cacaguggguggcuuugga

SEQ ID NO: 2030711 - RNA, 19 nt, Homo sapiens
  misc_RNA (1)...(19): siRNA sense strand
ggauucaagcaucggauug

SEQ ID NO: 2030712 - RNA, 19 nt, Homo sapiens
  misc_RNA (1)...(19): siRNA sense strand
gagcagugaccuuucuaag

SEQ ID NO: 2030713 - RNA, 19 nt, Homo sapiens
  misc_RNA (1)...(19): siRNA sense strand
ucaaugcagcagugugaaa

SEQ ID NO: 2030714 - RNA, 19 nt, Homo sapiens
  misc_RNA (1)...(19): siRNA sense strand
gaacaauuacugugauccu

SEQ ID NO: 2030715 - RNA, 19 nt, Homo sapiens
  misc_RNA (1)...(19): siRNA sense strand
guucugcagucgagcauac

SEQ ID NO: 2030716 - RNA, 19 nt, Homo sapiens
  misc_RNA (1)...(19): siRNA sense strand
ggauuguucugugcaagag

SEQ ID NO: 2030717 - RNA, 19 nt, Homo sapiens
  misc_RNA (1)...(19): siRNA sense strand
aaucaaagagccugcaaca

SEQ ID NO: 2030718 - RNA, 19 nt, Homo sapiens
  misc_RNA (1)...(19): siRNA sense strand
caacuccauuguccagaac

SEQ ID NO: 2030719 - RNA, 19 nt, Homo sapiens
  misc_RNA (1)...(19): siRNA sense strand
acugaagagugcaaagaug

SEQ ID NO: 2030720 - RNA, 19 nt, Homo sapiens
  misc_RNA (1)...(19): siRNA sense strand
gcagugugaaagcaaaugu

SEQ ID NO: 2030721 - RNA, 19 nt, Homo sapiens
  misc_RNA (1)...(19): siRNA sense strand
auucccagcugcacaaugu

SEQ ID NO: 2030722 - RNA, 19 nt, Homo sapiens
  misc_RNA (1)...(19): siRNA sense strand
gacauucccagcugcacaa

SEQ ID NO: 2030723 - RNA, 19 nt, Homo sapiens
  misc_RNA (1)...(19): siRNA sense strand
gaccugccaaggacacuga

SEQ ID NO: 2030724 - RNA, 19 nt, Homo sapiens
  misc_RNA (1)...(19): siRNA sense strand
ugaaagcaaaugugacagu

SEQ ID NO: 2030725 - RNA, 19 nt, Homo sapiens
  misc_RNA (1)...(19): siRNA sense strand
ggccuuggacagcagauga

SEQ ID NO: 2030726 - RNA, 19 nt, Homo sapiens
  misc_RNA (1)...(19): siRNA sense strand
ugcaagagcagugaccuuu

SEQ ID NO: 2030727 - RNA, 19 nt, Homo sapiens
  misc_RNA (1)...(19): siRNA sense strand
gagguggucuguaaaaggu

SEQ ID NO: 2030728 - RNA, 19 nt, Homo sapiens
  misc_RNA (1)...(19): siRNA sense strand
caaagaugugaauaaagug

SEQ ID NO: 2030729 - RNA, 19 nt, Homo sapiens
  misc_RNA (1)...(19): siRNA sense strand
aggaggagacgcuggacua

SEQ ID NO: 2030730 - RNA, 19 nt, Homo sapiens
  misc_RNA (1)...(19): siRNA sense strand
aaagagccugcaacacuga

SEQ ID NO: 2030731 - RNA, 19 nt, Homo sapiens
  misc_RNA (1)...(19): siRNA sense strand
acgcuggacuacagugguu

SEQ ID NO: 2030732 - RNA, 19 nt, Homo sapiens
  misc_RNA (1)...(19): siRNA sense strand
gauggugggaugcgcacaa

SEQ ID NO: 2030733 - RNA, 19 nt, Homo sapiens
  misc_RNA (1)...(19): siRNA sense strand
gcauacuucagacagaugu

SEQ ID NO: 2030734 - RNA, 19 nt, Homo sapiens
  misc_RNA (1)...(19): siRNA sense strand
ugcacaauguccagaggaa

SEQ ID NO: 2030735 - RNA, 19 nt, Homo sapiens
  misc_RNA (1)...(19): siRNA sense strand
aggagacgcuggacuacag

SEQ ID NO: 2030736 - RNA, 19 nt, Homo sapiens
  misc_RNA (1)...(19): siRNA sense strand
aaaaugugguccaggauuc

SEQ ID NO: 2030737 - RNA, 19 nt, Homo sapiens
  misc_RNA (1)...(19): siRNA sense strand
cagucgagcauacuucaga

SEQ ID NO: 2030738 - RNA, 19 nt, Homo sapiens
  misc_RNA (1)...(19): siRNA sense strand
ugugaaagcaaaugugaca

SEQ ID NO: 2030739 - RNA, 19 nt, Homo sapiens
  misc_RNA (1)...(19): siRNA sense strand
gaaacuguucggccuccau

SEQ ID NO: 2030740 - RNA, 19 nt, Homo sapiens
  misc_RNA (1)...(19): siRNA sense strand
gauucaagcaucggauugu

SEQ ID NO: 2030741 - RNA, 19 nt, Homo sapiens
  misc_RNA (1)...(19): siRNA sense strand
ccauuucuaauacugaaga

SEQ ID NO: 2030742 - RNA, 19 nt, Homo sapiens
  misc_RNA (1)...(19): siRNA sense strand
guaagccaccugaaaauca

SEQ ID NO: 2030743 - RNA, 19 nt, Homo sapiens
  misc_RNA (1)...(19): siRNA sense strand
ccggacaggcaucuaguga

SEQ ID NO: 2030744 - RNA, 19 nt, Homo sapiens
  misc_RNA (1)...(19): siRNA sense strand
ugaccuuucuaagacauuc

SEQ ID NO: 2030745 - RNA, 19 nt, Homo sapiens
  misc_RNA (1)...(19): siRNA sense strand
gcaaagaugugaauaaagu

SEQ ID NO: 2030746 - RNA, 19 nt, Homo sapiens
  misc_RNA (1)...(19): siRNA sense strand
ggacuacagugguuguuua

SEQ ID NO: 2030747 - RNA, 19 nt, Homo sapiens
  misc_RNA (1)...(19): siRNA sense strand
gaaagcaaaugugacagua

SEQ ID NO: 2030748 - RNA, 19 nt, Homo sapiens
  misc_RNA (1)...(19): siRNA sense strand
agacagauguguuguaaga

SEQ ID NO: 2030749 - RNA, 19 nt, Homo sapiens
  misc_RNA (1)...(19): siRNA sense strand
gugcaaagaugugaauaaa

SEQ ID NO: 2030750 - RNA, 19 nt, Homo sapiens
  misc_RNA (1)...(19): siRNA sense strand
gcagugaccuuucuaagac

SEQ ID NO: 2030751 - RNA, 19 nt, Homo sapiens
  misc_RNA (1)...(19): siRNA sense strand
ucagacagauguguuguaa

SEQ ID NO: 2030752 - RNA, 19 nt, Homo sapiens
  misc_RNA (1)...(19): siRNA sense strand
ggacaggcaucuagugacu

SEQ ID NO: 2030753 - RNA, 19 nt, Homo sapiens
  misc_RNA (1)...(19): siRNA sense strand
gcagcagugugaaagcaaa

SEQ ID NO: 2030754 - RNA, 19 nt, Homo sapiens
  misc_RNA (1)...(19): siRNA sense strand
caagagcagugaccuuucu

SEQ ID NO: 2030755 - RNA, 19 nt, Homo sapiens
  misc_RNA (1)...(19): siRNA sense strand
gacaguaagccaccugaaa

SEQ ID NO: 2030756 - RNA, 19 nt, Homo sapiens
  misc_RNA (1)...(19): siRNA sense strand
gagcauacuucagacagau

SEQ ID NO: 2030757 - RNA, 19 nt, Homo sapiens
  misc_RNA (1)...(19): siRNA sense strand
ucaaagagccugcaacacu

SEQ ID NO: 2030758 - RNA, 19 nt, Homo sapiens
  misc_RNA (1)...(19): siRNA sense strand
gaagagugcaaagauguga

SEQ ID NO: 2030759 - RNA, 19 nt, Homo sapiens
  misc_RNA (1)...(19): siRNA sense strand
ccagaacaauuacugugau

SEQ ID NO: 2030760 - RNA, 19 nt, Homo sapiens
  misc_RNA (1)...(19): siRNA sense strand
caucaaugcagcaguguga

SEQ ID NO: 2030761 - RNA, 19 nt, Homo sapiens
  misc_RNA (1)...(19): siRNA sense strand
ccaguguucugcucagugu

SEQ ID NO: 2030762 - RNA, 19 nt, Homo sapiens
  misc_RNA (1)...(19): siRNA sense strand
ggacagcagaugagaacug

SEQ ID NO: 2030763 - RNA, 19 nt, Homo sapiens
  misc_RNA (1)...(19): siRNA sense strand
ggacuggucugaguguacu

SEQ ID NO: 2030764 - RNA, 19 nt, Homo sapiens
  misc_RNA (1)...(19): siRNA sense strand
gcccacuggugcugaaguu

SEQ ID NO: 2030765 - RNA, 19 nt, Homo sapiens
  misc_RNA (1)...(19): siRNA sense strand
guaaaagguuggaugacaa

SEQ ID NO: 2030766 - RNA, 19 nt, Homo sapiens
  misc_RNA (1)...(19): siRNA sense strand
cgagcauacuucagacaga

SEQ ID NO: 2030767 - RNA, 19 nt, Homo sapiens
  misc_RNA (1)...(19): siRNA sense strand
gcacaauguccagaggaaa

SEQ ID NO: 2030768 - RNA, 19 nt, Homo sapiens
  misc_RNA (1)...(19): siRNA sense strand
gcaagagcagugaccuuuc

SEQ ID NO: 2030769 - RNA, 19 nt, Homo sapiens
  misc_RNA (1)...(19): siRNA sense strand
cagaacaauuacugugauc

SEQ ID NO: 2030770 - RNA, 19 nt, Homo sapiens
  misc_RNA (1)...(19): siRNA sense strand
gacuacagugguuguuuaa

SEQ ID NO: 2030771 - RNA, 19 nt, Homo sapiens
  misc_RNA (1)...(19): siRNA sense strand
gugacugucuagaaacugu

SEQ ID NO: 2030772 - RNA, 19 nt, Homo sapiens
  misc_RNA (1)...(19): siRNA sense strand
gcuuuggacuggucugagu

SEQ ID NO: 2030773 - RNA, 19 nt, Homo sapiens
  misc_RNA (1)...(19): siRNA sense strand
cacaguggguggcuuugga

SEQ ID NO: 2030774 - RNA, 19 nt, Homo sapiens
  misc_RNA (1)...(19): siRNA sense strand
ggauucaagcaucggauug

SEQ ID NO: 2030775 - RNA, 19 nt, Homo sapiens
  misc_RNA (1)...(19): siRNA sense strand
gagcagugaccuuucuaag

SEQ ID NO: 2030776 - RNA, 19 nt, Homo sapiens
  misc_RNA (1)...(19): siRNA sense strand
ucaaugcagcagugugaaa

SEQ ID NO: 2030777 - RNA, 19 nt, Homo sapiens
  misc_RNA (1)...(19): siRNA sense strand
gaacaauuacugugauccu

SEQ ID NO: 2030778 - RNA, 19 nt, Homo sapiens
  misc_RNA (1)...(19): siRNA sense strand
guucugcagucgagcauac

SEQ ID NO: 2030779 - RNA, 19 nt, Homo sapiens
  misc_RNA (1)...(19): siRNA sense strand
ggauuguucugugcaagag

SEQ ID NO: 2030780 - RNA, 19 nt, Homo sapiens
  misc_RNA (1)...(19): siRNA sense strand
aaucaaagagccugcaaca

SEQ ID NO: 2030781 - RNA, 19 nt, Homo sapiens
  misc_RNA (1)...(19): siRNA sense strand
caacuccauuguccagaac

SEQ ID NO: 2030782 - RNA, 19 nt, Homo sapiens
  misc_RNA (1)...(19): siRNA sense strand
acugaagagugcaaagaug

SEQ ID NO: 2030783 - RNA, 19 nt, Homo sapiens
  misc_RNA (1)...(19): siRNA sense strand
gcagugugaaagcaaaugu

SEQ ID NO: 2030784 - RNA, 19 nt, Homo sapiens
  misc_RNA (1)...(19): siRNA sense strand
auucccagcugcacaaugu

SEQ ID NO: 2030785 - RNA, 19 nt, Homo sapiens
  misc_RNA (1)...(19): siRNA sense strand
gacauucccagcugcacaa

SEQ ID NO: 2030786 - RNA, 19 nt, Homo sapiens
  misc_RNA (1)...(19): siRNA sense strand
gaccugccaaggacacuga

SEQ ID NO: 2030787 - RNA, 19 nt, Homo sapiens
  misc_RNA (1)...(19): siRNA sense strand
ugaaagcaaaugugacagu

SEQ ID NO: 2030788 - RNA, 19 nt, Homo sapiens
  misc_RNA (1)...(19): siRNA sense strand
ggccuuggacagcagauga

SEQ ID NO: 2030789 - RNA, 19 nt, Homo sapiens
  misc_RNA (1)...(19): siRNA sense strand
ugcaagagcagugaccuuu

SEQ ID NO: 2030790 - RNA, 19 nt, Homo sapiens
  misc_RNA (1)...(19): siRNA sense strand
gagguggucuguaaaaggu

SEQ ID NO: 2030791 - RNA, 19 nt, Homo sapiens
  misc_RNA (1)...(19): siRNA sense strand
caaagaugugaauaaagug

SEQ ID NO: 2030792 - RNA, 19 nt, Homo sapiens
  misc_RNA (1)...(19): siRNA sense strand
aggaggagacgcuggacua

SEQ ID NO: 2030793 - RNA, 19 nt, Homo sapiens
  misc_RNA (1)...(19): siRNA sense strand
aaagagccugcaacacuga

SEQ ID NO: 2030794 - RNA, 19 nt, Homo sapiens
  misc_RNA (1)...(19): siRNA sense strand
acgcuggacuacagugguu

SEQ ID NO: 2030795 - RNA, 19 nt, Homo sapiens
  misc_RNA (1)...(19): siRNA sense strand
gauggugggaugcgcacaa

SEQ ID NO: 2030796 - RNA, 19 nt, Homo sapiens
  misc_RNA (1)...(19): siRNA sense strand
gcauacuucagacagaugu

SEQ ID NO: 2030797 - RNA, 19 nt, Homo sapiens
  misc_RNA (1)...(19): siRNA sense strand
ugcacaauguccagaggaa

SEQ ID NO: 2030798 - RNA, 19 nt, Homo sapiens
  misc_RNA (1)...(19): siRNA sense strand
aggagacgcuggacuacag

SEQ ID NO: 2030799 - RNA, 19 nt, Homo sapiens
  misc_RNA (1)...(19): siRNA sense strand
aaaaugugguccaggauuc

SEQ ID NO: 2030800 - RNA, 19 nt, Homo sapiens
  misc_RNA (1)...(19): siRNA sense strand
cagucgagcauacuucaga

SEQ ID NO: 2030801 - RNA, 19 nt, Homo sapiens
  misc_RNA (1)...(19): siRNA sense strand
ugugaaagcaaaugugaca

SEQ ID NO: 2030802 - RNA, 19 nt, Homo sapiens
  misc_RNA (1)...(19): siRNA sense strand
gaaacuguucggccuccau

SEQ ID NO: 2030803 - RNA, 19 nt, Homo sapiens
  misc_RNA (1)...(19): siRNA sense strand
gauucaagcaucggauugu

SEQ ID NO: 2030804 - RNA, 19 nt, Homo sapiens
  misc_RNA (1)...(19): siRNA sense strand
ccauuucuaauacugaaga

SEQ ID NO: 2030805 - RNA, 19 nt, Homo sapiens
  misc_RNA (1)...(19): siRNA sense strand
guaagccaccugaaaauca

SEQ ID NO: 2030806 - RNA, 19 nt, Homo sapiens
  misc_RNA (1)...(19): siRNA sense strand
ccggacaggcaucuaguga

SEQ ID NO: 2030807 - RNA, 19 nt, Homo sapiens
  misc_RNA (1)...(19): siRNA sense strand
ugaccuuucuaagacauuc

SEQ ID NO: 2030808 - RNA, 19 nt, Homo sapiens
  misc_RNA (1)...(19): siRNA sense strand
gaagauaucuggaacauuc

SEQ ID NO: 2030809 - RNA, 19 nt, Homo sapiens
  misc_RNA (1)...(19): siRNA sense strand
gacggaagaugacuuugua

SEQ ID NO: 2030810 - RNA, 19 nt, Homo sapiens
  misc_RNA (1)...(19): siRNA sense strand
gcagaggacccauucauug

SEQ ID NO: 2030811 - RNA, 19 nt, Homo sapiens
  misc_RNA (1)...(19): siRNA sense strand
gaacugccaugagggugua

SEQ ID NO: 2030812 - RNA, 19 nt, Homo sapiens
  misc_RNA (1)...(19): siRNA sense strand
gcacccaacugcagauauc

SEQ ID NO: 2030813 - RNA, 19 nt, Homo sapiens
  misc_RNA (1)...(19): siRNA sense strand
ggaagaugacuuuguauca

SEQ ID NO: 2030814 - RNA, 19 nt, Homo sapiens
  misc_RNA (1)...(19): siRNA sense strand
ggagacagguggcagugau

SEQ ID NO: 2030815 - RNA, 19 nt, Homo sapiens
  misc_RNA (1)...(19): siRNA sense strand
gcaagaacggcaagaugaa

SEQ ID NO: 2030816 - RNA, 19 nt, Homo sapiens
  misc_RNA (1)...(19): siRNA sense strand
ccaccaauauccaaugcaa

SEQ ID NO: 2030817 - RNA, 19 nt, Homo sapiens
  misc_RNA (1)...(19): siRNA sense strand
gaucgcuacugcaacuuga

SEQ ID NO: 2030818 - RNA, 19 nt, Homo sapiens
  misc_RNA (1)...(19): siRNA sense strand
gaagaugacuuuguaucac

SEQ ID NO: 2030819 - RNA, 19 nt, Homo sapiens
  misc_RNA (1)...(19): siRNA sense strand
gcaacuugaugaugcaaag

SEQ ID NO: 2030820 - RNA, 19 nt, Homo sapiens
  misc_RNA (1)...(19): siRNA sense strand
cacuagacguguugucauu

SEQ ID NO: 2030821 - RNA, 19 nt, Homo sapiens
  misc_RNA (1)...(19): siRNA sense strand
gaggacccauucauugcuu

SEQ ID NO: 2030822 - RNA, 19 nt, Homo sapiens
  misc_RNA (1)...(19): siRNA sense strand
gcaagcgcuucaacaccuu

SEQ ID NO: 2030823 - RNA, 19 nt, Homo sapiens
  misc_RNA (1)...(19): siRNA sense strand
cugcagauaucgggccaua

SEQ ID NO: 2030824 - RNA, 19 nt, Homo sapiens
  misc_RNA (1)...(19): siRNA sense strand
gcagauaucgggccauagc

SEQ ID NO: 2030825 - RNA, 19 nt, Homo sapiens
  misc_RNA (1)...(19): siRNA sense strand
gcaagaugaacugccauga

SEQ ID NO: 2030826 - RNA, 19 nt, Homo sapiens
  misc_RNA (1)...(19): siRNA sense strand
ccaugaggguguagugaag

SEQ ID NO: 2030827 - RNA, 19 nt, Homo sapiens
  misc_RNA (1)...(19): siRNA sense strand
augcaaagacggaagauga

SEQ ID NO: 2030828 - RNA, 19 nt, Homo sapiens
  misc_RNA (1)...(19): siRNA sense strand
gcaccaccaauauccaaug

SEQ ID NO: 2030829 - RNA, 19 nt, Homo sapiens
  misc_RNA (1)...(19): siRNA sense strand
ggccauagcgagcacuaga

SEQ ID NO: 2030830 - RNA, 19 nt, Homo sapiens
  misc_RNA (1)...(19): siRNA sense strand
caaagacggaagaugacuu

SEQ ID NO: 2030831 - RNA, 19 nt, Homo sapiens
  misc_RNA (1)...(19): siRNA sense strand
gcacuagacguguugucau

SEQ ID NO: 2030832 - RNA, 19 nt, Homo sapiens
  misc_RNA (1)...(19): siRNA sense strand
ugcaagaacggcaagauga

SEQ ID NO: 2030833 - RNA, 19 nt, Homo sapiens
  misc_RNA (1)...(19): siRNA sense strand
ucuggaacauucguaguau

SEQ ID NO: 2030834 - RNA, 19 nt, Homo sapiens
  misc_RNA (1)...(19): siRNA sense strand
caagaugaacugccaugag

SEQ ID NO: 2030835 - RNA, 19 nt, Homo sapiens
  misc_RNA (1)...(19): siRNA sense strand
gauaucuggaacauucgua

SEQ ID NO: 2030836 - RNA, 19 nt, Homo sapiens
  misc_RNA (1)...(19): siRNA sense strand
gccaugaggguguagugaa

SEQ ID NO: 2030837 - RNA, 19 nt, Homo sapiens
  misc_RNA (1)...(19): siRNA sense strand
agacggaagaugacuuugu

SEQ ID NO: 2030838 - RNA, 19 nt, Homo sapiens
  misc_RNA (1)...(19): siRNA sense strand
gcagggacacaggaaguuc

SEQ ID NO: 2030839 - RNA, 19 nt, Homo sapiens
  misc_RNA (1)...(19): siRNA sense strand
aagaugacuuuguaucacu

SEQ ID NO: 2030840 - RNA, 19 nt, Homo sapiens
  misc_RNA (1)...(19): siRNA sense strand
accaauauccaaugcaaga

SEQ ID NO: 2030841 - RNA, 19 nt, Homo sapiens
  misc_RNA (1)...(19): siRNA sense strand
cagcaccaccaauauccaa

SEQ ID NO: 2030842 - RNA, 19 nt, Homo sapiens
  misc_RNA (1)...(19): siRNA sense strand
guguugucauugccuguga

SEQ ID NO: 2030843 - RNA, 19 nt, Homo sapiens
  misc_RNA (1)...(19): siRNA sense strand
gggcacccaacugcagaua

SEQ ID NO: 2030844 - RNA, 19 nt, Homo sapiens
  misc_RNA (1)...(19): siRNA sense strand
gaagauaucuggaacauuc

SEQ ID NO: 2030845 - RNA, 19 nt, Homo sapiens
  misc_RNA (1)...(19): siRNA sense strand
gacggaagaugacuuugua

SEQ ID NO: 2030846 - RNA, 19 nt, Homo sapiens
  misc_RNA (1)...(19): siRNA sense strand
gcagaggacccauucauug

SEQ ID NO: 2030847 - RNA, 19 nt, Homo sapiens
  misc_RNA (1)...(19): siRNA sense strand
gaacugccaugagggugua

SEQ ID NO: 2030848 - RNA, 19 nt, Homo sapiens
  misc_RNA (1)...(19): siRNA sense strand
gcacccaacugcagauauc

SEQ ID NO: 2030849 - RNA, 19 nt, Homo sapiens
  misc_RNA (1)...(19): siRNA sense strand
ggaagaugacuuuguauca

SEQ ID NO: 2030850 - RNA, 19 nt, Homo sapiens
  misc_RNA (1)...(19): siRNA sense strand
ggagacagguggcagugau

SEQ ID NO: 2030851 - RNA, 19 nt, Homo sapiens
  misc_RNA (1)...(19): siRNA sense strand
gcaagaacggcaagaugaa

SEQ ID NO: 2030852 - RNA, 19 nt, Homo sapiens
  misc_RNA (1)...(19): siRNA sense strand
ccaccaauauccaaugcaa

SEQ ID NO: 2030853 - RNA, 19 nt, Homo sapiens
  misc_RNA (1)...(19): siRNA sense strand
gaucgcuacugcaacuuga

SEQ ID NO: 2030854 - RNA, 19 nt, Homo sapiens
  misc_RNA (1)...(19): siRNA sense strand
gaagaugacuuuguaucac

SEQ ID NO: 2030855 - RNA, 19 nt, Homo sapiens
  misc_RNA (1)...(19): siRNA sense strand
gcaacuugaugaugcaaag

SEQ ID NO: 2030856 - RNA, 19 nt, Homo sapiens
  misc_RNA (1)...(19): siRNA sense strand
cacuagacguguugucauu

SEQ ID NO: 2030857 - RNA, 19 nt, Homo sapiens
  misc_RNA (1)...(19): siRNA sense strand
gaggacccauucauugcuu

SEQ ID NO: 2030858 - RNA, 19 nt, Homo sapiens
  misc_RNA (1)...(19): siRNA sense strand
gcaagcgcuucaacaccuu

SEQ ID NO: 2030859 - RNA, 19 nt, Homo sapiens
  misc_RNA (1)...(19): siRNA sense strand
cugcagauaucgggccaua

SEQ ID NO: 2030860 - RNA, 19 nt, Homo sapiens
  misc_RNA (1)...(19): siRNA sense strand
gcagauaucgggccauagc

SEQ ID NO: 2030861 - RNA, 19 nt, Homo sapiens
  misc_RNA (1)...(19): siRNA sense strand
gcaagaugaacugccauga

SEQ ID NO: 2030862 - RNA, 19 nt, Homo sapiens
  misc_RNA (1)...(19): siRNA sense strand
ccaugaggguguagugaag

SEQ ID NO: 2030863 - RNA, 19 nt, Homo sapiens
  misc_RNA (1)...(19): siRNA sense strand
augcaaagacggaagauga

SEQ ID NO: 2030864 - RNA, 19 nt, Homo sapiens
  misc_RNA (1)...(19): siRNA sense strand
gcaccaccaauauccaaug

SEQ ID NO: 2030865 - RNA, 19 nt, Homo sapiens
  misc_RNA (1)...(19): siRNA sense strand
ggccauagcgagcacuaga

SEQ ID NO: 2030866 - RNA, 19 nt, Homo sapiens
  misc_RNA (1)...(19): siRNA sense strand
caaagacggaagaugacuu

SEQ ID NO: 2030867 - RNA, 19 nt, Homo sapiens
  misc_RNA (1)...(19): siRNA sense strand
gcacuagacguguugucau

SEQ ID NO: 2030868 - RNA, 19 nt, Homo sapiens
  misc_RNA (1)...(19): siRNA sense strand
ugcaagaacggcaagauga

SEQ ID NO: 2030869 - RNA, 19 nt, Homo sapiens
  misc_RNA (1)...(19): siRNA sense strand
ucuggaacauucguaguau

SEQ ID NO: 2030870 - RNA, 19 nt, Homo sapiens
  misc_RNA (1)...(19): siRNA sense strand
caagaugaacugccaugag

SEQ ID NO: 2030871 - RNA, 19 nt, Homo sapiens
  misc_RNA (1)...(19): siRNA sense strand
gauaucuggaacauucgua

SEQ ID NO: 2030872 - RNA, 19 nt, Homo sapiens
  misc_RNA (1)...(19): siRNA sense strand
gccaugaggguguagugaa

SEQ ID NO: 2030873 - RNA, 19 nt, Homo sapiens
  misc_RNA (1)...(19): siRNA sense strand
agacggaagaugacuuugu

SEQ ID NO: 2030874 - RNA, 19 nt, Homo sapiens
  misc_RNA (1)...(19): siRNA sense strand
gcagggacacaggaaguuc

SEQ ID NO: 2030875 - RNA, 19 nt, Homo sapiens
  misc_RNA (1)...(19): siRNA sense strand
aagaugacuuuguaucacu

SEQ ID NO: 2030876 - RNA, 19 nt, Homo sapiens
  misc_RNA (1)...(19): siRNA sense strand
accaauauccaaugcaaga

SEQ ID NO: 2030877 - RNA, 19 nt, Homo sapiens
  misc_RNA (1)...(19): siRNA sense strand
cagcaccaccaauauccaa

SEQ ID NO: 2030878 - RNA, 19 nt, Homo sapiens
  misc_RNA (1)...(19): siRNA sense strand
guguugucauugccuguga

SEQ ID NO: 2030879 - RNA, 19 nt, Homo sapiens
  misc_RNA (1)...(19): siRNA sense strand
gggcacccaacugcagaua

SEQ ID NO: 2030880 - RNA, 19 nt, Homo sapiens
  misc_RNA (1)...(19): siRNA sense strand
gaagauaucuggaacauuc

SEQ ID NO: 2030881 - RNA, 19 nt, Homo sapiens
  misc_RNA (1)...(19): siRNA sense strand
gacggaagaugacuuugua

SEQ ID NO: 2030882 - RNA, 19 nt, Homo sapiens
  misc_RNA (1)...(19): siRNA sense strand
gcagaggacccauucauug

SEQ ID NO: 2030883 - RNA, 19 nt, Homo sapiens
  misc_RNA (1)...(19): siRNA sense strand
gaacugccaugagggugua

SEQ ID NO: 2030884 - RNA, 19 nt, Homo sapiens
  misc_RNA (1)...(19): siRNA sense strand
gcacccaacugcagauauc

SEQ ID NO: 2030885 - RNA, 19 nt, Homo sapiens
  misc_RNA (1)...(19): siRNA sense strand
ggaagaugacuuuguauca

SEQ ID NO: 2030886 - RNA, 19 nt, Homo sapiens
  misc_RNA (1)...(19): siRNA sense strand
ggagacagguggcagugau

SEQ ID NO: 2030887 - RNA, 19 nt, Homo sapiens
  misc_RNA (1)...(19): siRNA sense strand
gcaagaacggcaagaugaa

SEQ ID NO: 2030888 - RNA, 19 nt, Homo sapiens
  misc_RNA (1)...(19): siRNA sense strand
ccaccaauauccaaugcaa

SEQ ID NO: 2030889 - RNA, 19 nt, Homo sapiens
  misc_RNA (1)...(19): siRNA sense strand
gaucgcuacugcaacuuga

SEQ ID NO: 2030890 - RNA, 19 nt, Homo sapiens
  misc_RNA (1)...(19): siRNA sense strand
gaagaugacuuuguaucac

SEQ ID NO: 2030891 - RNA, 19 nt, Homo sapiens
  misc_RNA (1)...(19): siRNA sense strand
gcaacuugaugaugcaaag

SEQ ID NO: 2030892 - RNA, 19 nt, Homo sapiens
  misc_RNA (1)...(19): siRNA sense strand
cacuagacguguugucauu

SEQ ID NO: 2030893 - RNA, 19 nt, Homo sapiens
  misc_RNA (1)...(19): siRNA sense strand
gaggacccauucauugcuu

SEQ ID NO: 2030894 - RNA, 19 nt, Homo sapiens
  misc_RNA (1)...(19): siRNA sense strand
gcaagcgcuucaacaccuu

SEQ ID NO: 2030895 - RNA, 19 nt, Homo sapiens
  misc_RNA (1)...(19): siRNA sense strand
cugcagauaucgggccaua

SEQ ID NO: 2030896 - RNA, 19 nt, Homo sapiens
  misc_RNA (1)...(19): siRNA sense strand
gcagauaucgggccauagc

SEQ ID NO: 2030897 - RNA, 19 nt, Homo sapiens
  misc_RNA (1)...(19): siRNA sense strand
gcaagaugaacugccauga

SEQ ID NO: 2030898 - RNA, 19 nt, Homo sapiens
  misc_RNA (1)...(19): siRNA sense strand
ccaugaggguguagugaag

SEQ ID NO: 2030899 - RNA, 19 nt, Homo sapiens
  misc_RNA (1)...(19): siRNA sense strand
augcaaagacggaagauga

SEQ ID NO: 2030900 - RNA, 19 nt, Homo sapiens
  misc_RNA (1)...(19): siRNA sense strand
gcaccaccaauauccaaug

SEQ ID NO: 2030901 - RNA, 19 nt, Homo sapiens
  misc_RNA (1)...(19): siRNA sense strand
ggccauagcgagcacuaga

SEQ ID NO: 2030902 - RNA, 19 nt, Homo sapiens
  misc_RNA (1)...(19): siRNA sense strand
caaagacggaagaugacuu

SEQ ID NO: 2030903 - RNA, 19 nt, Homo sapiens
  misc_RNA (1)...(19): siRNA sense strand
gcacuagacguguugucau

SEQ ID NO: 2030904 - RNA, 19 nt, Homo sapiens
  misc_RNA (1)...(19): siRNA sense strand
ugcaagaacggcaagauga

SEQ ID NO: 2030905 - RNA, 19 nt, Homo sapiens
  misc_RNA (1)...(19): siRNA sense strand
ucuggaacauucguaguau

SEQ ID NO: 2030906 - RNA, 19 nt, Homo sapiens
  misc_RNA (1)...(19): siRNA sense strand
caagaugaacugccaugag

SEQ ID NO: 2030907 - RNA, 19 nt, Homo sapiens
  misc_RNA (1)...(19): siRNA sense strand
gauaucuggaacauucgua

SEQ ID NO: 2030908 - RNA, 19 nt, Homo sapiens
  misc_RNA (1)...(19): siRNA sense strand
gccaugaggguguagugaa

SEQ ID NO: 2030909 - RNA, 19 nt, Homo sapiens
  misc_RNA (1)...(19): siRNA sense strand
agacggaagaugacuuugu

SEQ ID NO: 2030910 - RNA, 19 nt, Homo sapiens
  misc_RNA (1)...(19): siRNA sense strand
gcagggacacaggaaguuc

SEQ ID NO: 2030911 - RNA, 19 nt, Homo sapiens
  misc_RNA (1)...(19): siRNA sense strand
aagaugacuuuguaucacu

SEQ ID NO: 2030912 - RNA, 19 nt, Homo sapiens
  misc_RNA (1)...(19): siRNA sense strand
accaauauccaaugcaaga

SEQ ID NO: 2030913 - RNA, 19 nt, Homo sapiens
  misc_RNA (1)...(19): siRNA sense strand
cagcaccaccaauauccaa

SEQ ID NO: 2030914 - RNA, 19 nt, Homo sapiens
  misc_RNA (1)...(19): siRNA sense strand
guguugucauugccuguga

SEQ ID NO: 2030915 - RNA, 19 nt, Homo sapiens
  misc_RNA (1)...(19): siRNA sense strand
gggcacccaacugcagaua

SEQ ID NO: 2030916 - RNA, 19 nt, Homo sapiens
  misc_RNA (1)...(19): siRNA sense strand
gaagauaucuggaacauuc

SEQ ID NO: 2030917 - RNA, 19 nt, Homo sapiens
  misc_RNA (1)...(19): siRNA sense strand
gacggaagaugacuuugua

SEQ ID NO: 2030918 - RNA, 19 nt, Homo sapiens
  misc_RNA (1)...(19): siRNA sense strand
gcagaggacccauucauug

SEQ ID NO: 2030919 - RNA, 19 nt, Homo sapiens
  misc_RNA (1)...(19): siRNA sense strand
gaacugccaugagggugua

SEQ ID NO: 2030920 - RNA, 19 nt, Homo sapiens
  misc_RNA (1)...(19): siRNA sense strand
gcacccaacugcagauauc

SEQ ID NO: 2030921 - RNA, 19 nt, Homo sapiens
  misc_RNA (1)...(19): siRNA sense strand
ggaagaugacuuuguauca

SEQ ID NO: 2030922 - RNA, 19 nt, Homo sapiens
  misc_RNA (1)...(19): siRNA sense strand
ggagacagguggcagugau

SEQ ID NO: 2030923 - RNA, 19 nt, Homo sapiens
  misc_RNA (1)...(19): siRNA sense strand
gcaagaacggcaagaugaa

SEQ ID NO: 2030924 - RNA, 19 nt, Homo sapiens
  misc_RNA (1)...(19): siRNA sense strand
ccaccaauauccaaugcaa

SEQ ID NO: 2030925 - RNA, 19 nt, Homo sapiens
  misc_RNA (1)...(19): siRNA sense strand
gaucgcuacugcaacuuga

SEQ ID NO: 2030926 - RNA, 19 nt, Homo sapiens
  misc_RNA (1)...(19): siRNA sense strand
gaagaugacuuuguaucac

SEQ ID NO: 2030927 - RNA, 19 nt, Homo sapiens
  misc_RNA (1)...(19): siRNA sense strand
gcaacuugaugaugcaaag

SEQ ID NO: 2030928 - RNA, 19 nt, Homo sapiens
  misc_RNA (1)...(19): siRNA sense strand
cacuagacguguugucauu

SEQ ID NO: 2030929 - RNA, 19 nt, Homo sapiens
  misc_RNA (1)...(19): siRNA sense strand
gaggacccauucauugcuu

SEQ ID NO: 2030930 - RNA, 19 nt, Homo sapiens
  misc_RNA (1)...(19): siRNA sense strand
gcaagcgcuucaacaccuu

SEQ ID NO: 2030931 - RNA, 19 nt, Homo sapiens
  misc_RNA (1)...(19): siRNA sense strand
cugcagauaucgggccaua

SEQ ID NO: 2030932 - RNA, 19 nt, Homo sapiens
  misc_RNA (1)...(19): siRNA sense strand
gcagauaucgggccauagc

SEQ ID NO: 2030933 - RNA, 19 nt, Homo sapiens
  misc_RNA (1)...(19): siRNA sense strand
gcaagaugaacugccauga

SEQ ID NO: 2030934 - RNA, 19 nt, Homo sapiens
  misc_RNA (1)...(19): siRNA sense strand
ccaugaggguguagugaag

SEQ ID NO: 2030935 - RNA, 19 nt, Homo sapiens
  misc_RNA (1)...(19): siRNA sense strand
augcaaagacggaagauga

SEQ ID NO: 2030936 - RNA, 19 nt, Homo sapiens
  misc_RNA (1)...(19): siRNA sense strand
gcaccaccaauauccaaug

SEQ ID NO: 2030937 - RNA, 19 nt, Homo sapiens
  misc_RNA (1)...(19): siRNA sense strand
ggccauagcgagcacuaga

SEQ ID NO: 2030938 - RNA, 19 nt, Homo sapiens
  misc_RNA (1)...(19): siRNA sense strand
caaagacggaagaugacuu

SEQ ID NO: 2030939 - RNA, 19 nt, Homo sapiens
  misc_RNA (1)...(19): siRNA sense strand
gcacuagacguguugucau

SEQ ID NO: 2030940 - RNA, 19 nt, Homo sapiens
  misc_RNA (1)...(19): siRNA sense strand
ugcaagaacggcaagauga

SEQ ID NO: 2030941 - RNA, 19 nt, Homo sapiens
  misc_RNA (1)...(19): siRNA sense strand
ucuggaacauucguaguau

SEQ ID NO: 2030942 - RNA, 19 nt, Homo sapiens
  misc_RNA (1)...(19): siRNA sense strand
caagaugaacugccaugag

SEQ ID NO: 2030943 - RNA, 19 nt, Homo sapiens
  misc_RNA (1)...(19): siRNA sense strand
gauaucuggaacauucgua

SEQ ID NO: 2030944 - RNA, 19 nt, Homo sapiens
  misc_RNA (1)...(19): siRNA sense strand
gccaugaggguguagugaa

SEQ ID NO: 2030945 - RNA, 19 nt, Homo sapiens
  misc_RNA (1)...(19): siRNA sense strand
agacggaagaugacuuugu

SEQ ID NO: 2030946 - RNA, 19 nt, Homo sapiens
  misc_RNA (1)...(19): siRNA sense strand
gcagggacacaggaaguuc

SEQ ID NO: 2030947 - RNA, 19 nt, Homo sapiens
  misc_RNA (1)...(19): siRNA sense strand
aagaugacuuuguaucacu

SEQ ID NO: 2030948 - RNA, 19 nt, Homo sapiens
  misc_RNA (1)...(19): siRNA sense strand
accaauauccaaugcaaga

SEQ ID NO: 2030949 - RNA, 19 nt, Homo sapiens
  misc_RNA (1)...(19): siRNA sense strand
cagcaccaccaauauccaa

SEQ ID NO: 2030950 - RNA, 19 nt, Homo sapiens
  misc_RNA (1)...(19): siRNA sense strand
guguugucauugccuguga

SEQ ID NO: 2030951 - RNA, 19 nt, Homo sapiens
  misc_RNA (1)...(19): siRNA sense strand
gggcacccaacugcagaua

SEQ ID NO: 2030952 - RNA, 19 nt, Homo sapiens
  misc_RNA (1)...(19): siRNA sense strand
gaagauaucuggaacauuc

SEQ ID NO: 2030953 - RNA, 19 nt, Homo sapiens
  misc_RNA (1)...(19): siRNA sense strand
gacggaagaugacuuugua

SEQ ID NO: 2030954 - RNA, 19 nt, Homo sapiens
  misc_RNA (1)...(19): siRNA sense strand
gcagaggacccauucauug

SEQ ID NO: 2030955 - RNA, 19 nt, Homo sapiens
  misc_RNA (1)...(19): siRNA sense strand
gaacugccaugagggugua

SEQ ID NO: 2030956 - RNA, 19 nt, Homo sapiens
  misc_RNA (1)...(19): siRNA sense strand
gcacccaacugcagauauc

SEQ ID NO: 2030957 - RNA, 19 nt, Homo sapiens
  misc_RNA (1)...(19): siRNA sense strand
ggaagaugacuuuguauca

SEQ ID NO: 2030958 - RNA, 19 nt, Homo sapiens
  misc_RNA (1)...(19): siRNA sense strand
ggagacagguggcagugau

SEQ ID NO: 2030959 - RNA, 19 nt, Homo sapiens
  misc_RNA (1)...(19): siRNA sense strand
gcaagaacggcaagaugaa

SEQ ID NO: 2030960 - RNA, 19 nt, Homo sapiens
  misc_RNA (1)...(19): siRNA sense strand
ccaccaauauccaaugcaa

SEQ ID NO: 2030961 - RNA, 19 nt, Homo sapiens
  misc_RNA (1)...(19): siRNA sense strand
gaucgcuacugcaacuuga

SEQ ID NO: 2030962 - RNA, 19 nt, Homo sapiens
  misc_RNA (1)...(19): siRNA sense strand
gaagaugacuuuguaucac

SEQ ID NO: 2030963 - RNA, 19 nt, Homo sapiens
  misc_RNA (1)...(19): siRNA sense strand
gcaacuugaugaugcaaag

SEQ ID NO: 2030964 - RNA, 19 nt, Homo sapiens
  misc_RNA (1)...(19): siRNA sense strand
cacuagacguguugucauu

SEQ ID NO: 2030965 - RNA, 19 nt, Homo sapiens
  misc_RNA (1)...(19): siRNA sense strand
gaggacccauucauugcuu

SEQ ID NO: 2030966 - RNA, 19 nt, Homo sapiens
  misc_RNA (1)...(19): siRNA sense strand
gcaagcgcuucaacaccuu

SEQ ID NO: 2030967 - RNA, 19 nt, Homo sapiens
  misc_RNA (1)...(19): siRNA sense strand
cugcagauaucgggccaua

SEQ ID NO: 2030968 - RNA, 19 nt, Homo sapiens
  misc_RNA (1)...(19): siRNA sense strand
gcagauaucgggccauagc

SEQ ID NO: 2030969 - RNA, 19 nt, Homo sapiens
  misc_RNA (1)...(19): siRNA sense strand
gcaagaugaacugccauga

SEQ ID NO: 2030970 - RNA, 19 nt, Homo sapiens
  misc_RNA (1)...(19): siRNA sense strand
ccaugaggguguagugaag

SEQ ID NO: 2030971 - RNA, 19 nt, Homo sapiens
  misc_RNA (1)...(19): siRNA sense strand
augcaaagacggaagauga

SEQ ID NO: 2030972 - RNA, 19 nt, Homo sapiens
  misc_RNA (1)...(19): siRNA sense strand
gcaccaccaauauccaaug

SEQ ID NO: 2030973 - RNA, 19 nt, Homo sapiens
  misc_RNA (1)...(19): siRNA sense strand
ggccauagcgagcacuaga

SEQ ID NO: 2030974 - RNA, 19 nt, Homo sapiens
  misc_RNA (1)...(19): siRNA sense strand
caaagacggaagaugacuu

SEQ ID NO: 2030975 - RNA, 19 nt, Homo sapiens
  misc_RNA (1)...(19): siRNA sense strand
gcacuagacguguugucau

SEQ ID NO: 2030976 - RNA, 19 nt, Homo sapiens
  misc_RNA (1)...(19): siRNA sense strand
ugcaagaacggcaagauga

SEQ ID NO: 2030977 - RNA, 19 nt, Homo sapiens
  misc_RNA (1)...(19): siRNA sense strand
ucuggaacauucguaguau

SEQ ID NO: 2030978 - RNA, 19 nt, Homo sapiens
  misc_RNA (1)...(19): siRNA sense strand
caagaugaacugccaugag

SEQ ID NO: 2030979 - RNA, 19 nt, Homo sapiens
  misc_RNA (1)...(19): siRNA sense strand
gauaucuggaacauucgua

SEQ ID NO: 2030980 - RNA, 19 nt, Homo sapiens
  misc_RNA (1)...(19): siRNA sense strand
gccaugaggguguagugaa

SEQ ID NO: 2030981 - RNA, 19 nt, Homo sapiens
  misc_RNA (1)...(19): siRNA sense strand
agacggaagaugacuuugu

SEQ ID NO: 2030982 - RNA, 19 nt, Homo sapiens
  misc_RNA (1)...(19): siRNA sense strand
gcagggacacaggaaguuc

SEQ ID NO: 2030983 - RNA, 19 nt, Homo sapiens
  misc_RNA (1)...(19): siRNA sense strand
aagaugacuuuguaucacu

SEQ ID NO: 2030984 - RNA, 19 nt, Homo sapiens
  misc_RNA (1)...(19): siRNA sense strand
accaauauccaaugcaaga

SEQ ID NO: 2030985 - RNA, 19 nt, Homo sapiens
  misc_RNA (1)...(19): siRNA sense strand
cagcaccaccaauauccaa

SEQ ID NO: 2030986 - RNA, 19 nt, Homo sapiens
  misc_RNA (1)...(19): siRNA sense strand
guguugucauugccuguga

SEQ ID NO: 2030987 - RNA, 19 nt, Homo sapiens
  misc_RNA (1)...(19): siRNA sense strand
gggcacccaacugcagaua

SEQ ID NO: 2030988 - RNA, 19 nt, Homo sapiens
  misc_RNA (1)...(19): siRNA sense strand
gaagauaucuggaacauuc

SEQ ID NO: 2030989 - RNA, 19 nt, Homo sapiens
  misc_RNA (1)...(19): siRNA sense strand
gacggaagaugacuuugua

SEQ ID NO: 2030990 - RNA, 19 nt, Homo sapiens
  misc_RNA (1)...(19): siRNA sense strand
gcagaggacccauucauug

SEQ ID NO: 2030991 - RNA, 19 nt, Homo sapiens
  misc_RNA (1)...(19): siRNA sense strand
gaacugccaugagggugua

SEQ ID NO: 2030992 - RNA, 19 nt, Homo sapiens
  misc_RNA (1)...(19): siRNA sense strand
gcacccaacugcagauauc

SEQ ID NO: 2030993 - RNA, 19 nt, Homo sapiens
  misc_RNA (1)...(19): siRNA sense strand
ggaagaugacuuuguauca

SEQ ID NO: 2030994 - RNA, 19 nt, Homo sapiens
  misc_RNA (1)...(19): siRNA sense strand
ggagacagguggcagugau

SEQ ID NO: 2030995 - RNA, 19 nt, Homo sapiens
  misc_RNA (1)...(19): siRNA sense strand
gcaagaacggcaagaugaa

SEQ ID NO: 2030996 - RNA, 19 nt, Homo sapiens
  misc_RNA (1)...(19): siRNA sense strand
ccaccaauauccaaugcaa

SEQ ID NO: 2030997 - RNA, 19 nt, Homo sapiens
  misc_RNA (1)...(19): siRNA sense strand
gaucgcuacugcaacuuga

SEQ ID NO: 2030998 - RNA, 19 nt, Homo sapiens
  misc_RNA (1)...(19): siRNA sense strand
gaagaugacuuuguaucac

SEQ ID NO: 2030999 - RNA, 19 nt, Homo sapiens
  misc_RNA (1)...(19): siRNA sense strand
gcaacuugaugaugcaaag

SEQ ID NO: 2031000 - RNA, 19 nt, Homo sapiens
  misc_RNA (1)...(19): siRNA sense strand
cacuagacguguugucauu

SEQ ID NO: 2031001 - RNA, 19 nt, Homo sapiens
  misc_RNA (1)...(19): siRNA sense strand
gaggacccauucauugcuu

SEQ ID NO: 2031002 - RNA, 19 nt, Homo sapiens
  misc_RNA (1)...(19): siRNA sense strand
gcaagcgcuucaacaccuu

SEQ ID NO: 2031003 - RNA, 19 nt, Homo sapiens
  misc_RNA (1)...(19): siRNA sense strand
cugcagauaucgggccaua

SEQ ID NO: 2031004 - RNA, 19 nt, Homo sapiens
  misc_RNA (1)...(19): siRNA sense strand
gcagauaucgggccauagc

SEQ ID NO: 2031005 - RNA, 19 nt, Homo sapiens
  misc_RNA (1)...(19): siRNA sense strand
gcaagaugaacugccauga

SEQ ID NO: 2031006 - RNA, 19 nt, Homo sapiens
  misc_RNA (1)...(19): siRNA sense strand
ccaugaggguguagugaag

SEQ ID NO: 2031007 - RNA, 19 nt, Homo sapiens
  misc_RNA (1)...(19): siRNA sense strand
augcaaagacggaagauga

SEQ ID NO: 2031008 - RNA, 19 nt, Homo sapiens
  misc_RNA (1)...(19): siRNA sense strand
gcaccaccaauauccaaug

SEQ ID NO: 2031009 - RNA, 19 nt, Homo sapiens
  misc_RNA (1)...(19): siRNA sense strand
ggccauagcgagcacuaga

SEQ ID NO: 2031010 - RNA, 19 nt, Homo sapiens
  misc_RNA (1)...(19): siRNA sense strand
caaagacggaagaugacuu

SEQ ID NO: 2031011 - RNA, 19 nt, Homo sapiens
  misc_RNA (1)...(19): siRNA sense strand
gcacuagacguguugucau

SEQ ID NO: 2031012 - RNA, 19 nt, Homo sapiens
  misc_RNA (1)...(19): siRNA sense strand
ugcaagaacggcaagauga

SEQ ID NO: 2031013 - RNA, 19 nt, Homo sapiens
  misc_RNA (1)...(19): siRNA sense strand
ucuggaacauucguaguau

SEQ ID NO: 2031014 - RNA, 19 nt, Homo sapiens
  misc_RNA (1)...(19): siRNA sense strand
caagaugaacugccaugag

SEQ ID NO: 2031015 - RNA, 19 nt, Homo sapiens
  misc_RNA (1)...(19): siRNA sense strand
gauaucuggaacauucgua

SEQ ID NO: 2031016 - RNA, 19 nt, Homo sapiens
  misc_RNA (1)...(19): siRNA sense strand
gccaugaggguguagugaa

SEQ ID NO: 2031017 - RNA, 19 nt, Homo sapiens
  misc_RNA (1)...(19): siRNA sense strand
agacggaagaugacuuugu

SEQ ID NO: 2031018 - RNA, 19 nt, Homo sapiens
  misc_RNA (1)...(19): siRNA sense strand
gcagggacacaggaaguuc

SEQ ID NO: 2031019 - RNA, 19 nt, Homo sapiens
  misc_RNA (1)...(19): siRNA sense strand
aagaugacuuuguaucacu

SEQ ID NO: 2031020 - RNA, 19 nt, Homo sapiens
  misc_RNA (1)...(19): siRNA sense strand
accaauauccaaugcaaga

SEQ ID NO: 2031021 - RNA, 19 nt, Homo sapiens
  misc_RNA (1)...(19): siRNA sense strand
cagcaccaccaauauccaa

SEQ ID NO: 2031022 - RNA, 19 nt, Homo sapiens
  misc_RNA (1)...(19): siRNA sense strand
guguugucauugccuguga

SEQ ID NO: 2031023 - RNA, 19 nt, Homo sapiens
  misc_RNA (1)...(19): siRNA sense strand
gggcacccaacugcagaua

SEQ ID NO: 2031024 - RNA, 19 nt, Homo sapiens
  misc_RNA (1)...(19): siRNA sense strand
gaagauaucuggaacauuc

SEQ ID NO: 2031025 - RNA, 19 nt, Homo sapiens
  misc_RNA (1)...(19): siRNA sense strand
gacggaagaugacuuugua

SEQ ID NO: 2031026 - RNA, 19 nt, Homo sapiens
  misc_RNA (1)...(19): siRNA sense strand
gcagaggacccauucauug

SEQ ID NO: 2031027 - RNA, 19 nt, Homo sapiens
  misc_RNA (1)...(19): siRNA sense strand
gaacugccaugagggugua

SEQ ID NO: 2031028 - RNA, 19 nt, Homo sapiens
  misc_RNA (1)...(19): siRNA sense strand
gcacccaacugcagauauc

SEQ ID NO: 2031029 - RNA, 19 nt, Homo sapiens
  misc_RNA (1)...(19): siRNA sense strand
ggaagaugacuuuguauca

SEQ ID NO: 2031030 - RNA, 19 nt, Homo sapiens
  misc_RNA (1)...(19): siRNA sense strand
ggagacagguggcagugau

SEQ ID NO: 2031031 - RNA, 19 nt, Homo sapiens
  misc_RNA (1)...(19): siRNA sense strand
gcaagaacggcaagaugaa

SEQ ID NO: 2031032 - RNA, 19 nt, Homo sapiens
  misc_RNA (1)...(19): siRNA sense strand
ccaccaauauccaaugcaa

SEQ ID NO: 2031033 - RNA, 19 nt, Homo sapiens
  misc_RNA (1)...(19): siRNA sense strand
gaucgcuacugcaacuuga

SEQ ID NO: 2031034 - RNA, 19 nt, Homo sapiens
  misc_RNA (1)...(19): siRNA sense strand
gaagaugacuuuguaucac

SEQ ID NO: 2031035 - RNA, 19 nt, Homo sapiens
  misc_RNA (1)...(19): siRNA sense strand
gcaacuugaugaugcaaag

SEQ ID NO: 2031036 - RNA, 19 nt, Homo sapiens
  misc_RNA (1)...(19): siRNA sense strand
cacuagacguguugucauu

SEQ ID NO: 2031037 - RNA, 19 nt, Homo sapiens
  misc_RNA (1)...(19): siRNA sense strand
gaggacccauucauugcuu

SEQ ID NO: 2031038 - RNA, 19 nt, Homo sapiens
  misc_RNA (1)...(19): siRNA sense strand
gcaagcgcuucaacaccuu

SEQ ID NO: 2031039 - RNA, 19 nt, Homo sapiens
  misc_RNA (1)...(19): siRNA sense strand
cugcagauaucgggccaua

SEQ ID NO: 2031040 - RNA, 19 nt, Homo sapiens
  misc_RNA (1)...(19): siRNA sense strand
gcagauaucgggccauagc

SEQ ID NO: 2031041 - RNA, 19 nt, Homo sapiens
  misc_RNA (1)...(19): siRNA sense strand
gcaagaugaacugccauga

SEQ ID NO: 2031042 - RNA, 19 nt, Homo sapiens
  misc_RNA (1)...(19): siRNA sense strand
ccaugaggguguagugaag

SEQ ID NO: 2031043 - RNA, 19 nt, Homo sapiens
  misc_RNA (1)...(19): siRNA sense strand
augcaaagacggaagauga

SEQ ID NO: 2031044 - RNA, 19 nt, Homo sapiens
  misc_RNA (1)...(19): siRNA sense strand
gcaccaccaauauccaaug

SEQ ID NO: 2031045 - RNA, 19 nt, Homo sapiens
  misc_RNA (1)...(19): siRNA sense strand
ggccauagcgagcacuaga

SEQ ID NO: 2031046 - RNA, 19 nt, Homo sapiens
  misc_RNA (1)...(19): siRNA sense strand
caaagacggaagaugacuu

SEQ ID NO: 2031047 - RNA, 19 nt, Homo sapiens
  misc_RNA (1)...(19): siRNA sense strand
gcacuagacguguugucau

SEQ ID NO: 2031048 - RNA, 19 nt, Homo sapiens
  misc_RNA (1)...(19): siRNA sense strand
ugcaagaacggcaagauga

SEQ ID NO: 2031049 - RNA, 19 nt, Homo sapiens
  misc_RNA (1)...(19): siRNA sense strand
ucuggaacauucguaguau

SEQ ID NO: 2031050 - RNA, 19 nt, Homo sapiens
  misc_RNA (1)...(19): siRNA sense strand
caagaugaacugccaugag

SEQ ID NO: 2031051 - RNA, 19 nt, Homo sapiens
  misc_RNA (1)...(19): siRNA sense strand
gauaucuggaacauucgua

SEQ ID NO: 2031052 - RNA, 19 nt, Homo sapiens
  misc_RNA (1)...(19): siRNA sense strand
gccaugaggguguagugaa

SEQ ID NO: 2031053 - RNA, 19 nt, Homo sapiens
  misc_RNA (1)...(19): siRNA sense strand
agacggaagaugacuuugu

SEQ ID NO: 2031054 - RNA, 19 nt, Homo sapiens
  misc_RNA (1)...(19): siRNA sense strand
gcagggacacaggaaguuc

SEQ ID NO: 2031055 - RNA, 19 nt, Homo sapiens
  misc_RNA (1)...(19): siRNA sense strand
aagaugacuuuguaucacu

SEQ ID NO: 2031056 - RNA, 19 nt, Homo sapiens
  misc_RNA (1)...(19): siRNA sense strand
accaauauccaaugcaaga

SEQ ID NO: 2031057 - RNA, 19 nt, Homo sapiens
  misc_RNA (1)...(19): siRNA sense strand
cagcaccaccaauauccaa

SEQ ID NO: 2031058 - RNA, 19 nt, Homo sapiens
  misc_RNA (1)...(19): siRNA sense strand
guguugucauugccuguga

SEQ ID NO: 2031059 - RNA, 19 nt, Homo sapiens
  misc_RNA (1)...(19): siRNA sense strand
gggcacccaacugcagaua

SEQ ID NO: 2031060 - RNA, 19 nt, Homo sapiens
  misc_RNA (1)...(19): siRNA sense strand
gaagauaucuggaacauuc

SEQ ID NO: 2031061 - RNA, 19 nt, Homo sapiens
  misc_RNA (1)...(19): siRNA sense strand
gacggaagaugacuuugua

SEQ ID NO: 2031062 - RNA, 19 nt, Homo sapiens
  misc_RNA (1)...(19): siRNA sense strand
gcagaggacccauucauug

SEQ ID NO: 2031063 - RNA, 19 nt, Homo sapiens
  misc_RNA (1)...(19): siRNA sense strand
gaacugccaugagggugua

SEQ ID NO: 2031064 - RNA, 19 nt, Homo sapiens
  misc_RNA (1)...(19): siRNA sense strand
gcacccaacugcagauauc

SEQ ID NO: 2031065 - RNA, 19 nt, Homo sapiens
  misc_RNA (1)...(19): siRNA sense strand
ggaagaugacuuuguauca

SEQ ID NO: 2031066 - RNA, 19 nt, Homo sapiens
  misc_RNA (1)...(19): siRNA sense strand
ggagacagguggcagugau

SEQ ID NO: 2031067 - RNA, 19 nt, Homo sapiens
  misc_RNA (1)...(19): siRNA sense strand
gcaagaacggcaagaugaa

SEQ ID NO: 2031068 - RNA, 19 nt, Homo sapiens
  misc_RNA (1)...(19): siRNA sense strand
ccaccaauauccaaugcaa

SEQ ID NO: 2031069 - RNA, 19 nt, Homo sapiens
  misc_RNA (1)...(19): siRNA sense strand
gaucgcuacugcaacuuga

SEQ ID NO: 2031070 - RNA, 19 nt, Homo sapiens
  misc_RNA (1)...(19): siRNA sense strand
gaagaugacuuuguaucac

SEQ ID NO: 2031071 - RNA, 19 nt, Homo sapiens
  misc_RNA (1)...(19): siRNA sense strand
gcaacuugaugaugcaaag

SEQ ID NO: 2031072 - RNA, 19 nt, Homo sapiens
  misc_RNA (1)...(19): siRNA sense strand
cacuagacguguugucauu

SEQ ID NO: 2031073 - RNA, 19 nt, Homo sapiens
  misc_RNA (1)...(19): siRNA sense strand
gaggacccauucauugcuu

SEQ ID NO: 2031074 - RNA, 19 nt, Homo sapiens
  misc_RNA (1)...(19): siRNA sense strand
gcaagcgcuucaacaccuu

SEQ ID NO: 2031075 - RNA, 19 nt, Homo sapiens
  misc_RNA (1)...(19): siRNA sense strand
cugcagauaucgggccaua

SEQ ID NO: 2031076 - RNA, 19 nt, Homo sapiens
  misc_RNA (1)...(19): siRNA sense strand
gcagauaucgggccauagc

SEQ ID NO: 2031077 - RNA, 19 nt, Homo sapiens
  misc_RNA (1)...(19): siRNA sense strand
gcaagaugaacugccauga

SEQ ID NO: 2031078 - RNA, 19 nt, Homo sapiens
  misc_RNA (1)...(19): siRNA sense strand
ccaugaggguguagugaag

SEQ ID NO: 2031079 - RNA, 19 nt, Homo sapiens
  misc_RNA (1)...(19): siRNA sense strand
augcaaagacggaagauga

SEQ ID NO: 2031080 - RNA, 19 nt, Homo sapiens
  misc_RNA (1)...(19): siRNA sense strand
gcaccaccaauauccaaug

SEQ ID NO: 2031081 - RNA, 19 nt, Homo sapiens
  misc_RNA (1)...(19): siRNA sense strand
ggccauagcgagcacuaga

SEQ ID NO: 2031082 - RNA, 19 nt, Homo sapiens
  misc_RNA (1)...(19): siRNA sense strand
caaagacggaagaugacuu

SEQ ID NO: 2031083 - RNA, 19 nt, Homo sapiens
  misc_RNA (1)...(19): siRNA sense strand
gcacuagacguguugucau

SEQ ID NO: 2031084 - RNA, 19 nt, Homo sapiens
  misc_RNA (1)...(19): siRNA sense strand
ugcaagaacggcaagauga

SEQ ID NO: 2031085 - RNA, 19 nt, Homo sapiens
  misc_RNA (1)...(19): siRNA sense strand
ucuggaacauucguaguau

SEQ ID NO: 2031086 - RNA, 19 nt, Homo sapiens
  misc_RNA (1)...(19): siRNA sense strand
caagaugaacugccaugag

SEQ ID NO: 2031087 - RNA, 19 nt, Homo sapiens
  misc_RNA (1)...(19): siRNA sense strand
gauaucuggaacauucgua

SEQ ID NO: 2031088 - RNA, 19 nt, Homo sapiens
  misc_RNA (1)...(19): siRNA sense strand
gccaugaggguguagugaa

SEQ ID NO: 2031089 - RNA, 19 nt, Homo sapiens
  misc_RNA (1)...(19): siRNA sense strand
agacggaagaugacuuugu

SEQ ID NO: 2031090 - RNA, 19 nt, Homo sapiens
  misc_RNA (1)...(19): siRNA sense strand
gcagggacacaggaaguuc

SEQ ID NO: 2031091 - RNA, 19 nt, Homo sapiens
  misc_RNA (1)...(19): siRNA sense strand
aagaugacuuuguaucacu

SEQ ID NO: 2031092 - RNA, 19 nt, Homo sapiens
  misc_RNA (1)...(19): siRNA sense strand
accaauauccaaugcaaga

SEQ ID NO: 2031093 - RNA, 19 nt, Homo sapiens
  misc_RNA (1)...(19): siRNA sense strand
cagcaccaccaauauccaa

SEQ ID NO: 2031094 - RNA, 19 nt, Homo sapiens
  misc_RNA (1)...(19): siRNA sense strand
guguugucauugccuguga

SEQ ID NO: 2031095 - RNA, 19 nt, Homo sapiens
  misc_RNA (1)...(19): siRNA sense strand
gggcacccaacugcagaua

SEQ ID NO: 2031096 - RNA, 19 nt, Homo sapiens
  misc_RNA (1)...(19): siRNA sense strand
gaagauaucuggaacauuc

SEQ ID NO: 2031097 - RNA, 19 nt, Homo sapiens
  misc_RNA (1)...(19): siRNA sense strand
gacggaagaugacuuugua

SEQ ID NO: 2031098 - RNA, 19 nt, Homo sapiens
  misc_RNA (1)...(19): siRNA sense strand
gcagaggacccauucauug

SEQ ID NO: 2031099 - RNA, 19 nt, Homo sapiens
  misc_RNA (1)...(19): siRNA sense strand
gaacugccaugagggugua

SEQ ID NO: 2031100 - RNA, 19 nt, Homo sapiens
  misc_RNA (1)...(19): siRNA sense strand
gcacccaacugcagauauc

SEQ ID NO: 2031101 - RNA, 19 nt, Homo sapiens
  misc_RNA (1)...(19): siRNA sense strand
ggaagaugacuuuguauca

SEQ ID NO: 2031102 - RNA, 19 nt, Homo sapiens
  misc_RNA (1)...(19): siRNA sense strand
ggagacagguggcagugau

SEQ ID NO: 2031103 - RNA, 19 nt, Homo sapiens
  misc_RNA (1)...(19): siRNA sense strand
gcaagaacggcaagaugaa

SEQ ID NO: 2031104 - RNA, 19 nt, Homo sapiens
  misc_RNA (1)...(19): siRNA sense strand
ccaccaauauccaaugcaa

SEQ ID NO: 2031105 - RNA, 19 nt, Homo sapiens
  misc_RNA (1)...(19): siRNA sense strand
gaucgcuacugcaacuuga

SEQ ID NO: 2031106 - RNA, 19 nt, Homo sapiens
  misc_RNA (1)...(19): siRNA sense strand
gaagaugacuuuguaucac

SEQ ID NO: 2031107 - RNA, 19 nt, Homo sapiens
  misc_RNA (1)...(19): siRNA sense strand
gcaacuugaugaugcaaag

SEQ ID NO: 2031108 - RNA, 19 nt, Homo sapiens
  misc_RNA (1)...(19): siRNA sense strand
cacuagacguguugucauu

SEQ ID NO: 2031109 - RNA, 19 nt, Homo sapiens
  misc_RNA (1)...(19): siRNA sense strand
gaggacccauucauugcuu

SEQ ID NO: 2031110 - RNA, 19 nt, Homo sapiens
  misc_RNA (1)...(19): siRNA sense strand
gcaagcgcuucaacaccuu

SEQ ID NO: 2031111 - RNA, 19 nt, Homo sapiens
  misc_RNA (1)...(19): siRNA sense strand
cugcagauaucgggccaua

SEQ ID NO: 2031112 - RNA, 19 nt, Homo sapiens
  misc_RNA (1)...(19): siRNA sense strand
gcagauaucgggccauagc

SEQ ID NO: 2031113 - RNA, 19 nt, Homo sapiens
  misc_RNA (1)...(19): siRNA sense strand
gcaagaugaacugccauga

SEQ ID NO: 2031114 - RNA, 19 nt, Homo sapiens
  misc_RNA (1)...(19): siRNA sense strand
ccaugaggguguagugaag

SEQ ID NO: 2031115 - RNA, 19 nt, Homo sapiens
  misc_RNA (1)...(19): siRNA sense strand
augcaaagacggaagauga

SEQ ID NO: 2031116 - RNA, 19 nt, Homo sapiens
  misc_RNA (1)...(19): siRNA sense strand
gcaccaccaauauccaaug

SEQ ID NO: 2031117 - RNA, 19 nt, Homo sapiens
  misc_RNA (1)...(19): siRNA sense strand
ggccauagcgagcacuaga

SEQ ID NO: 2031118 - RNA, 19 nt, Homo sapiens
  misc_RNA (1)...(19): siRNA sense strand
caaagacggaagaugacuu

SEQ ID NO: 2031119 - RNA, 19 nt, Homo sapiens
  misc_RNA (1)...(19): siRNA sense strand
gcacuagacguguugucau

SEQ ID NO: 2031120 - RNA, 19 nt, Homo sapiens
  misc_RNA (1)...(19): siRNA sense strand
ugcaagaacggcaagauga

SEQ ID NO: 2031121 - RNA, 19 nt, Homo sapiens
  misc_RNA (1)...(19): siRNA sense strand
ucuggaacauucguaguau

SEQ ID NO: 2031122 - RNA, 19 nt, Homo sapiens
  misc_RNA (1)...(19): siRNA sense strand
caagaugaacugccaugag

SEQ ID NO: 2031123 - RNA, 19 nt, Homo sapiens
  misc_RNA (1)...(19): siRNA sense strand
gauaucuggaacauucgua

SEQ ID NO: 2031124 - RNA, 19 nt, Homo sapiens
  misc_RNA (1)...(19): siRNA sense strand
gccaugaggguguagugaa

SEQ ID NO: 2031125 - RNA, 19 nt, Homo sapiens
  misc_RNA (1)...(19): siRNA sense strand
agacggaagaugacuuugu

SEQ ID NO: 2031126 - RNA, 19 nt, Homo sapiens
  misc_RNA (1)...(19): siRNA sense strand
gcagggacacaggaaguuc

SEQ ID NO: 2031127 - RNA, 19 nt, Homo sapiens
  misc_RNA (1)...(19): siRNA sense strand
aagaugacuuuguaucacu

SEQ ID NO: 2031128 - RNA, 19 nt, Homo sapiens
  misc_RNA (1)...(19): siRNA sense strand
accaauauccaaugcaaga

SEQ ID NO: 2031129 - RNA, 19 nt, Homo sapiens
  misc_RNA (1)...(19): siRNA sense strand
cagcaccaccaauauccaa

SEQ ID NO: 2031130 - RNA, 19 nt, Homo sapiens
  misc_RNA (1)...(19): siRNA sense strand
guguugucauugccuguga

SEQ ID NO: 2031131 - RNA, 19 nt, Homo sapiens
  misc_RNA (1)...(19): siRNA sense strand
gggcacccaacugcagaua

SEQ ID NO: 2031132 - RNA, 19 nt, Homo sapiens
  misc_RNA (1)...(19): siRNA sense strand
gaacagacuuuguguguag

SEQ ID NO: 2031133 - RNA, 19 nt, Homo sapiens
  misc_RNA (1)...(19): siRNA sense strand
acaaauggcuuaaggcaaa

SEQ ID NO: 2031134 - RNA, 19 nt, Homo sapiens
  misc_RNA (1)...(19): siRNA sense strand
gaagauaguccaaguccua

SEQ ID NO: 2031135 - RNA, 19 nt, Homo sapiens
  misc_RNA (1)...(19): siRNA sense strand
uguagaagauggagaagua

SEQ ID NO: 2031136 - RNA, 19 nt, Homo sapiens
  misc_RNA (1)...(19): siRNA sense strand
uugaacaacuuccuucuua

SEQ ID NO: 2031137 - RNA, 19 nt, Homo sapiens
  misc_RNA (1)...(19): siRNA sense strand
gcagcuacuuagagucuua

SEQ ID NO: 2031138 - RNA, 19 nt, Homo sapiens
  misc_RNA (1)...(19): siRNA sense strand
gcacaucccugcuuguagu

SEQ ID NO: 2031139 - RNA, 19 nt, Homo sapiens
  misc_RNA (1)...(19): siRNA sense strand
gcacuuaccaguaccauau

SEQ ID NO: 2031140 - RNA, 19 nt, Homo sapiens
  misc_RNA (1)...(19): siRNA sense strand
ccaaguguguugacaaaug

SEQ ID NO: 2031141 - RNA, 19 nt, Homo sapiens
  misc_RNA (1)...(19): siRNA sense strand
ggagguguccuuuggagua

SEQ ID NO: 2031142 - RNA, 19 nt, Homo sapiens
  misc_RNA (1)...(19): siRNA sense strand
aaucguacuugcccaauuu

SEQ ID NO: 2031143 - RNA, 19 nt, Homo sapiens
  misc_RNA (1)...(19): siRNA sense strand
gggcccaacuuucagcuuu

SEQ ID NO: 2031144 - RNA, 19 nt, Homo sapiens
  misc_RNA (1)...(19): siRNA sense strand
gaacaacuuccuucuuauc

SEQ ID NO: 2031145 - RNA, 19 nt, Homo sapiens
  misc_RNA (1)...(19): siRNA sense strand
gcagugggcccaacuuuca

SEQ ID NO: 2031146 - RNA, 19 nt, Homo sapiens
  misc_RNA (1)...(19): siRNA sense strand
caaggcagcuacuuagagu

SEQ ID NO: 2031147 - RNA, 19 nt, Homo sapiens
  misc_RNA (1)...(19): siRNA sense strand
agacagcgccucucucauu

SEQ ID NO: 2031148 - RNA, 19 nt, Homo sapiens
  misc_RNA (1)...(19): siRNA sense strand
gaucagcuccaucaaggaa

SEQ ID NO: 2031149 - RNA, 19 nt, Homo sapiens
  misc_RNA (1)...(19): siRNA sense strand
gacuaaagcagauauugaa

SEQ ID NO: 2031150 - RNA, 19 nt, Homo sapiens
  misc_RNA (1)...(19): siRNA sense strand
gcagaaugcagucaugguu

SEQ ID NO: 2031151 - RNA, 19 nt, Homo sapiens
  misc_RNA (1)...(19): siRNA sense strand
gauagaaaaugaaguggaa

SEQ ID NO: 2031152 - RNA, 19 nt, Homo sapiens
  misc_RNA (1)...(19): siRNA sense strand
guucagcacuuaccaguac

SEQ ID NO: 2031153 - RNA, 19 nt, Homo sapiens
  misc_RNA (1)...(19): siRNA sense strand
cucauucagucuuugauua

SEQ ID NO: 2031154 - RNA, 19 nt, Homo sapiens
  misc_RNA (1)...(19): siRNA sense strand
gaagauggagaaguagaaa

SEQ ID NO: 2031155 - RNA, 19 nt, Homo sapiens
  misc_RNA (1)...(19): siRNA sense strand
gcaccucccugucuguagu

SEQ ID NO: 2031156 - RNA, 19 nt, Homo sapiens
  misc_RNA (1)...(19): siRNA sense strand
aggagaacaucuuccagua

SEQ ID NO: 2031157 - RNA, 19 nt, Homo sapiens
  misc_RNA (1)...(19): siRNA sense strand
aaaugaaguggaacucuua

SEQ ID NO: 2031158 - RNA, 19 nt, Homo sapiens
  misc_RNA (1)...(19): siRNA sense strand
gaucgccucugcaaaggau

SEQ ID NO: 2031159 - RNA, 19 nt, Homo sapiens
  misc_RNA (1)...(19): siRNA sense strand
ggaagaagggaucgucugu

SEQ ID NO: 2031160 - RNA, 19 nt, Homo sapiens
  misc_RNA (1)...(19): siRNA sense strand
gagucaaggcagcuacuua

SEQ ID NO: 2031161 - RNA, 19 nt, Homo sapiens
  misc_RNA (1)...(19): siRNA sense strand
agaaugcagucaugguuga

SEQ ID NO: 2031162 - RNA, 19 nt, Homo sapiens
  misc_RNA (1)...(19): siRNA sense strand
ccaggaugcucugugguuu

SEQ ID NO: 2031163 - RNA, 19 nt, Homo sapiens
  misc_RNA (1)...(19): siRNA sense strand
gacagcgccucucucauuc

SEQ ID NO: 2031164 - RNA, 19 nt, Homo sapiens
  misc_RNA (1)...(19): siRNA sense strand
ugacuaaagcagauauuga

SEQ ID NO: 2031165 - RNA, 19 nt, Homo sapiens
  misc_RNA (1)...(19): siRNA sense strand
ugaacaacuuccuucuuau

SEQ ID NO: 2031166 - RNA, 19 nt, Homo sapiens
  misc_RNA (1)...(19): siRNA sense strand
cuuagagucuuacccugua

SEQ ID NO: 2031167 - RNA, 19 nt, Homo sapiens
  misc_RNA (1)...(19): siRNA sense strand
gagugaagauaguccaagu

SEQ ID NO: 2031168 - RNA, 19 nt, Homo sapiens
  misc_RNA (1)...(19): siRNA sense strand
gcacgcaacagaagaaguc

SEQ ID NO: 2031169 - RNA, 19 nt, Homo sapiens
  misc_RNA (1)...(19): siRNA sense strand
caaguguguugacaaaugg

SEQ ID NO: 2031170 - RNA, 19 nt, Homo sapiens
  misc_RNA (1)...(19): siRNA sense strand
guaguaugcaugugugauu

SEQ ID NO: 2031171 - RNA, 19 nt, Homo sapiens
  misc_RNA (1)...(19): siRNA sense strand
cagaacagacuuugugugu

SEQ ID NO: 2031172 - RNA, 19 nt, Homo sapiens
  misc_RNA (1)...(19): siRNA sense strand
ugccauauguguuaucaau

SEQ ID NO: 2031173 - RNA, 19 nt, Homo sapiens
  misc_RNA (1)...(19): siRNA sense strand
caucagcucccuugcaguu

SEQ ID NO: 2031174 - RNA, 19 nt, Homo sapiens
  misc_RNA (1)...(19): siRNA sense strand
gauaguccaaguccuaaga

SEQ ID NO: 2031175 - RNA, 19 nt, Homo sapiens
  misc_RNA (1)...(19): siRNA sense strand
uaccuuauccuccauuuau

SEQ ID NO: 2031176 - RNA, 19 nt, Homo sapiens
  misc_RNA (1)...(19): siRNA sense strand
cgaguuccaugccaagugu

SEQ ID NO: 2031177 - RNA, 19 nt, Homo sapiens
  misc_RNA (1)...(19): siRNA sense strand
aaauuacgaggcccuguua

SEQ ID NO: 2031178 - RNA, 19 nt, Homo sapiens
  misc_RNA (1)...(19): siRNA sense strand
ccauauguguuaucaaugc

SEQ ID NO: 2031179 - RNA, 19 nt, Homo sapiens
  misc_RNA (1)...(19): siRNA sense strand
cuuaacacaugauccuuug

SEQ ID NO: 2031180 - RNA, 19 nt, Homo sapiens
  misc_RNA (1)...(19): siRNA sense strand
gcagauauugaacaacuuc

SEQ ID NO: 2031181 - RNA, 19 nt, Homo sapiens
  misc_RNA (1)...(19): siRNA sense strand
aagcagauauugaacaacu

SEQ ID NO: 2031182 - RNA, 19 nt, Homo sapiens
  misc_RNA (1)...(19): siRNA sense strand
ggagaacaucuuccaguag

SEQ ID NO: 2031183 - RNA, 19 nt, Homo sapiens
  misc_RNA (1)...(19): siRNA sense strand
agaacagacuuugugugua

SEQ ID NO: 2031184 - RNA, 19 nt, Homo sapiens
  misc_RNA (1)...(19): siRNA sense strand
ucuuaucgguucaauccua

SEQ ID NO: 2031185 - RNA, 19 nt, Homo sapiens
  misc_RNA (1)...(19): siRNA sense strand
ggacugacuaaagcagaua

SEQ ID NO: 2031186 - RNA, 19 nt, Homo sapiens
  misc_RNA (1)...(19): siRNA sense strand
ccagcuuacugccauaugu

SEQ ID NO: 2031187 - RNA, 19 nt, Homo sapiens
  misc_RNA (1)...(19): siRNA sense strand
guaccuuauccuccauuua

SEQ ID NO: 2031188 - RNA, 19 nt, Homo sapiens
  misc_RNA (1)...(19): siRNA sense strand
ugccaaguguguugacaaa

SEQ ID NO: 2031189 - RNA, 19 nt, Homo sapiens
  misc_RNA (1)...(19): siRNA sense strand
gcaaagccucguggacuga

SEQ ID NO: 2031190 - RNA, 19 nt, Homo sapiens
  misc_RNA (1)...(19): siRNA sense strand
uuacaggacguaguagaua

SEQ ID NO: 2031191 - RNA, 19 nt, Homo sapiens
  misc_RNA (1)...(19): siRNA sense strand
aagaagggaucgucugucu

SEQ ID NO: 2031192 - RNA, 19 nt, Homo sapiens
  misc_RNA (1)...(19): siRNA sense strand
uaguaugcaugugugauuu

SEQ ID NO: 2031193 - RNA, 19 nt, Homo sapiens
  misc_RNA (1)...(19): siRNA sense strand
ucuagugauccauuucuua

SEQ ID NO: 2031194 - RNA, 19 nt, Homo sapiens
  misc_RNA (1)...(19): siRNA sense strand
uaacaaccaccagucagaa

SEQ ID NO: 2031195 - RNA, 19 nt, Homo sapiens
  misc_RNA (1)...(19): siRNA sense strand
ccagcagaaugcagucaug

SEQ ID NO: 2031196 - RNA, 19 nt, Homo sapiens
  misc_RNA (1)...(19): siRNA sense strand
guugacaaauggcuuaagg

SEQ ID NO: 2031197 - RNA, 19 nt, Homo sapiens
  misc_RNA (1)...(19): siRNA sense strand
gcccaacuuucagcuuuga

SEQ ID NO: 2031198 - RNA, 19 nt, Homo sapiens
  misc_RNA (1)...(19): siRNA sense strand
aagccaacaucacuucuca

SEQ ID NO: 2031199 - RNA, 19 nt, Homo sapiens
  misc_RNA (1)...(19): siRNA sense strand
cuucaggcauguucaguuc

SEQ ID NO: 2031200 - RNA, 19 nt, Homo sapiens
  misc_RNA (1)...(19): siRNA sense strand
cauguucaguucagcacuu

SEQ ID NO: 2031201 - RNA, 19 nt, Homo sapiens
  misc_RNA (1)...(19): siRNA sense strand
aaaucguacuugcccaauu

SEQ ID NO: 2031202 - RNA, 19 nt, Homo sapiens
  misc_RNA (1)...(19): siRNA sense strand
gauauugaacaacuuccuu

SEQ ID NO: 2031203 - RNA, 19 nt, Homo sapiens
  misc_RNA (1)...(19): siRNA sense strand
cagcuuugaauuagaugua

SEQ ID NO: 2031204 - RNA, 19 nt, Homo sapiens
  misc_RNA (1)...(19): siRNA sense strand
ugaaguggaacucuuagga

SEQ ID NO: 2031205 - RNA, 19 nt, Homo sapiens
  misc_RNA (1)...(19): siRNA sense strand
ccagcucccucaccaccaa

SEQ ID NO: 2031206 - RNA, 19 nt, Homo sapiens
  misc_RNA (1)...(19): siRNA sense strand
cuagugauccauuucuuau

SEQ ID NO: 2031207 - RNA, 19 nt, Homo sapiens
  misc_RNA (1)...(19): siRNA sense strand
cccaucauccuccucauuu

SEQ ID NO: 2031208 - RNA, 19 nt, Homo sapiens
  misc_RNA (1)...(19): siRNA sense strand
caaauggcuuaaggcaaau

SEQ ID NO: 2031209 - RNA, 19 nt, Homo sapiens
  misc_RNA (1)...(19): siRNA sense strand
agaagaaguccuccuguca

SEQ ID NO: 2031210 - RNA, 19 nt, Homo sapiens
  misc_RNA (1)...(19): siRNA sense strand
uugcaguucuuaacacaug

SEQ ID NO: 2031211 - RNA, 19 nt, Homo sapiens
  misc_RNA (1)...(19): siRNA sense strand
ccaucauccuccucauuug

SEQ ID NO: 2031212 - RNA, 19 nt, Homo sapiens
  misc_RNA (1)...(19): siRNA sense strand
caggccaguuugucccuuu

SEQ ID NO: 2031213 - RNA, 19 nt, Homo sapiens
  misc_RNA (1)...(19): siRNA sense strand
ccucucucauucagucuuu

SEQ ID NO: 2031214 - RNA, 19 nt, Homo sapiens
  misc_RNA (1)...(19): siRNA sense strand
ggcccaacuuucagcuuug

SEQ ID NO: 2031215 - RNA, 19 nt, Homo sapiens
  misc_RNA (1)...(19): siRNA sense strand
cuuaucgguucaauccuaa

SEQ ID NO: 2031216 - RNA, 19 nt, Homo sapiens
  misc_RNA (1)...(19): siRNA sense strand
ccacaugggauuccacucu

SEQ ID NO: 2031217 - RNA, 19 nt, Homo sapiens
  misc_RNA (1)...(19): siRNA sense strand
cuuacugccauauguguua

SEQ ID NO: 2031218 - RNA, 19 nt, Homo sapiens
  misc_RNA (1)...(19): siRNA sense strand
agugauccauuucuuauac

SEQ ID NO: 2031219 - RNA, 19 nt, Homo sapiens
  misc_RNA (1)...(19): siRNA sense strand
uagugugccuccuccaaug

SEQ ID NO: 2031220 - RNA, 19 nt, Homo sapiens
  misc_RNA (1)...(19): siRNA sense strand
uugccgagcugaugcuuca

SEQ ID NO: 2031221 - RNA, 19 nt, Homo sapiens
  misc_RNA (1)...(19): siRNA sense strand
cuaacaaccaccagucaga

SEQ ID NO: 2031222 - RNA, 19 nt, Homo sapiens
  misc_RNA (1)...(19): siRNA sense strand
gcuuugaauuagauguaga

SEQ ID NO: 2031223 - RNA, 19 nt, Homo sapiens
  misc_RNA (1)...(19): siRNA sense strand
guagugugccuccuccaau

SEQ ID NO: 2031224 - RNA, 19 nt, Homo sapiens
  misc_RNA (1)...(19): siRNA sense strand
ccaauuugccgagcugaug

SEQ ID NO: 2031225 - RNA, 19 nt, Homo sapiens
  misc_RNA (1)...(19): siRNA sense strand
uggcuuaaggcaaaucgua

SEQ ID NO: 2031226 - RNA, 19 nt, Homo sapiens
  misc_RNA (1)...(19): siRNA sense strand
uaacacaugauccuuugca

SEQ ID NO: 2031227 - RNA, 19 nt, Homo sapiens
  misc_RNA (1)...(19): siRNA sense strand
agaagugcaucgggauuca

SEQ ID NO: 2031228 - RNA, 19 nt, Homo sapiens
  misc_RNA (1)...(19): siRNA sense strand
aaaaugaaguggaacucuu

SEQ ID NO: 2031229 - RNA, 19 nt, Homo sapiens
  misc_RNA (1)...(19): siRNA sense strand
gacuuuguguguaguaugc

SEQ ID NO: 2031230 - RNA, 19 nt, Homo sapiens
  misc_RNA (1)...(19): siRNA sense strand
cuaaagcagauauugaaca

SEQ ID NO: 2031231 - RNA, 19 nt, Homo sapiens
  misc_RNA (1)...(19): siRNA sense strand
gaccaagccaacaucacuu

SEQ ID NO: 2031232 - RNA, 19 nt, Homo sapiens
  misc_RNA (1)...(19): siRNA sense strand
gaacagacuuuguguguag

SEQ ID NO: 2031233 - RNA, 19 nt, Homo sapiens
  misc_RNA (1)...(19): siRNA sense strand
acaaauggcuuaaggcaaa

SEQ ID NO: 2031234 - RNA, 19 nt, Homo sapiens
  misc_RNA (1)...(19): siRNA sense strand
uguagaagauggagaagua

SEQ ID NO: 2031235 - RNA, 19 nt, Homo sapiens
  misc_RNA (1)...(19): siRNA sense strand
uugaacaacuuccuucuua

SEQ ID NO: 2031236 - RNA, 19 nt, Homo sapiens
  misc_RNA (1)...(19): siRNA sense strand
gcagcuacuuagagucuua

SEQ ID NO: 2031237 - RNA, 19 nt, Homo sapiens
  misc_RNA (1)...(19): siRNA sense strand
gcacaucccugcuuguagu

SEQ ID NO: 2031238 - RNA, 19 nt, Homo sapiens
  misc_RNA (1)...(19): siRNA sense strand
gcacuuaccaguaccauau

SEQ ID NO: 2031239 - RNA, 19 nt, Homo sapiens
  misc_RNA (1)...(19): siRNA sense strand
ccaaguguguugacaaaug

SEQ ID NO: 2031240 - RNA, 19 nt, Homo sapiens
  misc_RNA (1)...(19): siRNA sense strand
ggagguguccuuuggagua

SEQ ID NO: 2031241 - RNA, 19 nt, Homo sapiens
  misc_RNA (1)...(19): siRNA sense strand
aaucguacuugcccaauuu

SEQ ID NO: 2031242 - RNA, 19 nt, Homo sapiens
  misc_RNA (1)...(19): siRNA sense strand
gggcccaacuuucagcuuu

SEQ ID NO: 2031243 - RNA, 19 nt, Homo sapiens
  misc_RNA (1)...(19): siRNA sense strand
gaacaacuuccuucuuauc

SEQ ID NO: 2031244 - RNA, 19 nt, Homo sapiens
  misc_RNA (1)...(19): siRNA sense strand
gcagugggcccaacuuuca

SEQ ID NO: 2031245 - RNA, 19 nt, Homo sapiens
  misc_RNA (1)...(19): siRNA sense strand
caaggcagcuacuuagagu

SEQ ID NO: 2031246 - RNA, 19 nt, Homo sapiens
  misc_RNA (1)...(19): siRNA sense strand
gaucagcuccaucaaggaa

SEQ ID NO: 2031247 - RNA, 19 nt, Homo sapiens
  misc_RNA (1)...(19): siRNA sense strand
gacuaaagcagauauugaa

SEQ ID NO: 2031248 - RNA, 19 nt, Homo sapiens
  misc_RNA (1)...(19): siRNA sense strand
gcagaaugcagucaugguu

SEQ ID NO: 2031249 - RNA, 19 nt, Homo sapiens
  misc_RNA (1)...(19): siRNA sense strand
gauagaaaaugaaguggaa

SEQ ID NO: 2031250 - RNA, 19 nt, Homo sapiens
  misc_RNA (1)...(19): siRNA sense strand
guucagcacuuaccaguac

SEQ ID NO: 2031251 - RNA, 19 nt, Homo sapiens
  misc_RNA (1)...(19): siRNA sense strand
gaagauggagaaguagaaa

SEQ ID NO: 2031252 - RNA, 19 nt, Homo sapiens
  misc_RNA (1)...(19): siRNA sense strand
gcaccucccugucuguagu

SEQ ID NO: 2031253 - RNA, 19 nt, Homo sapiens
  misc_RNA (1)...(19): siRNA sense strand
aggagaacaucuuccagua

SEQ ID NO: 2031254 - RNA, 19 nt, Homo sapiens
  misc_RNA (1)...(19): siRNA sense strand
aaaugaaguggaacucuua

SEQ ID NO: 2031255 - RNA, 19 nt, Homo sapiens
  misc_RNA (1)...(19): siRNA sense strand
gaucgccucugcaaaggau

SEQ ID NO: 2031256 - RNA, 19 nt, Homo sapiens
  misc_RNA (1)...(19): siRNA sense strand
ggaagaagggaucgucugu

SEQ ID NO: 2031257 - RNA, 19 nt, Homo sapiens
  misc_RNA (1)...(19): siRNA sense strand
gagucaaggcagcuacuua

SEQ ID NO: 2031258 - RNA, 19 nt, Homo sapiens
  misc_RNA (1)...(19): siRNA sense strand
agaaugcagucaugguuga

SEQ ID NO: 2031259 - RNA, 19 nt, Homo sapiens
  misc_RNA (1)...(19): siRNA sense strand
ccaggaugcucugugguuu

SEQ ID NO: 2031260 - RNA, 19 nt, Homo sapiens
  misc_RNA (1)...(19): siRNA sense strand
ugacuaaagcagauauuga

SEQ ID NO: 2031261 - RNA, 19 nt, Homo sapiens
  misc_RNA (1)...(19): siRNA sense strand
ugaacaacuuccuucuuau

SEQ ID NO: 2031262 - RNA, 19 nt, Homo sapiens
  misc_RNA (1)...(19): siRNA sense strand
cuuagagucuuacccugua

SEQ ID NO: 2031263 - RNA, 19 nt, Homo sapiens
  misc_RNA (1)...(19): siRNA sense strand
ugccauauguguuaucaau

SEQ ID NO: 2031264 - RNA, 19 nt, Homo sapiens
  misc_RNA (1)...(19): siRNA sense strand
caaguguguugacaaaugg

SEQ ID NO: 2031265 - RNA, 19 nt, Homo sapiens
  misc_RNA (1)...(19): siRNA sense strand
gcacgcaacagaagaaguc

SEQ ID NO: 2031266 - RNA, 19 nt, Homo sapiens
  misc_RNA (1)...(19): siRNA sense strand
guaguaugcaugugugauu

SEQ ID NO: 2031267 - RNA, 19 nt, Homo sapiens
  misc_RNA (1)...(19): siRNA sense strand
cagaacagacuuugugugu

SEQ ID NO: 2031268 - RNA, 19 nt, Homo sapiens
  misc_RNA (1)...(19): siRNA sense strand
caucagcucccuugcaguu

SEQ ID NO: 2031269 - RNA, 19 nt, Homo sapiens
  misc_RNA (1)...(19): siRNA sense strand
uaccuuauccuccauuuau

SEQ ID NO: 2031270 - RNA, 19 nt, Homo sapiens
  misc_RNA (1)...(19): siRNA sense strand
cgaguuccaugccaagugu

SEQ ID NO: 2031271 - RNA, 19 nt, Homo sapiens
  misc_RNA (1)...(19): siRNA sense strand
aaauuacgaggcccuguua

SEQ ID NO: 2031272 - RNA, 19 nt, Homo sapiens
  misc_RNA (1)...(19): siRNA sense strand
ccauauguguuaucaaugc

SEQ ID NO: 2031273 - RNA, 19 nt, Homo sapiens
  misc_RNA (1)...(19): siRNA sense strand
cuuaacacaugauccuuug

SEQ ID NO: 2031274 - RNA, 19 nt, Homo sapiens
  misc_RNA (1)...(19): siRNA sense strand
gcagauauugaacaacuuc

SEQ ID NO: 2031275 - RNA, 19 nt, Homo sapiens
  misc_RNA (1)...(19): siRNA sense strand
aagcagauauugaacaacu

SEQ ID NO: 2031276 - RNA, 19 nt, Homo sapiens
  misc_RNA (1)...(19): siRNA sense strand
ggagaacaucuuccaguag

SEQ ID NO: 2031277 - RNA, 19 nt, Homo sapiens
  misc_RNA (1)...(19): siRNA sense strand
agaacagacuuugugugua

SEQ ID NO: 2031278 - RNA, 19 nt, Homo sapiens
  misc_RNA (1)...(19): siRNA sense strand
ucuuaucgguucaauccua

SEQ ID NO: 2031279 - RNA, 19 nt, Homo sapiens
  misc_RNA (1)...(19): siRNA sense strand
ggacugacuaaagcagaua

SEQ ID NO: 2031280 - RNA, 19 nt, Homo sapiens
  misc_RNA (1)...(19): siRNA sense strand
ccagcuuacugccauaugu

SEQ ID NO: 2031281 - RNA, 19 nt, Homo sapiens
  misc_RNA (1)...(19): siRNA sense strand
guaccuuauccuccauuua

SEQ ID NO: 2031282 - RNA, 19 nt, Homo sapiens
  misc_RNA (1)...(19): siRNA sense strand
ugccaaguguguugacaaa

SEQ ID NO: 2031283 - RNA, 19 nt, Homo sapiens
  misc_RNA (1)...(19): siRNA sense strand
gcaaagccucguggacuga

SEQ ID NO: 2031284 - RNA, 19 nt, Homo sapiens
  misc_RNA (1)...(19): siRNA sense strand
uuacaggacguaguagaua

SEQ ID NO: 2031285 - RNA, 19 nt, Homo sapiens
  misc_RNA (1)...(19): siRNA sense strand
aagaagggaucgucugucu

SEQ ID NO: 2031286 - RNA, 19 nt, Homo sapiens
  misc_RNA (1)...(19): siRNA sense strand
uaguaugcaugugugauuu

SEQ ID NO: 2031287 - RNA, 19 nt, Homo sapiens
  misc_RNA (1)...(19): siRNA sense strand
ucuagugauccauuucuua

SEQ ID NO: 2031288 - RNA, 19 nt, Homo sapiens
  misc_RNA (1)...(19): siRNA sense strand
uaacaaccaccagucagaa

SEQ ID NO: 2031289 - RNA, 19 nt, Homo sapiens
  misc_RNA (1)...(19): siRNA sense strand
ccagcagaaugcagucaug

SEQ ID NO: 2031290 - RNA, 19 nt, Homo sapiens
  misc_RNA (1)...(19): siRNA sense strand
guugacaaauggcuuaagg

SEQ ID NO: 2031291 - RNA, 19 nt, Homo sapiens
  misc_RNA (1)...(19): siRNA sense strand
aagccaacaucacuucuca

SEQ ID NO: 2031292 - RNA, 19 nt, Homo sapiens
  misc_RNA (1)...(19): siRNA sense strand
gcccaacuuucagcuuuga

SEQ ID NO: 2031293 - RNA, 19 nt, Homo sapiens
  misc_RNA (1)...(19): siRNA sense strand
cuucaggcauguucaguuc

SEQ ID NO: 2031294 - RNA, 19 nt, Homo sapiens
  misc_RNA (1)...(19): siRNA sense strand
cauguucaguucagcacuu

SEQ ID NO: 2031295 - RNA, 19 nt, Homo sapiens
  misc_RNA (1)...(19): siRNA sense strand
aaaucguacuugcccaauu

SEQ ID NO: 2031296 - RNA, 19 nt, Homo sapiens
  misc_RNA (1)...(19): siRNA sense strand
gauauugaacaacuuccuu

SEQ ID NO: 2031297 - RNA, 19 nt, Homo sapiens
  misc_RNA (1)...(19): siRNA sense strand
cagcuuugaauuagaugua

SEQ ID NO: 2031298 - RNA, 19 nt, Homo sapiens
  misc_RNA (1)...(19): siRNA sense strand
ugaaguggaacucuuagga

SEQ ID NO: 2031299 - RNA, 19 nt, Homo sapiens
  misc_RNA (1)...(19): siRNA sense strand
cuagugauccauuucuuau

SEQ ID NO: 2031300 - RNA, 19 nt, Homo sapiens
  misc_RNA (1)...(19): siRNA sense strand
cccaucauccuccucauuu

SEQ ID NO: 2031301 - RNA, 19 nt, Homo sapiens
  misc_RNA (1)...(19): siRNA sense strand
caaauggcuuaaggcaaau

SEQ ID NO: 2031302 - RNA, 19 nt, Homo sapiens
  misc_RNA (1)...(19): siRNA sense strand
agaagaaguccuccuguca

SEQ ID NO: 2031303 - RNA, 19 nt, Homo sapiens
  misc_RNA (1)...(19): siRNA sense strand
uugcaguucuuaacacaug

SEQ ID NO: 2031304 - RNA, 19 nt, Homo sapiens
  misc_RNA (1)...(19): siRNA sense strand
ccaucauccuccucauuug

SEQ ID NO: 2031305 - RNA, 19 nt, Homo sapiens
  misc_RNA (1)...(19): siRNA sense strand
caggccaguuugucccuuu

SEQ ID NO: 2031306 - RNA, 19 nt, Homo sapiens
  misc_RNA (1)...(19): siRNA sense strand
ggcccaacuuucagcuuug

SEQ ID NO: 2031307 - RNA, 19 nt, Homo sapiens
  misc_RNA (1)...(19): siRNA sense strand
cuuaucgguucaauccuaa

SEQ ID NO: 2031308 - RNA, 19 nt, Homo sapiens
  misc_RNA (1)...(19): siRNA sense strand
ccacaugggauuccacucu

SEQ ID NO: 2031309 - RNA, 19 nt, Homo sapiens
  misc_RNA (1)...(19): siRNA sense strand
cuuacugccauauguguua

SEQ ID NO: 2031310 - RNA, 19 nt, Homo sapiens
  misc_RNA (1)...(19): siRNA sense strand
agugauccauuucuuauac

SEQ ID NO: 2031311 - RNA, 19 nt, Homo sapiens
  misc_RNA (1)...(19): siRNA sense strand
uagugugccuccuccaaug

SEQ ID NO: 2031312 - RNA, 19 nt, Homo sapiens
  misc_RNA (1)...(19): siRNA sense strand
uugccgagcugaugcuuca

SEQ ID NO: 2031313 - RNA, 19 nt, Homo sapiens
  misc_RNA (1)...(19): siRNA sense strand
cuaacaaccaccagucaga

SEQ ID NO: 2031314 - RNA, 19 nt, Homo sapiens
  misc_RNA (1)...(19): siRNA sense strand
gcuuugaauuagauguaga

SEQ ID NO: 2031315 - RNA, 19 nt, Homo sapiens
  misc_RNA (1)...(19): siRNA sense strand
guagugugccuccuccaau

SEQ ID NO: 2031316 - RNA, 19 nt, Homo sapiens
  misc_RNA (1)...(19): siRNA sense strand
ccaauuugccgagcugaug

SEQ ID NO: 2031317 - RNA, 19 nt, Homo sapiens
  misc_RNA (1)...(19): siRNA sense strand
uggcuuaaggcaaaucgua

SEQ ID NO: 2031318 - RNA, 19 nt, Homo sapiens
  misc_RNA (1)...(19): siRNA sense strand
uaacacaugauccuuugca

SEQ ID NO: 2031319 - RNA, 19 nt, Homo sapiens
  misc_RNA (1)...(19): siRNA sense strand
agaagugcaucgggauuca

SEQ ID NO: 2031320 - RNA, 19 nt, Homo sapiens
  misc_RNA (1)...(19): siRNA sense strand
aaaaugaaguggaacucuu

SEQ ID NO: 2031321 - RNA, 19 nt, Homo sapiens
  misc_RNA (1)...(19): siRNA sense strand
gacuuuguguguaguaugc

SEQ ID NO: 2031322 - RNA, 19 nt, Homo sapiens
  misc_RNA (1)...(19): siRNA sense strand
cuaaagcagauauugaaca

SEQ ID NO: 2031323 - RNA, 19 nt, Homo sapiens
  misc_RNA (1)...(19): siRNA sense strand
gaccaagccaacaucacuu

SEQ ID NO: 2031324 - RNA, 19 nt, Homo sapiens
  misc_RNA (1)...(19): siRNA sense strand
cgaccaagccaacaucacu

SEQ ID NO: 2031325 - RNA, 19 nt, Homo sapiens
  misc_RNA (1)...(19): siRNA sense strand
agaagauggagaaguagaa

SEQ ID NO: 2031326 - RNA, 19 nt, Homo sapiens
  misc_RNA (1)...(19): siRNA sense strand
aggcuuacaggacguagua

SEQ ID NO: 2031327 - RNA, 19 nt, Homo sapiens
  misc_RNA (1)...(19): siRNA sense strand
gagguguccuuuggaguac

SEQ ID NO: 2031328 - RNA, 19 nt, Homo sapiens
  misc_RNA (1)...(19): siRNA sense strand
uauacauccuccucaccuu

SEQ ID NO: 2031329 - RNA, 19 nt, Homo sapiens
  misc_RNA (1)...(19): siRNA sense strand
gugauccauuucuuauaca

SEQ ID NO: 2031330 - RNA, 19 nt, Homo sapiens
  misc_RNA (1)...(19): siRNA sense strand
agauguagaagauggagaa

SEQ ID NO: 2031331 - RNA, 19 nt, Homo sapiens
  misc_RNA (1)...(19): siRNA sense strand
ucagcuccaucaaggaaca

SEQ ID NO: 2031332 - RNA, 19 nt, Homo sapiens
  misc_RNA (1)...(19): siRNA sense strand
gaacagacuuuguguguag

SEQ ID NO: 2031333 - RNA, 19 nt, Homo sapiens
  misc_RNA (1)...(19): siRNA sense strand
acaaauggcuuaaggcaaa

SEQ ID NO: 2031334 - RNA, 19 nt, Homo sapiens
  misc_RNA (1)...(19): siRNA sense strand
gaagauaguccaaguccua

SEQ ID NO: 2031335 - RNA, 19 nt, Homo sapiens
  misc_RNA (1)...(19): siRNA sense strand
uguagaagauggagaagua

SEQ ID NO: 2031336 - RNA, 19 nt, Homo sapiens
  misc_RNA (1)...(19): siRNA sense strand
uugaacaacuuccuucuua

SEQ ID NO: 2031337 - RNA, 19 nt, Homo sapiens
  misc_RNA (1)...(19): siRNA sense strand
gcagcuacuuagagucuua

SEQ ID NO: 2031338 - RNA, 19 nt, Homo sapiens
  misc_RNA (1)...(19): siRNA sense strand
gcacaucccugcuuguagu

SEQ ID NO: 2031339 - RNA, 19 nt, Homo sapiens
  misc_RNA (1)...(19): siRNA sense strand
gcacuuaccaguaccauau

SEQ ID NO: 2031340 - RNA, 19 nt, Homo sapiens
  misc_RNA (1)...(19): siRNA sense strand
ccaaguguguugacaaaug

SEQ ID NO: 2031341 - RNA, 19 nt, Homo sapiens
  misc_RNA (1)...(19): siRNA sense strand
ggagguguccuuuggagua

SEQ ID NO: 2031342 - RNA, 19 nt, Homo sapiens
  misc_RNA (1)...(19): siRNA sense strand
aaucguacuugcccaauuu

SEQ ID NO: 2031343 - RNA, 19 nt, Homo sapiens
  misc_RNA (1)...(19): siRNA sense strand
gggcccaacuuucagcuuu

SEQ ID NO: 2031344 - RNA, 19 nt, Homo sapiens
  misc_RNA (1)...(19): siRNA sense strand
gaacaacuuccuucuuauc

SEQ ID NO: 2031345 - RNA, 19 nt, Homo sapiens
  misc_RNA (1)...(19): siRNA sense strand
gcagugggcccaacuuuca

SEQ ID NO: 2031346 - RNA, 19 nt, Homo sapiens
  misc_RNA (1)...(19): siRNA sense strand
caaggcagcuacuuagagu

SEQ ID NO: 2031347 - RNA, 19 nt, Homo sapiens
  misc_RNA (1)...(19): siRNA sense strand
agacagcgccucucucauu

SEQ ID NO: 2031348 - RNA, 19 nt, Homo sapiens
  misc_RNA (1)...(19): siRNA sense strand
gaucagcuccaucaaggaa

SEQ ID NO: 2031349 - RNA, 19 nt, Homo sapiens
  misc_RNA (1)...(19): siRNA sense strand
gacuaaagcagauauugaa

SEQ ID NO: 2031350 - RNA, 19 nt, Homo sapiens
  misc_RNA (1)...(19): siRNA sense strand
gcagaaugcagucaugguu

SEQ ID NO: 2031351 - RNA, 19 nt, Homo sapiens
  misc_RNA (1)...(19): siRNA sense strand
gauagaaaaugaaguggaa

SEQ ID NO: 2031352 - RNA, 19 nt, Homo sapiens
  misc_RNA (1)...(19): siRNA sense strand
guucagcacuuaccaguac

SEQ ID NO: 2031353 - RNA, 19 nt, Homo sapiens
  misc_RNA (1)...(19): siRNA sense strand
cucauucagucuuugauua

SEQ ID NO: 2031354 - RNA, 19 nt, Homo sapiens
  misc_RNA (1)...(19): siRNA sense strand
gaagauggagaaguagaaa

SEQ ID NO: 2031355 - RNA, 19 nt, Homo sapiens
  misc_RNA (1)...(19): siRNA sense strand
gcaccucccugucuguagu

SEQ ID NO: 2031356 - RNA, 19 nt, Homo sapiens
  misc_RNA (1)...(19): siRNA sense strand
aggagaacaucuuccagua

SEQ ID NO: 2031357 - RNA, 19 nt, Homo sapiens
  misc_RNA (1)...(19): siRNA sense strand
aaaugaaguggaacucuua

SEQ ID NO: 2031358 - RNA, 19 nt, Homo sapiens
  misc_RNA (1)...(19): siRNA sense strand
gaucgccucugcaaaggau

SEQ ID NO: 2031359 - RNA, 19 nt, Homo sapiens
  misc_RNA (1)...(19): siRNA sense strand
ggaagaagggaucgucugu

SEQ ID NO: 2031360 - RNA, 19 nt, Homo sapiens
  misc_RNA (1)...(19): siRNA sense strand
gagucaaggcagcuacuua

SEQ ID NO: 2031361 - RNA, 19 nt, Homo sapiens
  misc_RNA (1)...(19): siRNA sense strand
agaaugcagucaugguuga

SEQ ID NO: 2031362 - RNA, 19 nt, Homo sapiens
  misc_RNA (1)...(19): siRNA sense strand
ccaggaugcucugugguuu

SEQ ID NO: 2031363 - RNA, 19 nt, Homo sapiens
  misc_RNA (1)...(19): siRNA sense strand
gacagcgccucucucauuc

SEQ ID NO: 2031364 - RNA, 19 nt, Homo sapiens
  misc_RNA (1)...(19): siRNA sense strand
ugacuaaagcagauauuga

SEQ ID NO: 2031365 - RNA, 19 nt, Homo sapiens
  misc_RNA (1)...(19): siRNA sense strand
ugaacaacuuccuucuuau

SEQ ID NO: 2031366 - RNA, 19 nt, Homo sapiens
  misc_RNA (1)...(19): siRNA sense strand
cuuagagucuuacccugua

SEQ ID NO: 2031367 - RNA, 19 nt, Homo sapiens
  misc_RNA (1)...(19): siRNA sense strand
gagugaagauaguccaagu

SEQ ID NO: 2031368 - RNA, 19 nt, Homo sapiens
  misc_RNA (1)...(19): siRNA sense strand
gcacgcaacagaagaaguc

SEQ ID NO: 2031369 - RNA, 19 nt, Homo sapiens
  misc_RNA (1)...(19): siRNA sense strand
caaguguguugacaaaugg

SEQ ID NO: 2031370 - RNA, 19 nt, Homo sapiens
  misc_RNA (1)...(19): siRNA sense strand
guaguaugcaugugugauu

SEQ ID NO: 2031371 - RNA, 19 nt, Homo sapiens
  misc_RNA (1)...(19): siRNA sense strand
cagaacagacuuugugugu

SEQ ID NO: 2031372 - RNA, 19 nt, Homo sapiens
  misc_RNA (1)...(19): siRNA sense strand
ugccauauguguuaucaau

SEQ ID NO: 2031373 - RNA, 19 nt, Homo sapiens
  misc_RNA (1)...(19): siRNA sense strand
caucagcucccuugcaguu

SEQ ID NO: 2031374 - RNA, 19 nt, Homo sapiens
  misc_RNA (1)...(19): siRNA sense strand
gauaguccaaguccuaaga

SEQ ID NO: 2031375 - RNA, 19 nt, Homo sapiens
  misc_RNA (1)...(19): siRNA sense strand
uaccuuauccuccauuuau

SEQ ID NO: 2031376 - RNA, 19 nt, Homo sapiens
  misc_RNA (1)...(19): siRNA sense strand
cgaguuccaugccaagugu

SEQ ID NO: 2031377 - RNA, 19 nt, Homo sapiens
  misc_RNA (1)...(19): siRNA sense strand
aaauuacgaggcccuguua

SEQ ID NO: 2031378 - RNA, 19 nt, Homo sapiens
  misc_RNA (1)...(19): siRNA sense strand
ccauauguguuaucaaugc

SEQ ID NO: 2031379 - RNA, 19 nt, Homo sapiens
  misc_RNA (1)...(19): siRNA sense strand
cuuaacacaugauccuuug

SEQ ID NO: 2031380 - RNA, 19 nt, Homo sapiens
  misc_RNA (1)...(19): siRNA sense strand
gcagauauugaacaacuuc

SEQ ID NO: 2031381 - RNA, 19 nt, Homo sapiens
  misc_RNA (1)...(19): siRNA sense strand
aagcagauauugaacaacu

SEQ ID NO: 2031382 - RNA, 19 nt, Homo sapiens
  misc_RNA (1)...(19): siRNA sense strand
ggagaacaucuuccaguag

SEQ ID NO: 2031383 - RNA, 19 nt, Homo sapiens
  misc_RNA (1)...(19): siRNA sense strand
agaacagacuuugugugua

SEQ ID NO: 2031384 - RNA, 19 nt, Homo sapiens
  misc_RNA (1)...(19): siRNA sense strand
ucuuaucgguucaauccua

SEQ ID NO: 2031385 - RNA, 19 nt, Homo sapiens
  misc_RNA (1)...(19): siRNA sense strand
ggacugacuaaagcagaua

SEQ ID NO: 2031386 - RNA, 19 nt, Homo sapiens
  misc_RNA (1)...(19): siRNA sense strand
ccagcuuacugccauaugu

SEQ ID NO: 2031387 - RNA, 19 nt, Homo sapiens
  misc_RNA (1)...(19): siRNA sense strand
guaccuuauccuccauuua

SEQ ID NO: 2031388 - RNA, 19 nt, Homo sapiens
  misc_RNA (1)...(19): siRNA sense strand
ugccaaguguguugacaaa

SEQ ID NO: 2031389 - RNA, 19 nt, Homo sapiens
  misc_RNA (1)...(19): siRNA sense strand
gcaaagccucguggacuga

SEQ ID NO: 2031390 - RNA, 19 nt, Homo sapiens
  misc_RNA (1)...(19): siRNA sense strand
uuacaggacguaguagaua

SEQ ID NO: 2031391 - RNA, 19 nt, Homo sapiens
  misc_RNA (1)...(19): siRNA sense strand
aagaagggaucgucugucu

SEQ ID NO: 2031392 - RNA, 19 nt, Homo sapiens
  misc_RNA (1)...(19): siRNA sense strand
uaguaugcaugugugauuu

SEQ ID NO: 2031393 - RNA, 19 nt, Homo sapiens
  misc_RNA (1)...(19): siRNA sense strand
ucuagugauccauuucuua

SEQ ID NO: 2031394 - RNA, 19 nt, Homo sapiens
  misc_RNA (1)...(19): siRNA sense strand
uaacaaccaccagucagaa

SEQ ID NO: 2031395 - RNA, 19 nt, Homo sapiens
  misc_RNA (1)...(19): siRNA sense strand
ccagcagaaugcagucaug

SEQ ID NO: 2031396 - RNA, 19 nt, Homo sapiens
  misc_RNA (1)...(19): siRNA sense strand
guugacaaauggcuuaagg

SEQ ID NO: 2031397 - RNA, 19 nt, Homo sapiens
  misc_RNA (1)...(19): siRNA sense strand
gcccaacuuucagcuuuga

SEQ ID NO: 2031398 - RNA, 19 nt, Homo sapiens
  misc_RNA (1)...(19): siRNA sense strand
aagccaacaucacuucuca

SEQ ID NO: 2031399 - RNA, 19 nt, Homo sapiens
  misc_RNA (1)...(19): siRNA sense strand
cuucaggcauguucaguuc

SEQ ID NO: 2031400 - RNA, 19 nt, Homo sapiens
  misc_RNA (1)...(19): siRNA sense strand
cauguucaguucagcacuu

SEQ ID NO: 2031401 - RNA, 19 nt, Homo sapiens
  misc_RNA (1)...(19): siRNA sense strand
aaaucguacuugcccaauu

SEQ ID NO: 2031402 - RNA, 19 nt, Homo sapiens
  misc_RNA (1)...(19): siRNA sense strand
gauauugaacaacuuccuu

SEQ ID NO: 2031403 - RNA, 19 nt, Homo sapiens
  misc_RNA (1)...(19): siRNA sense strand
cagcuuugaauuagaugua

SEQ ID NO: 2031404 - RNA, 19 nt, Homo sapiens
  misc_RNA (1)...(19): siRNA sense strand
ugaaguggaacucuuagga

SEQ ID NO: 2031405 - RNA, 19 nt, Homo sapiens
  misc_RNA (1)...(19): siRNA sense strand
ccagcucccucaccaccaa

SEQ ID NO: 2031406 - RNA, 19 nt, Homo sapiens
  misc_RNA (1)...(19): siRNA sense strand
cuagugauccauuucuuau

SEQ ID NO: 2031407 - RNA, 19 nt, Homo sapiens
  misc_RNA (1)...(19): siRNA sense strand
cccaucauccuccucauuu

SEQ ID NO: 2031408 - RNA, 19 nt, Homo sapiens
  misc_RNA (1)...(19): siRNA sense strand
caaauggcuuaaggcaaau

SEQ ID NO: 2031409 - RNA, 19 nt, Homo sapiens
  misc_RNA (1)...(19): siRNA sense strand
agaagaaguccuccuguca

SEQ ID NO: 2031410 - RNA, 19 nt, Homo sapiens
  misc_RNA (1)...(19): siRNA sense strand
uugcaguucuuaacacaug

SEQ ID NO: 2031411 - RNA, 19 nt, Homo sapiens
  misc_RNA (1)...(19): siRNA sense strand
ccaucauccuccucauuug

SEQ ID NO: 2031412 - RNA, 19 nt, Homo sapiens
  misc_RNA (1)...(19): siRNA sense strand
caggccaguuugucccuuu

SEQ ID NO: 2031413 - RNA, 19 nt, Homo sapiens
  misc_RNA (1)...(19): siRNA sense strand
ccucucucauucagucuuu

SEQ ID NO: 2031414 - RNA, 19 nt, Homo sapiens
  misc_RNA (1)...(19): siRNA sense strand
ggcccaacuuucagcuuug

SEQ ID NO: 2031415 - RNA, 19 nt, Homo sapiens
  misc_RNA (1)...(19): siRNA sense strand
cuuaucgguucaauccuaa

SEQ ID NO: 2031416 - RNA, 19 nt, Homo sapiens
  misc_RNA (1)...(19): siRNA sense strand
ccacaugggauuccacucu

SEQ ID NO: 2031417 - RNA, 19 nt, Homo sapiens
  misc_RNA (1)...(19): siRNA sense strand
cuuacugccauauguguua

SEQ ID NO: 2031418 - RNA, 19 nt, Homo sapiens
  misc_RNA (1)...(19): siRNA sense strand
agugauccauuucuuauac

SEQ ID NO: 2031419 - RNA, 19 nt, Homo sapiens
  misc_RNA (1)...(19): siRNA sense strand
uagugugccuccuccaaug

SEQ ID NO: 2031420 - RNA, 19 nt, Homo sapiens
  misc_RNA (1)...(19): siRNA sense strand
uugccgagcugaugcuuca

SEQ ID NO: 2031421 - RNA, 19 nt, Homo sapiens
  misc_RNA (1)...(19): siRNA sense strand
cuaacaaccaccagucaga

SEQ ID NO: 2031422 - RNA, 19 nt, Homo sapiens
  misc_RNA (1)...(19): siRNA sense strand
gcuuugaauuagauguaga

SEQ ID NO: 2031423 - RNA, 19 nt, Homo sapiens
  misc_RNA (1)...(19): siRNA sense strand
guagugugccuccuccaau

SEQ ID NO: 2031424 - RNA, 19 nt, Homo sapiens
  misc_RNA (1)...(19): siRNA sense strand
ccaauuugccgagcugaug

SEQ ID NO: 2031425 - RNA, 19 nt, Homo sapiens
  misc_RNA (1)...(19): siRNA sense strand
uggcuuaaggcaaaucgua

SEQ ID NO: 2031426 - RNA, 19 nt, Homo sapiens
  misc_RNA (1)...(19): siRNA sense strand
uaacacaugauccuuugca

SEQ ID NO: 2031427 - RNA, 19 nt, Homo sapiens
  misc_RNA (1)...(19): siRNA sense strand
agaagugcaucgggauuca

SEQ ID NO: 2031428 - RNA, 19 nt, Homo sapiens
  misc_RNA (1)...(19): siRNA sense strand
aaaaugaaguggaacucuu

SEQ ID NO: 2031429 - RNA, 19 nt, Homo sapiens
  misc_RNA (1)...(19): siRNA sense strand
gacuuuguguguaguaugc

SEQ ID NO: 2031430 - RNA, 19 nt, Homo sapiens
  misc_RNA (1)...(19): siRNA sense strand
cuaaagcagauauugaaca

SEQ ID NO: 2031431 - RNA, 19 nt, Homo sapiens
  misc_RNA (1)...(19): siRNA sense strand
gaccaagccaacaucacuu

SEQ ID NO: 2031432 - RNA, 19 nt, Homo sapiens
  misc_RNA (1)...(19): siRNA sense strand
gaacagacuuuguguguag

SEQ ID NO: 2031433 - RNA, 19 nt, Homo sapiens
  misc_RNA (1)...(19): siRNA sense strand
acaaauggcuuaaggcaaa

SEQ ID NO: 2031434 - RNA, 19 nt, Homo sapiens
  misc_RNA (1)...(19): siRNA sense strand
uguagaagauggagaagua

SEQ ID NO: 2031435 - RNA, 19 nt, Homo sapiens
  misc_RNA (1)...(19): siRNA sense strand
uugaacaacuuccuucuua

SEQ ID NO: 2031436 - RNA, 19 nt, Homo sapiens
  misc_RNA (1)...(19): siRNA sense strand
gcagcuacuuagagucuua

SEQ ID NO: 2031437 - RNA, 19 nt, Homo sapiens
  misc_RNA (1)...(19): siRNA sense strand
gcacaucccugcuuguagu

SEQ ID NO: 2031438 - RNA, 19 nt, Homo sapiens
  misc_RNA (1)...(19): siRNA sense strand
gcacuuaccaguaccauau

SEQ ID NO: 2031439 - RNA, 19 nt, Homo sapiens
  misc_RNA (1)...(19): siRNA sense strand
ccaaguguguugacaaaug

SEQ ID NO: 2031440 - RNA, 19 nt, Homo sapiens
  misc_RNA (1)...(19): siRNA sense strand
ggagguguccuuuggagua

SEQ ID NO: 2031441 - RNA, 19 nt, Homo sapiens
  misc_RNA (1)...(19): siRNA sense strand
aaucguacuugcccaauuu

SEQ ID NO: 2031442 - RNA, 19 nt, Homo sapiens
  misc_RNA (1)...(19): siRNA sense strand
gggcccaacuuucagcuuu

SEQ ID NO: 2031443 - RNA, 19 nt, Homo sapiens
  misc_RNA (1)...(19): siRNA sense strand
gaacaacuuccuucuuauc

SEQ ID NO: 2031444 - RNA, 19 nt, Homo sapiens
  misc_RNA (1)...(19): siRNA sense strand
gcagugggcccaacuuuca

SEQ ID NO: 2031445 - RNA, 19 nt, Homo sapiens
  misc_RNA (1)...(19): siRNA sense strand
caaggcagcuacuuagagu

SEQ ID NO: 2031446 - RNA, 19 nt, Homo sapiens
  misc_RNA (1)...(19): siRNA sense strand
gaucagcuccaucaaggaa

SEQ ID NO: 2031447 - RNA, 19 nt, Homo sapiens
  misc_RNA (1)...(19): siRNA sense strand
gacuaaagcagauauugaa

SEQ ID NO: 2031448 - RNA, 19 nt, Homo sapiens
  misc_RNA (1)...(19): siRNA sense strand
gcagaaugcagucaugguu

SEQ ID NO: 2031449 - RNA, 19 nt, Homo sapiens
  misc_RNA (1)...(19): siRNA sense strand
gauagaaaaugaaguggaa

SEQ ID NO: 2031450 - RNA, 19 nt, Homo sapiens
  misc_RNA (1)...(19): siRNA sense strand
guucagcacuuaccaguac

SEQ ID NO: 2031451 - RNA, 19 nt, Homo sapiens
  misc_RNA (1)...(19): siRNA sense strand
gaagauggagaaguagaaa

SEQ ID NO: 2031452 - RNA, 19 nt, Homo sapiens
  misc_RNA (1)...(19): siRNA sense strand
gcaccucccugucuguagu

SEQ ID NO: 2031453 - RNA, 19 nt, Homo sapiens
  misc_RNA (1)...(19): siRNA sense strand
aggagaacaucuuccagua

SEQ ID NO: 2031454 - RNA, 19 nt, Homo sapiens
  misc_RNA (1)...(19): siRNA sense strand
aaaugaaguggaacucuua

SEQ ID NO: 2031455 - RNA, 19 nt, Homo sapiens
  misc_RNA (1)...(19): siRNA sense strand
gaucgccucugcaaaggau

SEQ ID NO: 2031456 - RNA, 19 nt, Homo sapiens
  misc_RNA (1)...(19): siRNA sense strand
ggaagaagggaucgucugu

SEQ ID NO: 2031457 - RNA, 19 nt, Homo sapiens
  misc_RNA (1)...(19): siRNA sense strand
gagucaaggcagcuacuua

SEQ ID NO: 2031458 - RNA, 19 nt, Homo sapiens
  misc_RNA (1)...(19): siRNA sense strand
agaaugcagucaugguuga

SEQ ID NO: 2031459 - RNA, 19 nt, Homo sapiens
  misc_RNA (1)...(19): siRNA sense strand
ccaggaugcucugugguuu

SEQ ID NO: 2031460 - RNA, 19 nt, Homo sapiens
  misc_RNA (1)...(19): siRNA sense strand
ugacuaaagcagauauuga

SEQ ID NO: 2031461 - RNA, 19 nt, Homo sapiens
  misc_RNA (1)...(19): siRNA sense strand
ugaacaacuuccuucuuau

SEQ ID NO: 2031462 - RNA, 19 nt, Homo sapiens
  misc_RNA (1)...(19): siRNA sense strand
cuuagagucuuacccugua

SEQ ID NO: 2031463 - RNA, 19 nt, Homo sapiens
  misc_RNA (1)...(19): siRNA sense strand
ugccauauguguuaucaau

SEQ ID NO: 2031464 - RNA, 19 nt, Homo sapiens
  misc_RNA (1)...(19): siRNA sense strand
caaguguguugacaaaugg

SEQ ID NO: 2031465 - RNA, 19 nt, Homo sapiens
  misc_RNA (1)...(19): siRNA sense strand
gcacgcaacagaagaaguc

SEQ ID NO: 2031466 - RNA, 19 nt, Homo sapiens
  misc_RNA (1)...(19): siRNA sense strand
guaguaugcaugugugauu

SEQ ID NO: 2031467 - RNA, 19 nt, Homo sapiens
  misc_RNA (1)...(19): siRNA sense strand
cagaacagacuuugugugu

SEQ ID NO: 2031468 - RNA, 19 nt, Homo sapiens
  misc_RNA (1)...(19): siRNA sense strand
caucagcucccuugcaguu

SEQ ID NO: 2031469 - RNA, 19 nt, Homo sapiens
  misc_RNA (1)...(19): siRNA sense strand
uaccuuauccuccauuuau

SEQ ID NO: 2031470 - RNA, 19 nt, Homo sapiens
  misc_RNA (1)...(19): siRNA sense strand
cgaguuccaugccaagugu

SEQ ID NO: 2031471 - RNA, 19 nt, Homo sapiens
  misc_RNA (1)...(19): siRNA sense strand
aaauuacgaggcccuguua

SEQ ID NO: 2031472 - RNA, 19 nt, Homo sapiens
  misc_RNA (1)...(19): siRNA sense strand
ccauauguguuaucaaugc

SEQ ID NO: 2031473 - RNA, 19 nt, Homo sapiens
  misc_RNA (1)...(19): siRNA sense strand
cuuaacacaugauccuuug

SEQ ID NO: 2031474 - RNA, 19 nt, Homo sapiens
  misc_RNA (1)...(19): siRNA sense strand
gcagauauugaacaacuuc

SEQ ID NO: 2031475 - RNA, 19 nt, Homo sapiens
  misc_RNA (1)...(19): siRNA sense strand
aagcagauauugaacaacu

SEQ ID NO: 2031476 - RNA, 19 nt, Homo sapiens
  misc_RNA (1)...(19): siRNA sense strand
ggagaacaucuuccaguag

SEQ ID NO: 2031477 - RNA, 19 nt, Homo sapiens
  misc_RNA (1)...(19): siRNA sense strand
agaacagacuuugugugua

SEQ ID NO: 2031478 - RNA, 19 nt, Homo sapiens
  misc_RNA (1)...(19): siRNA sense strand
ucuuaucgguucaauccua

SEQ ID NO: 2031479 - RNA, 19 nt, Homo sapiens
  misc_RNA (1)...(19): siRNA sense strand
ggacugacuaaagcagaua

SEQ ID NO: 2031480 - RNA, 19 nt, Homo sapiens
  misc_RNA (1)...(19): siRNA sense strand
ccagcuuacugccauaugu

SEQ ID NO: 2031481 - RNA, 19 nt, Homo sapiens
  misc_RNA (1)...(19): siRNA sense strand
guaccuuauccuccauuua

SEQ ID NO: 2031482 - RNA, 19 nt, Homo sapiens
  misc_RNA (1)...(19): siRNA sense strand
ugccaaguguguugacaaa

SEQ ID NO: 2031483 - RNA, 19 nt, Homo sapiens
  misc_RNA (1)...(19): siRNA sense strand
gcaaagccucguggacuga

SEQ ID NO: 2031484 - RNA, 19 nt, Homo sapiens
  misc_RNA (1)...(19): siRNA sense strand
uuacaggacguaguagaua

SEQ ID NO: 2031485 - RNA, 19 nt, Homo sapiens
  misc_RNA (1)...(19): siRNA sense strand
aagaagggaucgucugucu

SEQ ID NO: 2031486 - RNA, 19 nt, Homo sapiens
  misc_RNA (1)...(19): siRNA sense strand
uaguaugcaugugugauuu

SEQ ID NO: 2031487 - RNA, 19 nt, Homo sapiens
  misc_RNA (1)...(19): siRNA sense strand
ucuagugauccauuucuua

SEQ ID NO: 2031488 - RNA, 19 nt, Homo sapiens
  misc_RNA (1)...(19): siRNA sense strand
uaacaaccaccagucagaa

SEQ ID NO: 2031489 - RNA, 19 nt, Homo sapiens
  misc_RNA (1)...(19): siRNA sense strand
ccagcagaaugcagucaug

SEQ ID NO: 2031490 - RNA, 19 nt, Homo sapiens
  misc_RNA (1)...(19): siRNA sense strand
guugacaaauggcuuaagg

SEQ ID NO: 2031491 - RNA, 19 nt, Homo sapiens
  misc_RNA (1)...(19): siRNA sense strand
aagccaacaucacuucuca

SEQ ID NO: 2031492 - RNA, 19 nt, Homo sapiens
  misc_RNA (1)...(19): siRNA sense strand
gcccaacuuucagcuuuga

SEQ ID NO: 2031493 - RNA, 19 nt, Homo sapiens
  misc_RNA (1)...(19): siRNA sense strand
cuucaggcauguucaguuc

SEQ ID NO: 2031494 - RNA, 19 nt, Homo sapiens
  misc_RNA (1)...(19): siRNA sense strand
cauguucaguucagcacuu

SEQ ID NO: 2031495 - RNA, 19 nt, Homo sapiens
  misc_RNA (1)...(19): siRNA sense strand
aaaucguacuugcccaauu

SEQ ID NO: 2031496 - RNA, 19 nt, Homo sapiens
  misc_RNA (1)...(19): siRNA sense strand
gauauugaacaacuuccuu

SEQ ID NO: 2031497 - RNA, 19 nt, Homo sapiens
  misc_RNA (1)...(19): siRNA sense strand
cagcuuugaauuagaugua

SEQ ID NO: 2031498 - RNA, 19 nt, Homo sapiens
  misc_RNA (1)...(19): siRNA sense strand
ugaaguggaacucuuagga

SEQ ID NO: 2031499 - RNA, 19 nt, Homo sapiens
  misc_RNA (1)...(19): siRNA sense strand
cuagugauccauuucuuau

SEQ ID NO: 2031500 - RNA, 19 nt, Homo sapiens
  misc_RNA (1)...(19): siRNA sense strand
cccaucauccuccucauuu

SEQ ID NO: 2031501 - RNA, 19 nt, Homo sapiens
  misc_RNA (1)...(19): siRNA sense strand
caaauggcuuaaggcaaau

SEQ ID NO: 2031502 - RNA, 19 nt, Homo sapiens
  misc_RNA (1)...(19): siRNA sense strand
agaagaaguccuccuguca

SEQ ID NO: 2031503 - RNA, 19 nt, Homo sapiens
  misc_RNA (1)...(19): siRNA sense strand
uugcaguucuuaacacaug

SEQ ID NO: 2031504 - RNA, 19 nt, Homo sapiens
  misc_RNA (1)...(19): siRNA sense strand
ccaucauccuccucauuug

SEQ ID NO: 2031505 - RNA, 19 nt, Homo sapiens
  misc_RNA (1)...(19): siRNA sense strand
caggccaguuugucccuuu

SEQ ID NO: 2031506 - RNA, 19 nt, Homo sapiens
  misc_RNA (1)...(19): siRNA sense strand
ggcccaacuuucagcuuug

SEQ ID NO: 2031507 - RNA, 19 nt, Homo sapiens
  misc_RNA (1)...(19): siRNA sense strand
cuuaucgguucaauccuaa

SEQ ID NO: 2031508 - RNA, 19 nt, Homo sapiens
  misc_RNA (1)...(19): siRNA sense strand
ccacaugggauuccacucu

SEQ ID NO: 2031509 - RNA, 19 nt, Homo sapiens
  misc_RNA (1)...(19): siRNA sense strand
cuuacugccauauguguua

SEQ ID NO: 2031510 - RNA, 19 nt, Homo sapiens
  misc_RNA (1)...(19): siRNA sense strand
agugauccauuucuuauac

SEQ ID NO: 2031511 - RNA, 19 nt, Homo sapiens
  misc_RNA (1)...(19): siRNA sense strand
uagugugccuccuccaaug

SEQ ID NO: 2031512 - RNA, 19 nt, Homo sapiens
  misc_RNA (1)...(19): siRNA sense strand
uugccgagcugaugcuuca

SEQ ID NO: 2031513 - RNA, 19 nt, Homo sapiens
  misc_RNA (1)...(19): siRNA sense strand
cuaacaaccaccagucaga

SEQ ID NO: 2031514 - RNA, 19 nt, Homo sapiens
  misc_RNA (1)...(19): siRNA sense strand
gcuuugaauuagauguaga

SEQ ID NO: 2031515 - RNA, 19 nt, Homo sapiens
  misc_RNA (1)...(19): siRNA sense strand
guagugugccuccuccaau

SEQ ID NO: 2031516 - RNA, 19 nt, Homo sapiens
  misc_RNA (1)...(19): siRNA sense strand
ccaauuugccgagcugaug

SEQ ID NO: 2031517 - RNA, 19 nt, Homo sapiens
  misc_RNA (1)...(19): siRNA sense strand
uggcuuaaggcaaaucgua

SEQ ID NO: 2031518 - RNA, 19 nt, Homo sapiens
  misc_RNA (1)...(19): siRNA sense strand
uaacacaugauccuuugca

SEQ ID NO: 2031519 - RNA, 19 nt, Homo sapiens
  misc_RNA (1)...(19): siRNA sense strand
agaagugcaucgggauuca

SEQ ID NO: 2031520 - RNA, 19 nt, Homo sapiens
  misc_RNA (1)...(19): siRNA sense strand
aaaaugaaguggaacucuu

SEQ ID NO: 2031521 - RNA, 19 nt, Homo sapiens
  misc_RNA (1)...(19): siRNA sense strand
gacuuuguguguaguaugc

SEQ ID NO: 2031522 - RNA, 19 nt, Homo sapiens
  misc_RNA (1)...(19): siRNA sense strand
cuaaagcagauauugaaca

SEQ ID NO: 2031523 - RNA, 19 nt, Homo sapiens
  misc_RNA (1)...(19): siRNA sense strand
gaccaagccaacaucacuu

SEQ ID NO: 2031524 - RNA, 19 nt, Homo sapiens
  misc_RNA (1)...(19): siRNA sense strand
cgaccaagccaacaucacu

SEQ ID NO: 2031525 - RNA, 19 nt, Homo sapiens
  misc_RNA (1)...(19): siRNA sense strand
agaagauggagaaguagaa

SEQ ID NO: 2031526 - RNA, 19 nt, Homo sapiens
  misc_RNA (1)...(19): siRNA sense strand
aggcuuacaggacguagua

SEQ ID NO: 2031527 - RNA, 19 nt, Homo sapiens
  misc_RNA (1)...(19): siRNA sense strand
gagguguccuuuggaguac

SEQ ID NO: 2031528 - RNA, 19 nt, Homo sapiens
  misc_RNA (1)...(19): siRNA sense strand
uauacauccuccucaccuu

SEQ ID NO: 2031529 - RNA, 19 nt, Homo sapiens
  misc_RNA (1)...(19): siRNA sense strand
gugauccauuucuuauaca

SEQ ID NO: 2031530 - RNA, 19 nt, Homo sapiens
  misc_RNA (1)...(19): siRNA sense strand
agauguagaagauggagaa

SEQ ID NO: 2031531 - RNA, 19 nt, Homo sapiens
  misc_RNA (1)...(19): siRNA sense strand
ucagcuccaucaaggaaca

SEQ ID NO: 2031532 - RNA, 19 nt, Homo sapiens
  misc_RNA (1)...(19): siRNA sense strand
gaacagacuuuguguguag

SEQ ID NO: 2031533 - RNA, 19 nt, Homo sapiens
  misc_RNA (1)...(19): siRNA sense strand
acaaauggcuuaaggcaaa

SEQ ID NO: 2031534 - RNA, 19 nt, Homo sapiens
  misc_RNA (1)...(19): siRNA sense strand
uguagaagauggagaagua

SEQ ID NO: 2031535 - RNA, 19 nt, Homo sapiens
  misc_RNA (1)...(19): siRNA sense strand
uugaacaacuuccuucuua

SEQ ID NO: 2031536 - RNA, 19 nt, Homo sapiens
  misc_RNA (1)...(19): siRNA sense strand
gcagcuacuuagagucuua

SEQ ID NO: 2031537 - RNA, 19 nt, Homo sapiens
  misc_RNA (1)...(19): siRNA sense strand
gcacaucccugcuuguagu

SEQ ID NO: 2031538 - RNA, 19 nt, Homo sapiens
  misc_RNA (1)...(19): siRNA sense strand
gcacuuaccaguaccauau

SEQ ID NO: 2031539 - RNA, 19 nt, Homo sapiens
  misc_RNA (1)...(19): siRNA sense strand
ccaaguguguugacaaaug

SEQ ID NO: 2031540 - RNA, 19 nt, Homo sapiens
  misc_RNA (1)...(19): siRNA sense strand
ggagguguccuuuggagua

SEQ ID NO: 2031541 - RNA, 19 nt, Homo sapiens
  misc_RNA (1)...(19): siRNA sense strand
aaucguacuugcccaauuu

SEQ ID NO: 2031542 - RNA, 19 nt, Homo sapiens
  misc_RNA (1)...(19): siRNA sense strand
gggcccaacuuucagcuuu

SEQ ID NO: 2031543 - RNA, 19 nt, Homo sapiens
  misc_RNA (1)...(19): siRNA sense strand
gaacaacuuccuucuuauc

SEQ ID NO: 2031544 - RNA, 19 nt, Homo sapiens
  misc_RNA (1)...(19): siRNA sense strand
gcagugggcccaacuuuca

SEQ ID NO: 2031545 - RNA, 19 nt, Homo sapiens
  misc_RNA (1)...(19): siRNA sense strand
caaggcagcuacuuagagu

SEQ ID NO: 2031546 - RNA, 19 nt, Homo sapiens
  misc_RNA (1)...(19): siRNA sense strand
gaucagcuccaucaaggaa

SEQ ID NO: 2031547 - RNA, 19 nt, Homo sapiens
  misc_RNA (1)...(19): siRNA sense strand
gacuaaagcagauauugaa

SEQ ID NO: 2031548 - RNA, 19 nt, Homo sapiens
  misc_RNA (1)...(19): siRNA sense strand
gcagaaugcagucaugguu

SEQ ID NO: 2031549 - RNA, 19 nt, Homo sapiens
  misc_RNA (1)...(19): siRNA sense strand
gauagaaaaugaaguggaa

SEQ ID NO: 2031550 - RNA, 19 nt, Homo sapiens
  misc_RNA (1)...(19): siRNA sense strand
guucagcacuuaccaguac

SEQ ID NO: 2031551 - RNA, 19 nt, Homo sapiens
  misc_RNA (1)...(19): siRNA sense strand
gaagauggagaaguagaaa

SEQ ID NO: 2031552 - RNA, 19 nt, Homo sapiens
  misc_RNA (1)...(19): siRNA sense strand
gcaccucccugucuguagu

SEQ ID NO: 2031553 - RNA, 19 nt, Homo sapiens
  misc_RNA (1)...(19): siRNA sense strand
aggagaacaucuuccagua

SEQ ID NO: 2031554 - RNA, 19 nt, Homo sapiens
  misc_RNA (1)...(19): siRNA sense strand
aaaugaaguggaacucuua

SEQ ID NO: 2031555 - RNA, 19 nt, Homo sapiens
  misc_RNA (1)...(19): siRNA sense strand
gaucgccucugcaaaggau

SEQ ID NO: 2031556 - RNA, 19 nt, Homo sapiens
  misc_RNA (1)...(19): siRNA sense strand
ggaagaagggaucgucugu

SEQ ID NO: 2031557 - RNA, 19 nt, Homo sapiens
  misc_RNA (1)...(19): siRNA sense strand
gagucaaggcagcuacuua

SEQ ID NO: 2031558 - RNA, 19 nt, Homo sapiens
  misc_RNA (1)...(19): siRNA sense strand
agaaugcagucaugguuga

SEQ ID NO: 2031559 - RNA, 19 nt, Homo sapiens
  misc_RNA (1)...(19): siRNA sense strand
ccaggaugcucugugguuu

SEQ ID NO: 2031560 - RNA, 19 nt, Homo sapiens
  misc_RNA (1)...(19): siRNA sense strand
ugacuaaagcagauauuga

SEQ ID NO: 2031561 - RNA, 19 nt, Homo sapiens
  misc_RNA (1)...(19): siRNA sense strand
ugaacaacuuccuucuuau

SEQ ID NO: 2031562 - RNA, 19 nt, Homo sapiens
  misc_RNA (1)...(19): siRNA sense strand
cuuagagucuuacccugua

SEQ ID NO: 2031563 - RNA, 19 nt, Homo sapiens
  misc_RNA (1)...(19): siRNA sense strand
ugccauauguguuaucaau

SEQ ID NO: 2031564 - RNA, 19 nt, Homo sapiens
  misc_RNA (1)...(19): siRNA sense strand
caaguguguugacaaaugg

SEQ ID NO: 2031565 - RNA, 19 nt, Homo sapiens
  misc_RNA (1)...(19): siRNA sense strand
gcacgcaacagaagaaguc

SEQ ID NO: 2031566 - RNA, 19 nt, Homo sapiens
  misc_RNA (1)...(19): siRNA sense strand
guaguaugcaugugugauu

SEQ ID NO: 2031567 - RNA, 19 nt, Homo sapiens
  misc_RNA (1)...(19): siRNA sense strand
cagaacagacuuugugugu

SEQ ID NO: 2031568 - RNA, 19 nt, Homo sapiens
  misc_RNA (1)...(19): siRNA sense strand
caucagcucccuugcaguu

SEQ ID NO: 2031569 - RNA, 19 nt, Homo sapiens
  misc_RNA (1)...(19): siRNA sense strand
uaccuuauccuccauuuau

SEQ ID NO: 2031570 - RNA, 19 nt, Homo sapiens
  misc_RNA (1)...(19): siRNA sense strand
cgaguuccaugccaagugu

SEQ ID NO: 2031571 - RNA, 19 nt, Homo sapiens
  misc_RNA (1)...(19): siRNA sense strand
aaauuacgaggcccuguua

SEQ ID NO: 2031572 - RNA, 19 nt, Homo sapiens
  misc_RNA (1)...(19): siRNA sense strand
ccauauguguuaucaaugc

SEQ ID NO: 2031573 - RNA, 19 nt, Homo sapiens
  misc_RNA (1)...(19): siRNA sense strand
cuuaacacaugauccuuug

SEQ ID NO: 2031574 - RNA, 19 nt, Homo sapiens
  misc_RNA (1)...(19): siRNA sense strand
gcagauauugaacaacuuc

SEQ ID NO: 2031575 - RNA, 19 nt, Homo sapiens
  misc_RNA (1)...(19): siRNA sense strand
aagcagauauugaacaacu

SEQ ID NO: 2031576 - RNA, 19 nt, Homo sapiens
  misc_RNA (1)...(19): siRNA sense strand
ggagaacaucuuccaguag

SEQ ID NO: 2031577 - RNA, 19 nt, Homo sapiens
  misc_RNA (1)...(19): siRNA sense strand
agaacagacuuugugugua

SEQ ID NO: 2031578 - RNA, 19 nt, Homo sapiens
  misc_RNA (1)...(19): siRNA sense strand
ucuuaucgguucaauccua

SEQ ID NO: 2031579 - RNA, 19 nt, Homo sapiens
  misc_RNA (1)...(19): siRNA sense strand
ggacugacuaaagcagaua

SEQ ID NO: 2031580 - RNA, 19 nt, Homo sapiens
  misc_RNA (1)...(19): siRNA sense strand
ccagcuuacugccauaugu

SEQ ID NO: 2031581 - RNA, 19 nt, Homo sapiens
  misc_RNA (1)...(19): siRNA sense strand
guaccuuauccuccauuua

SEQ ID NO: 2031582 - RNA, 19 nt, Homo sapiens
  misc_RNA (1)...(19): siRNA sense strand
ugccaaguguguugacaaa

SEQ ID NO: 2031583 - RNA, 19 nt, Homo sapiens
  misc_RNA (1)...(19): siRNA sense strand
gcaaagccucguggacuga

SEQ ID NO: 2031584 - RNA, 19 nt, Homo sapiens
  misc_RNA (1)...(19): siRNA sense strand
uuacaggacguaguagaua

SEQ ID NO: 2031585 - RNA, 19 nt, Homo sapiens
  misc_RNA (1)...(19): siRNA sense strand
aagaagggaucgucugucu

SEQ ID NO: 2031586 - RNA, 19 nt, Homo sapiens
  misc_RNA (1)...(19): siRNA sense strand
uaguaugcaugugugauuu

SEQ ID NO: 2031587 - RNA, 19 nt, Homo sapiens
  misc_RNA (1)...(19): siRNA sense strand
ucuagugauccauuucuua

SEQ ID NO: 2031588 - RNA, 19 nt, Homo sapiens
  misc_RNA (1)...(19): siRNA sense strand
uaacaaccaccagucagaa

SEQ ID NO: 2031589 - RNA, 19 nt, Homo sapiens
  misc_RNA (1)...(19): siRNA sense strand
ccagcagaaugcagucaug

SEQ ID NO: 2031590 - RNA, 19 nt, Homo sapiens
  misc_RNA (1)...(19): siRNA sense strand
guugacaaauggcuuaagg

SEQ ID NO: 2031591 - RNA, 19 nt, Homo sapiens
  misc_RNA (1)...(19): siRNA sense strand
aagccaacaucacuucuca

SEQ ID NO: 2031592 - RNA, 19 nt, Homo sapiens
  misc_RNA (1)...(19): siRNA sense strand
gcccaacuuucagcuuuga

SEQ ID NO: 2031593 - RNA, 19 nt, Homo sapiens
  misc_RNA (1)...(19): siRNA sense strand
cuucaggcauguucaguuc

SEQ ID NO: 2031594 - RNA, 19 nt, Homo sapiens
  misc_RNA (1)...(19): siRNA sense strand
cauguucaguucagcacuu

SEQ ID NO: 2031595 - RNA, 19 nt, Homo sapiens
  misc_RNA (1)...(19): siRNA sense strand
aaaucguacuugcccaauu

SEQ ID NO: 2031596 - RNA, 19 nt, Homo sapiens
  misc_RNA (1)...(19): siRNA sense strand
gauauugaacaacuuccuu

SEQ ID NO: 2031597 - RNA, 19 nt, Homo sapiens
  misc_RNA (1)...(19): siRNA sense strand
cagcuuugaauuagaugua

SEQ ID NO: 2031598 - RNA, 19 nt, Homo sapiens
  misc_RNA (1)...(19): siRNA sense strand
ugaaguggaacucuuagga

SEQ ID NO: 2031599 - RNA, 19 nt, Homo sapiens
  misc_RNA (1)...(19): siRNA sense strand
cuagugauccauuucuuau

SEQ ID NO: 2031600 - RNA, 19 nt, Homo sapiens
  misc_RNA (1)...(19): siRNA sense strand
cccaucauccuccucauuu

SEQ ID NO: 2031601 - RNA, 19 nt, Homo sapiens
  misc_RNA (1)...(19): siRNA sense strand
caaauggcuuaaggcaaau

SEQ ID NO: 2031602 - RNA, 19 nt, Homo sapiens
  misc_RNA (1)...(19): siRNA sense strand
agaagaaguccuccuguca

SEQ ID NO: 2031603 - RNA, 19 nt, Homo sapiens
  misc_RNA (1)...(19): siRNA sense strand
uugcaguucuuaacacaug

SEQ ID NO: 2031604 - RNA, 19 nt, Homo sapiens
  misc_RNA (1)...(19): siRNA sense strand
ccaucauccuccucauuug

SEQ ID NO: 2031605 - RNA, 19 nt, Homo sapiens
  misc_RNA (1)...(19): siRNA sense strand
caggccaguuugucccuuu

SEQ ID NO: 2031606 - RNA, 19 nt, Homo sapiens
  misc_RNA (1)...(19): siRNA sense strand
ggcccaacuuucagcuuug

SEQ ID NO: 2031607 - RNA, 19 nt, Homo sapiens
  misc_RNA (1)...(19): siRNA sense strand
cuuaucgguucaauccuaa

SEQ ID NO: 2031608 - RNA, 19 nt, Homo sapiens
  misc_RNA (1)...(19): siRNA sense strand
ccacaugggauuccacucu

SEQ ID NO: 2031609 - RNA, 19 nt, Homo sapiens
  misc_RNA (1)...(19): siRNA sense strand
cuuacugccauauguguua

SEQ ID NO: 2031610 - RNA, 19 nt, Homo sapiens
  misc_RNA (1)...(19): siRNA sense strand
agugauccauuucuuauac

SEQ ID NO: 2031611 - RNA, 19 nt, Homo sapiens
  misc_RNA (1)...(19): siRNA sense strand
uagugugccuccuccaaug

SEQ ID NO: 2031612 - RNA, 19 nt, Homo sapiens
  misc_RNA (1)...(19): siRNA sense strand
uugccgagcugaugcuuca

SEQ ID NO: 2031613 - RNA, 19 nt, Homo sapiens
  misc_RNA (1)...(19): siRNA sense strand
cuaacaaccaccagucaga

SEQ ID NO: 2031614 - RNA, 19 nt, Homo sapiens
  misc_RNA (1)...(19): siRNA sense strand
gcuuugaauuagauguaga

SEQ ID NO: 2031615 - RNA, 19 nt, Homo sapiens
  misc_RNA (1)...(19): siRNA sense strand
guagugugccuccuccaau

SEQ ID NO: 2031616 - RNA, 19 nt, Homo sapiens
  misc_RNA (1)...(19): siRNA sense strand
ccaauuugccgagcugaug

SEQ ID NO: 2031617 - RNA, 19 nt, Homo sapiens
  misc_RNA (1)...(19): siRNA sense strand
uggcuuaaggcaaaucgua

SEQ ID NO: 2031618 - RNA, 19 nt, Homo sapiens
  misc_RNA (1)...(19): siRNA sense strand
uaacacaugauccuuugca

SEQ ID NO: 2031619 - RNA, 19 nt, Homo sapiens
  misc_RNA (1)...(19): siRNA sense strand
agaagugcaucgggauuca

SEQ ID NO: 2031620 - RNA, 19 nt, Homo sapiens
  misc_RNA (1)...(19): siRNA sense strand
aaaaugaaguggaacucuu

SEQ ID NO: 2031621 - RNA, 19 nt, Homo sapiens
  misc_RNA (1)...(19): siRNA sense strand
gacuuuguguguaguaugc

SEQ ID NO: 2031622 - RNA, 19 nt, Homo sapiens
  misc_RNA (1)...(19): siRNA sense strand
cuaaagcagauauugaaca

SEQ ID NO: 2031623 - RNA, 19 nt, Homo sapiens
  misc_RNA (1)...(19): siRNA sense strand
gaccaagccaacaucacuu

SEQ ID NO: 2031624 - RNA, 19 nt, Homo sapiens
  misc_RNA (1)...(19): siRNA sense strand
cgaccaagccaacaucacu

SEQ ID NO: 2031625 - RNA, 19 nt, Homo sapiens
  misc_RNA (1)...(19): siRNA sense strand
agaagauggagaaguagaa

SEQ ID NO: 2031626 - RNA, 19 nt, Homo sapiens
  misc_RNA (1)...(19): siRNA sense strand
aggcuuacaggacguagua

SEQ ID NO: 2031627 - RNA, 19 nt, Homo sapiens
  misc_RNA (1)...(19): siRNA sense strand
gagguguccuuuggaguac

SEQ ID NO: 2031628 - RNA, 19 nt, Homo sapiens
  misc_RNA (1)...(19): siRNA sense strand
uauacauccuccucaccuu

SEQ ID NO: 2031629 - RNA, 19 nt, Homo sapiens
  misc_RNA (1)...(19): siRNA sense strand
gugauccauuucuuauaca

SEQ ID NO: 2031630 - RNA, 19 nt, Homo sapiens
  misc_RNA (1)...(19): siRNA sense strand
agauguagaagauggagaa

SEQ ID NO: 2031631 - RNA, 19 nt, Homo sapiens
  misc_RNA (1)...(19): siRNA sense strand
ucagcuccaucaaggaaca

SEQ ID NO: 2031632 - RNA, 19 nt, Homo sapiens
  misc_RNA (1)...(19): siRNA sense strand
gaacagacuuuguguguag

SEQ ID NO: 2031633 - RNA, 19 nt, Homo sapiens
  misc_RNA (1)...(19): siRNA sense strand
acaaauggcuuaaggcaaa

SEQ ID NO: 2031634 - RNA, 19 nt, Homo sapiens
  misc_RNA (1)...(19): siRNA sense strand
uguagaagauggagaagua

SEQ ID NO: 2031635 - RNA, 19 nt, Homo sapiens
  misc_RNA (1)...(19): siRNA sense strand
uugaacaacuuccuucuua

SEQ ID NO: 2031636 - RNA, 19 nt, Homo sapiens
  misc_RNA (1)...(19): siRNA sense strand
gcagcuacuuagagucuua

SEQ ID NO: 2031637 - RNA, 19 nt, Homo sapiens
  misc_RNA (1)...(19): siRNA sense strand
gcacaucccugcuuguagu

SEQ ID NO: 2031638 - RNA, 19 nt, Homo sapiens
  misc_RNA (1)...(19): siRNA sense strand
gcacuuaccaguaccauau

SEQ ID NO: 2031639 - RNA, 19 nt, Homo sapiens
  misc_RNA (1)...(19): siRNA sense strand
ccaaguguguugacaaaug

SEQ ID NO: 2031640 - RNA, 19 nt, Homo sapiens
  misc_RNA (1)...(19): siRNA sense strand
ggagguguccuuuggagua

SEQ ID NO: 2031641 - RNA, 19 nt, Homo sapiens
  misc_RNA (1)...(19): siRNA sense strand
aaucguacuugcccaauuu

SEQ ID NO: 2031642 - RNA, 19 nt, Homo sapiens
  misc_RNA (1)...(19): siRNA sense strand
gggcccaacuuucagcuuu

SEQ ID NO: 2031643 - RNA, 19 nt, Homo sapiens
  misc_RNA (1)...(19): siRNA sense strand
gaacaacuuccuucuuauc

SEQ ID NO: 2031644 - RNA, 19 nt, Homo sapiens
  misc_RNA (1)...(19): siRNA sense strand
gcagugggcccaacuuuca

SEQ ID NO: 2031645 - RNA, 19 nt, Homo sapiens
  misc_RNA (1)...(19): siRNA sense strand
caaggcagcuacuuagagu

SEQ ID NO: 2031646 - RNA, 19 nt, Homo sapiens
  misc_RNA (1)...(19): siRNA sense strand
gaucagcuccaucaaggaa

SEQ ID NO: 2031647 - RNA, 19 nt, Homo sapiens
  misc_RNA (1)...(19): siRNA sense strand
gacuaaagcagauauugaa

SEQ ID NO: 2031648 - RNA, 19 nt, Homo sapiens
  misc_RNA (1)...(19): siRNA sense strand
gcagaaugcagucaugguu

SEQ ID NO: 2031649 - RNA, 19 nt, Homo sapiens
  misc_RNA (1)...(19): siRNA sense strand
gauagaaaaugaaguggaa

SEQ ID NO: 2031650 - RNA, 19 nt, Homo sapiens
  misc_RNA (1)...(19): siRNA sense strand
guucagcacuuaccaguac

SEQ ID NO: 2031651 - RNA, 19 nt, Homo sapiens
  misc_RNA (1)...(19): siRNA sense strand
gaagauggagaaguagaaa

SEQ ID NO: 2031652 - RNA, 19 nt, Homo sapiens
  misc_RNA (1)...(19): siRNA sense strand
gcaccucccugucuguagu

SEQ ID NO: 2031653 - RNA, 19 nt, Homo sapiens
  misc_RNA (1)...(19): siRNA sense strand
aggagaacaucuuccagua

SEQ ID NO: 2031654 - RNA, 19 nt, Homo sapiens
  misc_RNA (1)...(19): siRNA sense strand
aaaugaaguggaacucuua

SEQ ID NO: 2031655 - RNA, 19 nt, Homo sapiens
  misc_RNA (1)...(19): siRNA sense strand
gaucgccucugcaaaggau

SEQ ID NO: 2031656 - RNA, 19 nt, Homo sapiens
  misc_RNA (1)...(19): siRNA sense strand
ggaagaagggaucgucugu

SEQ ID NO: 2031657 - RNA, 19 nt, Homo sapiens
  misc_RNA (1)...(19): siRNA sense strand
gagucaaggcagcuacuua

SEQ ID NO: 2031658 - RNA, 19 nt, Homo sapiens
  misc_RNA (1)...(19): siRNA sense strand
agaaugcagucaugguuga

SEQ ID NO: 2031659 - RNA, 19 nt, Homo sapiens
  misc_RNA (1)...(19): siRNA sense strand
ccaggaugcucugugguuu

SEQ ID NO: 2031660 - RNA, 19 nt, Homo sapiens
  misc_RNA (1)...(19): siRNA sense strand
ugacuaaagcagauauuga

SEQ ID NO: 2031661 - RNA, 19 nt, Homo sapiens
  misc_RNA (1)...(19): siRNA sense strand
ugaacaacuuccuucuuau

SEQ ID NO: 2031662 - RNA, 19 nt, Homo sapiens
  misc_RNA (1)...(19): siRNA sense strand
cuuagagucuuacccugua

SEQ ID NO: 2031663 - RNA, 19 nt, Homo sapiens
  misc_RNA (1)...(19): siRNA sense strand
ugccauauguguuaucaau

SEQ ID NO: 2031664 - RNA, 19 nt, Homo sapiens
  misc_RNA (1)...(19): siRNA sense strand
caaguguguugacaaaugg

SEQ ID NO: 2031665 - RNA, 19 nt, Homo sapiens
  misc_RNA (1)...(19): siRNA sense strand
gcacgcaacagaagaaguc

SEQ ID NO: 2031666 - RNA, 19 nt, Homo sapiens
  misc_RNA (1)...(19): siRNA sense strand
guaguaugcaugugugauu

SEQ ID NO: 2031667 - RNA, 19 nt, Homo sapiens
  misc_RNA (1)...(19): siRNA sense strand
cagaacagacuuugugugu

SEQ ID NO: 2031668 - RNA, 19 nt, Homo sapiens
  misc_RNA (1)...(19): siRNA sense strand
caucagcucccuugcaguu

SEQ ID NO: 2031669 - RNA, 19 nt, Homo sapiens
  misc_RNA (1)...(19): siRNA sense strand
uaccuuauccuccauuuau

SEQ ID NO: 2031670 - RNA, 19 nt, Homo sapiens
  misc_RNA (1)...(19): siRNA sense strand
cgaguuccaugccaagugu

SEQ ID NO: 2031671 - RNA, 19 nt, Homo sapiens
  misc_RNA (1)...(19): siRNA sense strand
aaauuacgaggcccuguua

SEQ ID NO: 2031672 - RNA, 19 nt, Homo sapiens
  misc_RNA (1)...(19): siRNA sense strand
ccauauguguuaucaaugc

SEQ ID NO: 2031673 - RNA, 19 nt, Homo sapiens
  misc_RNA (1)...(19): siRNA sense strand
cuuaacacaugauccuuug

SEQ ID NO: 2031674 - RNA, 19 nt, Homo sapiens
  misc_RNA (1)...(19): siRNA sense strand
gcagauauugaacaacuuc

SEQ ID NO: 2031675 - RNA, 19 nt, Homo sapiens
  misc_RNA (1)...(19): siRNA sense strand
aagcagauauugaacaacu

SEQ ID NO: 2031676 - RNA, 19 nt, Homo sapiens
  misc_RNA (1)...(19): siRNA sense strand
ggagaacaucuuccaguag

SEQ ID NO: 2031677 - RNA, 19 nt, Homo sapiens
  misc_RNA (1)...(19): siRNA sense strand
agaacagacuuugugugua

SEQ ID NO: 2031678 - RNA, 19 nt, Homo sapiens
  misc_RNA (1)...(19): siRNA sense strand
ucuuaucgguucaauccua

SEQ ID NO: 2031679 - RNA, 19 nt, Homo sapiens
  misc_RNA (1)...(19): siRNA sense strand
ggacugacuaaagcagaua

SEQ ID NO: 2031680 - RNA, 19 nt, Homo sapiens
  misc_RNA (1)...(19): siRNA sense strand
ccagcuuacugccauaugu

SEQ ID NO: 2031681 - RNA, 19 nt, Homo sapiens
  misc_RNA (1)...(19): siRNA sense strand
guaccuuauccuccauuua

SEQ ID NO: 2031682 - RNA, 19 nt, Homo sapiens
  misc_RNA (1)...(19): siRNA sense strand
ugccaaguguguugacaaa

SEQ ID NO: 2031683 - RNA, 19 nt, Homo sapiens
  misc_RNA (1)...(19): siRNA sense strand
gcaaagccucguggacuga

SEQ ID NO: 2031684 - RNA, 19 nt, Homo sapiens
  misc_RNA (1)...(19): siRNA sense strand
uuacaggacguaguagaua

SEQ ID NO: 2031685 - RNA, 19 nt, Homo sapiens
  misc_RNA (1)...(19): siRNA sense strand
aagaagggaucgucugucu

SEQ ID NO: 2031686 - RNA, 19 nt, Homo sapiens
  misc_RNA (1)...(19): siRNA sense strand
uaguaugcaugugugauuu

SEQ ID NO: 2031687 - RNA, 19 nt, Homo sapiens
  misc_RNA (1)...(19): siRNA sense strand
ucuagugauccauuucuua

SEQ ID NO: 2031688 - RNA, 19 nt, Homo sapiens
  misc_RNA (1)...(19): siRNA sense strand
uaacaaccaccagucagaa

SEQ ID NO: 2031689 - RNA, 19 nt, Homo sapiens
  misc_RNA (1)...(19): siRNA sense strand
ccagcagaaugcagucaug

SEQ ID NO: 2031690 - RNA, 19 nt, Homo sapiens
  misc_RNA (1)...(19): siRNA sense strand
guugacaaauggcuuaagg

SEQ ID NO: 2031691 - RNA, 19 nt, Homo sapiens
  misc_RNA (1)...(19): siRNA sense strand
aagccaacaucacuucuca

SEQ ID NO: 2031692 - RNA, 19 nt, Homo sapiens
  misc_RNA (1)...(19): siRNA sense strand
gcccaacuuucagcuuuga

SEQ ID NO: 2031693 - RNA, 19 nt, Homo sapiens
  misc_RNA (1)...(19): siRNA sense strand
cuucaggcauguucaguuc

SEQ ID NO: 2031694 - RNA, 19 nt, Homo sapiens
  misc_RNA (1)...(19): siRNA sense strand
cauguucaguucagcacuu

SEQ ID NO: 2031695 - RNA, 19 nt, Homo sapiens
  misc_RNA (1)...(19): siRNA sense strand
aaaucguacuugcccaauu

SEQ ID NO: 2031696 - RNA, 19 nt, Homo sapiens
  misc_RNA (1)...(19): siRNA sense strand
gauauugaacaacuuccuu

SEQ ID NO: 2031697 - RNA, 19 nt, Homo sapiens
  misc_RNA (1)...(19): siRNA sense strand
cagcuuugaauuagaugua

SEQ ID NO: 2031698 - RNA, 19 nt, Homo sapiens
  misc_RNA (1)...(19): siRNA sense strand
ugaaguggaacucuuagga

SEQ ID NO: 2031699 - RNA, 19 nt, Homo sapiens
  misc_RNA (1)...(19): siRNA sense strand
cuagugauccauuucuuau

SEQ ID NO: 2031700 - RNA, 19 nt, Homo sapiens
  misc_RNA (1)...(19): siRNA sense strand
cccaucauccuccucauuu

SEQ ID NO: 2031701 - RNA, 19 nt, Homo sapiens
  misc_RNA (1)...(19): siRNA sense strand
caaauggcuuaaggcaaau

SEQ ID NO: 2031702 - RNA, 19 nt, Homo sapiens
  misc_RNA (1)...(19): siRNA sense strand
agaagaaguccuccuguca

SEQ ID NO: 2031703 - RNA, 19 nt, Homo sapiens
  misc_RNA (1)...(19): siRNA sense strand
uugcaguucuuaacacaug

SEQ ID NO: 2031704 - RNA, 19 nt, Homo sapiens
  misc_RNA (1)...(19): siRNA sense strand
ccaucauccuccucauuug

SEQ ID NO: 2031705 - RNA, 19 nt, Homo sapiens
  misc_RNA (1)...(19): siRNA sense strand
caggccaguuugucccuuu

SEQ ID NO: 2031706 - RNA, 19 nt, Homo sapiens
  misc_RNA (1)...(19): siRNA sense strand
ggcccaacuuucagcuuug

SEQ ID NO: 2031707 - RNA, 19 nt, Homo sapiens
  misc_RNA (1)...(19): siRNA sense strand
cuuaucgguucaauccuaa

SEQ ID NO: 2031708 - RNA, 19 nt, Homo sapiens
  misc_RNA (1)...(19): siRNA sense strand
ccacaugggauuccacucu

SEQ ID NO: 2031709 - RNA, 19 nt, Homo sapiens
  misc_RNA (1)...(19): siRNA sense strand
cuuacugccauauguguua

SEQ ID NO: 2031710 - RNA, 19 nt, Homo sapiens
  misc_RNA (1)...(19): siRNA sense strand
agugauccauuucuuauac

SEQ ID NO: 2031711 - RNA, 19 nt, Homo sapiens
  misc_RNA (1)...(19): siRNA sense strand
uagugugccuccuccaaug

SEQ ID NO: 2031712 - RNA, 19 nt, Homo sapiens
  misc_RNA (1)...(19): siRNA sense strand
uugccgagcugaugcuuca

SEQ ID NO: 2031713 - RNA, 19 nt, Homo sapiens
  misc_RNA (1)...(19): siRNA sense strand
cuaacaaccaccagucaga

SEQ ID NO: 2031714 - RNA, 19 nt, Homo sapiens
  misc_RNA (1)...(19): siRNA sense strand
gcuuugaauuagauguaga

SEQ ID NO: 2031715 - RNA, 19 nt, Homo sapiens
  misc_RNA (1)...(19): siRNA sense strand
guagugugccuccuccaau

SEQ ID NO: 2031716 - RNA, 19 nt, Homo sapiens
  misc_RNA (1)...(19): siRNA sense strand
ccaauuugccgagcugaug

SEQ ID NO: 2031717 - RNA, 19 nt, Homo sapiens
  misc_RNA (1)...(19): siRNA sense strand
uggcuuaaggcaaaucgua

SEQ ID NO: 2031718 - RNA, 19 nt, Homo sapiens
  misc_RNA (1)...(19): siRNA sense strand
uaacacaugauccuuugca

SEQ ID NO: 2031719 - RNA, 19 nt, Homo sapiens
  misc_RNA (1)...(19): siRNA sense strand
agaagugcaucgggauuca

SEQ ID NO: 2031720 - RNA, 19 nt, Homo sapiens
  misc_RNA (1)...(19): siRNA sense strand
aaaaugaaguggaacucuu

SEQ ID NO: 2031721 - RNA, 19 nt, Homo sapiens
  misc_RNA (1)...(19): siRNA sense strand
gacuuuguguguaguaugc

SEQ ID NO: 2031722 - RNA, 19 nt, Homo sapiens
  misc_RNA (1)...(19): siRNA sense strand
cuaaagcagauauugaaca

SEQ ID NO: 2031723 - RNA, 19 nt, Homo sapiens
  misc_RNA (1)...(19): siRNA sense strand
gaccaagccaacaucacuu

SEQ ID NO: 2031724 - RNA, 19 nt, Homo sapiens
  misc_RNA (1)...(19): siRNA sense strand
cgaccaagccaacaucacu

SEQ ID NO: 2031725 - RNA, 19 nt, Homo sapiens
  misc_RNA (1)...(19): siRNA sense strand
agaagauggagaaguagaa

SEQ ID NO: 2031726 - RNA, 19 nt, Homo sapiens
  misc_RNA (1)...(19): siRNA sense strand
aggcuuacaggacguagua

SEQ ID NO: 2031727 - RNA, 19 nt, Homo sapiens
  misc_RNA (1)...(19): siRNA sense strand
gagguguccuuuggaguac

SEQ ID NO: 2031728 - RNA, 19 nt, Homo sapiens
  misc_RNA (1)...(19): siRNA sense strand
uauacauccuccucaccuu

SEQ ID NO: 2031729 - RNA, 19 nt, Homo sapiens
  misc_RNA (1)...(19): siRNA sense strand
gugauccauuucuuauaca

SEQ ID NO: 2031730 - RNA, 19 nt, Homo sapiens
  misc_RNA (1)...(19): siRNA sense strand
agauguagaagauggagaa

SEQ ID NO: 2031731 - RNA, 19 nt, Homo sapiens
  misc_RNA (1)...(19): siRNA sense strand
ucagcuccaucaaggaaca

SEQ ID NO: 2031732 - RNA, 19 nt, Homo sapiens
  misc_RNA (1)...(19): siRNA sense strand
gaacagacuuuguguguag

SEQ ID NO: 2031733 - RNA, 19 nt, Homo sapiens
  misc_RNA (1)...(19): siRNA sense strand
acaaauggcuuaaggcaaa

SEQ ID NO: 2031734 - RNA, 19 nt, Homo sapiens
  misc_RNA (1)...(19): siRNA sense strand
gaagauaguccaaguccua

SEQ ID NO: 2031735 - RNA, 19 nt, Homo sapiens
  misc_RNA (1)...(19): siRNA sense strand
uguagaagauggagaagua

SEQ ID NO: 2031736 - RNA, 19 nt, Homo sapiens
  misc_RNA (1)...(19): siRNA sense strand
uugaacaacuuccuucuua

SEQ ID NO: 2031737 - RNA, 19 nt, Homo sapiens
  misc_RNA (1)...(19): siRNA sense strand
gcagcuacuuagagucuua

SEQ ID NO: 2031738 - RNA, 19 nt, Homo sapiens
  misc_RNA (1)...(19): siRNA sense strand
gcacaucccugcuuguagu

SEQ ID NO: 2031739 - RNA, 19 nt, Homo sapiens
  misc_RNA (1)...(19): siRNA sense strand
gcacuuaccaguaccauau

SEQ ID NO: 2031740 - RNA, 19 nt, Homo sapiens
  misc_RNA (1)...(19): siRNA sense strand
ccaaguguguugacaaaug

SEQ ID NO: 2031741 - RNA, 19 nt, Homo sapiens
  misc_RNA (1)...(19): siRNA sense strand
ggagguguccuuuggagua

SEQ ID NO: 2031742 - RNA, 19 nt, Homo sapiens
  misc_RNA (1)...(19): siRNA sense strand
aaucguacuugcccaauuu

SEQ ID NO: 2031743 - RNA, 19 nt, Homo sapiens
  misc_RNA (1)...(19): siRNA sense strand
gggcccaacuuucagcuuu

SEQ ID NO: 2031744 - RNA, 19 nt, Homo sapiens
  misc_RNA (1)...(19): siRNA sense strand
gaacaacuuccuucuuauc

SEQ ID NO: 2031745 - RNA, 19 nt, Homo sapiens
  misc_RNA (1)...(19): siRNA sense strand
gcagugggcccaacuuuca

SEQ ID NO: 2031746 - RNA, 19 nt, Homo sapiens
  misc_RNA (1)...(19): siRNA sense strand
caaggcagcuacuuagagu

SEQ ID NO: 2031747 - RNA, 19 nt, Homo sapiens
  misc_RNA (1)...(19): siRNA sense strand
agacagcgccucucucauu

SEQ ID NO: 2031748 - RNA, 19 nt, Homo sapiens
  misc_RNA (1)...(19): siRNA sense strand
gaucagcuccaucaaggaa

SEQ ID NO: 2031749 - RNA, 19 nt, Homo sapiens
  misc_RNA (1)...(19): siRNA sense strand
gacuaaagcagauauugaa

SEQ ID NO: 2031750 - RNA, 19 nt, Homo sapiens
  misc_RNA (1)...(19): siRNA sense strand
gcagaaugcagucaugguu

SEQ ID NO: 2031751 - RNA, 19 nt, Homo sapiens
  misc_RNA (1)...(19): siRNA sense strand
gauagaaaaugaaguggaa

SEQ ID NO: 2031752 - RNA, 19 nt, Homo sapiens
  misc_RNA (1)...(19): siRNA sense strand
guucagcacuuaccaguac

SEQ ID NO: 2031753 - RNA, 19 nt, Homo sapiens
  misc_RNA (1)...(19): siRNA sense strand
cucauucagucuuugauua

SEQ ID NO: 2031754 - RNA, 19 nt, Homo sapiens
  misc_RNA (1)...(19): siRNA sense strand
gaagauggagaaguagaaa

SEQ ID NO: 2031755 - RNA, 19 nt, Homo sapiens
  misc_RNA (1)...(19): siRNA sense strand
gcaccucccugucuguagu

SEQ ID NO: 2031756 - RNA, 19 nt, Homo sapiens
  misc_RNA (1)...(19): siRNA sense strand
aggagaacaucuuccagua

SEQ ID NO: 2031757 - RNA, 19 nt, Homo sapiens
  misc_RNA (1)...(19): siRNA sense strand
aaaugaaguggaacucuua

SEQ ID NO: 2031758 - RNA, 19 nt, Homo sapiens
  misc_RNA (1)...(19): siRNA sense strand
gaucgccucugcaaaggau

SEQ ID NO: 2031759 - RNA, 19 nt, Homo sapiens
  misc_RNA (1)...(19): siRNA sense strand
ggaagaagggaucgucugu

SEQ ID NO: 2031760 - RNA, 19 nt, Homo sapiens
  misc_RNA (1)...(19): siRNA sense strand
gagucaaggcagcuacuua

SEQ ID NO: 2031761 - RNA, 19 nt, Homo sapiens
  misc_RNA (1)...(19): siRNA sense strand
agaaugcagucaugguuga

SEQ ID NO: 2031762 - RNA, 19 nt, Homo sapiens
  misc_RNA (1)...(19): siRNA sense strand
ccaggaugcucugugguuu

SEQ ID NO: 2031763 - RNA, 19 nt, Homo sapiens
  misc_RNA (1)...(19): siRNA sense strand
gacagcgccucucucauuc

SEQ ID NO: 2031764 - RNA, 19 nt, Homo sapiens
  misc_RNA (1)...(19): siRNA sense strand
ugacuaaagcagauauuga

SEQ ID NO: 2031765 - RNA, 19 nt, Homo sapiens
  misc_RNA (1)...(19): siRNA sense strand
ugaacaacuuccuucuuau

SEQ ID NO: 2031766 - RNA, 19 nt, Homo sapiens
  misc_RNA (1)...(19): siRNA sense strand
cuuagagucuuacccugua

SEQ ID NO: 2031767 - RNA, 19 nt, Homo sapiens
  misc_RNA (1)...(19): siRNA sense strand
gagugaagauaguccaagu

SEQ ID NO: 2031768 - RNA, 19 nt, Homo sapiens
  misc_RNA (1)...(19): siRNA sense strand
gcacgcaacagaagaaguc

SEQ ID NO: 2031769 - RNA, 19 nt, Homo sapiens
  misc_RNA (1)...(19): siRNA sense strand
caaguguguugacaaaugg

SEQ ID NO: 2031770 - RNA, 19 nt, Homo sapiens
  misc_RNA (1)...(19): siRNA sense strand
guaguaugcaugugugauu

SEQ ID NO: 2031771 - RNA, 19 nt, Homo sapiens
  misc_RNA (1)...(19): siRNA sense strand
cagaacagacuuugugugu

SEQ ID NO: 2031772 - RNA, 19 nt, Homo sapiens
  misc_RNA (1)...(19): siRNA sense strand
ugccauauguguuaucaau

SEQ ID NO: 2031773 - RNA, 19 nt, Homo sapiens
  misc_RNA (1)...(19): siRNA sense strand
caucagcucccuugcaguu

SEQ ID NO: 2031774 - RNA, 19 nt, Homo sapiens
  misc_RNA (1)...(19): siRNA sense strand
gauaguccaaguccuaaga

SEQ ID NO: 2031775 - RNA, 19 nt, Homo sapiens
  misc_RNA (1)...(19): siRNA sense strand
uaccuuauccuccauuuau

SEQ ID NO: 2031776 - RNA, 19 nt, Homo sapiens
  misc_RNA (1)...(19): siRNA sense strand
cgaguuccaugccaagugu

SEQ ID NO: 2031777 - RNA, 19 nt, Homo sapiens
  misc_RNA (1)...(19): siRNA sense strand
aaauuacgaggcccuguua

SEQ ID NO: 2031778 - RNA, 19 nt, Homo sapiens
  misc_RNA (1)...(19): siRNA sense strand
ccauauguguuaucaaugc

SEQ ID NO: 2031779 - RNA, 19 nt, Homo sapiens
  misc_RNA (1)...(19): siRNA sense strand
cuuaacacaugauccuuug

SEQ ID NO: 2031780 - RNA, 19 nt, Homo sapiens
  misc_RNA (1)...(19): siRNA sense strand
gcagauauugaacaacuuc

SEQ ID NO: 2031781 - RNA, 19 nt, Homo sapiens
  misc_RNA (1)...(19): siRNA sense strand
aagcagauauugaacaacu

SEQ ID NO: 2031782 - RNA, 19 nt, Homo sapiens
  misc_RNA (1)...(19): siRNA sense strand
ggagaacaucuuccaguag

SEQ ID NO: 2031783 - RNA, 19 nt, Homo sapiens
  misc_RNA (1)...(19): siRNA sense strand
agaacagacuuugugugua

SEQ ID NO: 2031784 - RNA, 19 nt, Homo sapiens
  misc_RNA (1)...(19): siRNA sense strand
ucuuaucgguucaauccua

SEQ ID NO: 2031785 - RNA, 19 nt, Homo sapiens
  misc_RNA (1)...(19): siRNA sense strand
ggacugacuaaagcagaua

SEQ ID NO: 2031786 - RNA, 19 nt, Homo sapiens
  misc_RNA (1)...(19): siRNA sense strand
ccagcuuacugccauaugu

SEQ ID NO: 2031787 - RNA, 19 nt, Homo sapiens
  misc_RNA (1)...(19): siRNA sense strand
guaccuuauccuccauuua

SEQ ID NO: 2031788 - RNA, 19 nt, Homo sapiens
  misc_RNA (1)...(19): siRNA sense strand
ugccaaguguguugacaaa

SEQ ID NO: 2031789 - RNA, 19 nt, Homo sapiens
  misc_RNA (1)...(19): siRNA sense strand
gcaaagccucguggacuga

SEQ ID NO: 2031790 - RNA, 19 nt, Homo sapiens
  misc_RNA (1)...(19): siRNA sense strand
uuacaggacguaguagaua

SEQ ID NO: 2031791 - RNA, 19 nt, Homo sapiens
  misc_RNA (1)...(19): siRNA sense strand
aagaagggaucgucugucu

SEQ ID NO: 2031792 - RNA, 19 nt, Homo sapiens
  misc_RNA (1)...(19): siRNA sense strand
uaguaugcaugugugauuu

SEQ ID NO: 2031793 - RNA, 19 nt, Homo sapiens
  misc_RNA (1)...(19): siRNA sense strand
ucuagugauccauuucuua

SEQ ID NO: 2031794 - RNA, 19 nt, Homo sapiens
  misc_RNA (1)...(19): siRNA sense strand
uaacaaccaccagucagaa

SEQ ID NO: 2031795 - RNA, 19 nt, Homo sapiens
  misc_RNA (1)...(19): siRNA sense strand
ccagcagaaugcagucaug

SEQ ID NO: 2031796 - RNA, 19 nt, Homo sapiens
  misc_RNA (1)...(19): siRNA sense strand
guugacaaauggcuuaagg

SEQ ID NO: 2031797 - RNA, 19 nt, Homo sapiens
  misc_RNA (1)...(19): siRNA sense strand
gcccaacuuucagcuuuga

SEQ ID NO: 2031798 - RNA, 19 nt, Homo sapiens
  misc_RNA (1)...(19): siRNA sense strand
aagccaacaucacuucuca

SEQ ID NO: 2031799 - RNA, 19 nt, Homo sapiens
  misc_RNA (1)...(19): siRNA sense strand
cuucaggcauguucaguuc

SEQ ID NO: 2031800 - RNA, 19 nt, Homo sapiens
  misc_RNA (1)...(19): siRNA sense strand
cauguucaguucagcacuu

SEQ ID NO: 2031801 - RNA, 19 nt, Homo sapiens
  misc_RNA (1)...(19): siRNA sense strand
aaaucguacuugcccaauu

SEQ ID NO: 2031802 - RNA, 19 nt, Homo sapiens
  misc_RNA (1)...(19): siRNA sense strand
gauauugaacaacuuccuu

SEQ ID NO: 2031803 - RNA, 19 nt, Homo sapiens
  misc_RNA (1)...(19): siRNA sense strand
cagcuuugaauuagaugua

SEQ ID NO: 2031804 - RNA, 19 nt, Homo sapiens
  misc_RNA (1)...(19): siRNA sense strand
ugaaguggaacucuuagga

SEQ ID NO: 2031805 - RNA, 19 nt, Homo sapiens
  misc_RNA (1)...(19): siRNA sense strand
ccagcucccucaccaccaa

SEQ ID NO: 2031806 - RNA, 19 nt, Homo sapiens
  misc_RNA (1)...(19): siRNA sense strand
cuagugauccauuucuuau

SEQ ID NO: 2031807 - RNA, 19 nt, Homo sapiens
  misc_RNA (1)...(19): siRNA sense strand
cccaucauccuccucauuu

SEQ ID NO: 2031808 - RNA, 19 nt, Homo sapiens
  misc_RNA (1)...(19): siRNA sense strand
caaauggcuuaaggcaaau

SEQ ID NO: 2031809 - RNA, 19 nt, Homo sapiens
  misc_RNA (1)...(19): siRNA sense strand
agaagaaguccuccuguca

SEQ ID NO: 2031810 - RNA, 19 nt, Homo sapiens
  misc_RNA (1)...(19): siRNA sense strand
uugcaguucuuaacacaug

SEQ ID NO: 2031811 - RNA, 19 nt, Homo sapiens
  misc_RNA (1)...(19): siRNA sense strand
ccaucauccuccucauuug

SEQ ID NO: 2031812 - RNA, 19 nt, Homo sapiens
  misc_RNA (1)...(19): siRNA sense strand
caggccaguuugucccuuu

SEQ ID NO: 2031813 - RNA, 19 nt, Homo sapiens
  misc_RNA (1)...(19): siRNA sense strand
ccucucucauucagucuuu

SEQ ID NO: 2031814 - RNA, 19 nt, Homo sapiens
  misc_RNA (1)...(19): siRNA sense strand
ggcccaacuuucagcuuug

SEQ ID NO: 2031815 - RNA, 19 nt, Homo sapiens
  misc_RNA (1)...(19): siRNA sense strand
cuuaucgguucaauccuaa

SEQ ID NO: 2031816 - RNA, 19 nt, Homo sapiens
  misc_RNA (1)...(19): siRNA sense strand
ccacaugggauuccacucu

SEQ ID NO: 2031817 - RNA, 19 nt, Homo sapiens
  misc_RNA (1)...(19): siRNA sense strand
cuuacugccauauguguua

SEQ ID NO: 2031818 - RNA, 19 nt, Homo sapiens
  misc_RNA (1)...(19): siRNA sense strand
agugauccauuucuuauac

SEQ ID NO: 2031819 - RNA, 19 nt, Homo sapiens
  misc_RNA (1)...(19): siRNA sense strand
uagugugccuccuccaaug

SEQ ID NO: 2031820 - RNA, 19 nt, Homo sapiens
  misc_RNA (1)...(19): siRNA sense strand
uugccgagcugaugcuuca

SEQ ID NO: 2031821 - RNA, 19 nt, Homo sapiens
  misc_RNA (1)...(19): siRNA sense strand
cuaacaaccaccagucaga

SEQ ID NO: 2031822 - RNA, 19 nt, Homo sapiens
  misc_RNA (1)...(19): siRNA sense strand
gcuuugaauuagauguaga

SEQ ID NO: 2031823 - RNA, 19 nt, Homo sapiens
  misc_RNA (1)...(19): siRNA sense strand
guagugugccuccuccaau

SEQ ID NO: 2031824 - RNA, 19 nt, Homo sapiens
  misc_RNA (1)...(19): siRNA sense strand
ccaauuugccgagcugaug

SEQ ID NO: 2031825 - RNA, 19 nt, Homo sapiens
  misc_RNA (1)...(19): siRNA sense strand
uggcuuaaggcaaaucgua

SEQ ID NO: 2031826 - RNA, 19 nt, Homo sapiens
  misc_RNA (1)...(19): siRNA sense strand
uaacacaugauccuuugca

SEQ ID NO: 2031827 - RNA, 19 nt, Homo sapiens
  misc_RNA (1)...(19): siRNA sense strand
agaagugcaucgggauuca

SEQ ID NO: 2031828 - RNA, 19 nt, Homo sapiens
  misc_RNA (1)...(19): siRNA sense strand
aaaaugaaguggaacucuu

SEQ ID NO: 2031829 - RNA, 19 nt, Homo sapiens
  misc_RNA (1)...(19): siRNA sense strand
gacuuuguguguaguaugc

SEQ ID NO: 2031830 - RNA, 19 nt, Homo sapiens
  misc_RNA (1)...(19): siRNA sense strand
cuaaagcagauauugaaca

SEQ ID NO: 2031831 - RNA, 19 nt, Homo sapiens
  misc_RNA (1)...(19): siRNA sense strand
gaccaagccaacaucacuu

SEQ ID NO: 2031832 - RNA, 19 nt, Homo sapiens
  misc_RNA (1)...(19): siRNA sense strand
gaacagacuuuguguguag

SEQ ID NO: 2031833 - RNA, 19 nt, Homo sapiens
  misc_RNA (1)...(19): siRNA sense strand
acaaauggcuuaaggcaaa

SEQ ID NO: 2031834 - RNA, 19 nt, Homo sapiens
  misc_RNA (1)...(19): siRNA sense strand
uguagaagauggagaagua

SEQ ID NO: 2031835 - RNA, 19 nt, Homo sapiens
  misc_RNA (1)...(19): siRNA sense strand
uugaacaacuuccuucuua

SEQ ID NO: 2031836 - RNA, 19 nt, Homo sapiens
  misc_RNA (1)...(19): siRNA sense strand
gcagcuacuuagagucuua

SEQ ID NO: 2031837 - RNA, 19 nt, Homo sapiens
  misc_RNA (1)...(19): siRNA sense strand
gcacaucccugcuuguagu

SEQ ID NO: 2031838 - RNA, 19 nt, Homo sapiens
  misc_RNA (1)...(19): siRNA sense strand
gcacuuaccaguaccauau

SEQ ID NO: 2031839 - RNA, 19 nt, Homo sapiens
  misc_RNA (1)...(19): siRNA sense strand
ccaaguguguugacaaaug

SEQ ID NO: 2031840 - RNA, 19 nt, Homo sapiens
  misc_RNA (1)...(19): siRNA sense strand
ggagguguccuuuggagua

SEQ ID NO: 2031841 - RNA, 19 nt, Homo sapiens
  misc_RNA (1)...(19): siRNA sense strand
aaucguacuugcccaauuu

SEQ ID NO: 2031842 - RNA, 19 nt, Homo sapiens
  misc_RNA (1)...(19): siRNA sense strand
gggcccaacuuucagcuuu

SEQ ID NO: 2031843 - RNA, 19 nt, Homo sapiens
  misc_RNA (1)...(19): siRNA sense strand
gaacaacuuccuucuuauc

SEQ ID NO: 2031844 - RNA, 19 nt, Homo sapiens
  misc_RNA (1)...(19): siRNA sense strand
gcagugggcccaacuuuca

SEQ ID NO: 2031845 - RNA, 19 nt, Homo sapiens
  misc_RNA (1)...(19): siRNA sense strand
caaggcagcuacuuagagu

SEQ ID NO: 2031846 - RNA, 19 nt, Homo sapiens
  misc_RNA (1)...(19): siRNA sense strand
gaucagcuccaucaaggaa

SEQ ID NO: 2031847 - RNA, 19 nt, Homo sapiens
  misc_RNA (1)...(19): siRNA sense strand
gacuaaagcagauauugaa

SEQ ID NO: 2031848 - RNA, 19 nt, Homo sapiens
  misc_RNA (1)...(19): siRNA sense strand
gcagaaugcagucaugguu

SEQ ID NO: 2031849 - RNA, 19 nt, Homo sapiens
  misc_RNA (1)...(19): siRNA sense strand
gauagaaaaugaaguggaa

SEQ ID NO: 2031850 - RNA, 19 nt, Homo sapiens
  misc_RNA (1)...(19): siRNA sense strand
guucagcacuuaccaguac

SEQ ID NO: 2031851 - RNA, 19 nt, Homo sapiens
  misc_RNA (1)...(19): siRNA sense strand
gaagauggagaaguagaaa

SEQ ID NO: 2031852 - RNA, 19 nt, Homo sapiens
  misc_RNA (1)...(19): siRNA sense strand
gcaccucccugucuguagu

SEQ ID NO: 2031853 - RNA, 19 nt, Homo sapiens
  misc_RNA (1)...(19): siRNA sense strand
aggagaacaucuuccagua

SEQ ID NO: 2031854 - RNA, 19 nt, Homo sapiens
  misc_RNA (1)...(19): siRNA sense strand
aaaugaaguggaacucuua

SEQ ID NO: 2031855 - RNA, 19 nt, Homo sapiens
  misc_RNA (1)...(19): siRNA sense strand
gaucgccucugcaaaggau

SEQ ID NO: 2031856 - RNA, 19 nt, Homo sapiens
  misc_RNA (1)...(19): siRNA sense strand
ggaagaagggaucgucugu

SEQ ID NO: 2031857 - RNA, 19 nt, Homo sapiens
  misc_RNA (1)...(19): siRNA sense strand
gagucaaggcagcuacuua

SEQ ID NO: 2031858 - RNA, 19 nt, Homo sapiens
  misc_RNA (1)...(19): siRNA sense strand
agaaugcagucaugguuga

SEQ ID NO: 2031859 - RNA, 19 nt, Homo sapiens
  misc_RNA (1)...(19): siRNA sense strand
ccaggaugcucugugguuu

SEQ ID NO: 2031860 - RNA, 19 nt, Homo sapiens
  misc_RNA (1)...(19): siRNA sense strand
ugacuaaagcagauauuga

SEQ ID NO: 2031861 - RNA, 19 nt, Homo sapiens
  misc_RNA (1)...(19): siRNA sense strand
ugaacaacuuccuucuuau

SEQ ID NO: 2031862 - RNA, 19 nt, Homo sapiens
  misc_RNA (1)...(19): siRNA sense strand
cuuagagucuuacccugua

SEQ ID NO: 2031863 - RNA, 19 nt, Homo sapiens
  misc_RNA (1)...(19): siRNA sense strand
ugccauauguguuaucaau

SEQ ID NO: 2031864 - RNA, 19 nt, Homo sapiens
  misc_RNA (1)...(19): siRNA sense strand
caaguguguugacaaaugg

SEQ ID NO: 2031865 - RNA, 19 nt, Homo sapiens
  misc_RNA (1)...(19): siRNA sense strand
gcacgcaacagaagaaguc

SEQ ID NO: 2031866 - RNA, 19 nt, Homo sapiens
  misc_RNA (1)...(19): siRNA sense strand
guaguaugcaugugugauu

SEQ ID NO: 2031867 - RNA, 19 nt, Homo sapiens
  misc_RNA (1)...(19): siRNA sense strand
cagaacagacuuugugugu

SEQ ID NO: 2031868 - RNA, 19 nt, Homo sapiens
  misc_RNA (1)...(19): siRNA sense strand
caucagcucccuugcaguu

SEQ ID NO: 2031869 - RNA, 19 nt, Homo sapiens
  misc_RNA (1)...(19): siRNA sense strand
uaccuuauccuccauuuau

SEQ ID NO: 2031870 - RNA, 19 nt, Homo sapiens
  misc_RNA (1)...(19): siRNA sense strand
cgaguuccaugccaagugu

SEQ ID NO: 2031871 - RNA, 19 nt, Homo sapiens
  misc_RNA (1)...(19): siRNA sense strand
aaauuacgaggcccuguua

SEQ ID NO: 2031872 - RNA, 19 nt, Homo sapiens
  misc_RNA (1)...(19): siRNA sense strand
ccauauguguuaucaaugc

SEQ ID NO: 2031873 - RNA, 19 nt, Homo sapiens
  misc_RNA (1)...(19): siRNA sense strand
cuuaacacaugauccuuug

SEQ ID NO: 2031874 - RNA, 19 nt, Homo sapiens
  misc_RNA (1)...(19): siRNA sense strand
gcagauauugaacaacuuc

SEQ ID NO: 2031875 - RNA, 19 nt, Homo sapiens
  misc_RNA (1)...(19): siRNA sense strand
aagcagauauugaacaacu

SEQ ID NO: 2031876 - RNA, 19 nt, Homo sapiens
  misc_RNA (1)...(19): siRNA sense strand
ggagaacaucuuccaguag

SEQ ID NO: 2031877 - RNA, 19 nt, Homo sapiens
  misc_RNA (1)...(19): siRNA sense strand
agaacagacuuugugugua

SEQ ID NO: 2031878 - RNA, 19 nt, Homo sapiens
  misc_RNA (1)...(19): siRNA sense strand
ucuuaucgguucaauccua

SEQ ID NO: 2031879 - RNA, 19 nt, Homo sapiens
  misc_RNA (1)...(19): siRNA sense strand
ggacugacuaaagcagaua

SEQ ID NO: 2031880 - RNA, 19 nt, Homo sapiens
  misc_RNA (1)...(19): siRNA sense strand
ccagcuuacugccauaugu

SEQ ID NO: 2031881 - RNA, 19 nt, Homo sapiens
  misc_RNA (1)...(19): siRNA sense strand
guaccuuauccuccauuua

SEQ ID NO: 2031882 - RNA, 19 nt, Homo sapiens
  misc_RNA (1)...(19): siRNA sense strand
ugccaaguguguugacaaa

SEQ ID NO: 2031883 - RNA, 19 nt, Homo sapiens
  misc_RNA (1)...(19): siRNA sense strand
gcaaagccucguggacuga

SEQ ID NO: 2031884 - RNA, 19 nt, Homo sapiens
  misc_RNA (1)...(19): siRNA sense strand
uuacaggacguaguagaua

SEQ ID NO: 2031885 - RNA, 19 nt, Homo sapiens
  misc_RNA (1)...(19): siRNA sense strand
aagaagggaucgucugucu

SEQ ID NO: 2031886 - RNA, 19 nt, Homo sapiens
  misc_RNA (1)...(19): siRNA sense strand
uaguaugcaugugugauuu

SEQ ID NO: 2031887 - RNA, 19 nt, Homo sapiens
  misc_RNA (1)...(19): siRNA sense strand
ucuagugauccauuucuua

SEQ ID NO: 2031888 - RNA, 19 nt, Homo sapiens
  misc_RNA (1)...(19): siRNA sense strand
uaacaaccaccagucagaa

SEQ ID NO: 2031889 - RNA, 19 nt, Homo sapiens
  misc_RNA (1)...(19): siRNA sense strand
ccagcagaaugcagucaug

SEQ ID NO: 2031890 - RNA, 19 nt, Homo sapiens
  misc_RNA (1)...(19): siRNA sense strand
guugacaaauggcuuaagg

SEQ ID NO: 2031891 - RNA, 19 nt, Homo sapiens
  misc_RNA (1)...(19): siRNA sense strand
aagccaacaucacuucuca

SEQ ID NO: 2031892 - RNA, 19 nt, Homo sapiens
  misc_RNA (1)...(19): siRNA sense strand
gcccaacuuucagcuuuga

SEQ ID NO: 2031893 - RNA, 19 nt, Homo sapiens
  misc_RNA (1)...(19): siRNA sense strand
cuucaggcauguucaguuc

SEQ ID NO: 2031894 - RNA, 19 nt, Homo sapiens
  misc_RNA (1)...(19): siRNA sense strand
cauguucaguucagcacuu

SEQ ID NO: 2031895 - RNA, 19 nt, Homo sapiens
  misc_RNA (1)...(19): siRNA sense strand
aaaucguacuugcccaauu

SEQ ID NO: 2031896 - RNA, 19 nt, Homo sapiens
  misc_RNA (1)...(19): siRNA sense strand
gauauugaacaacuuccuu

SEQ ID NO: 2031897 - RNA, 19 nt, Homo sapiens
  misc_RNA (1)...(19): siRNA sense strand
cagcuuugaauuagaugua

SEQ ID NO: 2031898 - RNA, 19 nt, Homo sapiens
  misc_RNA (1)...(19): siRNA sense strand
ugaaguggaacucuuagga

SEQ ID NO: 2031899 - RNA, 19 nt, Homo sapiens
  misc_RNA (1)...(19): siRNA sense strand
cuagugauccauuucuuau

SEQ ID NO: 2031900 - RNA, 19 nt, Homo sapiens
  misc_RNA (1)...(19): siRNA sense strand
cccaucauccuccucauuu

SEQ ID NO: 2031901 - RNA, 19 nt, Homo sapiens
  misc_RNA (1)...(19): siRNA sense strand
caaauggcuuaaggcaaau

SEQ ID NO: 2031902 - RNA, 19 nt, Homo sapiens
  misc_RNA (1)...(19): siRNA sense strand
agaagaaguccuccuguca

SEQ ID NO: 2031903 - RNA, 19 nt, Homo sapiens
  misc_RNA (1)...(19): siRNA sense strand
uugcaguucuuaacacaug

SEQ ID NO: 2031904 - RNA, 19 nt, Homo sapiens
  misc_RNA (1)...(19): siRNA sense strand
ccaucauccuccucauuug

SEQ ID NO: 2031905 - RNA, 19 nt, Homo sapiens
  misc_RNA (1)...(19): siRNA sense strand
caggccaguuugucccuuu

SEQ ID NO: 2031906 - RNA, 19 nt, Homo sapiens
  misc_RNA (1)...(19): siRNA sense strand
ggcccaacuuucagcuuug

SEQ ID NO: 2031907 - RNA, 19 nt, Homo sapiens
  misc_RNA (1)...(19): siRNA sense strand
cuuaucgguucaauccuaa

SEQ ID NO: 2031908 - RNA, 19 nt, Homo sapiens
  misc_RNA (1)...(19): siRNA sense strand
ccacaugggauuccacucu

SEQ ID NO: 2031909 - RNA, 19 nt, Homo sapiens
  misc_RNA (1)...(19): siRNA sense strand
cuuacugccauauguguua

SEQ ID NO: 2031910 - RNA, 19 nt, Homo sapiens
  misc_RNA (1)...(19): siRNA sense strand
agugauccauuucuuauac

SEQ ID NO: 2031911 - RNA, 19 nt, Homo sapiens
  misc_RNA (1)...(19): siRNA sense strand
uagugugccuccuccaaug

SEQ ID NO: 2031912 - RNA, 19 nt, Homo sapiens
  misc_RNA (1)...(19): siRNA sense strand
uugccgagcugaugcuuca

SEQ ID NO: 2031913 - RNA, 19 nt, Homo sapiens
  misc_RNA (1)...(19): siRNA sense strand
cuaacaaccaccagucaga

SEQ ID NO: 2031914 - RNA, 19 nt, Homo sapiens
  misc_RNA (1)...(19): siRNA sense strand
gcuuugaauuagauguaga

SEQ ID NO: 2031915 - RNA, 19 nt, Homo sapiens
  misc_RNA (1)...(19): siRNA sense strand
guagugugccuccuccaau

SEQ ID NO: 2031916 - RNA, 19 nt, Homo sapiens
  misc_RNA (1)...(19): siRNA sense strand
ccaauuugccgagcugaug

SEQ ID NO: 2031917 - RNA, 19 nt, Homo sapiens
  misc_RNA (1)...(19): siRNA sense strand
uggcuuaaggcaaaucgua

SEQ ID NO: 2031918 - RNA, 19 nt, Homo sapiens
  misc_RNA (1)...(19): siRNA sense strand
uaacacaugauccuuugca

SEQ ID NO: 2031919 - RNA, 19 nt, Homo sapiens
  misc_RNA (1)...(19): siRNA sense strand
agaagugcaucgggauuca

SEQ ID NO: 2031920 - RNA, 19 nt, Homo sapiens
  misc_RNA (1)...(19): siRNA sense strand
aaaaugaaguggaacucuu

SEQ ID NO: 2031921 - RNA, 19 nt, Homo sapiens
  misc_RNA (1)...(19): siRNA sense strand
gacuuuguguguaguaugc

SEQ ID NO: 2031922 - RNA, 19 nt, Homo sapiens
  misc_RNA (1)...(19): siRNA sense strand
cuaaagcagauauugaaca

SEQ ID NO: 2031923 - RNA, 19 nt, Homo sapiens
  misc_RNA (1)...(19): siRNA sense strand
gaccaagccaacaucacuu

SEQ ID NO: 2031924 - RNA, 19 nt, Homo sapiens
  misc_RNA (1)...(19): siRNA sense strand
cgaccaagccaacaucacu

SEQ ID NO: 2031925 - RNA, 19 nt, Homo sapiens
  misc_RNA (1)...(19): siRNA sense strand
agaagauggagaaguagaa

SEQ ID NO: 2031926 - RNA, 19 nt, Homo sapiens
  misc_RNA (1)...(19): siRNA sense strand
aggcuuacaggacguagua

SEQ ID NO: 2031927 - RNA, 19 nt, Homo sapiens
  misc_RNA (1)...(19): siRNA sense strand
gagguguccuuuggaguac

SEQ ID NO: 2031928 - RNA, 19 nt, Homo sapiens
  misc_RNA (1)...(19): siRNA sense strand
uauacauccuccucaccuu

SEQ ID NO: 2031929 - RNA, 19 nt, Homo sapiens
  misc_RNA (1)...(19): siRNA sense strand
gugauccauuucuuauaca

SEQ ID NO: 2031930 - RNA, 19 nt, Homo sapiens
  misc_RNA (1)...(19): siRNA sense strand
agauguagaagauggagaa

SEQ ID NO: 2031931 - RNA, 19 nt, Homo sapiens
  misc_RNA (1)...(19): siRNA sense strand
ucagcuccaucaaggaaca

SEQ ID NO: 2031932 - RNA, 19 nt, Homo sapiens
  misc_RNA (1)...(19): siRNA sense strand
gaacagacuuuguguguag

SEQ ID NO: 2031933 - RNA, 19 nt, Homo sapiens
  misc_RNA (1)...(19): siRNA sense strand
acaaauggcuuaaggcaaa

SEQ ID NO: 2031934 - RNA, 19 nt, Homo sapiens
  misc_RNA (1)...(19): siRNA sense strand
gaagauaguccaaguccua

SEQ ID NO: 2031935 - RNA, 19 nt, Homo sapiens
  misc_RNA (1)...(19): siRNA sense strand
uguagaagauggagaagua

SEQ ID NO: 2031936 - RNA, 19 nt, Homo sapiens
  misc_RNA (1)...(19): siRNA sense strand
uugaacaacuuccuucuua

SEQ ID NO: 2031937 - RNA, 19 nt, Homo sapiens
  misc_RNA (1)...(19): siRNA sense strand
gcagcuacuuagagucuua

SEQ ID NO: 2031938 - RNA, 19 nt, Homo sapiens
  misc_RNA (1)...(19): siRNA sense strand
gcacaucccugcuuguagu

SEQ ID NO: 2031939 - RNA, 19 nt, Homo sapiens
  misc_RNA (1)...(19): siRNA sense strand
gcacuuaccaguaccauau

SEQ ID NO: 2031940 - RNA, 19 nt, Homo sapiens
  misc_RNA (1)...(19): siRNA sense strand
ccaaguguguugacaaaug

SEQ ID NO: 2031941 - RNA, 19 nt, Homo sapiens
  misc_RNA (1)...(19): siRNA sense strand
ggagguguccuuuggagua

SEQ ID NO: 2031942 - RNA, 19 nt, Homo sapiens
  misc_RNA (1)...(19): siRNA sense strand
aaucguacuugcccaauuu

SEQ ID NO: 2031943 - RNA, 19 nt, Homo sapiens
  misc_RNA (1)...(19): siRNA sense strand
gggcccaacuuucagcuuu

SEQ ID NO: 2031944 - RNA, 19 nt, Homo sapiens
  misc_RNA (1)...(19): siRNA sense strand
gaacaacuuccuucuuauc

SEQ ID NO: 2031945 - RNA, 19 nt, Homo sapiens
  misc_RNA (1)...(19): siRNA sense strand
gcagugggcccaacuuuca

SEQ ID NO: 2031946 - RNA, 19 nt, Homo sapiens
  misc_RNA (1)...(19): siRNA sense strand
caaggcagcuacuuagagu

SEQ ID NO: 2031947 - RNA, 19 nt, Homo sapiens
  misc_RNA (1)...(19): siRNA sense strand
agacagcgccucucucauu

SEQ ID NO: 2031948 - RNA, 19 nt, Homo sapiens
  misc_RNA (1)...(19): siRNA sense strand
gaucagcuccaucaaggaa

SEQ ID NO: 2031949 - RNA, 19 nt, Homo sapiens
  misc_RNA (1)...(19): siRNA sense strand
gacuaaagcagauauugaa

SEQ ID NO: 2031950 - RNA, 19 nt, Homo sapiens
  misc_RNA (1)...(19): siRNA sense strand
gcagaaugcagucaugguu

SEQ ID NO: 2031951 - RNA, 19 nt, Homo sapiens
  misc_RNA (1)...(19): siRNA sense strand
gauagaaaaugaaguggaa

SEQ ID NO: 2031952 - RNA, 19 nt, Homo sapiens
  misc_RNA (1)...(19): siRNA sense strand
guucagcacuuaccaguac

SEQ ID NO: 2031953 - RNA, 19 nt, Homo sapiens
  misc_RNA (1)...(19): siRNA sense strand
cucauucagucuuugauua

SEQ ID NO: 2031954 - RNA, 19 nt, Homo sapiens
  misc_RNA (1)...(19): siRNA sense strand
gaagauggagaaguagaaa

SEQ ID NO: 2031955 - RNA, 19 nt, Homo sapiens
  misc_RNA (1)...(19): siRNA sense strand
gcaccucccugucuguagu

SEQ ID NO: 2031956 - RNA, 19 nt, Homo sapiens
  misc_RNA (1)...(19): siRNA sense strand
aggagaacaucuuccagua

SEQ ID NO: 2031957 - RNA, 19 nt, Homo sapiens
  misc_RNA (1)...(19): siRNA sense strand
aaaugaaguggaacucuua

SEQ ID NO: 2031958 - RNA, 19 nt, Homo sapiens
  misc_RNA (1)...(19): siRNA sense strand
gaucgccucugcaaaggau

SEQ ID NO: 2031959 - RNA, 19 nt, Homo sapiens
  misc_RNA (1)...(19): siRNA sense strand
ggaagaagggaucgucugu

SEQ ID NO: 2031960 - RNA, 19 nt, Homo sapiens
  misc_RNA (1)...(19): siRNA sense strand
gagucaaggcagcuacuua

SEQ ID NO: 2031961 - RNA, 19 nt, Homo sapiens
  misc_RNA (1)...(19): siRNA sense strand
agaaugcagucaugguuga

SEQ ID NO: 2031962 - RNA, 19 nt, Homo sapiens
  misc_RNA (1)...(19): siRNA sense strand
ccaggaugcucugugguuu

SEQ ID NO: 2031963 - RNA, 19 nt, Homo sapiens
  misc_RNA (1)...(19): siRNA sense strand
gacagcgccucucucauuc

SEQ ID NO: 2031964 - RNA, 19 nt, Homo sapiens
  misc_RNA (1)...(19): siRNA sense strand
ugacuaaagcagauauuga

SEQ ID NO: 2031965 - RNA, 19 nt, Homo sapiens
  misc_RNA (1)...(19): siRNA sense strand
ugaacaacuuccuucuuau

SEQ ID NO: 2031966 - RNA, 19 nt, Homo sapiens
  misc_RNA (1)...(19): siRNA sense strand
cuuagagucuuacccugua

SEQ ID NO: 2031967 - RNA, 19 nt, Homo sapiens
  misc_RNA (1)...(19): siRNA sense strand
gagugaagauaguccaagu

SEQ ID NO: 2031968 - RNA, 19 nt, Homo sapiens
  misc_RNA (1)...(19): siRNA sense strand
gcacgcaacagaagaaguc

SEQ ID NO: 2031969 - RNA, 19 nt, Homo sapiens
  misc_RNA (1)...(19): siRNA sense strand
caaguguguugacaaaugg

SEQ ID NO: 2031970 - RNA, 19 nt, Homo sapiens
  misc_RNA (1)...(19): siRNA sense strand
guaguaugcaugugugauu

SEQ ID NO: 2031971 - RNA, 19 nt, Homo sapiens
  misc_RNA (1)...(19): siRNA sense strand
cagaacagacuuugugugu

SEQ ID NO: 2031972 - RNA, 19 nt, Homo sapiens
  misc_RNA (1)...(19): siRNA sense strand
ugccauauguguuaucaau

SEQ ID NO: 2031973 - RNA, 19 nt, Homo sapiens
  misc_RNA (1)...(19): siRNA sense strand
caucagcucccuugcaguu

SEQ ID NO: 2031974 - RNA, 19 nt, Homo sapiens
  misc_RNA (1)...(19): siRNA sense strand
gauaguccaaguccuaaga

SEQ ID NO: 2031975 - RNA, 19 nt, Homo sapiens
  misc_RNA (1)...(19): siRNA sense strand
uaccuuauccuccauuuau

SEQ ID NO: 2031976 - RNA, 19 nt, Homo sapiens
  misc_RNA (1)...(19): siRNA sense strand
cgaguuccaugccaagugu

SEQ ID NO: 2031977 - RNA, 19 nt, Homo sapiens
  misc_RNA (1)...(19): siRNA sense strand
aaauuacgaggcccuguua

SEQ ID NO: 2031978 - RNA, 19 nt, Homo sapiens
  misc_RNA (1)...(19): siRNA sense strand
ccauauguguuaucaaugc

SEQ ID NO: 2031979 - RNA, 19 nt, Homo sapiens
  misc_RNA (1)...(19): siRNA sense strand
cuuaacacaugauccuuug

SEQ ID NO: 2031980 - RNA, 19 nt, Homo sapiens
  misc_RNA (1)...(19): siRNA sense strand
gcagauauugaacaacuuc

SEQ ID NO: 2031981 - RNA, 19 nt, Homo sapiens
  misc_RNA (1)...(19): siRNA sense strand
aagcagauauugaacaacu

SEQ ID NO: 2031982 - RNA, 19 nt, Homo sapiens
  misc_RNA (1)...(19): siRNA sense strand
ggagaacaucuuccaguag

SEQ ID NO: 2031983 - RNA, 19 nt, Homo sapiens
  misc_RNA (1)...(19): siRNA sense strand
agaacagacuuugugugua

SEQ ID NO: 2031984 - RNA, 19 nt, Homo sapiens
  misc_RNA (1)...(19): siRNA sense strand
ucuuaucgguucaauccua

SEQ ID NO: 2031985 - RNA, 19 nt, Homo sapiens
  misc_RNA (1)...(19): siRNA sense strand
ggacugacuaaagcagaua

SEQ ID NO: 2031986 - RNA, 19 nt, Homo sapiens
  misc_RNA (1)...(19): siRNA sense strand
ccagcuuacugccauaugu

SEQ ID NO: 2031987 - RNA, 19 nt, Homo sapiens
  misc_RNA (1)...(19): siRNA sense strand
guaccuuauccuccauuua

SEQ ID NO: 2031988 - RNA, 19 nt, Homo sapiens
  misc_RNA (1)...(19): siRNA sense strand
ugccaaguguguugacaaa

SEQ ID NO: 2031989 - RNA, 19 nt, Homo sapiens
  misc_RNA (1)...(19): siRNA sense strand
gcaaagccucguggacuga

SEQ ID NO: 2031990 - RNA, 19 nt, Homo sapiens
  misc_RNA (1)...(19): siRNA sense strand
uuacaggacguaguagaua

SEQ ID NO: 2031991 - RNA, 19 nt, Homo sapiens
  misc_RNA (1)...(19): siRNA sense strand
aagaagggaucgucugucu

SEQ ID NO: 2031992 - RNA, 19 nt, Homo sapiens
  misc_RNA (1)...(19): siRNA sense strand
uaguaugcaugugugauuu

SEQ ID NO: 2031993 - RNA, 19 nt, Homo sapiens
  misc_RNA (1)...(19): siRNA sense strand
ucuagugauccauuucuua

SEQ ID NO: 2031994 - RNA, 19 nt, Homo sapiens
  misc_RNA (1)...(19): siRNA sense strand
uaacaaccaccagucagaa

SEQ ID NO: 2031995 - RNA, 19 nt, Homo sapiens
  misc_RNA (1)...(19): siRNA sense strand
ccagcagaaugcagucaug

SEQ ID NO: 2031996 - RNA, 19 nt, Homo sapiens
  misc_RNA (1)...(19): siRNA sense strand
guugacaaauggcuuaagg

SEQ ID NO: 2031997 - RNA, 19 nt, Homo sapiens
  misc_RNA (1)...(19): siRNA sense strand
gcccaacuuucagcuuuga

SEQ ID NO: 2031998 - RNA, 19 nt, Homo sapiens
  misc_RNA (1)...(19): siRNA sense strand
aagccaacaucacuucuca

SEQ ID NO: 2031999 - RNA, 19 nt, Homo sapiens
  misc_RNA (1)...(19): siRNA sense strand
cuucaggcauguucaguuc

SEQ ID NO: 2032000 - RNA, 19 nt, Homo sapiens
  misc_RNA (1)...(19): siRNA sense strand
cauguucaguucagcacuu

SEQ ID NO: 2032001 - RNA, 19 nt, Homo sapiens
  misc_RNA (1)...(19): siRNA sense strand
aaaucguacuugcccaauu

SEQ ID NO: 2032002 - RNA, 19 nt, Homo sapiens
  misc_RNA (1)...(19): siRNA sense strand
gauauugaacaacuuccuu

SEQ ID NO: 2032003 - RNA, 19 nt, Homo sapiens
  misc_RNA (1)...(19): siRNA sense strand
cagcuuugaauuagaugua

SEQ ID NO: 2032004 - RNA, 19 nt, Homo sapiens
  misc_RNA (1)...(19): siRNA sense strand
ugaaguggaacucuuagga

SEQ ID NO: 2032005 - RNA, 19 nt, Homo sapiens
  misc_RNA (1)...(19): siRNA sense strand
ccagcucccucaccaccaa

SEQ ID NO: 2032006 - RNA, 19 nt, Homo sapiens
  misc_RNA (1)...(19): siRNA sense strand
cuagugauccauuucuuau

SEQ ID NO: 2032007 - RNA, 19 nt, Homo sapiens
  misc_RNA (1)...(19): siRNA sense strand
cccaucauccuccucauuu

SEQ ID NO: 2032008 - RNA, 19 nt, Homo sapiens
  misc_RNA (1)...(19): siRNA sense strand
caaauggcuuaaggcaaau

SEQ ID NO: 2032009 - RNA, 19 nt, Homo sapiens
  misc_RNA (1)...(19): siRNA sense strand
agaagaaguccuccuguca

SEQ ID NO: 2032010 - RNA, 19 nt, Homo sapiens
  misc_RNA (1)...(19): siRNA sense strand
uugcaguucuuaacacaug

SEQ ID NO: 2032011 - RNA, 19 nt, Homo sapiens
  misc_RNA (1)...(19): siRNA sense strand
ccaucauccuccucauuug

SEQ ID NO: 2032012 - RNA, 19 nt, Homo sapiens
  misc_RNA (1)...(19): siRNA sense strand
caggccaguuugucccuuu

SEQ ID NO: 2032013 - RNA, 19 nt, Homo sapiens
  misc_RNA (1)...(19): siRNA sense strand
ccucucucauucagucuuu

SEQ ID NO: 2032014 - RNA, 19 nt, Homo sapiens
  misc_RNA (1)...(19): siRNA sense strand
ggcccaacuuucagcuuug

SEQ ID NO: 2032015 - RNA, 19 nt, Homo sapiens
  misc_RNA (1)...(19): siRNA sense strand
cuuaucgguucaauccuaa

SEQ ID NO: 2032016 - RNA, 19 nt, Homo sapiens
  misc_RNA (1)...(19): siRNA sense strand
ccacaugggauuccacucu

SEQ ID NO: 2032017 - RNA, 19 nt, Homo sapiens
  misc_RNA (1)...(19): siRNA sense strand
cuuacugccauauguguua

SEQ ID NO: 2032018 - RNA, 19 nt, Homo sapiens
  misc_RNA (1)...(19): siRNA sense strand
agugauccauuucuuauac

SEQ ID NO: 2032019 - RNA, 19 nt, Homo sapiens
  misc_RNA (1)...(19): siRNA sense strand
uagugugccuccuccaaug

SEQ ID NO: 2032020 - RNA, 19 nt, Homo sapiens
  misc_RNA (1)...(19): siRNA sense strand
uugccgagcugaugcuuca

SEQ ID NO: 2032021 - RNA, 19 nt, Homo sapiens
  misc_RNA (1)...(19): siRNA sense strand
cuaacaaccaccagucaga

SEQ ID NO: 2032022 - RNA, 19 nt, Homo sapiens
  misc_RNA (1)...(19): siRNA sense strand
gcuuugaauuagauguaga

SEQ ID NO: 2032023 - RNA, 19 nt, Homo sapiens
  misc_RNA (1)...(19): siRNA sense strand
guagugugccuccuccaau

SEQ ID NO: 2032024 - RNA, 19 nt, Homo sapiens
  misc_RNA (1)...(19): siRNA sense strand
ccaauuugccgagcugaug

SEQ ID NO: 2032025 - RNA, 19 nt, Homo sapiens
  misc_RNA (1)...(19): siRNA sense strand
uggcuuaaggcaaaucgua

SEQ ID NO: 2032026 - RNA, 19 nt, Homo sapiens
  misc_RNA (1)...(19): siRNA sense strand
uaacacaugauccuuugca

SEQ ID NO: 2032027 - RNA, 19 nt, Homo sapiens
  misc_RNA (1)...(19): siRNA sense strand
agaagugcaucgggauuca

SEQ ID NO: 2032028 - RNA, 19 nt, Homo sapiens
  misc_RNA (1)...(19): siRNA sense strand
aaaaugaaguggaacucuu

SEQ ID NO: 2032029 - RNA, 19 nt, Homo sapiens
  misc_RNA (1)...(19): siRNA sense strand
gacuuuguguguaguaugc

SEQ ID NO: 2032030 - RNA, 19 nt, Homo sapiens
  misc_RNA (1)...(19): siRNA sense strand
cuaaagcagauauugaaca

SEQ ID NO: 2032031 - RNA, 19 nt, Homo sapiens
  misc_RNA (1)...(19): siRNA sense strand
gaccaagccaacaucacuu

SEQ ID NO: 2032032 - RNA, 19 nt, Homo sapiens
  misc_RNA (1)...(19): siRNA sense strand
gaacagacuuuguguguag

SEQ ID NO: 2032033 - RNA, 19 nt, Homo sapiens
  misc_RNA (1)...(19): siRNA sense strand
acaaauggcuuaaggcaaa

SEQ ID NO: 2032034 - RNA, 19 nt, Homo sapiens
  misc_RNA (1)...(19): siRNA sense strand
uguagaagauggagaagua

SEQ ID NO: 2032035 - RNA, 19 nt, Homo sapiens
  misc_RNA (1)...(19): siRNA sense strand
uugaacaacuuccuucuua

SEQ ID NO: 2032036 - RNA, 19 nt, Homo sapiens
  misc_RNA (1)...(19): siRNA sense strand
gcagcuacuuagagucuua

SEQ ID NO: 2032037 - RNA, 19 nt, Homo sapiens
  misc_RNA (1)...(19): siRNA sense strand
gcacaucccugcuuguagu

SEQ ID NO: 2032038 - RNA, 19 nt, Homo sapiens
  misc_RNA (1)...(19): siRNA sense strand
gcacuuaccaguaccauau

SEQ ID NO: 2032039 - RNA, 19 nt, Homo sapiens
  misc_RNA (1)...(19): siRNA sense strand
ccaaguguguugacaaaug

SEQ ID NO: 2032040 - RNA, 19 nt, Homo sapiens
  misc_RNA (1)...(19): siRNA sense strand
ggagguguccuuuggagua

SEQ ID NO: 2032041 - RNA, 19 nt, Homo sapiens
  misc_RNA (1)...(19): siRNA sense strand
aaucguacuugcccaauuu

SEQ ID NO: 2032042 - RNA, 19 nt, Homo sapiens
  misc_RNA (1)...(19): siRNA sense strand
gggcccaacuuucagcuuu

SEQ ID NO: 2032043 - RNA, 19 nt, Homo sapiens
  misc_RNA (1)...(19): siRNA sense strand
gaacaacuuccuucuuauc

SEQ ID NO: 2032044 - RNA, 19 nt, Homo sapiens
  misc_RNA (1)...(19): siRNA sense strand
gcagugggcccaacuuuca

SEQ ID NO: 2032045 - RNA, 19 nt, Homo sapiens
  misc_RNA (1)...(19): siRNA sense strand
caaggcagcuacuuagagu

SEQ ID NO: 2032046 - RNA, 19 nt, Homo sapiens
  misc_RNA (1)...(19): siRNA sense strand
gaucagcuccaucaaggaa

SEQ ID NO: 2032047 - RNA, 19 nt, Homo sapiens
  misc_RNA (1)...(19): siRNA sense strand
gacuaaagcagauauugaa

SEQ ID NO: 2032048 - RNA, 19 nt, Homo sapiens
  misc_RNA (1)...(19): siRNA sense strand
gcagaaugcagucaugguu

SEQ ID NO: 2032049 - RNA, 19 nt, Homo sapiens
  misc_RNA (1)...(19): siRNA sense strand
gauagaaaaugaaguggaa

SEQ ID NO: 2032050 - RNA, 19 nt, Homo sapiens
  misc_RNA (1)...(19): siRNA sense strand
guucagcacuuaccaguac

SEQ ID NO: 2032051 - RNA, 19 nt, Homo sapiens
  misc_RNA (1)...(19): siRNA sense strand
gaagauggagaaguagaaa

SEQ ID NO: 2032052 - RNA, 19 nt, Homo sapiens
  misc_RNA (1)...(19): siRNA sense strand
gcaccucccugucuguagu

SEQ ID NO: 2032053 - RNA, 19 nt, Homo sapiens
  misc_RNA (1)...(19): siRNA sense strand
aggagaacaucuuccagua

SEQ ID NO: 2032054 - RNA, 19 nt, Homo sapiens
  misc_RNA (1)...(19): siRNA sense strand
aaaugaaguggaacucuua

SEQ ID NO: 2032055 - RNA, 19 nt, Homo sapiens
  misc_RNA (1)...(19): siRNA sense strand
gaucgccucugcaaaggau

SEQ ID NO: 2032056 - RNA, 19 nt, Homo sapiens
  misc_RNA (1)...(19): siRNA sense strand
ggaagaagggaucgucugu

SEQ ID NO: 2032057 - RNA, 19 nt, Homo sapiens
  misc_RNA (1)...(19): siRNA sense strand
gagucaaggcagcuacuua

SEQ ID NO: 2032058 - RNA, 19 nt, Homo sapiens
  misc_RNA (1)...(19): siRNA sense strand
agaaugcagucaugguuga

SEQ ID NO: 2032059 - RNA, 19 nt, Homo sapiens
  misc_RNA (1)...(19): siRNA sense strand
ccaggaugcucugugguuu

SEQ ID NO: 2032060 - RNA, 19 nt, Homo sapiens
  misc_RNA (1)...(19): siRNA sense strand
ugacuaaagcagauauuga

SEQ ID NO: 2032061 - RNA, 19 nt, Homo sapiens
  misc_RNA (1)...(19): siRNA sense strand
ugaacaacuuccuucuuau

SEQ ID NO: 2032062 - RNA, 19 nt, Homo sapiens
  misc_RNA (1)...(19): siRNA sense strand
cuuagagucuuacccugua

SEQ ID NO: 2032063 - RNA, 19 nt, Homo sapiens
  misc_RNA (1)...(19): siRNA sense strand
ugccauauguguuaucaau

SEQ ID NO: 2032064 - RNA, 19 nt, Homo sapiens
  misc_RNA (1)...(19): siRNA sense strand
caaguguguugacaaaugg

SEQ ID NO: 2032065 - RNA, 19 nt, Homo sapiens
  misc_RNA (1)...(19): siRNA sense strand
gcacgcaacagaagaaguc

SEQ ID NO: 2032066 - RNA, 19 nt, Homo sapiens
  misc_RNA (1)...(19): siRNA sense strand
guaguaugcaugugugauu

SEQ ID NO: 2032067 - RNA, 19 nt, Homo sapiens
  misc_RNA (1)...(19): siRNA sense strand
cagaacagacuuugugugu

SEQ ID NO: 2032068 - RNA, 19 nt, Homo sapiens
  misc_RNA (1)...(19): siRNA sense strand
caucagcucccuugcaguu

SEQ ID NO: 2032069 - RNA, 19 nt, Homo sapiens
  misc_RNA (1)...(19): siRNA sense strand
uaccuuauccuccauuuau

SEQ ID NO: 2032070 - RNA, 19 nt, Homo sapiens
  misc_RNA (1)...(19): siRNA sense strand
cgaguuccaugccaagugu

SEQ ID NO: 2032071 - RNA, 19 nt, Homo sapiens
  misc_RNA (1)...(19): siRNA sense strand
aaauuacgaggcccuguua

SEQ ID NO: 2032072 - RNA, 19 nt, Homo sapiens
  misc_RNA (1)...(19): siRNA sense strand
ccauauguguuaucaaugc

SEQ ID NO: 2032073 - RNA, 19 nt, Homo sapiens
  misc_RNA (1)...(19): siRNA sense strand
cuuaacacaugauccuuug

SEQ ID NO: 2032074 - RNA, 19 nt, Homo sapiens
  misc_RNA (1)...(19): siRNA sense strand
gcagauauugaacaacuuc

SEQ ID NO: 2032075 - RNA, 19 nt, Homo sapiens
  misc_RNA (1)...(19): siRNA sense strand
aagcagauauugaacaacu

SEQ ID NO: 2032076 - RNA, 19 nt, Homo sapiens
  misc_RNA (1)...(19): siRNA sense strand
ggagaacaucuuccaguag

SEQ ID NO: 2032077 - RNA, 19 nt, Homo sapiens
  misc_RNA (1)...(19): siRNA sense strand
agaacagacuuugugugua

SEQ ID NO: 2032078 - RNA, 19 nt, Homo sapiens
  misc_RNA (1)...(19): siRNA sense strand
ucuuaucgguucaauccua

SEQ ID NO: 2032079 - RNA, 19 nt, Homo sapiens
  misc_RNA (1)...(19): siRNA sense strand
ggacugacuaaagcagaua

SEQ ID NO: 2032080 - RNA, 19 nt, Homo sapiens
  misc_RNA (1)...(19): siRNA sense strand
ccagcuuacugccauaugu

SEQ ID NO: 2032081 - RNA, 19 nt, Homo sapiens
  misc_RNA (1)...(19): siRNA sense strand
guaccuuauccuccauuua

SEQ ID NO: 2032082 - RNA, 19 nt, Homo sapiens
  misc_RNA (1)...(19): siRNA sense strand
ugccaaguguguugacaaa

SEQ ID NO: 2032083 - RNA, 19 nt, Homo sapiens
  misc_RNA (1)...(19): siRNA sense strand
gcaaagccucguggacuga

SEQ ID NO: 2032084 - RNA, 19 nt, Homo sapiens
  misc_RNA (1)...(19): siRNA sense strand
uuacaggacguaguagaua

SEQ ID NO: 2032085 - RNA, 19 nt, Homo sapiens
  misc_RNA (1)...(19): siRNA sense strand
aagaagggaucgucugucu

SEQ ID NO: 2032086 - RNA, 19 nt, Homo sapiens
  misc_RNA (1)...(19): siRNA sense strand
uaguaugcaugugugauuu

SEQ ID NO: 2032087 - RNA, 19 nt, Homo sapiens
  misc_RNA (1)...(19): siRNA sense strand
ucuagugauccauuucuua

SEQ ID NO: 2032088 - RNA, 19 nt, Homo sapiens
  misc_RNA (1)...(19): siRNA sense strand
uaacaaccaccagucagaa

SEQ ID NO: 2032089 - RNA, 19 nt, Homo sapiens
  misc_RNA (1)...(19): siRNA sense strand
ccagcagaaugcagucaug

SEQ ID NO: 2032090 - RNA, 19 nt, Homo sapiens
  misc_RNA (1)...(19): siRNA sense strand
guugacaaauggcuuaagg

SEQ ID NO: 2032091 - RNA, 19 nt, Homo sapiens
  misc_RNA (1)...(19): siRNA sense strand
aagccaacaucacuucuca

SEQ ID NO: 2032092 - RNA, 19 nt, Homo sapiens
  misc_RNA (1)...(19): siRNA sense strand
gcccaacuuucagcuuuga

SEQ ID NO: 2032093 - RNA, 19 nt, Homo sapiens
  misc_RNA (1)...(19): siRNA sense strand
cuucaggcauguucaguuc

SEQ ID NO: 2032094 - RNA, 19 nt, Homo sapiens
  misc_RNA (1)...(19): siRNA sense strand
cauguucaguucagcacuu

SEQ ID NO: 2032095 - RNA, 19 nt, Homo sapiens
  misc_RNA (1)...(19): siRNA sense strand
aaaucguacuugcccaauu

SEQ ID NO: 2032096 - RNA, 19 nt, Homo sapiens
  misc_RNA (1)...(19): siRNA sense strand
gauauugaacaacuuccuu

SEQ ID NO: 2032097 - RNA, 19 nt, Homo sapiens
  misc_RNA (1)...(19): siRNA sense strand
cagcuuugaauuagaugua

SEQ ID NO: 2032098 - RNA, 19 nt, Homo sapiens
  misc_RNA (1)...(19): siRNA sense strand
ugaaguggaacucuuagga

SEQ ID NO: 2032099 - RNA, 19 nt, Homo sapiens
  misc_RNA (1)...(19): siRNA sense strand
cuagugauccauuucuuau

SEQ ID NO: 2032100 - RNA, 19 nt, Homo sapiens
  misc_RNA (1)...(19): siRNA sense strand
cccaucauccuccucauuu

SEQ ID NO: 2032101 - RNA, 19 nt, Homo sapiens
  misc_RNA (1)...(19): siRNA sense strand
caaauggcuuaaggcaaau

SEQ ID NO: 2032102 - RNA, 19 nt, Homo sapiens
  misc_RNA (1)...(19): siRNA sense strand
agaagaaguccuccuguca

SEQ ID NO: 2032103 - RNA, 19 nt, Homo sapiens
  misc_RNA (1)...(19): siRNA sense strand
uugcaguucuuaacacaug

SEQ ID NO: 2032104 - RNA, 19 nt, Homo sapiens
  misc_RNA (1)...(19): siRNA sense strand
ccaucauccuccucauuug

SEQ ID NO: 2032105 - RNA, 19 nt, Homo sapiens
  misc_RNA (1)...(19): siRNA sense strand
caggccaguuugucccuuu

SEQ ID NO: 2032106 - RNA, 19 nt, Homo sapiens
  misc_RNA (1)...(19): siRNA sense strand
ggcccaacuuucagcuuug

SEQ ID NO: 2032107 - RNA, 19 nt, Homo sapiens
  misc_RNA (1)...(19): siRNA sense strand
cuuaucgguucaauccuaa

SEQ ID NO: 2032108 - RNA, 19 nt, Homo sapiens
  misc_RNA (1)...(19): siRNA sense strand
ccacaugggauuccacucu

SEQ ID NO: 2032109 - RNA, 19 nt, Homo sapiens
  misc_RNA (1)...(19): siRNA sense strand
cuuacugccauauguguua

SEQ ID NO: 2032110 - RNA, 19 nt, Homo sapiens
  misc_RNA (1)...(19): siRNA sense strand
agugauccauuucuuauac

SEQ ID NO: 2032111 - RNA, 19 nt, Homo sapiens
  misc_RNA (1)...(19): siRNA sense strand
uagugugccuccuccaaug

SEQ ID NO: 2032112 - RNA, 19 nt, Homo sapiens
  misc_RNA (1)...(19): siRNA sense strand
uugccgagcugaugcuuca

SEQ ID NO: 2032113 - RNA, 19 nt, Homo sapiens
  misc_RNA (1)...(19): siRNA sense strand
cuaacaaccaccagucaga

SEQ ID NO: 2032114 - RNA, 19 nt, Homo sapiens
  misc_RNA (1)...(19): siRNA sense strand
gcuuugaauuagauguaga

SEQ ID NO: 2032115 - RNA, 19 nt, Homo sapiens
  misc_RNA (1)...(19): siRNA sense strand
guagugugccuccuccaau

SEQ ID NO: 2032116 - RNA, 19 nt, Homo sapiens
  misc_RNA (1)...(19): siRNA sense strand
ccaauuugccgagcugaug

SEQ ID NO: 2032117 - RNA, 19 nt, Homo sapiens
  misc_RNA (1)...(19): siRNA sense strand
uggcuuaaggcaaaucgua

SEQ ID NO: 2032118 - RNA, 19 nt, Homo sapiens
  misc_RNA (1)...(19): siRNA sense strand
uaacacaugauccuuugca

SEQ ID NO: 2032119 - RNA, 19 nt, Homo sapiens
  misc_RNA (1)...(19): siRNA sense strand
agaagugcaucgggauuca

SEQ ID NO: 2032120 - RNA, 19 nt, Homo sapiens
  misc_RNA (1)...(19): siRNA sense strand
aaaaugaaguggaacucuu

SEQ ID NO: 2032121 - RNA, 19 nt, Homo sapiens
  misc_RNA (1)...(19): siRNA sense strand
gacuuuguguguaguaugc

SEQ ID NO: 2032122 - RNA, 19 nt, Homo sapiens
  misc_RNA (1)...(19): siRNA sense strand
cuaaagcagauauugaaca

SEQ ID NO: 2032123 - RNA, 19 nt, Homo sapiens
  misc_RNA (1)...(19): siRNA sense strand
gaccaagccaacaucacuu

SEQ ID NO: 2032124 - RNA, 19 nt, Homo sapiens
  misc_RNA (1)...(19): siRNA sense strand
cgaccaagccaacaucacu

SEQ ID NO: 2032125 - RNA, 19 nt, Homo sapiens
  misc_RNA (1)...(19): siRNA sense strand
agaagauggagaaguagaa

SEQ ID NO: 2032126 - RNA, 19 nt, Homo sapiens
  misc_RNA (1)...(19): siRNA sense strand
aggcuuacaggacguagua

SEQ ID NO: 2032127 - RNA, 19 nt, Homo sapiens
  misc_RNA (1)...(19): siRNA sense strand
gagguguccuuuggaguac

SEQ ID NO: 2032128 - RNA, 19 nt, Homo sapiens
  misc_RNA (1)...(19): siRNA sense strand
uauacauccuccucaccuu

SEQ ID NO: 2032129 - RNA, 19 nt, Homo sapiens
  misc_RNA (1)...(19): siRNA sense strand
gugauccauuucuuauaca

SEQ ID NO: 2032130 - RNA, 19 nt, Homo sapiens
  misc_RNA (1)...(19): siRNA sense strand
agauguagaagauggagaa

SEQ ID NO: 2032131 - RNA, 19 nt, Homo sapiens
  misc_RNA (1)...(19): siRNA sense strand
ucagcuccaucaaggaaca

SEQ ID NO: 2032132 - RNA, 19 nt, Homo sapiens
  misc_RNA (1)...(19): siRNA sense strand
gaacagacuuuguguguag

SEQ ID NO: 2032133 - RNA, 19 nt, Homo sapiens
  misc_RNA (1)...(19): siRNA sense strand
acaaauggcuuaaggcaaa

SEQ ID NO: 2032134 - RNA, 19 nt, Homo sapiens
  misc_RNA (1)...(19): siRNA sense strand
uguagaagauggagaagua

SEQ ID NO: 2032135 - RNA, 19 nt, Homo sapiens
  misc_RNA (1)...(19): siRNA sense strand
uugaacaacuuccuucuua

SEQ ID NO: 2032136 - RNA, 19 nt, Homo sapiens
  misc_RNA (1)...(19): siRNA sense strand
gcagcuacuuagagucuua

SEQ ID NO: 2032137 - RNA, 19 nt, Homo sapiens
  misc_RNA (1)...(19): siRNA sense strand
gcacaucccugcuuguagu

SEQ ID NO: 2032138 - RNA, 19 nt, Homo sapiens
  misc_RNA (1)...(19): siRNA sense strand
gcacuuaccaguaccauau

SEQ ID NO: 2032139 - RNA, 19 nt, Homo sapiens
  misc_RNA (1)...(19): siRNA sense strand
ccaaguguguugacaaaug

SEQ ID NO: 2032140 - RNA, 19 nt, Homo sapiens
  misc_RNA (1)...(19): siRNA sense strand
ggagguguccuuuggagua

SEQ ID NO: 2032141 - RNA, 19 nt, Homo sapiens
  misc_RNA (1)...(19): siRNA sense strand
aaucguacuugcccaauuu

SEQ ID NO: 2032142 - RNA, 19 nt, Homo sapiens
  misc_RNA (1)...(19): siRNA sense strand
gggcccaacuuucagcuuu

SEQ ID NO: 2032143 - RNA, 19 nt, Homo sapiens
  misc_RNA (1)...(19): siRNA sense strand
gaacaacuuccuucuuauc

SEQ ID NO: 2032144 - RNA, 19 nt, Homo sapiens
  misc_RNA (1)...(19): siRNA sense strand
gcagugggcccaacuuuca

SEQ ID NO: 2032145 - RNA, 19 nt, Homo sapiens
  misc_RNA (1)...(19): siRNA sense strand
caaggcagcuacuuagagu

SEQ ID NO: 2032146 - RNA, 19 nt, Homo sapiens
  misc_RNA (1)...(19): siRNA sense strand
gaucagcuccaucaaggaa

SEQ ID NO: 2032147 - RNA, 19 nt, Homo sapiens
  misc_RNA (1)...(19): siRNA sense strand
gacuaaagcagauauugaa

SEQ ID NO: 2032148 - RNA, 19 nt, Homo sapiens
  misc_RNA (1)...(19): siRNA sense strand
gcagaaugcagucaugguu

SEQ ID NO: 2032149 - RNA, 19 nt, Homo sapiens
  misc_RNA (1)...(19): siRNA sense strand
gauagaaaaugaaguggaa

SEQ ID NO: 2032150 - RNA, 19 nt, Homo sapiens
  misc_RNA (1)...(19): siRNA sense strand
guucagcacuuaccaguac

SEQ ID NO: 2032151 - RNA, 19 nt, Homo sapiens
  misc_RNA (1)...(19): siRNA sense strand
gaagauggagaaguagaaa

SEQ ID NO: 2032152 - RNA, 19 nt, Homo sapiens
  misc_RNA (1)...(19): siRNA sense strand
gcaccucccugucuguagu

SEQ ID NO: 2032153 - RNA, 19 nt, Homo sapiens
  misc_RNA (1)...(19): siRNA sense strand
aggagaacaucuuccagua

SEQ ID NO: 2032154 - RNA, 19 nt, Homo sapiens
  misc_RNA (1)...(19): siRNA sense strand
aaaugaaguggaacucuua

SEQ ID NO: 2032155 - RNA, 19 nt, Homo sapiens
  misc_RNA (1)...(19): siRNA sense strand
gaucgccucugcaaaggau

SEQ ID NO: 2032156 - RNA, 19 nt, Homo sapiens
  misc_RNA (1)...(19): siRNA sense strand
ggaagaagggaucgucugu

SEQ ID NO: 2032157 - RNA, 19 nt, Homo sapiens
  misc_RNA (1)...(19): siRNA sense strand
gagucaaggcagcuacuua

SEQ ID NO: 2032158 - RNA, 19 nt, Homo sapiens
  misc_RNA (1)...(19): siRNA sense strand
agaaugcagucaugguuga

SEQ ID NO: 2032159 - RNA, 19 nt, Homo sapiens
  misc_RNA (1)...(19): siRNA sense strand
ccaggaugcucugugguuu

SEQ ID NO: 2032160 - RNA, 19 nt, Homo sapiens
  misc_RNA (1)...(19): siRNA sense strand
ugacuaaagcagauauuga

SEQ ID NO: 2032161 - RNA, 19 nt, Homo sapiens
  misc_RNA (1)...(19): siRNA sense strand
ugaacaacuuccuucuuau

SEQ ID NO: 2032162 - RNA, 19 nt, Homo sapiens
  misc_RNA (1)...(19): siRNA sense strand
cuuagagucuuacccugua

SEQ ID NO: 2032163 - RNA, 19 nt, Homo sapiens
  misc_RNA (1)...(19): siRNA sense strand
ugccauauguguuaucaau

SEQ ID NO: 2032164 - RNA, 19 nt, Homo sapiens
  misc_RNA (1)...(19): siRNA sense strand
caaguguguugacaaaugg

SEQ ID NO: 2032165 - RNA, 19 nt, Homo sapiens
  misc_RNA (1)...(19): siRNA sense strand
gcacgcaacagaagaaguc

SEQ ID NO: 2032166 - RNA, 19 nt, Homo sapiens
  misc_RNA (1)...(19): siRNA sense strand
guaguaugcaugugugauu

SEQ ID NO: 2032167 - RNA, 19 nt, Homo sapiens
  misc_RNA (1)...(19): siRNA sense strand
cagaacagacuuugugugu

SEQ ID NO: 2032168 - RNA, 19 nt, Homo sapiens
  misc_RNA (1)...(19): siRNA sense strand
caucagcucccuugcaguu

SEQ ID NO: 2032169 - RNA, 19 nt, Homo sapiens
  misc_RNA (1)...(19): siRNA sense strand
uaccuuauccuccauuuau

SEQ ID NO: 2032170 - RNA, 19 nt, Homo sapiens
  misc_RNA (1)...(19): siRNA sense strand
cgaguuccaugccaagugu

SEQ ID NO: 2032171 - RNA, 19 nt, Homo sapiens
  misc_RNA (1)...(19): siRNA sense strand
aaauuacgaggcccuguua

SEQ ID NO: 2032172 - RNA, 19 nt, Homo sapiens
  misc_RNA (1)...(19): siRNA sense strand
ccauauguguuaucaaugc

SEQ ID NO: 2032173 - RNA, 19 nt, Homo sapiens
  misc_RNA (1)...(19): siRNA sense strand
cuuaacacaugauccuuug

SEQ ID NO: 2032174 - RNA, 19 nt, Homo sapiens
  misc_RNA (1)...(19): siRNA sense strand
gcagauauugaacaacuuc

SEQ ID NO: 2032175 - RNA, 19 nt, Homo sapiens
  misc_RNA (1)...(19): siRNA sense strand
aagcagauauugaacaacu

SEQ ID NO: 2032176 - RNA, 19 nt, Homo sapiens
  misc_RNA (1)...(19): siRNA sense strand
ggagaacaucuuccaguag

SEQ ID NO: 2032177 - RNA, 19 nt, Homo sapiens
  misc_RNA (1)...(19): siRNA sense strand
agaacagacuuugugugua

SEQ ID NO: 2032178 - RNA, 19 nt, Homo sapiens
  misc_RNA (1)...(19): siRNA sense strand
ucuuaucgguucaauccua

SEQ ID NO: 2032179 - RNA, 19 nt, Homo sapiens
  misc_RNA (1)...(19): siRNA sense strand
ggacugacuaaagcagaua

SEQ ID NO: 2032180 - RNA, 19 nt, Homo sapiens
  misc_RNA (1)...(19): siRNA sense strand
ccagcuuacugccauaugu

SEQ ID NO: 2032181 - RNA, 19 nt, Homo sapiens
  misc_RNA (1)...(19): siRNA sense strand
guaccuuauccuccauuua

SEQ ID NO: 2032182 - RNA, 19 nt, Homo sapiens
  misc_RNA (1)...(19): siRNA sense strand
ugccaaguguguugacaaa

SEQ ID NO: 2032183 - RNA, 19 nt, Homo sapiens
  misc_RNA (1)...(19): siRNA sense strand
gcaaagccucguggacuga

SEQ ID NO: 2032184 - RNA, 19 nt, Homo sapiens
  misc_RNA (1)...(19): siRNA sense strand
uuacaggacguaguagaua

SEQ ID NO: 2032185 - RNA, 19 nt, Homo sapiens
  misc_RNA (1)...(19): siRNA sense strand
aagaagggaucgucugucu

SEQ ID NO: 2032186 - RNA, 19 nt, Homo sapiens
  misc_RNA (1)...(19): siRNA sense strand
uaguaugcaugugugauuu

SEQ ID NO: 2032187 - RNA, 19 nt, Homo sapiens
  misc_RNA (1)...(19): siRNA sense strand
ucuagugauccauuucuua

SEQ ID NO: 2032188 - RNA, 19 nt, Homo sapiens
  misc_RNA (1)...(19): siRNA sense strand
uaacaaccaccagucagaa

SEQ ID NO: 2032189 - RNA, 19 nt, Homo sapiens
  misc_RNA (1)...(19): siRNA sense strand
ccagcagaaugcagucaug

SEQ ID NO: 2032190 - RNA, 19 nt, Homo sapiens
  misc_RNA (1)...(19): siRNA sense strand
guugacaaauggcuuaagg

SEQ ID NO: 2032191 - RNA, 19 nt, Homo sapiens
  misc_RNA (1)...(19): siRNA sense strand
aagccaacaucacuucuca

SEQ ID NO: 2032192 - RNA, 19 nt, Homo sapiens
  misc_RNA (1)...(19): siRNA sense strand
gcccaacuuucagcuuuga

SEQ ID NO: 2032193 - RNA, 19 nt, Homo sapiens
  misc_RNA (1)...(19): siRNA sense strand
cuucaggcauguucaguuc

SEQ ID NO: 2032194 - RNA, 19 nt, Homo sapiens
  misc_RNA (1)...(19): siRNA sense strand
cauguucaguucagcacuu

SEQ ID NO: 2032195 - RNA, 19 nt, Homo sapiens
  misc_RNA (1)...(19): siRNA sense strand
aaaucguacuugcccaauu

SEQ ID NO: 2032196 - RNA, 19 nt, Homo sapiens
  misc_RNA (1)...(19): siRNA sense strand
gauauugaacaacuuccuu

SEQ ID NO: 2032197 - RNA, 19 nt, Homo sapiens
  misc_RNA (1)...(19): siRNA sense strand
cagcuuugaauuagaugua

SEQ ID NO: 2032198 - RNA, 19 nt, Homo sapiens
  misc_RNA (1)...(19): siRNA sense strand
ugaaguggaacucuuagga

SEQ ID NO: 2032199 - RNA, 19 nt, Homo sapiens
  misc_RNA (1)...(19): siRNA sense strand
cuagugauccauuucuuau

SEQ ID NO: 2032200 - RNA, 19 nt, Homo sapiens
  misc_RNA (1)...(19): siRNA sense strand
cccaucauccuccucauuu

SEQ ID NO: 2032201 - RNA, 19 nt, Homo sapiens
  misc_RNA (1)...(19): siRNA sense strand
caaauggcuuaaggcaaau

SEQ ID NO: 2032202 - RNA, 19 nt, Homo sapiens
  misc_RNA (1)...(19): siRNA sense strand
agaagaaguccuccuguca

SEQ ID NO: 2032203 - RNA, 19 nt, Homo sapiens
  misc_RNA (1)...(19): siRNA sense strand
uugcaguucuuaacacaug

SEQ ID NO: 2032204 - RNA, 19 nt, Homo sapiens
  misc_RNA (1)...(19): siRNA sense strand
ccaucauccuccucauuug

SEQ ID NO: 2032205 - RNA, 19 nt, Homo sapiens
  misc_RNA (1)...(19): siRNA sense strand
caggccaguuugucccuuu

SEQ ID NO: 2032206 - RNA, 19 nt, Homo sapiens
  misc_RNA (1)...(19): siRNA sense strand
ggcccaacuuucagcuuug

SEQ ID NO: 2032207 - RNA, 19 nt, Homo sapiens
  misc_RNA (1)...(19): siRNA sense strand
cuuaucgguucaauccuaa

SEQ ID NO: 2032208 - RNA, 19 nt, Homo sapiens
  misc_RNA (1)...(19): siRNA sense strand
ccacaugggauuccacucu

SEQ ID NO: 2032209 - RNA, 19 nt, Homo sapiens
  misc_RNA (1)...(19): siRNA sense strand
cuuacugccauauguguua

SEQ ID NO: 2032210 - RNA, 19 nt, Homo sapiens
  misc_RNA (1)...(19): siRNA sense strand
agugauccauuucuuauac

SEQ ID NO: 2032211 - RNA, 19 nt, Homo sapiens
  misc_RNA (1)...(19): siRNA sense strand
uagugugccuccuccaaug

SEQ ID NO: 2032212 - RNA, 19 nt, Homo sapiens
  misc_RNA (1)...(19): siRNA sense strand
uugccgagcugaugcuuca

SEQ ID NO: 2032213 - RNA, 19 nt, Homo sapiens
  misc_RNA (1)...(19): siRNA sense strand
cuaacaaccaccagucaga

SEQ ID NO: 2032214 - RNA, 19 nt, Homo sapiens
  misc_RNA (1)...(19): siRNA sense strand
gcuuugaauuagauguaga

SEQ ID NO: 2032215 - RNA, 19 nt, Homo sapiens
  misc_RNA (1)...(19): siRNA sense strand
guagugugccuccuccaau

SEQ ID NO: 2032216 - RNA, 19 nt, Homo sapiens
  misc_RNA (1)...(19): siRNA sense strand
ccaauuugccgagcugaug

SEQ ID NO: 2032217 - RNA, 19 nt, Homo sapiens
  misc_RNA (1)...(19): siRNA sense strand
uggcuuaaggcaaaucgua

SEQ ID NO: 2032218 - RNA, 19 nt, Homo sapiens
  misc_RNA (1)...(19): siRNA sense strand
uaacacaugauccuuugca

SEQ ID NO: 2032219 - RNA, 19 nt, Homo sapiens
  misc_RNA (1)...(19): siRNA sense strand
agaagugcaucgggauuca

SEQ ID NO: 2032220 - RNA, 19 nt, Homo sapiens
  misc_RNA (1)...(19): siRNA sense strand
aaaaugaaguggaacucuu

SEQ ID NO: 2032221 - RNA, 19 nt, Homo sapiens
  misc_RNA (1)...(19): siRNA sense strand
gacuuuguguguaguaugc

SEQ ID NO: 2032222 - RNA, 19 nt, Homo sapiens
  misc_RNA (1)...(19): siRNA sense strand
cuaaagcagauauugaaca

SEQ ID NO: 2032223 - RNA, 19 nt, Homo sapiens
  misc_RNA (1)...(19): siRNA sense strand
gaccaagccaacaucacuu

SEQ ID NO: 2032224 - RNA, 19 nt, Homo sapiens
  misc_RNA (1)...(19): siRNA sense strand
cgaccaagccaacaucacu

SEQ ID NO: 2032225 - RNA, 19 nt, Homo sapiens
  misc_RNA (1)...(19): siRNA sense strand
agaagauggagaaguagaa

SEQ ID NO: 2032226 - RNA, 19 nt, Homo sapiens
  misc_RNA (1)...(19): siRNA sense strand
aggcuuacaggacguagua

SEQ ID NO: 2032227 - RNA, 19 nt, Homo sapiens
  misc_RNA (1)...(19): siRNA sense strand
gagguguccuuuggaguac

SEQ ID NO: 2032228 - RNA, 19 nt, Homo sapiens
  misc_RNA (1)...(19): siRNA sense strand
uauacauccuccucaccuu

SEQ ID NO: 2032229 - RNA, 19 nt, Homo sapiens
  misc_RNA (1)...(19): siRNA sense strand
gugauccauuucuuauaca

SEQ ID NO: 2032230 - RNA, 19 nt, Homo sapiens
  misc_RNA (1)...(19): siRNA sense strand
agauguagaagauggagaa

SEQ ID NO: 2032231 - RNA, 19 nt, Homo sapiens
  misc_RNA (1)...(19): siRNA sense strand
ucagcuccaucaaggaaca

SEQ ID NO: 2032232 - RNA, 19 nt, Homo sapiens
  misc_RNA (1)...(19): siRNA sense strand
gaacagacuuuguguguag

SEQ ID NO: 2032233 - RNA, 19 nt, Homo sapiens
  misc_RNA (1)...(19): siRNA sense strand
acaaauggcuuaaggcaaa

SEQ ID NO: 2032234 - RNA, 19 nt, Homo sapiens
  misc_RNA (1)...(19): siRNA sense strand
uguagaagauggagaagua

SEQ ID NO: 2032235 - RNA, 19 nt, Homo sapiens
  misc_RNA (1)...(19): siRNA sense strand
uugaacaacuuccuucuua

SEQ ID NO: 2032236 - RNA, 19 nt, Homo sapiens
  misc_RNA (1)...(19): siRNA sense strand
gcagcuacuuagagucuua

SEQ ID NO: 2032237 - RNA, 19 nt, Homo sapiens
  misc_RNA (1)...(19): siRNA sense strand
gcacaucccugcuuguagu

SEQ ID NO: 2032238 - RNA, 19 nt, Homo sapiens
  misc_RNA (1)...(19): siRNA sense strand
gcacuuaccaguaccauau

SEQ ID NO: 2032239 - RNA, 19 nt, Homo sapiens
  misc_RNA (1)...(19): siRNA sense strand
ccaaguguguugacaaaug

SEQ ID NO: 2032240 - RNA, 19 nt, Homo sapiens
  misc_RNA (1)...(19): siRNA sense strand
ggagguguccuuuggagua

SEQ ID NO: 2032241 - RNA, 19 nt, Homo sapiens
  misc_RNA (1)...(19): siRNA sense strand
aaucguacuugcccaauuu

SEQ ID NO: 2032242 - RNA, 19 nt, Homo sapiens
  misc_RNA (1)...(19): siRNA sense strand
gggcccaacuuucagcuuu

SEQ ID NO: 2032243 - RNA, 19 nt, Homo sapiens
  misc_RNA (1)...(19): siRNA sense strand
gaacaacuuccuucuuauc

SEQ ID NO: 2032244 - RNA, 19 nt, Homo sapiens
  misc_RNA (1)...(19): siRNA sense strand
gcagugggcccaacuuuca

SEQ ID NO: 2032245 - RNA, 19 nt, Homo sapiens
  misc_RNA (1)...(19): siRNA sense strand
caaggcagcuacuuagagu

SEQ ID NO: 2032246 - RNA, 19 nt, Homo sapiens
  misc_RNA (1)...(19): siRNA sense strand
gaucagcuccaucaaggaa

SEQ ID NO: 2032247 - RNA, 19 nt, Homo sapiens
  misc_RNA (1)...(19): siRNA sense strand
gacuaaagcagauauugaa

SEQ ID NO: 2032248 - RNA, 19 nt, Homo sapiens
  misc_RNA (1)...(19): siRNA sense strand
gcagaaugcagucaugguu

SEQ ID NO: 2032249 - RNA, 19 nt, Homo sapiens
  misc_RNA (1)...(19): siRNA sense strand
gauagaaaaugaaguggaa

SEQ ID NO: 2032250 - RNA, 19 nt, Homo sapiens
  misc_RNA (1)...(19): siRNA sense strand
guucagcacuuaccaguac

SEQ ID NO: 2032251 - RNA, 19 nt, Homo sapiens
  misc_RNA (1)...(19): siRNA sense strand
gaagauggagaaguagaaa

SEQ ID NO: 2032252 - RNA, 19 nt, Homo sapiens
  misc_RNA (1)...(19): siRNA sense strand
gcaccucccugucuguagu

SEQ ID NO: 2032253 - RNA, 19 nt, Homo sapiens
  misc_RNA (1)...(19): siRNA sense strand
aggagaacaucuuccagua

SEQ ID NO: 2032254 - RNA, 19 nt, Homo sapiens
  misc_RNA (1)...(19): siRNA sense strand
aaaugaaguggaacucuua

SEQ ID NO: 2032255 - RNA, 19 nt, Homo sapiens
  misc_RNA (1)...(19): siRNA sense strand
gaucgccucugcaaaggau

SEQ ID NO: 2032256 - RNA, 19 nt, Homo sapiens
  misc_RNA (1)...(19): siRNA sense strand
ggaagaagggaucgucugu

SEQ ID NO: 2032257 - RNA, 19 nt, Homo sapiens
  misc_RNA (1)...(19): siRNA sense strand
gagucaaggcagcuacuua

SEQ ID NO: 2032258 - RNA, 19 nt, Homo sapiens
  misc_RNA (1)...(19): siRNA sense strand
agaaugcagucaugguuga

SEQ ID NO: 2032259 - RNA, 19 nt, Homo sapiens
  misc_RNA (1)...(19): siRNA sense strand
ccaggaugcucugugguuu

SEQ ID NO: 2032260 - RNA, 19 nt, Homo sapiens
  misc_RNA (1)...(19): siRNA sense strand
ugacuaaagcagauauuga

SEQ ID NO: 2032261 - RNA, 19 nt, Homo sapiens
  misc_RNA (1)...(19): siRNA sense strand
ugaacaacuuccuucuuau

SEQ ID NO: 2032262 - RNA, 19 nt, Homo sapiens
  misc_RNA (1)...(19): siRNA sense strand
cuuagagucuuacccugua

SEQ ID NO: 2032263 - RNA, 19 nt, Homo sapiens
  misc_RNA (1)...(19): siRNA sense strand
ugccauauguguuaucaau

SEQ ID NO: 2032264 - RNA, 19 nt, Homo sapiens
  misc_RNA (1)...(19): siRNA sense strand
caaguguguugacaaaugg

SEQ ID NO: 2032265 - RNA, 19 nt, Homo sapiens
  misc_RNA (1)...(19): siRNA sense strand
gcacgcaacagaagaaguc

SEQ ID NO: 2032266 - RNA, 19 nt, Homo sapiens
  misc_RNA (1)...(19): siRNA sense strand
guaguaugcaugugugauu

SEQ ID NO: 2032267 - RNA, 19 nt, Homo sapiens
  misc_RNA (1)...(19): siRNA sense strand
cagaacagacuuugugugu

SEQ ID NO: 2032268 - RNA, 19 nt, Homo sapiens
  misc_RNA (1)...(19): siRNA sense strand
caucagcucccuugcaguu

SEQ ID NO: 2032269 - RNA, 19 nt, Homo sapiens
  misc_RNA (1)...(19): siRNA sense strand
uaccuuauccuccauuuau

SEQ ID NO: 2032270 - RNA, 19 nt, Homo sapiens
  misc_RNA (1)...(19): siRNA sense strand
cgaguuccaugccaagugu

SEQ ID NO: 2032271 - RNA, 19 nt, Homo sapiens
  misc_RNA (1)...(19): siRNA sense strand
aaauuacgaggcccuguua

SEQ ID NO: 2032272 - RNA, 19 nt, Homo sapiens
  misc_RNA (1)...(19): siRNA sense strand
ccauauguguuaucaaugc

SEQ ID NO: 2032273 - RNA, 19 nt, Homo sapiens
  misc_RNA (1)...(19): siRNA sense strand
cuuaacacaugauccuuug

SEQ ID NO: 2032274 - RNA, 19 nt, Homo sapiens
  misc_RNA (1)...(19): siRNA sense strand
gcagauauugaacaacuuc

SEQ ID NO: 2032275 - RNA, 19 nt, Homo sapiens
  misc_RNA (1)...(19): siRNA sense strand
aagcagauauugaacaacu

SEQ ID NO: 2032276 - RNA, 19 nt, Homo sapiens
  misc_RNA (1)...(19): siRNA sense strand
ggagaacaucuuccaguag

SEQ ID NO: 2032277 - RNA, 19 nt, Homo sapiens
  misc_RNA (1)...(19): siRNA sense strand
agaacagacuuugugugua

SEQ ID NO: 2032278 - RNA, 19 nt, Homo sapiens
  misc_RNA (1)...(19): siRNA sense strand
ucuuaucgguucaauccua

SEQ ID NO: 2032279 - RNA, 19 nt, Homo sapiens
  misc_RNA (1)...(19): siRNA sense strand
ggacugacuaaagcagaua

SEQ ID NO: 2032280 - RNA, 19 nt, Homo sapiens
  misc_RNA (1)...(19): siRNA sense strand
ccagcuuacugccauaugu

SEQ ID NO: 2032281 - RNA, 19 nt, Homo sapiens
  misc_RNA (1)...(19): siRNA sense strand
guaccuuauccuccauuua

SEQ ID NO: 2032282 - RNA, 19 nt, Homo sapiens
  misc_RNA (1)...(19): siRNA sense strand
ugccaaguguguugacaaa

SEQ ID NO: 2032283 - RNA, 19 nt, Homo sapiens
  misc_RNA (1)...(19): siRNA sense strand
gcaaagccucguggacuga

SEQ ID NO: 2032284 - RNA, 19 nt, Homo sapiens
  misc_RNA (1)...(19): siRNA sense strand
uuacaggacguaguagaua

SEQ ID NO: 2032285 - RNA, 19 nt, Homo sapiens
  misc_RNA (1)...(19): siRNA sense strand
aagaagggaucgucugucu

SEQ ID NO: 2032286 - RNA, 19 nt, Homo sapiens
  misc_RNA (1)...(19): siRNA sense strand
uaguaugcaugugugauuu

SEQ ID NO: 2032287 - RNA, 19 nt, Homo sapiens
  misc_RNA (1)...(19): siRNA sense strand
ucuagugauccauuucuua

SEQ ID NO: 2032288 - RNA, 19 nt, Homo sapiens
  misc_RNA (1)...(19): siRNA sense strand
uaacaaccaccagucagaa

SEQ ID NO: 2032289 - RNA, 19 nt, Homo sapiens
  misc_RNA (1)...(19): siRNA sense strand
ccagcagaaugcagucaug

SEQ ID NO: 2032290 - RNA, 19 nt, Homo sapiens
  misc_RNA (1)...(19): siRNA sense strand
guugacaaauggcuuaagg

SEQ ID NO: 2032291 - RNA, 19 nt, Homo sapiens
  misc_RNA (1)...(19): siRNA sense strand
aagccaacaucacuucuca

SEQ ID NO: 2032292 - RNA, 19 nt, Homo sapiens
  misc_RNA (1)...(19): siRNA sense strand
gcccaacuuucagcuuuga

SEQ ID NO: 2032293 - RNA, 19 nt, Homo sapiens
  misc_RNA (1)...(19): siRNA sense strand
cuucaggcauguucaguuc

SEQ ID NO: 2032294 - RNA, 19 nt, Homo sapiens
  misc_RNA (1)...(19): siRNA sense strand
cauguucaguucagcacuu

SEQ ID NO: 2032295 - RNA, 19 nt, Homo sapiens
  misc_RNA (1)...(19): siRNA sense strand
aaaucguacuugcccaauu

SEQ ID NO: 2032296 - RNA, 19 nt, Homo sapiens
  misc_RNA (1)...(19): siRNA sense strand
gauauugaacaacuuccuu

SEQ ID NO: 2032297 - RNA, 19 nt, Homo sapiens
  misc_RNA (1)...(19): siRNA sense strand
cagcuuugaauuagaugua

SEQ ID NO: 2032298 - RNA, 19 nt, Homo sapiens
  misc_RNA (1)...(19): siRNA sense strand
ugaaguggaacucuuagga

SEQ ID NO: 2032299 - RNA, 19 nt, Homo sapiens
  misc_RNA (1)...(19): siRNA sense strand
cuagugauccauuucuuau

SEQ ID NO: 2032300 - RNA, 19 nt, Homo sapiens
  misc_RNA (1)...(19): siRNA sense strand
cccaucauccuccucauuu

SEQ ID NO: 2032301 - RNA, 19 nt, Homo sapiens
  misc_RNA (1)...(19): siRNA sense strand
caaauggcuuaaggcaaau

SEQ ID NO: 2032302 - RNA, 19 nt, Homo sapiens
  misc_RNA (1)...(19): siRNA sense strand
agaagaaguccuccuguca

SEQ ID NO: 2032303 - RNA, 19 nt, Homo sapiens
  misc_RNA (1)...(19): siRNA sense strand
uugcaguucuuaacacaug

SEQ ID NO: 2032304 - RNA, 19 nt, Homo sapiens
  misc_RNA (1)...(19): siRNA sense strand
ccaucauccuccucauuug

SEQ ID NO: 2032305 - RNA, 19 nt, Homo sapiens
  misc_RNA (1)...(19): siRNA sense strand
caggccaguuugucccuuu

SEQ ID NO: 2032306 - RNA, 19 nt, Homo sapiens
  misc_RNA (1)...(19): siRNA sense strand
ggcccaacuuucagcuuug

SEQ ID NO: 2032307 - RNA, 19 nt, Homo sapiens
  misc_RNA (1)...(19): siRNA sense strand
cuuaucgguucaauccuaa

SEQ ID NO: 2032308 - RNA, 19 nt, Homo sapiens
  misc_RNA (1)...(19): siRNA sense strand
ccacaugggauuccacucu

SEQ ID NO: 2032309 - RNA, 19 nt, Homo sapiens
  misc_RNA (1)...(19): siRNA sense strand
cuuacugccauauguguua

SEQ ID NO: 2032310 - RNA, 19 nt, Homo sapiens
  misc_RNA (1)...(19): siRNA sense strand
agugauccauuucuuauac

SEQ ID NO: 2032311 - RNA, 19 nt, Homo sapiens
  misc_RNA (1)...(19): siRNA sense strand
uagugugccuccuccaaug

SEQ ID NO: 2032312 - RNA, 19 nt, Homo sapiens
  misc_RNA (1)...(19): siRNA sense strand
uugccgagcugaugcuuca

SEQ ID NO: 2032313 - RNA, 19 nt, Homo sapiens
  misc_RNA (1)...(19): siRNA sense strand
cuaacaaccaccagucaga

SEQ ID NO: 2032314 - RNA, 19 nt, Homo sapiens
  misc_RNA (1)...(19): siRNA sense strand
gcuuugaauuagauguaga

SEQ ID NO: 2032315 - RNA, 19 nt, Homo sapiens
  misc_RNA (1)...(19): siRNA sense strand
guagugugccuccuccaau

SEQ ID NO: 2032316 - RNA, 19 nt, Homo sapiens
  misc_RNA (1)...(19): siRNA sense strand
ccaauuugccgagcugaug

SEQ ID NO: 2032317 - RNA, 19 nt, Homo sapiens
  misc_RNA (1)...(19): siRNA sense strand
uggcuuaaggcaaaucgua

SEQ ID NO: 2032318 - RNA, 19 nt, Homo sapiens
  misc_RNA (1)...(19): siRNA sense strand
uaacacaugauccuuugca

SEQ ID NO: 2032319 - RNA, 19 nt, Homo sapiens
  misc_RNA (1)...(19): siRNA sense strand
agaagugcaucgggauuca

SEQ ID NO: 2032320 - RNA, 19 nt, Homo sapiens
  misc_RNA (1)...(19): siRNA sense strand
aaaaugaaguggaacucuu

SEQ ID NO: 2032321 - RNA, 19 nt, Homo sapiens
  misc_RNA (1)...(19): siRNA sense strand
gacuuuguguguaguaugc

SEQ ID NO: 2032322 - RNA, 19 nt, Homo sapiens
  misc_RNA (1)...(19): siRNA sense strand
cuaaagcagauauugaaca

SEQ ID NO: 2032323 - RNA, 19 nt, Homo sapiens
  misc_RNA (1)...(19): siRNA sense strand
gaccaagccaacaucacuu

SEQ ID NO: 2032324 - RNA, 19 nt, Homo sapiens
  misc_RNA (1)...(19): siRNA sense strand
cgaccaagccaacaucacu

SEQ ID NO: 2032325 - RNA, 19 nt, Homo sapiens
  misc_RNA (1)...(19): siRNA sense strand
agaagauggagaaguagaa

SEQ ID NO: 2032326 - RNA, 19 nt, Homo sapiens
  misc_RNA (1)...(19): siRNA sense strand
aggcuuacaggacguagua

SEQ ID NO: 2032327 - RNA, 19 nt, Homo sapiens
  misc_RNA (1)...(19): siRNA sense strand
gagguguccuuuggaguac

SEQ ID NO: 2032328 - RNA, 19 nt, Homo sapiens
  misc_RNA (1)...(19): siRNA sense strand
uauacauccuccucaccuu

SEQ ID NO: 2032329 - RNA, 19 nt, Homo sapiens
  misc_RNA (1)...(19): siRNA sense strand
gugauccauuucuuauaca

SEQ ID NO: 2032330 - RNA, 19 nt, Homo sapiens
  misc_RNA (1)...(19): siRNA sense strand
agauguagaagauggagaa

SEQ ID NO: 2032331 - RNA, 19 nt, Homo sapiens
  misc_RNA (1)...(19): siRNA sense strand
ucagcuccaucaaggaaca

SEQ ID NO: 2032332 - RNA, 19 nt, Homo sapiens
  misc_RNA (1)...(19): siRNA sense strand
gaacagacuuuguguguag

SEQ ID NO: 2032333 - RNA, 19 nt, Homo sapiens
  misc_RNA (1)...(19): siRNA sense strand
acaaauggcuuaaggcaaa

SEQ ID NO: 2032334 - RNA, 19 nt, Homo sapiens
  misc_RNA (1)...(19): siRNA sense strand
gaagauaguccaaguccua

SEQ ID NO: 2032335 - RNA, 19 nt, Homo sapiens
  misc_RNA (1)...(19): siRNA sense strand
uguagaagauggagaagua

SEQ ID NO: 2032336 - RNA, 19 nt, Homo sapiens
  misc_RNA (1)...(19): siRNA sense strand
uugaacaacuuccuucuua

SEQ ID NO: 2032337 - RNA, 19 nt, Homo sapiens
  misc_RNA (1)...(19): siRNA sense strand
gcagcuacuuagagucuua

SEQ ID NO: 2032338 - RNA, 19 nt, Homo sapiens
  misc_RNA (1)...(19): siRNA sense strand
gcacaucccugcuuguagu

SEQ ID NO: 2032339 - RNA, 19 nt, Homo sapiens
  misc_RNA (1)...(19): siRNA sense strand
gcacuuaccaguaccauau

SEQ ID NO: 2032340 - RNA, 19 nt, Homo sapiens
  misc_RNA (1)...(19): siRNA sense strand
ccaaguguguugacaaaug

SEQ ID NO: 2032341 - RNA, 19 nt, Homo sapiens
  misc_RNA (1)...(19): siRNA sense strand
ggagguguccuuuggagua

SEQ ID NO: 2032342 - RNA, 19 nt, Homo sapiens
  misc_RNA (1)...(19): siRNA sense strand
aaucguacuugcccaauuu
